United States Patent Application Publication US 2021/0199660 A1 - sequence listing, part 71

SEQ ID NO: 1025295 - DNA, 120 bp, Artificial Sequence
  ENSG00000244879_103 (sequence is synthesized)
gcaagagaatctcttgaacccagggggtggaggttgcactgagccgagatcatgccattgtacttcacctgggcaacaagagggaaactgtctccaaaaaaaaaaaatttggagggctgg

SEQ ID NO: 1025296 - DNA, 88 bp, Artificial Sequence
  ENSG00000244879_104 (sequence is synthesized)
tgaacccgggaggcagaggttgtgagctgagatcgcgtcagtacactccagcctgggcaacaatgcgagattgcatctcaaaaaaata

SEQ ID NO: 1025297 - DNA, 120 bp, Artificial Sequence
  ENSG00000244879_105 (sequence is synthesized)
cagcctgggcaacaatgcgagattgcatctcaaaaaaataaataaatatttggagtcccataataaataaatatttggagtccaatgtgatagtatctggagatggggcctttggaggta

SEQ ID NO: 1025298 - DNA, 120 bp, Artificial Sequence
  ENSG00000244879_106 (sequence is synthesized)
atatgggttagataggtcatgacggtagggccctcattatgggattagtggcgttataagaagaagagagaaatcttcctcctcaagagcagaggaaaagccatataagaatacagtgag

SEQ ID NO: 1025299 - DNA, 120 bp, Artificial Sequence
  ENSG00000244879_107 (sequence is synthesized)
ataagaatacagtgagacggccacttccaaaccagaaagggagcccccaccaggaaccaaattggctggcaccttgatcttggacttcccatgctccagaactgtgagaaataaatttct

SEQ ID NO: 1025300 - DNA, 120 bp, Artificial Sequence
  ENSG00000244879_108 (sequence is synthesized)
gtagttttatggcatcctaagctaagacagcgcgtctctagtttcccacagattcataaaggtccatacaaaaatgttataactgttaatagtgtcctgtccttgaatttaacagcaacc

SEQ ID NO: 1025301 - DNA, 120 bp, Artificial Sequence
  ENSG00000244879_109 (sequence is synthesized)
aacatattgtttgcatagttcttgcaccatttggaaacagtgacctttaggtgttgcaggtaactattgggaaatccttcaatttgtttaacatttccatattttgatttgcatcttggg

SEQ ID NO: 1025302 - DNA, 120 bp, Artificial Sequence
  ENSG00000244879_110 (sequence is synthesized)
tgtttaacatttccatattttgatttgcatcttgggagttgcttggaatttgggatcctcttctgtctcttgagttgaaatcagaggctgcttgccgggcaaggtggctcacgcctgtaa

SEQ ID NO: 1025303 - DNA, 66 bp, Artificial Sequence
  ENSG00000244879_111 (sequence is synthesized)
ctggtgcatgcctgtaatcctagctgcttgggtgctgagttaggagaattgcttgaatccgggagg

SEQ ID NO: 1025304 - DNA, 66 bp, Artificial Sequence
  ENSG00000244879_112 (sequence is synthesized)
gagcaagactctgcctcaaaaaaaagaaaaaagaaatcagaggctgggcatagtggctcatgccta

SEQ ID NO: 1025305 - DNA, 69 bp, Artificial Sequence
  ENSG00000244879_113 (sequence is synthesized)
caagaccagcctgggcaacatggcaaaagcctatctctactagagatacaaaagattagctggacgaat

SEQ ID NO: 1025306 - DNA, 120 bp, Artificial Sequence
  ENSG00000244879_114 (sequence is synthesized)
gactctgtctcaaaaaaaaaaaaaagaaatcagagataatataaatgcaggtgtaaactcatacacttaatgggctataagttttggaactggctgtgataatataacaaaagtaataat

SEQ ID NO: 1025307 - DNA, 120 bp, Artificial Sequence
  ENSG00000244879_115 (sequence is synthesized)
tggaactggctgtgataatataacaaaagtaataatgggctgtaagtggtattaaatgtgggattaactggatatttaatgataccaaggaatcattaattttgtttggctgtgatgttt

SEQ ID NO: 1025308 - DNA, 84 bp, Artificial Sequence
  ENSG00000244879_116 (sequence is synthesized)
gataccaaggaatcattaattttgtttggctgtgatgttttattattagaatgatgttatgattaaattttatttttgtctgga

SEQ ID NO: 1025309 - DNA, 120 bp, Artificial Sequence
  ENSG00000244879_117 (sequence is synthesized)
atttattcatcaactattaaatgctttcatgtagatttctcatttaatctctgcaaggtaggtgttacccctggttttacaaatgagaaaatgtagattcaagataagtaatatgcaggt

SEQ ID NO: 1025310 - DNA, 85 bp, Artificial Sequence
  ENSG00000244879_118 (sequence is synthesized)
aaatgagaaaatgtagattcaagataagtaatatgcaggtcaagaatagcaaaatcggtcgggtgcggtacagtgggtggatcac

SEQ ID NO: 1025311 - DNA, 80 bp, Artificial Sequence
  ENSG00000244879_119 (sequence is synthesized)
gccaggcatgatggcaggtgcctgtaataccaactactcggggggttgagggcccgagattgtgtcactgcactccagcc

SEQ ID NO: 1025312 - DNA, 120 bp, Artificial Sequence
  ENSG00000244879_120 (sequence is synthesized)
agcctgggcgacagagctagactccatctaaaaaaaatgaaaatagcaaaattacaacttttcccccatttggtcttccacctggaaactcatgttttatttctactgttaccatgctgc

SEQ ID NO: 1025313 - DNA, 120 bp, Artificial Sequence
  ENSG00000244879_121 (sequence is synthesized)
tgttttatttctactgttaccatgctgcttctcagacatgcctgactgtttcttcccgtgctgttttcctttaggagtgaaagcttggcacaacatgtacaataaaatttagggaagatt

SEQ ID NO: 1025314 - DNA, 120 bp, Artificial Sequence
  ENSG00000244879_122 (sequence is synthesized)
tttggggtctttgtcctcttctttcctgttaaagcagctagagtcagtaggcaggacctaaggtgtactacaccataaggaagccatggaacggtgaactggcaaaattctagacccaac

SEQ ID NO: 1025315 - DNA, 120 bp, Artificial Sequence
  ENSG00000244879_123 (sequence is synthesized)
tcatgaaattttggttcttcaagaatttctttgactgctattacctgtatttgtgttgattactgttcaatatactgggtctcatctcactttcagaacataaacgaagagcttaatccc

SEQ ID NO: 1025316 - DNA, 120 bp, Artificial Sequence
  ENSG00000244879_124 (sequence is synthesized)
tttccactttttcataaactcaacagtcaggttcatgacgaagatatagatatttctgtagattttttccccaacattctaattatgcctcatgtttcgtagatcctagtaactgcttgg

SEQ ID NO: 1025317 - DNA, 120 bp, Artificial Sequence
  ENSG00000244879_125 (sequence is synthesized)
attactgccacctcagaggtagagatctgtttttccgtggctggaatgccaaaaattttgttgtattttattaagaaagtagcaaaagtttggagatttgcaaagttaaaaaaaaaaaaa

SEQ ID NO: 1025318 - DNA, 60 bp, Artificial Sequence
  ENSG00000257869_0 (sequence is synthesized)
aaatcaccgtcttctgaaatccagccatattttgagattctcctatgtacctgaatcttc

SEQ ID NO: 1025319 - DNA, 120 bp, Artificial Sequence
  ENSG00000257869_1 (sequence is synthesized)
ccagccatattttgagattctcctatgtacctgaatcttcagagagcacaggagatggacaaactctgtgggtgctgtcaaggtgtgtgcgaccaaggaatgggagactagaggaaccca

SEQ ID NO: 1025320 - DNA, 72 bp, Artificial Sequence
  ENSG00000257863_0 (sequence is synthesized)
taagacatgctctctccagccatgcagaacttttcaaacccctggaatcatctgattggttcgcttaaaagt

SEQ ID NO: 1025321 - DNA, 120 bp, Artificial Sequence
  ENSG00000257863_1 (sequence is synthesized)
ttcaaacccctggaatcatctgattggttcgcttaaaagtccaccttcgtccaattggttttctcaaagaggacagatttgcacatggcaaacgtgactcatgaacaaattctctatgtg

SEQ ID NO: 1025322 - DNA, 120 bp, Artificial Sequence
  ENSG00000257863_2 (sequence is synthesized)
tccccatgaatgaaaggccagttgctagagaaagaaaatcatatattgggcagatgcctaaaagttgttacctgatgactgtgagagagaggagaagcagtaaacttttagtggaaaatg

SEQ ID NO: 1025323 - DNA, 120 bp, Artificial Sequence
  ENSG00000257863_3 (sequence is synthesized)
aataaataaaaggacatcaggacgagatgcaaaggaaagatgagaagatgatgactttgaatcagaatggcagagagatttgaagtcaacaatcacagaagaatcatccataatttagtg

SEQ ID NO: 1025324 - DNA, 120 bp, Artificial Sequence
  ENSG00000257863_4 (sequence is synthesized)
atacatatatgtttcagatgtgtagatttatagtatatacttgcatcaggattaggcagtatgagattcaacctatgaatattttcccacttctgttacttcttctacatttataaatca

SEQ ID NO: 1025325 - DNA, 120 bp, Artificial Sequence
  ENSG00000257863_5 (sequence is synthesized)
agagtaacacaaaaattcatttcataatacattattttgatattctttcatcatttgaatgaaaagcagcttatatttaaaagggagagaagaaaaaaaaccaactaaccttgagtttct

SEQ ID NO: 1025326 - DNA, 120 bp, Artificial Sequence
  ENSG00000257863_6 (sequence is synthesized)
gctgaagtagctgaggatccaagatgctctaggctgcaagctgaagtttgaagaaaattcagcctgctgacttttatcctctcttttggacaagatgactgtgggcaatttgggcctctg

SEQ ID NO: 1025327 - DNA, 120 bp, Artificial Sequence
  ENSG00000257863_7 (sequence is synthesized)
gctatgaaacatgaacctgtctatccgcgttattaatggatacttgatgggatgagctaacaatgactttggtttctttgaaaaaaggaaatttcttgagataggaaaagccaaataaac

SEQ ID NO: 1025328 - DNA, 120 bp, Artificial Sequence
  ENSG00000257860_0 (sequence is synthesized)
gctgcttttctgcttagcatctgaacaagttaatttggaaacacagccttctggaaagaaatggcgcttctctcagcatcccatggattcatgagcagctccttgaatgcaaatattgcc

SEQ ID NO: 1025329 - DNA, 120 bp, Artificial Sequence
  ENSG00000257860_1 (sequence is synthesized)
acattattgtggatacttttattcaccacaatggaagtctttaaacataaagttgatgtacattaagaggcaagacccagggcatatcatctaaagaagattcctcccacttttcttctg

SEQ ID NO: 1025330 - DNA, 120 bp, Artificial Sequence
  ENSG00000257860_2 (sequence is synthesized)
cttacaccaatccatccaaccatacatgaatttatattcaatgtactcaatttattcagtgtataatattgctttgtgaactatgggaaatataaatatgactcagtttttcccctcaaa

SEQ ID NO: 1025331 - DNA, 120 bp, Artificial Sequence
  ENSG00000257860_3 (sequence is synthesized)
gagtgtgggcaaaagctcacactcagtcccaggattaagttactaatcacttgatgttgtcttaattgaaaggcagattacccagcaccacggccaaatcacagctctgagtggggaacc

SEQ ID NO: 1025332 - DNA, 120 bp, Artificial Sequence
  ENSG00000257860_4 (sequence is synthesized)
acatttgaacagactagtcccttctgccttctgggcaggtcacatctgaaagattatcctctttgaatcagtttgaatgttctagtgaccaggccacacagtttctcttgacatttaaaa

SEQ ID NO: 1025333 - DNA, 120 bp, Artificial Sequence
  ENSG00000257860_5 (sequence is synthesized)
ataaagcttccagtcttgtcactaatggatttggggtccagtacccttaaaatcacctcagagctgcctgaatccatagactacttgcagaatcactggttttacttggatcaagccatc

SEQ ID NO: 1025334 - DNA, 120 bp, Artificial Sequence
  ENSG00000257860_6 (sequence is synthesized)
ctcagcatcccatggattcatgagtggtctccagacacaggagaagagcgacggcgaagaaaggaaggaaggaagaaagaaaaggagcctgaatttacactcaccgcttcaaaagccctt

SEQ ID NO: 1025335 - DNA, 120 bp, Artificial Sequence
  ENSG00000257860_7 (sequence is synthesized)
ttgtactaagccaacttctcctggctgaagatgcagtatctgccaagaagtcgcctgcaagaaagcacaccacacaacaaaagtataaaacagtccattaaagggctccttttctaccca

SEQ ID NO: 1025336 - DNA, 120 bp, Artificial Sequence
  ENSG00000257860_8 (sequence is synthesized)
acattggagctgctgctccctgtttggaagcctctctctctcccagagagcacattgggatgctcatggctaattcaggttatttctaaagattttattaagagtacttgctgactagtc

SEQ ID NO: 1025337 - DNA, 120 bp, Artificial Sequence
  ENSG00000257860_9 (sequence is synthesized)
ttgggtcaattgtcttttcacctggctcgagccaccaagtcaacgtgaactaagaataggagttatttagcatgtaggacccgtcggagagcaagcctctcggagcagtggtctgagagg

SEQ ID NO: 1025338 - DNA, 120 bp, Artificial Sequence
  ENSG00000257860_10 (sequence is synthesized)
agcgagaatggctgtcttgtttgggtggttgttgttttgagctgctcttacacattcagactttctgtccattcagccagagaggccacgtgtccgaaacctgaaaggggctagtgcttt

SEQ ID NO: 1025339 - DNA, 120 bp, Artificial Sequence
  ENSG00000257860_11 (sequence is synthesized)
agagcaacgtggttaaacttgccttttcatatgtgggattttccatgtggacaatatttgttctctaggcattttgagaagcctgctcatatatggatgtttttcaatgtttatattttc

SEQ ID NO: 1025340 - DNA, 120 bp, Artificial Sequence
  ENSG00000257860_12 (sequence is synthesized)
aagtatgtgtttaaaaaccagcataaactgtgagggatgtgagagggtaggaggaagagaaagtagaaataaacaaagagtggtcagtaacttcttccatcacagcctgcatagacacct

SEQ ID NO: 1025341 - DNA, 120 bp, Artificial Sequence
  ENSG00000257860_13 (sequence is synthesized)
gctggaaagtcacaagtcctgtgaaatgactcgccgagtgttttgatctccatgatgccaactggctgacttttccaatgaactgaccagttgttttggcatctttcaggaacaactctg

SEQ ID NO: 1025342 - DNA, 120 bp, Artificial Sequence
  ENSG00000257860_14 (sequence is synthesized)
cttcaatctgaattatttagaagtaattaccccatgggtggataatcaaggcctgtgctttctttctattttctttctaggcacctgctttttggggcctattttaatactaattcatac

SEQ ID NO: 1025343 - DNA, 120 bp, Artificial Sequence
  ENSG00000257860_15 (sequence is synthesized)
cccaaacttgagaagggtgtttcagtttacttcagtgaacatttttattgaacatctgtcatgagccaagcactctgctagattctggagatagaaagataaaaagaggtgattgttgct

SEQ ID NO: 1025344 - DNA, 120 bp, Artificial Sequence
  ENSG00000257860_16 (sequence is synthesized)
ctcagtcccaggattaagttactaatcacttgatgttgtcttaattgaaaggcagattacccagtttaggcccttgaagataatgcttggacaattacctcctaaattattttcttgcca

SEQ ID NO: 1025345 - DNA, 120 bp, Artificial Sequence
  ENSG00000257860_17 (sequence is synthesized)
ttctgccacttatttcaccacagatactttgttaatatcttggaactcttgtttttagaaaaaagcattggaaatggaggagactgtcaaggacaataataaatgatggtactgtaaaca

SEQ ID NO: 1025346 - DNA, 120 bp, Artificial Sequence
  ENSG00000255032_0 (sequence is synthesized)
agatgaggctgcatatcagagtcctccagcctccacagctaaatccctagacccttcagggcccggagggaagggctctggagctgagagtcatctactgagcctcccagggaccccccc

SEQ ID NO: 1025347 - DNA, 120 bp, Artificial Sequence
  ENSG00000255032_1 (sequence is synthesized)
tattcagatgcccagacaccctcctggggagagaagcccaaattgcaaaagtcaccatgacttctgatgctaaaatggaacccaagaaaaacatcaagcaagaaaaatccatctcaactg

SEQ ID NO: 1025348 - DNA, 120 bp, Artificial Sequence
  ENSG00000255032_2 (sequence is synthesized)
tggcaggcaactccagaaagacatcccatctagggagcaaagatgaataacacgactggcaaacacttagctgcggacagagtgtgttttgacacagacattcacctcctttgatgctca

SEQ ID NO: 1025349 - DNA, 120 bp, Artificial Sequence
  ENSG00000255032_3 (sequence is synthesized)
ggactaggctatgagaccaagtctaattgatgcacaaagggtgcgttgaaagcctactgcatgcttagaggaagccaaaactgtgaagaccacaagccaagaactttattgagctcttac

SEQ ID NO: 1025350 - DNA, 120 bp, Artificial Sequence
  ENSG00000255032_4 (sequence is synthesized)
tgggtactagacacttcgcttaacactgtatctctatttattcctccaaacttatctctcccgtaagattgtgggctccttgaaggcaatgtctattttagtcctctttgtccctaccat

SEQ ID NO: 1025351 - DNA, 120 bp, Artificial Sequence
  ENSG00000255031_0 (sequence is synthesized)
gggtggaattccagaacaagttctactcaggcacgggctacaagctgagtcccttcaccttcgctgccacagatgactagggcccactgcaggtcctgccagacctccttcctgacctct

SEQ ID NO: 1025352 - DNA, 120 bp, Artificial Sequence
  ENSG00000255031_1 (sequence is synthesized)
tatggatttcacagctacactcgatccacgccccacaccacatacaggctgctgtctcccacaagaatgatgatgtcaggggcatcaggaaagcaggaggggagagctctgctccacacg

SEQ ID NO: 1025353 - DNA, 120 bp, Artificial Sequence
  ENSG00000255031_2 (sequence is synthesized)
cctgcgtggaggactgggcactgaacagcacaggcccgagcccatccttgtccacgtgagcttatggcctgatgtagagaccaccaggggctccaggaaagttaagctgcatggagagaa

SEQ ID NO: 1025354 - DNA, 120 bp, Artificial Sequence
  ENSG00000255031_3 (sequence is synthesized)
acgatgggccagggccgggcccagggtggtttagggaatggcagtgtcctgggtagaataggaaggcctgagactgtgactgagctgacagtggggcaaagtgaaggagcccagtattgg

SEQ ID NO: 1025355 - DNA, 120 bp, Artificial Sequence
  ENSG00000255031_4 (sequence is synthesized)
aagatcggctccacatgtatctctgcgaggagactgcaagcgagctcgtgtggaccaggcagaggcgagggctgagtgaggccagcagtggcctgggcacaggaagacggacatttcata

SEQ ID NO: 1025356 - DNA, 120 bp, Artificial Sequence
  ENSG00000255031_5 (sequence is synthesized)
agcagcttctggaggccccaggcagaggccaccttgcagcagtgactggcgactttgcagtacatctctgctcacttgctgtcccttgggagtgagcaccgtctataacacatcgccatc

SEQ ID NO: 1025357 - DNA, 120 bp, Artificial Sequence
  ENSG00000255031_6 (sequence is synthesized)
tacaaaagcctggtcacagtgttcaccagcacattcatgaaaatttaaatcaacattaaccaaagtacctgcaagtaacactgcttactcttgctgtttgcctcatctgactggaaacct

SEQ ID NO: 1025358 - DNA, 120 bp, Artificial Sequence
  ENSG00000255031_7 (sequence is synthesized)
gagattcaggacacatccaagggtgacagcttgaggttgggtttttatttttttatttgtatagtacaatctctgtggtagcagaaatatatgcacaaaaaacaattcaaataagagttc

SEQ ID NO: 1025359 - DNA, 120 bp, Artificial Sequence
  ENSG00000255031_8 (sequence is synthesized)
agagtaaaaaaaagtcagctaagactgtatcccgcaggacatttcatatatatggatttcacagctacactcgatccacgccccacaccacatacaggctgctgtctcccacaagaatga

SEQ ID NO: 1025360 - DNA, 120 bp, Artificial Sequence
  ENSG00000255039_0 (sequence is synthesized)
atccaggatgagttcagaccctgggctatccatggaccatggctgacccttggcctaaagccacatatccaggcctatgaaatggatttgacccatctgtgatctgattaccccaccact

SEQ ID NO: 1025361 - DNA, 120 bp, Artificial Sequence
  ENSG00000255039_1 (sequence is synthesized)
gcatgcctacagcacacaaggaatgcgaaaacatcatgttccagggacagtcttcatttgcgctagacaaaagacaaacaatccttccttgaatggacccactcttcttttttcactcat

SEQ ID NO: 1025362 - DNA, 120 bp, Artificial Sequence
  ENSG00000255039_2 (sequence is synthesized)
ctcctctcactgatctccctgctggtggtggcggatagaaggcagagatgtggtcaacaccaaatgagattatgttctgggaattcagagattacagtctgaagaattcaagataaggta

SEQ ID NO: 1025363 - DNA, 120 bp, Artificial Sequence
  ENSG00000255039_3 (sequence is synthesized)
aaccttcatatcatcttgccctgcatgaaatatattagaagcctttgctctggtctttcatggtacttttaaaggatattatcatttacaaaatggaataccaatgacttttcacaagtg

SEQ ID NO: 1025364 - DNA, 120 bp, Artificial Sequence
  ENSG00000255039_4 (sequence is synthesized)
gtctatcaactaagcatgtacttaagtaaatattttcagaggatttcattaacctctgagtgaatagttgaaaaaaaagaatgaaacagatataagtccatgtttttatttgtaaataaa

SEQ ID NO: 1025365 - DNA, 120 bp, Artificial Sequence
  ENSG00000255039_5 (sequence is synthesized)
tgtattgccaaaattacatacaaataacaaataatgtctcgagtgacatgcaatgatcaaaatcctcaaaagaatacttttgtttagtagagatttgaacaaataaactacaatttaagg

SEQ ID NO: 1025366 - DNA, 120 bp, Artificial Sequence
  ENSG00000255038_0 (sequence is synthesized)
cctaaggcctagctcagctgccacgtcctatctggatcatgccccccacaaccccgagaccatcttgaaccctccggcaagtgagcgcctccactggtgcacttaaacaccaacagtagt

SEQ ID NO: 1025367 - DNA, 120 bp, Artificial Sequence
  ENSG00000255038_1 (sequence is synthesized)
acaacagcagcgcatgactaccctccccacaggctggcaaatgcccatgggagccagtgatccagcctgctctagtctgtcagaaaggctgctcaggaccagattacaacctggagaaag

SEQ ID NO: 1025368 - DNA, 120 bp, Artificial Sequence
  ENSG00000255038_2 (sequence is synthesized)
acagccagtttcaccactaatttcaaggattacactaggaacaagagcaaatctaccactatcaccccagactatgcccatcatctccacctctcccgctggaagaggtgacaatctatt

SEQ ID NO: 1025369 - DNA, 120 bp, Artificial Sequence
  ENSG00000255038_3 (sequence is synthesized)
gtccacacaggagccagagaaaataccttaaaacggatgtcgggtcctgtcagacctttgctcaaaaccctctgaggcttctgatcattatctgaataaaatccaaactccttaccatga

SEQ ID NO: 1025370 - DNA, 120 bp, Artificial Sequence
  ENSG00000261026_0 (sequence is synthesized)
ctgggaaactctcgggttccacaccctccgatcctatccttgctccgatggtgcccctgagccctgctcatgctgcttggagcacaatggctgtcctttgggtcagcccttctcaccagg

SEQ ID NO: 1025371 - DNA, 120 bp, Artificial Sequence
  ENSG00000261026_1 (sequence is synthesized)
cctgcccagggcctgcagccttctctacttgggccgtttgttgtggcatcatgacccaaccagaaacagactgctcaatcatagacttgttgtttgggattcccttttgggtcacgcact

SEQ ID NO: 1025372 - DNA, 120 bp, Artificial Sequence
  ENSG00000261026_2 (sequence is synthesized)
gagttcctagctagagtttcaggaatgcctccagctgtcagctccctagaggaatagagatgtctgtcacccttgagtccgggcacaccccaagccctcttcaggggtacctatccttgt

SEQ ID NO: 1025373 - DNA, 120 bp, Artificial Sequence
  ENSG00000261026_3 (sequence is synthesized)
ctatgggcctgtattctctgaaatggctcaccccagaggtgaccattcactcacctagaatccatcagtaccctgttctcaccaaagacagagaggttagtggccagaacagaactgagc

SEQ ID NO: 1025374 - DNA, 120 bp, Artificial Sequence
  ENSG00000261026_4 (sequence is synthesized)
ctttgagccctttggtatcttttccacaacaggctgcaagagctctcacacttttttttccttggcgtcacccctccacattgtccagatgcctgacagtcttccattcctccccgttcc

SEQ ID NO: 1025375 - DNA, 120 bp, Artificial Sequence
  ENSG00000261026_5 (sequence is synthesized)
tttctctgcactgcttaggaaggtcaggttggtcccagcaggagggagagaagaaaacttccagtacccgtggaaccccagggtgctaatgaaagtcttcttttgggtacttgttactta

SEQ ID NO: 1025376 - DNA, 120 bp, Artificial Sequence
  ENSG00000261026_6 (sequence is synthesized)
cttaggtttcagtcctaaaaatgaagaggcagtttgataacctggcagctactctggtttttctcctggggcccttaacccactttgggaccatcgcctccctcctacatctgaatctca

SEQ ID NO: 1025377 - DNA, 120 bp, Artificial Sequence
  ENSG00000261026_7 (sequence is synthesized)
actctgccactttctggcagtgtgactctcagaaacttcttagtctatgtgacccattatttcctcttgtcttatcattgctgttgcggagtttaaatgagatactgtgtatggtgcctg

SEQ ID NO: 1025378 - DNA, 120 bp, Artificial Sequence
  ENSG00000261026_8 (sequence is synthesized)
gttcatggtgggtgctccatcaatgtcatttatcttccctgtcccttaccccgtccccttcctccaaacacagtggcaagaaaacaggctctgtctccactggggatcagtacatcaatt

SEQ ID NO: 1025379 - DNA, 120 bp, Artificial Sequence
  ENSG00000261026_9 (sequence is synthesized)
caaacaaccaggggacctcgcggtccctgccaccactcccagcccctaccatccactgcttatctgtgttctgaaaatagatcctctccaccctacccccaatccactcgagagaacatg

SEQ ID NO: 1025380 - DNA, 120 bp, Artificial Sequence
  ENSG00000261026_10 (sequence is synthesized)
agtcctttcccctcttggccacagccaaagttcattgttgtaatttcctggcctaattcctgacccctcctcaggtccttttgtcccatctctctcgctgagatgggtggatgggacacc

SEQ ID NO: 1025381 - DNA, 120 bp, Artificial Sequence
  ENSG00000261026_11 (sequence is synthesized)
ttcctgatccagtatcatctgcaaagttaattaatgtgtcatcgggctgttgcctgcttcctgatccttatcatggatttaaataaaacgcagcagccccagttctgccccgtccatctc

SEQ ID NO: 1025382 - DNA, 120 bp, Artificial Sequence
  ENSG00000261026_12 (sequence is synthesized)
tttcccttcatcttagtcatcagtccttgacctcagccttctggctagctcttagcttccagctgcagggctggtggccctgcttctgcccaggcctggtctgggggcagaggtggcatg

SEQ ID NO: 1025383 - DNA, 120 bp, Artificial Sequence
  ENSG00000261026_13 (sequence is synthesized)
cagggctttaatggaatgcagggctttaattctgcgagagaatcatggacatcaggcccttacctcaaggtcccacttccttcagggattctccctaaattttagccataagggacttta

SEQ ID NO: 1025384 - DNA, 120 bp, Artificial Sequence
  ENSG00000261026_14 (sequence is synthesized)
agatgccatttagtccaacatgctctttttcagataaggaaacagaggcctaaaggggttcgtgacttgtccaaactcacacatctaggaagggcagaggtgagaattcagatcctgaca

SEQ ID NO: 1025385 - DNA, 120 bp, Artificial Sequence
  ENSG00000261026_15 (sequence is synthesized)
atcagtggaaggtcccacagaaaggttaattgctttgtttatttatttaaatgtgtgtcaagggcctgccatgtgcaacacattcttctaggcaccggggttatagcagtgaacaaaaag

SEQ ID NO: 1025386 - DNA, 120 bp, Artificial Sequence
  ENSG00000261026_16 (sequence is synthesized)
gcctgcattgtcacagcttaccttctccagggcagaaacaggtaaaaaacaaacaagcaaatatgtgttgtgtccgattgtgatgtgtgttatggagaaaaatacagcagaggaaggaga

SEQ ID NO: 1025387 - DNA, 120 bp, Artificial Sequence
  ENSG00000261026_17 (sequence is synthesized)
acggctagcactgggagaaggggattacaatcacatacgagtgatctgggacggcttcacagggaggcgtctttcagcacaggcccaggaagtgacaggatggaccacgtggccatctga

SEQ ID NO: 1025388 - DNA, 120 bp, Artificial Sequence
  ENSG00000261026_18 (sequence is synthesized)
ggaagaactgtctgggtgcaaaagtcctcaggagagcatggtattcttggaagttcgaagagtaacatggaggcagagtggctggaaaggaagggaggtgacaataggagatgaagtcgg

SEQ ID NO: 1025389 - DNA, 120 bp, Artificial Sequence
  ENSG00000261026_19 (sequence is synthesized)
agagatagtatgggaccaggtcacgggagcgctttaaaggaaatgaatgtgtccaaaagaagcaaaaaatgctgaaggctaatagtgagggaaaggccccacgacccctgagcagagccc

SEQ ID NO: 1025390 - DNA, 120 bp, Artificial Sequence
  ENSG00000261026_20 (sequence is synthesized)
cctctgctcggctctgtcatcccctgactgcagtctccttagtctttctttcacatctgagatgtcaaagaccaccaatgattcctaaactccagcctggccaaggagagacagaagtgc

SEQ ID NO: 1025391 - DNA, 120 bp, Artificial Sequence
  ENSG00000261026_21 (sequence is synthesized)
ctccttcaagaaccataaccaagagccttctctcttcctgttgacacttgccttcgtgccaagttcctaatgagatgaatgactcttcctgctggccagcctaggagtgggaatctccct

SEQ ID NO: 1025392 - DNA, 120 bp, Artificial Sequence
  ENSG00000261026_22 (sequence is synthesized)
tggcctcatctctcagaaatcgctccagcaaagccagctccctcttttgtctgtggctagattgaccatgttctctcccttggcaaaaagctggtggatggtcaggttcttccaatatgg

SEQ ID NO: 1025393 - DNA, 120 bp, Artificial Sequence
  ENSG00000261026_23 (sequence is synthesized)
tcacattctcacccatatcccgggccctgagcccaaaaatcacttgatccgcaataccgcttgccacatcctctctatttccctggattctggcaaatctccgtctagtaacatcatttc

SEQ ID NO: 1025394 - DNA, 120 bp, Artificial Sequence
  ENSG00000261026_24 (sequence is synthesized)
tatggcctagcctaggcagtttcatgcctgagaaaaaaacatttcttcctccctctccccaccttttttggtcttccatttcatgcctcccaaaagttcccctcagttcttggctttccc

SEQ ID NO: 1025395 - DNA, 120 bp, Artificial Sequence
  ENSG00000261026_25 (sequence is synthesized)
ttgcaacttggcatcatccggagcttcttcacatttcattcattcatccatgaatttagcaaaactactaagccaggtacagtgttcagcatgggggtggggtggtcacacagtccaaag

SEQ ID NO: 1025396 - DNA, 120 bp, Artificial Sequence
  ENSG00000261026_26 (sequence is synthesized)
atgaacaacacacagtccttgaagatcttacgctctgtcggggaagcagacacataaacagatgatttcaatacactgggactggtgtcatgataatggttcactctgataggaaggcac

SEQ ID NO: 1025397 - DNA, 120 bp, Artificial Sequence
  ENSG00000261026_27 (sequence is synthesized)
ctaaatcagagtttgggggtaagtgggaaggatggggtggtgtagggaagcttcccggaggatctcagtcttctttcaggtcccacatcaataacaaaaccactaagctgctgaggactt

SEQ ID NO: 1025398 - DNA, 120 bp, Artificial Sequence
  ENSG00000261026_28 (sequence is synthesized)
tctatgcgccaagtgctgtgctaaaggctggacatgtattatcccgttggactctaggtagagtagaactaacccagggtgctcaccagttagcctgtggggctgttcactctttgtcct

SEQ ID NO: 1025399 - DNA, 120 bp, Artificial Sequence
  ENSG00000261026_29 (sequence is synthesized)
tttcctggaggagaaagagaaaatcccagtggcccacaggccccaggaaacaacagagcagcttggcatctctggagtatgcccagctggcttagtggaagttgtccaacccagatgaca

SEQ ID NO: 1025400 - DNA, 120 bp, Artificial Sequence
  ENSG00000261026_30 (sequence is synthesized)
tgtccctgtgttacattctggttgcttctccttgctacagagcagagttttctggggtttggggagggatacggggagcctccatctttggattcttttggtacaggaacaacatccctc

SEQ ID NO: 1025401 - DNA, 120 bp, Artificial Sequence
  ENSG00000261026_31 (sequence is synthesized)
caggtgacctccacctaccatggctctgtagacgccagctcctcagcacaggacctgaggtggtgagctgggaggaaacccaccagacgtgctcttcttcctgaggtgcttagagtcagg

SEQ ID NO: 1025402 - DNA, 120 bp, Artificial Sequence
  ENSG00000261026_32 (sequence is synthesized)
ttccacagtttcaagcatggccaacctccaccttcccctctctcagcccatccacctgattctcctttgctgttggttgaagagctcagacaaaagaccaaggctgtggctccagttcca

SEQ ID NO: 1025403 - DNA, 120 bp, Artificial Sequence
  ENSG00000261026_33 (sequence is synthesized)
gcactgcctctccctgtgcattagaccctaagtgaatttcttaacttggctgagcctctattttcccatctgtacagtggggataatacccttctccacagagttgttgagaggatccac

SEQ ID NO: 1025404 - DNA, 120 bp, Artificial Sequence
  ENSG00000261026_34 (sequence is synthesized)
tcgaatgtaaattatgaaaaagagctgtcctttccaaaaagccaaaagaagactgttggaggaggaggtgggcgatactcttctccttcgacaggtgaatatattatggggagacgtttc

SEQ ID NO: 1025405 - DNA, 120 bp, Artificial Sequence
  ENSG00000261026_35 (sequence is synthesized)
taggtggagctggaagcccggtctgaactcagtcactattcttattagatcaggtgagaagatcacacaggattcagatggctccgaggtgacaagctcaggaataatcccagcttcact

SEQ ID NO: 1025406 - DNA, 120 bp, Artificial Sequence
  ENSG00000261026_36 (sequence is synthesized)
gttagaaactgcattttctgggtcttaagacatggaaatctccatccaatgaggatgtagatcattgaacagatgtacaccctctgtactgcactgcatcaggagtcaggagacctggct

SEQ ID NO: 1025407 - DNA, 120 bp, Artificial Sequence
  ENSG00000261026_37 (sequence is synthesized)
tctagtcctggctttaacatgaggacaaagctctataacatctgcaaagtcacagcccttctctgggtcttgaagtccctgttagaaaatcaagtggtcccactagagaatccatacgat

SEQ ID NO: 1025408 - DNA, 120 bp, Artificial Sequence
  ENSG00000261026_38 (sequence is synthesized)
atcttcagccctaaagtgcagaagtcccaagactgtcactctgtgcaagacccacccccatctcacagctggggactgagccagggctcagcaatgctggcatgagactcaaatgcaaag

SEQ ID NO: 1025409 - DNA, 120 bp, Artificial Sequence
  ENSG00000261026_39 (sequence is synthesized)
atcctgcttcccgttgcctcaaagcaccagctctctcgctccatcctcccaagagcctccaaggcgccattggcttcctgggactctgagtctgccggcctcttttcctgactccagttt

SEQ ID NO: 1025410 - DNA, 120 bp, Artificial Sequence
  ENSG00000261026_40 (sequence is synthesized)
cttctggcctgagccaatggggcatgttctgtgactgcatttgcatctcggattgtgtttttaaacccattttctcccatatttgcctgaaaaatatatagaaactgatatacaatccaa

SEQ ID NO: 1025411 - DNA, 120 bp, Artificial Sequence
  ENSG00000271732_0 (sequence is synthesized)
cttccaggagggattctgtgtccctgttattgtgtgtcaacatgtgttagcctgatatttatatttttaatgagagaaaacgaactctggaatttgcgaactgttttttcgttttgcttt

SEQ ID NO: 1025412 - DNA, 120 bp, Artificial Sequence
  ENSG00000271732_1 (sequence is synthesized)
cggattcccctgctctccgcttctccggtctaacagtagtttaaaatagaagatcagcaacatttggagagtttttttctttgcattttaatgataaacttgatttattccattccaaaa

SEQ ID NO: 1025413 - DNA, 120 bp, Artificial Sequence
  ENSG00000271730_0 (sequence is synthesized)
ttatgacaatctcatgacaaataatacttacagaaacattttctgctgagttgaccggcatctcatccacactgtgattgccatttgtaatgtcacagatgcagtagttgctaacagaag

SEQ ID NO: 1025414 - DNA, 120 bp, Artificial Sequence
  ENSG00000271730_1 (sequence is synthesized)
gaggtctgaatgtgtggccaccatcacaatgaatttctggactgattccacagccgaatgtgaatgaggcaagagaatgatagtgtgtgagtaaaactactgcatgtaccaattccgcaa

SEQ ID NO: 1025415 - DNA, 120 bp, Artificial Sequence
  ENSG00000271730_2 (sequence is synthesized)
aaaaaaaaaagaatatatttttgtactggggtgtggtaaaagtatacagttcattttagtatttaatttattgaaaacatgagtcatcatacaaagcctagcataaaattatcatttgaa

SEQ ID NO: 1025416 - DNA, 120 bp, Artificial Sequence
  ENSG00000271730_3 (sequence is synthesized)
acatgtagaacccagaatttgctaatttttatgaatatgcattcacaaatagaacttaacataatctgttaagacattcactattattttgattttctgaaatattgacttaaaatgtaa

SEQ ID NO: 1025417 - DNA, 120 bp, Artificial Sequence
  ENSG00000271730_4 (sequence is synthesized)
gagaatgcattttgcttaaaagtggctgctgtatttcagatgctggattatgaatgaattactgtgttgttagttcaaaatctcaaagcaaatgtaataaatttgtgtttaaaagtagaa

SEQ ID NO: 1025418 - DNA, 120 bp, Artificial Sequence
  ENSG00000276107_0 (sequence is synthesized)
gaaggccccaaacgctggggtgagaggaacaacaaactgactaactcacggccgagttggagccagaaccaacaacagctcggctgccttcacactcatctgtcaaacacatggtgtatg

SEQ ID NO: 1025419 - DNA, 120 bp, Artificial Sequence
  ENSG00000276107_1 (sequence is synthesized)
gctcccctgacagaaatgactcctataagcttcctcatactcgcgcattcttggaagtctgagactggaaatgcctacccagatatgttaagtcagtaaaggaaaactcatttgcaatgc

SEQ ID NO: 1025420 - DNA, 120 bp, Artificial Sequence
  ENSG00000276107_2 (sequence is synthesized)
tgagaggagaaagaaaatcaatgaataggagagcatacactgtgggaaggctcagctgtactgagccaggcaaagcatccgattaccccactgctgtacacatcatgacctgggataaac

SEQ ID NO: 1025421 - DNA, 120 bp, Artificial Sequence
  ENSG00000276107_3 (sequence is synthesized)
gcctaagaaatatgttgcttttcatcctgtataactgcaactttgtgccggctcatattatgttctagagagctcatgtacaccatggtgaccatagttaataatactggattgtatgct

SEQ ID NO: 1025422 - DNA, 120 bp, Artificial Sequence
  ENSG00000276107_4 (sequence is synthesized)
taaaatttgctaagagagtagatcttaagtcatcaccaaaaaaagtaactgtaagatgatggagatgtgttaattagcttgacggtggtaatcacaatatatgtgtatatcaaaacatca

SEQ ID NO: 1025423 - DNA, 120 bp, Artificial Sequence
  ENSG00000276107_5 (sequence is synthesized)
cattatacaccttaaatgtatataatatttgtcaattatacctcagtaaagccaaaaagaaataaatatattgcttttcaccctctggcaagtggagggccctgaacagagccctctaaa

SEQ ID NO: 1025424 - DNA, 120 bp, Artificial Sequence
  ENSG00000271736_0 (sequence is synthesized)
aagaagcttttttggggcagtttgtccctaacattccagccttttaataggactcatgtgattatactgaactgacccagataacccaggataattcacatctcaagacccttaaacttg

SEQ ID NO: 1025425 - DNA, 120 bp, Artificial Sequence
  ENSG00000271736_1 (sequence is synthesized)
atgacgtctgcaaagtcccttttgccataaggttatattggcatatggtccaggaattagtgcagagccacaatctcagaaagaaaatgagagtggataatgaagacagatcatctgggt

SEQ ID NO: 1025426 - DNA, 120 bp, Artificial Sequence
  ENSG00000271736_2 (sequence is synthesized)
gtaaacctgaggatattccagaatatagaggttagagagataagaaagaaactagcaaggaaactaaggagcagcctctaagtagaaggaaaagaatggtgagttgtaattggaggtgaa

SEQ ID NO: 1025427 - DNA, 120 bp, Artificial Sequence
  ENSG00000271736_3 (sequence is synthesized)
gacagtttcaagggagggtatgttaattgctgctgacacatcaaggaagatgaggactgagcattgaccattggatttagcaacatggagttttctgctgacctggacctgagcagtttt

SEQ ID NO: 1025428 - DNA, 120 bp, Artificial Sequence
  ENSG00000271736_4 (sequence is synthesized)
aatggagtggtgggggcaatgcatgacagaagagaattcaagacagaagggacttttccaaaaaaaaaaggtatacaaatggttattgtgcaacgtggaaagatgttcaccaatattagt

SEQ ID NO: 1025429 - DNA, 120 bp, Artificial Sequence
  ENSG00000271736_5 (sequence is synthesized)
attgctggtggaatgtaaaaatggtgaaggtgaaggtggaaaaacggaaatgaagtattgagagggagatggaatataagaagctttctgacagataacccaatggaacaaactgactga

SEQ ID NO: 1025430 - DNA, 120 bp, Artificial Sequence
  ENSG00000271736_6 (sequence is synthesized)
ctgggcatctgaaatgagtaagaaggagtcaaaaatgagcaaaattatgcttctctgtggatgcaaatcatatctccattacttacacccaggagaacttgtatgaagtagttaacttct

SEQ ID NO: 1025431 - DNA, 120 bp, Artificial Sequence
  ENSG00000271736_7 (sequence is synthesized)
ctggattttagctttttcatgtgtacaatggggggtttatgcctcatagagttgtagaaactgcaaatgagagacttatgaaaagcctactgaatgaccttatgaataataatatcatca

SEQ ID NO: 1025432 - DNA, 120 bp, Artificial Sequence
  ENSG00000271736_8 (sequence is synthesized)
gtggaaggtgatttgaggatgtgatgctgttatccctgacatgggcaggagggaacttggacaaagaccaaggaagaaaatatctcttctctgaatgtcttgtctgcatttgagtgcaat

SEQ ID NO: 1025433 - DNA, 120 bp, Artificial Sequence
  ENSG00000271736_9 (sequence is synthesized)
gtcctttattccgtgtcttccacccaatcagggccctactgccacttaaggggtaatttctctttcaatcattagttgttccagcaccaagaagcttagcctcagttgaggcacctgagt

SEQ ID NO: 1025434 - DNA, 120 bp, Artificial Sequence
  ENSG00000271736_10 (sequence is synthesized)
caggaggccaggatccttgggagattgacaacaggaggataatcccatcagaatactccaggattccaacagtatcttagtctatttagctactataataaaataccttagatgtataaa

SEQ ID NO: 1025435 - DNA, 88 bp, Artificial Sequence
  ENSG00000271736_11 (sequence is synthesized)
aaggtcttactctgagaaccaggctgcagtgcagtggcatgatcacggatcactacagcctcaaactctcaggctctggagactctcc

SEQ ID NO: 1025436 - DNA, 120 bp, Artificial Sequence
  ENSG00000271737_0 (sequence is synthesized)
ggctcctgggcctcctgcttggcctccgcgctgctagatcccccgggagttgatgtggccggcgctggacccaagcctcgcctgggtggacaaagtggcccccggccccccatcaaagcc

SEQ ID NO: 1025437 - DNA, 120 bp, Artificial Sequence
  ENSG00000271737_1 (sequence is synthesized)
tggggcggcgcagatacagagtagaggcggcgactgttgctcccgagctccgcgctccggatacaatgtgtctggcgcctccgacccgcccgcgcggcgtctagacaatctcagagaaaa

SEQ ID NO: 1025438 - DNA, 120 bp, Artificial Sequence
  ENSG00000271737_2 (sequence is synthesized)
cccctgtgcgccgattttgcactacagattagcgattttctcctgtagcaaagctactagcagccaatttccatgcatttgagaggcaaaaagacaaaataaaacaaaacgtggattggg

SEQ ID NO: 1025439 - DNA, 120 bp, Artificial Sequence
  ENSG00000271734_0 (sequence is synthesized)
ggaaaaggcaaggactttgaaatcagacctggggctttccccctacttgggtaagcgatttggttctctgagccttggtttctacacctgtgaaatgggagttcataatacttgcctcaa

SEQ ID NO: 1025440 - DNA, 120 bp, Artificial Sequence
  ENSG00000271734_1 (sequence is synthesized)
acactgcacaaattggctatgtaatttggcacttgtttatgtacccgctcatgctgttaccagcttctttattgttctttattgtgtgtgattgttattcctcctctccagactacattg

SEQ ID NO: 1025441 - DNA, 120 bp, Artificial Sequence
  ENSG00000271734_2 (sequence is synthesized)
taatctcttccaattcaaggactctatctcctttgtcctttgtacccatagttcaatgaatggtttttgaagttagagtagcagttgtttgagaaaagataaaatacattcctgaactac

SEQ ID NO: 1025442 - DNA, 120 bp, Artificial Sequence
  ENSG00000256546_0 (sequence is synthesized)
agcccagtgagagtcagccctgggtgggaactggtgggaaagaattctgctggagcatctggagttgctcaaatggagtggctgtggccatctttccttacacgtggggaggaatcagcc

SEQ ID NO: 1025443 - DNA, 120 bp, Artificial Sequence
  ENSG00000256546_1 (sequence is synthesized)
tgagaatgaaaccatcacaggaaagggctgaaagacggtgagtgtgtgctttctaagggcagcatttgggccttggccccagccggccctgaagccagcacaacccccggaacgtctcaa

SEQ ID NO: 1025444 - DNA, 120 bp, Artificial Sequence
  ENSG00000256546_2 (sequence is synthesized)
tttgtgagccaataaatgcccttgatggtttaggcaagttttcactgggtcttacccgacgtgagcccccactcctccatatggacctgttttggaccaatgaggcatcctcttctgtag

SEQ ID NO: 1025445 - DNA, 120 bp, Artificial Sequence
  ENSG00000256546_3 (sequence is synthesized)
gcggagctccaccactcctgagcagtgtgacctcaggtgcttgctgcagaggcatcgggggtctctggccagaggtgacatctgaagcaatcgggatcctgtttggttttgccacatccg

SEQ ID NO: 1025446 - DNA, 120 bp, Artificial Sequence
  ENSG00000256546_4 (sequence is synthesized)
acctgccgcccagctggggcaagacagccacgcgcggcggatgcaccggccctgaactctttctcgagtagtccccagagatttcaggaagagagagaagaggtaaagagaccagaaaca

SEQ ID NO: 1025447 - DNA, 120 bp, Artificial Sequence
  ENSG00000256546_5 (sequence is synthesized)
aagtcttctgcaagcaaagaactgcaacaggccccagctgttaggtttgaggggcgtatggggcaggcgactgaactgcagagttggagccagaggtaccattgctgacccctgagccca

SEQ ID NO: 1025448 - DNA, 120 bp, Artificial Sequence
  ENSG00000256546_6 (sequence is synthesized)
ggagccttgagaatactgacagtgttaataataactgcaatcatccaacatatgatgctagaataactggacatctgtgtgcaaaaatattaaacctataccttgcaccttatcacaaaa

SEQ ID NO: 1025449 - DNA, 120 bp, Artificial Sequence
  ENSG00000256546_7 (sequence is synthesized)
cccctgcctcccttgtctccacccgcctagatcactgtctcacagtcattctgtggaacttcctctgtgtctctcactggagccgcctaacttcctctcccacctcccttcatcaaggag

SEQ ID NO: 1025450 - DNA, 120 bp, Artificial Sequence
  ENSG00000256546_8 (sequence is synthesized)
cagtctcatgcccaggagctagaaatgtaggctttgccggcattggttgagctgtgctgggccctaggcagcgatgactcaaacttgacccttaacccccaggcaggcaagttttcactg

SEQ ID NO: 1025451 - DNA, 120 bp, Artificial Sequence
  ENSG00000256546_9 (sequence is synthesized)
gacactggtacccatggatgcactgggtgacttgaggtcaatggctttctctctccagacctaggcagaaaaagcaatctgctttgcatcagagaacctcaagaggctcttaatcctgct

SEQ ID NO: 1025452 - DNA, 120 bp, Artificial Sequence
  ENSG00000256546_10 (sequence is synthesized)
cttttctccctctgggctccctccgtgatgagctcatctgacctcctggcaaccccgaagggtggtttagagcagggaatcagcctcccgatttacagaaaggataactcaggccaggga

SEQ ID NO: 1025453 - DNA, 120 bp, Artificial Sequence
  ENSG00000256546_11 (sequence is synthesized)
agcgacttggacagggtcctgcagggactcagtgaaggaggcttcggaacccagcctgtcttccagcaggccaggaatcagcaaatctggctacctgtttttttatttttatttatttat

SEQ ID NO: 1025454 - DNA, 120 bp, Artificial Sequence
  ENSG00000256546_12 (sequence is synthesized)
gctgaaagacggcaagttttcactgggtcttacccgacgtgagcccccactcctccatatggacctgttttggaccaatgaggcatcctcttctgtagtcctcaacacgcggagctccac

SEQ ID NO: 1025455 - DNA, 120 bp, Artificial Sequence
  ENSG00000286648_0 (sequence is synthesized)
gagaaaaatggatctgtgaaaatatttctgagcatgagtgcgtgtgtgtgtagtgcactagtgattttccatctgagagttggaaaaacctatcttctatgacatgggggcagaagatta

SEQ ID NO: 1025456 - DNA, 120 bp, Artificial Sequence
  ENSG00000286648_1 (sequence is synthesized)
tggatcaagtaccacgcataactaactagtgcgagatgatttatcttatttaagcagcctgcactcgggccatctccactgatatatctgctggatactatggactaggtagactggctg

SEQ ID NO: 1025457 - DNA, 120 bp, Artificial Sequence
  ENSG00000286648_2 (sequence is synthesized)
gctttgtcattgaatttgcaacaggaccgtcacaaattggttttccacacttatccgtcactgggcaatctgcttccaaagggtagcttatgctgttggacagagcgcgggtggtgttta

SEQ ID NO: 1025458 - DNA, 120 bp, Artificial Sequence
  ENSG00000286648_3 (sequence is synthesized)
caccagaggagaccatctggaaatgcaatcagagacctgagcctcgggggattattggacccagtcgagcatgaaaggaagatctgtgcccagagctctttggttctgccatgaccttag

SEQ ID NO: 1025459 - DNA, 120 bp, Artificial Sequence
  ENSG00000286648_4 (sequence is synthesized)
ctccacgcagctataattttgaccctttaatgtaactaatttgactacagttacttttgcaggctccagctcagtcaattctcatcaaacagcaggaactatattgaagcaggtgacaaa

SEQ ID NO: 1025460 - DNA, 120 bp, Artificial Sequence
  ENSG00000286648_5 (sequence is synthesized)
agagtaaaaagcaagttatttcccaaactactacagtcactcatcgtcaattattgatcagagaaggttttgtaatgtaaattctacaggacaaacacatgtggtagataatgccataaa

SEQ ID NO: 1025461 - DNA, 120 bp, Artificial Sequence
  ENSG00000286648_6 (sequence is synthesized)
atgataatatatgtggcagaagcaccttcgcaggctcaaattattcagtgcctgaactattgtatattcttcagtttttaaaattaaatttcctgctggccacagacagatccctctggg

SEQ ID NO: 1025462 - DNA, 120 bp, Artificial Sequence
  ENSG00000286648_7 (sequence is synthesized)
acacaccctcatttctttaaaccctgaggtaagactaattttcctggctagatcctatgaatataaggccagatctttattatgctaaattgtagaccagcctgcacacagaaagattcc

SEQ ID NO: 1025463 - DNA, 120 bp, Artificial Sequence
  ENSG00000286648_8 (sequence is synthesized)
tatacagcctgccatgaacactgtcaatctctttgggaatggtcacacaattctgtctaatgatgcaatgaaagccagactttcaaaggcaaacaatcgaataaagagaaagaagaagag

SEQ ID NO: 1025464 - DNA, 120 bp, Artificial Sequence
  ENSG00000286648_9 (sequence is synthesized)
aggtaaaagaaaaagttgaggcagaaataatttatcttctttttgagtaaaatttgccaaggaaagctacccaagtgttgccagagaaaaattatatttgtgatagctgaccttcaaata

SEQ ID NO: 1025465 - DNA, 120 bp, Artificial Sequence
  ENSG00000286648_10 (sequence is synthesized)
gattcttgatatttatcatctaaaattcaagctacagaaactcagcctttcatctcaagaattttaaccatgctgttgtgtttatcttgtccaaatgagtatgcaaaatcttcctattat

SEQ ID NO: 1025466 - DNA, 120 bp, Artificial Sequence
  ENSG00000286648_11 (sequence is synthesized)
tcactcattagaattcattccaaactccacattactttgtagagaaagaaggagaggatcacctcactaaggaaaaaaaaaggcccattttctcccagtgactgtggaacaccatatgga

SEQ ID NO: 1025467 - DNA, 120 bp, Artificial Sequence
  ENSG00000286648_12 (sequence is synthesized)
aagtcttactcaaatggccattgctcttctaagacaaataccttgcataattgtagcagttagaactaagactgctcaaatattggcagaaactatctgacacttcttcacttactttca

SEQ ID NO: 1025468 - DNA, 120 bp, Artificial Sequence
  ENSG00000286649_0 (sequence is synthesized)
tcgtgtttacctcttaacattttttcctgtgggagaaaggatcaccacagcttcctacacaaagtagttgttgtttgcaaaaaccacttagagcttttcctgctgtctgaaatttgtcat

SEQ ID NO: 1025469 - DNA, 120 bp, Artificial Sequence
  ENSG00000286649_1 (sequence is synthesized)
tcaccatctcatcaaaaacgatccaatttccatcattgattgcactatttgaaaagatccttttatacaatgaagaggcaaacgtggtggaatcaaatcctcatttatgactagccccag

SEQ ID NO: 1025470 - DNA, 120 bp, Artificial Sequence
  ENSG00000286649_2 (sequence is synthesized)
tatgtagagattggaagacactctgaattgtaaaggaatttaaagtatattgatcaactgcctgggtgctactaaataagataggaaggaagaaaactaatctttttgaagacctacttt

SEQ ID NO: 1025471 - DNA, 120 bp, Artificial Sequence
  ENSG00000286649_3 (sequence is synthesized)
atatgctgggtaacttatataatttttatttaatattataccatgaagtataattaataccagtttacaaatgaggaaactgaagcaacagaagccatcaagataaacagcttgtcctaa

SEQ ID NO: 1025472 - DNA, 120 bp, Artificial Sequence
  ENSG00000286649_4 (sequence is synthesized)
gtcagtgaaagagaaggaatggtgctatactctgaacccagggtgtctgactgtgaagctgactcctatttcattgcactacagcattccccaatataatacagaaaactcaagtggtta

SEQ ID NO: 1025473 - DNA, 120 bp, Artificial Sequence
  ENSG00000286649_5 (sequence is synthesized)
ttgctcatgctatggaatacaagactcaagttaaaagtgatcttggtcagttgtaaagaggagggcctaacaaaagaatgaaaaaggaaagaatgaaaaaggaaagaatgaacaattcaa

SEQ ID NO: 1025474 - DNA, 120 bp, Artificial Sequence
  ENSG00000286649_6 (sequence is synthesized)
taaggaactaataattccgaaagaaaaacaagaggagaaaggacttcctggccaaagtgcagaaaagaaagatctggtaatatgatcaatacaattctgaaatgtatgagagtaatggca

SEQ ID NO: 1025475 - DNA, 120 bp, Artificial Sequence
  ENSG00000286649_7 (sequence is synthesized)
tgcacataatcctggagcatgatatactagtcatcatgtggatgaggaaaaggaatcaaagaaaagaagcacaaatgatcaacgaggtaaaaaagaaggactacgaagaaggataaaagg

SEQ ID NO: 1025476 - DNA, 120 bp, Artificial Sequence
  ENSG00000286649_8 (sequence is synthesized)
aactagggtcatttatctaatgcaggagaaggcaagcaggtgacctgccatcggagcttcccaagagtaaagatcatttcttaccacctttgctgtctagtgattaacagtctctttaac

SEQ ID NO: 1025477 - DNA, 120 bp, Artificial Sequence
  ENSG00000286649_9 (sequence is synthesized)
ttgtaaagagaacaataaccatgagtggtctgtgtatagatggagaaaaatatttttgaacatataagtgtaaaagcaggagttcaagtttgtacagagaaaggctgagagaggctttcc

SEQ ID NO: 1025478 - DNA, 120 bp, Artificial Sequence
  ENSG00000286649_10 (sequence is synthesized)
cctgtctatgcacaatgtagtcagtattcagtaaaagagcaagtaaatgaattttggttgtattcagtccatgaaactggaataaattacaaaggaggtttattccgcccttgggttaaa

SEQ ID NO: 1025479 - DNA, 120 bp, Artificial Sequence
  ENSG00000286649_11 (sequence is synthesized)
gaattgtcatctgacactagagaggtcagttattactgtccttcccaatctctaacaagtctaaaaatgctacatatttttttctttattctcactgccatctatttctcttctggattt

SEQ ID NO: 1025480 - DNA, 120 bp, Artificial Sequence
  ENSG00000286649_12 (sequence is synthesized)
ttatgcctgactcccaagtagataccttagccagtgtctttgacatagtgcagccgtatggatcttcctaaataatagctccaatcaagtcactctttcatttaaaaaaacaaaatcaaa

SEQ ID NO: 1025481 - DNA, 120 bp, Artificial Sequence
  ENSG00000286649_13 (sequence is synthesized)
tccaagagcttctaaatgattatttcaaaaggccttccatgagctaactccaaccccctttcctaatattatgccaccctcctttctgaaatacaccaaacggaaatgcccagtttcccc

SEQ ID NO: 1025482 - DNA, 120 bp, Artificial Sequence
  ENSG00000286649_14 (sequence is synthesized)
aaaccctcaatatttcccttcccaaggcctttgctcctgctgcataggagctttccctactcaatttgtgtaggttcaaatcctatccatcttcaaaggccacacattccaactactgct

SEQ ID NO: 1025483 - DNA, 120 bp, Artificial Sequence
  ENSG00000286649_15 (sequence is synthesized)
cctaattgctttgcagaaaagtattctctctcctgctgaactcctagagcaccttgcttgtcccctcttgcacagaacttaactattttcaaactcaagttcagttattttggtaaatct

SEQ ID NO: 1025484 - DNA, 120 bp, Artificial Sequence
  ENSG00000286649_16 (sequence is synthesized)
ttatgtcatacactaaacataaattccttgagacaaaagtagtcttactcatctttgtggccctcacatgctaagaaagaaggaagatgtttgaacatgagctccactgaggatgccaag

SEQ ID NO: 1025485 - DNA, 120 bp, Artificial Sequence
  ENSG00000286649_17 (sequence is synthesized)
agatggccaggaagaaaagaagggtttttcttagtatggtgatgacagatgagagtctactgtggtttgaatgtcctctgcaaaattcatgttgcaaatttagttgccattgtaagagtc

SEQ ID NO: 1025486 - DNA, 120 bp, Artificial Sequence
  ENSG00000286644_0 (sequence is synthesized)
gggcttcctgcagaggaacctaaccattctgggaggttgtttacagatgaggccactgaggcatggacaggtcacacaaggctgcggaacacgtaggacggagcaaaaggacagggaacg

SEQ ID NO: 1025487 - DNA, 120 bp, Artificial Sequence
  ENSG00000286644_1 (sequence is synthesized)
gaaaagaaacagggcacagagaaattcaagtgaaatacaggctggttcaggaggaggactgcgccacttcgggcgggcctgcagcactgacacggcttttgggttcgcagtggcggtgga

SEQ ID NO: 1025488 - DNA, 120 bp, Artificial Sequence
  ENSG00000286644_2 (sequence is synthesized)
gatcagagtcggagtgtattcaactgcgggtttgaacttggatttatttggagtgtgataaaactactaaagtgcctcggctcctgggaaattcaaactctgccgtcagtgcctgaccgt

SEQ ID NO: 1025489 - DNA, 120 bp, Artificial Sequence
  ENSG00000286644_3 (sequence is synthesized)
ccctcccacttacgtccgtttcctgccccttctaccctaccagcgaccaagccattttctacccgcgatgaagctcacggcacggagatggagaaacgtgcaccctgacgccactggagc

SEQ ID NO: 1025490 - DNA, 120 bp, Artificial Sequence
  ENSG00000286645_0 (sequence is synthesized)
tgtttagtcaaggacaggctctcatgagagggtggccaagatggttggagaaataaatcaagacagcgagaatgaaatggcagacgcggcaacatctcattaacacttagctcagatgac

SEQ ID NO: 1025491 - DNA, 120 bp, Artificial Sequence
  ENSG00000286645_1 (sequence is synthesized)
tcagtaacgtcaataaggaagggtgactacaactgtgtacttgtgaaagatagaacagggcctcggggaacgtgtgctccaatcttctcatttttcagaggaagagccccagaagagctc

SEQ ID NO: 1025492 - DNA, 120 bp, Artificial Sequence
  ENSG00000286645_2 (sequence is synthesized)
acctcactcacagctgctcagtggtagagccgggatcagaactccagcatcctgattccggattcagcactgttcacagctctctgcttggtgtggtaagggaggaggcagaacactggc

SEQ ID NO: 1025493 - DNA, 120 bp, Artificial Sequence
  ENSG00000286645_3 (sequence is synthesized)
tcagaacaatgacgggagatgaagaagaacagagcttctctcttcaaacctgtttccatggtccaccccacagctgcagctacacgtcccgcagttcaaggaagccatatccttccgggc

SEQ ID NO: 1025494 - DNA, 120 bp, Artificial Sequence
  ENSG00000286645_4 (sequence is synthesized)
attttcagcttttgcgtcccccttttcaacaggacaggtgtcccggttctcacacggactctaagttgaaaagataagaaaggagacttaccataagtttcaaaaaaacccagtgccttg

SEQ ID NO: 1025495 - DNA, 120 bp, Artificial Sequence
  ENSG00000286645_5 (sequence is synthesized)
gtttgaaacagcctggtaaaatgaaggaaggaaggacttcctccttggctgcaggactggattctgagagcaccctctctttctctgagtcccctggtttatataatttgaataactagg

SEQ ID NO: 1025496 - DNA, 120 bp, Artificial Sequence
  ENSG00000286645_6 (sequence is synthesized)
gattccagagcattacctcatagcaaatgctaggaagcatcagaatactgtttgcctagagggagtgggaggagggatgagaaccaaggtagaggagagagaagggaggttaaagcctgg

SEQ ID NO: 1025497 - DNA, 120 bp, Artificial Sequence
  ENSG00000286645_7 (sequence is synthesized)
gcagctgcaggtggggggactcactctgtgtcatgcctatccctagtgacaccccagggagatgaccagcttaatagctgcactctgggtcccattcagtcagaggtttctcctcagaga

SEQ ID NO: 1025498 - DNA, 120 bp, Artificial Sequence
  ENSG00000286645_8 (sequence is synthesized)
ccaggcaggcacattgagccctatctgccactccatctgtgcccctgttgagtccccagacggcaacactccctctccaccttctccacctcccctgcacagcctccgtcaatgtccagt

SEQ ID NO: 1025499 - DNA, 120 bp, Artificial Sequence
  ENSG00000286645_9 (sequence is synthesized)
actgattctcctgtatcccttctgtctctagggctgtcattgcccttggtctcagcaaaaattctggaggtgcatcggctgtgccagcagccctggtctccctgcagcctcccagatgcc

SEQ ID NO: 1025500 - DNA, 120 bp, Artificial Sequence
  ENSG00000286645_10 (sequence is synthesized)
cacagaaagcccagggaaggctgatcctgcatccctgactaatgatcacgccttcaagacgggatgcagcctgtgactcaaactgtggaggctcagcaaatgcaagagagtgggagggag

SEQ ID NO: 1025501 - DNA, 120 bp, Artificial Sequence
  ENSG00000286645_11 (sequence is synthesized)
aagagaggaacacggaggaaaacaaagatgaagagggggagtaggcagagaaaaagcaagggaagaaaggcctcagattcttgaaatctgcaaagctgccctccccactgtggcctctgc

SEQ ID NO: 1025502 - DNA, 120 bp, Artificial Sequence
  ENSG00000286645_12 (sequence is synthesized)
agtgattaaaatggtgagatacacatcttctacaacagtcctgcagtcttgttggatattactccaagggaagagaggatgaaagttagacgaggatgtgagcgtacttgcagctactga

SEQ ID NO: 1025503 - DNA, 120 bp, Artificial Sequence
  ENSG00000286645_13 (sequence is synthesized)
aacttgcagtacagtatcatgtatactgcatatccaaattcagatttatatagacagtgaactcttaaggacaagaaccatggctcttttcacgctagagaggtaataatatatgccaaa

SEQ ID NO: 1025504 - DNA, 120 bp, Artificial Sequence
  ENSG00000286645_14 (sequence is synthesized)
actgttttagtttggtcctgttccaagaaaatgagcctggccaggaaggatatttaaagacaagtgaggttcactctttccacaggaagttgttatgtccatgggaggtagttatgacat

SEQ ID NO: 1025505 - DNA, 120 bp, Artificial Sequence
  ENSG00000286646_0 (sequence is synthesized)
ataaacagagaactcccaaaaggctggctccagccaaggccacgggtgagacaagcctgtgttatgcgcttatataatgcacaggcttcacccagagatggaaccagctcgaactaccaa

SEQ ID NO: 1025506 - DNA, 120 bp, Artificial Sequence
  ENSG00000286646_1 (sequence is synthesized)
ctgataatgtctcaagcagacaacaggtgaccaaattaaggaaagaaaccaggatcctggcagcccaggaagcagagccggtcatgacaacatgcagctgatgatgtgggggtgaaaggc

SEQ ID NO: 1025507 - DNA, 120 bp, Artificial Sequence
  ENSG00000286646_2 (sequence is synthesized)
tgagtaagcggttgcaatctgcagtgagccaagctgaaaggcccgggcggatgtgaaggctggtggtaaggaaatgggaagcaggcagccaagctaaccctgtgtccactgaaggagtga

SEQ ID NO: 1025508 - DNA, 120 bp, Artificial Sequence
  ENSG00000286646_3 (sequence is synthesized)
ggtggccttgagcacagcagcatccctgggtcttacgtcggccagaagtagaaagggaagaagcctaaaggaagtgaaagtgttgctggatctcctgctggcattgcctcctccttcaca

SEQ ID NO: 1025509 - DNA, 120 bp, Artificial Sequence
  ENSG00000286646_4 (sequence is synthesized)
cctgcagccacctgatcttccctttgtccccttcctcaccacagccccaccaccttcaccactccaagttgatgcttctcctacatctggccaagatgctactcagaggtggatgaaagc

SEQ ID NO: 1025510 - DNA, 120 bp, Artificial Sequence
  ENSG00000286646_5 (sequence is synthesized)
aaaagtcactgctctaatacaagaaaagtcccggttttaggtttcagaaacagaattttcccgaatgtttaaaatggtgaatggttccataaactgtgttaaccaggcttcttacaggct

SEQ ID NO: 1025511 - DNA, 120 bp, Artificial Sequence
  ENSG00000286646_6 (sequence is synthesized)
agtcccagaatctgaccaccatgtgcaatactgtttctaagaaaagtgtgctccaagcaagaaccttcaaacatttaacctgaatgaatgaatataacctcttcacggttcagtgttttc

SEQ ID NO: 1025512 - DNA, 86 bp, Artificial Sequence
  ENSG00000286646_7 (sequence is synthesized)
tgaatgaatgaatataacctcttcacggttcagtgttttcataagcaaaacaagagaatagcagcattgatgtcttttaaaaaaaa

SEQ ID NO: 1025513 - DNA, 120 bp, Artificial Sequence
  ENSG00000286647_0 (sequence is synthesized)
attctactcttgccctacaaaattgccatcatccttttctcttttataaagtactggagagatacagtcaagttacatctgcttcattcccaaaggctcaaaggctcccccggcccatct

SEQ ID NO: 1025514 - DNA, 120 bp, Artificial Sequence
  ENSG00000286647_1 (sequence is synthesized)
ctcgctgcaccaggccctttctctcttgacccttcttactcctcttctcactcctcctttgcctgccaggaatcactgtcaacagaacccacggagggtcggctgcctgccggggactag

SEQ ID NO: 1025515 - DNA, 120 bp, Artificial Sequence
  ENSG00000286647_2 (sequence is synthesized)
tttctgtaaggcagaaagaagcaccaggagatccgaaagtgaatcataaatgtgctgggatttcagaagatgttactggatgcaggaatggagaggacctggcttggaaatttcaagtaa

SEQ ID NO: 1025516 - DNA, 120 bp, Artificial Sequence
  ENSG00000286647_3 (sequence is synthesized)
aggggtaccagagttgaataggggatccatgcctgaacaatcagttagagaaaattaagagccaatttttttctgttgccgtggtttcagctcccatttctatgctgaggaatcctgaaa

SEQ ID NO: 1025517 - DNA, 120 bp, Artificial Sequence
  ENSG00000286647_4 (sequence is synthesized)
tctctatctctagcacggtatttctcatgagcttctcaactctttatcttaatggccatcttcccctgaacagtccacagaaaagtgaaactgaaaatgtctaaaatcatatgattcctt

SEQ ID NO: 1025518 - DNA, 120 bp, Artificial Sequence
  ENSG00000286647_5 (sequence is synthesized)
tcctgccttcaaacctacttctcattctgtttcctacacttttgtggagcccccatctatctagttatccacattagaaacctattcccaacataccccactcatttctcaaattcaatc

SEQ ID NO: 1025519 - DNA, 120 bp, Artificial Sequence
  ENSG00000286647_6 (sequence is synthesized)
gcaatcctataaattttgcattccagatattttatgaatttattatacttctccatctctaagtcaaagcagcaaaatgttcaataagcagctccagcatggccccaggctaatggcagt

SEQ ID NO: 1025520 - DNA, 120 bp, Artificial Sequence
  ENSG00000286647_7 (sequence is synthesized)
aattaaatccagaatgcataggactccatggtggcattccataaggagaattctataaacatatcacctttccggccacacatttttttcttccagaaattaatgtttaccttgtaggaa

SEQ ID NO: 1025521 - DNA, 120 bp, Artificial Sequence
  ENSG00000286647_8 (sequence is synthesized)
agtgctgggcattttaattttttcctgaaactttacattcttatcaccctcctagctttcttttaacaggtaattaactcgtaagaatcttaagattcatatattggccagaccaatgcc

SEQ ID NO: 1025522 - DNA, 120 bp, Artificial Sequence
  ENSG00000286647_9 (sequence is synthesized)
atcactgtctatttgctatagagaaggggtccactgagagtcagagtagtcctgcagcctcatgactgtgacaagtggtacccacagaggtttccaatgccagtggcaggcgtgtgacct

SEQ ID NO: 1025523 - DNA, 120 bp, Artificial Sequence
  ENSG00000286647_10 (sequence is synthesized)
tgggccctctgtgccttgggaggacactatcacagaagagatatgcatatcaatttgggaaaagctggaaaaagttatcagtcatttcctgattctattaagaatctgggagtctagttt

SEQ ID NO: 1025524 - DNA, 120 bp, Artificial Sequence
  ENSG00000286647_11 (sequence is synthesized)
ctacttgagttccctaaagaaataaaaatatgcaccatttggggataagcagggaatgggagaaagggtacagcatattacatccccatcccaatcaacagaaagaaaattaggaaagga

SEQ ID NO: 1025525 - DNA, 120 bp, Artificial Sequence
  ENSG00000286647_12 (sequence is synthesized)
ctgtcaattctcatgaagttgacattatttcatgaaactgaattactctataaatatttaataatctaccctgcctaagcaatgtgggcacatagagctgcaaataacattgccatgatt

SEQ ID NO: 1025526 - DNA, 120 bp, Artificial Sequence
  ENSG00000286647_13 (sequence is synthesized)
gttgtcttcagcaagcttacagtacagcaagagacgaagtcatggaaacaagaacttacaaagcaatgtcattagaattgtatgtaatgtgtgtgaagggaggtgcagacatgtgaagtg

SEQ ID NO: 1025527 - DNA, 120 bp, Artificial Sequence
  ENSG00000286647_14 (sequence is synthesized)
gacagccaactagatttaggggagagtgaaaaaagatattgctgcaggaaattatatccaagctgagaccagaagttgaacaaaagttggtcaagttgcagaaagagagtatgcacagag

SEQ ID NO: 1025528 - DNA, 120 bp, Artificial Sequence
  ENSG00000286647_15 (sequence is synthesized)
gagatgggttctgggagaaagcaacagcatgggcaaaggcccaggaatgggagatggtcgggcccatttaggactacaaaagaagtttatcctagcttgtgtagaactgatacacaaagt

SEQ ID NO: 1025529 - DNA, 120 bp, Artificial Sequence
  ENSG00000286647_16 (sequence is synthesized)
gatgagatataagaccagaaaaacaatgtttgaactttgaaggctcttattggctgcatggagaaattaagactttgtcatgtcttgtgtcttagaaatgtcactcatagtgaaaagaat

SEQ ID NO: 1025530 - DNA, 120 bp, Artificial Sequence
  ENSG00000286647_17 (sequence is synthesized)
atgaggaattatgttggcttttgttaaggaaataacaatgaggatgtaaataagtggttatgttaaaaaatatttaggaattcgactcaataagaattggtgattaccaatctacagttg

SEQ ID NO: 1025531 - DNA, 120 bp, Artificial Sequence
  ENSG00000286647_18 (sequence is synthesized)
caaagacatggaacaaacttaagtgcccactgaccaatgagtggataaaagaaaacatggtatatatataccatggaactactcagccataaaaaggaatgaaatgtccttttcagcaac

SEQ ID NO: 1025532 - DNA, 120 bp, Artificial Sequence
  ENSG00000286647_19 (sequence is synthesized)
agtgaagtaactcaggaatggaaaacagaataccatatgttcttacttataagtgggagctaaactatgagtaagcaaaggcatacagagtgatataatgaactttggagactcagaagg

SEQ ID NO: 1025533 - DNA, 120 bp, Artificial Sequence
  ENSG00000286647_20 (sequence is synthesized)
atataatgaactttggagactcagaaggggaaggatgggaaggagtaaaggaaaaaacatctacatgttgggtataatatacactattcaggtgacaggtgcactaaaatctcagaattc

SEQ ID NO: 1025534 - DNA, 120 bp, Artificial Sequence
  ENSG00000286647_21 (sequence is synthesized)
accactatataattcatccacataaccaaaaaccacctgtaccccaaaagctattgaaatctaaaaataaataaataaaaattttaaaaatagaatggtgataacaggaagactgaggag

SEQ ID NO: 1025535 - DNA, 120 bp, Artificial Sequence
  ENSG00000286647_22 (sequence is synthesized)
acagcaaaactaagaaggaccccatgtgtctgacattagcagtttgttggatgggaatagcattcactgtgataggaaactagagagaagaagcaggtttggggaacgggatcaaaggag

SEQ ID NO: 1025536 - DNA, 120 bp, Artificial Sequence
  ENSG00000286647_23 (sequence is synthesized)
gataatgagttgagttcctgatgttttcagttctagatttttgcagtatatacaagtgggaatatgcatagacagttgtgtatggaggttagaagagagatctgaacaaaggataaacat

SEQ ID NO: 1025537 - DNA, 120 bp, Artificial Sequence
  ENSG00000286647_24 (sequence is synthesized)
cagagagtcaacagcacataatagtgacaatgggagtagatgacatctaccatggagaagatgagagtaggagttgagacttagaacaggaactggatttttttttttacttttttttaa

SEQ ID NO: 1025538 - DNA, 72 bp, Artificial Sequence
  ENSG00000286647_25 (sequence is synthesized)
ttagaacaggaactggatttttttttttacttttttttaatttttaagtttcaggatacatgtgtaggatgt

SEQ ID NO: 1025539 - DNA, 120 bp, Artificial Sequence
  ENSG00000286647_26 (sequence is synthesized)
attaagctccacatgccttagctatttatcctgatgctctccctcctaccgccccccaacccccgacaggccccagtttatgtggttcaccgccgtgtccatgtgttctcattgttcagc

SEQ ID NO: 1025540 - DNA, 120 bp, Artificial Sequence
  ENSG00000286647_27 (sequence is synthesized)
ttatcctcagcaaactcacacaggaacaggaactggatcttgcagaggagacagaaaatgctcacagagggaaggagggacactgcggtggtctggagagcggaagcttttcagaaggag

SEQ ID NO: 1025541 - DNA, 120 bp, Artificial Sequence
  ENSG00000286647_28 (sequence is synthesized)
tagtttacaacaatatgatgcagttatcaagaatggattctgtatgtgcagataatgtgaagatgttcaaaatacattgcatgaaaagagcaggttgaagaacaatatgtgtggtatgat

SEQ ID NO: 1025542 - DNA, 120 bp, Artificial Sequence
  ENSG00000286647_29 (sequence is synthesized)
ctcattgtatatttttaaatactgaatctgaatgaatatttctggagaaatactgaagagatggccaaaaataggtctttaagaaataagacttaagagtcacagagaaaaaggggctgc

SEQ ID NO: 1025543 - DNA, 120 bp, Artificial Sequence
  ENSG00000286647_30 (sequence is synthesized)
aaattaccacttaatatacctccaatattggtagaatattttaccttgagtgtatcttgcatttgtatagtttttaagttaattaaaaagaaagagaattgttgtcagtatcagtactgc

SEQ ID NO: 1025544 - DNA, 120 bp, Artificial Sequence
  ENSG00000286647_31 (sequence is synthesized)
agataaagtaaaatcaaaatgaaaaatattaattagctttgcaacaaggaggtcattagtgaattaatagaaatattttcagtggccggacatggtggttcatgcctgtgatctcagcac

SEQ ID NO: 1025545 - DNA, 120 bp, Artificial Sequence
  ENSG00000286647_32 (sequence is synthesized)
gcactttggtaagcagaggcaggtggattgcttgagctcaagaattcaagaccagcctgggcaacatggggaaacccagtccctagaaaaaactacaaaaattagctgagtgtggtggca

SEQ ID NO: 1025546 - DNA, 84 bp, Artificial Sequence
  ENSG00000286647_33 (sequence is synthesized)
cctgtagtcccagctacatgggggactgcggctctggtgaacaaagattgcaccactgcactccaacctgagcaacagagccag

SEQ ID NO: 1025547 - DNA, 120 bp, Artificial Sequence
  ENSG00000286641_0 (sequence is synthesized)
ctgtttgtcaagaggattgtagctagacagaatgagggaagggaaagaaaagctaaacagccagggcatttggcagaaacctttgaaactggatgttcagaggttttgcttgctagttga

SEQ ID NO: 1025548 - DNA, 120 bp, Artificial Sequence
  ENSG00000286641_1 (sequence is synthesized)
atgaataaagctaaagaaagaaaactcacaacatttaaaaaagggaggtttaagggaagactccagatgtttcctgctggaatagacttccgtcttgtgggatgaagctgatcctggcat

SEQ ID NO: 1025549 - DNA, 120 bp, Artificial Sequence
  ENSG00000286641_2 (sequence is synthesized)
tcttttcttctgtttctgtctctattatcctgggtgagactgattcaatcagctgaaagacctcaggagcggaactgaggcttccctgagaaaacataaattctgcctatggacagcaat

SEQ ID NO: 1025550 - DNA, 120 bp, Artificial Sequence
  ENSG00000286641_3 (sequence is synthesized)
ttcagttcacccctaaaatcccaccctcctctttctgatggcctgtgctgtggacttccgatgtgccttgccagcgcccacaatcatgtgcagcaagttgcctttttaaaatgtgcactt

SEQ ID NO: 1025551 - DNA, 120 bp, Artificial Sequence
  ENSG00000286641_4 (sequence is synthesized)
tgcagcaagttgcctttttaaaatgtgcactttggccgggtgtggcagctcactcttgtaatcctagcacttcgggaggccgaagtgggagaactgcttgaggccaggagttcgagacca

SEQ ID NO: 1025552 - DNA, 66 bp, Artificial Sequence
  ENSG00000286641_5 (sequence is synthesized)
ttcaggaggttgaagcttcagtgagctgtgatcatgccaatgcattccagcctgggcaacatacaa

SEQ ID NO: 1025553 - DNA, 120 bp, Artificial Sequence
  ENSG00000286641_6 (sequence is synthesized)
tgtgatcatgccaatgcattccagcctgggcaacatacaagatcctgtctcagaaaaacaaatacaacatacaccttctcctctgttgtctctgtcataggaactaaccgtgctgtactc

SEQ ID NO: 1025554 - DNA, 120 bp, Artificial Sequence
  ENSG00000286641_7 (sequence is synthesized)
tgtgctggttatgggtctcactctttatttcctttccctccagccatgcaaagccttttgtgctattctgtccaagttgcagtcagcaactttagtgcacaggtgataaaattacatcat

SEQ ID NO: 1025555 - DNA, 120 bp, Artificial Sequence
  ENSG00000286641_8 (sequence is synthesized)
atttcaggtaaaacaatcgcatgattttcttgagttccttaaaccatattttggaagaaatatgaagtctaataataaatcatccagacacagcaggaacagtgtcagcaattttagtga

SEQ ID NO: 1025556 - DNA, 120 bp, Artificial Sequence
  ENSG00000286641_9 (sequence is synthesized)
aatttgtgtctcctgagtttactaatgaaaatgaatggggcaacttccacgttcccacaaactcttcaaaacctttgctacttctcaatagacagcagttgtaattgaatagaacactga

SEQ ID NO: 1025557 - DNA, 120 bp, Artificial Sequence
  ENSG00000286641_10 (sequence is synthesized)
gattgatgttaggattaaaggttatgagctatgaagacagctgaatacttagttccataaagtctatgaaaggcagggtattgaaatggaattttatgggcttttttatttgttgctttg

SEQ ID NO: 1025558 - DNA, 120 bp, Artificial Sequence
  ENSG00000286641_11 (sequence is synthesized)
tttcttatgtgtccaaggctaattatactaattagatcagaaggcatgaatgggtactacagaaaaagccattcaggaaaaaaataataaagcatcagaaattgctgtgttagttgataa

SEQ ID NO: 1025559 - DNA, 120 bp, Artificial Sequence
  ENSG00000286641_12 (sequence is synthesized)
ctagagggaggctgaagagcagcttcatccttcaccaagccctgtacatatattacatggaaatggaattcttctgagcagaggtcatattctgtgctcatgctgttacattatcttggt

SEQ ID NO: 1025560 - DNA, 120 bp, Artificial Sequence
  ENSG00000286641_13 (sequence is synthesized)
cattgaatttgagggctaaaaatgaaacagagtaagctcataaagaaataaaatgtagtatataaaggatcaggaaatccataaagtagaaccaaaatcatatctgagttgaatatttgt

SEQ ID NO: 1025561 - DNA, 120 bp, Artificial Sequence
  ENSG00000286641_14 (sequence is synthesized)
caaaaatttctgtgagatgtcagcagtcctataaaagtaaaaaatttatttgccacatcacctccaaaagcaatcataaaagcatctagctgcataacaagtgcatatgttatctggaga

SEQ ID NO: 1025562 - DNA, 120 bp, Artificial Sequence
  ENSG00000286641_15 (sequence is synthesized)
attattctgttatggcccaagcagtgtcatcataccattgtcacacaatggcattgtggcctcgttgaatggcacagcagagagcattgttgagagagaaattgccggctccgattcact

SEQ ID NO: 1025563 - DNA, 120 bp, Artificial Sequence
  ENSG00000286641_16 (sequence is synthesized)
ggctgcttcttcagaaaattcactcgttcattcggcaagtgtctctttagcgcctccctcatcccaacactgtgttagctcactggagggaacagtgcaaagatgcgggtcattatgaga

SEQ ID NO: 1025564 - DNA, 120 bp, Artificial Sequence
  ENSG00000286641_17 (sequence is synthesized)
gaaaactaaaagcttggaatgtgatcaagtggttgagtaggcattagcgaatgaggtgatgtaggcaaagagagtagcatatttaaaacctaaaggcagaaaatggtaggttcaggtaga

SEQ ID NO: 1025565 - DNA, 120 bp, Artificial Sequence
  ENSG00000286641_18 (sequence is synthesized)
gtttatgtttctgctgagagggaattgtgtcaaaagaggattctaaaggaatggcagaaacgtgcttatgaaggactttcttagccacattcaggagtattggctgcatcctgaggcaga

SEQ ID NO: 1025566 - DNA, 120 bp, Artificial Sequence
  ENSG00000286641_19 (sequence is synthesized)
gagaagccaagactggtattaaactggcagaaatgtgtgacttattcaaggagttactcttgagaagccactgatcatagtggagaaagtacattggagacataaagaatttgcttttta

SEQ ID NO: 1025567 - DNA, 120 bp, Artificial Sequence
  ENSG00000286641_20 (sequence is synthesized)
accccaacaggacttctcaaattactatagaatatactgttatacttaaatgcgtgtgtcaaagtgcaatcttcaaccaaaatgggaatttgtttcttgaagatgttttgaagaagctgg

SEQ ID NO: 1025568 - DNA, 120 bp, Artificial Sequence
  ENSG00000286641_21 (sequence is synthesized)
taggtgagtgagatggaccgtaatgcactaccttaaaaatcccaaggagggccgggcgtggtggctcactcctggaatcccagcactccgggaggccgaggcgggtggattactgaggtc

SEQ ID NO: 1025569 - DNA, 120 bp, Artificial Sequence
  ENSG00000286641_22 (sequence is synthesized)
tggacaacaagggcgaaactccgtctcaaacaaacaaacaaacaaacaaaaaacacaaaacaaacaaacaaaacaccaagtaagcagcaatctggtctgagaggcggaaaatctgtattt

SEQ ID NO: 1025570 - DNA, 120 bp, Artificial Sequence
  ENSG00000286641_23 (sequence is synthesized)
tttggaatattcctcatgtgttaatatatgatattgttgttaacttagtgtgatgtttactgaaagtcgcaagtcagcaataatagatatgtattgagtggccactatgtgtcaggcact

SEQ ID NO: 1025571 - DNA, 120 bp, Artificial Sequence
  ENSG00000286641_24 (sequence is synthesized)
gatctaagcacttgggaagcatccacaaatacccctttcctcccggaacttattaatacagtcaaatagaaagcatttgtttccaataaataaaaatgataagtgtaacaaatcagtaaa

SEQ ID NO: 1025572 - DNA, 120 bp, Artificial Sequence
  ENSG00000286641_25 (sequence is synthesized)
tgatgtgataattaggtgatacgcacatacctgctatggaagaaggaaaacaatagaacatgatcagagcaattgggaatttaaaatgagttgtaattttaaacaggatggacaggttga

SEQ ID NO: 1025573 - DNA, 120 bp, Artificial Sequence
  ENSG00000286641_26 (sequence is synthesized)
gtcttattgggacggtgcatttaagtgacaatgtgaagcaggtgaaggaatttgccaagttgatctggggaaaggaagtcctggacagtgagaagagccagtgcaaagccagtgcagaga

SEQ ID NO: 1025574 - DNA, 120 bp, Artificial Sequence
  ENSG00000286641_27 (sequence is synthesized)
gcgtgccaactttgtccgaggagattgaggggcagggcagcggcagattaagttaaactggtaatggggagggaaagctcctcaggccttgtgtggactttgtcttttattctgagtgat

SEQ ID NO: 1025575 - DNA, 120 bp, Artificial Sequence
  ENSG00000286641_28 (sequence is synthesized)
gctgagagacagcatctgatttaggtcttacctggatcactctgactgctatgtttagaacagtctttagggcaaaaaggaggcagaagtcactttggtggaagtgaatgaggtcagatg

SEQ ID NO: 1025576 - DNA, 120 bp, Artificial Sequence
  ENSG00000286641_29 (sequence is synthesized)
tgggatatgtgcaaacttcaggtaactaggattccataatggattggatgtggggagtgagaaaagcagagtctaatatgacttccagggagtttggtctcaggaatagagaagaatgaa

SEQ ID NO: 1025577 - DNA, 120 bp, Artificial Sequence
  ENSG00000286641_30 (sequence is synthesized)
cttgtcatcaactgaaatggggaaggctgcaggtttagggggaaagtcaggactgggttttggacacctaacacgtaaggtttctgtttagacattccagtggagatgtcaaataggcag

SEQ ID NO: 1025578 - DNA, 120 bp, Artificial Sequence
  ENSG00000286641_31 (sequence is synthesized)
ttgattgtataaaactttgagaaaaaattgtatgtggagatgtgcatttgtgttactgtgatacagagaataacagaagccattaatctaaacagattattaatttgtacataaattaaa

SEQ ID NO: 1025579 - DNA, 120 bp, Artificial Sequence
  ENSG00000286642_0 (sequence is synthesized)
acagatttgcagcttttaacctggaagcttcacagcaaaggcaattcggctttactttgtttcccttcgaatcccaaagaaagcattatctactttgttactaaacagagcaggcaatat

SEQ ID NO: 1025580 - DNA, 120 bp, Artificial Sequence
  ENSG00000286642_1 (sequence is synthesized)
tttatattgccatagtcaattatgtgaggctgtgtaaccttttccagctattacagtcttcaaatctttctgtgctaatgttgccaacaatacagaagcagcttcaaagcatctttgcag

SEQ ID NO: 1025581 - DNA, 120 bp, Artificial Sequence
  ENSG00000286642_2 (sequence is synthesized)
tgttcgaaagagaagacagctggtactgcttagaaactaagctgcgatgaccagatttctaatttataaaactggggcagcacacgtcaggggaacgtcggcggtggttttgtgaaggta

SEQ ID NO: 1025582 - DNA, 120 bp, Artificial Sequence
  ENSG00000286642_3 (sequence is synthesized)
gctcgtcttccctggaagcacagaacaatgagagtcacagcttgcatgtgaccgttcctatccacagtcccagaaaaatctcagacatcaatgactgccaggatgtccggcaaaacagcc

SEQ ID NO: 1025583 - DNA, 120 bp, Artificial Sequence
  ENSG00000286642_4 (sequence is synthesized)
tcttttgtggacaggttgatgaaaaacatctattttaaagcatctcagtctctttgcttggaatccatgcctattcacaaaccttatgattaaatttttgtttccaccgttagtcaatta

SEQ ID NO: 1025584 - DNA, 120 bp, Artificial Sequence
  ENSG00000286642_5 (sequence is synthesized)
acattatgattttacaaaaattgggtttattcacccagttcaagagcttgacaagtgggagggacacctttattcgcaggaataaggtgattcaagaactcctgtcctcagacaagagca

SEQ ID NO: 1025585 - DNA, 120 bp, Artificial Sequence
  ENSG00000286642_6 (sequence is synthesized)
gctccggccgggtttatttcacaggatccggagtccaggccgccaggcactctctttgtttttgtgaccgtttttttgaagctcaacttcctcacatcacatggaaggaaaaatatgtat

SEQ ID NO: 1025586 - DNA, 120 bp, Artificial Sequence
  ENSG00000286642_7 (sequence is synthesized)
tttatgtcccattttatcagattaactgttagagttttagggaacttagattttccaaaagaagagtccacggaggcatagaaataatcagtgactgcctcaaatcaccgtcgcactcca

SEQ ID NO: 1025587 - DNA, 120 bp, Artificial Sequence
  ENSG00000286642_8 (sequence is synthesized)
gcctggtccattctgggtccaggcacgcagggaaccggcacgcacggcgcccacggctgctccgcgtcaggtaatgggccccacggcggccagggacgcaccctagcacctgaggtcagc

SEQ ID NO: 1025588 - DNA, 120 bp, Artificial Sequence
  ENSG00000286642_9 (sequence is synthesized)
ctagggcctcgactcccggaagtgagaaggctgtggcttcggggacagccggctaggcaaagtgcccggggcggaaatgccttccatggtgcccccagctggggcccagcggcagctccc

SEQ ID NO: 1025589 - DNA, 120 bp, Artificial Sequence
  ENSG00000286642_10 (sequence is synthesized)
cggagaccaggggttccgccctcagagactcagaatacccctgcctgcggcgaccttgagcctcctgacttactgagcctgatgaggcctgcccacgggggcgttcacagctccctaggg

SEQ ID NO: 1025590 - DNA, 120 bp, Artificial Sequence
  ENSG00000286642_11 (sequence is synthesized)
gagcagccagctttgacgccaccgctttggagcctcgcctcaagaactggctgagcgacagcgatcttggcagggaagcggaagtggtcatgccgaacccagcctgtgcaacacccggca

SEQ ID NO: 1025591 - DNA, 120 bp, Artificial Sequence
  ENSG00000286642_12 (sequence is synthesized)
ctgccatcgccctgacacaggaggggctgcttttccttctgacctcaaacagctccacggagaagggctcatgccttccagaccgtgggcctcaatcctgaaggcttcagcccaccttga

SEQ ID NO: 1025592 - DNA, 120 bp, Artificial Sequence
  ENSG00000286642_13 (sequence is synthesized)
ggaatctttggtatcatcggaacccagcagctcaggggaacaaagtcagcagcagcaggaacaacgcctgggcaccagaaagcagcatggtacagaaggagaatgagagaaaaggcaaga

SEQ ID NO: 1025593 - DNA, 120 bp, Artificial Sequence
  ENSG00000286642_14 (sequence is synthesized)
agcccagaggcagttctggaacttagggcacctctaagcccacagcaccaagtccagtagggattttaagggtggctggcacaaccaggatcaagaatgtgtcttggcccagccatcctc

SEQ ID NO: 1025594 - DNA, 120 bp, Artificial Sequence
  ENSG00000286642_15 (sequence is synthesized)
gattggggtctctggctccttctagccccattggctgccaaggtatccagccagtgggtaggggtgagttaccccaactggaggggcagatagaaatgtaaaagtttaccctattggtca

SEQ ID NO: 1025595 - DNA, 120 bp, Artificial Sequence
  ENSG00000286642_16 (sequence is synthesized)
caaccatgactagaaatgttgtgacttctgcacgcactgcactgcaggaagccactccatctttggcagggagggatgtcatgcaacactacggacatacttaaactgaaaaaaaatatt

SEQ ID NO: 1025596 - DNA, 120 bp, Artificial Sequence
  ENSG00000286642_17 (sequence is synthesized)
cctacaaagggaaacacactcttaccatataatccagcattcaaacgcctaggcatttgcccaaatgaatttaaagcttacgtccacaccaaaatctgcacacagatgtttatagcagct

SEQ ID NO: 1025597 - DNA, 120 bp, Artificial Sequence
  ENSG00000286642_18 (sequence is synthesized)
ctattcttaattccaaaacttggaagcaagcaagatgtccttcaccaggtgaatgagtaagtcaactgtggtacatctagacaatggaatattaataggattcagggctaaaaagaaatg

SEQ ID NO: 1025598 - DNA, 120 bp, Artificial Sequence
  ENSG00000286642_19 (sequence is synthesized)
ggctatgaagacatggaaagatatgaaagaaacttaaaggcacattactaagtgaaagtaaccaatctgaaaagactgcatactgtacaattccaactttacaacattctgggaaaggaa

SEQ ID NO: 1025599 - DNA, 120 bp, Artificial Sequence
  ENSG00000286642_20 (sequence is synthesized)
aaactatggaggcagtaagaagatcagtggttgccaggagtttaagggagagggggatgaataagcagagattcacagatcattatgactgtgaaaatactctgtatgatactataatgg

SEQ ID NO: 1025600 - DNA, 120 bp, Artificial Sequence
  ENSG00000286642_21 (sequence is synthesized)
tggacacatatcattatacatttctcaaaacccatacaacaccaaaagtacaacaccaagagtgaattgtaatgtaacctgtggactttgggtgataatgatgtgtcaatatagtttcat

SEQ ID NO: 1025601 - DNA, 120 bp, Artificial Sequence
  ENSG00000286642_22 (sequence is synthesized)
gaattataacacatgtaccactctgctggtgggggatgcagatatgagggaggagggtggtcaggagttatataggaactcttctgtattttctgctcagttttacagggaacccaaaac

SEQ ID NO: 1025602 - DNA, 120 bp, Artificial Sequence
  ENSG00000286642_23 (sequence is synthesized)
ataagtcatgatttaaaaggaccagcagcatctgtgaagaaaccctgtcaatcagaatcctacacacatgcaaaggtttgcccgcctcagccctgtaggactgattcactcagaccacac

SEQ ID NO: 1025603 - DNA, 120 bp, Artificial Sequence
  ENSG00000286642_24 (sequence is synthesized)
tgctagccctgtcaccaagctttcgttcttgtctccctttctctgtgccattttacctccacaaagttcaaattctttgtctatataatcctgagttaaaataaagtttcagcagaagaa

SEQ ID NO: 1025604 - DNA, 120 bp, Artificial Sequence
  ENSG00000286642_25 (sequence is synthesized)
gtaatatgaccaaattaagtataacaagggagtttttaaaaaataaataagctataagatccactaaagaatttactatgacagggaaaaaattatgtattttgtactaagttacacaca

SEQ ID NO: 1025605 - DNA, 120 bp, Artificial Sequence
  ENSG00000286642_26 (sequence is synthesized)
ctctttcaggggtacactaaaacccatataacgccattgactagataagccattataagcttataagcaagttccaagatgtcaagaaaggtgattagaaagtatagggaagcataatca

SEQ ID NO: 1025606 - DNA, 120 bp, Artificial Sequence
  ENSG00000286642_27 (sequence is synthesized)
acttaattttcaggtatattgttgagccatgattcttgtttcagaaagtagaaagcagaccactttccctgtcccattggtaatgtgaaggaaacagttctgactagaaatgaaggggat

SEQ ID NO: 1025607 - DNA, 120 bp, Artificial Sequence
  ENSG00000286642_28 (sequence is synthesized)
tgacgaggtgtttttgacacctgtgctcagtccattcctcctccttcctccagactttttgctctgttcttaggcagcgcagagataatagaagatctgcatggttgagtgggacttcct

SEQ ID NO: 1025608 - DNA, 120 bp, Artificial Sequence
  ENSG00000286642_29 (sequence is synthesized)
ggttatgttgcttaagatatctgagcacagggaggagtaagccctgcaaaaagtctaggaaatcttcagtgtttctagttttctgctgctctaattaaacatttgagataaattaactga

SEQ ID NO: 1025609 - DNA, 120 bp, Artificial Sequence
  ENSG00000286642_30 (sequence is synthesized)
cacacagaataaaatcagataccttctctcttggaattggtagagattacatgtctgagaactcagtatctagcccaaagcccaacatatgcaaaggcaaaaatgacgaacgatttagta

SEQ ID NO: 1025610 - DNA, 120 bp, Artificial Sequence
  ENSG00000286642_31 (sequence is synthesized)
aacgagaatgcagaagctgggtaaccagttacctagagaaaagcattcacctgagcaaaggttactgtccagggagttttgcttgtggtcatataaagaaagcattatagttattgagga

SEQ ID NO: 1025611 - DNA, 120 bp, Artificial Sequence
  ENSG00000286642_32 (sequence is synthesized)
ctatgtactaaggctttgtgacaggctctgttactgtctagtgaagaggattctgccatttagaataggaaggtgtacaatgttaactattttacgaatttattttttttagtgtgtttt

SEQ ID NO: 1025612 - DNA, 120 bp, Artificial Sequence
  ENSG00000286642_33 (sequence is synthesized)
ttttttattctgccaattggaaagccattttctatattgtaacaacctcaaaaacaaacacatcatactattccttttacattaagaaatctgcagttatatttcagaatatgaattaga

SEQ ID NO: 1025613 - DNA, 120 bp, Artificial Sequence
  ENSG00000286642_34 (sequence is synthesized)
ttgctagaaacacattctctcgatacacacatggatatttaaagaattataatattttagccatttaaaattattttcattttcatgaagtaaactcaaaagctttccctatcaatatga

SEQ ID NO: 1025614 - DNA, 120 bp, Artificial Sequence
  ENSG00000286643_0 (sequence is synthesized)
acggacgttcagagaaactgcaaaccctgacacccttatgcacgaacgttcagagaaactgcaaaccctgacaactttatgcacgaacgttcagagaaactgcaaaccctgacaccctta

SEQ ID NO: 1025615 - DNA, 120 bp, Artificial Sequence
  ENSG00000286643_1 (sequence is synthesized)
ggagtgacagagatgacttccaaaagcaagcattttctggattgctcttcaggggtctccagaaccaacttggtcaggaatcaaggtgtcttcaagatctgcgaatttgaagccatcagc

SEQ ID NO: 1025616 - DNA, 120 bp, Artificial Sequence
  ENSG00000286643_2 (sequence is synthesized)
cacaatggagcttacctccaccttttcaagccttcatagaacaaaaacaagattcccaacaatttcttcccatctgatgaccttttgttctacttctctgagaaaaatgaagcaatcaga

SEQ ID NO: 1025617 - DNA, 120 bp, Artificial Sequence
  ENSG00000286643_3 (sequence is synthesized)
gaggactaccacaaacttctaagactatatatattctctggtgatctatctgcatgcaggtatatacactctacctttctgcctgttgatgtagacaactatccatactcctctctaaag

SEQ ID NO: 1025618 - DNA, 120 bp, Artificial Sequence
  ENSG00000286643_4 (sequence is synthesized)
ccaacccctccacttgtgatgaggtccaatctccaccccttgctcactcaagggcaatgttttagcaattttcctctctctcctccacatcatcaaattataactatgaaaatttgctgc

SEQ ID NO: 1025619 - DNA, 120 bp, Artificial Sequence
  ENSG00000286643_5 (sequence is synthesized)
tttctccctctcctttgcagaaatattaaaagaggcatctgtatttgccatgttcccttattttccccattctctcttaaacccactccagtgcatcttccatccaaccacgtgctgttc

SEQ ID NO: 1025620 - DNA, 120 bp, Artificial Sequence
  ENSG00000286643_6 (sequence is synthesized)
tcaagggcactaatgatctcccggtttataaagccaatgtttctctcttgtcttcattgtacttgacctattctatcagcagcatttgacaccactgattactcattctgctctggtgta

SEQ ID NO: 1025621 - DNA, 120 bp, Artificial Sequence
  ENSG00000286643_7 (sequence is synthesized)
ctttcttcaattgcttccaagacaccataaattcttctgccttgctggctgcctttgctggttcctcctcttctccctgacctcttaatgttggagaaccacagggcttagtccttggtc

SEQ ID NO: 1025622 - DNA, 120 bp, Artificial Sequence
  ENSG00000286643_8 (sequence is synthesized)
gggggctgtggtcagaaggcagcctcgagccttcagttcctgcaggacctgtctcagggcagagggcggcatcccagggtaggccatatctggtgactgaatgaggcagggataaaggac

SEQ ID NO: 1025623 - DNA, 120 bp, Artificial Sequence
  ENSG00000286643_9 (sequence is synthesized)
tggtcatatcagcctctgcaggacaaggatgatgggcagtattaattccagagcttccagccaggttgttctacaccactgtttgacttctccacgcggtcctgcttgcttcctctttct

SEQ ID NO: 1025624 - DNA, 120 bp, Artificial Sequence
  ENSG00000286643_10 (sequence is synthesized)
tttgcagttcatctaaatgccgtcttcttgcctgtttctggagaaatcaacctacaactcttggagatcccctccggtctcatgactgcgaatactttccacatgctaacaactcccaat

SEQ ID NO: 1025625 - DNA, 120 bp, Artificial Sequence
  ENSG00000286643_11 (sequence is synthesized)
gcatgtctctagccagtgctttttcccctagactccacaatcgaataccgcactgtgcacgtacaccctctgggtatcttccaggtgcctttcccagctgagctaagggcaattgaaccc

SEQ ID NO: 1025626 - DNA, 120 bp, Artificial Sequence
  ENSG00000286643_12 (sequence is synthesized)
tcccaactattcagaccaaaatacttggtgccatacttgccttccctttcctttcacatcccacatcgaatcagtcggaaaattctgttgcatccactctccaaatatgtgccaatccaa

SEQ ID NO: 1025627 - DNA, 120 bp, Artificial Sequence
  ENSG00000286643_13 (sequence is synthesized)
atctcttctcaccccttcctgctgctgccactataatccgagccaccattctctactagattacgacaaaacctctgaacaagtctccctgtttccactcttgtccttctacaatccatc

SEQ ID NO: 1025628 - DNA, 120 bp, Artificial Sequence
  ENSG00000286643_14 (sequence is synthesized)
ctcatccaggaccatggggatccttttaaagtataaattagatcacagcattcctccgctcaaggggtaaaagccaaactccctagagggacccacaaagcatatcacccctctggcctc

SEQ ID NO: 1025629 - DNA, 120 bp, Artificial Sequence
  ENSG00000286643_15 (sequence is synthesized)
gttattacttctctgtcctcatctcctgctgcttctccccttgttcatgccactgaagccacacttggcctcctcgatgttccctgaactttccagacacactccctctttctggaacat

SEQ ID NO: 1025630 - DNA, 120 bp, Artificial Sequence
  ENSG00000286643_16 (sequence is synthesized)
tccaggtaggctgctaatttctttatattcttttagtcttcattcaaatggtaccatctcatcactataccctaatctaccccgcttacctcccagaactgcccacccacccaaagcagg

SEQ ID NO: 1025631 - DNA, 120 bp, Artificial Sequence
  ENSG00000244128_0 (sequence is synthesized)
atagcacaccgaagcattcggttgaatattaatccggatgtttctgtgaggttgtttctggatgaaatgaacatttttgtagactgagtaaagtagtttgccgcctctcccgacccaaca

SEQ ID NO: 1025632 - DNA, 120 bp, Artificial Sequence
  ENSG00000244128_1 (sequence is synthesized)
atgtgggtggggctcatccaatcagttgaaggcgttactagaacaaaaatgctgaccttttcatgagtaaggggggaagtcctcctgcctgactacctttgaactgggacatgtgccttt

SEQ ID NO: 1025633 - DNA, 120 bp, Artificial Sequence
  ENSG00000244128_2 (sequence is synthesized)
tttttctgccttcagactcaaactaaacgtcagcttttcccggctctcaagcctgctggtccctgaactaaaactcacattatcaactctactggttcttaggcctttggagtcagactg

SEQ ID NO: 1025634 - DNA, 120 bp, Artificial Sequence
  ENSG00000244128_3 (sequence is synthesized)
gaactacagcattgactcttccggaactccagcttactgactacagatcttggaacttttcagcttccacaaccatgatgccctgcggttgttttcaggactgaagacaacagctccacg

SEQ ID NO: 1025635 - DNA, 120 bp, Artificial Sequence
  ENSG00000244128_4 (sequence is synthesized)
atgtatctttgcataagaatacacttgtataataagtttttttttttagagaaattgcatgtatctgccttataaactttttcattcattcattttctttcttcctaatctgttccataa

SEQ ID NO: 1025636 - DNA, 120 bp, Artificial Sequence
  ENSG00000244128_5 (sequence is synthesized)
aagattattttaatctgcagctacaaaatatgtaactcattaatatttaaacaatcacaattttctattaacattatagcattttatctactactagatcaggaattagctattttttgt

SEQ ID NO: 1025637 - DNA, 120 bp, Artificial Sequence
  ENSG00000244128_6 (sequence is synthesized)
tttctttgtaaggcaaagcaatagtattgtatatactttcctaaagattgtcaagttcagttttgcttaaatttaacagtacatgtgacactttctgtttgaagaataagttggttttaa

SEQ ID NO: 1025638 - DNA, 120 bp, Artificial Sequence
  ENSG00000244128_7 (sequence is synthesized)
gtttataccaaacaaaagcatctcttttgttttgcaaaatctgaaactttgatctttctagttgtgacttcttgtaaatatgttttatataaatattctatgaattggttattaacaagg

SEQ ID NO: 1025639 - DNA, 120 bp, Artificial Sequence
  ENSG00000244128_8 (sequence is synthesized)
taaagaaagattgatatgtaagctgattcttaaacattaattttctggagataaacttttttaaaattatgctttaaaaatattttaacacatgttatcaaaaaggaactgaaatatctt

SEQ ID NO: 1025640 - DNA, 120 bp, Artificial Sequence
  ENSG00000244128_9 (sequence is synthesized)
aggcataaaagacatctctagaggtcattattcagtttccagaaagtactgaaactatctctgacagattgatacgttttctgcatttatagctctctggagagaggttctgtatattta

SEQ ID NO: 1025641 - DNA, 120 bp, Artificial Sequence
  ENSG00000244128_10 (sequence is synthesized)
acaattctcactgtgagggatattttaagtatttcaaatttaaagtgctcatgtttcagattcagattattattatcatcatcattattttggttctggcttcagtaaaaatgtgaaaaa

SEQ ID NO: 1025642 - DNA, 120 bp, Artificial Sequence
  ENSG00000244128_11 (sequence is synthesized)
aatcccgcgcggctcagagatgggtttctggactcgcgaagcagctgcaacaaggcatcactcactgtataagtatttccatttctgagagcaaaaggaagaacttaagcgggcggcact

SEQ ID NO: 1025643 - DNA, 120 bp, Artificial Sequence
  ENSG00000244128_12 (sequence is synthesized)
ggaagaacttaagcgggcggcacttggagtgtaaattgctttgtagtatttaaaggcagaatggatcctgggcagccgagctgatcatgaggttcctgaggcctcctagccatgcttcct

SEQ ID NO: 1025644 - DNA, 120 bp, Artificial Sequence
  ENSG00000244128_13 (sequence is synthesized)
gttgtatttttaaaccttattcctggaagcactacggatatcagatcaatttagaaagccaaagagtacctctgggaatgaaatggtagtaatagaaacaatatttggccaaactatcgc

SEQ ID NO: 1025645 - DNA, 120 bp, Artificial Sequence
  ENSG00000244128_14 (sequence is synthesized)
tgtatgccaatgatgccaaaaatcacagtaacctggcagcaacaaaccggcaggacttcctgtgaaatcatgaccaccatgtgctctttcagcctctatcagttcctacctctaagcacc

SEQ ID NO: 1025646 - DNA, 120 bp, Artificial Sequence
  ENSG00000244128_15 (sequence is synthesized)
gactacagatcttggaacttttcagcttccacaaccataatgaaagccaagcatattccatcatttcctaaaaccaagatagagcacatatgggaacttgtgaaataaggtgaggatggg

SEQ ID NO: 1025647 - DNA, 120 bp, Artificial Sequence
  ENSG00000244128_16 (sequence is synthesized)
gaggtgtcaaacaagacctaacctctcaacaatcagctggacactgttgtgtaagaatgtgaagcttggcactgctgcagccatcttgttccaggaagggtaaaacctgaggttagaagc

SEQ ID NO: 1025648 - DNA, 120 bp, Artificial Sequence
  ENSG00000244128_17 (sequence is synthesized)
caacatcctaatgatggcagagaagacaaagagaaccagagtctaaatgacattgttgagttagatcactacactacctctagtcttctttttatgtgtgataataaatctcacttatac

SEQ ID NO: 1025649 - DNA, 120 bp, Artificial Sequence
  ENSG00000244128_18 (sequence is synthesized)
gtaaattgctttgtagtatttaaaggcagaatggatcctgggcagccgagctgagttgcttcccccttctttactccgaaaaatcaacttttgagctttttcttaaatcctatatctcct

SEQ ID NO: 1025650 - DNA, 120 bp, Artificial Sequence
  ENSG00000244128_19 (sequence is synthesized)
aaatcctatatctcctgggaggctttttctaactcatacacaaagatagatattctgaagccttaaatttgtaccttggtcacaatcatgaggttcctgaggcctcctagccatgcttcc

SEQ ID NO: 1025651 - DNA, 120 bp, Artificial Sequence
  ENSG00000244128_20 (sequence is synthesized)
atgttgtatggcctgtaaaactaagtaatgaaggctgatatgtacccacctggctctgtcttgggatcacacaacttgggagccaaaacaggtataattgtgatctcttcccaggaaaaa

SEQ ID NO: 1025652 - DNA, 120 bp, Artificial Sequence
  ENSG00000244128_21 (sequence is synthesized)
gaatgagacttggctgttctaaaaaactacagcttgtcctgtggagaactgtgattacttctgatggaaaatgacaggctgaatgccagaaggcaaagcaactgttttcctaagagtctt

SEQ ID NO: 1025653 - DNA, 120 bp, Artificial Sequence
  ENSG00000244128_22 (sequence is synthesized)
aagaccctgaaggacttgtgcctcctttggtgatctaggggataaagaagtggaatggaaatggagaggaatagctggaacaaaaaggcaaagaggtataatctatcataaatatgccgc

SEQ ID NO: 1025654 - DNA, 120 bp, Artificial Sequence
  ENSG00000244128_23 (sequence is synthesized)
ctttataagcatgtgtgtaccaaaaaaaagccacaaaccatataaagtgagcctatattagaaatagaagtattttatgaaataatatatttaaaatttccagtaaacagaatataaatt

SEQ ID NO: 1025655 - DNA, 120 bp, Artificial Sequence
  ENSG00000244128_24 (sequence is synthesized)
ccacaggaaaccacaggtactaactcttttagacctgatgaagtgtctcccaaatacagtctggcatgaatgaaagccaagcatattccatcatttcctaaaaccaagatagagcacata

SEQ ID NO: 1025656 - DNA, 120 bp, Artificial Sequence
  ENSG00000244128_25 (sequence is synthesized)
aagccatttgaagttgagtctaatgttcatttcagaccaaagcagcttaactgacatgttctccgctttgttaccctatccagttgttttcatgcaggaaataaatctcaaattacctca

SEQ ID NO: 1025657 - DNA, 120 bp, Artificial Sequence
  ENSG00000244128_26 (sequence is synthesized)
gcctttggagtcagactggaactacagcattgactcttccggaactccagcttactgactacagatcttggaacttttcagcttccacaaccataaggtcatgggaagatatgcaaggaa

SEQ ID NO: 1025658 - DNA, 120 bp, Artificial Sequence
  ENSG00000244128_27 (sequence is synthesized)
gaagtccatgtgaagacggaggcagagatgagagtgatttacaagtatctacaagcccaggaacaccaaggattgccagcaaccaccagcagctaggagagaatgcatataatggtgaat

SEQ ID NO: 1025659 - DNA, 120 bp, Artificial Sequence
  ENSG00000244128_28 (sequence is synthesized)
gtaacttctgaaggccttccttactgaagataagaaaatctggaccaaaaaaatcaaacaaataaagatctacttgaagatattgaagaattgacactaaagtaaataactactgggcca

SEQ ID NO: 1025660 - DNA, 120 bp, Artificial Sequence
  ENSG00000244128_29 (sequence is synthesized)
ttcttctaaggaggataaggggtttcaccttgttgcccaagctggtcttgaagttctgggctcaagcgatctgcctgcattagcctcctaaagttctgggattaccaacatgagctacca

SEQ ID NO: 1025661 - DNA, 120 bp, Artificial Sequence
  ENSG00000244128_30 (sequence is synthesized)
tgcctgggtcaaagccattctctgagctgaagaaaaactacaaaagatagaaactcagatgtgcaggaaagaatatagacaccaaaaaagaccatatcatatttgctccagtacttccag

SEQ ID NO: 1025662 - DNA, 120 bp, Artificial Sequence
  ENSG00000244128_31 (sequence is synthesized)
caaggaaattgtacacgtttgagatgactgttgtaacttacccttctgcctggtcacaggaaatggtgtcatttcttaaaaaggagtgcaattttgaccaattactttttactggaagaa

SEQ ID NO: 1025663 - DNA, 120 bp, Artificial Sequence
  ENSG00000244128_32 (sequence is synthesized)
ctggttagaatcaatgcccacacctgagaattgtgcttgagatagattctcctgaagacacagggcttcacaggaaggagagataattattggatggaaaacagaactgagaagagaaat

SEQ ID NO: 1025664 - DNA, 120 bp, Artificial Sequence
  ENSG00000244128_33 (sequence is synthesized)
cacttgtgtcccagcaccatttgttgaaaaggatattctttccctgttgaaataatgtcttggcacccaaactgaaaatgaattcacctcagaagagatcagcatttgaatcagtagact

SEQ ID NO: 1025665 - DNA, 120 bp, Artificial Sequence
  ENSG00000244128_34 (sequence is synthesized)
gagtagctctcaccagtatgggcaagtgtcatctaatcccttgaggcctcacctagagaacaagaagggagagaaagaatgaatttgctctctcttcttgagctgggacatccatcttct

SEQ ID NO: 1025666 - DNA, 120 bp, Artificial Sequence
  ENSG00000244128_35 (sequence is synthesized)
gcccatcctctgctcaccttctgctcctagttcttgattcttggacatatgtcatccccactcaattgtcgagccttcgaccttggactggaaattccaacactgatcagttcttctgga

SEQ ID NO: 1025667 - DNA, 120 bp, Artificial Sequence
  ENSG00000244128_36 (sequence is synthesized)
tctctggccttcagatttggactgaattacaccaacagctttcctggctgtctagcatgcagatagcatattgtgggaattagcctccataaccgtgaaaaccagtttccataacaaatc

SEQ ID NO: 1025668 - DNA, 120 bp, Artificial Sequence
  ENSG00000244128_37 (sequence is synthesized)
acatcttctccatctctatatatcctattagtcctctttctctggagaaccgtgactaatacgagatctcaagcgagaatatgcatttctgtcttgcctatttaattaagttttggggaa

SEQ ID NO: 1025669 - DNA, 120 bp, Artificial Sequence
  ENSG00000244128_38 (sequence is synthesized)
aaaaatcacatggagtaatgcacagaaatcttgttatgagattgccaaaagttccatttatcacctactccatctcttatcctatagatattttatgattttcacaactttgtaaaacac

SEQ ID NO: 1025670 - DNA, 120 bp, Artificial Sequence
  ENSG00000244128_39 (sequence is synthesized)
tggagtgtaaattgctttgtagtatttaaaggcagaatggatcctgggcagccgagctgcaacaaaccggcaggacttcctgtgaaatcatgaccaccatgtgctctttcagcctctatc

SEQ ID NO: 1025671 - DNA, 120 bp, Artificial Sequence
  ENSG00000244128_40 (sequence is synthesized)
gctgcagaagacattttaaagcaacatttatttttcattcattcattcaacgttcactgaattactaaaacacttactaagtgtctgttatatgccaagtactgctcgaagtactggaga

SEQ ID NO: 1025672 - DNA, 120 bp, Artificial Sequence
  ENSG00000244128_41 (sequence is synthesized)
taagataacatttaattgaggaatgaagtgaaaattctcctttccttttttttttttttttggaacatgggtatggtcagcagcctccaacatgactcctaaagatctctacctcttagc

SEQ ID NO: 1025673 - DNA, 120 bp, Artificial Sequence
  ENSG00000244128_42 (sequence is synthesized)
atttatactgtcatgtaattctttccccttaagggtggttgatttaatgacttgtttctaataaacaaaatattacaaaagtgatgggctgtcatttctaattaggttatgaaagactgt

SEQ ID NO: 1025674 - DNA, 120 bp, Artificial Sequence
  ENSG00000244128_43 (sequence is synthesized)
ggtctggtttgggtgccttctcttacattctcattcacttgttgtgagggaatcaagctacagtgttttaaggtgcacacatgtcaaagaactgatgttttcagccgggatccagcaagg

SEQ ID NO: 1025675 - DNA, 120 bp, Artificial Sequence
  ENSG00000244128_44 (sequence is synthesized)
acctgaggtcatccaaaaggcatgtgaatgagtttggaagaaatctttccccagttgtgctctgagataattgcgacactggcgtacaatttcctgagagatgttgagccagaaccacca

SEQ ID NO: 1025676 - DNA, 120 bp, Artificial Sequence
  ENSG00000244128_45 (sequence is synthesized)
caaggtattttagaaaatttattacacagcaatagataacaaatacatacagtggaaacatcttcagtattgtagacttgagtatggtggttagcaggatattttctgtcatcagaagtc

SEQ ID NO: 1025677 - DNA, 120 bp, Artificial Sequence
  ENSG00000244128_46 (sequence is synthesized)
agcataagtaaaggaaattaacaatagttcagagaaggccataagatagaaacttggtaaggaaacactgtacctgttctacctacttctaagtttttctttatttccaccactctttga

SEQ ID NO: 1025678 - DNA, 67 bp, Artificial Sequence
  ENSG00000244128_47 (sequence is synthesized)
atctttcaggttctctttctgcagccacttactaagctataatgataataaagggacaaaaagactg

SEQ ID NO: 1025679 - DNA, 120 bp, Artificial Sequence
  ENSG00000244128_48 (sequence is synthesized)
cttactaagctataatgataataaagggacaaaaagactgggaattgaacttcagtcataatgaaatgactccataattcaaagacaaataaacccataatttcctttttggatttaaag

SEQ ID NO: 1025680 - DNA, 120 bp, Artificial Sequence
  ENSG00000244128_49 (sequence is synthesized)
aagaaacatttatcaaataaactgataaacaataatatacttttacgtagcctaagataaaagccatttgtctatattagggttctgataacaatacacaattctcactcacaaaaagat

SEQ ID NO: 1025681 - DNA, 120 bp, Artificial Sequence
  ENSG00000244128_50 (sequence is synthesized)
tttgtcatgggatcaggagtaactgcaggtgtttatttccagtcagaataactgaaaaatttcaactggacttccaatgtttatataaacctggttgtttctacagaaaagtaaatagtt

SEQ ID NO: 1025682 - DNA, 120 bp, Artificial Sequence
  ENSG00000244128_51 (sequence is synthesized)
taattaccatttgccacgattcctgtttggaaagttagctttctgaaaatattgataagtgtatatttcagggacatcaaattatgaaacagacaattacatgacttgtcagttcattat

SEQ ID NO: 1025683 - DNA, 120 bp, Artificial Sequence
  ENSG00000244128_52 (sequence is synthesized)
gctagaaagatttaaaaggtaaattagattttataagtcataccaaatgttcacactgaaggattcaacacatctttagaatacttcaagtatattaggagaaaaaatgcaactttattc

SEQ ID NO: 1025684 - DNA, 120 bp, Artificial Sequence
  ENSG00000244128_53 (sequence is synthesized)
ttgagctgattcagcagagtagaaataattttgacatttgtagtttctagatgaggcttgatgtaagaataaaaattctttcaggaactgtgtgtctgtgatttaaaagtttatgttgaa

SEQ ID NO: 1025685 - DNA, 120 bp, Artificial Sequence
  ENSG00000244128_54 (sequence is synthesized)
cagtttgaaagtatgaagactacttttacaaccaagaaaagaaaatgaactgaattgaactgaatgattgaatcaacaaaatagtaaacctctgctcatattattaatatagtctttcct

SEQ ID NO: 1025686 - DNA, 120 bp, Artificial Sequence
  ENSG00000244128_55 (sequence is synthesized)
ctcatattactggtaagcccataaatagcatcatattatgcaatccgagaaacttccatgtctagggtcaataccaattaagattgggtggctcgtagggtggaggtggtagtcgtagag

SEQ ID NO: 1025687 - DNA, 120 bp, Artificial Sequence
  ENSG00000244128_56 (sequence is synthesized)
ctgacagaattttggtgttagcatttgctcataggctgttttttgacaactttttaaaaagcagttattatgtgtcaaatataatttccagtttaaattaaaaataaaggcctaggatgt

SEQ ID NO: 1025688 - DNA, 120 bp, Artificial Sequence
  ENSG00000244128_57 (sequence is synthesized)
atcaaatcacataatatcaaaatcatactctaaagaaattttgtagccacagatgtatatttttagtctgataaatgaaatctgcattcacctcaagaagctagcgaaacaacaaaacat

SEQ ID NO: 1025689 - DNA, 120 bp, Artificial Sequence
  ENSG00000244128_58 (sequence is synthesized)
taagaactaaaatcaacataatttctggtcactttgttaaataaaattgaaaccagaatatttccttgtacctctattaagttaataccaagaacaagcaaaaataaagcaattacttgt

SEQ ID NO: 1025690 - DNA, 120 bp, Artificial Sequence
  ENSG00000244128_59 (sequence is synthesized)
ctctttggaaataagacgaataaccagctaaaataggtttttaatcaaaactaacaaaagtgttgatcaatactcatttcaagatcctggcttcatggtgcccatcaatccaaaactact

SEQ ID NO: 1025691 - DNA, 120 bp, Artificial Sequence
  ENSG00000244128_60 (sequence is synthesized)
tcctagaccctgttgaatctcaaccaacttcccccctgtcaagactagctttaaaatcactcatgaaggtatgagattctaataaacatctccctttccctctgacttctccttcttgag

SEQ ID NO: 1025692 - DNA, 120 bp, Artificial Sequence
  ENSG00000244128_61 (sequence is synthesized)
acactacacttgtactctattaaggtgatagtttttcttcctgcaataggtcacataaacttagctgtcttcatcaatatttctgaaggtattttgtgaagttaacagcaatggaagaga

SEQ ID NO: 1025693 - DNA, 120 bp, Artificial Sequence
  ENSG00000244128_62 (sequence is synthesized)
aataaatcataaatatttgaaaaccagttattttaataaaaaaagaagtgtctttttttttaacagaattgcaaataacatatggagatactgtgctcccaggaggtggagatgaattat

SEQ ID NO: 1025694 - DNA, 120 bp, Artificial Sequence
  ENSG00000244128_63 (sequence is synthesized)
tatcctttcttcacaccttcccattgagattgggctagatttgctgatatttttcaaaaaaatagtgcagtgaaaaaaaaaaaggtgcattgttttagtacaagaaacttggcacattct

SEQ ID NO: 1025695 - DNA, 120 bp, Artificial Sequence
  ENSG00000244128_64 (sequence is synthesized)
acctcaaccaaatgatgaaagttaacatcacagattccatgtggacattactacctccctggtatgatgtgatgagaaaggcatttccctctgtggtattatttcaaatgactgataatt

SEQ ID NO: 1025696 - DNA, 120 bp, Artificial Sequence
  ENSG00000244128_65 (sequence is synthesized)
ctggtctaatcaggagaaaaacaacacagatccattggagactttcaacaggacacctgcccagtatgcctcaagactttcaaggtcatgaaaaccagaaaggagagataaacaatcaca

SEQ ID NO: 1025697 - DNA, 120 bp, Artificial Sequence
  ENSG00000244128_66 (sequence is synthesized)
gattaagacattgtggaaattgaacaatcagaagcaatgatgtagcctagattaaatcctaaatctgtaagaggacattgatggaaaaactggtgacatccaaagaagtcttgaatttag

SEQ ID NO: 1025698 - DNA, 120 bp, Artificial Sequence
  ENSG00000244128_67 (sequence is synthesized)
ttacagtaatatcctaaaagaaaaaaaattgaaattgaaagcaaaataaagtacttcacaaataaatgagaaatacatcagataattcagattataaacaaagagaaaaaatcaattagt

SEQ ID NO: 1025699 - DNA, 120 bp, Artificial Sequence
  ENSG00000244128_68 (sequence is synthesized)
acttaaacagggacatccccaaagaatcagagtttattttaaaatggctttctcagggattttattctaaatattttaaaacgtaaaggaattttaaaatttctttaaaaatacttaaaa

SEQ ID NO: 1025700 - DNA, 120 bp, Artificial Sequence
  ENSG00000244128_69 (sequence is synthesized)
ataccagaattaatcaagtatattggaaatgtcataaaatcagtaactctagatttaaattaaaggaataaaaaaactctaccattggcaaatggtagattatttgattaatacataaaa

SEQ ID NO: 1025701 - DNA, 120 bp, Artificial Sequence
  ENSG00000244128_70 (sequence is synthesized)
aatataagctactcaaataaattatttgaactagttgaagttctaacatactccaatagttttcttgtgattcttagtaagacaatattaagaaaaaaaattccttcatgagaaaacaac

SEQ ID NO: 1025702 - DNA, 120 bp, Artificial Sequence
  ENSG00000244128_71 (sequence is synthesized)
tacaaaatatgtatatttattccaaacataaaatacttaagttttttttgcaaaaaatacaaatctttattgaagaactaaataaaacataccaaaacataagcataccaaatgtgtgtc

SEQ ID NO: 1025703 - DNA, 120 bp, Artificial Sequence
  ENSG00000244128_72 (sequence is synthesized)
taaatccttttattatctcatcacaaccatctttgactgtttatcagaaatggttctcttttgtacattgaccattattttatagatcacatttaagttaatataaatcatgcctataaa

SEQ ID NO: 1025704 - DNA, 120 bp, Artificial Sequence
  ENSG00000244128_73 (sequence is synthesized)
tacagtctggcatgggcaaatttatgttactctggaagtagagaaaatcatgatggcagatcggaggcaggactaatctgcaacttccactgagacagacagaccagtgtgtggagactc

SEQ ID NO: 1025705 - DNA, 120 bp, Artificial Sequence
  ENSG00000244128_74 (sequence is synthesized)
cttttgctccaagaactactgcaggaccataccaggaaagctgagagaatccacagaaggatcttgatcaccaccgcaggctccctgagatgctgaagaaaacttactcaaactaaacgt

SEQ ID NO: 1025706 - DNA, 120 bp, Artificial Sequence
  ENSG00000244128_75 (sequence is synthesized)
gccctgcggttgttttcaggactgaagacaacagctccacgatgtatctttgcataagaatacacttgaaaccaaagcacaaagagagaaagaaaagaaagagaaaaaaggaagaaagaa

SEQ ID NO: 1025707 - DNA, 120 bp, Artificial Sequence
  ENSG00000244128_76 (sequence is synthesized)
agactggaactacagcattgactcttccggaactccagcttactgactacagatcttggaacttttcagcttccacaaccatgtaagccaattcctttctaataaataagtctctctctg

SEQ ID NO: 1025708 - DNA, 120 bp, Artificial Sequence
  ENSG00000244128_77 (sequence is synthesized)
cctgggaacaaagaaagagtcccattgcattgcgggttgctggccagatcccgcaatacagtactgctttagaaacaaagtaacagaacaaaaataaaagggaatagagttctccacttc

SEQ ID NO: 1025709 - DNA, 120 bp, Artificial Sequence
  ENSG00000244128_78 (sequence is synthesized)
tgtatagtgggtggtgggcaggggaacactgagatctgtagagaagagaggctccttcattgcatgtatagcggggtgtcagtgccccagagaaagcaatggtttccagatggaagctga

SEQ ID NO: 1025710 - DNA, 120 bp, Artificial Sequence
  ENSG00000244128_79 (sequence is synthesized)
agtgggtgcagcccacagagggcgatccaaaacagggtggggcattgcctcacccaggaagggcaaggggtcgggggattttcctttcctaaccaagggaagccgtgacagactgtacct

SEQ ID NO: 1025711 - DNA, 120 bp, Artificial Sequence
  ENSG00000244128_80 (sequence is synthesized)
gccctggtcactggctacctggaaatagacttggtggtgttggggaagcacagtgggactgagaacaccctttaggactgcaggctgcataggagcagggtgaagcctgtgactgctggc

SEQ ID NO: 1025712 - DNA, 120 bp, Artificial Sequence
  ENSG00000244128_81 (sequence is synthesized)
tttcccccacttgcctggtgacctgtatgactcagcagaggcagccataatcaccccgggaatataaatccattggactgggaaccacactcccatcccctacagcagctgcagtaagcc

SEQ ID NO: 1025713 - DNA, 120 bp, Artificial Sequence
  ENSG00000244128_82 (sequence is synthesized)
atctctgcccccacttggtgatctgtctctacccatcctggtagctgaagacaaaaatcataatcataatctcttgggaactctatggccctgcccactgcctaagaaacctgactactt

SEQ ID NO: 1025714 - DNA, 120 bp, Artificial Sequence
  ENSG00000244128_83 (sequence is synthesized)
aaccaggtgtgcctagggcaagttcgcatttccttatagggctgcagctgatgcactctcaaaagtgccacctcctggctagaggccaacaaagacaaaagcagcaccctaaataaaaac

SEQ ID NO: 1025715 - DNA, 120 bp, Artificial Sequence
  ENSG00000244128_84 (sequence is synthesized)
tacctccaccagagcaggtgctggtatctatggctgcaagacctgaagatagatcacatcacaaaactccttgaaaacactcctcagtaccagcctggagcccagtagctccactgggtg

SEQ ID NO: 1025716 - DNA, 120 bp, Artificial Sequence
  ENSG00000244128_85 (sequence is synthesized)
tcctcagtaccagcctggagcccagtagctccactgggtggttagacccagaagagtggaaacaatcactacagtttagctctcaggaagccccattcctaggggaaggagcagaacacc

SEQ ID NO: 1025717 - DNA, 120 bp, Artificial Sequence
  ENSG00000244128_86 (sequence is synthesized)
acattaaggaagcaccccgagggacaaaagaatctgaacagcagaccttgaatcccagagcttcccatcgacatagtctacccaaataagaaggaaccagaaaaacaattctgattcttt

SEQ ID NO: 1025718 - DNA, 120 bp, Artificial Sequence
  ENSG00000244128_87 (sequence is synthesized)
aataccccctgaaaacaaggttctttaataccccctgaaaattataccagctcaccaagaatggatccaaactaagatgaaatctctgaattgccaaaaaataattaataaggtcgatta

SEQ ID NO: 1025719 - DNA, 120 bp, Artificial Sequence
  ENSG00000244128_88 (sequence is synthesized)
ttaagctaatcaaggaggcacaagagaaaggttaagtccaacttaaataaaaagcatgatacaggatataaaaagaaaattcttcagtgagatagatagcataaataaaaaacaatataa

SEQ ID NO: 1025720 - DNA, 120 bp, Artificial Sequence
  ENSG00000244128_89 (sequence is synthesized)
ctaacgaggtgagaaatagcttctataacataaatgaaaagctccagaaaatattggtcttaaagtaaacgttgtttcttatgaaacgtttcctgtgatttaaccccatatttactgtct

SEQ ID NO: 1025721 - DNA, 120 bp, Artificial Sequence
  ENSG00000244128_90 (sequence is synthesized)
aaatgtatctgtctaaaataattttcaggattctaatttcactgaatttttatacaggtaccctatcattcactttcaacaaagctattctatatactaaattaccgctgtgttcttttt

SEQ ID NO: 1025722 - DNA, 120 bp, Artificial Sequence
  ENSG00000244128_91 (sequence is synthesized)
ttttggaaacctaatatttagaaaaatccagaagataatctatctattacttaaacctgaaacacttaaatctatctattacttaaatttatctattacttaaagctgaaatgcttactt

SEQ ID NO: 1025723 - DNA, 120 bp, Artificial Sequence
  ENSG00000244128_92 (sequence is synthesized)
gcaaacatttgctttgttacctatttctgagagtgcgaaagcttcctttgaaaatgagacataaaatcaagaaatgcaattaaagctttaggactggaaatttctcacagattatcttgt

SEQ ID NO: 1025724 - DNA, 120 bp, Artificial Sequence
  ENSG00000244128_93 (sequence is synthesized)
ccaatatactttttttttttcatacaagtaaactgagggagaatatgaagtcagtaagcaataggggacatataggagaaaactttttactttacatttttaagttttaacaccttgatc

SEQ ID NO: 1025725 - DNA, 120 bp, Artificial Sequence
  ENSG00000244128_94 (sequence is synthesized)
taccatacatttttaatgttgaaatcttattgcttatggttctaaattcaactcaaaaaatgcctcagatgcaatttgccagtaaatattttattaaaagaatgtatccttcatagagaa

SEQ ID NO: 1025726 - DNA, 120 bp, Artificial Sequence
  ENSG00000244128_95 (sequence is synthesized)
cagattatagtgaacacaatatagccattctttttaaaacagtttattactacaaatctttggaaaaaaataataatggtggttgataacaatatcaacatagccatattaacacatttt

SEQ ID NO: 1025727 - DNA, 120 bp, Artificial Sequence
  ENSG00000244128_96 (sequence is synthesized)
atcaaatatccctgtgaggtcagtactttcattaacctattttcattaacatatgattaaactgtggtgtctgaactcagttgtcctggctcacaaaatggccttatcaaccacgatatt

SEQ ID NO: 1025728 - DNA, 120 bp, Artificial Sequence
  ENSG00000244128_97 (sequence is synthesized)
cttctctagagcaaacatattatcaacacagaaactactgtttaaagcatttgaatatacatttaaaccattttcatacatatttgctggaaacttatatgaactaaatactattttacc

SEQ ID NO: 1025729 - DNA, 120 bp, Artificial Sequence
  ENSG00000244128_98 (sequence is synthesized)
acttttcttgttttggctatgaaataaaacattgaaaaattattgggtgtaacctagtgaggaagtggaaaaccatgtgctttagtccttcccttaatcagtgtgtgagtaataaagctt

SEQ ID NO: 1025730 - DNA, 120 bp, Artificial Sequence
  ENSG00000244128_99 (sequence is synthesized)
gctatttaatatgaagatgatgatcttgatccactgtcaaaggacatgtatgtggggctgctttcactgttaataaaggattacataagctatacttattattcttaggaaaaattgcaa

SEQ ID NO: 1025731 - DNA, 120 bp, Artificial Sequence
  ENSG00000244128_100 (sequence is synthesized)
tggcacagaagttaggaggccttgggtttaatttctgctctgtaagtagttatttggctttagccaagtcatttaactctacaagaatcattttcctcttcttgaaagtgaagaggtagg

SEQ ID NO: 1025732 - DNA, 120 bp, Artificial Sequence
  ENSG00000244128_101 (sequence is synthesized)
aattttgacctagatcagtttatagattctttctaggtctgttccaacgttctatgagtctataatctagacctcattagtggtgtgctactagtactaatcaggcccaaagaaatatat

SEQ ID NO: 1025733 - DNA, 120 bp, Artificial Sequence
  ENSG00000244128_102 (sequence is synthesized)
taagttgcattttgtatgtgataggtgctgccagattttagattcctacttttaatttctgtttgagatcctcttctaccttctgtatgcttttttagaaagctttgctcttagaaaaga

SEQ ID NO: 1025734 - DNA, 120 bp, Artificial Sequence
  ENSG00000244128_103 (sequence is synthesized)
agctttgctcttagaaaagaaccaaaatacatggattgattgagatcattcaagaatttttaaattattttacaaattagattataaagattaaacctcattaataagaataaattaaat

SEQ ID NO: 1025735 - DNA, 120 bp, Artificial Sequence
  ENSG00000244128_104 (sequence is synthesized)
ttaccaagtttggagagccttgggataagctagtttcaaaactggctgttagcatccctcagttgtgttttgggagcaaaggacacccttaaaaaagggaggcagttatattttgtgagc

SEQ ID NO: 1025736 - DNA, 120 bp, Artificial Sequence
  ENSG00000244128_105 (sequence is synthesized)
cggttgttttcaggactgaagacaacagctccacgatgaaaccaaagcacaaagagagaaagaaaagaaagagaaaaaaggaagaaagaaaagaaagatgaaagaaagaaagagaaagaa

SEQ ID NO: 1025737 - DNA, 74 bp, Artificial Sequence
  ENSG00000244128_106 (sequence is synthesized)
aatgaaagccaagcatattccatcatttcctaaaaccaagatagagcacatatgggaacttgtgaaataaggaa

SEQ ID NO: 1025738 - DNA, 120 bp, Artificial Sequence
  ENSG00000244128_107 (sequence is synthesized)
accaagatagagcacatatgggaacttgtgaaataaggaaaccaaagcacaaagagagaaagaaaagaaagagaaaaaaggaagaaagaaaagaaagatgaaagaaagaaagagaaagaa

SEQ ID NO: 1025739 - DNA, 120 bp, Artificial Sequence
  ENSG00000244128_108 (sequence is synthesized)
aagtaggaagtctggccttacctcaaaagacagtcattcaattaagcagttaaacataagccaccataagaagtttttttgatacttagagagagaaaggcaacgtgtattaaaattccg

SEQ ID NO: 1025740 - DNA, 120 bp, Artificial Sequence
  ENSG00000244128_109 (sequence is synthesized)
ggaccattatctcaggagtgctgtgttattattgactgggggcctgctgggaagctagaaatatatctaaaatgtggcaggtggttaattagagcatatgaataaatatatataaatttg

SEQ ID NO: 1025741 - DNA, 120 bp, Artificial Sequence
  ENSG00000244128_110 (sequence is synthesized)
ttaaagcgttcacttatggtaaactatacctcaattaaaaagaaaaaatatgcacaaagaaaataaataatgaatggaaatatgagcctctaaaatcaaagttagaaaagcagatattca

SEQ ID NO: 1025742 - DNA, 120 bp, Artificial Sequence
  ENSG00000244128_111 (sequence is synthesized)
aatttgcagagctgattgtcaactggaatgattgtgatagaatcaagtctcactagctcattggaaataggatttgttaaggtaatgatggttaatgatttttcagcataataacagcca

SEQ ID NO: 1025743 - DNA, 120 bp, Artificial Sequence
  ENSG00000244128_112 (sequence is synthesized)
agttaatgtatgggtgcgtgtgtgtatccataggtgtatgtttttacatgcgtatttttattgtaaaattaacatgtttattgaaaacaagaaagcacagaaaatatcaacttaagtaaa

SEQ ID NO: 1025744 - DNA, 120 bp, Artificial Sequence
  ENSG00000244128_113 (sequence is synthesized)
gatcaacataatttagttcaaaattatattcaacagtgcattatttcaatgttttttatcttaatccatttgcttgaaagcattgatatatgctccaaatttcctcccagattccacttg

SEQ ID NO: 1025745 - DNA, 120 bp, Artificial Sequence
  ENSG00000244128_114 (sequence is synthesized)
gggaaatatttagtatattggattatgaaatgatttatctttacctatattattagtaaagttcttaaaatttttagcctgttactgtctatgtgattagtgatattgttcacatgacta

SEQ ID NO: 1025746 - DNA, 120 bp, Artificial Sequence
  ENSG00000244128_115 (sequence is synthesized)
aaattcaaagataaaatatgattatattttatgggtgaaagttaggaagcaaaatagcatattaatacatttaactaaagtagtattcatttggataatcaaggtcaaacacttcaaaaa

SEQ ID NO: 1025747 - DNA, 120 bp, Artificial Sequence
  ENSG00000244128_116 (sequence is synthesized)
aattttaaagttaatgctttcaaaaaataaattagcaaaaattatttactttgtttcttaaaaagaagaattattgaaaaaaattctaccatcaaaaaatagttgttctatgcctagttt

SEQ ID NO: 1025748 - DNA, 120 bp, Artificial Sequence
  ENSG00000244128_117 (sequence is synthesized)
gtttattttagtcactgaataagactgagcccttgacctcatattttttcctgcctcaccattagcagttaggtttagctatgcaaacctttatttattcaacatatataaaatacttag

SEQ ID NO: 1025749 - DNA, 120 bp, Artificial Sequence
  ENSG00000244128_118 (sequence is synthesized)
tatgcagtagatgttattctaagtgcttggtagatatcaacacatttaataatcaaaacaactctaagaggtaattagtactattatctccattttattactgaggaaaccaaagcacaa

SEQ ID NO: 1025750 - DNA, 120 bp, Artificial Sequence
  ENSG00000244128_119 (sequence is synthesized)
catttgctttcaatagagatcagattctgacctctggaaagaagaaataagggaaaatgtttatgatggggaaggatcaaaggggaacttgtgggaaaggaagaggctgccagaaaagga

SEQ ID NO: 1025751 - DNA, 120 bp, Artificial Sequence
  ENSG00000244128_120 (sequence is synthesized)
gttttgagatctgaaaagagacttgtgtatgtctgagggaagagttggagagaggtaaccaggggagaaaatctgggaagttttgagcagtgaagatctgatgagatggaaaaggagaaa

SEQ ID NO: 1025752 - DNA, 83 bp, Artificial Sequence
  ENSG00000244128_121 (sequence is synthesized)
aggaagaacttaagcgggcggcacttggagtgtaaattgctttgtagtatttaaaggcagaatggatcctgggcagccgagct

SEQ ID NO: 1025753 - DNA, 120 bp, Artificial Sequence
  ENSG00000244125_0 (sequence is synthesized)
ggagttgttgacagcctcctgaaagcaattctgagtgtgaattaagcaagatgctctttgaagaaaggtgctgctcagcataaaagttaaaagtgcaattcaggaagtactgggattctg

SEQ ID NO: 1025754 - DNA, 120 bp, Artificial Sequence
  ENSG00000244125_1 (sequence is synthesized)
ccttcccgggaaggaagcttccgaggaacgaagggagaagctttgttttgcctgcagaagcagccctgtgctcggctgagggttctcagctggctgtgaactgcggagcattgtaggcgc

SEQ ID NO: 1025755 - DNA, 120 bp, Artificial Sequence
  ENSG00000244125_2 (sequence is synthesized)
ctggctggctcaggccaatgcagaagtctctcccttctccaaagacccaaatccccacagaaccagcttcgagttactttcccttcaaggggattaaaataattgtgatttgtggcgctc

SEQ ID NO: 1025756 - DNA, 120 bp, Artificial Sequence
  ENSG00000244124_0 (sequence is synthesized)
tgactagcctagggaataaatgccaaattttacaaacatttcttccacttttgtgcttttctaaaaacaaacaaaaaatccacaactaaataaacaaaattaaaactccacctgctttga

SEQ ID NO: 1025757 - DNA, 120 bp, Artificial Sequence
  ENSG00000244124_1 (sequence is synthesized)
acacacctctctccaaagcaaaagggaaagctaactgaaatccgaatcattaaatctgggtttttcattaacatttcccccaactattctagaagcaaaggatacgtaatagataaacaa

SEQ ID NO: 1025758 - DNA, 120 bp, Artificial Sequence
  ENSG00000244124_2 (sequence is synthesized)
gaagaaaaatgcatttaaaaccttaaggggacccagcactccatccaagcttatctatgcagcctgctcacaggctcctgtatacaggcgcactgtcatgaaattagcacttctacccag

SEQ ID NO: 1025759 - DNA, 120 bp, Artificial Sequence
  ENSG00000268592_0 (sequence is synthesized)
gcgaacttgcagacgttgcggccgcgcgccgtgcagttgaagaggtagcagccgagcacggctgccgggggcgcggggcgccggggcagctccaccacggccacggagcagcgcggctcg

SEQ ID NO: 1025760 - DNA, 120 bp, Artificial Sequence
  ENSG00000268592_1 (sequence is synthesized)
gagcagcaggccgccacgcattgccgccagccccgcacggccgccggcgcccgcaggaagctggcacccgccgccagggagtccttggtgcggatgatggcgtcaggcattgcgctgtag

SEQ ID NO: 1025761 - DNA, 120 bp, Artificial Sequence
  ENSG00000268592_2 (sequence is synthesized)
ccgccgctgcccgggcccgggcagtcctcctgggggccgccgcccgcgcgcagctccagctccagctcctcctgaggccgctcctgctgcagttgccggcggaactcctccagcagctgc

SEQ ID NO: 1025762 - DNA, 120 bp, Artificial Sequence
  ENSG00000268592_3 (sequence is synthesized)
tccacgcccgacagctgcgcgtgcagttcggacagcggcgccgcgggcggcaaggccgcacggccgcttggcagccacaggcagagcagtagcagcccgcgcagcgccccgtgacgcggc

SEQ ID NO: 1025763 - DNA, 120 bp, Artificial Sequence
  ENSG00000268592_4 (sequence is synthesized)
ggtagccggcgctgcgagcccgcgctctcctgggcgacggaggccatggcgacgagagccaagggcagcgagccgaggcggggctgagcgcgggaggaaggcggggacgcgggcgagcgc

SEQ ID NO: 1025764 - DNA, 120 bp, Artificial Sequence
  ENSG00000268592_5 (sequence is synthesized)
ctctaggccccggcctcacagcgcggcgcccccgaacccggctgctcccccgaggtcgcgggcgccggcgggaaccgcagtagcgggagacatagccggcccagccgggcaccgctcctt

SEQ ID NO: 1025765 - DNA, 120 bp, Artificial Sequence
  ENSG00000268592_6 (sequence is synthesized)
tagccggcccagccgggcaccgctccttgccctcgccggagactgcccagcgccctgcgcctctccgccccggcctgcggcgcgctgggtggcgacgagtcggcctcggcgttgatcagc

SEQ ID NO: 1025766 - DNA, 120 bp, Artificial Sequence
  ENSG00000268592_7 (sequence is synthesized)
ggtgtgtgcgaacagtggccgcggcggggtggagccttggatgaaccgttgtccacattctgttttctgagtcaaagaggaggaagatctgtccatcgaaactgagctgccaagatccac

SEQ ID NO: 1025767 - DNA, 120 bp, Artificial Sequence
  ENSG00000268592_8 (sequence is synthesized)
tgccgtgtccttcggctttctgctcacaagacatcctggcctgcagggtgaggggttctgcccccatcaaagagagatcagctctggccttgacagatattgagcccccatcctcttcca

SEQ ID NO: 1025768 - DNA, 120 bp, Artificial Sequence
  ENSG00000268592_9 (sequence is synthesized)
cttgcaatttcctggtcttacttgctctgccacatcctggccttgcctctagacgtcttgcggggtgagatgaccttcctatttgtatttttacatgaaaactataaatgcctctaacct

SEQ ID NO: 1025769 - DNA, 120 bp, Artificial Sequence
  ENSG00000268595_0 (sequence is synthesized)
gcgcgggtctccagagcctgagctagtcagaagcaacagttgctactgcgtcccccggacattgggagaatcgttttccttgggcagctggttccagacccccaccagtcctctagactc

SEQ ID NO: 1025770 - DNA, 120 bp, Artificial Sequence
  ENSG00000268595_1 (sequence is synthesized)
caggccaatcagttgctaagggacgttcctctctcaacctgcacttatcaacattttaagctataaattcgtctgcatttcttcatcgtctgtctatgtagaccatgactccacggaggc

SEQ ID NO: 1025771 - DNA, 120 bp, Artificial Sequence
  ENSG00000268595_2 (sequence is synthesized)
ctggctcctggcgaactccctgactatgcttaatctcaccgcctgactgttcagatttagcctctgtctgaccaaagggctctcaggggcctcactggcacgagagccgccctggtggcc

SEQ ID NO: 1025772 - DNA, 120 bp, Artificial Sequence
  ENSG00000268595_3 (sequence is synthesized)
taaccgacctgcggctgccccacggcccaaggatccgctgactgacgctgactggaagcccagttagtgcagtttcaatgaaggaacccaacaaccgccaacaactgccagggacccaac

SEQ ID NO: 1025773 - DNA, 120 bp, Artificial Sequence
  ENSG00000268597_0 (sequence is synthesized)
cacgatgatctctgtggtcagggaccacgcagaagactcacatcatgttggtggtgggcccaacaatatgtcacaatgttttctgagaagaaggtcaaggaaagacagacctggaaatac

SEQ ID NO: 1025774 - DNA, 120 bp, Artificial Sequence
  ENSG00000268597_1 (sequence is synthesized)
agaaaaattgcaaccattagtcctttatctacctatgacctggcagctcccgccctgcttcgagttctcccactttcctggacaatgtacaccttccatatatcgattaatgtctcctga

SEQ ID NO: 1025775 - DNA, 120 bp, Artificial Sequence
  ENSG00000268597_2 (sequence is synthesized)
ctcctaaaatgtataaaatcaagctgtgacccaaccaccttaggcccgcgttgtcacgacctcgtgaggcggtgtcacgggtgtgtctttaatcttggcaaaataaactttctaaattga

SEQ ID NO: 1025776 - DNA, 120 bp, Artificial Sequence
  ENSG00000245832_0 (sequence is synthesized)
gagccggctccggcctcggccagcccagaaaggggctcacacagtgcagggccgggctgaagggctccttaagggcggccagagttggcgccaaggctgaggaggtgcccagagcgagcg

SEQ ID NO: 1025777 - DNA, 120 bp, Artificial Sequence
  ENSG00000245832_1 (sequence is synthesized)
ggaggtgcccagagcgagcgagggctgccagggctgctagcaggctgtcacctctcaatagcagttttgtatatgggatctagcccctccctaagaggttgattctaaggaagccaacag

SEQ ID NO: 1025778 - DNA, 120 bp, Artificial Sequence
  ENSG00000245832_2 (sequence is synthesized)
agttttcattttcatcaagggaagacttcaactgtattagaacatggttatgttgtataacttggggacattgaggaaaagtaaaaacagtgacatgtatgtgactacaagcttttagag

SEQ ID NO: 1025779 - DNA, 120 bp, Artificial Sequence
  ENSG00000245832_3 (sequence is synthesized)
ctttttgttttattgtaataagagtacttaaaggagaactacccttttaacaaaactttaagtgtacaatacagtaatgtttaattatgggaacagtgttgtacaataaatctctagaac

SEQ ID NO: 1025780 - DNA, 120 bp, Artificial Sequence
  ENSG00000245832_4 (sequence is synthesized)
acagcactgaggccctgagacctgccaactgtcatgatcttccgatgcctggacacagaaagagcagtggaaggggtcgttgcatgagcaaagacaaagagtgggacactgactgttaca

SEQ ID NO: 1025781 - DNA, 120 bp, Artificial Sequence
  ENSG00000245832_5 (sequence is synthesized)
caaagacaaagagtgggacactgactgttacatctcaaggagaaggattgccagatcaaaagtcttgcagttaaccaggcgtggtggcagatacctgtaatcccagctattcgggaggct

SEQ ID NO: 1025782 - DNA, 120 bp, Artificial Sequence
  ENSG00000245832_6 (sequence is synthesized)
cactgtattaactccataatcatctaaattttattgggaacagctagtttgacaagcatagaccagatgtccagttgtcattcattcagcaggagcagcaagattcaatcatgtttttat

SEQ ID NO: 1025783 - DNA, 120 bp, Artificial Sequence
  ENSG00000245832_7 (sequence is synthesized)
tatattatttcctgaaacttgtggctgtaacaatgaagtttgaggattggtctgtgtaagtatggcagaagtgatgttaagtcgcttatgagattagggtataaaagactaaggcttcca

SEQ ID NO: 1025784 - DNA, 120 bp, Artificial Sequence
  ENSG00000245832_8 (sequence is synthesized)
tgcttccatcttggtctctgtctctcagagaacagtcatgtgaatgattcttcttgaaagtaaatcttccagccccagtccagtattcaaatgatccagcaacattgcaacttatgagag

SEQ ID NO: 1025785 - DNA, 120 bp, Artificial Sequence
  ENSG00000245832_9 (sequence is synthesized)
accttgagccatccaggtaacatgcttccaaatcctgacccttaaaacctgtaaaataataaatgtggttttaaactcttaagtaatttgttacatagtaataaatagctaatacaccgt

SEQ ID NO: 1025786 - DNA, 120 bp, Artificial Sequence
  ENSG00000245832_10 (sequence is synthesized)
taactccataatcggtttattcataatgctgcatcatccaaccatcatccaacctatttatcattcacaatgccacctgtgaatactggcttccattgactctttcaagaattgctactg

SEQ ID NO: 1025787 - DNA, 120 bp, Artificial Sequence
  ENSG00000245832_11 (sequence is synthesized)
ggcctcaccaatgttgaccacaaatgcaagtcatactgagagtatgtagtacatgtgaataataattagttttcttgtcatattaaacatatcattcatactagtatgaacatagagaaa

SEQ ID NO: 1025788 - DNA, 120 bp, Artificial Sequence
  ENSG00000245832_12 (sequence is synthesized)
cattgactcctgcctgatgacaagagagaatctacgtctcaacaacaacaacacgcttgggcactgtattaactccataatcgtccttttccaggcaggaaatataacactgaccagaga

SEQ ID NO: 1025789 - DNA, 120 bp, Artificial Sequence
  ENSG00000245832_13 (sequence is synthesized)
accaagttcctctcttgtatggattgtttctgttaattatcactcaaatctgaacggtgtggtaggacggagggataccttgaaatctaagaaaaggggaaaaaagtgcaatcgctacag

SEQ ID NO: 1025790 - DNA, 120 bp, Artificial Sequence
  ENSG00000245832_14 (sequence is synthesized)
tgatactttagcagaagtttctattgctaagtattgtggagctcagaggaagaagtaaaggcttcaagacgttgaactttaagctgagtcttgaaggcggagtcttcaagttaaagaaga

SEQ ID NO: 1025791 - DNA, 120 bp, Artificial Sequence
  ENSG00000245832_15 (sequence is synthesized)
ggggttaaggaaagtccagggagaaggaactgcatgagctgtgaagaaccatgatgcattcttggaattggtagcattccctttgaaatatggattgaaacccaggaagcatgaaagaaa

SEQ ID NO: 1025792 - DNA, 120 bp, Artificial Sequence
  ENSG00000245832_16 (sequence is synthesized)
caagaattcaaaactttaaattaagacaagactatggtaaagagtttggcattgaacattcaggaaatgtaacaactagaacgagtataaagggaataaaatgcaatttgtgtttttata

SEQ ID NO: 1025793 - DNA, 120 bp, Artificial Sequence
  ENSG00000245832_17 (sequence is synthesized)
gcaagtcatactgagagcctctgtgctctttcccctgtggacaataactaccatttcatcctggacacccattgtttgcctggaccacaccttgttatgaccataaccctcagtcagact

SEQ ID NO: 1025794 - DNA, 120 bp, Artificial Sequence
  ENSG00000245832_18 (sequence is synthesized)
gggcaaccatagaaaaggattgatgtaagtgtccactgtccctgcttgtaaccctggacttcagagtgatgttggaggaaaactgggaacctctacagacttgagctgctacaaagcctt

SEQ ID NO: 1025795 - DNA, 120 bp, Artificial Sequence
  ENSG00000245832_19 (sequence is synthesized)
ctacagacttgagctgctacaaagccttggtttcctttctcagctcctggcttgcagttagttgtgtccatgtgactgagtcttttttttttgttttgagatggagtctcactcttgtcg

SEQ ID NO: 1025796 - DNA, 68 bp, Artificial Sequence
  ENSG00000245832_20 (sequence is synthesized)
tcactcttgtcgcccaggctggcgtgcagtgccatgatctcggctcactacaacctccatctcccagc

SEQ ID NO: 1025797 - DNA, 120 bp, Artificial Sequence
  ENSG00000245832_21 (sequence is synthesized)
tcctgacctcaagtgatcctcccgcctctgcctcccaaagtgctgagattaccatgcccggcctgtgactgagtcttaggtgatggaatgtgagcggaagtgatacacatcacttgtgag

SEQ ID NO: 1025798 - DNA, 120 bp, Artificial Sequence
  ENSG00000245832_22 (sequence is synthesized)
ggaatgtgagcggaagtgatacacatcacttgtgagtctggtccatagaactctctacatagaaatctccaagtcatttgtccttttgtggtgtgatgcagatgagcatggcagttttgg

SEQ ID NO: 1025799 - DNA, 120 bp, Artificial Sequence
  ENSG00000245832_23 (sequence is synthesized)
gattcatgtgttgaagatggaatcacaagatgcaatgaatctgggtcttcaagtcaccacttggaggagagctacctgtccatgaagaacacctcttttggactttccatagcaagaagt

SEQ ID NO: 1025800 - DNA, 120 bp, Artificial Sequence
  ENSG00000245832_24 (sequence is synthesized)
tggaacttcagtgcagagggttgaagtaatcatattcttcagttgaagagactaaaacaactttaccagattgaaacactcaagacaaaggagcccaggaacaaaattcatcagaaaact

SEQ ID NO: 1025801 - DNA, 120 bp, Artificial Sequence
  ENSG00000245832_25 (sequence is synthesized)
agaggaagttttcatggagttgctgtgagttagaaacttttaatgaatccggttgtattgtttaccaagttaagatcctctcagatgtcaggagatagatgtgtagatgtcagcttataa

SEQ ID NO: 1025802 - DNA, 120 bp, Artificial Sequence
  ENSG00000245832_26 (sequence is synthesized)
atgaaggaggcctgagataagttggaagaaaaactggctaccaagagggatagcattttttttttgttgttaaatcaaatatttatgagactgggctttgatttccccatggtttaacaa

SEQ ID NO: 1025803 - DNA, 120 bp, Artificial Sequence
  ENSG00000245832_27 (sequence is synthesized)
ttcaagggaaagataatttttgagagatacttaaggtgttggagtaattcaggtaactgtacctagtatgaaaataatcactagaatttcgaatgcatacaaattgtgatgggagtagaa

SEQ ID NO: 1025804 - DNA, 120 bp, Artificial Sequence
  ENSG00000245832_28 (sequence is synthesized)
gaaaatttgcaatgttaatacatgatgatgtaacatgttcaaatgattaaaatatgtcctagtgtcatagacatgattctatctcttgtcagtacagaacatttggttttgattttggat

SEQ ID NO: 1025805 - DNA, 120 bp, Artificial Sequence
  ENSG00000245832_29 (sequence is synthesized)
tttactaatgtttattgaatgcctatcatgtgttggacacatgataggttttaaaatctttaatgattactaaatccattaaatatatattatttcattttttaggtaagaaaactgata

SEQ ID NO: 1025806 - DNA, 120 bp, Artificial Sequence
  ENSG00000245832_30 (sequence is synthesized)
ttcagataagttaaatggtgctcaaagacacagagttagtaaggtaaaagttggacttgatactcaggtctgtatgtctgtatgacatcaaaatccatgatcttttcctgatataatttt

SEQ ID NO: 1025807 - DNA, 76 bp, Artificial Sequence
  ENSG00000245832_31 (sequence is synthesized)
tatgacatcaaaatccatgatcttttcctgatataattttttttgttttggagacaagatcttactttgtctgtca

SEQ ID NO: 1025808 - DNA, 120 bp, Artificial Sequence
  ENSG00000245832_32 (sequence is synthesized)
tagctgggattacaggcacatgccattatgcctggcctaatttttgtattatttgtagagattgcgtctcattatgctgcccaggctggtcctgaacccctgggctcaagcaatccaccc

SEQ ID NO: 1025809 - DNA, 75 bp, Artificial Sequence
  ENSG00000245832_33 (sequence is synthesized)
acccatcccagccccaattctagcattcttaaactataatttctggatcaaagaagattatggagacttggcttg

SEQ ID NO: 1025810 - DNA, 120 bp, Artificial Sequence
  ENSG00000245832_34 (sequence is synthesized)
gaggacacagtgtttgttccctctaggggacacaacaacaaggcaccttcttgggtcctagaagacggggtcctcaccaaacaccaaacctgctggcaccttgatcttgaactttcagtc

SEQ ID NO: 1025811 - DNA, 120 bp, Artificial Sequence
  ENSG00000282375_0 (sequence is synthesized)
ggctgttgctgtctccggctccttcgctaacgattgcaggagaaataatgaggatgtaattattacagccctgcgcggagggctggggggcggcggacgcgggctcctctgcctgcgcgc

SEQ ID NO: 1025812 - DNA, 120 bp, Artificial Sequence
  ENSG00000282375_1 (sequence is synthesized)
ccaggtggggctgggctgggctgggctgggctgggctggactggacgcctctccccgcccggccctccctcagcgcgcggcgtgtgcggtgcccgaggcttcggagcaggctggacctgg

SEQ ID NO: 1025813 - DNA, 120 bp, Artificial Sequence
  ENSG00000282375_2 (sequence is synthesized)
gaacccggggaggggcctggaggagagatagctgggcgaggtgggcgccggcgagaaggcggagcccccggacagcgtaggttcgcaggtggagagcggacgcgggggcgagggtgcgcg

SEQ ID NO: 1025814 - DNA, 120 bp, Artificial Sequence
  ENSG00000282375_3 (sequence is synthesized)
gcggcccccggtcccggccctgcgcgcttggagcccgggtccttccagcccctgcgcgacgccgccgccgccgccgccggtgaatggcgatcccggccacggcctggaattggaaattcg

SEQ ID NO: 1025815 - DNA, 120 bp, Artificial Sequence
  ENSG00000282375_4 (sequence is synthesized)
ccggccacggcctggaattggaaattcgtgacttgtcggcggccccggtcttctatcgattaaagataaagcgatcagcagtgaatttatccttcgtgtggatgaactcggccagcccgg

SEQ ID NO: 1025816 - DNA, 120 bp, Artificial Sequence
  ENSG00000282375_5 (sequence is synthesized)
gctgtggggggtttgggaactgtaaatattctccaaagcgccgccgcttctcccgtcttcccggactcgaggctggaggcagctccggcgacgcgaaggggggtaccccccggagaggtc

SEQ ID NO: 1025817 - DNA, 120 bp, Artificial Sequence
  ENSG00000282375_6 (sequence is synthesized)
gggcctggggcgcggcggacagagacccggtcccagagcctggcggagcccgacaatccgccctgtcaggaggaatctcatcaacagcccgtgaattaattgtccttgcagttgggaaat

SEQ ID NO: 1025818 - DNA, 120 bp, Artificial Sequence
  ENSG00000282375_7 (sequence is synthesized)
gagtccaggaggctctccaaggagccttcccccgggtcgcgaagctgcgctaaaccccggccccagcgcaccttggaaggcgcattttggcctgaggtgaacgcaccttacaccattttc

SEQ ID NO: 1025819 - DNA, 120 bp, Artificial Sequence
  ENSG00000282375_8 (sequence is synthesized)
attttacttccttttctctgagaaaggtaatagataaccaaggccaaaaatggcgaaatgatgaaaaaatggtaattcttggcaggtcaagttgttactctgggtttaaaaaaatgtcat

SEQ ID NO: 1025820 - DNA, 120 bp, Artificial Sequence
  ENSG00000282375_9 (sequence is synthesized)
taatcaggattttccagtagccaaattgtcttgtgccggcagctgggtgactcacagatttggctccaatagtaattgtagagtgtgcgtaccatttccttctggatggtgtgacttttt

SEQ ID NO: 1025821 - DNA, 120 bp, Artificial Sequence
  ENSG00000282375_10 (sequence is synthesized)
cattgcttggaagagaacacattagaatattttatcccctacatctggcagcatgtggagcaggctgtaggcaatactctgtccaagcacatctgggcggggaggccgtggagggaccga

SEQ ID NO: 1025822 - DNA, 120 bp, Artificial Sequence
  ENSG00000282375_11 (sequence is synthesized)
ggtgacacagagccggccctgtcctcggttctgtctcgggtcacctgaggcatcttcaccgcggcagctcgggcgcgtgggatctgctctcagtgatgacctgggacgcatcctgcctct

SEQ ID NO: 1025823 - DNA, 120 bp, Artificial Sequence
  ENSG00000282375_12 (sequence is synthesized)
gtgcgccattcctgccccttcactgtcactccttggtgatcgcccgtgttcttgggtaagcagtggagaggcacagaatggcttcctctgttgatctaccgcgtcaaatctgtatattat

SEQ ID NO: 1025824 - DNA, 120 bp, Artificial Sequence
  ENSG00000282375_13 (sequence is synthesized)
aatttcaggttaaagggtaagagttgtaagcaaaatgagtactacgtcaaataattcaaaggaacgaagtaattaaaagtaaagctttctcagcacgaagatgttttctcagataagcat

SEQ ID NO: 1025825 - DNA, 120 bp, Artificial Sequence
  ENSG00000282375_14 (sequence is synthesized)
tctaagtcaacttttcatagtattcaatgtctatttgttattcttcgaaagaactttgcacttatgattgtccaaagtggtacagcttgagacagaaataaacatgtatttatttaccaa

SEQ ID NO: 1025826 - DNA, 83 bp, Artificial Sequence
  ENSG00000287069_0 (sequence is synthesized)
tcctgaccacccccacaacagccatgtgaaacctacagccactgaaaactaggagacaaaaccgagcctggacaagccctgca

SEQ ID NO: 1025827 - DNA, 120 bp, Artificial Sequence
  ENSG00000287069_1 (sequence is synthesized)
gaaaactaggagacaaaaccgagcctggacaagccctgcaaagtgactctgaggaggacgacaagccctgctccagtcacatccagaagctgactggtctacgcacggctgaagcatgag

SEQ ID NO: 1025828 - DNA, 120 bp, Artificial Sequence
  ENSG00000287069_2 (sequence is synthesized)
gagaatcatcgtaaaactcattttccttataatttggacttgtatagtaaaaacttccactgattttccccgcatgaaagactactcttagtgtatacatcaggttactgagattcttgg

SEQ ID NO: 1025829 - DNA, 120 bp, Artificial Sequence
  ENSG00000287069_3 (sequence is synthesized)
ccttcccaccctaccccgcatgatacagatacacttttaggcatctgcaatggatacgcttgctccagccaaagggtattgaaaaaagcatgaacagctaatatgaatgtcaaaaggaag

SEQ ID NO: 1025830 - DNA, 120 bp, Artificial Sequence
  ENSG00000287069_4 (sequence is synthesized)
tctttattgaagaaggcacaaaaccctggaagcataaatcgccacaagcatttaaaacctgaacatgcgataaataaatcaaccttaaaggccatgtggcggggagctctttactcacca

SEQ ID NO: 1025831 - DNA, 120 bp, Artificial Sequence
  ENSG00000287069_5 (sequence is synthesized)
ctgtgacgttgaaagcatacagaagatcaaaaggcagggcagcgattaaatcaatgatgaaccaggttgtgacatagtggatgcaaattgatcttgcttcaaagataacttggccagact

SEQ ID NO: 1025832 - DNA, 120 bp, Artificial Sequence
  ENSG00000287069_6 (sequence is synthesized)
tgctgacataagttgttcggaaatttaaaataatatctgcttgggaaaaaaaaggttgagaaataaaaggaagagacagagaagaataaagaaggtaggaaggacaatgaaagaaagaag

SEQ ID NO: 1025833 - DNA, 120 bp, Artificial Sequence
  ENSG00000287069_7 (sequence is synthesized)
aaaggaagggagacaggcaggcaaacaagcaggaaggaagggaggaagaaaatcgtagaaaattaaataaaattaggcaaatggcaaccacttagcctagttcagattgataatatccaa

SEQ ID NO: 1025834 - DNA, 120 bp, Artificial Sequence
  ENSG00000287069_8 (sequence is synthesized)
gagttaagactttgggggactgttggaaacacatgtttgtgttttgacatgtgaaaatatgatatttgggaggggccggggtggaatgatataatttgactgtgtctccacccaaatctc

SEQ ID NO: 1025835 - DNA, 120 bp, Artificial Sequence
  ENSG00000287069_9 (sequence is synthesized)
ttcgtgatagtgagtaagttttcaccagatatgatggttttataaggggtttccccctttgctaggctctcattcttctctcttctgctgccatatgaagacggatgtgtttgctttccc

SEQ ID NO: 1025836 - DNA, 75 bp, Artificial Sequence
  ENSG00000287069_10 (sequence is synthesized)
tcttctgctgccatatgaagacggatgtgtttgctttcccttccatcataattgtaagtttcctgaggccttctt

SEQ ID NO: 1025837 - DNA, 120 bp, Artificial Sequence
  ENSG00000287069_11 (sequence is synthesized)
ccctgccccgcggggaggcagctaagtcccggcgagaatttgagcgcagcgccggcgctccggcactgctggggaagccggcgcaccctccacagggccggccagccggccgctccgagt

SEQ ID NO: 1025838 - DNA, 120 bp, Artificial Sequence
  ENSG00000287069_12 (sequence is synthesized)
acgcccacccggaactcgcgctggcccgcgagcacccgcgcgcagcccgggttccctcccgcgcctctccgtctacacctccccgcaagtagagggagccggctctggcttccgccagcc

SEQ ID NO: 1025839 - DNA, 87 bp, Artificial Sequence
  ENSG00000287069_13 (sequence is synthesized)
gcctcctcaagcgtgggcggagtgggcaccgaggccgaggaggcactgagagcaagggctgccagcacgctgtcatctctcactttc

SEQ ID NO: 1025840 - DNA, 120 bp, Artificial Sequence
  ENSG00000287069_14 (sequence is synthesized)
gagagcaagggctgccagcacgctgtcatctctcactttcatgggtctccatattttaaaaagctaaagaaaggacttcaattatgtctccaggagaaatcaagagaagagtccaagttt

SEQ ID NO: 1025841 - DNA, 87 bp, Artificial Sequence
  ENSG00000287069_15 (sequence is synthesized)
attatgtctccaggagaaatcaagagaagagtccaagttttaagtctggatcaatacaatattggaaaaatcgccatgattttaagt

SEQ ID NO: 1025842 - DNA, 120 bp, Artificial Sequence
  ENSG00000287069_16 (sequence is synthesized)
tacagatccagttcaactaaacagatactgaagaagggtgaaagtaatattttctgagcacataatgttccagacatgaagctacatgttaagattattaaaataaataatcgtagcaat

SEQ ID NO: 1025843 - DNA, 120 bp, Artificial Sequence
  ENSG00000287069_17 (sequence is synthesized)
agcaacaatagtcatcacttactaagtgttcactatgtacccaatattgttctaagagcttggcataggatatttcacttaatcctcagtacatctcctgaagtagacagtgttactctg

SEQ ID NO: 1025844 - DNA, 120 bp, Artificial Sequence
  ENSG00000287069_18 (sequence is synthesized)
attaaagagtcagaaatcaagtcccaggaagaaaaagtaattcatccaagatcatattgccaagagtggcagagtcaagttttaatacagatacaagccgggcatggtggctcatgcctg

SEQ ID NO: 1025845 - DNA, 120 bp, Artificial Sequence
  ENSG00000287069_19 (sequence is synthesized)
taatcccagcactttggaaggacgaagcaaaagaattgcccgagctcagaagttcaggatgagtctgggcaacaaaacgagaactcatctctattaaaattcaaaaaaaattagctgggc

SEQ ID NO: 1025846 - DNA, 120 bp, Artificial Sequence
  ENSG00000287069_20 (sequence is synthesized)
atactggcacatgtctgtagtcccagttactccagagactgaggtggaagaatcacttgagcccaggaagttgaggcttcagtgagccatgattgcaccatgcactccagcctgggcaac

SEQ ID NO: 1025847 - DNA, 120 bp, Artificial Sequence
  ENSG00000287069_21 (sequence is synthesized)
agagtgagaccctgtttcaaaaacaaaaacaaaaaacccactaaatataatctgaaatctatattccttattttatataatattacttatttccatgtataaaagttttactaatctctg

SEQ ID NO: 1025848 - DNA, 120 bp, Artificial Sequence
  ENSG00000287069_22 (sequence is synthesized)
tgtcgatatggaattcagccctgccctgaaggcactcctattaacaaagtactggtagtttcttgtgtgaatttctgggttaaattctattttaatgaaagatgtaattgttttcaatct

SEQ ID NO: 1025849 - DNA, 120 bp, Artificial Sequence
  ENSG00000287069_23 (sequence is synthesized)
ttccctgcatcattatttagttatatattatcgagcgttttacaatatatgaggtcctcctgagtgctgatcaaatgacatccgtgtgagtttccaacagccctatgagcttgaaagaag

SEQ ID NO: 1025850 - DNA, 120 bp, Artificial Sequence
  ENSG00000287069_24 (sequence is synthesized)
accctgagcaggagaaaggaacacaactcagctgatattttgatgtcagccttttgaattcctgatcggaggatccaactaagccatccctggacttttgacatatagcaactgtaagac

SEQ ID NO: 1025851 - DNA, 120 bp, Artificial Sequence
  ENSG00000268049_0 (sequence is synthesized)
ggtggggccccaagtgtcaagaaggtggagactccagtttgtgaggaacacgatggacccgtctccattcctgaaggctggaggacaccgcctgacccaaacacagctatgtctgcctca

SEQ ID NO: 1025852 - DNA, 120 bp, Artificial Sequence
  ENSG00000268049_1 (sequence is synthesized)
cccactccaccctggccggatccctgggtagtcccctccacacagtatgggcagcatgtccaggctggaggatctcagtggctgttacccaggcaatgtccacaccaggcctctgtgcag

SEQ ID NO: 1025853 - DNA, 120 bp, Artificial Sequence
  ENSG00000268049_2 (sequence is synthesized)
ttctcaggacacaatgcggagcacacaggtgtggactggagatctctgactctgccgtccaagccaagaccaccaaactcccacctgtcaccatcactttcccacagcccccaggccctc

SEQ ID NO: 1025854 - DNA, 120 bp, Artificial Sequence
  ENSG00000268049_3 (sequence is synthesized)
tcagccaccaacccacgactggccccagtgctggctcagctggggtcgtgagcaggggaagcacacccagcccccagaccagcccccactcatctggagtcctggcccagctgactcctg

SEQ ID NO: 1025855 - DNA, 120 bp, Artificial Sequence
  ENSG00000268049_4 (sequence is synthesized)
ctgggagcagtgtgcccaataactgctccagcaccaagagctccagcatctgctccttggagcaggcctcaggcatcagccactggcaacacagctcacgcagctgagccagggcccctc

SEQ ID NO: 1025856 - DNA, 120 bp, Artificial Sequence
  ENSG00000268049_5 (sequence is synthesized)
ggggccctgctgccttctcatagcagaacccccagaagcactggccagggctcttggagctgggctcacccaccatcagttccagtggactcgggaagacctggggggccagggctgatg

SEQ ID NO: 1025857 - DNA, 120 bp, Artificial Sequence
  ENSG00000268049_6 (sequence is synthesized)
cctcactcatctgggcagccatcctgcccctttcctgggaggggagtgcagctgcatggcccagggtactttctctgcagctggaaacacaaaggtgagcctgtgagcacagcaaggcca

SEQ ID NO: 1025858 - DNA, 120 bp, Artificial Sequence
  ENSG00000268049_7 (sequence is synthesized)
cgaaggtcccctccttgggaccacctgagactgagtaaaaatggaagaatgggggtatcggcgtttctggcccccagtgtcagcatctttgcccacctgtgtgtccaggtgcctgaggga

SEQ ID NO: 1025859 - DNA, 120 bp, Artificial Sequence
  ENSG00000268049_8 (sequence is synthesized)
cacactgaggtgccatggctgcttgtaccatcccttccccccgcctccccgcttttcttgagggtccctgccctgccctgtctccttggcacccttcatcccacacacagaacaactaag

SEQ ID NO: 1025860 - DNA, 120 bp, Artificial Sequence
  ENSG00000287063_0 (sequence is synthesized)
tattaataattgttcattaaaatcattgtgtctcagaggcaaccacatttttctagtcaattttggctttaattgtggctgtcctaagacttttggtcatccaaaagtggtcttgttttg

SEQ ID NO: 1025861 - DNA, 120 bp, Artificial Sequence
  ENSG00000287063_1 (sequence is synthesized)
gttctctttaaaaggtggtttagaattaactgtaggactctactggtgcttttaaatgcagatttctgataagtttggacattgtgacatcagaacagagggaaacctttcaggactcag

SEQ ID NO: 1025862 - DNA, 120 bp, Artificial Sequence
  ENSG00000287063_2 (sequence is synthesized)
ggagagctaaaatgttcataaatatcaagcagaacagaagttaactgcatggactaaactagcaaaagtctaaagtaacctttttaactttttgtgtaaaatgttgctgatcttttgtgt

SEQ ID NO: 1025863 - DNA, 120 bp, Artificial Sequence
  ENSG00000287063_3 (sequence is synthesized)
ttcagagtcaagaaaacttttgagctattatagcttttagcaattgagtaaagtatacttgtgtgaacaaaattgagagcatatttttttctttttacctgatttctctggattttgtaa

SEQ ID NO: 1025864 - DNA, 120 bp, Artificial Sequence
  ENSG00000287063_4 (sequence is synthesized)
atttatggcaatatagttatttgcatgagtgtaataagaatctgttgggttttgttttgttttctttattattattattatttttggcaacaagacacaattggagaaactgattatttt

SEQ ID NO: 1025865 - DNA, 120 bp, Artificial Sequence
  ENSG00000287063_5 (sequence is synthesized)
ttggagaaactgattattttacgaagactttgatggaatggtatactctcctttaaggaatcaaacttgacttgccaagtcaataaaagccccttggagaaatggcctcagacctttgct

SEQ ID NO: 1025866 - DNA, 120 bp, Artificial Sequence
  ENSG00000287063_6 (sequence is synthesized)
acaacagtccctgtacgtgatttctgacctgtggtaagtaaataatgtcaccttctaacaggtccaggagccccaagttatcttgggaccccaagaggagaggaatttactaaactcata

SEQ ID NO: 1025867 - DNA, 120 bp, Artificial Sequence
  ENSG00000287063_7 (sequence is synthesized)
ggtatttgagggtacaaacccatggtagggctcagctcaaaaagagtcttatctaagattccttctaagaaacaaagtttcatcaaagccagtgttaaaagtctatgtgaaaaataatta

SEQ ID NO: 1025868 - DNA, 120 bp, Artificial Sequence
  ENSG00000287063_8 (sequence is synthesized)
atcaggccaagtataataaagcaaattagtctcactatgacttatctttagtgaaaatggaaaacaggagagagaatattatgtttcaagacctatgttacacttgttattaaattctag

SEQ ID NO: 1025869 - DNA, 120 bp, Artificial Sequence
  ENSG00000287063_9 (sequence is synthesized)
gttacacttgttattaaattctagtctcatcagttgttaagtttgtttctgcagtttaggctaaccctgcttcttcctgtgaaccaaccggtgatctttgtttgctactctgaaaaaaca

SEQ ID NO: 1025870 - DNA, 120 bp, Artificial Sequence
  ENSG00000287063_10 (sequence is synthesized)
agacattttggtaatgtaaaaatctggatcagtattctaattctgggcatgtattggaattggctaaccacctcatgtcagcttggttccagtagttgcccagttcatgaagagccttat

SEQ ID NO: 1025871 - DNA, 120 bp, Artificial Sequence
  ENSG00000287063_11 (sequence is synthesized)
aatttagtttatttgggataattttgcttattttgttatattgctgttttactctttgtgtaggaatgcagactaagcttgctaaatgttttcttaaactaaatacttattagtctttca

SEQ ID NO: 1025872 - DNA, 120 bp, Artificial Sequence
  ENSG00000287063_12 (sequence is synthesized)
gatatcacctttcatcaggactcaagagttctgaatggccttcatcatactgaggctttctgactgagctcctctctaccctgaacacagagaccctaatagttaggcaggaatatcatt

SEQ ID NO: 1025873 - DNA, 120 bp, Artificial Sequence
  ENSG00000287063_13 (sequence is synthesized)
caaccttaggattaagggttctcttataaaagggagggaggaaatgtctaagacatgtgaactagagcaacttcatcctgaagaggagctgagtaaaataaggctgaaacctactgggct

SEQ ID NO: 1025874 - DNA, 88 bp, Artificial Sequence
  ENSG00000287063_14 (sequence is synthesized)
gataggaggttagcacaagatacaggtccttaaaaccagccaaaacccaccaaaaccaatatggccacgagagtgacctctggtcatc

SEQ ID NO: 1025875 - DNA, 88 bp, Artificial Sequence
  ENSG00000287063_15 (sequence is synthesized)
ctcactgctacactcccaccagcgccataatagttcacaaataccatagcaacatcaggatgtaaccctgcataaataatgccataat

SEQ ID NO: 1025876 - DNA, 88 bp, Artificial Sequence
  ENSG00000287063_16 (sequence is synthesized)
cccttgtttagcatatgatcaagaaataaccataataataggcaaccagcagccctcagggatgctctgtctttggagtagccattct

SEQ ID NO: 1025877 - DNA, 120 bp, Artificial Sequence
  ENSG00000287063_17 (sequence is synthesized)
tttcttgcacaagatccaagaaccctctcttggagtctgattgggacctttttcttgtgacagattctgccagtttctgttcttggcaggttccatttctacaaattcctcatctctata

SEQ ID NO: 1025878 - DNA, 120 bp, Artificial Sequence
  ENSG00000287063_18 (sequence is synthesized)
ggttccatttctacaaattcctcatctctataggtttaggatcagaatgttccagcaggggagcattacagctgtttcaatcctcagggagactactcatcttgggaataattccttcct

SEQ ID NO: 1025879 - DNA, 120 bp, Artificial Sequence
  ENSG00000287063_19 (sequence is synthesized)
ggagtgattggaaaataattcctaaaagaaattgaaaagtcaaattgttgaacgaactgagctggtctaaaggtgcatatcttggtaaggctctgtgaagaaatgacctaatctggagag

SEQ ID NO: 1025880 - DNA, 120 bp, Artificial Sequence
  ENSG00000287063_20 (sequence is synthesized)
aagctgttgggacactcgtctgtgtgtggcctgtggctcacagggggctcatgaacgtcacagaccctgagataccggtctcactgtcctcaactatcaaatgaggaggttgcaccaaag

SEQ ID NO: 1025881 - DNA, 120 bp, Artificial Sequence
  ENSG00000287063_21 (sequence is synthesized)
aacccctaaagcccctcccacctctaatcgcctatgggactgtccattcttcttaaggatcattatagacacacagcagggaacataaagtagacaaattctgagaaacagctaagaaaa

SEQ ID NO: 1025882 - DNA, 120 bp, Artificial Sequence
  ENSG00000287063_22 (sequence is synthesized)
gtactacagacccaccagaatgggagtataaattgggcttcatctgccccattgcaacctagacttcctttgccttatgatttggctcaatggcatctgtgacaaggtagcttgaagttg

SEQ ID NO: 1025883 - DNA, 120 bp, Artificial Sequence
  ENSG00000287063_23 (sequence is synthesized)
acaccagtgcatccctggagattggatgggctgggctcagaatcccatacatcctttacagccttttttttcctcaccctatccataccctcaccctactagaattatgcatgcacttgt

SEQ ID NO: 1025884 - DNA, 120 bp, Artificial Sequence
  ENSG00000287063_24 (sequence is synthesized)
tgaaaacagccctagcaaagtaaatctaggctccttaggccatgattaagggcccttgaagaagtcaaattacctaagaaactctagacatgcactctccaatatgcaagccactagttc

SEQ ID NO: 1025885 - DNA, 120 bp, Artificial Sequence
  ENSG00000287063_25 (sequence is synthesized)
gtgtctactgagctcctgaattgtggctagtgctaatggagatgtgctgtaagcatgaaatgcacaccagatgtacaagacttagtatgaaaaaatatattaaaatctcattaatagtaa

SEQ ID NO: 1025886 - DNA, 120 bp, Artificial Sequence
  ENSG00000287062_0 (sequence is synthesized)
attcatttcccccttggtgtggagaacacagcagtacaccagggcccctctgtctgctggtgattggaggagaaagcaagccatctattgcagaaacatgccagcgtctttttttaatgg

SEQ ID NO: 1025887 - DNA, 120 bp, Artificial Sequence
  ENSG00000287062_1 (sequence is synthesized)
aagatcatctatgaaaatcggaaaatggaagaggaccttctacaatgctactcaaagccaggaaatatttttagcatagttaataacagatcgagggataagacagttgagaaattcatt

SEQ ID NO: 1025888 - DNA, 120 bp, Artificial Sequence
  ENSG00000287062_2 (sequence is synthesized)
ctcaaaagtataaaaggcgtgactgtgagaccggtatttccttccttcattcatttaaacaatatttactgagtgcctacagattactaaacactgctctaggaggtagggaaacatcta

SEQ ID NO: 1025889 - DNA, 120 bp, Artificial Sequence
  ENSG00000287062_3 (sequence is synthesized)
tgaataaaacagttagaaatccctgtcctcagtgaccttatttatattctagagttgggagtttacattctaatgcttcatgttgagactagatctatgaggatgggttctcttattgcc

SEQ ID NO: 1025890 - DNA, 120 bp, Artificial Sequence
  ENSG00000287062_4 (sequence is synthesized)
ccattgagagggaaaaacgtgcagggacaagaaccggagagttttaagaaaccaaaaggcctgttggagagaaaatgaatttgacgttccacaaacaagaaaagacctgtgcagtacagg

SEQ ID NO: 1025891 - DNA, 120 bp, Artificial Sequence
  ENSG00000287062_5 (sequence is synthesized)
ccaaaggcctctgacacccactaaggatcttaaatagtaagcccgacagagtagaggcaccttacccaagatagtttctgtatacatggctacaggcctctcaaacccggaggaagaact

SEQ ID NO: 1025892 - DNA, 120 bp, Artificial Sequence
  ENSG00000287062_6 (sequence is synthesized)
gccttctgaatacactgctgtgactgaccaatctagaaaatgtctcttcagctttacatttctgcttgggtttcagggttttgcttttattttattttactttgttagtgtttgagggga

SEQ ID NO: 1025893 - DNA, 120 bp, Artificial Sequence
  ENSG00000287062_7 (sequence is synthesized)
aaggtgttttgttgggttgtgctgtatttattttcagcagttgactacactacccaacctgctaatgttgaggacctatctatctgtgttatgtatggccatcttgatattttaaataga

SEQ ID NO: 1025894 - DNA, 120 bp, Artificial Sequence
  ENSG00000287062_8 (sequence is synthesized)
atagcttttttaacccaatcgttttcaaatatattatatttaacaccatttcacccaaaagatgaatatgtaaaccagacagaagaagagctgctcggattagaactcagagcaggtggg

SEQ ID NO: 1025895 - DNA, 120 bp, Artificial Sequence
  ENSG00000287061_0 (sequence is synthesized)
gctcttgcactgagatgattcagctgctgcctcagacgttctgagaaacaacggccacaacacttgcagcggcagcaaaacatgcttattcaaaagaaaatgtttattttaaaaagaaga

SEQ ID NO: 1025896 - DNA, 120 bp, Artificial Sequence
  ENSG00000287061_1 (sequence is synthesized)
actatcaccccccagcatttatttaaatattaatagagacgagtaaaaacttcaaatggtataacaagaataacagctttatagtcacagatggtcagatgctgacaaacaagaaagagg

SEQ ID NO: 1025897 - DNA, 120 bp, Artificial Sequence
  ENSG00000287061_2 (sequence is synthesized)
gtctatgtacattgagattcggttgttatgagaatgcatatgaaggcttaagaaacggtctatttataggcttcggtggagccataatccccaatttgctattggctcctgatgtcgctt

SEQ ID NO: 1025898 - DNA, 120 bp, Artificial Sequence
  ENSG00000287061_3 (sequence is synthesized)
gagaagtatgtgaggctgaactggatccaatgatgctggaggatttcgttttggaagatatctttctacatgtggcagaccccctgaaatgtgacaaagaaaaaaatcaaaatgttaaat

SEQ ID NO: 1025899 - DNA, 120 bp, Artificial Sequence
  ENSG00000287061_4 (sequence is synthesized)
gaaaccaaaaatgaatgaccttcctctcaacctgcacagagctacaataccacttccctgggcctaatgtgtccttgtgcattttctgcctacgagccccctaggtaagttcttgttttt

SEQ ID NO: 1025900 - DNA, 120 bp, Artificial Sequence
  ENSG00000287061_5 (sequence is synthesized)
tattactcagaaggacaagaggtagaaaaactgcaaaagaaaacacaacagcttgcaaaagttgactgtggacttttttttggtttcttttttctgcaagcaactctgttacaatataca

SEQ ID NO: 1025901 - DNA, 120 bp, Artificial Sequence
  ENSG00000287061_6 (sequence is synthesized)
gttactttggggtcaagttctcaagactgatggaatggtctccctcctgccaggcctaacctactagccagaaggcagagggtgccctggcagaaaatcaaaaagcggctgtcagaaaca

SEQ ID NO: 1025902 - DNA, 120 bp, Artificial Sequence
  ENSG00000287061_7 (sequence is synthesized)
agcggcccaggaaaacatgggaaggggaagacagaagccatttacgcaacccctaaagaggcctggcttgactgaacttttggtttctctgttgtggcttcttcttgctacccctgcaaa

SEQ ID NO: 1025903 - DNA, 120 bp, Artificial Sequence
  ENSG00000287061_8 (sequence is synthesized)
ggctgggaggtcgattctcccaggtgttaatgaaaggcagggagtgtgcacgtgcttcaaggtggagatccatgggattctgcagcaataaaagcagcggagcaagtactgacagaatag

SEQ ID NO: 1025904 - DNA, 120 bp, Artificial Sequence
  ENSG00000287061_9 (sequence is synthesized)
taaaagccacgaggacacaaaaccctttgttatttattcagctagtgtatgatttatagtattgtaggtggaaaagtctcttaagaagaacaatcatcccaaacaggcaaacaaatatct

SEQ ID NO: 1025905 - DNA, 120 bp, Artificial Sequence
  ENSG00000287061_10 (sequence is synthesized)
aagggaagatcaacatggaagacatctttgcaaacaagaaacattagtcaggctgagtgcggtggctcacgtctgtaatccagcactttggggagaccaaagtgggctgatcacttgagc

SEQ ID NO: 1025906 - DNA, 82 bp, Artificial Sequence
  ENSG00000287061_11 (sequence is synthesized)
gagtttgagaccagcctgggcaacatggggaaactccatctgtacaaaaaatacaaaaattagccaggagtgatggtataca

SEQ ID NO: 1025907 - DNA, 81 bp, Artificial Sequence
  ENSG00000287061_12 (sequence is synthesized)
cagactttgtcctcaaattaaaaaaagaaagaaaactttagtcataactattagtcagtagatgttttaaacatctgaagc

SEQ ID NO: 1025908 - DNA, 120 bp, Artificial Sequence
  ENSG00000287061_13 (sequence is synthesized)
tcataactattagtcagtagatgttttaaacatctgaagcaaatattttttgttgtttcttgaagcaaatatttttgttttggatcaaaccttaattgtcactccattaacaactgtcat

SEQ ID NO: 1025909 - DNA, 120 bp, Artificial Sequence
  ENSG00000287060_0 (sequence is synthesized)
gcgctcgctcctgaagttaggcgtatacaccaccttccaactgggacagaagatatcagtctcgctttctctcagacgcccacgaagttgagactgcattcttctgaagattcactactc

SEQ ID NO: 1025910 - DNA, 120 bp, Artificial Sequence
  ENSG00000287060_1 (sequence is synthesized)
cctcgtttagggagaagtaccagctagtgcgcccgtctcccaccgcctttcctgcccccactgcgtccttgacccagacctttcactgtggatttaaagcagcccttaaaatagtaggta

SEQ ID NO: 1025911 - DNA, 120 bp, Artificial Sequence
  ENSG00000287060_2 (sequence is synthesized)
agtgtttccaactttataaggtaaaaattaattgcatcagatattattaacgttaagataacgtaaaccacaagttccggggtgtggatacagttattgttgttgttttaattttttgta

SEQ ID NO: 1025912 - DNA, 84 bp, Artificial Sequence
  ENSG00000287060_3 (sequence is synthesized)
ggtgtggatacagttattgttgttgttttaattttttgtagagatagggtcttgctcactatgttgcccaagctattcttgaat

SEQ ID NO: 1025913 - DNA, 120 bp, Artificial Sequence
  ENSG00000287060_4 (sequence is synthesized)
agatacagtcttactcaagtgacaaagtcataagagctattaaaacatattgcaataatagtatcataaccttccacccacccccatagtccttactgtgtgccaggctctgttctaaat

SEQ ID NO: 1025914 - DNA, 120 bp, Artificial Sequence
  ENSG00000287060_5 (sequence is synthesized)
gttgtaagaatgttaactgagttatacaggttatctcaagcaggatttgactccaggatgagtgctcttaaccaccgcataatattgtctctctgactttgtttctggagaatatgaaaa

SEQ ID NO: 1025915 - DNA, 120 bp, Artificial Sequence
  ENSG00000287060_6 (sequence is synthesized)
taataccttacataaatttctgtgatttcaatcatagaattaccagcattttttaaagcattaccttttgtacagccactgtgtaacagctttgagagcattacgtcattttatctcaaa

SEQ ID NO: 1025916 - DNA, 120 bp, Artificial Sequence
  ENSG00000287060_7 (sequence is synthesized)
ttctatcactcccgcccacccaagaggcagacatggaaattgcagctccattttacagatgtgaacactgcaactcagagacattaagtttcttggccaaagtcatgacattagtaagtg

SEQ ID NO: 1025917 - DNA, 120 bp, Artificial Sequence
  ENSG00000287060_8 (sequence is synthesized)
gcaaagccaggctacaaattcaggtaaacctgacaccaaagtctgtgctctaaaccaaaacactctgggttctgttcaaagtgaactaaattaggtctaaatacaaccccatatttagtc

SEQ ID NO: 1025918 - DNA, 120 bp, Artificial Sequence
  ENSG00000287060_9 (sequence is synthesized)
acctggcacaatcatgatgctatatcaaatcagaggttgcaaactgatgactcctattcctgggcttccagcctttctgcaaagcgctgaagatctggcagcacagggcccatgctgcac

SEQ ID NO: 1025919 - DNA, 120 bp, Artificial Sequence
  ENSG00000287060_10 (sequence is synthesized)
cagcaggcacaattgcctcagctggggctggacagtgccagctcatttctggcatgcaggcactcaggtcccaaccagtccacttcacccaactgtgtcagtggcccccacaggcatttg

SEQ ID NO: 1025920 - DNA, 120 bp, Artificial Sequence
  ENSG00000287060_11 (sequence is synthesized)
agtttttgctccctatcctagaaatgttcagaccagtgctgcatctcctctgaccattgcaaactggtacagattttgaaatcaatttatgccagttgagcaggggtttcctacagtgta

SEQ ID NO: 1025921 - DNA, 120 bp, Artificial Sequence
  ENSG00000287060_12 (sequence is synthesized)
aagctagacatctggagttggggaattccaatttcaatgcccttctggctttagaccaactgtagattttacaatcccacatcaaggtctatgatatggctcccggtgacagatgtgtgg

SEQ ID NO: 1025922 - DNA, 120 bp, Artificial Sequence
  ENSG00000287060_13 (sequence is synthesized)
cactagctctgctcactggggaaaataatctgtctgacacagggctaaagtcaacctctgtttgccattcacggtctcagcaatctcatttctctctgtgttgattaccactgcatatct

SEQ ID NO: 1025923 - DNA, 120 bp, Artificial Sequence
  ENSG00000287060_14 (sequence is synthesized)
tagagctgcagataagaaacgggatgtgtagtgtgaagacaaaagaggcagaagggacacctagtcttcacaaaacagagatacagctgaacataataaggttggacaggtagaggattt

SEQ ID NO: 1025924 - DNA, 120 bp, Artificial Sequence
  ENSG00000287060_15 (sequence is synthesized)
gcacagaaacattggctatctaaacactatgtggttgtcataaatacatttgggaaggaagagaaggaataatatgatttctcttcctaacataccttggaaaccagccagtaaggaaac

SEQ ID NO: 1025925 - DNA, 120 bp, Artificial Sequence
  ENSG00000287060_16 (sequence is synthesized)
agtctcatcactgagatatttttctttcttcaacaccatgaaaattaatgaaatattataacattttatttatctaggctataaatttgtgtattgatagattcttctttcctggtgata

SEQ ID NO: 1025926 - DNA, 80 bp, Artificial Sequence
  ENSG00000287060_17 (sequence is synthesized)
ggattcccagtggtagattcctcatgaatggtttagctccgtctctttggtgataagtgagttctcacttggttagctca

SEQ ID NO: 1025927 - DNA, 120 bp, Artificial Sequence
  ENSG00000287060_18 (sequence is synthesized)
gtctctttggtgataagtgagttctcacttggttagctcacacaagatctggttgtttaaaagggtctaggacctcccccttctctctctctcttgctctgtctcttgccatgcaatgca

SEQ ID NO: 1025928 - DNA, 120 bp, Artificial Sequence
  ENSG00000287060_19 (sequence is synthesized)
gcaatgcactgacttcccctttgccttccaccatgattctaagcttcctgagcctcactggaagcagacactggcaccacacttcctctgcgccctgcagaaccatgagctaattaaacc

SEQ ID NO: 1025929 - DNA, 120 bp, Artificial Sequence
  ENSG00000287060_20 (sequence is synthesized)
ttataagtgacccaaactcagatatttctttaaagcagtgcaagaatggactgacacatctgggtatagaatacttagattttagattactggagattaaaaagctcaaactggcttgaa

SEQ ID NO: 1025930 - DNA, 120 bp, Artificial Sequence
  ENSG00000287060_21 (sequence is synthesized)
caaaaaaaaatgaggcattgtattcatataagagacatccaatttagcttcaggtgtggctgcaaccggatattcatatggagtcgccaggggttagtatccatctcctggctctttttt

SEQ ID NO: 1025931 - DNA, 120 bp, Artificial Sequence
  ENSG00000287060_22 (sequence is synthesized)
cctatacattggctttgttctctggcaggctatcttgtggtggcaaggtggtcttcagcagccctagatatacattctgccaggttatcaatgccaacagaaagaaatgatctctcagaa

SEQ ID NO: 1025932 - DNA, 120 bp, Artificial Sequence
  ENSG00000287060_23 (sequence is synthesized)
gaatttgagcaaaatccccaggactgtctctgtttgatctggcattggtcatgggctcaccccagaattcgttactgtggccagaggtatgtggtgatgtggtgttctcattgattggtg

SEQ ID NO: 1025933 - DNA, 120 bp, Artificial Sequence
  ENSG00000287060_24 (sequence is synthesized)
ctgagtccccaccaaaggcaaggggtagggccatctccatccaaaccataatatcaatgtcaaagaggtgtgattttcaagacggaaagagagagagagagggcggggggattctgtgtg

SEQ ID NO: 1025934 - DNA, 120 bp, Artificial Sequence
  ENSG00000287060_25 (sequence is synthesized)
cagaagggcaatgggcaggccaaaccgcagatggtcactaacattcttcactctgaccttgaggcaggcggggaggatgagctttcattaaatgattttttcctagtccttttgaaaaag

SEQ ID NO: 1025935 - DNA, 120 bp, Artificial Sequence
  ENSG00000287060_26 (sequence is synthesized)
gactcagtattgagttccttagcttctgggtccaacccacaaataaaccagcagagtaaaaattattattttcattggatcactgcacaaaatacaatcaaacaggaaccaatatatcag

SEQ ID NO: 1025936 - DNA, 120 bp, Artificial Sequence
  ENSG00000287060_27 (sequence is synthesized)
caaaggaattcttttcatgaaatatcctagttatccttagtgacccaacagttatctccaggtaatattaagcatcaaaatgttattcacccaaactcctacatattaattctgaggctc

SEQ ID NO: 1025937 - DNA, 120 bp, Artificial Sequence
  ENSG00000287060_28 (sequence is synthesized)
ccatattattggtatagagccaactcttaattattggcagacgcagaatatggaaattatggatcaagcctaaggtctcgttttagcaaagcgattcagactcttccagataaactttta

SEQ ID NO: 1025938 - DNA, 120 bp, Artificial Sequence
  ENSG00000287066_0 (sequence is synthesized)
tatgcatcatttgttattttgagtgttacagaagcctgtgatgtcttctccctcatccccaggatcccggcacagcttcacttcttccatctttatgttcacctctaaattacttacaac

SEQ ID NO: 1025939 - DNA, 120 bp, Artificial Sequence
  ENSG00000287066_1 (sequence is synthesized)
tttctcttcatcattaacaaagaagtattgttttgttctttagtgttctaattgccaccaccaaaagctaaaagcttatcattcacttcacacctgcattcctggaaatgtttcctgtgg

SEQ ID NO: 1025940 - DNA, 120 bp, Artificial Sequence
  ENSG00000287066_2 (sequence is synthesized)
tctccaccctccaactgtcacctatatattgcctgtcacttctggaataatccatattaaatgctgctttcattatattgtaactctgcttaaaaatcgattatggtgccctatttcaga

SEQ ID NO: 1025941 - DNA, 120 bp, Artificial Sequence
  ENSG00000287066_3 (sequence is synthesized)
caacatcaaacataaaactattctatctagatgtcaaagccatacataagctgtttccataatactcatctgatttatttatttatttatttttactggaacataccaagaaatacttca

SEQ ID NO: 1025942 - DNA, 120 bp, Artificial Sequence
  ENSG00000287066_4 (sequence is synthesized)
gggttaccttctcactgctgtatcattgaaaactgcattctttcattcatgagcttgccttcatacaaagtgccctccacttttaccctcgtctctctaataaagttctacataatcttc

SEQ ID NO: 1025943 - DNA, 120 bp, Artificial Sequence
  ENSG00000287065_0 (sequence is synthesized)
agagcacacacctgtgatcaaaggagggcggctgtgcacagccagtgccgtggtgtgtgggggctccgtctctgtctcagcctgggccctcggtgatgtggggccctttgcaacccctaa

SEQ ID NO: 1025944 - DNA, 120 bp, Artificial Sequence
  ENSG00000287065_1 (sequence is synthesized)
ggctccttgcagaacaaaggagctactgaggcagctggctgtgcctggcacctccctgcccccaccctacctcccatgtgttttttttttttttaatttaagcagcttcagactgtcatt

SEQ ID NO: 1025945 - DNA, 120 bp, Artificial Sequence
  ENSG00000287065_2 (sequence is synthesized)
ccatgtctgttgggttgaggaaggaaaattgaaaatctctttcaaggatctttaagattaaaagtcaaagatgttcttgatggagtccctgtcagcctggatcccagagtgctgatgtgg

SEQ ID NO: 1025946 - DNA, 120 bp, Artificial Sequence
  ENSG00000287065_3 (sequence is synthesized)
tgtgtgtttgttgtacctaccctctgtcagggctgtctggggagagccgtgatggggtgcagggcgaggcgtcttataccatgctcgtcactctggaggaaacacaactccaatcacaag

SEQ ID NO: 1025947 - DNA, 120 bp, Artificial Sequence
  ENSG00000287065_4 (sequence is synthesized)
aactgagctgaagtctctggttcgttattttttgttttgtagctgagaatgttagtaagctctgctgctgttccacacacaataatgccaacttccttgtgagtcactgaagaacatgga

SEQ ID NO: 1025948 - DNA, 120 bp, Artificial Sequence
  ENSG00000287065_5 (sequence is synthesized)
atgtggtgtgtgaattgcttcgaagaccctgactggccacccgaacaacaggtgtcagttctgaatttaggaggtgcttagtaaatgtttacttcgggattttaattataaataattgtc

SEQ ID NO: 1025949 - DNA, 120 bp, Artificial Sequence
  ENSG00000287065_6 (sequence is synthesized)
ttaatcctaaattattgaatttgaccacacttggaggaggcagatcttgagttcactgggttcattacctgtagcattatacacccacctggatcagttaataaaaatggataagcaaga

SEQ ID NO: 1025950 - DNA, 77 bp, Artificial Sequence
  ENSG00000287064_0 (sequence is synthesized)
ggtaacccgctggggtccccttctacactgtggaagctttgattgcttttatgagctataacactcaccgcgaaggt

SEQ ID NO: 1025951 - DNA, 87 bp, Artificial Sequence
  ENSG00000287064_1 (sequence is synthesized)
ccacattgcttttatacactcctgaagctagcgagaccatgagcccactgggaggaaaaaacaactccagacgcgctgccttaagag

SEQ ID NO: 1025952 - DNA, 120 bp, Artificial Sequence
  ENSG00000287064_2 (sequence is synthesized)
tcattcctgaagtcagtgagaccaagaacccgccaattccagacacgttttggcaacccagatgggactttcgcctatcgccaagtggtgagacaatcgccgagcagtgagaccatcgcc

SEQ ID NO: 1025953 - DNA, 120 bp, Artificial Sequence
  ENSG00000287064_3 (sequence is synthesized)
ctggcacttcccctggcctagagagttcccctctgaaggacaccacaactacagggccccttcttcgcctctatccagcaggaagtagctagagtggtcatcggccaaattcccaacagc

SEQ ID NO: 1025954 - DNA, 66 bp, Artificial Sequence
  ENSG00000287064_4 (sequence is synthesized)
ccctttctgggctggccgtgggaacccgggctgtgcgcggcgcttgtgggccagctggagttccgg

SEQ ID NO: 1025955 - DNA, 120 bp, Artificial Sequence
  ENSG00000287064_5 (sequence is synthesized)
ccccagcagtgccagcccgctggcgctgcgctcgatttctcaccaggccttagctgccttcccatggggcagggctcgggaccggcagcccatcatgcctgagcctcccaccccctccgt

SEQ ID NO: 1025956 - DNA, 120 bp, Artificial Sequence
  ENSG00000270462_0 (sequence is synthesized)
tgtctcccttcctgcagaggttgtacatcattgtaactggccgtagcaggctaatggtgaccccatgaaaacatgttcacattcatgttcatgttcattatatggcaaaagatgtaatta

SEQ ID NO: 1025957 - DNA, 120 bp, Artificial Sequence
  ENSG00000270462_1 (sequence is synthesized)
ttacatgtaccatcctaagagatagggaattttgggacacaagagaagaagcagatgtgaagatgcaacaaagagagatgtggccacaagccaaggcatgccaacagccaccagaaacta

SEQ ID NO: 1025958 - DNA, 120 bp, Artificial Sequence
  ENSG00000270462_2 (sequence is synthesized)
gaagagtcaaggaatggattctcctacagagtttctggaaaggggggttgctctactgacattatgattttggacttctggcctccagacctcagagcgaataaacttctattgttttaa

SEQ ID NO: 1025959 - DNA, 120 bp, Artificial Sequence
  ENSG00000254075_0 (sequence is synthesized)
atggccttgaccccactcctcctcctcattgtcctccttcactgcacagatccctctggcagcccgtgccgactcagtcgacctctgcatctgcctccctgggagccctggccaagctcg

SEQ ID NO: 1025960 - DNA, 120 bp, Artificial Sequence
  ENSG00000254075_1 (sequence is synthesized)
ccacaccaagggggctgggattcccagtcactagttctcagtctccaggactggagctgaccactatagtgtcatttctacaatcccgtctgaggatggagctgactatatctgtggtac

SEQ ID NO: 1025961 - DNA, 120 bp, Artificial Sequence
  ENSG00000278611_0 (sequence is synthesized)
agaaaaattctactttccatctgcttggctgcggaggaccttggggtgggctcagcgtgggggctgcaggcagaaatgggtccagaaggcaaggtcgaggttagagccaagcctgtgggc

SEQ ID NO: 1025962 - DNA, 120 bp, Artificial Sequence
  ENSG00000278611_1 (sequence is synthesized)
agggctacgggcagggggcggggaggaatgtgggtccaggcccagaggaaaaggttgaagttatagccaggcctgtgggcgaggccgcagcagggcggccataggggaaggagccaatgt

SEQ ID NO: 1025963 - DNA, 120 bp, Artificial Sequence
  ENSG00000278611_2 (sequence is synthesized)
agcagggcggccataggggaaggagccaatgtgttatgcatgtagaaaatagacaaaatctcactctgtcaccaaggctggagttcagtggagccatctcagctcactgcaacctccacc

SEQ ID NO: 1025964 - DNA, 120 bp, Artificial Sequence
  ENSG00000278611_3 (sequence is synthesized)
ttttagtagaggcagggttttgccatgctggccaggctggtcttgaactacttgtcaggcctctgagcccaagttaaatcatcataaaccctgtcacctgcacgtatacatccagatggc

SEQ ID NO: 1025965 - DNA, 90 bp, Artificial Sequence
  ENSG00000278611_4 (sequence is synthesized)
cagccagttcctgccttaactgatgacgttccaccattgtgatttgttgctgccccaccccaactgatctcttgaccttgtgacattctt

SEQ ID NO: 1025966 - DNA, 120 bp, Artificial Sequence
  ENSG00000278611_5 (sequence is synthesized)
tgccccaccccaactgatctcttgaccttgtgacattcttcttctggacgagtctcaggagttccccaccgagcaccttgtgacccccggccctgccagcaaaagataaccacctttaac

SEQ ID NO: 1025967 - DNA, 60 bp, Artificial Sequence
  ENSG00000278611_6 (sequence is synthesized)
tgacccccggccctgccagcaaaagataaccacctttaacctttctcggactcagcccac

SEQ ID NO: 1025968 - DNA, 120 bp, Artificial Sequence
  ENSG00000272918_0 (sequence is synthesized)
tcctgtcttctcattcttctcacttaaccattcattaaccaagtgctagagaaaagaaaaaaattggatcattatatatgtaattccaaattctcccttgaatattctaataccagattt

SEQ ID NO: 1025969 - DNA, 120 bp, Artificial Sequence
  ENSG00000272918_1 (sequence is synthesized)
gaaattggtgtattatctaaaatgataaattgggtaatttaaatcattcatatgtgatcaaaatatcagtatgtccttttacatttcttagttatctactgttattctgaaactttttac

SEQ ID NO: 1025970 - DNA, 120 bp, Artificial Sequence
  ENSG00000272918_2 (sequence is synthesized)
ccaattattttgtagaacaaaacatatggttgctttttaaatatttatattacatgaaatttgtattacttttttttttgagacaagatatctctgtcatcaggctggagtgcagtggtg

SEQ ID NO: 1025971 - DNA, 120 bp, Artificial Sequence
  ENSG00000272918_3 (sequence is synthesized)
cagtctcggcttactgaagcctccgccccctgggctcaggtgtgatccctccacttcagcctcccgagtagctgggacaaggcgctcaccaccacgcctggctaatttttaaagtatttt

SEQ ID NO: 1025972 - DNA, 120 bp, Artificial Sequence
  ENSG00000272918_4 (sequence is synthesized)
ttttgcagagacaaggtccgctatattgcccaggctggtctcaacccctgggctcaagcagtcctcccgcctcagccttgcaaagtgctgagtttacaggtgtgagccaccgtgcccagc

SEQ ID NO: 1025973 - DNA, 120 bp, Artificial Sequence
  ENSG00000272918_5 (sequence is synthesized)
ctttttaatatagttacaactagagacacgtcagtaccattttattaaacacactaaatttaggtttactaccgcttctattataggtataagatgttccatctgttagaaaaatctgat

SEQ ID NO: 1025974 - DNA, 120 bp, Artificial Sequence
  ENSG00000272918_6 (sequence is synthesized)
tgattttaggcagtgttttcctacaatagctgcccatcagaatctcctggagatgaggacagtgcacagtactttttttgagaaagggtgagttgcccagcctggagtgcagtggcgtga

SEQ ID NO: 1025975 - DNA, 72 bp, Artificial Sequence
  ENSG00000272918_7 (sequence is synthesized)
accaccttagcctcccaacttttaattttctgtagagacagggtctcgttatgctgcccaggctggttttga

SEQ ID NO: 1025976 - DNA, 90 bp, Artificial Sequence
  ENSG00000272918_8 (sequence is synthesized)
aacctccccaaatgttgggattgcaggcataagccaccacacctggctcacgatacatatatatttaaaagtcaccattgacaatccctg

SEQ ID NO: 1025977 - DNA, 120 bp, Artificial Sequence
  ENSG00000272918_9 (sequence is synthesized)
cgatacatatatatttaaaagtcaccattgacaatccctgatataaggggtttggaatatctcttaaggttcttgtgctttgaaatttttcatagtcattaattctgctgattctctgat

SEQ ID NO: 1025978 - DNA, 120 bp, Artificial Sequence
  ENSG00000272918_10 (sequence is synthesized)
ctacaacatacataatacagtctctattggctatatgaatatacctgaccctgaagtataaattactactttaaaaaaaacgagtaaccattcatattgttacctagttagcaaatgata

SEQ ID NO: 1025979 - DNA, 72 bp, Artificial Sequence
  ENSG00000272918_11 (sequence is synthesized)
catggtgaaacctgtttctactaaaatacaaaaaaattagctggttttggtagtgcgcgctgggaggcggag

SEQ ID NO: 1025980 - DNA, 60 bp, Artificial Sequence
  ENSG00000272918_12 (sequence is synthesized)
atcacaccactgcactccagccagaacttagtatatataaatgtgcatatgtatatatat

SEQ ID NO: 1025981 - DNA, 120 bp, Artificial Sequence
  ENSG00000272918_13 (sequence is synthesized)
atatatacacacacacacacacacagaaacacacacattttaaaaatctacccatccttttttccaaaggtaaccactgtaaacattttagcatcttttctgtccctctctgtatataga

SEQ ID NO: 1025982 - DNA, 120 bp, Artificial Sequence
  ENSG00000272918_14 (sequence is synthesized)
tgtccctctctgtatatagaactccattcctaggactgcagtagtgaaacacatggagtctggagccagactgccaggagggtgaatcctggctttgccatttacactatgaccatgagc

SEQ ID NO: 1025983 - DNA, 120 bp, Artificial Sequence
  ENSG00000272918_15 (sequence is synthesized)
aagttaagtaacttttttatatctcaatctttatctgtaaaagaagggttgtgatagaacctagttctataaataggattgttatgaagattaaaagttcaataacatacataaagctct

SEQ ID NO: 1025984 - DNA, 120 bp, Artificial Sequence
  ENSG00000272918_16 (sequence is synthesized)
tagaacagtatctggcacagaaaaagtgacatgtattattaaactgaatgaggcctttaggggaaatcatgataatttggtactctgtcaaacagtatgttgtttaaaataacaaaatct

SEQ ID NO: 1025985 - DNA, 120 bp, Artificial Sequence
  ENSG00000272918_17 (sequence is synthesized)
gcaggcaaaagaggctttttaagagaatcagataggatgtagaagcctacatctcagaccagggatttaaataaatttatcgtaccacaactttgttaaaagtttaataaaaggtaggga

SEQ ID NO: 1025986 - DNA, 120 bp, Artificial Sequence
  ENSG00000272918_18 (sequence is synthesized)
ttatgtcatatttgtaattgagaaagtagtttcacttcttttaagcctgaggttttttcttttcactttacaaagttagaatttttttgtccattgttacaggcaaatattgggttgctt

SEQ ID NO: 1025987 - DNA, 120 bp, Artificial Sequence
  ENSG00000272918_19 (sequence is synthesized)
aagctatggcggtgcagtaaggagagtacagacttttaattagaaacaactgtgtttagattgtctctaatgaaacctgcgactttggcaagtaaattatttaacttgtgctattaaaat

SEQ ID NO: 1025988 - DNA, 120 bp, Artificial Sequence
  ENSG00000272918_20 (sequence is synthesized)
ataatcctgggttcatactagaattttactaaatgtacatgtcatggtttagcagcatgcctacaaactgtactgaattaggtaagaacaaagacagaataaatgaaatttcaaagtaaa

SEQ ID NO: 1025989 - DNA, 74 bp, Artificial Sequence
  ENSG00000272912_0 (sequence is synthesized)
cttccctgaagccaaaaagcctccaaacttgaagatccctcttgctaaggaacaattacttgacttaggcatct

SEQ ID NO: 1025990 - DNA, 120 bp, Artificial Sequence
  ENSG00000272912_1 (sequence is synthesized)
atccctcttgctaaggaacaattacttgacttaggcatctagattgctctgtgtgtcttgagtatacatgaagagtataaacccccaccaaccatccaggatcattcagcaaccctctgt

SEQ ID NO: 1025991 - DNA, 120 bp, Artificial Sequence
  ENSG00000272912_2 (sequence is synthesized)
gtgaatttgagtttttttttttttttaatattgtaagttgtctgggtgtcctttctgaccttttcttctatgaagtcctgaatttctaacttgcttctaaattgctgaatgtcacattgt

SEQ ID NO: 1025992 - DNA, 120 bp, Artificial Sequence
  ENSG00000272912_3 (sequence is synthesized)
tttgagagcctgtcttctctcttagctcccttaaaaacatttgtagtatttccactttttatgaagttaaaatggtttattttcaatccactgagttagaaggatcatgtctatccttaa

SEQ ID NO: 1025993 - DNA, 120 bp, Artificial Sequence
  ENSG00000272912_4 (sequence is synthesized)
cctttgccaaatatccttaaaaatcatttttttcttgggaaacttccataatgccattcttataaatgcatgccaagcctgagcctgtgggtggttttcttcatctgaacttacttttca

SEQ ID NO: 1025994 - DNA, 120 bp, Artificial Sequence
  ENSG00000272912_5 (sequence is synthesized)
aatatagcagtatgagacttgaggtaggggaagcagcatcagaaatggaagggctggaaactagactcaggacattgtttaaaataatcagaataaatactttcatttatttaacattct

SEQ ID NO: 1025995 - DNA, 120 bp, Artificial Sequence
  ENSG00000272910_0 (sequence is synthesized)
ttgttgagcatgttacagtcatcattttctgcatgtctaaccatcctagtagactgagcccttggtgtgcagggactagtgcctagcagactatacatatttaaatattaataaatgaga

SEQ ID NO: 1025996 - DNA, 120 bp, Artificial Sequence
  ENSG00000272910_1 (sequence is synthesized)
ttcaaataatttaagagaaactaatagatgtcaactaggaaaacgattaaaggatattaactttagtgatactataccaggcacacacaaaatatcatgtatctattgaaaaatggacgc

SEQ ID NO: 1025997 - DNA, 120 bp, Artificial Sequence
  ENSG00000272910_2 (sequence is synthesized)
cagtgaggaaatatatgactgaagaataccattaaagaacaaacagaacttactggaggagttttctgagacagctctctattcaacctgtcagtaaaactctgtattagtgtgtttcct

SEQ ID NO: 1025998 - DNA, 120 bp, Artificial Sequence
  ENSG00000272910_3 (sequence is synthesized)
cctgccactattacactgccatagagaccctaggataaaaatacaagaaaaatcaattagttccatatgtttccaaaagttttaaatacaactacaaatataaccatgtgctctactaca

SEQ ID NO: 1025999 - DNA, 120 bp, Artificial Sequence
  ENSG00000272915_0 (sequence is synthesized)
agccccagccctacccatagccccagccaccaccccctttgaggagagaaggtgctgggttgggtgaggagctctgcgggaggactgaaccaagctgtgggctcctgggcacctgcccat

SEQ ID NO: 1026000 - DNA, 120 bp, Artificial Sequence
  ENSG00000272915_1 (sequence is synthesized)
caggcctgcatctcccagacctgcttgtgggtgagcctgcatgctgacatgcttggctgggctctagccttggctattggtggcccagggtgtgtgtgtgtgtgcgtgcatgtgtgtgtg

SEQ ID NO: 1026001 - DNA, 120 bp, Artificial Sequence
  ENSG00000272915_2 (sequence is synthesized)
tgtccctttggagctatgtagtttgtgtaccaaaataagaagggagctggggagttgagccctgatgaactttgtaacaataaagccttatcttgttaaataaatcaagccttgaataaa

SEQ ID NO: 1026002 - DNA, 120 bp, Artificial Sequence
  ENSG00000272914_0 (sequence is synthesized)
acacagtaacatggtttccagcagaacataggcaaagcaaaagtttacaggattcatcattaggagagagggaagctgaagaaggaaattgtaaaaggaaaacattaaacattccctgag

SEQ ID NO: 1026003 - DNA, 120 bp, Artificial Sequence
  ENSG00000272914_1 (sequence is synthesized)
tgaaaggtaggggaaccccactcacttagggaacagctgcaccacctctccagactctggctcagtccagaaaaattccatgagtgaggggggcatgaaggcatggcccacagtacttta

SEQ ID NO: 1026004 - DNA, 120 bp, Artificial Sequence
  ENSG00000272914_2 (sequence is synthesized)
actgtggtggctgtccctggcttgcccactctcttgctgtccaatcacatgcagttcaattctcccgagaaaactgcaggcgcgatggttctccactgattgtctttgttgcagtccttg

SEQ ID NO: 1026005 - DNA, 120 bp, Artificial Sequence
  ENSG00000272914_3 (sequence is synthesized)
aactctcaaggttgcagaagttgctagggttctaactgtcgaagtgaatcgtgctcctcagtgtcgagggtcagcgtgcactgtttctttcatggaacacgattaacaactaaaacaaag

SEQ ID NO: 1026006 - DNA, 120 bp, Artificial Sequence
  ENSG00000272914_4 (sequence is synthesized)
gaaagatcagaccgggtgtgcggctcaggtgacaacggtgttcctgttcaggccagtttcctgctcttcctaccaaactggtcaaagcaattaaatgtgtgaactgtgttatttatgagt

SEQ ID NO: 1026007 - DNA, 120 bp, Artificial Sequence
  ENSG00000272914_5 (sequence is synthesized)
ttccagggctgtaaaagtcatgtctgtgctaagagaccaaaaatacatatgccttgaacaccacagcaaacaccctcttctgtcaaacaaacagatattctcttctccaaaatcaaaacc

SEQ ID NO: 1026008 - DNA, 120 bp, Artificial Sequence
  ENSG00000272914_6 (sequence is synthesized)
tccaccaactcagaaagttagcacaggacggatttctcgcagagagtgcctctctaggcaggtgagccgtgcatggggcccagcgacagttgccgattgtgatttattagtggaggaaaa

SEQ ID NO: 1026009 - DNA, 120 bp, Artificial Sequence
  ENSG00000272914_7 (sequence is synthesized)
tttggaattggactttaccgttgggatttacttgcatttgaaagcaatgcagttagcagtccatctttcaacactgaatgtattttctctgcttttatatctttctgatgaattaagcac

SEQ ID NO: 1026010 - DNA, 120 bp, Artificial Sequence
  ENSG00000272914_8 (sequence is synthesized)
ttatgtgaggtgagggattgaaaacactagcagcctaatctctcagtagatctgcttgccagataacagctgtatggaaaaacacggggaccaattttacattgtttctccaccaattca

SEQ ID NO: 1026011 - DNA, 120 bp, Artificial Sequence
  ENSG00000272914_9 (sequence is synthesized)
taccagccgtgaactgtgatgctccccccaattctacaatgggcagataatgagagttccttgccctccagttctccaagccgtttcgaagaagacctgctaattgaattcagttgtttg

SEQ ID NO: 1026012 - DNA, 120 bp, Artificial Sequence
  ENSG00000272914_10 (sequence is synthesized)
cagttttaaatgttcatgctttccacaaaacaagaatatattaaactcatttcatctgtcatccaagaagaattggagcctgcatttttattaccaactgacttgtgtgttcatctttat

SEQ ID NO: 1026013 - DNA, 120 bp, Artificial Sequence
  ENSG00000272914_11 (sequence is synthesized)
cccagattttttttgaaatgtttacaatgtaattaaaaacaatcaagtcaaatgatgtatttgaattgttccctttgggagaagataaaggagaaaatatagctacaattgcttcatttt

SEQ ID NO: 1026014 - DNA, 120 bp, Artificial Sequence
  ENSG00000272914_12 (sequence is synthesized)
tgctgagtatttctgccttctcaacagaaatacatcatgtatctgctcacctagagcgttttgtaatgtcactggtgatttaacaattacaaaatattgtaattaaatgttcaaatgctc

SEQ ID NO: 1026015 - DNA, 120 bp, Artificial Sequence
  ENSG00000203266_0 (sequence is synthesized)
gagggaagggaagacaggggaactagaaagaaagcacgaggaccagccagctgggagaggccaggtctgtggagcacctgctctgtgcgcagcagctgctgcctcaggtggagtctgtgg

SEQ ID NO: 1026016 - DNA, 120 bp, Artificial Sequence
  ENSG00000203266_1 (sequence is synthesized)
ttcccatggttcctagagtgaggactcatcctgccagatggagggctctgggttctgctgagcaccttcaggagttcagttgtggtgttggctgtaagtgacaaggaccttgatctggct

SEQ ID NO: 1026017 - DNA, 120 bp, Artificial Sequence
  ENSG00000203266_2 (sequence is synthesized)
gaaggaaagagtgttggctcctgagactggaaagctgaggggtcacccacatggtccaagatggctgctggagatccagccattacacaaaactccagtcagcaagaaggaagaagcaac

SEQ ID NO: 1026018 - DNA, 120 bp, Artificial Sequence
  ENSG00000203266_3 (sequence is synthesized)
actttctagaaattataagagcacatgtttatgccccttttgacagaactcagtcacatacatgatctgggtgcaagaaaaaatgcaaaatgtgattttttttttttttttggagacaga

SEQ ID NO: 1026019 - DNA, 120 bp, Artificial Sequence
  ENSG00000203266_4 (sequence is synthesized)
cttccggttcggcgtgtgcggggcgttatgctaagtcttccggctgggcgtgtgcggggcgctgtgctgtcttccggttcggcgtgtgcggggcgctgtgctaagtcttccggctgcatt

SEQ ID NO: 1026020 - DNA, 74 bp, Artificial Sequence
  ENSG00000203266_5 (sequence is synthesized)
gcaaaatgtgattttttattccagtttgtcacaggtccaagtaagaatcagagtttttcttgctaaggaagaag

SEQ ID NO: 1026021 - DNA, 120 bp, Artificial Sequence
  ENSG00000203266_6 (sequence is synthesized)
gtccaagtaagaatcagagtttttcttgctaaggaagaaggggagatgcatagtgagggacaatgatcagattttgccacaaatagatgctattcttgttatccttgcttttagataaaa

SEQ ID NO: 1026022 - DNA, 120 bp, Artificial Sequence
  ENSG00000203266_7 (sequence is synthesized)
ttgaggctcagaaagattaaataccttacctagggtcatgcaactcccagcctgcccctacagcctgtgcctgcaataaccactatcatataattccatttaattagatttcagagatgc

SEQ ID NO: 1026023 - DNA, 120 bp, Artificial Sequence
  ENSG00000203266_8 (sequence is synthesized)
caattacctaaggagggtccaatgacaggcaaattctattttttaaaaaaatctaacattcaaacaaattgagcattcagacatcacaactttgtcaaaaaccctaacgatcacagcaaa

SEQ ID NO: 1026024 - DNA, 120 bp, Artificial Sequence
  ENSG00000203266_9 (sequence is synthesized)
tgtagaaaaacacaggagaaaaaatgtttaaactatacacacagaggtatgaaagagaagcaagaccagcttttgcacagatcaacagtccttccagagaagaaaaagcccatcacatgt

SEQ ID NO: 1026025 - DNA, 120 bp, Artificial Sequence
  ENSG00000203266_10 (sequence is synthesized)
tccggaagccaatttaactaggatgatcacaaagaagaaacaagggagtgtaccaagtggcaacgcagccacagggtggggaagtcatgcttgaaatcactaagaataaaagtttgagca

SEQ ID NO: 1026026 - DNA, 120 bp, Artificial Sequence
  ENSG00000215068_0 (sequence is synthesized)
gcgctgggaagagactgtgcccctgcagctcccctgtcaccggctccaaggagcgtcgggctccccccgcccagccctgcagcacccatccggcaacgccagactcggcgcaacgggggc

SEQ ID NO: 1026027 - DNA, 120 bp, Artificial Sequence
  ENSG00000215068_1 (sequence is synthesized)
agctgcgactttaaatctctcagatccgcggcctgagggctgccgccaccgagaaatggaggcacagagctgtgaacaagagaccacggctcgccgaaatggcggtgccaggagcctgaa

SEQ ID NO: 1026028 - DNA, 120 bp, Artificial Sequence
  ENSG00000215068_2 (sequence is synthesized)
agggaatgcagccggcggggttgtcaaggacaacatttgttttggcgcaaccagcggtgccgtcaccaagaaaccgtcgactctgagaaaaaaagagaagttcggctaccgagaaactcc

SEQ ID NO: 1026029 - DNA, 120 bp, Artificial Sequence
  ENSG00000215068_3 (sequence is synthesized)
gtgcagcaagtgctgtgacagcaaaaccgccggcttcgcgccgctggcgaaagagccaacggaaacgccgggtgctgcgaccgcgaagccggcactagagggcctcggatggagaaagcc

SEQ ID NO: 1026030 - DNA, 120 bp, Artificial Sequence
  ENSG00000215068_4 (sequence is synthesized)
ccgcaccgagacgaggaaactgtgcacagcacgactagcagttgacacaaacagaaaagtgtctcgtctgctctctgggagaaagcgtggatcaaaaccagcaactcagtggagagaacc

SEQ ID NO: 1026031 - DNA, 120 bp, Artificial Sequence
  ENSG00000215068_5 (sequence is synthesized)
ccgcagccactgaagaagttgcccacgtggcggtggggccagagaaacaccgcgatttcgacgacagccgtagggataccacagagaaacatgcgcggccacagaagtacatccagctcc

SEQ ID NO: 1026032 - DNA, 120 bp, Artificial Sequence
  ENSG00000215068_6 (sequence is synthesized)
gcgcaatcagtggttctgcgatccagaaaccgccagctgggctagactagaaacttctaaaaaactgtcgtcccatagcagctttcctaaccacgacagacagtcgcctttagagagcac

SEQ ID NO: 1026033 - DNA, 120 bp, Artificial Sequence
  ENSG00000215068_7 (sequence is synthesized)
ctaacggtgctgagaccggcctgggccagcaaaagcgcagagcggtgccagtgccaagaaacgcccgacttggtgaaaccaaccttgtgaccaccgattccactggcttcgcaggacgca

SEQ ID NO: 1026034 - DNA, 120 bp, Artificial Sequence
  ENSG00000215068_8 (sequence is synthesized)
acgggcgaaggcgcggcggagaaaccgcaggctcccttcaccgattatgctgcgggctggggatggtggggggcacccgcgaaattgtgaaaccagcggcgctgggacccagcgatcagc

SEQ ID NO: 1026035 - DNA, 120 bp, Artificial Sequence
  ENSG00000215068_9 (sequence is synthesized)
agataatttttggccgtgagaaggttgccgccagagagcgtccgataacgctgacaaaggcgtggcgttgccagtgagaaacagccggcgctgggaaaggaacggtgcagcgaccgacca

SEQ ID NO: 1026036 - DNA, 120 bp, Artificial Sequence
  ENSG00000215068_10 (sequence is synthesized)
actgcgcgctcggtgccaccaaagtgctactggctctacccactctgtcccccacgggcttagggaagtctgatgtctttttcttttcttttttcctctgtcgcctaggctggtgcagtg

SEQ ID NO: 1026037 - DNA, 120 bp, Artificial Sequence
  ENSG00000215068_11 (sequence is synthesized)
gtgtcatcttggctcagtgcagcctcgacttcctgggatccagcgatcctcccgcttcagcctctagagtagccgagaccacagcttcctacgcaggaaacagccatccaccctctgtga

SEQ ID NO: 1026038 - DNA, 120 bp, Artificial Sequence
  ENSG00000215068_12 (sequence is synthesized)
ctgggcttttccaggtcacccctcgctgccaggctctcttcccggtccagagcccacaggatcctacaggaggggccaacaactgcttgcctttgaaacttgaaactctcggtctaaggt

SEQ ID NO: 1026039 - DNA, 120 bp, Artificial Sequence
  ENSG00000215068_13 (sequence is synthesized)
tccttaggagcgtaaaaggcacagcgttttctgatcgcagcttcaggtctcccgcccctgtcccggtacctctcctgcaggacggaactctgtgggaacgctcgttgattctgatggtta

SEQ ID NO: 1026040 - DNA, 120 bp, Artificial Sequence
  ENSG00000215068_14 (sequence is synthesized)
actgtcagatatccttgatattggacataggatttggaagagggcaggagagaaaaatgaactgcaagactccagcacaagaggtgggattgctggcagatgtctgctccctctccaaac

SEQ ID NO: 1026041 - DNA, 120 bp, Artificial Sequence
  ENSG00000215068_15 (sequence is synthesized)
ctaatgaacatctcaaagtgccatccactttcctatacccttgatctgtgaaatggatcactgacgctttctctgtctttccggaaatgcaaaacaggtgaattttcaagcgcttgaatt

SEQ ID NO: 1026042 - DNA, 120 bp, Artificial Sequence
  ENSG00000215068_16 (sequence is synthesized)
gtctctcacacttttcagtcaagagtggggctataaactccttcctcataggaaataaggaactgccactgcttggaagtaaaacgtatttttcccataagctttcacatttcccaaaaa

SEQ ID NO: 1026043 - DNA, 120 bp, Artificial Sequence
  ENSG00000215068_17 (sequence is synthesized)
aaattatacatccagatgtaatccccctaagaggcttacagaccctaccaggagcgttcccacgcgaacgcatcatctcccaatcggatcctgaaaacaccatgcaaccaattccatcct

SEQ ID NO: 1026044 - DNA, 120 bp, Artificial Sequence
  ENSG00000215068_18 (sequence is synthesized)
tttctggatcaacctgggcagaggacaggtgcagaggagcccagagaagggccttgacaagtcaggagacccaatttggggtcgcaattgtcactcactccccaggcgtttgctttgatc

SEQ ID NO: 1026045 - DNA, 120 bp, Artificial Sequence
  ENSG00000215068_19 (sequence is synthesized)
actcgatattgcgaaaccaaacttggtataagagctcccaacactgctaaactggtcatcgctaaacctttaaaaaaaaaaaaaaagcattcgctggtacccagatttccacaggagtta

SEQ ID NO: 1026046 - DNA, 120 bp, Artificial Sequence
  ENSG00000215068_20 (sequence is synthesized)
aacatttcctgcgcagctaaagcaagtcttaccagtaggaaaccggaacttgctaggactaagaaacttgaggctaggctgaccccatggttgttatgattagaaatccgaggccactgg

SEQ ID NO: 1026047 - DNA, 120 bp, Artificial Sequence
  ENSG00000215068_21 (sequence is synthesized)
cccctcccaccatactacttcttctgctacctggtttctccctggtatttgaggatcctccaattgccttctggtcttacagacgggagaataaaggaaaaatggcatcgtttccacctt

SEQ ID NO: 1026048 - DNA, 120 bp, Artificial Sequence
  ENSG00000215068_22 (sequence is synthesized)
gcatggggaaacgggtgagttcctacggcctagatatcgcagccagggctagaccggtgtttgtcttaagtcaggacttgcttgggctgagaaaatacattttggctattcccctacttg

SEQ ID NO: 1026049 - DNA, 120 bp, Artificial Sequence
  ENSG00000215068_23 (sequence is synthesized)
gacagagggtggaaatcccaggcaccgcgaaatcgaaacttgctaggactaagaagccaacgacgcgcgaaaccgtggggtcctgcgacagagacgccggcggcgccgccacaggactgc

SEQ ID NO: 1026050 - DNA, 120 bp, Artificial Sequence
  ENSG00000215068_24 (sequence is synthesized)
ggtctggtttaaaagggttcctggccttacaggtgggtaagaaatgtcacttcctggcaggctgaggaacatcaggatatttggaggaccttgacaagggaagaattcaccgaaatctat

SEQ ID NO: 1026051 - DNA, 120 bp, Artificial Sequence
  ENSG00000215068_25 (sequence is synthesized)
aggtattccaggcaaagtgtgatagcaagatcctggtatggtttcctagccttgagaggcttttaaaagtctaatttgagattccttattaaaagatccagaaaagccaacttaaagaga

SEQ ID NO: 1026052 - DNA, 120 bp, Artificial Sequence
  ENSG00000215068_26 (sequence is synthesized)
ctcttactaatactttgatgatgtttgataaaaagggagtaagtatagagaaaaaactttcagagaaaaaaatatagtgcacctgttattagactctagctcattgtttttgaggttttt

SEQ ID NO: 1026053 - DNA, 120 bp, Artificial Sequence
  ENSG00000215068_27 (sequence is synthesized)
tttttcgtctacctgaaatctagactggatcttgaattttttgtttcctgtaatatctggcaatgggctgggtgtcagagctcgcaactgcaatcccagcactttgggaggtcgaggtgg

SEQ ID NO: 1026054 - DNA, 120 bp, Artificial Sequence
  ENSG00000215068_28 (sequence is synthesized)
attgctgaagcccaagacttcgagaccagcctgggcaaaaggcgaaacaccgtctctacaaaaagttcaaaaatttgctgggcatggaggcatgcgcctgtggttgcagctgcttggaag

SEQ ID NO: 1026055 - DNA, 120 bp, Artificial Sequence
  ENSG00000215068_29 (sequence is synthesized)
gtggaggtggaaggattgcttgagccaaggaggttgaggctgcagtaagccttgtttgtgccactgcactccagcctcaattacaaagcaaggaccccatctcaaaaaaaaaaaaaaaaa

SEQ ID NO: 1026056 - DNA, 120 bp, Artificial Sequence
  ENSG00000215068_30 (sequence is synthesized)
atgcccgcccactgcttcaccctcctcatttccacctcagcaaagcattttagcagaaaagctgacccagagcagtagctccctgctataatcctagcactttgggaggctaagtcagga

SEQ ID NO: 1026057 - DNA, 120 bp, Artificial Sequence
  ENSG00000215068_31 (sequence is synthesized)
agaccacaggaacagaaacaacacactcagacttgagaaactggtctggtttaaaagggttcctggccttacaggtcctgaagaaatttttccagatgaattagtgatcatctcccaact

SEQ ID NO: 1026058 - DNA, 120 bp, Artificial Sequence
  ENSG00000215068_32 (sequence is synthesized)
atttggactttggtgtctgccattctgtatataacagaacatactataaaagcacagtctgtactggacagaatcatttactccctttcctagaccagccacgtagcttggcctgatctg

SEQ ID NO: 1026059 - DNA, 120 bp, Artificial Sequence
  ENSG00000215068_33 (sequence is synthesized)
gaggctaaaatatggagccccattcatcatctttggaagagctgtcttgaaggcagcatgtccagagccccacatgccaccagacttaagcctaaagtaagctgggattgggcaatggac

SEQ ID NO: 1026060 - DNA, 120 bp, Artificial Sequence
  ENSG00000215068_34 (sequence is synthesized)
aacttcactgcactgagccaccactgccaatgtccccagttctgtgcacatatgaagtacagtgcattcaggctgccatgctgggcttacataggctagagtcatttctgaagtttaaag

SEQ ID NO: 1026061 - DNA, 120 bp, Artificial Sequence
  ENSG00000215068_35 (sequence is synthesized)
gggacaaaaatgttgttgagacccacactctggggccaatggctgaaaccacagaagagctacactcacttgaaaaataagtgtatgctgagatcgttcgaagatggctgaataggaaca

SEQ ID NO: 1026062 - DNA, 70 bp, Artificial Sequence
  ENSG00000215068_36 (sequence is synthesized)
tttccaactgagctttgaagagagcagttaagtgggtccctggcccccgagtagcctaactgggagacac

SEQ ID NO: 1026063 - DNA, 66 bp, Artificial Sequence
  ENSG00000215068_37 (sequence is synthesized)
agacgaagcttccagaggaaggatcaggaagcaacatttgcaggtctggagtggacctccagcaaa

SEQ ID NO: 1026064 - DNA, 79 bp, Artificial Sequence
  ENSG00000215068_38 (sequence is synthesized)
agggttatcaacaccaacaaaaaggacatccacaccaaaccccatctgtaggttaccatcatcaaagaccaaaggtaga

SEQ ID NO: 1026065 - DNA, 74 bp, Artificial Sequence
  ENSG00000215068_39 (sequence is synthesized)
cagagcatttcttctcctccaaagaatcacagctcctcgccatcaacggaacaaagctggacagagaataactt

SEQ ID NO: 1026066 - DNA, 87 bp, Artificial Sequence
  ENSG00000215068_40 (sequence is synthesized)
taaaatcagagcatttcttctcctccaaagaatcacagctcctcgccatcaacggaacaaagctggacagagaataactttgacgag

SEQ ID NO: 1026067 - DNA, 77 bp, Artificial Sequence
  ENSG00000215068_41 (sequence is synthesized)
cgtatcagtgattgaagatcaaaagaatgaaatgaagtgagaagttagaggaaaaaagagtaaaaagaaatgaacaa

SEQ ID NO: 1026068 - DNA, 120 bp, Artificial Sequence
  ENSG00000232377_0 (sequence is synthesized)
gagggagtgcgcgcgggtgggagcgccaggggctggcggggcccgcgccctgggacgagcccctcgtgctccggctctgcgctcccgcagcgcccacgcagccgagaggagtgggtgatg

SEQ ID NO: 1026069 - DNA, 120 bp, Artificial Sequence
  ENSG00000232377_1 (sequence is synthesized)
gatgacttcgtgacctcaacgtcctcccccgtccctcgacatgttcccgcgcctgaaaggtgcagaaaactccccccaccgctctggacgagactgagctaggcgtcgagggcgggcgcc

SEQ ID NO: 1026070 - DNA, 120 bp, Artificial Sequence
  ENSG00000232377_2 (sequence is synthesized)
gccgcagaccggagctcgggctcgctggccgctcaggcgcagcggtgtggagggaacggacgcgcggcaaggcgacccgctctgggcaacgcgggcgcagctgccccgacgcaaggcact

SEQ ID NO: 1026071 - DNA, 120 bp, Artificial Sequence
  ENSG00000232377_3 (sequence is synthesized)
gggcgtgcgctctctcggcaggcgagcgccgggctccgcggaggtccctgcgcccactgcctgcttctccgcccggcgacccggagtccccaggctgcggtgcgccaggccagacctgac

SEQ ID NO: 1026072 - DNA, 120 bp, Artificial Sequence
  ENSG00000232377_4 (sequence is synthesized)
agaggcagaaggaagaaagaggagaaagagaagacaaatgtttttcccttcttgaagaggtggtcttgactactgctcaaccacagcctactgaaagagccctggaaaatctgagttcta

SEQ ID NO: 1026073 - DNA, 120 bp, Artificial Sequence
  ENSG00000232377_5 (sequence is synthesized)
gatctgcctgtaccactgtgggacccaagcaaaggactgggagacagaagccttcagtttgaatttcagattcttgaagactaactttctcaatcatattctcgggaaagtaactatgtg

SEQ ID NO: 1026074 - DNA, 120 bp, Artificial Sequence
  ENSG00000232377_6 (sequence is synthesized)
ttcatttctaagaatcatgtgaagatggctctgtctactgagaatcgacttcaaatgcatgctactaaaatggagctaatatgcgtcatttcctcagctataatttggggaggttaatac

SEQ ID NO: 1026075 - DNA, 120 bp, Artificial Sequence
  ENSG00000232377_7 (sequence is synthesized)
ggaggttaatacttgttaaatcactagactgctataaggtttgcccataaacattgtaaataatgtattcaaaattattaaaatgttacaatataaacaagaatgtgatataataaaatg

SEQ ID NO: 1026076 - DNA, 120 bp, Artificial Sequence
  ENSG00000234238_0 (sequence is synthesized)
caaaaggaagcacaaagattacagctatgctttgtccaagtgaatggataaattctcactcatcctcttagaggaaaactggtaacaaatgctcctttccaagccagttttttaagaccc

SEQ ID NO: 1026077 - DNA, 120 bp, Artificial Sequence
  ENSG00000234238_1 (sequence is synthesized)
caagccagctttggaccacggcttcagtagatgtttgtgtgtggatttaggatgatccactcttaactgttacttgctacagtgttgctctcctccctgtcttcgctcagcgtgtagaac

SEQ ID NO: 1026078 - DNA, 120 bp, Artificial Sequence
  ENSG00000234238_2 (sequence is synthesized)
gtccacctgggaggtctcagccaagctatctcaacacactcctctgcttggaattggtactatgtattatctttgttttaggatgtagggtaggaactgagtctattaatgtttttctca

SEQ ID NO: 1026079 - DNA, 120 bp, Artificial Sequence
  ENSG00000234238_3 (sequence is synthesized)
acactgtattcccaggcctaataaggctagtaggtgcagtaataacctgttgttagagcaaaaaagatggcataagttgtctcccttgttgtttgagcctctttgaaacttttcattggt

SEQ ID NO: 1026080 - DNA, 120 bp, Artificial Sequence
  ENSG00000234238_4 (sequence is synthesized)
agtgaacacaaaaaggattaaagctctgcctaccaacatctctgccacaagagactggcccccactgtgagaatgctctgcctgatctctgaagattcacaggcttccaggcacgatcat

SEQ ID NO: 1026081 - DNA, 120 bp, Artificial Sequence
  ENSG00000234238_5 (sequence is synthesized)
tcttcatttgagaactgcaaatctcagctttctgatgcatcctcagtcacctgttgttcccagccctccgtgagcaggtctggccagtcccaacatcctgctgccccttgctctttgcaa

SEQ ID NO: 1026082 - DNA, 120 bp, Artificial Sequence
  ENSG00000234238_6 (sequence is synthesized)
gtgcctgatgtggacatggcccgcttccagcctccagaaccatgtttctgctcttctgttactagggaagatccagtaaatttcagctcttctttcaccattatttattcattaaaacaa

SEQ ID NO: 1026083 - DNA, 120 bp, Artificial Sequence
  ENSG00000234238_7 (sequence is synthesized)
acttatgaggcaaggtcgtgccttctcatatcagaagtgtgcaatccggccaaaaagagcatccagacttagagtccagagaaattgactgagtaggcattgggtcctcggttgtgtctc

SEQ ID NO: 1026084 - DNA, 120 bp, Artificial Sequence
  ENSG00000234238_8 (sequence is synthesized)
acaggtggccgagttgggatacaacaaaatgcattcagacaatccgatcctgtgatctggcaaaatgcaaaacattatagccacttactaaaaactgggtaacattgtgcagaaactcag

SEQ ID NO: 1026085 - DNA, 120 bp, Artificial Sequence
  ENSG00000234238_9 (sequence is synthesized)
gggacagatacaaatgattgtttgtccatattgatttgattcctgtaagctaatgaagaaattaccttgtgacatcaaagacctagtactcaataaaaagagaaaacattcatttaggaa

SEQ ID NO: 1026086 - DNA, 120 bp, Artificial Sequence
  ENSG00000287689_0 (sequence is synthesized)
gggaggccaggacctgctctgcaacttccctgccccagttccctccatctcctccacacagaggagcaggaaacacaggcaacttcccaactcaaagtaaacaaagccaatacctaccct

SEQ ID NO: 1026087 - DNA, 120 bp, Artificial Sequence
  ENSG00000287689_1 (sequence is synthesized)
gcgttcctggaatttacaatctaagacagcattgatgtgaaggggcatgtaaggcttatggacaactaaacaagcctttcccattaaaactggaacccattaaagaaaaaggatttgcta

SEQ ID NO: 1026088 - DNA, 120 bp, Artificial Sequence
  ENSG00000287689_2 (sequence is synthesized)
tctgcagggaaagtattctttggaagggcttcctgctgattctgaatctcaaagttggtgagtgagaagagcaggctgagccctcttcactgctatctgaggaccaacaccgtgcaacgg

SEQ ID NO: 1026089 - DNA, 120 bp, Artificial Sequence
  ENSG00000287689_3 (sequence is synthesized)
gcaggatgctgagtccaggaggaatgggaagtcccccattagtgggaggaccaggtctgtaacagacacacagatgtgcacacacacaaacacacagttaaacacacgaggaagtgttag

SEQ ID NO: 1026090 - DNA, 120 bp, Artificial Sequence
  ENSG00000287689_4 (sequence is synthesized)
aaggtgctggaggagggaggagtcaagtgaggccccaggaggtggtactggaggtggtcttgaaggatgagcaggggcccaggaacaagggaggatcaagacttccagtgacaaatatcg

SEQ ID NO: 1026091 - DNA, 120 bp, Artificial Sequence
  ENSG00000287689_5 (sequence is synthesized)
aggagcagatggagaccatggggattggagacttgtgcaggaaagggcgggaattgcaccggctgggagcagttaacagggcaatcaaaggaccctggttggtttccttttccaagaaaa

SEQ ID NO: 1026092 - DNA, 120 bp, Artificial Sequence
  ENSG00000287689_6 (sequence is synthesized)
taactcatagcttgacagaggcaggattagaagaggccagcctagagtctgcggcccacgtctacagagattacaagggagctgagcaaatggcagcctttggggagaggaagagatgtt

SEQ ID NO: 1026093 - DNA, 120 bp, Artificial Sequence
  ENSG00000287689_7 (sequence is synthesized)
gtcatagtggtctagataggacttgcacactgggtacgaggcctgagaggccagtgaagatctttcttttgtgtcccaaagtgctgaatgatggcagtgatcccccaaaactaagtcaac

SEQ ID NO: 1026094 - DNA, 120 bp, Artificial Sequence
  ENSG00000287689_8 (sequence is synthesized)
acaaaaataattctccaccataagtcacatgcaagggagtatatcaaatttagcttcccatgatgattatttcattgcctttcatgaactatccaaaatcaaattattttttaaattatt

SEQ ID NO: 1026095 - DNA, 120 bp, Artificial Sequence
  ENSG00000287689_9 (sequence is synthesized)
taatatatttaatttaataattaatataattatattttaaaaattattttgagtttttgtgccatccttgtgccttcaacattgtaagtgtgcttatgatgcccatttaaaattcattta

SEQ ID NO: 1026096 - DNA, 120 bp, Artificial Sequence
  ENSG00000287689_10 (sequence is synthesized)
acatcatgtgtcatcagagaactgtaaattaaaacaatgagataccactacacatctgttagaatgaccaaaatccagagcgctgacgacaccaaatgccagtgaggatatggagcaaca

SEQ ID NO: 1026097 - DNA, 120 bp, Artificial Sequence
  ENSG00000287689_11 (sequence is synthesized)
ggaactttcattcattgctggtgggaatgcaaacgatccagctactttggcagacagtttgtcaatttcttagaaaactaaacatactcttaccgtatgatctagcaatcatgctcctgg

SEQ ID NO: 1026098 - DNA, 120 bp, Artificial Sequence
  ENSG00000287689_12 (sequence is synthesized)
tatttatagcattcataactgccaaaatctaaaagcaaccaaggagtccttcagtaggtgaatggataaataagctgcagtacaagcagaaaatcaaatatgatgcgctgatgaaataaa

SEQ ID NO: 1026099 - DNA, 120 bp, Artificial Sequence
  ENSG00000287689_13 (sequence is synthesized)
tgagttatcaagccatgaaagacataaatgaagcttaaatgattattgctaaatgaaaaaagccaatctgaagaggatacatgctgtatgatttcctaggaaaaaaatcagtggttgcca

SEQ ID NO: 1026100 - DNA, 120 bp, Artificial Sequence
  ENSG00000287689_14 (sequence is synthesized)
ggagttagtggggagggtgagatgagtaaagtgacatgtagaggaattgtagggccatgaaacagctttgtatctatatctgtatctgtatcaactgtatctgtatctgtaactgtcact

SEQ ID NO: 1026101 - DNA, 120 bp, Artificial Sequence
  ENSG00000287689_15 (sequence is synthesized)
gtgtctgtatctgtaactgtcactgtatctgtatgtgtatctgcaactgtatagtatctgtatatttaaaactgtatctgtatttgaaactatatctgtgactgtaactgtatctgttac

SEQ ID NO: 1026102 - DNA, 120 bp, Artificial Sequence
  ENSG00000287689_16 (sequence is synthesized)
taactgtatctgttactgtatctgtatcagtaactgtatctgtaactgtatgggtacctgtatttgtatctgtatctgtatttaaaactgtatctaggccaggtgcggtggctcacgcct

SEQ ID NO: 1026103 - DNA, 77 bp, Artificial Sequence
  ENSG00000287689_17 (sequence is synthesized)
tgaacccggcaggcggaggttgcagtgaggagagagaatcaaaccaccccccccaccccccacttgccacacacaca

SEQ ID NO: 1026104 - DNA, 120 bp, Artificial Sequence
  ENSG00000287689_18 (sequence is synthesized)
atcaaaccaccccccccaccccccacttgccacacacacacaaactgtatctataactgtatctgtaactgtaactgtaactggatctatgtttgtatctgcatctgtgtctgtaactgt

SEQ ID NO: 1026105 - DNA, 120 bp, Artificial Sequence
  ENSG00000287689_19 (sequence is synthesized)
aactgtgtctatctgtatctgtattggtaactgtatctgtatcaactgtaactctctatctataactgtatgtataattgtaactgtatctgtatctgtacctgaaactgtatctatatc

SEQ ID NO: 1026106 - DNA, 120 bp, Artificial Sequence
  ENSG00000287689_20 (sequence is synthesized)
tgtaattctaattatatctgtgtctgtatcaactgtaactgtatctctaactgtatctgtaactgatctgtatctgtaactgtcactgtatctgtatctgtaactccatctgtaactgtt

SEQ ID NO: 1026107 - DNA, 120 bp, Artificial Sequence
  ENSG00000287689_21 (sequence is synthesized)
tctgtatgtttatgtttgccttgtatttacaatggtggatccatgtcatatgtttatccaaattcacagcatgtagagcaccaagagtgaaccctaatgtgaactatgaacttcaggtga

SEQ ID NO: 1026108 - DNA, 120 bp, Artificial Sequence
  ENSG00000287689_22 (sequence is synthesized)
taatgacgtgccaagtgtaagtttattgatggtagcaaatgtaccactctggtgggagatgttgatgtgggggaggatgtgcctgccagggggcaggagtagatagaaaatctctgtacc

SEQ ID NO: 1026109 - DNA, 120 bp, Artificial Sequence
  ENSG00000287688_0 (sequence is synthesized)
ggcaccgaagcatcaactatcttggaactctgccaactagaacctcggcctcaactgacacatccaaactaatggctgagtgtcttttttagcagcatcaagcaactcctttacaatacc

SEQ ID NO: 1026110 - DNA, 120 bp, Artificial Sequence
  ENSG00000287688_1 (sequence is synthesized)
acccaaagtaattttcctgaagaaattctccttgtatctaacttcattcaggttcttggggcttgccaaatagccagcaatgtgaccttaacttggtcagttgacatctctggtcttaag

SEQ ID NO: 1026111 - DNA, 120 bp, Artificial Sequence
  ENSG00000287688_2 (sequence is synthesized)
tttcctaatctgcaacatttgaaggtttattttctaaacgtttttactttagtactaatttctgtgagacaatcaagctattcaatgttaggttgaggtatgtaaatcattcctgccagc

SEQ ID NO: 1026112 - DNA, 120 bp, Artificial Sequence
  ENSG00000287688_3 (sequence is synthesized)
ctttgtacgaggtggttctggtatcactgtggcccagcatgtgtctgtctatcagtgttggcagataaagatgaacaagatggaggggtgcaggatgcttggtgaatacagaacatacca

SEQ ID NO: 1026113 - DNA, 120 bp, Artificial Sequence
  ENSG00000287688_4 (sequence is synthesized)
cctgtgctttggaactgccttccccactgtcatggcatgctagaaggggatggagacctagaaatcgttcagaccctcactagttaaagtgtggtccgtgcaccagcggcatcagcatca

SEQ ID NO: 1026114 - DNA, 120 bp, Artificial Sequence
  ENSG00000287688_5 (sequence is synthesized)
acctcctgaccagaatccgcattttaacacagtatgcagccgctgagacaagtgatgtcacctgccaatactgtagattgaataaccagggaaggctgaggaatgcaagtgaatgtaaaa

SEQ ID NO: 1026115 - DNA, 120 bp, Artificial Sequence
  ENSG00000287688_6 (sequence is synthesized)
accacctggagggaagcattgcagcaagaaaggaacagcaagtgcagaggcctgaggcagaaccagcagggaaaatgctttgaggttccatgaaaacctggaagaaatattcctgaggac

SEQ ID NO: 1026116 - DNA, 120 bp, Artificial Sequence
  ENSG00000287688_7 (sequence is synthesized)
catccaacaccatttccctgagagacaagctgtaagtgctgttctagttacagatccgagtccctggtacattgatatcaagtaagggtgcatgcagctcagaaggcagtttccattaca

SEQ ID NO: 1026117 - DNA, 120 bp, Artificial Sequence
  ENSG00000287688_8 (sequence is synthesized)
ctggacaagagtgtggctgcctgagtcctagaactgcagtggcttctgctgacaatgtgaggagtagctgccctgtccagagtgtggccccgcacgctgccccctcccctggagggactg

SEQ ID NO: 1026118 - DNA, 120 bp, Artificial Sequence
  ENSG00000287688_9 (sequence is synthesized)
aagagaacagcttggagcatgcccttccctttcccttatctcgcccactatgctaatgctgctcatccctcaagatccgagttattcctcctcaattcaatacacaccaatcaactgccc

SEQ ID NO: 1026119 - DNA, 120 bp, Artificial Sequence
  ENSG00000287688_10 (sequence is synthesized)
gtctatcagtgttggcaggcaaggtcactaaggctggtttgaagtttctgtgccttgaaatttcttatgtcatggagtcacctgacattcagatcaaaggccgactccgctctatgtttg

SEQ ID NO: 1026120 - DNA, 120 bp, Artificial Sequence
  ENSG00000287687_0 (sequence is synthesized)
agctacgtgctgcctggcatgtgcactctgccaggtccctggagggcactgctgtctctcacttgctcagggttcaggagttgttaatcccggattcagataataatatccaaaggcaat

SEQ ID NO: 1026121 - DNA, 120 bp, Artificial Sequence
  ENSG00000287687_1 (sequence is synthesized)
caggggacattgaaccagctggagctgaaggctcctctctgtgggccttggaaggaggggcctctgcattcctccgcctgccataggctgggcctgcagcaagtgctcaactacagtggg

SEQ ID NO: 1026122 - DNA, 120 bp, Artificial Sequence
  ENSG00000287687_2 (sequence is synthesized)
aagaatggctgagtgaaggagagaccctcccagactacaatgcaaacaaataacaaagaaggaggaggagaatcaatatggattggttcacaggacccacagcagagggacagctgggtc

SEQ ID NO: 1026123 - DNA, 120 bp, Artificial Sequence
  ENSG00000287687_3 (sequence is synthesized)
acagcttcagggtggaagccggtcaccaaaaagcccaagccgtgattagaagcttggaactttcagccacaccccacccctatcctccaggaaagaagaggggctagaggttgaattaat

SEQ ID NO: 1026124 - DNA, 120 bp, Artificial Sequence
  ENSG00000287687_4 (sequence is synthesized)
aaccattcatgccttcttgattaagcctaataaaagtcgccaaagtacagggttcagagacctgggttggtgaacacatctatgtgccaggaaggtggtgtgccctgactcactggagac

SEQ ID NO: 1026125 - DNA, 120 bp, Artificial Sequence
  ENSG00000287687_5 (sequence is synthesized)
agaagctcctgcaatcagacccttccagacctcaccctgtgtacctcttcatttgcctgttcatctgtattcattatcatatcctttataataagccaataaacataagtctctctccaa

SEQ ID NO: 1026126 - DNA, 120 bp, Artificial Sequence
  ENSG00000287686_0 (sequence is synthesized)
accattagccgcgggaatatcagtatggtgactccttaccctggggaagtgtacttaggccacggctagtgagaacgtggccatggacaagaattccaagtagtggcacttctgtagacg

SEQ ID NO: 1026127 - DNA, 120 bp, Artificial Sequence
  ENSG00000287686_1 (sequence is synthesized)
acgcggcccttttggggttactacagcccaggaaactcacatgcgacacggcgccagctgaagtccatctagacccccgcagacccaaggtcacaagttgagaaccccctgccgtggaca

SEQ ID NO: 1026128 - DNA, 120 bp, Artificial Sequence
  ENSG00000287686_2 (sequence is synthesized)
ttcttctgcacctagtggtgaagcaggtggagctgcaccttgctccgcccatttggagactggttctgcacatatgagtgtgccctgcagcgatcctgcaatccttcgtgactaacaagg

SEQ ID NO: 1026129 - DNA, 120 bp, Artificial Sequence
  ENSG00000287686_3 (sequence is synthesized)
actttctgtgaaaacagatttatcttttcttctctacctttaaggtttcttgctgttgagaatagttaagggacgaggaattcttattgcccccattttacaggcaaagaaactaatgct

SEQ ID NO: 1026130 - DNA, 120 bp, Artificial Sequence
  ENSG00000287686_4 (sequence is synthesized)
gaccccaaccttaccgaccacttggaggtccctaaaaacacatgacctttgtgtttctcggctgttagtggaatcctttctgtctgctcatgaactcatcttcaaacgcattccaggcct

SEQ ID NO: 1026131 - DNA, 120 bp, Artificial Sequence
  ENSG00000287686_5 (sequence is synthesized)
cttccgtgagcgcaagtcactggtatgggccactgttaactgccggttatcacctagattttcttaactatgctttgccctctgaggccgtgagctcttgaatcttcaccttagtctgta

SEQ ID NO: 1026132 - DNA, 120 bp, Artificial Sequence
  ENSG00000287686_6 (sequence is synthesized)
ggaggaaaagttgtttgagatgatatttgaatccttcattttaggccaaattcagaacatagcaaaaggttctggctaacatgcagaacagtatgtctggactcccactactgttggtct

SEQ ID NO: 1026133 - DNA, 120 bp, Artificial Sequence
  ENSG00000287686_7 (sequence is synthesized)
gcaaagttgaaggctactctaggcaaatatgtcacctttaatgtatctccttaggaggagtctttcaccttattcatgctcctcagcacccacaccaaaagattcatgaagtaaatgtta

SEQ ID NO: 1026134 - DNA, 120 bp, Artificial Sequence
  ENSG00000287686_8 (sequence is synthesized)
cctagtctctgctttaccccattacccccggcctgaggacctttgaaccattttaaatgctctacctgccagcctggccatctgtgcattgcttgctccatccacccttctgactcagct

SEQ ID NO: 1026135 - DNA, 120 bp, Artificial Sequence
  ENSG00000287686_9 (sequence is synthesized)
gaaataccaccttcccaaagaagtctaagtgaccacctcatctaaattgggtttcctgcccacccctcctctatcactttgcgcatggttgtatttctatcacagaacttccgtccatca

SEQ ID NO: 1026136 - DNA, 120 bp, Artificial Sequence
  ENSG00000287685_0 (sequence is synthesized)
ccactggactaaatacaatttttgtatcactatattttaaccgtgaaaatcacatttggctgagaataatctcttcttgcctatttctaccagtttgtcttctagcaggacaaggaaaag

SEQ ID NO: 1026137 - DNA, 120 bp, Artificial Sequence
  ENSG00000287685_1 (sequence is synthesized)
tgaaaagagacaaaagctccagaatctttggaccatgaggcccagagagaagagcttaatacagcctcccaaacagttggagtgaaaggaatcctgtgaaggacacaagtgaagaagccc

SEQ ID NO: 1026138 - DNA, 120 bp, Artificial Sequence
  ENSG00000287685_2 (sequence is synthesized)
tgataacctgctgaataaagagagatctgtggtccagtcacccctactgcttccgccaatagcctaagaaatgctggataagtgagtgaggctatccttggtcatctctgctagctgact

SEQ ID NO: 1026139 - DNA, 120 bp, Artificial Sequence
  ENSG00000287685_3 (sequence is synthesized)
ggcaagctgactacaacagcataaaagaacccaatggaattggagagctaatgacccataaaactcagagttgatattttaaagtgctttatagttttctttttatatatgcaccactat

SEQ ID NO: 1026140 - DNA, 120 bp, Artificial Sequence
  ENSG00000287685_4 (sequence is synthesized)
agtgtccattttcaaattattcatctgttgattcctagggaaaattaatagtctataacataaagttcctttaaaacttggatatgaagtctttgtagtgttacctttttttagcagtgg

SEQ ID NO: 1026141 - DNA, 120 bp, Artificial Sequence
  ENSG00000287684_0 (sequence is synthesized)
tccttctctatattttttgccctgggctttgagatactgcttcaacttgagcttttggggaactaattagtgtttcaacagcacagcagagacagcatttcacaaagcaaaactgctccc

SEQ ID NO: 1026142 - DNA, 120 bp, Artificial Sequence
  ENSG00000287684_1 (sequence is synthesized)
taatctcagatatttgcctgcccaattagctggaggctccttgatggcagagactgcctccttggtatccccagcacacagcacagaacctggcacataccttcagccttgggaacttct

SEQ ID NO: 1026143 - DNA, 120 bp, Artificial Sequence
  ENSG00000287684_2 (sequence is synthesized)
gtgtgtttattgcacattcatgaaggttacagtaaataatactcaaatgaagagaccaagatgattaaaattgtaagttgcctatgcatggatttagaaagcaaaaaaggagaccaagga

SEQ ID NO: 1026144 - DNA, 120 bp, Artificial Sequence
  ENSG00000287684_3 (sequence is synthesized)
cttagcttaaagctattctttctataaaccttgtctggctcaatctcttgttcattcaccgcctcccccaccatgttccctaatattgatatactaagcttacagggtcaagtgttgaat

SEQ ID NO: 1026145 - DNA, 120 bp, Artificial Sequence
  ENSG00000287684_4 (sequence is synthesized)
ttgtgctctgctcctccttttcctcttcctcctcctcctctgtgctatattcttccatgatgtctccgtcaacaaaatggataatccttttaggagtagtctttttggaaggtacactct

SEQ ID NO: 1026146 - DNA, 120 bp, Artificial Sequence
  ENSG00000287684_5 (sequence is synthesized)
tctctaggtctaactgctggaaaccgtcaatctccataatgaaacaaaacaactagaaaattaaaaacagggcaccttagggcaagttacccagagctgagagttatctagttattttca

SEQ ID NO: 1026147 - DNA, 120 bp, Artificial Sequence
  ENSG00000287684_6 (sequence is synthesized)
atggatagtaaagacagagaactcagaggtaatcacacctgtgacctcatcgattcctcaaatccaaaaaaggactgttctattctgtaccaaaatggaagagatttgataaatagcgaa

SEQ ID NO: 1026148 - DNA, 120 bp, Artificial Sequence
  ENSG00000287684_7 (sequence is synthesized)
aacgtgaacttacagtcttcaaacaaaagtgtcaacagggttttcttaccttttgttaacgttaaaacacacaattgctagtaggaaggggtcactatcctgcagacgtttctcaattat

SEQ ID NO: 1026149 - DNA, 120 bp, Artificial Sequence
  ENSG00000287684_8 (sequence is synthesized)
ttcaataaatattgagaagcaatgaaggaaatggttaagagtacagacttcacacagacaggagaaaacatgtgcaaagtatatatttggtaaaggacttattttcagaacatgtaaaga

SEQ ID NO: 1026150 - DNA, 120 bp, Artificial Sequence
  ENSG00000287684_9 (sequence is synthesized)
gcgattacaattcaacaggtaaaaggcaaataactcaattaaaatatgggcaaaatatttgagtagagattttaccaaagatatacagatgacgaatgtcattagtcatttgggaaatgc

SEQ ID NO: 1026151 - DNA, 120 bp, Artificial Sequence
  ENSG00000287684_10 (sequence is synthesized)
gtcatttgggaaatgcaaattaaaatcataatgagatatcataacatacccactgtaatggctaattttctttcttttttttgaaacagacttttttgctcttgttgcccaggctggagt

SEQ ID NO: 1026152 - DNA, 64 bp, Artificial Sequence
  ENSG00000287684_11 (sequence is synthesized)
atgtcgagtgcagcctaaaatttttttggggggctgcagagacagagtctttctctgtcaccca

SEQ ID NO: 1026153 - DNA, 89 bp, Artificial Sequence
  ENSG00000287684_12 (sequence is synthesized)
cttacctcccaggcttaagcaatcttcccgcctcaaccacctgagtagctggcaccacaggtgcgtgccaccaagcctggctaattaaa

SEQ ID NO: 1026154 - DNA, 120 bp, Artificial Sequence
  ENSG00000287684_13 (sequence is synthesized)
cacctgagtagctggcaccacaggtgcgtgccaccaagcctggctaattaaaaaaaatttttttttatagagatggggtctcactatgttacctaggctggtcttgaactcctgagctca

SEQ ID NO: 1026155 - DNA, 120 bp, Artificial Sequence
  ENSG00000287684_14 (sequence is synthesized)
agaaatgaaagcgtatgtctccctaaagatttgtatgggaatattcgtagcagttttatttgtgaacactccaaactggagtcaactcaatgtccatccactgacgatggataaacaaaa

SEQ ID NO: 1026156 - DNA, 120 bp, Artificial Sequence
  ENSG00000287684_15 (sequence is synthesized)
tgtggtccatatatttaatagaatactcctcagcaattaaaagtaataaacaatgaatatttgtaacactgtgactctcaaatgtattatgctaagcaaaagaagccagacactgcatcg

SEQ ID NO: 1026157 - DNA, 120 bp, Artificial Sequence
  ENSG00000287684_16 (sequence is synthesized)
tatataattccatttatgtagaaatttagaaaaggcaaaattatagtagaaaacagatcactgtttgctagaggagagtgggtaggggttaagattaactataaagtgacaaagggagct

SEQ ID NO: 1026158 - DNA, 120 bp, Artificial Sequence
  ENSG00000287684_17 (sequence is synthesized)
ttttggggtgacggaagtgttctaatagatatcatgatcataatgtcggttacttgactgtataatttgtcaaaatgaatcaaattctacacttaaaattagttcattttattgtattta

SEQ ID NO: 1026159 - DNA, 120 bp, Artificial Sequence
  ENSG00000287684_18 (sequence is synthesized)
aggtatatcttaataaagctggaaagctttggagatagacttcctggatttaaaatcctattatttaatatcccagtgtcttggttttctcatttataaaataatagtatgaaatgatat

SEQ ID NO: 1026160 - DNA, 120 bp, Artificial Sequence
  ENSG00000287684_19 (sequence is synthesized)
agtgccaaccttataaaattgtaatgaagagtaaatgagtaaagacacataaagaagttagaacaattcttagcaaatggtgtttaataaaagctggctattattaagtacctataattt

SEQ ID NO: 1026161 - DNA, 120 bp, Artificial Sequence
  ENSG00000287684_20 (sequence is synthesized)
gctggctattattaagtacctataatttacttagcagtgtatatgtcaggcagtattccaatgttgtaaggatacgtacacatgtatttttgcctttttttttttttttttgagatggag

SEQ ID NO: 1026162 - DNA, 120 bp, Artificial Sequence
  ENSG00000287684_21 (sequence is synthesized)
cctggcctcatattgttttaattaagatttaagatactttaaaattatatcaaccaatatggctgaatgatgtagaataattcttcctattccagacacacagaaatgctggatgaaatt

SEQ ID NO: 1026163 - DNA, 120 bp, Artificial Sequence
  ENSG00000287684_22 (sequence is synthesized)
aaatgaaaacattaaatcataagtacactaaggaagcagaaaaaagagagagacctagggatagagatgagagagagaggggcagggggttgaaagcaagtcagccagcctagatgtcag

SEQ ID NO: 1026164 - DNA, 120 bp, Artificial Sequence
  ENSG00000287684_23 (sequence is synthesized)
aataagagaaagaacaaaactataagtatgagctgaagccgagatggttgctggggggttcagaaccagatataggccttggagctggagttttattaccaatagagagaagagagtcca

SEQ ID NO: 1026165 - DNA, 120 bp, Artificial Sequence
  ENSG00000287684_24 (sequence is synthesized)
aatctcagatcccatgagtgtggagagctgaaatgaagccacctgcataaaactaaggtaataaaatactatcttatctataaaatatggacaggaaaatctacccccagcttgcaaaag

SEQ ID NO: 1026166 - DNA, 120 bp, Artificial Sequence
  ENSG00000287684_25 (sequence is synthesized)
tagcaaagtaatttgctatctcctagcaacaagggtagaaatagtcacctaaaaaatattggaaacccccgccagtaccacatgctggtgtgtggcccaaattcatagtcctcatatgct

SEQ ID NO: 1026167 - DNA, 120 bp, Artificial Sequence
  ENSG00000287684_26 (sequence is synthesized)
gtgaaaacctaagatgaagctgagtgaaataaaggcagtgtaatccactgaactctgtcagacgccaagtacaaagtcaccttggaggaataattcaacaagacagggtatactgaatct

SEQ ID NO: 1026168 - DNA, 72 bp, Artificial Sequence
  ENSG00000287684_27 (sequence is synthesized)
cttggaggaataattcaacaagacagggtatactgaatctccactaaaaacaattcgcaaggcgggtggatc

SEQ ID NO: 1026169 - DNA, 120 bp, Artificial Sequence
  ENSG00000287683_0 (sequence is synthesized)
agacctgggcactccagggagccggtggcgccctcgctcgagaaggagtcgggaagaggagagtggctttcgggaagaggagagtggctttcgggaagcatctcctctgaggaagaggcg

SEQ ID NO: 1026170 - DNA, 120 bp, Artificial Sequence
  ENSG00000287683_1 (sequence is synthesized)
gcggcggcggcggcatttacggagagaaaaaattctctgaaaattccatttgaaacactgaaaaaacaccatctattttcttttggaaaatgaggtcttagttccagagggaggaatgtt

SEQ ID NO: 1026171 - DNA, 120 bp, Artificial Sequence
  ENSG00000287683_2 (sequence is synthesized)
gcaccaggagacacaacaacgattccattgaactggaagttgagacaactgctacctggccactttgggctccacctgcctctaagtcaagagactaagaaaggagttacagtgctggtt

SEQ ID NO: 1026172 - DNA, 120 bp, Artificial Sequence
  ENSG00000287683_3 (sequence is synthesized)
tgggtgactgacctggactaccaagatgaaatcagactactactccacaatggagtattgcttctgagcaagaaactcacttcaaaacaaaagaagtgcaagaatgggctcatgctcatg

SEQ ID NO: 1026173 - DNA, 120 bp, Artificial Sequence
  ENSG00000287683_4 (sequence is synthesized)
gatttcactgatttcaccatgttccccaccaatctgaagcagctggcttgatagaatgatggaatgttcttttgaagactgaattacagcaccagctaggtaataatacctttcagggct

SEQ ID NO: 1026174 - DNA, 120 bp, Artificial Sequence
  ENSG00000287683_5 (sequence is synthesized)
ggagcaagattctccagaaggctctgaatcagtgtcattatgtggtactctttctctgatagccaggatatataggtctaggagtcaaagagtggaaatgggagtggcatcacttacaat

SEQ ID NO: 1026175 - DNA, 120 bp, Artificial Sequence
  ENSG00000287683_6 (sequence is synthesized)
tacctttggtgacccactagcaaaatttttggttcctgtttctgcagctttaatttctgtcagcctagaggtcttagttccacagaaacaaatgcttctaccaggagacacaacaatgat

SEQ ID NO: 1026176 - DNA, 120 bp, Artificial Sequence
  ENSG00000287683_7 (sequence is synthesized)
ttcattgtgttggatgttaagactgccacctggccattttgggttcctcatgcctttgagtcaacaggcaagaagaaagatgtggtgttggctgggattattaatcctgatgacgaaggg

SEQ ID NO: 1026177 - DNA, 120 bp, Artificial Sequence
  ENSG00000287683_8 (sequence is synthesized)
gaaattgaactaatcctcctcaataaagggagaaacagaaataatgaaggatgaaaatttggagaggcactgtttttagtaatagtcttacatatgaggtaaggcttaaagttgccaaaa

SEQ ID NO: 1026178 - DNA, 120 bp, Artificial Sequence
  ENSG00000287683_9 (sequence is synthesized)
tggaatctggaaataaaaatccatcagccttatgtctaaagtaaatcataattgttctgaaaatgattaacgctgggtgacagccaatgctcctttgataaaatagtacttagtctgatt

SEQ ID NO: 1026179 - DNA, 120 bp, Artificial Sequence
  ENSG00000287683_10 (sequence is synthesized)
ttcatacagggctatagtaattccaaaacataggttacaaaaatggctcagatgccaggaaattaaacagagtttcccaggatagcagacaattgtttgtttgttttttctatttcagtc

SEQ ID NO: 1026180 - DNA, 120 bp, Artificial Sequence
  ENSG00000287683_11 (sequence is synthesized)
tcacattcctctaagttttgctttttcttcttatgagcatatttggcaaaccatgtacctattgttcaaggagcttcctacaatttctttgctgatttgactgcatcagagtagaagtta

SEQ ID NO: 1026181 - DNA, 120 bp, Artificial Sequence
  ENSG00000287683_12 (sequence is synthesized)
gtaaataacaacatgacagtactattcagtgactttttactttgcaaattacacaaaatatttttaataactttgtaataaggtgggatccaggcagatcaaattctcataatttgtcaa

SEQ ID NO: 1026182 - DNA, 120 bp, Artificial Sequence
  ENSG00000287683_13 (sequence is synthesized)
aggtagccattaaaattgtaatagtttattggaatttcttgattcctggagtgcaaaaaactattaagctgagtctctgtcatcatatagtgtatttaaatgcttcttttagacaattct

SEQ ID NO: 1026183 - DNA, 120 bp, Artificial Sequence
  ENSG00000287683_14 (sequence is synthesized)
ttgcattccacaccacacttcctgtatgcaatattgccaagctcaggctctttcttcccatgggcataacttaaatgcatctagaaaatgatttgaactgtagagtgcatatcattttaa

SEQ ID NO: 1026184 - DNA, 120 bp, Artificial Sequence
  ENSG00000287683_15 (sequence is synthesized)
actggagagaagaataaagccttggagacagcacagtatgtggttgtagtagtccaaggtaaaaatgacctaagtgtcaacgagggatttgaatgctagactagcgtggttattaatgga

SEQ ID NO: 1026185 - DNA, 120 bp, Artificial Sequence
  ENSG00000287683_16 (sequence is synthesized)
caaatactctttcctcaacgaaggaactgcttctattccttgtggttatgggaataggaaatggaaagagacaacactttactggcagacacattactgaccctgcagaggcagcaagaa

SEQ ID NO: 1026186 - DNA, 120 bp, Artificial Sequence
  ENSG00000287683_17 (sequence is synthesized)
aaatgagcagagaaagcttcagagaagagagtcctgccaagcagaataattgctgcaagaagtacaggattccttggacatggtggtgactgggttggataaccacctatcagagtagaa

SEQ ID NO: 1026187 - DNA, 120 bp, Artificial Sequence
  ENSG00000287683_18 (sequence is synthesized)
tggatcaaccaaagggttgttgaatcaaatcatcctagaatgttgaaatcactgggaaagaagcaaaggcatcctgattcctgtcatttctgagtcatgggtatttgagggagccaacct

SEQ ID NO: 1026188 - DNA, 120 bp, Artificial Sequence
  ENSG00000287683_19 (sequence is synthesized)
ctcactgcacttgggatacacattgacagcgatttgctagccataaatctggcatgatcttgaattcaaatattcattctgtaatcagaaaatgtcttgatgttttgctttcataagtat

SEQ ID NO: 1026189 - DNA, 69 bp, Artificial Sequence
  ENSG00000287682_0 (sequence is synthesized)
accaccatgcccagccggaaaaccattggtacttgccccaggtaggaggaggagcagagaacagaaggt

SEQ ID NO: 1026190 - DNA, 120 bp, Artificial Sequence
  ENSG00000287682_1 (sequence is synthesized)
tacttgccccaggtaggaggaggagcagagaacagaaggtttctgtggagctgcgttaatcaccaaggagaggcagatggctccaagcccacagagtgtgacccaggtctgctggagttt

SEQ ID NO: 1026191 - DNA, 90 bp, Artificial Sequence
  ENSG00000287682_2 (sequence is synthesized)
ctccaagcccacagagtgtgacccaggtctgctggagtttgctcgaggtccactccagaccctgttgaaagattgctgcctgttccttcc

SEQ ID NO: 1026192 - DNA, 120 bp, Artificial Sequence
  ENSG00000287682_3 (sequence is synthesized)
cccagagaggaggaatctagagaggcagactggatacagcagctttgctgagctgtggtgggctccgcccagtttgaacttcctggagtcttcatgtacactgtgaagggaaaactacct

SEQ ID NO: 1026193 - DNA, 120 bp, Artificial Sequence
  ENSG00000287682_4 (sequence is synthesized)
tacactgtgaagggaaaactacctactgaagcctcagtaatggtggacaccactccccacaccaagctcaagtgtcccaagttgacttcagactgctgtgctggcagtaacaatttcaag

SEQ ID NO: 1026194 - DNA, 120 bp, Artificial Sequence
  ENSG00000287682_5 (sequence is synthesized)
accgcctggcttcctgacttcagacccctttccaggggagcgaatggttctgtctcgctggcattccaagcaccaccggggtatgaaaaaaactgcagctagcttggtgtctgcccaaac

SEQ ID NO: 1026195 - DNA, 86 bp, Artificial Sequence
  ENSG00000287682_6 (sequence is synthesized)
ttgtgaagactatgggaaaagcatagtatctgggccagaaggtactgttcctcatggtgcagtccctcatggcttcccttggctag

SEQ ID NO: 1026196 - DNA, 61 bp, Artificial Sequence
  ENSG00000287682_7 (sequence is synthesized)
agctcactctctgtgggctgcacccactctttaaccagtcccaatgagatgagctgtgtac

SEQ ID NO: 1026197 - DNA, 120 bp, Artificial Sequence
  ENSG00000287682_8 (sequence is synthesized)
acccactctttaaccagtcccaatgagatgagctgtgtacctcagttggaaatgcagaaatcatctgccttctgtgttgatcttgctgggagctacagaccagagctgttcctattcagc

SEQ ID NO: 1026198 - DNA, 120 bp, Artificial Sequence
  ENSG00000287682_9 (sequence is synthesized)
catcttgccagccaaatattttcttaagaagatgaagttaacagactatctgacactgtgtttcacaatgtttatgggagttttagatatgtgacagagtttggaattgaattgatgata

SEQ ID NO: 1026199 - DNA, 120 bp, Artificial Sequence
  ENSG00000287682_10 (sequence is synthesized)
agtaaatatactactcatcttatgagcaaataagaaaaaacaagcaaacagcagttccttctcacctgggtccttctttctcccattcccagtcaataaaagcttgtgcaggaaatggaa

SEQ ID NO: 1026200 - DNA, 120 bp, Artificial Sequence
  ENSG00000287680_0 (sequence is synthesized)
attcagtaaaatacttttaaaaagcctcaggcaagaacatgattttccagattaggagaaggtgatataataattagtcaaatgggaagaaaggcgttccaagatatcatttatcaaaat

SEQ ID NO: 1026201 - DNA, 120 bp, Artificial Sequence
  ENSG00000287680_1 (sequence is synthesized)
ggccttggataactctcttcaacctctttggtgctgagctacttctagatatacatagttttagaaaagaatgcatactaacattaacgttttgagaaaatttatcatgatcacagaatc

SEQ ID NO: 1026202 - DNA, 120 bp, Artificial Sequence
  ENSG00000287680_2 (sequence is synthesized)
agatattgcttatattttatagggcctatcagaatgaagaaactgaaatatttcccatctatgcatctagaggagggacaacatggcagagattcctgtaagtcttgggttatttctgag

SEQ ID NO: 1026203 - DNA, 120 bp, Artificial Sequence
  ENSG00000287680_3 (sequence is synthesized)
tgctggttatcgtggcatctgaaaatgtaaataagtgatgtaccctgtggggtagctctgctgcaggcaccccggggacctgctggtgaccctgcccttctcctgctgcgatcatcccag

SEQ ID NO: 1026204 - DNA, 120 bp, Artificial Sequence
  ENSG00000287680_4 (sequence is synthesized)
gccagcgtgacactcagcagcgtggacgtctctctgcaaacgcccaaatgcagtgtatgaaatgtcatccctagaaatggcttcatttgggataaagctttgaacttgcgtgcgtgcccc

SEQ ID NO: 1026205 - DNA, 120 bp, Artificial Sequence
  ENSG00000287680_5 (sequence is synthesized)
gcaccccgtggcggactgagtcactgctttgctgttgcggcgtggtgagtaaaactttcccaggggagccggagttgagtgagaaagggatgcaggacacgcaggagctgacacatctct

SEQ ID NO: 1026206 - DNA, 120 bp, Artificial Sequence
  ENSG00000287680_6 (sequence is synthesized)
tcagctttccaggccggatctggtcccagccattctacctgacccagactccccgcacccctgccattcccccagctgccgtcctgtgtctcctgatttctgcgtttttgatcctgaggc

SEQ ID NO: 1026207 - DNA, 120 bp, Artificial Sequence
  ENSG00000287680_7 (sequence is synthesized)
tctctgcctctctgcctcctccctggaggccgtgcaaatcctgttctccttccagcggtgagttcctcctgctgaccacctcccccgatgccctccacgctgcacactgggctggtctgc

SEQ ID NO: 1026208 - DNA, 120 bp, Artificial Sequence
  ENSG00000287680_8 (sequence is synthesized)
agaggtcgaatgcactccctggtgacttacacatctcacaagtgccctccatcacctgcttgtgaactcctgaccacagcagcctactccatgtccccctgtggatgctgcaatgcccag

SEQ ID NO: 1026209 - DNA, 120 bp, Artificial Sequence
  ENSG00000287680_9 (sequence is synthesized)
caccacactggtggctcaaagactgcatgcctgagacggggtccaaacccctcttcaactgtcctccaagcttcaggtccaccgtgacctcccccaactctgctgcagctgccgtggtgc

SEQ ID NO: 1026210 - DNA, 120 bp, Artificial Sequence
  ENSG00000287680_10 (sequence is synthesized)
cagccccctgcccctctcctccacctccatagatcaggcttcagtgtctggggacctggggactgctgtcctccttcccagcatgaagttctactgcaagggccactctccctgtacagg

SEQ ID NO: 1026211 - DNA, 120 bp, Artificial Sequence
  ENSG00000287680_11 (sequence is synthesized)
ccttcctgacccctcgtccctggaaagccctctccagggccctcggcctcgctgtctcacatcactcgcctccctaccccacctccctcctcgcacctgggacgcaggtgccctccggtc

SEQ ID NO: 1026212 - DNA, 120 bp, Artificial Sequence
  ENSG00000287680_12 (sequence is synthesized)
acacccttccatcccgtgtggtgctgagcccctcacacacacgaggggccccggaatcacctgccacgtgaataaacaaagtcagatctgaaatgcttaaaagcaaattaaacttaactc

SEQ ID NO: 1026213 - DNA, 120 bp, Artificial Sequence
  ENSG00000253417_0 (sequence is synthesized)
gctaatgctgtatatatggcttacgttcaggctctcctgtgcccagagagagaataaagccatgttgaaaccgtccacaattgcttaagtgtttttccagctaccgccactcgcctgact

SEQ ID NO: 1026214 - DNA, 120 bp, Artificial Sequence
  ENSG00000253417_1 (sequence is synthesized)
ccccttggacctcagttagaacctgacatttggcgccatgaacagatcctgagatttagaagcagtggcgcccttcttgtggcaacatttggctgcatgtggttgggccatcaacaaatc

SEQ ID NO: 1026215 - DNA, 120 bp, Artificial Sequence
  ENSG00000253417_2 (sequence is synthesized)
caaggtccaacagcctggattatctgcgagattcctgggagttatctggtcagatacaagactcaaaggaaccatgcggagctgataaagtgtggcaccatctcccagggcaaaaactgt

SEQ ID NO: 1026216 - DNA, 120 bp, Artificial Sequence
  ENSG00000253417_3 (sequence is synthesized)
tggcatctgcattgttatccagagatgaaaggttagactgtattttgcctgagggacatgatttaactctgttagtacctgtgcctgctctgtcatttcgaccgtaggttgacatgctcc

SEQ ID NO: 1026217 - DNA, 120 bp, Artificial Sequence
  ENSG00000253417_4 (sequence is synthesized)
aactgcattgtggactgggcccacaccttcactgaggtgaccaatgtttccaactgttggatctgcaccatccttccaggagcagctgcagatggcttgccttggcacatacattcagca

SEQ ID NO: 1026218 - DNA, 120 bp, Artificial Sequence
  ENSG00000253417_5 (sequence is synthesized)
tctgcagagaaatggacatggctggagactttgagtcccatggccgacacctggaatgcgacagggcaagctgcagacaaagaattccgcaagacccatagcatgcctgccccatcttgc

SEQ ID NO: 1026219 - DNA, 120 bp, Artificial Sequence
  ENSG00000253417_6 (sequence is synthesized)
ctgtagcatttatgatgggaggggctggctagtggggaaatatgtagtacccccagctcagggacggcagtgcatagaggaacactggggtaacaccactgtgggatggctaccctgcaa

SEQ ID NO: 1026220 - DNA, 120 bp, Artificial Sequence
  ENSG00000253417_7 (sequence is synthesized)
ggcctgtgtaaacataacacatgtcaccacaccgaaggtatggtggaacatgcggccccacccaaggtcaggccctgatggattttatgacccctgggagtttatgggtcattgaggaca

SEQ ID NO: 1026221 - DNA, 120 bp, Artificial Sequence
  ENSG00000253417_8 (sequence is synthesized)
cagggtgtccttacctaccagcagactggcctggacgttgtacctgagtttggccttacgtacctggcactgttctccctgctttgcccagatgccagaataactgggaggtgctatgct

SEQ ID NO: 1026222 - DNA, 120 bp, Artificial Sequence
  ENSG00000253417_9 (sequence is synthesized)
cttggaagtgactatccctggagtgggtatcataactgtaaaagcagaagttactgcttttgcagagcacaccgctcgggctctgaatcacacccgaggggccctcctcctgtcaattga

SEQ ID NO: 1026223 - DNA, 120 bp, Artificial Sequence
  ENSG00000253417_10 (sequence is synthesized)
tgcagttgatcagatcaggaaggtggtgttgcaaaaccgaatggccttagacatagtaactgctgcccaaggaggcatctgtacccttttaggaacacaatgttgtacctttatccctga

SEQ ID NO: 1026224 - DNA, 120 bp, Artificial Sequence
  ENSG00000253417_11 (sequence is synthesized)
cagtcagcagaacataacagcagcccttcaaggggtctcatgggagaataagtttctagggagccttactgatgaacccctgcagagaaggaggggcatccctaggctctggcctatgct

SEQ ID NO: 1026225 - DNA, 120 bp, Artificial Sequence
  ENSG00000253417_12 (sequence is synthesized)
gggccccaatagttataaatagcgtaactgggatcctagtagctgttgctctctgtattgttattgtgggttatagattcagggctctgctgtatgggcacatgtctctgcccggaggac

SEQ ID NO: 1026226 - DNA, 120 bp, Artificial Sequence
  ENSG00000253417_13 (sequence is synthesized)
actcttggcctagggagtggagggtaaggaaaatggctgcactttagtcaggaataagctgaggcagccttccaaagcagcataactcagtgggtttggagcacaggtgcacagccctgc

SEQ ID NO: 1026227 - DNA, 120 bp, Artificial Sequence
  ENSG00000253417_14 (sequence is synthesized)
acattatgtaaccacaccatgtgaggtgcattaggtgatcacacacgtgcgctcatgttttgctcagaaccactattgtctgtaaaaggtatggttaccctactaaagctgtacatatgg

SEQ ID NO: 1026228 - DNA, 120 bp, Artificial Sequence
  ENSG00000253417_15 (sequence is synthesized)
ctcacccccaggctcactcatgcccagactcactcgcacttagagagagtaaagccaagtcaaaactgtctacgattccttgagtgtttctccagctacccgccactcaccccaccaact

SEQ ID NO: 1026229 - DNA, 120 bp, Artificial Sequence
  ENSG00000253417_16 (sequence is synthesized)
cccctcggaccccagttaaaacctgacaccacccctttccctgtaagaggagtgcattcctgcccactgccatgcagctttctatgtccccagtgggaggcccatgcatccctgtcccat

SEQ ID NO: 1026230 - DNA, 120 bp, Artificial Sequence
  ENSG00000253417_17 (sequence is synthesized)
cggcttttggctttgaccaaaggaacaaaagcagacatgacagaggccacatccaagtagaaactctaagaggcaggacaggtgtccacagtactcctggtctttctttctgctatgaga

SEQ ID NO: 1026231 - DNA, 120 bp, Artificial Sequence
  ENSG00000253417_18 (sequence is synthesized)
atagcatatcccacttaggaagctgttccttcagcttaagtccctgaatgggaaactgctgcagccaaagaaagcttcagtcaatgcatagtctccctttaataaaccttgtggtagaaa

SEQ ID NO: 1026232 - DNA, 120 bp, Artificial Sequence
  ENSG00000253416_0 (sequence is synthesized)
cgcaacttatctttcctggtttgagttatacagtcagctgaggtgtagaaaatccactatgggaagtaaatccaataacttattggggagaaacttctcttcatttgggctgccacgtga

SEQ ID NO: 1026233 - DNA, 120 bp, Artificial Sequence
  ENSG00000253416_1 (sequence is synthesized)
aaaacttgggccccatggggatcttggataatagttgtgattgatgtccagttaaagcccttcccacgccatctttcttcttcttcatgaaagactgtttgaaaaggtactagatacatt

SEQ ID NO: 1026234 - DNA, 120 bp, Artificial Sequence
  ENSG00000253416_2 (sequence is synthesized)
ctcctgccactaaactgaactcaaagatggccttttttttttctggatacagtgaatattctcttagtttaaaagggattgtcttccttctggagggtagttcagagagaaaaagcaagg

SEQ ID NO: 1026235 - DNA, 120 bp, Artificial Sequence
  ENSG00000253416_3 (sequence is synthesized)
ctaagaaggtgaggaggacaagtcttgggcaagtgtgacttagtgaggagaatcatacaaacagacatccatttcctaaagtgtgccagaagcctcttttatctgcatcaggatctcttt

SEQ ID NO: 1026236 - DNA, 120 bp, Artificial Sequence
  ENSG00000253416_4 (sequence is synthesized)
aaagatgtccatcttgctgagataaaaatgtatacatgtacccaaacattacactgtgccctattaatttgtacaattattattcatcaattaaagatcaaataaaacattaaaaatgtc

SEQ ID NO: 1026237 - DNA, 120 bp, Artificial Sequence
  ENSG00000253414_0 (sequence is synthesized)
caactggagggtttttctgagagagaagtgagcatcaaatacattcctcatcttgccctctctagatgaaggttgcttgagcaggaaatccacccatggcccaaagaggaaagatccgct

SEQ ID NO: 1026238 - DNA, 120 bp, Artificial Sequence
  ENSG00000253414_1 (sequence is synthesized)
ttaaatgcctgggcatatacttccaagaaccagatgtggcctgttccttacacctccctgggcttagatgacagcttgaactctgcggctgatggaattgagcagatgggaatgacctgg

SEQ ID NO: 1026239 - DNA, 120 bp, Artificial Sequence
  ENSG00000253414_2 (sequence is synthesized)
ctgtccacttgtccctcccttcctgccactggccctgccagcgtaccttgtgtacttcgcaaaggtcactggctcctgttttatgtaatgactgacagacgatctcgcccagctcagcaa

SEQ ID NO: 1026240 - DNA, 120 bp, Artificial Sequence
  ENSG00000253414_3 (sequence is synthesized)
tgtgaacagacaccttgcatggtgccggtggtgggtgcggttgtttctggatgtcatggaagaggctggggcataccagggctttccccaattgtgcctaaaataaattggctcttggga

SEQ ID NO: 1026241 - DNA, 120 bp, Artificial Sequence
  ENSG00000253414_4 (sequence is synthesized)
aagacagcgctgcctacactctggggttactttccaagggagagaacggggccctgaaaggctaaaaccagagcagaaacgatgaaggttgcttgagcaggaaatccacccatggcccaa

SEQ ID NO: 1026242 - DNA, 120 bp, Artificial Sequence
  ENSG00000253414_5 (sequence is synthesized)
aggacacagggctgtgggctatgagtcctgcctcaccctgcagcctgcactgcctctgcttctccaagcaggagccgccgagtgattgatgggccccagcttgaatggaaagtccagatt

SEQ ID NO: 1026243 - DNA, 120 bp, Artificial Sequence
  ENSG00000253412_0 (sequence is synthesized)
ctgtgaagttaactaatggagtcagacagagaaatactacagaccaggaattctgccttttctgcaaagcctctggattcactttcactgaaaacagcataagcttgatccagcaggctt

SEQ ID NO: 1026244 - DNA, 120 bp, Artificial Sequence
  ENSG00000253412_1 (sequence is synthesized)
gtgggactctccttgagtaaaaagatgattaacaatcctcaaatacactcagttcaggagattctcttttaagatgattaacctgagagctcaggaaaagtccgtgtattactttgaggg

SEQ ID NO: 1026245 - DNA, 88 bp, Artificial Sequence
  ENSG00000240922_0 (sequence is synthesized)
ggaatgactgtggctctgtgccatctcgaaatctactggtctctaagcacaaacgaacattctcttaaactaatgaaatgagtggcag

SEQ ID NO: 1026246 - DNA, 120 bp, Artificial Sequence
  ENSG00000240922_1 (sequence is synthesized)
acaaacgaacattctcttaaactaatgaaatgagtggcaggcagcgtgtgcagagcaccagcaaaggctcagagggatgcccacagagttccaccgcaaccgtgcacagaggaggaggag

SEQ ID NO: 1026247 - DNA, 120 bp, Artificial Sequence
  ENSG00000240922_2 (sequence is synthesized)
gggcgcattcacagagaaacggtcacatgatgaggcagcaagaaggcaaaaattgcgagccaacaagagaggcctcagaagaatccaaccctggtgccgccttcattttaaacttccaac

SEQ ID NO: 1026248 - DNA, 120 bp, Artificial Sequence
  ENSG00000240922_3 (sequence is synthesized)
aaccccagaactgtggaaaaaaattctattttttgtctgtggtattttgttatggcaaccctagcaaactaatacactgagcaaactaatacattaaacagaatattaaaacgaacaaaa

SEQ ID NO: 1026249 - DNA, 120 bp, Artificial Sequence
  ENSG00000257527_0 (sequence is synthesized)
cacaatatttcactgtgtgaatgaaacagcagcccttcttacgtgtgctttttggaatttgaagattttgtaagataagatgaatgcattggaacaagtgatcctcaattctgtgcagtc

SEQ ID NO: 1026250 - DNA, 120 bp, Artificial Sequence
  ENSG00000257527_1 (sequence is synthesized)
tgtgcctccggagactggcggctgcccctccctgtctagtcttgcaagagaggcagctggcaagaggacagaagccggcagctgctgcgttttcatcctgtttctgctcttggagctgag

SEQ ID NO: 1026251 - DNA, 120 bp, Artificial Sequence
  ENSG00000257527_2 (sequence is synthesized)
tcacagactggagtgtgcctgggtatggagaaagaacattttgcttcttgcctctcagagtttcaagaacgcctcacctgagtggcatgcattcatggaatgagtaattattacagtgga

SEQ ID NO: 1026252 - DNA, 120 bp, Artificial Sequence
  ENSG00000257527_3 (sequence is synthesized)
gaactcctcactgtgaattaattacacagatgatattcaagacttagactgggctagtgcaggggttagcaaactatggcccactgttcttgttttataaataaagtgttatgagcacac

SEQ ID NO: 1026253 - DNA, 120 bp, Artificial Sequence
  ENSG00000257526_0 (sequence is synthesized)
gctccactcaaaaaaaagaaagtcctaatgcaagtaattgaaagtgaagatattgcaaaacaaataatgacagctgaattgatgatatgatgacaggctcatccctccattgtaaactat

SEQ ID NO: 1026254 - DNA, 120 bp, Artificial Sequence
  ENSG00000257526_1 (sequence is synthesized)
tttcctgaggcctccccagccatgcttctatacagcctgtggaaccatgggtcgattaaacctcttttcattacaaattacccagtctcaagtagttctttatagcaatgcaaaaacgga

SEQ ID NO: 1026255 - DNA, 120 bp, Artificial Sequence
  ENSG00000257526_2 (sequence is synthesized)
tctttatagcaatgcaaaaacggacaaatacatggattgtttttggattctgaagattcagtgctatggatttcacatgagtttggctattttgattaaaatgtggctgtttgtctttcc

SEQ ID NO: 1026256 - DNA, 120 bp, Artificial Sequence
  ENSG00000257523_0 (sequence is synthesized)
ggtatactcacacaattgacccaaagcagaagtcagcaggaatgggagctgcaacaaagcacgaagaagagaaaacagaaaacatccattgaatcctctgcctctggtaatgtatggctc

SEQ ID NO: 1026257 - DNA, 120 bp, Artificial Sequence
  ENSG00000257523_1 (sequence is synthesized)
ccagtatgcctccttcaagagcatgactgacccaattactagtatgagcaaaagtgacatcatttgctgaggtgaggaaaaccagaaaggaacaggcagaaaggagaaagaaggtatcta

SEQ ID NO: 1026258 - DNA, 120 bp, Artificial Sequence
  ENSG00000257523_2 (sequence is synthesized)
aagtaaatggccttatgtataatcctgaattataagtcattgcaaaagaatcaggcttgtggctacttctctgacagagccaaactctccaattcaattattctgagcaaaacaaacaag

SEQ ID NO: 1026259 - DNA, 120 bp, Artificial Sequence
  ENSG00000257523_3 (sequence is synthesized)
gagggggaccctcttacggattaaagacctctttgtgatatgactggcccaattcaattgcctaagcatcacgtagaaacaatagttcaatacttcaaaggaaagtttcagaaaggtgat

SEQ ID NO: 1026260 - DNA, 120 bp, Artificial Sequence
  ENSG00000257523_4 (sequence is synthesized)
ctttaaaggctacatcaaatttgacaaatggaattgtgaggaaagcacattagaagtaaagagtgaacccacaaaaacaagagaacatcatgtttctagaggctgcctgcattccttggc

SEQ ID NO: 1026261 - DNA, 120 bp, Artificial Sequence
  ENSG00000257523_5 (sequence is synthesized)
taatgactttgcatcactctgacgtcttgctcccatggtcgtatcacctactactggccctgatctcactacttgttatatggaacaaagggataaggaagtgacttgcctaagtcactg

SEQ ID NO: 1026262 - DNA, 120 bp, Artificial Sequence
  ENSG00000257523_6 (sequence is synthesized)
aggaacctaatattgagattagcactcaatgattcctggctctcagaatgtgtgctgctaccaccaggccacactcttccctccagagagaagatgtgtcagcacggaattgtgctgaag

SEQ ID NO: 1026263 - DNA, 120 bp, Artificial Sequence
  ENSG00000257523_7 (sequence is synthesized)
caaagatgtgaaatagaatgattacatatctacctagtgggaagatctggggaagaatctatcagtgctggcagagaagcaaaccatacgacatcactcatccccagaaagtgaagttaa

SEQ ID NO: 1026264 - DNA, 120 bp, Artificial Sequence
  ENSG00000257523_8 (sequence is synthesized)
gggaaataaaaaacaatctacaccatttagaaaacacagccaccccatacccttggaaaaaatacactaaaatatcttcatctgatttgacctctaataacatgaataattgtcttataa

SEQ ID NO: 1026265 - DNA, 120 bp, Artificial Sequence
  ENSG00000257523_9 (sequence is synthesized)
agaaaggaacaggcagaaaggagaaagaagatggctgaagaggaacagccccagtctgcagcgcccagggagaccaacgcagaaggcagaaagtttcagaaaggtgatgaaatttaagct

SEQ ID NO: 1026266 - DNA, 120 bp, Artificial Sequence
  ENSG00000257523_10 (sequence is synthesized)
catttaatttgaagattttaattatgtagaaaaagtaggttcgcattctttcttattaatagagttcaaaagacttaaggcctagagtctagcttcagctattaaaattatacatcagca

SEQ ID NO: 1026267 - DNA, 120 bp, Artificial Sequence
  ENSG00000257523_11 (sequence is synthesized)
aagaggaacagccccagtctgcagcgcccagggagaccaacgcagaaggcagctgatttacagagatagactgcagaagggcaagagtgaaagcagaaaatattgctagtatataactcc

SEQ ID NO: 1026268 - DNA, 120 bp, Artificial Sequence
  ENSG00000257523_12 (sequence is synthesized)
aggtgctgagtggaaagcccacactccagaagctcattaaaagggccaagttacagtacaggtttatttctgtcacagcgtttctgaaaacagtgacaaggattaatatgtttctttagt

SEQ ID NO: 1026269 - DNA, 120 bp, Artificial Sequence
  ENSG00000257523_13 (sequence is synthesized)
aggctggtaagaattcataagctattgcagaagcctgcggcaaaactaattgttttattcaacagtcacttgtttatttattatttatttcatactcccctcctataatccttttccact

SEQ ID NO: 1026270 - DNA, 120 bp, Artificial Sequence
  ENSG00000257523_14 (sequence is synthesized)
ctccttcctcaaagtcaagattatcttggttcgttgcctgaatgcacagagcaaatacagaaacggggagccctattccaggagttctcaaaaaagttcctacggatcagtgttttgtgg

SEQ ID NO: 1026271 - DNA, 120 bp, Artificial Sequence
  ENSG00000257523_15 (sequence is synthesized)
aaatacccattctaaatgttttataaaaatattcttactctcctttgattggcataaaaattccttgctaaaaagcaatatttgcacaaatattataacctttgttttctgtgtcatcat

SEQ ID NO: 1026272 - DNA, 120 bp, Artificial Sequence
  ENSG00000257523_16 (sequence is synthesized)
gtgacattaagctttatttgctagtggttgctatgtgtctgacacatgatttgccatgtggtacatgtaaatcacagcaaagtgcaaagtatattataaaacaattctgttttacatcaa

SEQ ID NO: 1026273 - DNA, 120 bp, Artificial Sequence
  ENSG00000257523_17 (sequence is synthesized)
attagataggcaaatatctattcgctattttcaaaaattaaaatgcaatatgctatatagatactgtaaaacaaataatatttaacattgagaaagctctctctctctttccttctcctc

SEQ ID NO: 1026274 - DNA, 120 bp, Artificial Sequence
  ENSG00000232998_0 (sequence is synthesized)
aaggcgtcgtctcgcctcctcgccccgcgcggctaaagccggaccgtgcggggccaggggtagagaacggcccctcgccgggacttgaacgccagacccacggagcccacggcaagtccg

SEQ ID NO: 1026275 - DNA, 120 bp, Artificial Sequence
  ENSG00000232998_1 (sequence is synthesized)
ctccgctcggaaaatatagaccttttcatcccgcactcatgaccctctcctttcccccaaaatataaacaactcgagggcggaggccagggaactgccgcccggctttacgtaacttgac

SEQ ID NO: 1026276 - DNA, 120 bp, Artificial Sequence
  ENSG00000232998_2 (sequence is synthesized)
gagaggccggggagcggcggcggcggcctccttacctttccagatgcccagagagagctgggacgtgtccaagtccaccacatagtcccccaagaaccggttcaacacgtccacgaccac

SEQ ID NO: 1026277 - DNA, 120 bp, Artificial Sequence
  ENSG00000232998_3 (sequence is synthesized)
cgactcgaaaaccatgttcctcagccgtggtgggcacggcagccggcccgtgcgctcctcctcccgccgccttccccacgcccctccctcgagagtaacacgcttccctgcagataagag

SEQ ID NO: 1026278 - DNA, 120 bp, Artificial Sequence
  ENSG00000232998_4 (sequence is synthesized)
ttggagtcagccggtctggaaactgctgaacaccctccaagaaatactgggagtgctggacccttgacccctatgcctccaccgaaccactgacctaaaataaattacaattacagatct

SEQ ID NO: 1026279 - DNA, 120 bp, Artificial Sequence
  ENSG00000267348_0 (sequence is synthesized)
gcgactgagacgaaacgacactcacctttacttaatggaaggcttcgcttacatcctgaacttaaaggaactacagaaagggacagaaactgctttctttttaaacaatgcgctgaaagg

SEQ ID NO: 1026280 - DNA, 120 bp, Artificial Sequence
  ENSG00000267348_1 (sequence is synthesized)
ttactagtgataggaggcttagtgaagcgcgtgatgtgaacggccacgctgcaaggctggagagaaaagaggagggagtgaagttgcaccctgatcgcgaatcctcggccttttatcagg

SEQ ID NO: 1026281 - DNA, 120 bp, Artificial Sequence
  ENSG00000267348_2 (sequence is synthesized)
ggcgccgccactcggggtccgaccattcgcctccaacgaggggacagcgaatctgctgtcgtgtgcagtccacagcaaccacaggtggggcaacaggaggagcgcttgggcacgaccacg

SEQ ID NO: 1026282 - DNA, 120 bp, Artificial Sequence
  ENSG00000267348_3 (sequence is synthesized)
tgacccagcacgagccaccgcccgccccaaaatgaaatcaaatcctaatctcccaatcccggcatgccggtcactccagcctttccaggagacttgcggccgtgcagcccctacaccttt

SEQ ID NO: 1026283 - DNA, 120 bp, Artificial Sequence
  ENSG00000267348_4 (sequence is synthesized)
atctggactcctgtcgtacttggcccagctccactggattcagcccttggataaccaccctaccagcccctaaagatgactccatccccgtcggtatagttaattaaagaaaaacaggag

SEQ ID NO: 1026284 - DNA, 120 bp, Artificial Sequence
  ENSG00000267348_5 (sequence is synthesized)
tcgaattttcctggggtaactggttctttagcaggaggggagcactggggagtatcttcagggtggctggactttgcagcctctttaataacttccccctgtgcaggttgtatcctttat

SEQ ID NO: 1026285 - DNA, 120 bp, Artificial Sequence
  ENSG00000267348_6 (sequence is synthesized)
caccccaccccgatgccccggtcttcaggaaatggcagcaggcccatatttctgtagggttcagagttctgtgaggtagagcattccttccaatgggatcttagaattcctagagttgca

SEQ ID NO: 1026286 - DNA, 120 bp, Artificial Sequence
  ENSG00000267348_7 (sequence is synthesized)
gaattttactgactagacccaggaggtctcaggagtccagacttgcttaaagcttggctcaaaattccaagggagctcataactccatggggcccagagttcctggctcgggaacattgg

SEQ ID NO: 1026287 - DNA, 120 bp, Artificial Sequence
  ENSG00000267348_8 (sequence is synthesized)
cggagcagcgcctctgcttgcacacctatgggagtctgcagctgtgacacgtagaagttggccacatccaggtcggtggctccaaagtgggcggccacacgcacaccctcgtgcaacgtg

SEQ ID NO: 1026288 - DNA, 120 bp, Artificial Sequence
  ENSG00000267348_9 (sequence is synthesized)
aagctcacctgatgacccaccatggccagcaggctgcggaggtaacgctcccgaagggcggctcgtgcccgctgctcctgggattccagggattcttgagctatgggacactcctggatt

SEQ ID NO: 1026289 - DNA, 120 bp, Artificial Sequence
  ENSG00000267348_10 (sequence is synthesized)
tcaggaacctctggcctcaagggggctctgcgtccatcaggggcaaagccacggctgaagccatcagggccccggggcagccggagcacaggcacgggaatgttcactggagtttgcatt

SEQ ID NO: 1026290 - DNA, 120 bp, Artificial Sequence
  ENSG00000267348_11 (sequence is synthesized)
gtcttggctgttgagtgaagaaaaagagcaggaagtcattacatggctcttcctgtctctgcacctgaactgtgagccccttgcaagacaggaccctgcagatagaccaaggatgtgaac

SEQ ID NO: 1026291 - DNA, 120 bp, Artificial Sequence
  ENSG00000267348_12 (sequence is synthesized)
cagggctactcagtctggacactattgacatttggggctggataattatctgctatgttgtgggggctgtccaacgcataggtgtagggtttgagcagcatcctagcctctgcctcctat

SEQ ID NO: 1026292 - DNA, 120 bp, Artificial Sequence
  ENSG00000267348_13 (sequence is synthesized)
taatagatgccagtagcatcccatcttcaagttgtgacagccaaaaatgtcaccactggtgaacagtgaattggtgaatgtgaattgcatctcaatacagtttttttttaaagtctccat

SEQ ID NO: 1026293 - DNA, 120 bp, Artificial Sequence
  ENSG00000267348_14 (sequence is synthesized)
gaattgccaaacgtctcctgatggccccaaatgaaacactgatgcagacaaacaggtcacaaagagggaggaaggaataaagatggctatagaagacatgaacataggctgggcacagtg

SEQ ID NO: 1026294 - DNA, 120 bp, Artificial Sequence
  ENSG00000267348_15 (sequence is synthesized)
aggagcctgtagttccagctacttgggaggtgggaagatcgcttgagcccggtaggttgaggctgcactgagctatgatcgcgcccctgcactccgacctggtagacagagccagaccct

SEQ ID NO: 1026295 - DNA, 64 bp, Artificial Sequence
  ENSG00000267348_16 (sequence is synthesized)
gcgcccctgcactccgacctggtagacagagccagaccctgtctcaacgaaaggaaacacgggc

SEQ ID NO: 1026296 - DNA, 120 bp, Artificial Sequence
  ENSG00000267348_17 (sequence is synthesized)
cctgggcgacagagcaagactccgttcccccccccccaaaaaaaacaaaggaaataaatgaaaacattgaggctagactaactgatgaagagtggtaacggcatgaagaagtcgaaaaga

SEQ ID NO: 1026297 - DNA, 120 bp, Artificial Sequence
  ENSG00000267348_18 (sequence is synthesized)
atgaagagtggtaacggcatgaagaagtcgaaaagaaaggcggataggagctgcattcaatatatgagtgcagttgatggatgctgacagggatactctggagacgaagtctcggcccct

SEQ ID NO: 1026298 - DNA, 120 bp, Artificial Sequence
  ENSG00000267348_19 (sequence is synthesized)
tcgctagtctctagtcctccatttgctcgctgcagttacatcaacagctctctgtatcggggtagagttgcataaaatacaacttaaattacaatgctaaaataaatatgagcccatgag

SEQ ID NO: 1026299 - DNA, 120 bp, Artificial Sequence
  ENSG00000267348_20 (sequence is synthesized)
cggtatcataggcctgattttaaaaaacaaaacctaggagaaggtagaaattccaaaggcgagagacgaatctgccaacctaaatcctgggtgacaaggctggtggatcaccgaggcaag

SEQ ID NO: 1026300 - DNA, 120 bp, Artificial Sequence
  ENSG00000267348_21 (sequence is synthesized)
aaagaaccagcgtgagctcaagccacacccctaggctcagacccaacgcttgacattcgccgccgcactttcgccacgcttgccgaagcgcacccggctaactagaggaggcggggctga

SEQ ID NO: 1026301 - DNA, 120 bp, Artificial Sequence
  ENSG00000267348_22 (sequence is synthesized)
aaccataaaagggaactggggcggagcgagctgcgtcgtcgccaaggcaactcgagagctaagtccgggcctcggcggagccggcgctgcgaatggactgatggccgctgaggctgctcc

SEQ ID NO: 1026302 - DNA, 120 bp, Artificial Sequence
  ENSG00000267348_23 (sequence is synthesized)
aacagagcctggcgcacaggaggcactcagtgaatgcttgcaaaatgaatttttattgtaatgcatttaatgaaatagcccagattactatcaggcacctaataagaaacgtgaccgact

SEQ ID NO: 1026303 - DNA, 120 bp, Artificial Sequence
  ENSG00000267348_24 (sequence is synthesized)
atttttctcgcttgggggtgcgtgtgggcatgccgtgtctcagtttcacccgccctaaaacgggatcagggatagctgtttcaatgccttgtgggaactcggtgtgattaaatttggtca

SEQ ID NO: 1026304 - DNA, 120 bp, Artificial Sequence
  ENSG00000267348_25 (sequence is synthesized)
ctaagccaaacgcacgggacactgcctagattgagttaggccgccgtcagggccccagcagggcggctcggtcccctcccatgagccccgccctggtaggcggagccacgggcccggcca

SEQ ID NO: 1026305 - DNA, 120 bp, Artificial Sequence
  ENSG00000232993_0 (sequence is synthesized)
tgcagggatagggataatgcttttatattagtttttctataacaagaaaaatcagctttgagatttttatcatttttttccttagaaaagaataaaaaataaaggcacccggaacttccc

SEQ ID NO: 1026306 - DNA, 120 bp, Artificial Sequence
  ENSG00000232993_1 (sequence is synthesized)
agcacccagggggctctcccatcctgcctccactgggcttgcccattggaaaagtgcctgtgtcctgccagggcgtggcagggagggactcttagcagagtgactgcccagcacctggag

SEQ ID NO: 1026307 - DNA, 120 bp, Artificial Sequence
  ENSG00000232993_2 (sequence is synthesized)
gagcagggtgggccaggccaggcccgggctcctcagggctcagtaccagcaccggctcctcctccgcaaattcgttctcttcggggctcaggctgtggccgccacttcggccaaatcctg

SEQ ID NO: 1026308 - DNA, 120 bp, Artificial Sequence
  ENSG00000232991_0 (sequence is synthesized)
atccaagtccccactcgaaccagaaagtccagctggcttcacctctcaatagcctgcccatcagctgttctgttgccctgtagcctgctccagattatcagtgaaatcaccgcagccaga

SEQ ID NO: 1026309 - DNA, 120 bp, Artificial Sequence
  ENSG00000232991_1 (sequence is synthesized)
gaccctttctagagtccagaaacctggtctgcttctctgggctaagcctccttctgaagacaccggaggaaaatccctagctttggcttttccagcgtcaagagcagccttgcattcctg

SEQ ID NO: 1026310 - DNA, 120 bp, Artificial Sequence
  ENSG00000232991_2 (sequence is synthesized)
caagaacacagagctagtaagtggcagatccaggaccatgccaggaagtgtgatttcaggatacaagctcttaagcattacattaggccgcctctcttacggaatcatccagtgttcaat

SEQ ID NO: 1026311 - DNA, 120 bp, Artificial Sequence
  ENSG00000232991_3 (sequence is synthesized)
ctcaaaatacttactggtgttaaaacacatccttccttccaatgcatcctctttatcttcacagccgccccttttatggaatcatccagcgtccaatctcaaaatacatattggtgttaa

SEQ ID NO: 1026312 - DNA, 120 bp, Artificial Sequence
  ENSG00000232991_4 (sequence is synthesized)
ttctgaatacatttaagaattaaaaaaaaacaaaataatgtcagggacattttctctttgtttcagtcctgagtcccaagtctaggccatgcagacacagagaagacactatttttaaat

SEQ ID NO: 1026313 - DNA, 120 bp, Artificial Sequence
  ENSG00000232991_5 (sequence is synthesized)
gaggtattaaatgaaatgagtgtgcaagcacttggcaatctgatacctgcttacccagaagcttgttctgacagccttctcatttgaaatcccaggaaatatagataattcactctgatt

SEQ ID NO: 1026314 - DNA, 120 bp, Artificial Sequence
  ENSG00000276923_0 (sequence is synthesized)
tgcatggaccacagcaatgggctcccttctctgctgcttccaagttatgttccctgccagtggttggaggtcagggcagggaagaataaagttgggctccatctgtgggatgacccaggg

SEQ ID NO: 1026315 - DNA, 120 bp, Artificial Sequence
  ENSG00000276923_1 (sequence is synthesized)
ttcttctctaactctgcacagggccccactaaccctagagagctgcactatcctttgtggctttctttacttcacccacacctttataaacatttcctgtattaaactttcttcgaatta

SEQ ID NO: 1026316 - DNA, 120 bp, Artificial Sequence
  ENSG00000273341_0 (sequence is synthesized)
ctagcccagtggcttccaaacctggagggtcggcctattttctttattctacaagtgcctccactgtgcagcaaagtgtggaaaccacttggcttgagagagctgggtcctctggagcag

SEQ ID NO: 1026317 - DNA, 120 bp, Artificial Sequence
  ENSG00000273341_1 (sequence is synthesized)
cctctggagcagttcagggtcaccacagaagtaggccgtctcttgggcctattcgccccagcttcgaggtggtggtgctttattagtgttattaaggctagagtgcagtggtgcgatctc

SEQ ID NO: 1026318 - DNA, 120 bp, Artificial Sequence
  ENSG00000273341_2 (sequence is synthesized)
agcctcccgagtagccaggactacagtgtcgaggtcatgaaagccactgaaagactgagaactgttccagaaaggagactagagagacatggcagccaaatgctccacataatcctgtcc

SEQ ID NO: 1026319 - DNA, 120 bp, Artificial Sequence
  ENSG00000273341_3 (sequence is synthesized)
aatgctccacataatcctgtcctggattcttctcctacaaaggaaggggtctgaggattaggtggtagtactgaatcaaggaactatcatctcctattgtgctgtaggcaaacttgagtg

SEQ ID NO: 1026320 - DNA, 120 bp, Artificial Sequence
  ENSG00000273341_4 (sequence is synthesized)
acatggtggaagccaccagagagaatatctgaagcaattcattaaaatcttggcagccagaccccagctcccactttccctgaaagctccctttaatgaagctgaacgctgtcccagcaa

SEQ ID NO: 1026321 - DNA, 120 bp, Artificial Sequence
  ENSG00000273341_5 (sequence is synthesized)
ttccctccacagaagacctactgtcaccacctctggaggggcaattcctggaggaaccaagtcagccaatcgaaggtcctgaataagcaaaaactaagtaaataaattaccatctcgaaa

SEQ ID NO: 1026322 - DNA, 120 bp, Artificial Sequence
  ENSG00000273343_0 (sequence is synthesized)
ctccagacaacctgggtggtggggtcaaccttggccttggattgggagcaagtgctctagaacaaaactggtctcctacacagctgcagaaggtagccccctgagaaattaactgttccg

SEQ ID NO: 1026323 - DNA, 120 bp, Artificial Sequence
  ENSG00000273343_1 (sequence is synthesized)
ggtgtctcctgactttcagtgcacggccacatcatggtacctaacttgtggcaaattgttgctttataagtaaggatccagtccaagttcatgtactacaattggttactttggtctctt

SEQ ID NO: 1026324 - DNA, 120 bp, Artificial Sequence
  ENSG00000273343_2 (sequence is synthesized)
ggcattgacttttttgtagagtccagggcattctaattttatagaatgccctgctcttgatctatcagacgaaatgcttcctcttgcatttaacctgcttctccactctctgggtttcct

SEQ ID NO: 1026325 - DNA, 120 bp, Artificial Sequence
  ENSG00000273343_3 (sequence is synthesized)
gtacactggactgctggtagaagcctgattagaagcaggtttaatgtggcaaaaatttctcctagcagtgcaaggcccccttccccagaaggcaggcagtgtccatctgctccaggattg

SEQ ID NO: 1026326 - DNA, 120 bp, Artificial Sequence
  ENSG00000273343_4 (sequence is synthesized)
gtgtgtttttatcaagaatggatgttggattttggcagttcccttttcggcagctcttgagatgatcacgtggtgaatcattttctattactacagtgaattacagtcacttgaattcca

SEQ ID NO: 1026327 - DNA, 120 bp, Artificial Sequence
  ENSG00000273342_0 (sequence is synthesized)
aatgaaagaagaatcccaagttttgggcctgagcatctgcagaatggaggtgccatttactgagactcataagcctgggggaggggtagtttgagggcggagaccaggaattctgctttg

SEQ ID NO: 1026328 - DNA, 120 bp, Artificial Sequence
  ENSG00000273342_1 (sequence is synthesized)
ccctagactggagacccctcaagtgcagggactaccaaatccagggcagactgacttttaaccgtttggacacctaaatgctgaaaagatcaaggtgtcttatactacatgtaactcaaa

SEQ ID NO: 1026329 - DNA, 120 bp, Artificial Sequence
  ENSG00000273342_2 (sequence is synthesized)
atcaaaacagtattaaacacgaaacccccaaaataacatgttgctgtaatgaaaatggctttactctggattttctgaacgcaaaattctggatgatttaattaaatatgaacttttctc

SEQ ID NO: 1026330 - DNA, 120 bp, Artificial Sequence
  ENSG00000273344_0 (sequence is synthesized)
gggggtggggccttggggccgcgagtgggagcgggagcggttctgcggcctcctcgggcttcttggccctgggcggagtgggattgggtgtcccggctgttcgcagtggccgcgagtgcg

SEQ ID NO: 1026331 - DNA, 120 bp, Artificial Sequence
  ENSG00000273344_1 (sequence is synthesized)
gccggacctggagtagtacctgagccgctctggccgagcaaggcgcggggccccggtctacaccgcgctggacccggctatgccgtgacggaattcccgaggccgtagcgccacgcgaga

SEQ ID NO: 1026332 - DNA, 120 bp, Artificial Sequence
  ENSG00000273344_2 (sequence is synthesized)
gagacgcgcactggtggcctccgcggcgagtcctggggtctccgcaaggcctcagtgcccgagctggggacgtgctggggggaggcccggccccgtcgctgcccgaggccccgctgtccc

SEQ ID NO: 1026333 - DNA, 120 bp, Artificial Sequence
  ENSG00000273344_3 (sequence is synthesized)
ggaccggcctggtccctggcgtcctgtcgggtccgcgctggaggagagtcccagacagcagagcccgcggtgcagctccagccccgggaagccccgcgctcaacaggttaatactacaca

SEQ ID NO: 1026334 - DNA, 120 bp, Artificial Sequence
  ENSG00000273344_4 (sequence is synthesized)
gcggcgattctaatggtcacgcttttatttacagctcgcctcccttccgccaagattcacagaacacggcagagtggcctcgggatcacctgcccaagacacctgcacgaccggaagttg

SEQ ID NO: 1026335 - DNA, 120 bp, Artificial Sequence
  ENSG00000273344_5 (sequence is synthesized)
ggagaagaaattaaggccatgatgatgaacgcagcctttctcgtttatttccaatcccacaacaaaccggagtccaggaactcatgggtgattatcggactattacctagtcgtaaaact

SEQ ID NO: 1026336 - DNA, 120 bp, Artificial Sequence
  ENSG00000273344_6 (sequence is synthesized)
gtggagcattggtgtctaaaggaatctgagacagacccgcagtgtctcccccacatgccttaagtcacttctgccaagcagaaaatcatttttaagtaaatgttagtgaaattggtttta

SEQ ID NO: 1026337 - DNA, 88 bp, Artificial Sequence
  ENSG00000273344_7 (sequence is synthesized)
gggcgcggtggctcacgcctgtaatcctatcctttaggaggccgaggtgggcggattggacacggtgaaaccccgtccctactaaaat

SEQ ID NO: 1026338 - DNA, 120 bp, Artificial Sequence
  ENSG00000273344_8 (sequence is synthesized)
tgcggtacactaatttaacagattagatcactttccaggctttaagttggcctttgttctaccctttttttagtgtatgataaaagttgtgttggttcgttgatcagcatgcaatgaact

SEQ ID NO: 1026339 - DNA, 120 bp, Artificial Sequence
  ENSG00000273344_9 (sequence is synthesized)
ctggctcttgttaatcaggtgactacagttttgtccttacatttgtatgtatgtcatgagtggttttgtatgggcaggaggtaaacaacgcacatttaaatatacttaatgatttatcat

SEQ ID NO: 1026340 - DNA, 120 bp, Artificial Sequence
  ENSG00000273344_10 (sequence is synthesized)
tccaatgttttctggttgttttagtctttcatttgtctcttgaacaatctgaaacatccctattctaaggctaaaaaatttcctttacaaacttaggttaaacattcctaatctgaaatc

SEQ ID NO: 1026341 - DNA, 120 bp, Artificial Sequence
  ENSG00000273344_11 (sequence is synthesized)
caaaatgctctaaaattcgaatttttttgagtactgacgtgaccccacaaatggaaaattccacacttgccctcatgtgacactgggtgacagtcaagtcacaatcaagcctggtgtggt

SEQ ID NO: 1026342 - DNA, 77 bp, Artificial Sequence
  ENSG00000273344_12 (sequence is synthesized)
cactgggtgacagtcaagtcacaatcaagcctggtgtggtgggcacctgtagtgccagctactcgggaggttgacga

SEQ ID NO: 1026343 - DNA, 85 bp, Artificial Sequence
  ENSG00000273344_13 (sequence is synthesized)
ataatataaccttaccttcaggctatgtgggtaaggtaaggtgtatgtgaaacaaatgaatttcccatttagacttgggtcccat

SEQ ID NO: 1026344 - DNA, 120 bp, Artificial Sequence
  ENSG00000273344_14 (sequence is synthesized)
tgtgaaacaaatgaatttcccatttagacttgggtcccatccccaagatatcttattatgtatatgcaaatattccaaatcaaaaatatctgaaatacttttgtcccaagcatttcagat

SEQ ID NO: 1026345 - DNA, 120 bp, Artificial Sequence
  ENSG00000273344_15 (sequence is synthesized)
aaaggttactcaacctgtaataaaaacactcagtgcttgcctgaaggaaaaaccaagaatttgtcatccatccttaaatttttatgacaccctttgtaatcaggaaaccttttaatacct

SEQ ID NO: 1026346 - DNA, 120 bp, Artificial Sequence
  ENSG00000273344_16 (sequence is synthesized)
aagaatatatttgatatattctggtatatgtttatcattctgatgtttaatgttctatgttgggcatatatcagtgtaataaatacattagatccaaatacagatcatgctgccttttta

SEQ ID NO: 1026347 - DNA, 120 bp, Artificial Sequence
  ENSG00000273348_0 (sequence is synthesized)
aacgtctcaactgtaaactctgggcacgcggctagcgccacgtcctctccagccctaacattctgtgattctaaacttgtctgatttgtctcatatgttgcaaggctcgtagcaaaaaga

SEQ ID NO: 1026348 - DNA, 120 bp, Artificial Sequence
  ENSG00000273348_1 (sequence is synthesized)
ctagagagagagacacacacacacgtttcaaataacccgaacactagaacctagtgaattttatacctttactaaactttagcgattatttgtttctttcgtaacaaaggttattgatta

SEQ ID NO: 1026349 - DNA, 120 bp, Artificial Sequence
  ENSG00000273348_2 (sequence is synthesized)
gatttagtgctgaaaaaaaccaacaacgtgcgcttcggtcatttgtcttatggaggaaacataaatctataaatcttcctcctgtctctaagaaataaaactctcttcatttccaaagta

SEQ ID NO: 1026350 - DNA, 120 bp, Artificial Sequence
  ENSG00000285689_0 (sequence is synthesized)
agcacagttatgggagcacatttttgaacacaggctcccaccttcaacttatcacttccttacctttgctggggtacctgatgactttaaagagactgtttctttggagaaggtggaata

SEQ ID NO: 1026351 - DNA, 120 bp, Artificial Sequence
  ENSG00000285689_1 (sequence is synthesized)
cgcttaaagattggtcttgcctttaaaacaccattttaaaagagaccatttgttagtgcctgaaatctgtaactggcttaaaagctctgtcagctggaaaggaacctgtcagtgtgataa

SEQ ID NO: 1026352 - DNA, 120 bp, Artificial Sequence
  ENSG00000285689_2 (sequence is synthesized)
gtctgacaaactcacgttgaataacaagatcttcatggcctggatccctgaaagactgtgtggaacagagccccttgacaacctgaaacccctaccttcattcagattgttgtgtgaggt

SEQ ID NO: 1026353 - DNA, 120 bp, Artificial Sequence
  ENSG00000285689_3 (sequence is synthesized)
tccaataatgtgattcctttttaagacactaagggggagtatttgttacagcaggttaacatatattaattaacagccatataataaaatatgtgtgtatttaagaacagcaaaaaaaaa

SEQ ID NO: 1026354 - DNA, 120 bp, Artificial Sequence
  ENSG00000285688_0 (sequence is synthesized)
gtgctttatttttgcctttaagtaaaaggaatctgaaatgaaacaatcttcatttcagatataaatcagccccataaacttgaagctaaccagagatcctgaggcattctcattacatga

SEQ ID NO: 1026355 - DNA, 120 bp, Artificial Sequence
  ENSG00000285688_1 (sequence is synthesized)
agtaattggttggttgcaagactcaattgtactgcaaagtcttcctgagaattcagatgagcagttatctgaagagttacacatcctctcacccgacatgttgtaggaacacatagcatt

SEQ ID NO: 1026356 - DNA, 120 bp, Artificial Sequence
  ENSG00000285688_2 (sequence is synthesized)
ggccagtggggcgaatgatttctagtctctgatgaggccggaactctccagcaagtgggcctatgactgagaaaccccgggcaactttgaggtccctttgaggaaatgaaacttcatcaa

SEQ ID NO: 1026357 - DNA, 120 bp, Artificial Sequence
  ENSG00000285688_3 (sequence is synthesized)
aagcagccaatattaatgatatattgagcatctattgtgtacatccagtcttctagtctccttggtgacattcatcttatttaaccttcccagtaaatcagcaaaataagtaccattacc

SEQ ID NO: 1026358 - DNA, 120 bp, Artificial Sequence
  ENSG00000285688_4 (sequence is synthesized)
ctcttttatggaataaaactaaaactcacagaggttgagtaacttttgaatcactcaaccttctcaacgcatgaagaaaaaatccgacccaaacaagagacattggagagcaggtgcaag

SEQ ID NO: 1026359 - DNA, 120 bp, Artificial Sequence
  ENSG00000285688_5 (sequence is synthesized)
gtgtcatcaaaacaagggaatcagcagtcctgtatctatgaagaaacaactggaaatgataggttcttgaattccaattttcttttagggtgagaaagtgggccactcagctctgcttta

SEQ ID NO: 1026360 - DNA, 120 bp, Artificial Sequence
  ENSG00000285688_6 (sequence is synthesized)
taatattgggcttccgagaatgattagcattcaagtgagcagagatacttctaaagtgttctattatataaattatacagggataagaaaatgggaggttagcacagacagaggcggagt

SEQ ID NO: 1026361 - DNA, 120 bp, Artificial Sequence
  ENSG00000285688_7 (sequence is synthesized)
taacctccagggtgagggtgaagggagatgtctggtacatagcccagccccgggtagggaggacgagcatccggacccaagcactgaggcacaggaggtagacaggctgcggattgtcat

SEQ ID NO: 1026362 - DNA, 120 bp, Artificial Sequence
  ENSG00000285688_8 (sequence is synthesized)
caccacatcattggccaccataccttcttcttcttctttttaataaacttcatttttagagtagttttagggtcatagcaaaattgaatggaagatacagaggttttccacaaaccctct

SEQ ID NO: 1026363 - DNA, 120 bp, Artificial Sequence
  ENSG00000285688_9 (sequence is synthesized)
gccccaacacatgcatagcctcctcaattatccacatccctcacctcagtggtacgtttgttccaattggtgaatcttcatcgacacatcatgattacctaaagtccatactttacatta

SEQ ID NO: 1026364 - DNA, 120 bp, Artificial Sequence
  ENSG00000285681_0 (sequence is synthesized)
cactctccagcattcattacacagtggtttccttttaaattctaggacatgccaagctgtttcaacctctgtgcctgagaacctgctgtttcttcttatctgcacatttccctacttgtc

SEQ ID NO: 1026365 - DNA, 120 bp, Artificial Sequence
  ENSG00000285681_1 (sequence is synthesized)
atatggctggctccttgtcatcactcagatctcacagtatcgcatcagaagatttatctacaaaatatgcatgaataaagagaggaaattcttgaatacacagagattgaagacaggaaa

SEQ ID NO: 1026366 - DNA, 120 bp, Artificial Sequence
  ENSG00000285681_2 (sequence is synthesized)
aatctgagccagatattgttggttgcatcatggatccagaatctgcagatacagaggccaactgtccttttcatttccctatgttcttcagcttaccttcacatggtagatgcccaggaa

SEQ ID NO: 1026367 - DNA, 120 bp, Artificial Sequence
  ENSG00000285681_3 (sequence is synthesized)
agaccctgaaacttatgaaagaagttggcagattctaaaatccacatggaaaaacaaaggatccagaagaacaaacaaaaaacactgataaagaagaacaaaactggaagtcttatacat

SEQ ID NO: 1026368 - DNA, 120 bp, Artificial Sequence
  ENSG00000285681_4 (sequence is synthesized)
cctgcttttcaacttcactgcaaagctacagtaatgaaggcagcctgctactggcataagaagagacacatagatcaatgaagtaaaattgacagctcagaaatgaacccttacatgtat

SEQ ID NO: 1026369 - DNA, 120 bp, Artificial Sequence
  ENSG00000285681_5 (sequence is synthesized)
agttaattgattttcaacaagaatgcttagactattaaatgaagtaaaatggtcttttcttcaacaaataatgccaggacaactgaatattcatgctaaagaatcaagttggatccttat

SEQ ID NO: 1026370 - DNA, 120 bp, Artificial Sequence
  ENSG00000285681_6 (sequence is synthesized)
ctctcactgttaccaaaatcaactcaaaatgaataataaacccatgtgtaggaactgatactcttggaataaaactttgaagtaatgtttgtgattttgagttagttttcttagatatga

SEQ ID NO: 1026371 - DNA, 120 bp, Artificial Sequence
  ENSG00000285681_7 (sequence is synthesized)
cactaaaatcaggatataaattgtacttcatcaaaacttaaaacttttatgcttcaaagaacaccagcaagaaagtcaaaaggtaactcacagaatgtcagaaaatatgtgcaaatgaca

SEQ ID NO: 1026372 - DNA, 120 bp, Artificial Sequence
  ENSG00000285681_8 (sequence is synthesized)
aaaatgagcaaaagatttgaatgatcatttcttcaaggagatatacaattcaacaataagtactgaaaagttgctcaagtcaattagtcattaggtagatgcaaatctatgccacaaaca

SEQ ID NO: 1026373 - DNA, 120 bp, Artificial Sequence
  ENSG00000285681_9 (sequence is synthesized)
gcgctttctacttgctaggatgactacaatgaaaagacagtaacaagtcttggcaaagatgtggagaaattggatcagcacattgctgacgggattgtaaaacagggccatgactttgga

SEQ ID NO: 1026374 - DNA, 120 bp, Artificial Sequence
  ENSG00000285681_10 (sequence is synthesized)
aaacagtttaacaattcctccaaatattaaacatgtagttatctttataacccagcaattgcacttcaatatgtatgtgcccaagagaaaggaaaacatatgtctacacaaaagcttgta

SEQ ID NO: 1026375 - DNA, 120 bp, Artificial Sequence
  ENSG00000285681_11 (sequence is synthesized)
caagaatgttcatagcagcagtattcatactagtcaagaaagtataaagaaatcaaaatgtggtatatccatacataggaagttatatagcaataaaatggaatgaagtgttaatatttg

SEQ ID NO: 1026376 - DNA, 120 bp, Artificial Sequence
  ENSG00000285681_12 (sequence is synthesized)
ctataacacagacgaacttggaaaacattacactaaataactgaagctagtgatgaaaggccagatactacatgatctcatttatataaaatattcagaataggcaaatccataaagaca

SEQ ID NO: 1026377 - DNA, 120 bp, Artificial Sequence
  ENSG00000285681_13 (sequence is synthesized)
gaaagaaagattagtatttgctaagggctgggagttggagtagggagaatgatgagtgattgctagtgtatataggtttttttggtgtagtggtaataaaaatgtcctctattggatact

SEQ ID NO: 1026378 - DNA, 120 bp, Artificial Sequence
  ENSG00000285681_14 (sequence is synthesized)
ggtaataattgcataacactaaatattctaaaaagcactaaattggttttcagagggcataaaggggaggcagaagcagaggaagagagagacagagagaatgaaggagagggaagggat

SEQ ID NO: 1026379 - DNA, 120 bp, Artificial Sequence
  ENSG00000285681_15 (sequence is synthesized)
ggaccttaaaaaaatacagagagaaatgacaggacatctaaaactaatgacaactagaatgacagctgacttcacatcagcaggaataaaaaaatcacctatgaaaaaaatatatatgta

SEQ ID NO: 1026380 - DNA, 120 bp, Artificial Sequence
  ENSG00000285681_16 (sequence is synthesized)
tatgtatatgatagagatgctactgtaaaaaataaaatagggaaaggatggattgttttttaaaaattactgttccattacctagctatatacgtgatttgaaacttaaaactagatccc

SEQ ID NO: 1026381 - DNA, 120 bp, Artificial Sequence
  ENSG00000285681_17 (sequence is synthesized)
atctgcggtttactatatttttgcaggtatcgcatcagaagatttatctacaaaatatgcatgaataaagagaggaaattcttgaatacacagagattgaagacaggaaaaatctgagcc

SEQ ID NO: 1026382 - DNA, 120 bp, Artificial Sequence
  ENSG00000285680_0 (sequence is synthesized)
gtgtgggcagcaccaacaaaagcagcagagagggatttccagtattaataaagggattcactgctgcatttggagaggggaaaaaaagaagggttaacttatgctctgaactgcctaccg

SEQ ID NO: 1026383 - DNA, 120 bp, Artificial Sequence
  ENSG00000285680_1 (sequence is synthesized)
atcacaaataatggcgaaatggcactttctgattatactgtattttgtttatagaaagtttgatacgatggaacttatcagattgtaatattctaggaattgggtgctacgataatgaag

SEQ ID NO: 1026384 - DNA, 120 bp, Artificial Sequence
  ENSG00000285680_2 (sequence is synthesized)
atattacacaatttctgaaggagagctgctggaagccaagaaatgaaaagagaatggggaaatccagacagatttatgtatatattaagggtttatcttggaggttgaaatcacaattca

SEQ ID NO: 1026385 - DNA, 120 bp, Artificial Sequence
  ENSG00000285680_3 (sequence is synthesized)
agaggaaattcttcatgggacattctaaaggaaagtaatgataactaatgtacccaccagaacctcttctcacgtaaaaattgccgctgtccccagcaaattccgtcaatcattttacaa

SEQ ID NO: 1026386 - DNA, 120 bp, Artificial Sequence
  ENSG00000285680_4 (sequence is synthesized)
atgctagcttattaaagatataccaaaaagtaggtaactagggctaaatctgagaccatgatgtttcagagttttagaatattattgtgaatacacaggagaaaacaaatttaaattttg

SEQ ID NO: 1026387 - DNA, 120 bp, Artificial Sequence
  ENSG00000285680_5 (sequence is synthesized)
catcactttgagggtggcattgagatttatggccagaagtcaagttcagctttaagtttaatgccattcagcctgtatctgtgtccctgcagctagggtagctagctaggttcctgtttc

SEQ ID NO: 1026388 - DNA, 120 bp, Artificial Sequence
  ENSG00000285680_6 (sequence is synthesized)
ttcttggacaaccatctctatcatagtcatttatttctatttttaaatatagcttggtacatgggtttatcttaaaagtacaacacatactcagtttccaactatttcaagatgaagttc

SEQ ID NO: 1026389 - DNA, 120 bp, Artificial Sequence
  ENSG00000285680_7 (sequence is synthesized)
ataactaaatcacagtaaggtgtacttttcctagaatattttgcattgcccaaagcctttccctttaacatagtacaatgaagcctaggatgtgagcttttatctagtagctgatttgca

SEQ ID NO: 1026390 - DNA, 120 bp, Artificial Sequence
  ENSG00000285680_8 (sequence is synthesized)
taatgtaagtatgcacacatacatatatgtaaatgcacatatgtgtgttttctgaaatgtggttttctgtttcaacttggttcttattagaatgattttttaaagtgactaaatattctt

SEQ ID NO: 1026391 - DNA, 120 bp, Artificial Sequence
  ENSG00000285680_9 (sequence is synthesized)
tagattcatttgttttttcaataaaattgacatagtaactcatttttgagaaaataagcttctgtatataataatggatgacatccattctttgtcattgtctatgtaacattctctgcc

SEQ ID NO: 1026392 - DNA, 120 bp, Artificial Sequence
  ENSG00000285680_10 (sequence is synthesized)
tttccaatatggcgtagcttgaaattctcactctaaaaaaaatccattcactagcatggaaaatatatcagcatataaatttcaaatatagtgaaaatatgaataatatctttgaagtaa

SEQ ID NO: 1026393 - DNA, 120 bp, Artificial Sequence
  ENSG00000285680_11 (sequence is synthesized)
gtttactagttgaatagctatgttaaaagtaattgtgtaaaacagatactagatttgcattctaaaactcatagagtaacaatgttttcttacataaagtttttggtataataggtttta

SEQ ID NO: 1026394 - DNA, 120 bp, Artificial Sequence
  ENSG00000285680_12 (sequence is synthesized)
cttgaagaggacgaatttaggaaagtctcattttacagtaggtttctaaaaggactttaggcttattttacatagccattgatttttacagatcattagactgaccacatattattttaa

SEQ ID NO: 1026395 - DNA, 120 bp, Artificial Sequence
  ENSG00000285680_13 (sequence is synthesized)
tctagctgcatttagttaaattggttatttgtaatgtttgtgacttttgctaacttaaattgcttgtttattagcatacgacctgcataaaaataattgttattgaagaatatcactacc

SEQ ID NO: 1026396 - DNA, 78 bp, Artificial Sequence
  ENSG00000285680_14 (sequence is synthesized)
cacactgggacctgtcacggggtggagggattagttaatgggagcagcaaacaaacatagcacatgtatacatatgta

SEQ ID NO: 1026397 - DNA, 120 bp, Artificial Sequence
  ENSG00000285680_15 (sequence is synthesized)
ctgtttattttaattctcatgtttatttgaagggatgttttaatatactctactacactttttttaccaagttgaattttaaaatattttgataataattcccccatgtgttactccttc

SEQ ID NO: 1026398 - DNA, 120 bp, Artificial Sequence
  ENSG00000285680_16 (sequence is synthesized)
tgaaattgaaaatgaatacagtaactaaaacataaagcatcaaaaacctgtaactttgctcataagttttaccatttatttactttgaccaaagtaatataaaaataatcggtgataata

SEQ ID NO: 1026399 - DNA, 120 bp, Artificial Sequence
  ENSG00000285680_17 (sequence is synthesized)
taaattttttaaagtataattcttttcagtttttttaatgttacaacatcattaggacactatttagaagattatttactgactcattaggattactatttcatttgcaaatttaccaat

SEQ ID NO: 1026400 - DNA, 120 bp, Artificial Sequence
  ENSG00000285680_18 (sequence is synthesized)
ttaccaattcagccaagttttgccttttactgaagtgttaattctaagtaaacaaagtatatggcttcaaatcttaaatgaacgggtttcacaccattatttatcaaacaattttgctac

SEQ ID NO: 1026401 - DNA, 120 bp, Artificial Sequence
  ENSG00000285680_19 (sequence is synthesized)
tttcattcctccaccccagcagcccttttagcaattttttttttcctaacttcccaagggaaactttcataccagagataactgtttatgtactatgtggttctttggaggaccacagac

SEQ ID NO: 1026402 - DNA, 120 bp, Artificial Sequence
  ENSG00000285680_20 (sequence is synthesized)
cattgtaatagctaagataccgccactcaaactgttcccccttgtgggtgatataatccccattgagaatgtatggtttattcctacagattttaccacagtttagtcacctatttacta

SEQ ID NO: 1026403 - DNA, 120 bp, Artificial Sequence
  ENSG00000285680_21 (sequence is synthesized)
ttcatggtattgctgaaggaagacttgctgaaatattaccagccataaaatatgtcaatagcattaggagatattgaatggcactttatctctgaggtggtcttgaaaactcaaaatcaa

SEQ ID NO: 1026404 - DNA, 120 bp, Artificial Sequence
  ENSG00000285680_22 (sequence is synthesized)
atgtcttatctcaatgagatgtttcaaagaaaaatcaccaggtgcaaaaatttgtttccataaattatagttcagctcataggacttaaacatctgccaaaatgtcaatcaaaagatgtt

SEQ ID NO: 1026405 - DNA, 120 bp, Artificial Sequence
  ENSG00000285680_23 (sequence is synthesized)
gaaaagctcccctaatctttgtcaaaaggagactttttctttcttttgttttttcttaattccaccttggcctattacaactaacatcagcacacatacccctggcaaagagtttgctgc

SEQ ID NO: 1026406 - DNA, 120 bp, Artificial Sequence
  ENSG00000285680_24 (sequence is synthesized)
actgcgttctcctctggtcccttcttcttaaatcctatgttaatatgctgcttggtgaaagtcttcttagggcaagacagcattattgcattattggcaaaataacagcagaagcttgta

SEQ ID NO: 1026407 - DNA, 120 bp, Artificial Sequence
  ENSG00000285680_25 (sequence is synthesized)
aatgagtctgacagctcaaaatggaagacttgtccagcaacaggcttttatgtaacagtgtgttaataacatcattttgaagaaacaaatgaattaaaagtatctataattgttattatt

SEQ ID NO: 1026408 - DNA, 120 bp, Artificial Sequence
  ENSG00000285680_26 (sequence is synthesized)
tgcccattgattggagataattttatgtgaatatctatccaatatctgacaaaaatcgactgttaaaacgtgagttggtggtggcaaatattaattttcaatggtattattttctgagaa

SEQ ID NO: 1026409 - DNA, 120 bp, Artificial Sequence
  ENSG00000285680_27 (sequence is synthesized)
agaaatactttaaaatgttttcctaggataaatatagtatattaaataatgagtttcacttgataatttaaggaagagaaaataactctctagaatagcactgttatgaataataaaagc

SEQ ID NO: 1026410 - DNA, 120 bp, Artificial Sequence
  ENSG00000285680_28 (sequence is synthesized)
atagatcattgtaggcctattcataattcgtgcttttatacatactctaggtttattgtataacatcatttaatcaagaaaaacaaagtggggactcaatgtcaaataaaaaagagtgag

SEQ ID NO: 1026411 - DNA, 120 bp, Artificial Sequence
  ENSG00000285680_29 (sequence is synthesized)
gcactctgaaagatctgacaccctctgctgatctgcagtagcaaaaatccatctggctagggaatgctgaaagaaaaaaaaatcaatccacgtacagggcaagcgttaaaaatgtgggca

SEQ ID NO: 1026412 - DNA, 120 bp, Artificial Sequence
  ENSG00000285680_30 (sequence is synthesized)
taaaaggctgacgatctacatagatgcttattttaaatggattatttgattatttttgcgtgctggaaactttaccctttcctttccttaacgagttcacagcccccaccagctccacca

SEQ ID NO: 1026413 - DNA, 120 bp, Artificial Sequence
  ENSG00000285683_0 (sequence is synthesized)
acaaactgtagtgacctttcagtgtcccgccgacttccactctcttgcttccagcaggagttagaatctaacatttctttacaatgacctctctaacttcttggactcaagacacagttt

SEQ ID NO: 1026414 - DNA, 120 bp, Artificial Sequence
  ENSG00000285683_1 (sequence is synthesized)
acaggacctcattcgcactccaatgacaatgaaaggaagggggtgttgggcagagaagcaaagagctccggttctcaccatcacatggtagcgggtgtaagtttgttcccaacataccag

SEQ ID NO: 1026415 - DNA, 120 bp, Artificial Sequence
  ENSG00000285683_2 (sequence is synthesized)
ttaagtgtagacaatgctcccatcagtgctggaactggccccggtaacttgctttagctgatggaatgttaccaaacacaacatgatcaaaggcttgagagatgatttccctcctgtgct

SEQ ID NO: 1026416 - DNA, 120 bp, Artificial Sequence
  ENSG00000285683_3 (sequence is synthesized)
tccgcaattaccatgaaaagaacatggcctggtggtccctgatccccaaagaatgacggacacctggaaaaagcttggagtaacagattcatgagcaagaataaataattattgttttaa

SEQ ID NO: 1026417 - DNA, 120 bp, Artificial Sequence
  ENSG00000285683_4 (sequence is synthesized)
gcatgaaaaactagcccttacatattatgtaaggatttagatgttaaactccactgtagaaactgataacttcacctaaaccatttggtaggctcctttcatatataccaggaaggatgg

SEQ ID NO: 1026418 - DNA, 120 bp, Artificial Sequence
  ENSG00000285683_5 (sequence is synthesized)
aattttactgagaaaaaacttttaataagacaggattaaggtatttctctaccatcgcaaagccagaaggtcaggtataatcactctgaagcaaagaaagtcgaagtcagagaacatctg

SEQ ID NO: 1026419 - DNA, 120 bp, Artificial Sequence
  ENSG00000285683_6 (sequence is synthesized)
ctggtgcctgtgttcctcacaggtgggagggcaaccagagaatttatcctgttgcatcaaatgagttgactggagctgtctgctccagacctggtcgtctgagacagcagacttggaccc

SEQ ID NO: 1026420 - DNA, 120 bp, Artificial Sequence
  ENSG00000285683_7 (sequence is synthesized)
agcagcaagcgttgaaggatggagggaggaggcgacagagaacatgcacaaatcaccaagctagagaagcctcaagtatcctctcttaaatgcatgcaaaaggaatcctgaaaagaatga

SEQ ID NO: 1026421 - DNA, 120 bp, Artificial Sequence
  ENSG00000285683_8 (sequence is synthesized)
aggacagttagtgccgtagactctgaccagcttggtttgtgactcactctccctactggtgggaagtagaatcatgaccggaaaccttgatcttgaggagatcaaaaaacacagagcaaa

SEQ ID NO: 1026422 - DNA, 120 bp, Artificial Sequence
  ENSG00000285685_0 (sequence is synthesized)
ggcacaggaaatggctgctggatgaatgtgcaagtgagtaaggaggacacagacggtcagagagaccactggccccagagtgcacaggggctgcgcatgatggttgtgactgcgttctgg

SEQ ID NO: 1026423 - DNA, 120 bp, Artificial Sequence
  ENSG00000285685_1 (sequence is synthesized)
tgcagactaactgaagagcagagatgagggagagaagagaaggagagccttgggcaccccaacagagcaagtcccaggctgagccgccctcaccctctcggccctacctacctaccttcc

SEQ ID NO: 1026424 - DNA, 120 bp, Artificial Sequence
  ENSG00000285685_2 (sequence is synthesized)
acctggatccagctcagtgctgatcacacagtttgctgaagggatagagctggggaatgtcagaaatggggaaactgagtcagcttccaggcctcttaagtccttgactggggctcacct

SEQ ID NO: 1026425 - DNA, 120 bp, Artificial Sequence
  ENSG00000285685_3 (sequence is synthesized)
cacttccccagactgtggcccccatccttctccagacctcctccctgctctagcccagggcctcgcttagacccccacccccaggggagccttgacagaggcccatgcccacccttcctt

SEQ ID NO: 1026426 - DNA, 120 bp, Artificial Sequence
  ENSG00000285685_4 (sequence is synthesized)
gtacacgcctgagcacggctgattcctccctgtgagcccaggccaataatgtgctcttcatgccacaaagctgaaaagcactcaggaaccaggtgcaatcggcctaagggacctgtccaa

SEQ ID NO: 1026427 - DNA, 120 bp, Artificial Sequence
  ENSG00000285685_5 (sequence is synthesized)
ggccacccagcccttaagaagcaaagaagggctgacctgtcactacccactgatatctcaggacctgcaggggcagggttaaatgcacattcccctctcacccacacggcagcaagagaa

SEQ ID NO: 1026428 - DNA, 120 bp, Artificial Sequence
  ENSG00000285685_6 (sequence is synthesized)
agagttagggtcctgggggctgcaatctgggcaatgcctaagcagacagcctcagacaatgaagggcgagtcaggactcagttgtgtcaacttggtatatacaacctctccaagccttga

SEQ ID NO: 1026429 - DNA, 120 bp, Artificial Sequence
  ENSG00000285684_0 (sequence is synthesized)
atattctgatcgtcttgaaatgagttaggagaagcagtatttttcttttctggttaacagtcaaggagatctctggtttatgagagtaaacttggttacattttcagctataaatgactg

SEQ ID NO: 1026430 - DNA, 120 bp, Artificial Sequence
  ENSG00000285684_1 (sequence is synthesized)
gctctcttaggaaatacaaatggacagtacttggaggctggaggagtatggaaaatctgacgaggaaggtgtggacctggccagtggaaagcattttggtgggtctaatgattttgggaa

SEQ ID NO: 1026431 - DNA, 120 bp, Artificial Sequence
  ENSG00000285684_2 (sequence is synthesized)
aatctctgcaaggctggaacattttgccacacgtaagtggttatttccttagcctcttctacattcactgagagctctgtgtagctgattggagagtgagagaactgaaaaacagtccca

SEQ ID NO: 1026432 - DNA, 120 bp, Artificial Sequence
  ENSG00000285684_3 (sequence is synthesized)
gtatgagtctgtcaagagagatgcttcagtacaccaatatgtttggaaataaagagacttggcttcctggtcctgctctaagatgggagcttaaacctatggaatgtgacaccactttgg

SEQ ID NO: 1026433 - DNA, 120 bp, Artificial Sequence
  ENSG00000285684_4 (sequence is synthesized)
gcaaaaacagaattcttagcaaagaaatcattgatgttaaggtaaatttattaaatgctgtacaggaagcatggctggaggggcctcagaaaattacaatcatgatggaaggcaaaaaag

SEQ ID NO: 1026434 - DNA, 89 bp, Artificial Sequence
  ENSG00000285684_5 (sequence is synthesized)
gggcctcagaaaattacaatcatgatggaaggcaaaaaagaaggcggcacctcttacatggctggcgcaggaggaagagagagcaggca

SEQ ID NO: 1026435 - DNA, 120 bp, Artificial Sequence
  ENSG00000285684_6 (sequence is synthesized)
agatctgcccctgtgatccaatcacttcccagcaggcccctcctccaacactggggtttacaatttgacatgcgatttggatggggacacaaatccaaaccatgttaataaccccaaata

SEQ ID NO: 1026436 - DNA, 120 bp, Artificial Sequence
  ENSG00000285684_7 (sequence is synthesized)
catcatttctatgttgagaacactgcgcctctaaagttgaaagcaatattaaaaaattaatttttaaaaatgcttttattggattttcagctacatacaaataggacttaaaatgcatgc

SEQ ID NO: 1026437 - DNA, 120 bp, Artificial Sequence
  ENSG00000285684_8 (sequence is synthesized)
aattccactttaaaaaccataaaaaataaagtccacatgatttcttaatcactttctacttttgcctgtagttataatagagtatagaatagttgaaaataagtgaggatgataatgata

SEQ ID NO: 1026438 - DNA, 120 bp, Artificial Sequence
  ENSG00000285684_9 (sequence is synthesized)
ataatgatgatttaatatcatgtagaaatataaaacctaatgtgctagttgtggacatttgacaccctgactttgaccaacacattttgatggtgtcaaaggatgtttttgaatacccca

SEQ ID NO: 1026439 - DNA, 120 bp, Artificial Sequence
  ENSG00000285684_10 (sequence is synthesized)
caaagaacaatcagccaaatgtctatgaatgctaaacacctatgagtagctattcctcttctgaactcctataaacttcatttgtgtctttattatggtacttatcactttattccttgg

SEQ ID NO: 1026440 - DNA, 120 bp, Artificial Sequence
  ENSG00000285684_11 (sequence is synthesized)
gatatagttacttgtgcaacttagttcccctaacataggggaactttagggcatgatatgtatctgattcttcttggaatgcctccataacacctatcccagaagtcaacaaataagaat

SEQ ID NO: 1026441 - DNA, 120 bp, Artificial Sequence
  ENSG00000285684_12 (sequence is synthesized)
gacagatagttttaaacttatatgagcattccagaattaatattgacaaattcatattggcatgtaacagattttggaaacaaagttctatgcacgtgggtgtcaaaaagaataatgcac

SEQ ID NO: 1026442 - DNA, 120 bp, Artificial Sequence
  ENSG00000285684_13 (sequence is synthesized)
atttctgaatgaaggatagcagatgacttcaaagccactagcagactgtttactttatctgggatcaaggaccctgcatggataaaaggcaaaggaagtcatccaccttgaaaaaaaata

SEQ ID NO: 1026443 - DNA, 120 bp, Artificial Sequence
  ENSG00000285684_14 (sequence is synthesized)
ttttcttaaaatagaggtttggtatctaaagctcctttaattcataggttcagctctatgaaatcattctctttgatgtttaatcatcccaaatcctataataataatttggggaaaaat

SEQ ID NO: 1026444 - DNA, 120 bp, Artificial Sequence
  ENSG00000285684_15 (sequence is synthesized)
aggttgccatggaaaacagtgtggggtagggttatgagtctagcattaggaagatttgacctggttataaaattcattcatgaaagcactgtggttagaattcatgggaaaccacccagc

SEQ ID NO: 1026445 - DNA, 120 bp, Artificial Sequence
  ENSG00000285684_16 (sequence is synthesized)
tttatgcttgctaaaaggaagtaataggatatagagagagatgccttcaaacaaagctgttataaatctgcaacagacaattgtaacgcctaaattacttaaacgaaagcagatgctttt

SEQ ID NO: 1026446 - DNA, 120 bp, Artificial Sequence
  ENSG00000285684_17 (sequence is synthesized)
acgtatattaaatttgagttttttgtttgtttatatgtttattttaacaaaagaaagcagagacattggaggaaagtatacaaattgttctagatatgctttgcttaagaaaaaaaaaaa

SEQ ID NO: 1026447 - DNA, 120 bp, Artificial Sequence
  ENSG00000285684_18 (sequence is synthesized)
ttgtaacatgggtgaagagtagaaatactccactgccaatgaatgtaattcctccgcattctctcatttcactcaccttgtctctcgtttggcctcagattttgcagctctagcagggat

SEQ ID NO: 1026448 - DNA, 120 bp, Artificial Sequence
  ENSG00000285684_19 (sequence is synthesized)
tgtggtttatatgaaaaagtagattttttccttttaaatggacatatatatcttcagatgtaaaacttcagaatttcaaaatatgataaaattttgtcactttataggttttgatttaat

SEQ ID NO: 1026449 - DNA, 120 bp, Artificial Sequence
  ENSG00000285684_20 (sequence is synthesized)
ttattttaaaagtttcactattcttttgatagtagctgacagatccaatcctgttcccatatgctttctgctattttaaaagaaacagtacacaattgcctcagagaggcaccatgtgtt

SEQ ID NO: 1026450 - DNA, 120 bp, Artificial Sequence
  ENSG00000285684_21 (sequence is synthesized)
tccaaagtgtgaatctgaaaaccatccatctgggcatgttggcatcttcctgaatcgtatgtgattgaaagaaatattttcaacatttttcaagtctttgactacatgagaaagagaata

SEQ ID NO: 1026451 - DNA, 120 bp, Artificial Sequence
  ENSG00000285684_22 (sequence is synthesized)
ggatagccccaatcattcatcaagactcaggtcaccagtggcattcttagtgaattactctgtcaccctagctctttatttgtcgcataactaactctatgcatactcatatgaaaatgc

SEQ ID NO: 1026452 - DNA, 120 bp, Artificial Sequence
  ENSG00000285684_23 (sequence is synthesized)
ttatttactttgattaaaattatttcttcaactgttgcttcccctataatctatgagctcctaaaatgaaaagcagatggtctttaatgcaattcaattcaacaaatattattacaatgc

SEQ ID NO: 1026453 - DNA, 120 bp, Artificial Sequence
  ENSG00000285684_24 (sequence is synthesized)
tccagatactaatctagaagctgcagagacaattctgaataagaagagagcatttttgccctccagaatttacaatctagctgggcagagagaaattgaacaagtaattagacttaaaga

SEQ ID NO: 1026454 - DNA, 120 bp, Artificial Sequence
  ENSG00000285684_25 (sequence is synthesized)
tgattcttggtgaggagttaggataactgcatctgaaacctcacatagacaaaaataaagttgaaagttcaaacttactttaatattgtttttattaatagtactttttgtgttgtatga

SEQ ID NO: 1026455 - DNA, 120 bp, Artificial Sequence
  ENSG00000285684_26 (sequence is synthesized)
catagatattcagagtgattttctagattgttgagatcatcatacatatttcttgtgaagctaagtaatagtcactaaattatgggccaggcatatggctaggtttatgtatgtatatgt

SEQ ID NO: 1026456 - DNA, 120 bp, Artificial Sequence
  ENSG00000285684_27 (sequence is synthesized)
acacacaagttatattatatataacttatagtgaatttacaagccctctatgaccaagttactttattttttgaaacttaaattaatcctaaaagtaaaggttttttttttcaaatcatt

SEQ ID NO: 1026457 - DNA, 120 bp, Artificial Sequence
  ENSG00000285684_28 (sequence is synthesized)
taaaaagcagataaattatattgcatcattatagcctcaaacacatggtatcaaaatatggccacatgttaatcaataaaacgaataactttgtggtaaactaagagactgagaaatctt

SEQ ID NO: 1026458 - DNA, 120 bp, Artificial Sequence
  ENSG00000285684_29 (sequence is synthesized)
gccactaaacattaaaggcagagtgacttccatgttttgatcgtgttagagttgtctgagtcattttaggctggcctaacagaataccaatggactgggtagcttaaacagcagaagtgt

SEQ ID NO: 1026459 - DNA, 120 bp, Artificial Sequence
  ENSG00000285684_30 (sequence is synthesized)
atttcttgcagttctgaagactaggaagtccaagatgaaggtgctggcagatctggtgtctggtgagggcccttttccctctggtgagggtttgtagatgactgccttctcgttggattc

SEQ ID NO: 1026460 - DNA, 120 bp, Artificial Sequence
  ENSG00000285684_31 (sequence is synthesized)
tcacatggtggacagcagagagagaagaagcaagctctcttgtgtcttttataaagatgttaagcccattcatagaggctccacccttttgacctaataatctcccaaaggtgcaacctc

SEQ ID NO: 1026461 - DNA, 120 bp, Artificial Sequence
  ENSG00000285684_32 (sequence is synthesized)
ctaatactgatattttggaagttaatatatcaacatatgagttttggagagacataaacattcagtccatggcagggtgcataactggttccattgttcaaagaaaaattcagtaaaaat

SEQ ID NO: 1026462 - DNA, 120 bp, Artificial Sequence
  ENSG00000285684_33 (sequence is synthesized)
aaaaaataataattccatcagatcttggttaagttgattgtcacagaatttggttcattaataaaataacctgtttctaccctaaatggggatactttgattaaggtttccacttactag

SEQ ID NO: 1026463 - DNA, 120 bp, Artificial Sequence
  ENSG00000285684_34 (sequence is synthesized)
tgaccaaattcctcaagagaaagcactgtctctacttttttcaaacctcattcatagtatttgggttaggattctacacaatatgagagctttgtcaaagttgagtaaatcaacttggac

SEQ ID NO: 1026464 - DNA, 120 bp, Artificial Sequence
  ENSG00000285684_35 (sequence is synthesized)
ctcttttcttcttattaaaatgcaacaaatttaattaataaacacccttttattgatacaggtatcccctgctatctgaattctctcttttaatgaaaattattttcctatccaaactct

SEQ ID NO: 1026465 - DNA, 120 bp, Artificial Sequence
  ENSG00000285684_36 (sequence is synthesized)
agaactgaattgaagctctactcttcagaccaaaaaaaggttgcagaatataaatttaggcactttttggagggctggaggtctgtacactgttgttaggaagaaactgtctactctcca

SEQ ID NO: 1026466 - DNA, 120 bp, Artificial Sequence
  ENSG00000285684_37 (sequence is synthesized)
gcagagatgagaaaaaaaggggaattgttacaaaattaatatgagaccagattaaaagatgtattgaaaggaaaagagagattagaataccagccaggaggcaataatattgaaaaagtg

SEQ ID NO: 1026467 - DNA, 120 bp, Artificial Sequence
  ENSG00000285684_38 (sequence is synthesized)
aagttttcatatcttgtcaaaagaaaatgtttactttttcaaagtttttttaatgttgtatattatgaatacatttgaaatccaaattattgttcagccatgttgaatatatttgctact

SEQ ID NO: 1026468 - DNA, 120 bp, Artificial Sequence
  ENSG00000285684_39 (sequence is synthesized)
ctgaccagtttttagaatgctctgatgaaacttgtgtgatctccaaatttgtatagtgaagagaaaaccctgaaaatctttcactttgtcatgcctgcgctgagggcagatgactcactg

SEQ ID NO: 1026469 - DNA, 120 bp, Artificial Sequence
  ENSG00000285684_40 (sequence is synthesized)
tatgaattcaagttaaatcacttaacctttttctcttattcaacccatctgggaagctgaatacaagcacttcactatgaaacagatggtgagcctaagctacattttcccagattaaaa

SEQ ID NO: 1026470 - DNA, 120 bp, Artificial Sequence
  ENSG00000285684_41 (sequence is synthesized)
aaagaagaatgtgttataaggactaaaagaaccaaatgtggaaaaaacgcagggattacacggaaaagagctataagctggatcagacattttcacctgtaaaaaataatgtaatgctta

SEQ ID NO: 1026471 - DNA, 120 bp, Artificial Sequence
  ENSG00000285684_42 (sequence is synthesized)
aaaaataagtcctaggagatgatatggggacaaagtcagtaaaaccttttcataaagcaccatatgtgtaatgtggtcatgaatgttggtatgtacagtgagtaaaatgctatttgtttg

SEQ ID NO: 1026472 - DNA, 120 bp, Artificial Sequence
  ENSG00000285684_43 (sequence is synthesized)
ctggttcatttacctgtatgtctcagaaaacaaatttggttactttaggatacttttaggttatctatttgataactgtaaagctaaatgctaataaaaacatctcgagaaaatttatga

SEQ ID NO: 1026473 - DNA, 120 bp, Artificial Sequence
  ENSG00000285684_44 (sequence is synthesized)
gacccatctaaattatagctccagtgaaatttaacactagttggaaaacaaaaactttccaatatgttctaggataattgttttctaatcttttatatgcatataaatcacttggaagta

SEQ ID NO: 1026474 - DNA, 120 bp, Artificial Sequence
  ENSG00000285686_0 (sequence is synthesized)
attcccttatagggccataggaagccatggcatgtttcaacaaggagaaagaaatatctaatctgcgttttagaaagatgatcatttgtggtgaaaggtgaaccttgtgaacacatttaa

SEQ ID NO: 1026475 - DNA, 120 bp, Artificial Sequence
  ENSG00000285686_1 (sequence is synthesized)
tggaataaaacattttgtgagagctgtaggcagttgtgattgctcgagtgcctcttctgcatcatggaaccaggattgaagagaagagctcagccccaaaggagaggaacagaattgctt

SEQ ID NO: 1026476 - DNA, 120 bp, Artificial Sequence
  ENSG00000285686_2 (sequence is synthesized)
ctggaagcaccatgagagcttccactctccgtgagaaaagaatagcagaggaggaaacggtggccctggaaagagcttgctgtctgagaggcaaaggaggctggcggacacagagctaag

SEQ ID NO: 1026477 - DNA, 120 bp, Artificial Sequence
  ENSG00000285686_3 (sequence is synthesized)
aaaggttaaaaaaatcatgcgtccaagaagagaaaaagaatactgttgaattcactattgaagtttagaaatgagaagaaagggatgatgtgctgcagggggagagctgagaaggaatgc

SEQ ID NO: 1026478 - DNA, 120 bp, Artificial Sequence
  ENSG00000285686_4 (sequence is synthesized)
cattagaacagaaagaggaatttggatacaagtactggaagtcatatagcaatttgggagcagggttcttaaacacacatgcacatagacacacatatacaaccctatttagcaacctgt

SEQ ID NO: 1026479 - DNA, 120 bp, Artificial Sequence
  ENSG00000285686_5 (sequence is synthesized)
cgggatttctccatgagattcttattctcgcagctctcaggctaggccccattataggaactgatcataattcatctacttcaagcctatttatatgatttgcacaagttcacaaaaact

SEQ ID NO: 1026480 - DNA, 120 bp, Artificial Sequence
  ENSG00000285686_6 (sequence is synthesized)
atttgcctgtgaaatgcacatgtcaattacccttcaatggttcaacaacccaggaccctgagcccactggcatttcacagagcactgagagactttgtcttcagtccaccccaaagtacc

SEQ ID NO: 1026481 - DNA, 120 bp, Artificial Sequence
  ENSG00000285686_7 (sequence is synthesized)
ccagccctgccatcaataataacacaaatgagtttcctcagagtcagaccaggagtgtcagcagtgaattgttggggagatctgggaactccccatggctccatgggtgttcctgaattt

SEQ ID NO: 1026482 - DNA, 120 bp, Artificial Sequence
  ENSG00000285686_8 (sequence is synthesized)
cactctccaggctatcactttttccaagtttctttattgctccattaccaggaaaaaaacagggtgttaaaaagagccaggctgctctcacaccccaaatgacctgtagcagagtcagca

SEQ ID NO: 1026483 - DNA, 120 bp, Artificial Sequence
  ENSG00000285686_9 (sequence is synthesized)
acaggccaaaacatgcacaagagtgaagacgtttttcttccccagatttctccctgctgcttgtgaagttggaagcactgttgctggctcagcgggaagaggcaacagttgtcttgtgca

SEQ ID NO: 1026484 - DNA, 120 bp, Artificial Sequence
  ENSG00000285686_10 (sequence is synthesized)
cctgtgccctaaatctcctctactggtgatgagccctttacatctccagggatgcaatttcccctccctcaagtttctcccttccaatagaacttgtgtgtatgaaagctgaattaacca

SEQ ID NO: 1026485 - DNA, 120 bp, Artificial Sequence
  ENSG00000285686_11 (sequence is synthesized)
cattccgacttcaggaatgcaacggtctctttcaaaatgtttccaaaacaagggagcaatggcagctattaatccaagaacttagatccaacaattctctccaaaaatacaaaataacaa

SEQ ID NO: 1026486 - DNA, 120 bp, Artificial Sequence
  ENSG00000230262_0 (sequence is synthesized)
tcagactgcaattgaccactagtaactggaactgcagaaagcaagaccaagagacttgaatcagacaatgggggactgctatatcagacaaaggatttgtatctggaatatataaagatc

SEQ ID NO: 1026487 - DNA, 120 bp, Artificial Sequence
  ENSG00000230262_1 (sequence is synthesized)
acttatacctaaatactaagaagacaaacagcccaatttaaaaatggacagaatatttgaacagatggtggattggaaacagtgtcagcatgactctcccacttggaaagacaaaatggg

SEQ ID NO: 1026488 - DNA, 120 bp, Artificial Sequence
  ENSG00000230262_2 (sequence is synthesized)
cttaattattagataaggatacgtttccaactgaaggtggcaacgttatgctggaagaacatgtcaggaagaccacaaaatttcatgactgtacttgctacactttcagcagaagagtta

SEQ ID NO: 1026489 - DNA, 120 bp, Artificial Sequence
  ENSG00000230262_3 (sequence is synthesized)
tacatattttcaattcaacaaagattaagccaaaaagaattcttagaacattcccactcttctttggcacatcaaaaggcaacaaatgtcattttctcccatgtttttatgtgcagttta

SEQ ID NO: 1026490 - DNA, 120 bp, Artificial Sequence
  ENSG00000230262_4 (sequence is synthesized)
gaacaaagaccaattatctatgcagctgtccacagtggataaaacaaaaagcatacatttggtccagagttaagtcacctgggttgggcccatccaaggaagtttgatgtttctactctc

SEQ ID NO: 1026491 - DNA, 120 bp, Artificial Sequence
  ENSG00000230262_5 (sequence is synthesized)
ggataaacacaaatttctccttaaatttccatttattggaaatgattggagggagggaacttctccctcacctccacactgcctcttttccaactcttcttccaacacaaaatagtttaa

SEQ ID NO: 1026492 - DNA, 120 bp, Artificial Sequence
  ENSG00000230262_6 (sequence is synthesized)
acagcaagcacttagagagcttttagccttgcttgttgattacaaggcccaagttagtgtatggtttgcccatcggaggaaagctaaaacatgggccttcatgggtattaaaattgaaga

SEQ ID NO: 1026493 - DNA, 120 bp, Artificial Sequence
  ENSG00000230262_7 (sequence is synthesized)
aaccttttccagcattttttctattttctttaaagtaacaacctatggacttccccatctgacattttcgagtgatcccactgtgtgaatgaaggactacttcagggtttgagggcaaag

SEQ ID NO: 1026494 - DNA, 120 bp, Artificial Sequence
  ENSG00000230262_8 (sequence is synthesized)
ctgaaatcttagcaacttaccagtgagcaaaggtagaacccagagcccatctctccttttccaggctgctgagtaaagtctggctcaatcaacctatcaatgaagcagtgcttacaacat

SEQ ID NO: 1026495 - DNA, 120 bp, Artificial Sequence
  ENSG00000230262_9 (sequence is synthesized)
tctccaagaccacccaaaacccaaactggaaatgaatcatgactaatctgactcattttggctcacacagtgcccttccaatttgtatttacctttaccacccaggacctgaccttggac

SEQ ID NO: 1026496 - DNA, 120 bp, Artificial Sequence
  ENSG00000230262_10 (sequence is synthesized)
atgtgtaccaggatgtaaggcaataaacctattcacaattccaaaagggcctggtcctctatgaagatttcctgaaggctacttactttctctactcattaaaatttttgcttaacttca

SEQ ID NO: 1026497 - DNA, 120 bp, Artificial Sequence
  ENSG00000230262_11 (sequence is synthesized)
gaactacactacccagactgccacggggcgcgcaactaccctaccgtggatgccctggagcgagggactacaacatccagaatgctgcgaggggcgggaccgcagcatccaggagaaatt

SEQ ID NO: 1026498 - DNA, 120 bp, Artificial Sequence
  ENSG00000230262_12 (sequence is synthesized)
gtggccacgacatggactgcccatgccagctttcccgaccttccttccagtggaaggcccgcgaaagcggggaccacctccgggctagctcaccagaactgtgaaaggacactcaccacg

SEQ ID NO: 1026499 - DNA, 120 bp, Artificial Sequence
  ENSG00000230262_13 (sequence is synthesized)
cctaccatgcccatgccggagtgtgcacagggaccgcttctccagcactcagcagtctgactggtttcatttcctctcatcttactgcttgctagtaactcttcttggatggaaaaaaag

SEQ ID NO: 1026500 - DNA, 120 bp, Artificial Sequence
  ENSG00000230262_14 (sequence is synthesized)
acatggttgaatatgcatcttcctctagtccactgcatataactcattgttctcagcaatccaggtttacctcttcaaatttatgcagaactgcaaaaaatcattttctctgaagtaact

SEQ ID NO: 1026501 - DNA, 120 bp, Artificial Sequence
  ENSG00000230262_15 (sequence is synthesized)
gcttctgtcattttcagccaattttggcctcaaagctaaaaatacgttgcttggtcattgctatttgtccttccttccatggggcagtaagctaagacttttagcctaattctcatgatg

SEQ ID NO: 1026502 - DNA, 120 bp, Artificial Sequence
  ENSG00000230262_16 (sequence is synthesized)
gaacaacttcaaagaaaagggaaaaacaaactgctttattaaaatgtaccattatggtcaggacttcagtagtgaggaaggcagtgtgtgcgtaataaacagggaagtatatgtgaacac

SEQ ID NO: 1026503 - DNA, 120 bp, Artificial Sequence
  ENSG00000230262_17 (sequence is synthesized)
ctcgacccaggaagtccagctggcttcgcctctcactggaattacagttacagaggctgagaagtccaagatcaagggaccacatccagtgagagccttcttgctgatggtggattggaa

SEQ ID NO: 1026504 - DNA, 75 bp, Artificial Sequence
  ENSG00000230262_18 (sequence is synthesized)
cctctcactggaattacagatggtggattggaaacagtgtcagcatgactctcccacttggaaagacaaaatggg

SEQ ID NO: 1026505 - DNA, 120 bp, Artificial Sequence
  ENSG00000230260_0 (sequence is synthesized)
agaacctgtgacttgttcttaaccaacagactatgacaaagagatctaaaatgaatcaaggcatttcttgaaattcaatggctttttttttcatttgggaatgttcaaatgtatgttaat

SEQ ID NO: 1026506 - DNA, 120 bp, Artificial Sequence
  ENSG00000230260_1 (sequence is synthesized)
aatcttcctgttcaccccactcaacaactggctcgtcattcatacgcaaaatgaggtaagaaagaagctgaaaaagattctgccagaataagagagagacataaaaggagaggctgctta

SEQ ID NO: 1026507 - DNA, 120 bp, Artificial Sequence
  ENSG00000230260_2 (sequence is synthesized)
agattgcctgaagccattgaccaactccattttaagaattcctgtatgaggtgaagaacagttgaagagtttctctgggaaaagtagactcatatggataagagctgaactccagttgcc

SEQ ID NO: 1026508 - DNA, 120 bp, Artificial Sequence
  ENSG00000230260_3 (sequence is synthesized)
ctgccaagacttgctgctccctatgtaataattcatagcttcgaagaatgcaagccaaatgctgtccaggagctttgtatatagcacacgatggtaactgcatgtgaattcagagtgtgg

SEQ ID NO: 1026509 - DNA, 120 bp, Artificial Sequence
  ENSG00000243368_0 (sequence is synthesized)
ctctgtcacccaggctggagtgcaatttcacaaagttaaagtaaaactcttttctacaagaaggatagtttggttttgtttcctacaattaatgcttcgtcaatcatggcttttcatatt

SEQ ID NO: 1026510 - DNA, 120 bp, Artificial Sequence
  ENSG00000243368_1 (sequence is synthesized)
ttcatatttaaggtggtattaacttacaaaataaggcaaaagaaccattaggtatgattgctcccaaagtcctcatagcaaatgaactcatgatttccttacctccatcttcatggcgat

SEQ ID NO: 1026511 - DNA, 120 bp, Artificial Sequence
  ENSG00000243368_2 (sequence is synthesized)
cataaccatgagggaatctcccgctttcactttgtctccagctttgacaaacaccttgagattcagtgtgacaggttaatatttgaaaacacagaggtcctagatatgttcatctgcttc

SEQ ID NO: 1026512 - DNA, 120 bp, Artificial Sequence
  ENSG00000243368_3 (sequence is synthesized)
ttgcaaaccatgaatataaacaataaaacataaataaaaagaaaaaaaacaacacagaggtcctttgtggtccacagatttggtatataaacttacagagcagaagtagagcccatgtgg

SEQ ID NO: 1026513 - DNA, 120 bp, Artificial Sequence
  ENSG00000243368_4 (sequence is synthesized)
gtcaaatcagaggcctacagcccaaatatacaggtcaaatctgagacctacagcccaaatgcactggtcaaatcagaggcctacaggtcaaatgcactggtcaaatcagaggcttacagc

SEQ ID NO: 1026514 - DNA, 120 bp, Artificial Sequence
  ENSG00000243368_5 (sequence is synthesized)
aaatgcactggtcaaatcagaggcctacaggtcaaatgcactggtcaaatcagaggcttacagcccaaatgtacaggtcaaatctgagacctacagcccaaatgtactggtcaaatcaga

SEQ ID NO: 1026515 - DNA, 120 bp, Artificial Sequence
  ENSG00000230266_0 (sequence is synthesized)
aaaacggattcagtagtaccaaaatactcataatgtgcagacagacaaaagaactggaaggagtcgtgttttcagacacaggaagcttttcacgtgctccacctggacctcatctctcag

SEQ ID NO: 1026516 - DNA, 120 bp, Artificial Sequence
  ENSG00000230266_1 (sequence is synthesized)
gctcctagcctgcccgggaggcagagccatcagattctcctcttggccccttatcccaactaaacacatcaccactgaggacctgtccaggggtttagctcctgatgaagagacagagaa

SEQ ID NO: 1026517 - DNA, 120 bp, Artificial Sequence
  ENSG00000230266_2 (sequence is synthesized)
aaggtcagagaaaggaagggtgacgctccatccaagatgactacagcgctatgatttccagatggggaaggtcacggatgctggacgcaacagaatctcaacagggacccgagagagaga

SEQ ID NO: 1026518 - DNA, 120 bp, Artificial Sequence
  ENSG00000230266_3 (sequence is synthesized)
atcctgtaagatttatacagaaaatataaaaatctggggagggggaactgtgaaacaatgtgaaaaaaactatttgtcaaatggacagtggggaataacttctcctcccgcacctcctcc

SEQ ID NO: 1026519 - DNA, 120 bp, Artificial Sequence
  ENSG00000230266_4 (sequence is synthesized)
aagcttctaacaacactcatggcacacaatacagaggagactgccataaaaatgacttaaaatgtgcccttttgaggtaaagtaactatgggacaagtgactataaaaatgacacagctg

SEQ ID NO: 1026520 - DNA, 89 bp, Artificial Sequence
  ENSG00000230269_0 (sequence is synthesized)
gtttcccctttgcttcccagccatgcttcccgtacagccttcggaactgcactagacaatccaaaagatctacaaaaactttacatcta

SEQ ID NO: 1026521 - DNA, 120 bp, Artificial Sequence
  ENSG00000230269_1 (sequence is synthesized)
cactagacaatccaaaagatctacaaaaactttacatctacaagccaaggcactgaatctcagccccagaaagagactgtgaccttccttcctcatcaggatcccaagaagccgtagaac

SEQ ID NO: 1026522 - DNA, 120 bp, Artificial Sequence
  ENSG00000230269_2 (sequence is synthesized)
aagaggctaagaggttcgaaggacactggaaaggcttcatgctgctgtaggttgtggatggacaagctttgtgtctggagctgctgtagtgggccactcagttagttcacccaggctccc

SEQ ID NO: 1026523 - DNA, 120 bp, Artificial Sequence
  ENSG00000230269_3 (sequence is synthesized)
acattctccatgctctgtttcaggaaacaaccagaactgtggacagtcttaccaaagacactaacatcatcaccagagaattaaagaaatccagtgagtggcccacaacaattggctggc

SEQ ID NO: 1026524 - DNA, 120 bp, Artificial Sequence
  ENSG00000230269_4 (sequence is synthesized)
ataggacatgatcctagcttcccacagggcacttgggattgtgcagtcagaagtgattgatgtgcatatgtttccacagacctctctgatgtctatgccgtcaccaaaaatattcagact

SEQ ID NO: 1026525 - DNA, 120 bp, Artificial Sequence
  ENSG00000230269_5 (sequence is synthesized)
aattgccaccattgtccttatacttccgtttaaggacactccaggcccaacgtctcaaggccttttaggctagcttccttcaaacctcaaatcttggttgctgtctaatttaacctttaa

SEQ ID NO: 1026526 - DNA, 120 bp, Artificial Sequence
  ENSG00000230269_6 (sequence is synthesized)
cccttttaccatttgccctgagaacacttgccggcagcacttccagctgcagcgtttacccaaagatacctctgccaggaaagaccttgcttttattattacttttgcatttctctagca

SEQ ID NO: 1026527 - DNA, 120 bp, Artificial Sequence
  ENSG00000230269_7 (sequence is synthesized)
tattgacattggaaacaaaagacatcattctatatatagcattctggttttagtggtggtagttccatttacaaaatatagtaattcttgatcactgaaaatgtcagagcctagaaaacg

SEQ ID NO: 1026528 - DNA, 120 bp, Artificial Sequence
  ENSG00000230269_8 (sequence is synthesized)
gagcattcctatgcgtgatgttaacatcattaaacagttgttggccaaagactcatgtgatgaatccaatttttctaaaataaatagctcagatgattcagatgattctgatattaggtc

SEQ ID NO: 1026529 - DNA, 120 bp, Artificial Sequence
  ENSG00000230269_9 (sequence is synthesized)
tgtttagaaataaaacttcaaaaacagtttttatattttacttccacattgaaaatcagtcagatttgctttggcctcaaagaatgtgttcatgtaaaattaaatgagcactagcagcca

SEQ ID NO: 1026530 - DNA, 89 bp, Artificial Sequence
  ENSG00000230269_10 (sequence is synthesized)
gtttcccctttgcttcccagccatgcttcccgtacagccttcggaactatggaacgttagcagctggggacctttctgccaccacaaaa

SEQ ID NO: 1026531 - DNA, 120 bp, Artificial Sequence
  ENSG00000230269_11 (sequence is synthesized)
tggaacgttagcagctggggacctttctgccaccacaaaagcctagattatcctgatggacgatggaagacacatggctgttgttccagctgacatcaagccaaccactggacaagatag

SEQ ID NO: 1026532 - DNA, 120 bp, Artificial Sequence
  ENSG00000230269_12 (sequence is synthesized)
gaaagctctcctagaacacgaaggcccgaatgaactggcccagagcagagaaactgctcagccaaactgccaagctgtgattaacaaaggcttcatcttaatccaccagattttggggtg

SEQ ID NO: 1026533 - DNA, 120 bp, Artificial Sequence
  ENSG00000230269_13 (sequence is synthesized)
gtttgttacacagcgaatgctaactgatacagtcattatcattaggtctttcttgagctgatcatacttcccagcatagaatacgccaatgtcctgctccttattcctggctgccagcat

SEQ ID NO: 1026534 - DNA, 120 bp, Artificial Sequence
  ENSG00000285354_0 (sequence is synthesized)
cagtggttctcagaatcacctggaagctggttaaaacccagtttgctggacccaccctcagaatccctaactcagcagctttgaagtgggccaagaatttgcaccaagtctccaagggat

SEQ ID NO: 1026535 - DNA, 120 bp, Artificial Sequence
  ENSG00000285354_1 (sequence is synthesized)
gctggtgcctttgatccagggaccacactgctcaagaggcactcatcacaggagtagtcaactcatctccatggagcatgtgttccccgcaagcccatactcttcctgagggggaagtgc

SEQ ID NO: 1026536 - DNA, 120 bp, Artificial Sequence
  ENSG00000285354_2 (sequence is synthesized)
tctaggaaggaagatccaaaggaaaggagaaaggaaaaaagagaagaaaagaagggggaaagggaaggagctctcttcacaaaacaagactttttggtagtgcctaggggtatccttgtg

SEQ ID NO: 1026537 - DNA, 120 bp, Artificial Sequence
  ENSG00000285354_3 (sequence is synthesized)
cctctgcttcagtgttcaaagctgtcctttgtgataacactgggccaggaggagaatccaagatcatctcctcatctcaagatccttgacttgatcacttctgcagagtgcctttgccat

SEQ ID NO: 1026538 - DNA, 120 bp, Artificial Sequence
  ENSG00000285354_4 (sequence is synthesized)
ggtctccagcttgcagaaaattccatgtcttttaaggatatgtgctgaaatatttagagaagaaatgatatgatgtcttagatttgcttcaaaataatccagttgtggagagatggctag

SEQ ID NO: 1026539 - DNA, 120 bp, Artificial Sequence
  ENSG00000285354_5 (sequence is synthesized)
gcaagacaatccatggacttaatcccaggaagacctgcaggtaggagcctcgagatacggtaaagtttgagagctcatcagtattccatggaagaggaagatctgtcttgacatatagag

SEQ ID NO: 1026540 - DNA, 120 bp, Artificial Sequence
  ENSG00000254485_0 (sequence is synthesized)
acgagtcacggtggctccgcgctggcggcgggttcccccacaaggtcttggggaaaggagcatgcgctggaagctgtgtgctgttggttttgaggatcttcagtaagctgaaagcggaga

SEQ ID NO: 1026541 - DNA, 120 bp, Artificial Sequence
  ENSG00000254485_1 (sequence is synthesized)
gtcaggggccttgtgtcctaccatggtatttgctaacgtttagagagtgcttccccttgccgagcactggaacccaaagattggatcttctgagaacatcagagaaagactgtccttacc

SEQ ID NO: 1026542 - DNA, 120 bp, Artificial Sequence
  ENSG00000254485_2 (sequence is synthesized)
atccacaccacagcaaaactttggagccttgaacattgggttcataatctcacagctgagaaaggtccctccacactcctggaactgtacacctattggaacccttaagccttccaggag

SEQ ID NO: 1026543 - DNA, 120 bp, Artificial Sequence
  ENSG00000254485_3 (sequence is synthesized)
agccccattgtactcttaagggacaacaatagaagaaatgacagaagacaatcagagattaatgaccagatgaatgatatataccaggtggtcccaacctgagctcccaggctcccaagg

SEQ ID NO: 1026544 - DNA, 120 bp, Artificial Sequence
  ENSG00000254485_4 (sequence is synthesized)
gtcttagagagcagtaatggggggagaaggaaggggtgcttatgagctatttgcagtacttcaaaaagactaatccaaagagctcatatttgctagatattagatgcacaggctaattaa

SEQ ID NO: 1026545 - DNA, 120 bp, Artificial Sequence
  ENSG00000254485_5 (sequence is synthesized)
aagaaaacatcaggtttctttgctcggggctagaaacaccagttaccccatgctgactggaagatctgattggcagttaccgttgtctttgattaataaaacatgagaaaatgaattaat

SEQ ID NO: 1026546 - DNA, 120 bp, Artificial Sequence
  ENSG00000254485_6 (sequence is synthesized)
tggtatttgctaacgtttagagagtgcttccccttgccgagcactggcaagaaggccctcaccagatgccagcaccttgacattggactttccagcctccagaaatatcactcctttatt

SEQ ID NO: 1026547 - DNA, 120 bp, Artificial Sequence
  ENSG00000254485_7 (sequence is synthesized)
caggaaaaaggatttagtactgctatgctcaaatgaacactgggcccatgtgtcagggccaagcaactagaacatgattcagaaatcagtcagagagagacacacttggacaagaccaag

SEQ ID NO: 1026548 - DNA, 120 bp, Artificial Sequence
  ENSG00000254485_8 (sequence is synthesized)
aggcatttcattgtcacgaaacaaggtgggggagggattccaaaacacacagcaggaagtacttctaaccctcagaggtcaaggagcttattccatgttggtatgaggaatggcttattt

SEQ ID NO: 1026549 - DNA, 120 bp, Artificial Sequence
  ENSG00000254485_9 (sequence is synthesized)
tctgatgaccacatgtgggactatttcaactgccacgagaaatcccagaaggattattgttttgtattatttatatatactatacctttttaaaaaaataaaataaatgtaacacataaa

SEQ ID NO: 1026550 - DNA, 120 bp, Artificial Sequence
  ENSG00000254485_10 (sequence is synthesized)
gaatcctagggagcgggtaaaggcctgggagagggagcaagatgggctccgccacgagatccgcctgaagtccggctcggcgccggcctcaactgcaagaggaaggccacccctctctcc

SEQ ID NO: 1026551 - DNA, 120 bp, Artificial Sequence
  ENSG00000254485_11 (sequence is synthesized)
ccaagctgaaacaccagaagagccacactcggccgttcccaaccgccgccagttaccggccgccagcgaagaccctttcagctcccacactccattggcctcttgcggtcaggtcacgcc

SEQ ID NO: 1026552 - DNA, 120 bp, Artificial Sequence
  ENSG00000254485_12 (sequence is synthesized)
tatttgctaacgtttagagagtgcttccccttgccgagcactggttcttgaggctggaaagtccaagagcatggcactggcatctggtgagggccttcctgttgcattatcccatggcag

SEQ ID NO: 1026553 - DNA, 120 bp, Artificial Sequence
  ENSG00000254485_13 (sequence is synthesized)
tttgaggatcttcagtaagctgaaagcggagagtcaggggccttgtgtcctaccatggtatttgctaacgtttagagagtgcttccccttgccgagcactggatcactcctttattgtac

SEQ ID NO: 1026554 - DNA, 120 bp, Artificial Sequence
  ENSG00000273838_0 (sequence is synthesized)
gtacttgtcatcactttccttgttatactggtcggtgatccactgcaagctgtccttcgcatagttttctactgccatcacttcatggacgcttagaaaggttttcttccttgcttggta

SEQ ID NO: 1026555 - DNA, 120 bp, Artificial Sequence
  ENSG00000273838_1 (sequence is synthesized)
ggggagggccatcagagtcaatagaatggccaacaggagctgtagggcctgccagggctcagccatcatccttcagctgcagaggaacaggaagagtgttctctgtactcctcagggaca

SEQ ID NO: 1026556 - DNA, 120 bp, Artificial Sequence
  ENSG00000273838_2 (sequence is synthesized)
agtcgaatcacactgaccctacctgccctggcaggatttaagagcagctggtggtggacacccacagctctcctctcctcctcctcccccttcatcagcagctgaactcgaggggagagc

SEQ ID NO: 1026557 - DNA, 120 bp, Artificial Sequence
  ENSG00000273838_3 (sequence is synthesized)
agcaagagactgtgcaatggtttttgcataagttcatgccacacacacacaggataacacacacattttctcttttgaggggctgctccctcagcaacacacaggcttctgtggacccag

SEQ ID NO: 1026558 - DNA, 120 bp, Artificial Sequence
  ENSG00000273838_4 (sequence is synthesized)
cattgtcttggtgggagccaggcgagggcccctgggagtcctggaggatggtagctgctggagacacggggagattggatgccaggactggcgcattcataggttgttcatggaatagac

SEQ ID NO: 1026559 - DNA, 120 bp, Artificial Sequence
  ENSG00000273838_5 (sequence is synthesized)
tatctttcatgtctcatgaaaactgttctcctggccaaattgaacgaatgcagctctctggactcagagaggattgaatgggcaattaatcaggagggtgccagtctcccaggagaacca

SEQ ID NO: 1026560 - DNA, 120 bp, Artificial Sequence
  ENSG00000273838_6 (sequence is synthesized)
gcaaatatcactgaattacgctgctcatattcctggactctgctgaagaacaatctcctccaggaagcgccttctgattgcctggcccaccttctgcccaggctaacacggatgccactg

SEQ ID NO: 1026561 - DNA, 120 bp, Artificial Sequence
  ENSG00000273838_7 (sequence is synthesized)
ctatctggccacacttctatcaaaacatgcaagctgttctccttccactgctcttcagctctgcctctggaacctcactttgaatcccttgggacaacaaagtcagactggctggactca

SEQ ID NO: 1026562 - DNA, 120 bp, Artificial Sequence
  ENSG00000273838_8 (sequence is synthesized)
catctggctccaccattgaccagctgggtggctgtgggcaaattacttacattcaacgtgcctcagtcttctcacctgcaaaatggaaattgccacagccaacccaaccttcagcaacca

SEQ ID NO: 1026563 - DNA, 120 bp, Artificial Sequence
  ENSG00000273838_9 (sequence is synthesized)
ccagtctgatcagtcagcaaccatcaacatcaaggcaagaccctccatcagcaaaaggattatgactcactgaaggcacagattgttagcatttttagcagtaaatcatttttaattaag

SEQ ID NO: 1026564 - DNA, 120 bp, Artificial Sequence
  ENSG00000273838_10 (sequence is synthesized)
caacgtgcctcagtcttctcacctgcaaaatgggtataaaatagttctcattcatgctaatgaaatgagataatccaggcaaagagcttataatggtttttaaaaaaatgttcaattatt

SEQ ID NO: 1026565 - DNA, 120 bp, Artificial Sequence
  ENSG00000273837_0 (sequence is synthesized)
ttcttcattctttttcatgaatttaacttttataaacttcaggtgtttttcttttaatttccctaagtgcatgtagcaaagagagtgcaatatttgctttttttctatatgctttaactc

SEQ ID NO: 1026566 - DNA, 120 bp, Artificial Sequence
  ENSG00000273837_1 (sequence is synthesized)
tggggctttttggaaagtgattaacccataatggtgccatccttcatgaatgggattagtgttctcataaaagaaacagaaggaagtgtgttttcctcttctgccatgtgaggataccac

SEQ ID NO: 1026567 - DNA, 120 bp, Artificial Sequence
  ENSG00000273837_2 (sequence is synthesized)
gaaaagatactatctgggaagcaaataattctctccagacactgaatccgctggcaccttgatcttggacttcccgacctccagaattatgagaaataaatttctgttgtttataaatca

SEQ ID NO: 1026568 - DNA, 120 bp, Artificial Sequence
  ENSG00000219159_0 (sequence is synthesized)
ttcatgctggtgagtgtggtgtcccaaccacagacggaggggctgtcacgcggcgggtcccacctcccactctgtcatggcgggatttttgtcatgtttttcagatttctctggaatccc

SEQ ID NO: 1026569 - DNA, 120 bp, Artificial Sequence
  ENSG00000219159_1 (sequence is synthesized)
cttggccaagaagggtccattcagcttgttggtgcgggagctcaggatttcatttttagttctcacatggcaggtgagtgaaaacgttataagggactatccaaacctttcccgaagtgg

SEQ ID NO: 1026570 - DNA, 120 bp, Artificial Sequence
  ENSG00000219159_2 (sequence is synthesized)
ctgtagtatcttaactctcaccagtcgtgtgtgacagttttggtgtctttaaaagtcggtggtgtcaagatttcacaactacctcttctgctgattgtgtggttctatctgttcgtggct

SEQ ID NO: 1026571 - DNA, 120 bp, Artificial Sequence
  ENSG00000219159_3 (sequence is synthesized)
taaacttgcatttccctcatgacaaaaagtgtgaaaccatcagtcatgaactgtctgtccattccaatctcttctgttcatttttaaagtggggctgtgtatctttttattgatttatga

SEQ ID NO: 1026572 - DNA, 120 bp, Artificial Sequence
  ENSG00000219159_4 (sequence is synthesized)
tcattctttctatattctggatacaagatttttgtgtgggatttgttttgcagtatctccccagacttcctggtcattttctttgtagtgtcttttgataactagagcattttccttcgg

SEQ ID NO: 1026573 - DNA, 120 bp, Artificial Sequence
  ENSG00000219159_5 (sequence is synthesized)
ataaagccaaattgattatttttaaatgtgcttgtcactgctttttcctccctgccaggaagtgtttgtgcactctcaggtcacacaagagatggtaatttgtcagtgagctgaggaagg

SEQ ID NO: 1026574 - DNA, 120 bp, Artificial Sequence
  ENSG00000219159_6 (sequence is synthesized)
cagatctggcctcagctatgagggtgggtagcacccagcccattgcagacccagactccggaggttcctctgtcttcttgggctggggcgtccatctcctcctgcccgcagacacaggag

SEQ ID NO: 1026575 - DNA, 120 bp, Artificial Sequence
  ENSG00000219159_7 (sequence is synthesized)
tttctgggtcccaggccttgcgctctgggactgacaccagcggtttgggcttggactgaatgacgccacccgctgttcgggttcactggcttagggacagcggtttgtgggacttctcag

SEQ ID NO: 1026576 - DNA, 120 bp, Artificial Sequence
  ENSG00000219159_8 (sequence is synthesized)
cctccgtgatcaaggagccgattcctgtaataaatctcctcctaaacgtatcgcccagcagctctgtttctctggagaaccctgactcacatatgggggcctagaggtttggttgtagca

SEQ ID NO: 1026577 - DNA, 120 bp, Artificial Sequence
  ENSG00000219159_9 (sequence is synthesized)
ggccccaggccctgttccagcacctggcagtacccccagctgatgggccccaggtggggagggacagccggcctgagggaggtgcctcctgggccccaccgtgggctcccgtgcagacag

SEQ ID NO: 1026578 - DNA, 120 bp, Artificial Sequence
  ENSG00000219159_10 (sequence is synthesized)
gcagggtggggagcaaggacaaggctgtcccctcctctggcctccgtctacaggtgggacttctttccagccctttctgtgggtggggggtgcacacgggcaggccagccccaggcgccc

SEQ ID NO: 1026579 - DNA, 120 bp, Artificial Sequence
  ENSG00000219159_11 (sequence is synthesized)
tcaggaccgcaccctaggcctgccctggggggagtggggatggggctggggcctcaccttgctcaggacccaaccctggtgcagctccactcctggcttttcgcctgcaggacagagggg

SEQ ID NO: 1026580 - DNA, 120 bp, Artificial Sequence
  ENSG00000219159_12 (sequence is synthesized)
cctggagtggcctggccctgccgtgggcagcatggcgtgggcatgcagggcgcagactgaccactctgttcccacacctggctcaaggtgggtcgagggccttcccagccttctcagagc

SEQ ID NO: 1026581 - DNA, 120 bp, Artificial Sequence
  ENSG00000219159_13 (sequence is synthesized)
taacccagaggagtgcacaggacagctcgtctcccccgagagccacagggagtgctggacccgcctgagcggggggcatatggggctcagcacagcactgtggggcctggatgagaagcc

SEQ ID NO: 1026582 - DNA, 120 bp, Artificial Sequence
  ENSG00000219159_14 (sequence is synthesized)
aaccttggggagccttgggtgaggtcgcctcccaggaagtcctgagctgagacatcgcgggcccattttgaggtggctgtgaggggtacaggtgagtgtacttggggttccttcaaggcc

SEQ ID NO: 1026583 - DNA, 120 bp, Artificial Sequence
  ENSG00000219159_15 (sequence is synthesized)
aggcccagcaggtcacctgcagaaggccttgggcaggtgccccccaccccgtcctggaacaccattcttccccatcgccccagaggaccaggcccaggcaaggctgggaatgcttagccg

SEQ ID NO: 1026584 - DNA, 120 bp, Artificial Sequence
  ENSG00000219159_16 (sequence is synthesized)
acctgctcagcatgaagctcctgccccaaccccctccttccaggtgcccggcctgggctctgccagaggctgaggtgcccagggtgtcaggacggccaccctgaaggccctaccccttta

SEQ ID NO: 1026585 - DNA, 120 bp, Artificial Sequence
  ENSG00000219159_17 (sequence is synthesized)
taggaaataaagtcttctttccaaatttatagatgtgggatttgttcagtggacatagctcacccggggcattttaggaatttacccaaaagacataaaagtctgcgtttacagaaagaa

SEQ ID NO: 1026586 - DNA, 120 bp, Artificial Sequence
  ENSG00000219159_18 (sequence is synthesized)
tagaccaaaatgctaacagcagctttattcatagtagtaagaactaaaatccacccacatgggcatcatcagaaaaacggccaagctgtggctcttcatgacatggcttcaagtcagcaa

SEQ ID NO: 1026587 - DNA, 120 bp, Artificial Sequence
  ENSG00000219159_19 (sequence is synthesized)
tgaaaaggaacaaaattctcaaccatgttcaagggacatgaaccccagggacagggccctctctcaaaacaggcaggtccaacccacgtgtagctcgtggtcccattcctctgcaggctc

SEQ ID NO: 1026588 - DNA, 120 bp, Artificial Sequence
  ENSG00000219159_20 (sequence is synthesized)
cggacagaaagcgggaagctagaatcacataacccacaagagtggaccctcccgctggggaagggcggggaggaccgggaacccacgagagtggaccctcctgctggggaagttcaggga

SEQ ID NO: 1026589 - DNA, 120 bp, Artificial Sequence
  ENSG00000219159_21 (sequence is synthesized)
ggaccaggaacccacaagagtggaccctccctctggggaagttcagggaggactgggaacccacaagagtggaccctcccgctgcggaagggcagggaggaccagaggactcggggatga

SEQ ID NO: 1026590 - DNA, 120 bp, Artificial Sequence
  ENSG00000219159_22 (sequence is synthesized)
tgaagacgttccagctcctgacgctggcgagactcacgctgctgacacctgtcacagtgcacgggctcacacttaacttttgtgtgtttcacgttgttttcatattctggtgtaagtttg

SEQ ID NO: 1026591 - DNA, 120 bp, Artificial Sequence
  ENSG00000219159_23 (sequence is synthesized)
ttttatttctctagaaagaagcaagggctgtgaatggtgattaaacgttccttctcaggtttgcctgtgcgtggggtagaggtggaccacgcagaccctccctgctgtgagctccgtgga

SEQ ID NO: 1026592 - DNA, 120 bp, Artificial Sequence
  ENSG00000219159_24 (sequence is synthesized)
gggtcaatgcagatgcagggagactgtggggcccggtatccgcgacgctggacaagggggttcccgctctggaaggaggagtcaaggtctccagtggtgtcggattagaatatgaggaat

SEQ ID NO: 1026593 - DNA, 120 bp, Artificial Sequence
  ENSG00000219159_25 (sequence is synthesized)
ccgtctgagctcattctccacaggatcccacgagggaaagcctggcttttccctgtgcagatgccaggcctctacaggttccagaaggttcctctgctcctctgagagggcagggcactt

SEQ ID NO: 1026594 - DNA, 120 bp, Artificial Sequence
  ENSG00000219159_26 (sequence is synthesized)
gcacagggaacaggcagccgaaggcagccacagccctactggaaccagggtttctctgcctcctgggaagaggtcagtggatgggttggggagggggacaggcggccttcctgtgggagt

SEQ ID NO: 1026595 - DNA, 120 bp, Artificial Sequence
  ENSG00000219159_27 (sequence is synthesized)
cgaagagcctggggcctcccctccttggaggcgaccagacaccttccctaactggaggaaattctgaaccccagacctggaaagttcaaagctgaaataaaatcgccccttgttttgcga

SEQ ID NO: 1026596 - DNA, 120 bp, Artificial Sequence
  ENSG00000261437_0 (sequence is synthesized)
acaggtggcagctctcgtcccctgagagcgggcgaaggccagggtcccacactcgcagcgctgcgacggcgctcgggacctccctcgtccactgcttgagttccagaggtgggtgcttcc

SEQ ID NO: 1026597 - DNA, 120 bp, Artificial Sequence
  ENSG00000261437_1 (sequence is synthesized)
ctgtcctgaacttcagagtgcggagtcataaatgggttccggctggcttactgcagtagcctcgctcctccccagccccggtaactccgagctacccgtccaggccctcgggcgtcgcgg

SEQ ID NO: 1026598 - DNA, 120 bp, Artificial Sequence
  ENSG00000261437_2 (sequence is synthesized)
gggcagggactgggcgcggaacgaggcagggagggacctggaaaaaccacccagattgcattgcagtgggcgaggccgcctggaggagccggttccccctaaccacctccccgtggggct

SEQ ID NO: 1026599 - DNA, 120 bp, Artificial Sequence
  ENSG00000261437_3 (sequence is synthesized)
ctcggtgcgcggttcccaggtgctcagctctgctgggcccaggaggtgccgcctcacagggacgcggaaccccgtgcgtggcccccgccgggtggaacagatagcgcggggcggtccgga

SEQ ID NO: 1026600 - DNA, 120 bp, Artificial Sequence
  ENSG00000261437_4 (sequence is synthesized)
ggctcgtcgccaagcaggtgactcttgctgaaaaagtggttggaacacttgaggaaacccggccccgcctgttctttctaggtctttggagtttggattaatcatttgtgtagcccgttt

SEQ ID NO: 1026601 - DNA, 120 bp, Artificial Sequence
  ENSG00000261437_5 (sequence is synthesized)
ggataaaccgaagactttattaaatcagcgcgtttaacaggaattccgcagtagtatccacattagaatcttgagtcttggagttgaacatattcacacagacttgccttcttcctgttt

SEQ ID NO: 1026602 - DNA, 120 bp, Artificial Sequence
  ENSG00000261437_6 (sequence is synthesized)
agtttatgccttgtgttccgttattggaacgctaagcttgtgggagttgtttacatcctactgctcaaggtcatcgctaaggtgtgatttttcacaaaaagaatttgcaacctccggcat

SEQ ID NO: 1026603 - DNA, 120 bp, Artificial Sequence
  ENSG00000261437_7 (sequence is synthesized)
aaaagaatttgcaacctccggcatgaatgacttaagggaagtctaatcccggtttctgattttttttttttttttaatttaaaagttaatctttctgggccgggcgcggtggctcacgcc

SEQ ID NO: 1026604 - DNA, 72 bp, Artificial Sequence
  ENSG00000261437_8 (sequence is synthesized)
tctggccatgttaatctttccaactagattttcaaggatgaggattttgttgttgttgttgttgttgttctc

SEQ ID NO: 1026605 - DNA, 120 bp, Artificial Sequence
  ENSG00000261437_9 (sequence is synthesized)
caaggatgaggattttgttgttgttgttgttgttgttctcaaatgtattcccagggcttggaacagagcctgacatatactaggcactcaacaaatatttgttgaatgattgtaatgagt

SEQ ID NO: 1026606 - DNA, 120 bp, Artificial Sequence
  ENSG00000261437_10 (sequence is synthesized)
aacacccatttttgcagatctttgtcttctgagcctagggcataggtcatcactgcaggggtgagattgtcaaaatgggagtctacaggtaatttaagacttaaatgtttaaagagtatg

SEQ ID NO: 1026607 - DNA, 120 bp, Artificial Sequence
  ENSG00000261437_11 (sequence is synthesized)
tgctcattcttcaacaaacttacttttgttaaattaaaatggtaaaatgtggtggaggggttggaatatatgtaattcaagacagttctgaatacaaaaatgttttactgtctatcacca

SEQ ID NO: 1026608 - DNA, 120 bp, Artificial Sequence
  ENSG00000261437_12 (sequence is synthesized)
ccatctataaatctaattcactaaggataatctgtgtaaggtggctggaaagaaccttgaggagagaggcttatttaagtattggctcaggaccacacctaaaattctcaaaacgttgag

SEQ ID NO: 1026609 - DNA, 120 bp, Artificial Sequence
  ENSG00000261437_13 (sequence is synthesized)
attctgttgttttgtttttaagcgccagagacccaagttgaggaacagcctataaaataactggcctgtactcttacatacatgaaagccatcaaagacaaagactgaagaagaactttt

SEQ ID NO: 1026610 - DNA, 120 bp, Artificial Sequence
  ENSG00000261437_14 (sequence is synthesized)
gcagattaaaggactttaagagacatgatcctgaaccagaaaaagtaaaaaataaaaaaataaaaagatctgtagattagataatagttttatatccatgttaatttcccatttgttgta

SEQ ID NO: 1026611 - DNA, 120 bp, Artificial Sequence
  ENSG00000261437_15 (sequence is synthesized)
atattactgtggttgggcaagagagtgtctttgttggtggaagtatctactgaagtatttaggggtaaagaggaatcatgtctgtaacttatgctcaaaaggttcagacaaaatatatgt

SEQ ID NO: 1026612 - DNA, 120 bp, Artificial Sequence
  ENSG00000261437_16 (sequence is synthesized)
aaagggaatgataaagcaaacgcaataaaatgttaacattggggaatctgtataagggaattattaacttttctgtaagtctaaaattatttcaaattaaaaataatttttttaagcctc

SEQ ID NO: 1026613 - DNA, 120 bp, Artificial Sequence
  ENSG00000272128_0 (sequence is synthesized)
ctagctacttgggaggctgagggtggaggatcctttgaccccaggagttcaagtacggcctgggtaacagagaaaaaccaggtgacttaaaaaaaaatgtaggtgccactcaggggttca

SEQ ID NO: 1026614 - DNA, 120 bp, Artificial Sequence
  ENSG00000272128_1 (sequence is synthesized)
cataatacaaagtgcagaatgtttaataaatcttttgcttcaagtataaatcatgtgtatactgggtcattgcaaaatgtatttcttatgtgagttgtggctaaaacatttgaaagacat

SEQ ID NO: 1026615 - DNA, 120 bp, Artificial Sequence
  ENSG00000272128_2 (sequence is synthesized)
tgatctaaattaacagtcttcaaaattttgtttgcatgaatttatcattgtaagtttagttacaaaggatttcatgtggattgtaagcattagcattgttaaataaaaccttaaaaaata

SEQ ID NO: 1026616 - DNA, 120 bp, Artificial Sequence
  ENSG00000272129_0 (sequence is synthesized)
agaaaatactttgtgtaaatttgccatatttacactccttctattaaagcatgtttacttgcaccgtgattttatcttttaagtgaaatatttcggagaacagtatagtaaaagtctatg

SEQ ID NO: 1026617 - DNA, 120 bp, Artificial Sequence
  ENSG00000272129_1 (sequence is synthesized)
taccctccctcctagcataaaaattataaagttcaattcattttttcctagtcttccctaacccagagggcaatttagaccctatgttaacagtaacaaatagtatttttttaaaaaaaa

SEQ ID NO: 1026618 - DNA, 120 bp, Artificial Sequence
  ENSG00000272129_2 (sequence is synthesized)
tctgtcccaaaggctagacaacccacaagggtttccctaattattttggggaattgcgtgagggttgctttcaaacacaaggaatttgcacaaccacatggagtacatggttctctctgg

SEQ ID NO: 1026619 - DNA, 120 bp, Artificial Sequence
  ENSG00000272129_3 (sequence is synthesized)
ctctggctctgtctcccagcagaaatatctgctgccggtagctatggaaggcacctaagggctgctactgccacaggtgccgcctgcagctgacgctcactattgaagctatacttcttt

SEQ ID NO: 1026620 - DNA, 120 bp, Artificial Sequence
  ENSG00000272129_4 (sequence is synthesized)
gggttgttggagtggtgacagtgctcttattctctctggaggtagaaaaatccttctcctcttgttgagatacagggatcccaaattagtgtgactggtgatcacaacatctcatcaata

SEQ ID NO: 1026621 - DNA, 120 bp, Artificial Sequence
  ENSG00000272129_5 (sequence is synthesized)
cttttcccagagaatgggcttcttgaaggggctgctttgtttctcagtacacatacaccattggccaacttgcctgtcaatcctacaggccactctagattctagagcaaacacacttta

SEQ ID NO: 1026622 - DNA, 120 bp, Artificial Sequence
  ENSG00000272129_6 (sequence is synthesized)
agtcccagcttggcttactcttctaagggaagaactcatgtccatcagatttatttgatgttattttctgaacaataaaagtgttcaaatagattataggaacattgcctaggataatat

SEQ ID NO: 1026623 - DNA, 120 bp, Artificial Sequence
  ENSG00000272129_7 (sequence is synthesized)
ggtatagctgtggtttgtgatttatggtatatccatatgatcaggtacaatgtacaattttcaaatgatgattatgaaaattatgtagcaagatagtaacatggtcattacatactttta

SEQ ID NO: 1026624 - DNA, 120 bp, Artificial Sequence
  ENSG00000272129_8 (sequence is synthesized)
agtagaaaaatcaggattcaaaattatgtgtgtattatgattaaaactagtattacttgtgattacaactattattacttatgattttacttacaaaggagtaattagagaacatagcca

SEQ ID NO: 1026625 - DNA, 120 bp, Artificial Sequence
  ENSG00000272129_9 (sequence is synthesized)
tgttagggtgaggatcataagttatatcataatgaaagaatttatttttcagaatgtttattacacaaagtaataaaatatttactatgtgctaaaaattgttaccaaatattaagtatt

SEQ ID NO: 1026626 - DNA, 120 bp, Artificial Sequence
  ENSG00000272129_10 (sequence is synthesized)
gcataatctttctgttttgtaaaacactgtccaagcaccagtattaaaggatcttttatctgtctgattactgcaagaacctggaatcaataaaatatggtattttttcttcatctcaaa

SEQ ID NO: 1026627 - DNA, 120 bp, Artificial Sequence
  ENSG00000272123_0 (sequence is synthesized)
aaaagtagaaataatatctcaagggtcaagttgaccttttcagtgggaacgttgtccttcaggctacttaggattctttgtatctgcttcctggcaatctttgagatgctgtaatggaat

SEQ ID NO: 1026628 - DNA, 120 bp, Artificial Sequence
  ENSG00000272123_1 (sequence is synthesized)
ctttagaaaatattcctaaagagctgtatttagaagcaaaagaagaggataatatgtgttttatttacttgatgtaacattaaattgcaatggcagatgagctgctttttgtcataaatt

SEQ ID NO: 1026629 - DNA, 120 bp, Artificial Sequence
  ENSG00000272123_2 (sequence is synthesized)
tatgggctgggctaaacttgcaactggccttggtgactgtatttcctttcatttgtatcttcaagagctaaaatgtaaggctttatcaatttatgaataaagtgatgataaattcttgta

SEQ ID NO: 1026630 - DNA, 120 bp, Artificial Sequence
  ENSG00000272121_0 (sequence is synthesized)
ggaggggggacacgtgaccgcccggccaggcggcccggcgcgccccattcgcgatgggcaccccatcttcctcctggaaaagccgggggacacagagaaggcggaggagcacgcggggtg

SEQ ID NO: 1026631 - DNA, 120 bp, Artificial Sequence
  ENSG00000272121_1 (sequence is synthesized)
caggagagcctaccagcccctttagccgcagtgctggtgattccggccgctgaacccggagaggaaaggctcccacgcggccagccggccttgactgtcctctcgccctgcccttggccg

SEQ ID NO: 1026632 - DNA, 120 bp, Artificial Sequence
  ENSG00000272121_2 (sequence is synthesized)
cagtaccctcccctcggctgcagtaaccgccccctacacctccaggcaagggcacgctcagtgtagaccactgccacttcatagatgccagtgccacttaagagtggtgttgggtttttt

SEQ ID NO: 1026633 - DNA, 120 bp, Artificial Sequence
  ENSG00000272121_3 (sequence is synthesized)
ttttttcctttcctcctctctgcacaccagcacattgtacccgagagaaactcacggcggtgcactgcagacaccgcccagctccagggcccgaagaccctccgaccaggccccgggatg

SEQ ID NO: 1026634 - DNA, 120 bp, Artificial Sequence
  ENSG00000272121_4 (sequence is synthesized)
ggtggaaggggagagggccgttatcgtggtgcgaatccaactcgcagcctctgggagcacgttgctaataaaggtcaaattaaaacaactaagtggtgccggcagggacgcgccgcatgg

SEQ ID NO: 1026635 - DNA, 120 bp, Artificial Sequence
  ENSG00000272121_5 (sequence is synthesized)
tcaggagaagcccggctattaatcatccataaggagcattgctcttctggtgtgggagaatggggctgtgcgacagccccccggagttgcgctctgctctgaaccctaagctcccccaga

SEQ ID NO: 1026636 - DNA, 120 bp, Artificial Sequence
  ENSG00000272121_6 (sequence is synthesized)
gcaagtggattgcgcagcctattaccccacctccccacggccccctcttggggcggcaccaccctagatggcaggaattcggagaaaatgcggtgtcacgtccgccgctatgcccgcaca

SEQ ID NO: 1026637 - DNA, 120 bp, Artificial Sequence
  ENSG00000272121_7 (sequence is synthesized)
cgcgtctgcgccaactccagcaacacgtggggaccgtgaatctgggcgtctgctctccacttaggtggttatgtgggtatacttatatgattactgattaaaaccaaattggacggagaa

SEQ ID NO: 1026638 - DNA, 120 bp, Artificial Sequence
  ENSG00000249998_0 (sequence is synthesized)
gaaaggaatatagagggggaatccctgggaagagaagagggcacggcgctgagagctctctctttcctgctaccatgtgaagaaggacttcgcttccccttcaccttccaccatgactgt

SEQ ID NO: 1026639 - DNA, 120 bp, Artificial Sequence
  ENSG00000249998_1 (sequence is synthesized)
ttgatcatgccaaagaagtcgctgtggcccaatggacaacatttttctgcatgaattaacatatcagtgtctgtgttgtagaagaatcttggtggaaaaattctacagatctgagacctt

SEQ ID NO: 1026640 - DNA, 120 bp, Artificial Sequence
  ENSG00000249998_2 (sequence is synthesized)
taacaacaccatgtgatgattattactgcttatgggcagcaaatgggattagcagactgtgatattggcaaaagaaagctgatattcttctttcccgaaggtatactacatcaaagacgg

SEQ ID NO: 1026641 - DNA, 120 bp, Artificial Sequence
  ENSG00000273403_0 (sequence is synthesized)
tagagtttccaagtgtggcttcctaggccttttgggcctgctcttcttccattgccttccccacctgggctccctctatctcaagattagggttcctcccagggccccctggaggccagc

SEQ ID NO: 1026642 - DNA, 120 bp, Artificial Sequence
  ENSG00000273403_1 (sequence is synthesized)
tttcattttcatcttgagcagccgtggaaaattaaggactcaaccactttaattttggggtcttagtaattatctgacaccacccactcaactctacccactagttattacaataataac

SEQ ID NO: 1026643 - DNA, 120 bp, Artificial Sequence
  ENSG00000273403_2 (sequence is synthesized)
atccgggactgggcggagatagatatagcctcacacttcctttttctatcagtgtggtactagttttgggagtaaggactgttggagtctagtcagttctggcaaggatgccatatatca

SEQ ID NO: 1026644 - DNA, 120 bp, Artificial Sequence
  ENSG00000273403_3 (sequence is synthesized)
catgactgaatgtgcccctaaatgcctgtgtaccttcatttccccctctgtaaaatgtgggaaaaagtcttgcaagacgatgtgctttcagcttcctgaaataaagtcatgataagcaac

SEQ ID NO: 1026645 - DNA, 120 bp, Artificial Sequence
  ENSG00000249993_0 (sequence is synthesized)
ctgagggcagagctgtttgcctggcagaggaggagcaaacagccatgttgtaaatggcctctgaggaggactggcctctaggagttgaggacctcaagcctacatctgcaaggaattgaa

SEQ ID NO: 1026646 - DNA, 120 bp, Artificial Sequence
  ENSG00000249993_1 (sequence is synthesized)
cgatgccaagaacccgaacaaactctgaagatgagaatgcggccctgtgccaagactggctgccttcccctgtttctgtaccacactggttcctgaagctatttgagtttgagactgctg

SEQ ID NO: 1026647 - DNA, 120 bp, Artificial Sequence
  ENSG00000249993_2 (sequence is synthesized)
gggtaacctgacccacttcaaggatctgaaagtattttacagttggttgaatccatggatgtggaacccatggatgtgaaggactgactgtactttgcactagtggttctcaaagtgtgg

SEQ ID NO: 1026648 - DNA, 120 bp, Artificial Sequence
  ENSG00000249993_3 (sequence is synthesized)
cagctcctgtttcagatggacctatcagaatctctgcaggaacattttgaagtcccctcatatacaatgaaatgatagatttgtcaacacagataaatctcaaaaacacaataagtgaag

SEQ ID NO: 1026649 - DNA, 120 bp, Artificial Sequence
  ENSG00000249993_4 (sequence is synthesized)
aaagtaagttgcagatggaaataatatgtgatggtcaaacaatctagatgtttccgtgaaggtgtttttggatgagactaacattgacattggtggactttgagtaaagcaggttgcctg

SEQ ID NO: 1026650 - DNA, 120 bp, Artificial Sequence
  ENSG00000249993_5 (sequence is synthesized)
cgtgccataatgtgggtattctcatccaatcagttgcgggatttaacagagcaaagactgaggtcccctgagaaaataggattccaccagcagacagccttcagccttgaactgcagtgt

SEQ ID NO: 1026651 - DNA, 120 bp, Artificial Sequence
  ENSG00000249993_6 (sequence is synthesized)
cacctcttcactgggcctcccaacctgctgacactttgatcttggacttctagcctccataactgtgtgagccaattccctaaaataaatctctctctgtacacattctatggttatgtt

SEQ ID NO: 1026652 - DNA, 120 bp, Artificial Sequence; identical to SEQ ID NO: 870666
  ENSG00000147761_0 (sequence is synthesized)

SEQ ID NO: 1026653 - DNA, 120 bp, Artificial Sequence; identical to SEQ ID NO: 870667
  ENSG00000147761_1 (sequence is synthesized)

SEQ ID NO: 1026654 - DNA, 120 bp, Artificial Sequence; identical to SEQ ID NO: 870668
  ENSG00000147761_2 (sequence is synthesized)

SEQ ID NO: 1026655 - DNA, 120 bp, Artificial Sequence; identical to SEQ ID NO: 870669
  ENSG00000147761_3 (sequence is synthesized)

SEQ ID NO: 1026656 - DNA, 120 bp, Artificial Sequence
  ENSG00000147761_4 (sequence is synthesized)
cctgcttggctagcaactgaatatgaagtaaattcaagggaccctgtggaccggactgctagtgtttctaaatggggtgtacactggacaataaaacactgaaagatttctgttcctgaa

SEQ ID NO: 1026657 - DNA, 120 bp, Artificial Sequence; identical to SEQ ID NO: 870671
  ENSG00000147761_5 (sequence is synthesized)

SEQ ID NO: 1026658 - DNA, 120 bp, Artificial Sequence; identical to SEQ ID NO: 870672
  ENSG00000147761_6 (sequence is synthesized)

SEQ ID NO: 1026659 - DNA, 120 bp, Artificial Sequence; identical to SEQ ID NO: 870673
  ENSG00000147761_7 (sequence is synthesized)

SEQ ID NO: 1026660 - DNA, 120 bp, Artificial Sequence; identical to SEQ ID NO: 870674
  ENSG00000147761_8 (sequence is synthesized)

SEQ ID NO: 1026661 - DNA, 120 bp, Artificial Sequence; identical to SEQ ID NO: 870675
  ENSG00000147761_9 (sequence is synthesized)

SEQ ID NO: 1026662 - DNA, 120 bp, Artificial Sequence; identical to SEQ ID NO: 870676
  ENSG00000147761_10 (sequence is synthesized)

SEQ ID NO: 1026663 - DNA, 120 bp, Artificial Sequence
  ENSG00000249994_0 (sequence is synthesized)
gtgagcagtgctgaccctaccctgcgtcacagcacagtggcctcatcagaaccaagacgaccaaccttctccagagaatggacttctgttgggagactctcctctttctacaaacaaaat

SEQ ID NO: 1026664 - DNA, 120 bp, Artificial Sequence
  ENSG00000249994_1 (sequence is synthesized)
ggccagcttgttgagaatttttagtaccatttgcagagctctccataatgtgatacagactctggcctgaagaaagcacaaaataaacatgaacaaatcataactgtgcttcagtaggat

SEQ ID NO: 1026665 - DNA, 120 bp, Artificial Sequence
  ENSG00000249994_2 (sequence is synthesized)
atttacaagaaaaaaaaccattaaaaagtggtcaaaaatatgaacagacacttctcaaaataagacatttatacaaccaccaaacatatgaaggaaaagctcaacatcattgatcattag

SEQ ID NO: 1026666 - DNA, 120 bp, Artificial Sequence
  ENSG00000249994_3 (sequence is synthesized)
gtcagaatggcccttattaaaaagtcaagaaacatcagatgctggcaagattgtgcagaaataggaatgcttttacactgttggttggaatgtaaatcacttcaatcattgtggaagatg

SEQ ID NO: 1026667 - DNA, 120 bp, Artificial Sequence
  ENSG00000249996_0 (sequence is synthesized)
aagcagactgcggcggaggtaggctggcctcagcccagctcccccagggtctcccccggagcgccggcctcccagcacgcgagcagccccctcccacccagtcccgcggccgcctccagt

SEQ ID NO: 1026668 - DNA, 120 bp, Artificial Sequence
  ENSG00000249996_1 (sequence is synthesized)
ccccctgcgcccgggaagcctccacctcgcccgccctgacaccgaggtcccagtatccaaagcgcccccagggccccgcccgcaacaggggaagttgcagcccgccgctctcggtcacct

SEQ ID NO: 1026669 - DNA, 120 bp, Artificial Sequence
  ENSG00000249996_2 (sequence is synthesized)
cgagaggtagcagcagccgaggacccgggcccatggctggaatgctacaactacattctccaagactaccttgtagctagtttctgcatgtgacctagctatcaccaagaagacatattg

SEQ ID NO: 1026670 - DNA, 120 bp, Artificial Sequence
  ENSG00000249996_3 (sequence is synthesized)
cttgagactaggaggcagagatgctaaatgtgaatgatagctctgcagagagagagatcagatcttgcaagtgcagagaacaagacacctggatttcctgggacagctgctctggggatt

SEQ ID NO: 1026671 - DNA, 82 bp, Artificial Sequence
  ENSG00000258007_0 (sequence is synthesized)
aatttaattcaacctcctcattgaagaagtgaggagacaaagggccagagaagtgcatgtttttctgagagacaatgtctca

SEQ ID NO: 1026672 - DNA, 120 bp, Artificial Sequence
  ENSG00000258007_1 (sequence is synthesized)
ggcctcccaaagtgctggggttacaggcctgagccaccacacctgataagaagtcctttcttaatggaaagaacacagggctaggagaaagaaactcaggtgagtctcagatcaaccacc

SEQ ID NO: 1026673 - DNA, 120 bp, Artificial Sequence
  ENSG00000258007_2 (sequence is synthesized)
gtgaaacaagagcagcaatatctgaccttctgcctttttgcctctgaggttaaataatataatcaagttaaactgagagtaaaaagtcagaaaagcaatgatgcaatgattgctgctgct

SEQ ID NO: 1026674 - DNA, 120 bp, Artificial Sequence
  ENSG00000258007_3 (sequence is synthesized)
attaccaatttggaacttctcatagaatacagggctttactgagataggaaagtcattgtgaaaggcatgagtcactctgtggggctttgtagctgcatctcctcagacactcccatgcc

SEQ ID NO: 1026675 - DNA, 120 bp, Artificial Sequence
  ENSG00000258001_0 (sequence is synthesized)
agcagccctgcggggcctaccgcctgccgcacgcactcccgccggcgcgcgcgcactcgcactcgctcgctcgccctctcctccttccgcgttacctgtgtcaggacaccaatccggagt

SEQ ID NO: 1026676 - DNA, 120 bp, Artificial Sequence
  ENSG00000258001_1 (sequence is synthesized)
cactgggagcctcggtcctccttaaacccttcaagtctgtcagatagaataccctggatttcaatataatactaatagtgatcattctaaagtaatttccatttacagagcactttcact

SEQ ID NO: 1026677 - DNA, 120 bp, Artificial Sequence
  ENSG00000258001_2 (sequence is synthesized)
tgagcagtgccatgacacagaatgaaagcctgaaatgtttctgagacaagtgcaagaactgaagaacaacaaccaagaatacctggatttaaaacctatactcctggccaggcacggtgg

SEQ ID NO: 1026678 - DNA, 120 bp, Artificial Sequence
  ENSG00000272744_0 (sequence is synthesized)
agaggtttcctgggccagccttgcaataccatcactcttgggcccagcattccagacctgaaaaatccttagaattacccagctaatttcctcagttatccactagctagtgggttcttg

SEQ ID NO: 1026679 - DNA, 120 bp, Artificial Sequence
  ENSG00000272744_1 (sequence is synthesized)
atttagcagtctctattatcaaaacaaaaattccaatttccttacaaattggataaaagcaacatgtccatgtcataaacacaggaggaatgagatttttactgcagcagcatattttgg

SEQ ID NO: 1026680 - DNA, 120 bp, Artificial Sequence
  ENSG00000272744_2 (sequence is synthesized)
agtagtctttcagattttaattgtattggataaaaattttcctgccttcttaaatatgtccttaaattcttcttggcgtatagtaggacaaacaaacatttaatgtattcatcctttgac

SEQ ID NO: 1026681 - DNA, 120 bp, Artificial Sequence
  ENSG00000272744_3 (sequence is synthesized)
tcaacaccatgtgattatacagtgatattcttaaatcttgctccagtatggaggaccatttgcctctgtacttgcttccgagtgttttttaaaataaatttggctgcttttgatgttttt

SEQ ID NO: 1026682 - DNA, 120 bp, Artificial Sequence
  ENSG00000272744_4 (sequence is synthesized)
catgcttccttgcttctaaaactgtctgccttgtagtttgtatccctcttagtttgttgtgtgttggaaaagcatttggttgaatctgtgtctagcttcagaataaatagattctaagag

SEQ ID NO: 1026683 - DNA, 120 bp, Artificial Sequence
  ENSG00000249664_0 (sequence is synthesized)
atttacatttgttgttactgtattttaatcctaaataggggggatgataaaatcaaaaggagacaaggaaaaaacaaagtatttattgttaactatgactatttcatcaaatatgatcat

SEQ ID NO: 1026684 - DNA, 120 bp, Artificial Sequence
  ENSG00000249664_1 (sequence is synthesized)
aatttagtttttggcatacattcaagggaatggatctaaccataaataaaaaggaatcctctaacctctatgaatcaatgtaagactatataatttttaaaaatcttataaattcatgtt

SEQ ID NO: 1026685 - DNA, 120 bp, Artificial Sequence
  ENSG00000249664_2 (sequence is synthesized)
gattaaagtttgaaagctaaaatgccctagaacattgatttccattccttttgaataatgtcaaatattttcacaaagcaatgccttactacctcatctaaaattataatgctattttag

SEQ ID NO: 1026686 - DNA, 120 bp, Artificial Sequence
  ENSG00000249664_3 (sequence is synthesized)
gtcacatggctaagcaagatgtattatttattcagtccaaagaaatgctatgttacatctggattcaagggactttgcagtaattccaagaggtagaatgtaagtccctgggggaaagag

SEQ ID NO: 1026687 - DNA, 120 bp, Artificial Sequence
  ENSG00000249664_4 (sequence is synthesized)
tctccatgtgtgttcagtgttttgtgtgtgatgaaacctatatgtgttttcattttctttcctctaagaaacttttatatacatattaacagttgcagagcgttaatgggagaagagaaa

SEQ ID NO: 1026688 - DNA, 120 bp, Artificial Sequence
  ENSG00000249664_5 (sequence is synthesized)
tgagcataaagtaaaatgctagtagcaatgattaatgcaacacttattgtggccaagaattttacatttgttatctcatttaagtttcatgaaaatctccatttacagagaagaaaactg

SEQ ID NO: 1026689 - DNA, 120 bp, Artificial Sequence
  ENSG00000233103_0 (sequence is synthesized)
ctgctacatcagaatcactcctcacaatgggaaaatattaaaaatcccttggaatgtgaatcccttggaggtggggatgacagcctcaaatggcatggctgattcacaaattatggtcac

SEQ ID NO: 1026690 - DNA, 120 bp, Artificial Sequence
  ENSG00000233103_1 (sequence is synthesized)
gggaggaacttggagctctgaaggaaccgttatccaatcattgcagttgccatagctcagctcacatcctacataaatcccctgacagcagcaaaaactcagtgcaaagagccggcttat

SEQ ID NO: 1026691 - DNA, 120 bp, Artificial Sequence
  ENSG00000233103_2 (sequence is synthesized)
tttgaacaacgctcagaaccagacggagaaaggaggagacagaaatcatcatttatcattcgggacaaaaggcacagtcagtgggaaaatctgattttcaatcatttaaagggtattaaa

SEQ ID NO: 1026692 - DNA, 120 bp, Artificial Sequence
  ENSG00000233101_0 (sequence is synthesized)
ggaaccagatcttgatctggcgctcggacaggcagagtgcgtgggcgatctcgatgcgccgtcgccgggtcaggttgcttgtctggagatggagccactacaggcgggcctgggcgcctg

SEQ ID NO: 1026693 - DNA, 120 bp, Artificial Sequence
  ENSG00000233101_1 (sequence is synthesized)
agaatggaggaggggatcggcactcacttgcagacatcaacagtttccagaaaattcggttcaattccttcaccacggacccaccaaccaaggagctggcaaaacccactaaccaaccag

SEQ ID NO: 1026694 - DNA, 120 bp, Artificial Sequence
  ENSG00000233101_2 (sequence is synthesized)
gagaacacagacccggtttgtcttttgacaaccgagtggaactgacggggccggcgcctgccctgcgggtcccctcccttggctgagaagaaaaccaaataaaccttgaacagccttggc

SEQ ID NO: 1026695 - DNA, 120 bp, Artificial Sequence
  ENSG00000233101_3 (sequence is synthesized)
ggaagccgcttcccttgccagccgccagccgtttcctctccctcgccggcctcggcggagattccaggccctatagaaaccaggacgtcccttagcgccaccgcctcacatgccagtgct

SEQ ID NO: 1026696 - DNA, 120 bp, Artificial Sequence
  ENSG00000233101_4 (sequence is synthesized)
agagaggctcggaggaagccccgggcgtggcgtggtcaggctccgagagcggccgggatgcggccacaccggcctggtaaactcgcacctcttaggatcttgctcccggactcattccct

SEQ ID NO: 1026697 - DNA, 120 bp, Artificial Sequence
  ENSG00000233101_5 (sequence is synthesized)
tccccaccccctattttaaagttttatttgggtcgtctgtatcaatttagaacgagataaattaagacaaagaaagtaaaataaatcgaaataaaatataggaatagctcttggcgaaaa

SEQ ID NO: 1026698 - DNA, 120 bp, Artificial Sequence
  ENSG00000233101_6 (sequence is synthesized)
gtcatagcgacttttgggatagtttgctatcgacaaagggagacaaagtcaaggggtgaagggaaaggagggccaagtagagcctccacgaccctcggcttcctcctcaccagctccccc

SEQ ID NO: 1026699 - DNA, 120 bp, Artificial Sequence
  ENSG00000233101_7 (sequence is synthesized)
tccctccaagtccagtaagaagttgggccaagctggaagggattgaccgggttgcttgtctggagatggagccactacaggcgggcctgggcgcctggagtcgggcatgaaagaaaatag

SEQ ID NO: 1026700 - DNA, 120 bp, Artificial Sequence
  ENSG00000233101_8 (sequence is synthesized)
gtttcaataccatgtaccagcttgacttctctacatgtcctttggattgcccaaaagcaaaatctcagaggggccaaggaccttctagggctggctccctcagggcctcctatagagcag

SEQ ID NO: 1026701 - DNA, 120 bp, Artificial Sequence
  ENSG00000233101_9 (sequence is synthesized)
agacgacaggtctgggatcagggagtcttcaaggcccccgctgaggggacagcgaatctaccattgaaccgtgcacgggggacatggacaaaatgagacgcgacagggacaagagcattt

SEQ ID NO: 1026702 - DNA, 120 bp, Artificial Sequence
  ENSG00000233101_10 (sequence is synthesized)
gccgaaagagggtgagggctgcagccacagtgtttgtccccagcaccaccaggccccttaacctcgtcagctcctctagccctcggccagactctggcaacaccttggtttgcctggcac

SEQ ID NO: 1026703 - DNA, 120 bp, Artificial Sequence
  ENSG00000233101_11 (sequence is synthesized)
cgcaggcaatttcctggaaccccacccccacccaggaacggggaccacagcacctttaaaggaactgccagagcttcctcctacggcttgaaagcccaagctaatcagtaacccgtgaga

SEQ ID NO: 1026704 - DNA, 120 bp, Artificial Sequence
  ENSG00000233101_12 (sequence is synthesized)
gaagggaaaggagggccaagtagagcctccacgaccctcggcttcctcctcaccagctccccctccctccaagtccagtaagaagttgggccaagctggaagggattgaccggccgtttc

SEQ ID NO: 1026705 - DNA, 120 bp, Artificial Sequence
  ENSG00000233101_13 (sequence is synthesized)
cagtttccagaaaattcggttcaattccttcaccacggacccaccaaccaaggagctggcaaaacccactaaccaaccaggagaacacagacccgccgtttcctctccctcgccggcctc

SEQ ID NO: 1026706 - DNA, 120 bp, Artificial Sequence
  ENSG00000233101_14 (sequence is synthesized)
cttttccttaaaaaaaaatgataattgaggaaaaaaaaaaatcaagatttggggggaattacctacaaagatgtaaggttgcttgtctggagatggagccactacaggcgggcctgggcg

SEQ ID NO: 1026707 - DNA, 120 bp, Artificial Sequence
  ENSG00000233101_15 (sequence is synthesized)
cctcggcactgagctgagacgcgctgagcagtttgctctcctttttccacttcatgcgtcggttctggaaccatatcttgatctgcctctccgtcaggcacagggcgtgcgcgatctcga

SEQ ID NO: 1026708 - DNA, 120 bp, Artificial Sequence
  ENSG00000233108_0 (sequence is synthesized)
gcactagcaaagagaagcccgaagaggctgaagtttccacggagggcaccgtcggggagacgcagcccgggaggacgggagggttgggctcgctacctctgcacacgggcgagccggggc

SEQ ID NO: 1026709 - DNA, 120 bp, Artificial Sequence
  ENSG00000233108_1 (sequence is synthesized)
tccgtctctcagcatgtgacaccttctgccatgagatgatgctacaagaagaacctcaccgactgctggcaccttgatactggacttcacagcctccagaattgtgagccagtaagtttc

SEQ ID NO: 1026710 - DNA, 120 bp, Artificial Sequence
  ENSG00000233108_2 (sequence is synthesized)
caggtagggtggagtagaaaacagtgcaatcagtggagagcaagatagtcagaagtgaatatagggttgaagagctctggcatcatgaggaatacgaaaaggaaacaaaactgtattttc

SEQ ID NO: 1026711 - DNA, 120 bp, Artificial Sequence
  ENSG00000233108_3 (sequence is synthesized)
cacatgtgtcagatcatcaggcatatctgggtcccttgctaaaaacacagatttcagtcccctttcctggagagtctaattcagctggtctgctggtgggagggttaggactgtataatt

SEQ ID NO: 1026712 - DNA, 82 bp, Artificial Sequence
  ENSG00000267808_0 (sequence is synthesized)
aactcatttgggtcccctcccacgctgtgggagatttgtgcttttgctcttcacaataaatcttgctgcagctcggcgaagg

SEQ ID NO: 1026713 - DNA, 120 bp, Artificial Sequence
  ENSG00000267808_1 (sequence is synthesized)
tctgcggtttcactcctgaagtcagcgagaccaagaacccaggggaaggaaccaattctggacacattggtacacacattggcaggtagaggggctaccttgtaggagctaaggctggaa

SEQ ID NO: 1026714 - DNA, 120 bp, Artificial Sequence
  ENSG00000267808_2 (sequence is synthesized)
ttattattttgagatggagtctcactatgtcacctaggatggagcgcagtggtgcagtctaggctcactgcaacctccgtgtgccaggttaaaacgattctcctacctcagtctcctgag

SEQ ID NO: 1026715 - DNA, 120 bp, Artificial Sequence
  ENSG00000267808_3 (sequence is synthesized)
aacgattctcctacctcagtctcctgagtagctgggcttacaggtgcctgccaccacacctgggtaatttttctatttttagtagagggaaatgactttgtatctcccttcacaaagaga

SEQ ID NO: 1026716 - DNA, 120 bp, Artificial Sequence
  ENSG00000267808_4 (sequence is synthesized)
ctctcaatgattacttcaataagtaatcatcgtccattgactaaataccagatacaagctgtgtagcctagagcaaattacttaacctccgtttcatcttttgtaaaatggggatgttaa

SEQ ID NO: 1026717 - DNA, 120 bp, Artificial Sequence
  ENSG00000267808_5 (sequence is synthesized)
taatatctgggtccttgagttgggaattagatgagttatatataaagcactcagactagaggctgaaaaacagtaaacatgatgtaaatgtttgctgttatgatgatccacaagagcaca

SEQ ID NO: 1026718 - DNA, 120 bp, Artificial Sequence
  ENSG00000267808_6 (sequence is synthesized)
agacagtctctgctcctgcctgattctcacgaatgtaattataacctgacgagtgctactacggaaaattacacagaatgtgtgaatttatatcagggggtactagtggcggggaaaagg

SEQ ID NO: 1026719 - DNA, 120 bp, Artificial Sequence
  ENSG00000267808_7 (sequence is synthesized)
tggggattaaggaaacgtttcctgagtgaactgagacccgaaggctcagtgaataaccaggtgaaggatgagttggagtttgggcggggggtgttctgagctgaggtcacagagaggcaa

SEQ ID NO: 1026720 - DNA, 120 bp, Artificial Sequence
  ENSG00000267808_8 (sequence is synthesized)
aggccttgaggaggggaaatatgaccaacttgagaagcccgaagaagaacagcattttaatatacagactcaagtataagatgacaaaatgcagaataaacgtagtttccatttaaattg

SEQ ID NO: 1026721 - DNA, 120 bp, Artificial Sequence
  ENSG00000267801_0 (sequence is synthesized)
ctagcatggcagcttccccctcctcgatgaagcccagcacctgggtctggaagccctgcagggcggccgcagcatctgcaaacagccggctcaccctctcccgctctgctacggctgcac

SEQ ID NO: 1026722 - DNA, 120 bp, Artificial Sequence
  ENSG00000267801_1 (sequence is synthesized)
tctgcacaggacgacagtagagggggcaatgagggcaaagaaccgtcccggactgtacccccctccttccctgaccccggcttcccaccggccctcttgaggggacagaggggccagact

SEQ ID NO: 1026723 - DNA, 120 bp, Artificial Sequence
  ENSG00000267801_2 (sequence is synthesized)
gagcctgtcctggatctgggccaggtcaggggacacttgtgctcagtaggtatgggcatggtttgtttggagtggattgttccatgctgagggaggggtgtttgaccttgatgagggcca

SEQ ID NO: 1026724 - DNA, 120 bp, Artificial Sequence
  ENSG00000267801_3 (sequence is synthesized)
ctgtgcgcctggactgtgcaatgccagcacccagctcgtccatgcggtcctccacggcgctcaggactttggactgctcagcctgtggacaacaccctccatgagtgtgaggtctggcag

SEQ ID NO: 1026725 - DNA, 120 bp, Artificial Sequence
  ENSG00000267801_4 (sequence is synthesized)
aggccacagccctacactcgggtcccaggccttgccaggggagagaagggggtgactggggagtggtatctgtgcatcaggtgggactggagtggccacgatgtcccataatatgccaga

SEQ ID NO: 1026726 - DNA, 120 bp, Artificial Sequence
  ENSG00000267801_5 (sequence is synthesized)
ggtgcctgcagcccaggctggtgcctttcctgaacgcctggggggcgtgcaggctgactgggtgtctgcctcgggtctctgacaggaggcctagtacagggccgtccgctggtctcagtg

SEQ ID NO: 1026727 - DNA, 120 bp, Artificial Sequence
  ENSG00000267801_6 (sequence is synthesized)
ttgctcagatgaatttgagaacttcctccggcggggaagaggcagagagtaagccagttaggttgggaggtgggcggcggaggggtgactgcacaaggaggcattaagctgtcctgagga

SEQ ID NO: 1026728 - DNA, 120 bp, Artificial Sequence
  ENSG00000267801_7 (sequence is synthesized)
tcactgttcccaaagagcctgcatccacagtccaggcctggaaaaaaggggattccgggcaaatcccctaggtcttatgagtcactgctccaggcaggagaaacggaaaatcccttggcc

SEQ ID NO: 1026729 - DNA, 120 bp, Artificial Sequence
  ENSG00000267801_8 (sequence is synthesized)
agaggcgccaagaccgggctggaggccaaaggaaactgggggcgggaggtagaggccgcggctcacatgctcccaccactggcccccggaacagctggacagagaatctgtgtgcccggt

SEQ ID NO: 1026730 - DNA, 120 bp, Artificial Sequence
  ENSG00000267801_9 (sequence is synthesized)
cgccctctgccgccctcctgccgcctgccacacccatcgaaagctgctgcctcagcccagggcaaatctgagctgagaccggcgtgaccctccgggcgggagcagcagccacgctaccgg

SEQ ID NO: 1026731 - DNA, 120 bp, Artificial Sequence
  ENSG00000267801_10 (sequence is synthesized)
aaccccgcgggcctaacccggctccctcccgcctacacccccatagaccccggcccggcttcaggtcccctgcccgctcttcgcgtccttgtcctgttctcacgtccctccttcctccct

SEQ ID NO: 1026732 - DNA, 120 bp, Artificial Sequence
  ENSG00000267801_11 (sequence is synthesized)
tcccatctccatcaccgccagcagatgaccttgtcaaggctggaagggaccgcaaagatcctcaggttagaggaggagattaagacccaacccgggaagactggggggtccaaggtcctc

SEQ ID NO: 1026733 - DNA, 120 bp, Artificial Sequence
  ENSG00000267801_12 (sequence is synthesized)
ggcccgctcgcgcgcggtcggtcaccagccccggctcacccgagtgtgcccccggagcccacctcctgaagcgcgcgctcctgctccagcggcaccagctcgtggccgcggtgctcctgt

SEQ ID NO: 1026734 - DNA, 120 bp, Artificial Sequence
  ENSG00000267801_13 (sequence is synthesized)
gcgggcacaggctctcctctagccggcgcagcggcggcaccaggcggtgtccgcggagggcggggctgcgctcgtgcgggcccaggtgcgcggggcaaaaggaggcgaggcaggagaggc

SEQ ID NO: 1026735 - DNA, 80 bp, Artificial Sequence
  ENSG00000267801_14 (sequence is synthesized)
ggcaggagaggcaggacagcgcggcgggcagggccgcgccctcggggcacgcgtcgcagcgcactggctcttcgcccgcg

SEQ ID NO: 1026736 - DNA, 120 bp, Artificial Sequence
  ENSG00000267801_15 (sequence is synthesized)
ctccggggccagggcaggggccgggccggggccggacccggggcccgagccctggcggagctgcagcagctcggacagcgtgtggttcttgcggagctgaaggccgtcggggaagggctc

SEQ ID NO: 1026737 - DNA, 120 bp, Artificial Sequence
  ENSG00000267801_16 (sequence is synthesized)
ggagctgaaggccgtcggggaagggctcctggcacagcgggcagcgggccgcgcctccgggtccgccggctccactcgcgccacgatgcggccagagcgcgcccaggcaggcgagacaga

SEQ ID NO: 1026738 - DNA, 120 bp, Artificial Sequence
  ENSG00000267801_17 (sequence is synthesized)
agttgtggccgcagggcagcgtcaccggctcccggagtggctctaggcagatggggcagctgaagggtccactgccgtccatgactccgcggccgcccagggcgccgccgattgtgctcc

SEQ ID NO: 1026739 - DNA, 80 bp, Artificial Sequence
  ENSG00000267801_18 (sequence is synthesized)
tgtgctccggcctgggagggacccgggccgttcgcgccgcggcacctccccctgggacctaggccagggctccggccccc

SEQ ID NO: 1026740 - DNA, 120 bp, Artificial Sequence
  ENSG00000267801_19 (sequence is synthesized)
cgcggactcccagtccccgcccagacaacgcagggaggcctccgagcccgcgcgacccccaggggagtccgcgtggtcctaaggaagggcgctgctgaaagggtgtgaaactgagtgagc

SEQ ID NO: 1026741 - DNA, 120 bp, Artificial Sequence
  ENSG00000267801_20 (sequence is synthesized)
gcgggcggagaacgcgagaggtacagtggaaggaatgggaaggactcagcctccatccctctggtccttctgggccaggccagcgctccgcaggggctgggcgcgtctagctgtgtcatg

SEQ ID NO: 1026742 - DNA, 120 bp, Artificial Sequence
  ENSG00000267801_21 (sequence is synthesized)
cctgcacctttgcgctcgacccctccctggcacccttagcaaagttcctgagctgctgactgcagagaaaaataactgctgatgtacatatgtttttgccccttagcgactctttttttt

SEQ ID NO: 1026743 - DNA, 62 bp, Artificial Sequence
  ENSG00000267801_22 (sequence is synthesized)
tttttttttttttttttgagacagagttcctctcttgtcgcccaggctggagtgcaggtagc

SEQ ID NO: 1026744 - DNA, 120 bp, Artificial Sequence
  ENSG00000267801_23 (sequence is synthesized)
gccttagcctcccaagtagctggaattataggcgcttgccaccacaccaggcaaatttttgtatttttttgtagagacggagtttcaccttgtccaggctggtcttgaactcgtgacctc

SEQ ID NO: 1026745 - DNA, 120 bp, Artificial Sequence
  ENSG00000267801_24 (sequence is synthesized)
acaggcgtgagccacagcgcccagctcctttagcgactctttaccccaagtagggaacttggacttttctagacctgaaatgggaagttgacgtcattccctaagtcccttgtctgagga

SEQ ID NO: 1026746 - DNA, 120 bp, Artificial Sequence
  ENSG00000267801_25 (sequence is synthesized)
ttccctaagtcccttgtctgaggaatgtagttctggcccctggacactggggacacctgtggtggggttgggggttccccaactggaagtatttaaagctcatctaattatgcacttaaa

SEQ ID NO: 1026747 - DNA, 120 bp, Artificial Sequence
  ENSG00000275367_0 (sequence is synthesized)
aaatagaagttccagctacagatgggcagacacatgccctctcaattcctgatggacctcctagtgcctcctggacctaaggggcctccctcaatgtttcaagatgccaccaaggcaggg

SEQ ID NO: 1026748 - DNA, 120 bp, Artificial Sequence
  ENSG00000275367_1 (sequence is synthesized)
atcagctcgtgcattcctgagaacatccacgatgaagtgaggctctggaaaaatgcaagagtttccacataatcccaaaaaaccctaaaggtgaactggatgccacagaaagaggagtgg

SEQ ID NO: 1026749 - DNA, 120 bp, Artificial Sequence
  ENSG00000275367_2 (sequence is synthesized)
tctttgtcacaacaaaatcaacaaaattatttcgaagtcaattaggaaactcagaaatcactcttgctgccattaagaggaagaataggagcctgtgaatggcatccctggcctacctga

SEQ ID NO: 1026750 - DNA, 120 bp, Artificial Sequence
  ENSG00000275367_3 (sequence is synthesized)
gactccacagatatttctatgtggcttcagacaccagaaatctccctgattttcagaaaggcagggacagctcctgccagcccatccctctgcagaatgtgtcccagcagatcagtggca

SEQ ID NO: 1026751 - DNA, 120 bp, Artificial Sequence
  ENSG00000275367_4 (sequence is synthesized)
tggaaccatcatggacagcacaaaggctcaagggcagcatcccaggccggcctgtgactctagataagttctgagtccccatgggggctcaggaaaggttagtgatgacctggaaagaag

SEQ ID NO: 1026752 - DNA, 120 bp, Artificial Sequence
  ENSG00000275367_5 (sequence is synthesized)
ggacaggctgaaaccgcccctacgctatctgcaggattccaacttcagcaggaagccaaggaccaactcgtaccacacctgcgccctctgaaaacgctggatacaatcccactctgcaga

SEQ ID NO: 1026753 - DNA, 120 bp, Artificial Sequence
  ENSG00000275367_6 (sequence is synthesized)
aagttccacatagaagtggctgggaattttgcattctagactgcattttacagtgcctctggacatgtgatgagaaatttaacattggtgtatctaactctgacatttttcacgaagtga

SEQ ID NO: 1026754 - DNA, 120 bp, Artificial Sequence
  ENSG00000275367_7 (sequence is synthesized)
ttttttaaaatgtggtaaaaaagacaaaatataattcaaacatatgcattatatgtcaaagtatgcttcgctggcatcaagtagactcaccttgagatacaatcttggacaacctccatc

SEQ ID NO: 1026755 - DNA, 120 bp, Artificial Sequence
  ENSG00000275367_8 (sequence is synthesized)
ttcagaatatctactttttcaaaccgaaactctccaaccaaaaatcaataacatcaaaagtttgcaaatacaagccgacggaaaataaatacatgaattctaccacagtgaattggaccg

SEQ ID NO: 1026756 - DNA, 74 bp, Artificial Sequence
  ENSG00000275367_9 (sequence is synthesized)
gaaaataaatacatgaattctaccacagtgaattggaccgcactgggaaacacagatgaagaaagtcaataact

SEQ ID NO: 1026757 - DNA, 76 bp, Artificial Sequence
  ENSG00000275367_10 (sequence is synthesized)
gcgaagatccaccgcccctaattctgcccatggtcatctgcagctgcacgagttagggtcggtgttccttggacgg

SEQ ID NO: 1026758 - DNA, 79 bp, Artificial Sequence
  ENSG00000275367_11 (sequence is synthesized)
tgaacttttgtgccacgtcccctaattctgcccatggtcatctgcagctgcacgagttagggtcgtgaaccagcacact

SEQ ID NO: 1026759 - DNA, 120 bp, Artificial Sequence
  ENSG00000275367_12 (sequence is synthesized)
ttctcatgtagcccaagtgacccaaggtcttcttgagctttggaaccagtcgcgtcccacttgacacagcacccgactcccagtttctcaatcgtgttggccctccggcgatctcccgtt

SEQ ID NO: 1026760 - DNA, 78 bp, Artificial Sequence
  ENSG00000275367_13 (sequence is synthesized)
tgatcttattgataacgaccctcaacagcggcggaaagggagcagccatttggtgtgtctcagaaaatcgcgctcagt

SEQ ID NO: 1026761 - DNA, 120 bp, Artificial Sequence
  ENSG00000275367_14 (sequence is synthesized)
ccctcaacagcggcggaaagggagcagccatttggtgtgtctcagaaaatcgcgctcagttccgaggcctcctagatgtggaatcctgctcagagttgttcccaggtcagagaatggaga

SEQ ID NO: 1026762 - DNA, 120 bp, Artificial Sequence
  ENSG00000275367_15 (sequence is synthesized)
ctcttaggatcagggggagaaccatggaaaggcccggtgtcagacatccggaaagaagatgggatgaatgttttacctctgaagtacatcccaaatctgggagttaacttcagctttgct

SEQ ID NO: 1026763 - DNA, 120 bp, Artificial Sequence
  ENSG00000275367_16 (sequence is synthesized)
tgaatgttttacctctgaagtacatcccaaatctgggagttaacttcagctttgctgggctctatttggccagtgaaactctgcctggttcattcgcacatccggaagccacttcacggg

SEQ ID NO: 1026764 - DNA, 70 bp, Artificial Sequence
  ENSG00000275367_17 (sequence is synthesized)
gagacataacgatttggattgagaacaagtcaagaaattttcaagcccttggatgtagggaaaagaaaga

SEQ ID NO: 1026765 - DNA, 62 bp, Artificial Sequence
  ENSG00000275367_18 (sequence is synthesized)
ctctgtttcagagacataacgatttggattgagaacaagtcaagaaattttcaagcccttgg

SEQ ID NO: 1026766 - DNA, 85 bp, Artificial Sequence
  ENSG00000275367_19 (sequence is synthesized)
gcgtgcaggacgtgccttgttaaccacatgtttacaagcagtatacttggtaaaagacattgccattctctagtctcaataaacc

SEQ ID NO: 1026767 - DNA, 73 bp, Artificial Sequence
  ENSG00000275367_20 (sequence is synthesized)
gaactgaatgtctcggtgtaaaacccgatcgtacatttattcaactctgagcttgctgccttgttattcttta

SEQ ID NO: 1026768 - DNA, 120 bp, Artificial Sequence
  ENSG00000271474_0 (sequence is synthesized)
gggaggcgcaaggcggccacctccgccgctccccccagcagcaggagcagccgcagctccgccgcacgccgaagtctggactgctctccgggtcccctcgcctgtgaggaacacacacag

SEQ ID NO: 1026769 - DNA, 120 bp, Artificial Sequence
  ENSG00000271474_1 (sequence is synthesized)
acaccgggggtgggggtgggggtgggggttgaagtggggggagttggaggaggagggaacggagggaggaagcttgggcaccgtcaggcgctctggtctccaatctcagtgttctcacgc

SEQ ID NO: 1026770 - DNA, 120 bp, Artificial Sequence
  ENSG00000271474_2 (sequence is synthesized)
cggcggagagatgtcccggctgtcgctgctgggtggccaaggaggttcacatcctagagtagggcgcacgggtgcgcgaaggcgctcgccaaggaggcgtagagggcgcagcacaactcc

SEQ ID NO: 1026771 - DNA, 120 bp, Artificial Sequence
  ENSG00000271474_3 (sequence is synthesized)
tctggggggtaaccgggggcgggagcacgcccgcccgccttatgtaagcaaggattgcagggagatcagcgcccaggagaccagctgtgggtttgcccgctgaagccgaggcgagacaga

SEQ ID NO: 1026772 - DNA, 120 bp, Artificial Sequence
  ENSG00000271474_4 (sequence is synthesized)
ccaggggacgaagcggctgcggagagtggcagcgcgcctgcctcccgcggtgcgccagacctggacgccgggagtgcagcgggcgcgccccgggccactaggctgtgtccagtggagctc

SEQ ID NO: 1026773 - DNA, 120 bp, Artificial Sequence
  ENSG00000271474_5 (sequence is synthesized)
agcctgccgcctgccaccttcttcgccgcgccggcaaagcctcagccgaattccctaggactggactcggtctacgacttcgggtctcgcggttgacgaagccggtgcgggctcgaactg

SEQ ID NO: 1026774 - DNA, 120 bp, Artificial Sequence
  ENSG00000271474_6 (sequence is synthesized)
aagtccttcttggttggggaagaaggcatgaagcttttgcactgccccagccggctgctgtcctggggttgtcagcgccagtcagactgctttatgttctgagcgcgtatgacccctttg

SEQ ID NO: 1026775 - DNA, 120 bp, Artificial Sequence
  ENSG00000271474_7 (sequence is synthesized)
cagtggaacagaaactaaaagctcgacggaaactcattctgcaacagtgctttctttgcgtgcatgttggtggctgacaagggtggtgatgcgataccgagagaaactctcttagaaaaa

SEQ ID NO: 1026776 - DNA, 120 bp, Artificial Sequence
  ENSG00000271474_8 (sequence is synthesized)
aaaaatgcaaagcaaaatttgtagatactcaaagtgatggtggagcctataacatgtttttcaaatttctaatagtgtgtgtaagaactcgagctgctatgaatttgtttacctttctac

SEQ ID NO: 1026777 - DNA, 120 bp, Artificial Sequence
  ENSG00000271474_9 (sequence is synthesized)
aggaaataattgtctacgtagctgggttgtgaatccctgtggtcatgatggagggatgcaagattgggtgggtaaaataagactagacaaaaggaaagtgaatttattaaaaggtcaaca

SEQ ID NO: 1026778 - DNA, 120 bp, Artificial Sequence
  ENSG00000271474_10 (sequence is synthesized)
cacagacacagacaacattttgggaaaaagaaaatcacttcccaagattagcatgtctttaaactaataatacatcagggaattttatgctcttggtgccaagggggccatgtgtaaaca

SEQ ID NO: 1026779 - DNA, 120 bp, Artificial Sequence
  ENSG00000271474_11 (sequence is synthesized)
cgcatgcacacacacacgcaggaaacatgaggtctaattttggctgtggtcataactactctgttaccctgggtaagtcaggtaacctgtgaatgtctcagtttcttcatttgtgaaata

SEQ ID NO: 1026780 - DNA, 120 bp, Artificial Sequence
  ENSG00000271474_12 (sequence is synthesized)
ttttgatagtttcaaagttctcttaagttctaacattctatgattctgcctgcacagccccatctaggcaataagacctatctcggatgaatcagggagatccgaaaaggtagtatttgc

SEQ ID NO: 1026781 - DNA, 120 bp, Artificial Sequence
  ENSG00000271474_13 (sequence is synthesized)
ataccaagacatcaagatatttgacaacagggtgggtgctggcaccagactgtctgccttcagttcttagcatttcttattacttgactgatattgaacattaaagctaggtgcctctct

SEQ ID NO: 1026782 - DNA, 120 bp, Artificial Sequence
  ENSG00000271474_14 (sequence is synthesized)
tccctaatttgtaagatgggtctagtaacaggaactatctcatagggttatttgaggattatgtaagttaaacatatgtaaaatgcctgacgccaaaattgtaaactgctgttcttacca

SEQ ID NO: 1026783 - DNA, 120 bp, Artificial Sequence
  ENSG00000271474_15 (sequence is synthesized)
ttgatgaaaaattcccattagcctcatgctatctacaccagtgctgttcagcagaaatttctgcaatgaagaacatgttcatatctgtactttctgaggtcgtagttatgagatacatgt

SEQ ID NO: 1026784 - DNA, 120 bp, Artificial Sequence
  ENSG00000271474_16 (sequence is synthesized)
ggctacttgcatgcaatgtggctagtgtgaattggaaatttttatttaattttaatttaaatagtcacatgtggccagcagctaccatattttatggtgtatcgaggccactaataactt

SEQ ID NO: 1026785 - DNA, 120 bp, Artificial Sequence
  ENSG00000271474_17 (sequence is synthesized)
gtcaagtattttgagaatgacttcacaagggattattattatactttatatttatatgtacaattttactaagaaggacaacagcttaagtactaagaaatctccacacatactcaccat

SEQ ID NO: 1026786 - DNA, 120 bp, Artificial Sequence
  ENSG00000271474_18 (sequence is synthesized)
cacatcaacgacatccaaaagttatttatttacaattttattgcctgtcttcttaaattagaatttaactcttttaagacagagattttgcctttgttcattatttcaaccacagctcct

SEQ ID NO: 1026787 - DNA, 120 bp, Artificial Sequence
  ENSG00000271474_19 (sequence is synthesized)
aaactgagcctgatatatagttggtactcaatcaatattgactgatttcctgccaaaaaagctcaatggggaagactcctcaaagtctaggacagctaaagaaggttgaaattgtcgcct

SEQ ID NO: 1026788 - DNA, 120 bp, Artificial Sequence
  ENSG00000271474_20 (sequence is synthesized)
actcctgtttggggtattgaggtactcagtgacagataccacatgcaattagttccttaaaataaagaatacgagattaaaagaggaaatgtagttaaatactgaaattcagcctaaaga

SEQ ID NO: 1026789 - DNA, 120 bp, Artificial Sequence
  ENSG00000271474_21 (sequence is synthesized)
tggcaggagaatggtttgagaagtggtatagagtaatgaggtggaaaagggggaagagagtgagagcaccacacaaaggacaggaaaaacaccagcaatacatcagctttacacagcagg

SEQ ID NO: 1026790 - DNA, 120 bp, Artificial Sequence
  ENSG00000271474_22 (sequence is synthesized)
caagtttcctgctctctacaagtacagatggaacttgtcttgtgaattaacatcctgactacttttgttgatcatcacattttttcctcatgagagaaataatagtgttttataggctcc

SEQ ID NO: 1026791 - DNA, 120 bp, Artificial Sequence
  ENSG00000271474_23 (sequence is synthesized)
tgagaataggtttactaaagtcatcgagatctgggttcaaatgacactgcttagggaggcattcactgatcaagttacctaaaatagcaacaatctatcatccaaaatatcatttgccag

SEQ ID NO: 1026792 - DNA, 120 bp, Artificial Sequence
  ENSG00000271474_24 (sequence is synthesized)
ctttgattttgcatataacacttactttatatatgtacatatatgtgtatatatatatttgtgtgtgtgtgtgtgtatacatgtatatatatatgcagtctgcaataaaatgtatgcttc

SEQ ID NO: 1026793 - DNA, 120 bp, Artificial Sequence
  ENSG00000271474_25 (sequence is synthesized)
tcaggggagaaatttttttctaatacattcagtgctctatacccagaacctggaacaataccttgtacataataggtgatcaataaatacttactgaatattgaatggattgaatcagaa

SEQ ID NO: 1026794 - DNA, 120 bp, Artificial Sequence
  ENSG00000271474_26 (sequence is synthesized)
ccaatggatttaaaattgagctaagtccttcattaaaccttcttcctctcctcttcagcctctcaagttatcaaattatgagtaggcttttctagttgttgaataaaatcaagttttgcc

SEQ ID NO: 1026795 - DNA, 120 bp, Artificial Sequence
  ENSG00000229821_0 (sequence is synthesized)
gagaaccgaagagccttagtttggaggtgcagtagctgaagctaccactagagggatttgcaggcctggagcagaatggccacccagccgccaagtgagggcagtaccttcaaggaggac

SEQ ID NO: 1026796 - DNA, 120 bp, Artificial Sequence
  ENSG00000229821_1 (sequence is synthesized)
ctgaatccttcctgcctcatgtctctcacctgatttccacaagcccagtcagtgatttccacaagcactgactaggggccaaaaaggaacagggaagaaaagagagccacagggctgagt

SEQ ID NO: 1026797 - DNA, 120 bp, Artificial Sequence
  ENSG00000229821_2 (sequence is synthesized)
ctggcccccttggcctctctgggcttccctccccacacccctgcaggtacactcacttcaaaggagacgggcacacgaactgtgtccccgaccttgactgtcagcaagtccttggtgctg

SEQ ID NO: 1026798 - DNA, 120 bp, Artificial Sequence
  ENSG00000229821_3 (sequence is synthesized)
ctccctcctccctcacagttggaccccagccccaggtccccagcaagatgagataaacaccaatctaagacaggaaatgacttgcctgaggtcacaccttgttcgggagagagccaggac

SEQ ID NO: 1026799 - DNA, 120 bp, Artificial Sequence
  ENSG00000229821_4 (sequence is synthesized)
aagattctgggactttggactccgtgtgctgtgtttgtgactccctactgccatagtgatgactagggtcagctggggtggcccagtgtcagcttgggtcaaaggcagatcaggtgcttg

SEQ ID NO: 1026800 - DNA, 120 bp, Artificial Sequence
  ENSG00000229821_5 (sequence is synthesized)
tggtggttaaagcccaaagggaaagacaatcctcttttcaataataacggggagctgggcatgtcccattctgaacgtgaaccatgggagctgagcggcccttaggccttcgaaggccat

SEQ ID NO: 1026801 - DNA, 120 bp, Artificial Sequence
  ENSG00000236463_0 (sequence is synthesized)
ggtgcccaccagcttaaccacagcacacactgcaactcattcatacgagaaacacacgaaatgtaggctgtgttgagaaataaatagcagaattgtaattaggggccagaggaaaagggt

SEQ ID NO: 1026802 - DNA, 120 bp, Artificial Sequence
  ENSG00000236463_1 (sequence is synthesized)
agggtcaaaaaagcgtctgaaggagagacactgagtgcattctgggttcacattcccctcctctactgcattcctgaattttctgcctcacagcggcatctgaagcagtggctgtatgtg

SEQ ID NO: 1026803 - DNA, 120 bp, Artificial Sequence
  ENSG00000236463_2 (sequence is synthesized)
tccttaaccacccttcaagtccacaacatgtcatattacctcattttggctccctgggactattttggaggacctgaattagtcatgtggggtacttgattaaaaatcacttgaacagcc

SEQ ID NO: 1026804 - DNA, 120 bp, Artificial Sequence
  ENSG00000233581_0 (sequence is synthesized)
ccaggctcctgtgcttaatctttcttaactggatcatcagtgcttgggaaatgggcaggataacaatttaaagagataattgactgcacaaatcagctcatcccttcaagggataaattt

SEQ ID NO: 1026805 - DNA, 120 bp, Artificial Sequence
  ENSG00000233581_1 (sequence is synthesized)
tctcacactttctggttctgtaataggtcagggctgttggagacagagctggctttttccctgatgtccagggtcctgaaatgaagtatggctgggccacttgactgggagtgcagttac

SEQ ID NO: 1026806 - DNA, 120 bp, Artificial Sequence
  ENSG00000233581_2 (sequence is synthesized)
caggaagctcgattcaagtcaccagcagaaaacagagttgccttcatgtctttactctcaaggttctgcagcttgccatagcggaaacctgaatcttgttaaatggagatgggcaataca

SEQ ID NO: 1026807 - DNA, 120 bp, Artificial Sequence
  ENSG00000233581_3 (sequence is synthesized)
ggcaatggatccttcaggtctccttcttccaagcaaatgtagccctgggaacactttcattgaaaagaaagaagagacaaagtgactggtgactggtgatacaaaatcagaatagggata

SEQ ID NO: 1026808 - DNA, 120 bp, Artificial Sequence
  ENSG00000238217_0 (sequence is synthesized)
aaagcattcgccatctagagagacacagagatgaggagcccaagagatgaaactggagaggatgccctttgccatgttatgatcctgcaggaagaccctcaccagatatggccccttgat

SEQ ID NO: 1026809 - DNA, 120 bp, Artificial Sequence
  ENSG00000238217_1 (sequence is synthesized)
cttggacttcccagcctccagaattgactggagtgtcatatctcagcttctcgccccttgatctccatatgcctggcaatctggagctcagcagtccggagctggtataatgactccatc

SEQ ID NO: 1026810 - DNA, 120 bp, Artificial Sequence
  ENSG00000238217_2 (sequence is synthesized)
gtccttctgtcttggtccttttgagtgtggctccatcatcctcaaccttggatcacatccaggaccccttttccccggaggccagctcgcatcgtttatgatttgcatttcattgccgta

SEQ ID NO: 1026811 - DNA, 120 bp, Artificial Sequence
  ENSG00000238217_3 (sequence is synthesized)
cactgaacccagtgagaagtcgtctgaaccagcagaatggtgagagctaaaagtagcaagcaagaagtctccattttccagctcattctgcacagtctgctttgccagaaaccctaagcc

SEQ ID NO: 1026812 - DNA, 120 bp, Artificial Sequence
  ENSG00000238217_4 (sequence is synthesized)
aaatttgatttaaaatttatacaagaaaagaacatcaacatgagtacactcagtctcttctcttcccctttcccaagacccttcttggcctgggaacctctgttttaggtttcatttgat

SEQ ID NO: 1026813 - DNA, 120 bp, Artificial Sequence
  ENSG00000238217_5 (sequence is synthesized)
gttggatggctaattattagatttttctcttttccctccctatttaattctgccacttacttttacaatgtccttattttccccagtcctctttatccctcaatctttaacctgcaaaag

SEQ ID NO: 1026814 - DNA, 120 bp, Artificial Sequence
  ENSG00000238217_6 (sequence is synthesized)
agaacgaagtcaacttttgaaatgtaaacaagaattttaaagaagaaaaagtagggtcaaagagagcagtgcaatagttgaaaaaatataataattcaatgaaagtatgaaagtatgtag

SEQ ID NO: 1026815 - DNA, 120 bp, Artificial Sequence
  ENSG00000238217_7 (sequence is synthesized)
aatatactccatataagaaaaggaaactcattcgtcctgtcctgcacatgatcatccttatacatactacggaaagagtttgagaaaaaaattctgatgaagtcatctcccatattcata

SEQ ID NO: 1026816 - DNA, 120 bp, Artificial Sequence
  ENSG00000238217_8 (sequence is synthesized)
tagatcagctaggacttttaaacaaagctactgattttaagacagaactctctcctaaactacatagctatttttttttgaaaactatgttaccaaagtatgtccatggggaagtcttac

SEQ ID NO: 1026817 - DNA, 120 bp, Artificial Sequence
  ENSG00000238217_9 (sequence is synthesized)
cagcccctcaagtaaaaggtaaactgcttcttctcctgtattcctgccttagttaatgataccagatgaagccacctctttccttatccctgtgttcaaggtgccacaaagacaggtcgc

SEQ ID NO: 1026818 - DNA, 120 bp, Artificial Sequence
  ENSG00000238217_10 (sequence is synthesized)
tttctaaatggttcctacttagtttacacctgagcccctctgcctgagtttgcactatcaatcccatcctaatcagcccctgatctgtgagacagtccgttatctatactattagcgata

SEQ ID NO: 1026819 - DNA, 120 bp, Artificial Sequence
  ENSG00000238217_11 (sequence is synthesized)
gttctaacatgcacctctgagtgtgtcctgcactgcctaaatccttccatgacttccattaccaaggaaggtagtcaaaaggatcaagtggagggaagggaatttactagaatctctcca

SEQ ID NO: 1026820 - DNA, 120 bp, Artificial Sequence
  ENSG00000238217_12 (sequence is synthesized)
ttatactttgcaccaattctacaggaactgcccttcgtccctctggattctgacatgatgtgagagaggggagctggaaagttctctggttcattctgaggagttcctctgcccccttcc

SEQ ID NO: 1026821 - DNA, 120 bp, Artificial Sequence
  ENSG00000238217_13 (sequence is synthesized)
tgctcacctctcctgctccccattgcctcccaaaccctctggcccacaaggtgcagtccacactccccagggcacaggaggccttgcagaagttggactctctcagcccctccacccaag

SEQ ID NO: 1026822 - DNA, 120 bp, Artificial Sequence
  ENSG00000238217_14 (sequence is synthesized)
cacctgccaatccagactcacctgttctatatggggagcacctgcttttcctccgtctgaagggctctttctttcctggctaactcccacttctctatcaagcctcatcttagatattgt

SEQ ID NO: 1026823 - DNA, 120 bp, Artificial Sequence
  ENSG00000238217_15 (sequence is synthesized)
ctcctaacggaaggggcatcttcatcacctggggcacatacctggcccttctcacaatgacaacatgtgtgacctgcctgtctcttctctccagcctaggagttcctgagggggtagaca

SEQ ID NO: 1026824 - DNA, 120 bp, Artificial Sequence
  ENSG00000238217_16 (sequence is synthesized)
gcagatgcttaatggtttttgaatgaatagatgtgtgggaataaatacatggctaaaggaaatcatggcagtgaggtctctatgaactgactaaattgactgttttgcaaaaagttggta

SEQ ID NO: 1026825 - DNA, 120 bp, Artificial Sequence
  ENSG00000238217_17 (sequence is synthesized)
gcaatatctttttaccatacaatcaactcaattggaccactaacccaccagccaataatcagagtatgacacaactgaactcactgttttgatcatctttgcaaatgagactagtcattt

SEQ ID NO: 1026826 - DNA, 120 bp, Artificial Sequence
  ENSG00000238217_18 (sequence is synthesized)
gttaattaaatcacatacgaaataaattctccatctccccctaaaaaaaaaaagagtatttgccagctattatgaatggaaagtattaacatttatttgagtgtttactgtgtaccaggc

SEQ ID NO: 1026827 - DNA, 120 bp, Artificial Sequence
  ENSG00000238217_19 (sequence is synthesized)
actatcttattcattttgcatggactgattcattgagtcctcacaaaaactctagaaggtgcatgttttcgtagtactcactttacagatgagagagctgcctacgggcacccagcaggc

SEQ ID NO: 1026828 - DNA, 120 bp, Artificial Sequence
  ENSG00000238217_20 (sequence is synthesized)
acggccgaggtgggctcacaatacagccacacagcccaagtgctccctcactaggttctactgtctctgaggacatgaatgagcattgtgtggtttccaccagaaacagcacatgatatt

SEQ ID NO: 1026829 - DNA, 120 bp, Artificial Sequence
  ENSG00000238217_21 (sequence is synthesized)
ttccagtgtagatccataattcagttatctacagcttccatcttatattcacatcaaaaagacatcacagcgatggacaccccatttaccctgatgtgattattacccattgcaggcctg

SEQ ID NO: 1026830 - DNA, 120 bp, Artificial Sequence
  ENSG00000238217_22 (sequence is synthesized)
tatcaaaatatttcaggtgaccgacatacacacctagtatgtacccccaaaaattaaaaatttaaaaatttaaatttaaattaaaaaataggctgagtgcagtggctcacatctgtgatc

SEQ ID NO: 1026831 - DNA, 75 bp, Artificial Sequence
  ENSG00000238217_23 (sequence is synthesized)
ctctctataaaaaaaaatacaaaaattagccgagcttggtggtatgtgccttgtagtcccagctactcaggaggc

SEQ ID NO: 1026832 - DNA, 75 bp, Artificial Sequence
  ENSG00000238217_24 (sequence is synthesized)
tggtatgtgagagcctgagaggtggagggtgcaatgagctattatctcaccactacgctccagcctgggtgacag

SEQ ID NO: 1026833 - DNA, 120 bp, Artificial Sequence
  ENSG00000238217_25 (sequence is synthesized)
ggagcccaagagatgaaactggagagcagaacatctccagcagcagctgggatgatgaagcatcttctcttggcaaagaagaacaccaaaatcagagaggccagttaggaggctactgca

SEQ ID NO: 1026834 - DNA, 120 bp, Artificial Sequence
  ENSG00000238217_26 (sequence is synthesized)
atatttcagggtcagcccaagaagcaggaagcagcagtgcagggagaaaagagtactggatttagagtcagacacccaggttcaagttctaggtcagccacttcttttgttatatgatct

SEQ ID NO: 1026835 - DNA, 120 bp, Artificial Sequence
  ENSG00000238217_27 (sequence is synthesized)
ctggggctgagtctcaccacagttaacaggctgtgtctgcaaaaagggtatcaaggtgataaaatgaggcagtatattaaattgtactaaatacccatttgtagggcaaaacaggctact

SEQ ID NO: 1026836 - DNA, 120 bp, Artificial Sequence
  ENSG00000238217_28 (sequence is synthesized)
atcagcaatttcagatgaaatttcattttcatcataatttatgaatgcattttgcaaagcataaataactatagggattaagattcaaagggaattagaaagcaaagaaaagggatagag

SEQ ID NO: 1026837 - DNA, 120 bp, Artificial Sequence
  ENSG00000238217_29 (sequence is synthesized)
agaggagattctggtaagtgcccaagtttggtgtgaatagcagtatgagggttaaggaagcacaacccagcagcttctaagtttcttatagccagaggcaactctttgatccctggtctg

SEQ ID NO: 1026838 - DNA, 120 bp, Artificial Sequence
  ENSG00000238217_30 (sequence is synthesized)
gcatcctctgtgtcaacaattatgtcccctcttcaacattcctgaaaactgttgttacttagaggtctgtgtagaacctttatgtattccaaaagcagaaaaatatattacttagaactc

SEQ ID NO: 1026839 - DNA, 120 bp, Artificial Sequence
  ENSG00000238217_31 (sequence is synthesized)
ttgtttcccccactcccattctccttccttcaaagcaaatggagaaaatggggttcgtatggtggggggcagtaacgtggtctcctgggaatttccagttttataagcttgcgtttactt

SEQ ID NO: 1026840 - DNA, 120 bp, Artificial Sequence
  ENSG00000238217_32 (sequence is synthesized)
tgtggactaacagattcaggatttccaatagcctataaaattattttctcttccatctttgtttaaaatgccacaattaggcagatgatgactatatgtattctatatttattttgccta

SEQ ID NO: 1026841 - DNA, 120 bp, Artificial Sequence
  ENSG00000238217_33 (sequence is synthesized)
gacatattttcttcttcttctttatttaagtttgcagttcatagaagcagtcttcccagcttgattttattcacagaagaaaaaaggcacccctgggaagtgcctgacaaaagcttgaag

SEQ ID NO: 1026842 - DNA, 120 bp, Artificial Sequence
  ENSG00000238217_34 (sequence is synthesized)
agagaagaggctctgctgtggtttgaatgcgtcccccaaagttcatgtgttggaaacttgatccccgatgcagcagtactgggaggtgggacctttgagaggtgtttaagtcatgaggac

SEQ ID NO: 1026843 - DNA, 120 bp, Artificial Sequence
  ENSG00000238217_35 (sequence is synthesized)
cctgccctcatgaatggattaatgctgttattgcaggagtgggtttgttatctcgggaatggatttgttataaaaagaaaagttcagcccccttttatctctcacccataggatgccctt

SEQ ID NO: 1026844 - DNA, 84 bp, Artificial Sequence
  ENSG00000238217_36 (sequence is synthesized)
agttcagcccccttttatctctcacccataggatgccctttgccatgttatgatcctgcaggaagaccctcaccagatatggcc

SEQ ID NO: 1026845 - DNA, 120 bp, Artificial Sequence
  ENSG00000238217_37 (sequence is synthesized)
cattctgttatagctgcacaaagcagactgagacaggctcctttactcatggtgaagaaggtaagtcccttatgactttatcaaataaaaataatgactacaggtaaagggctagaaatt

SEQ ID NO: 1026846 - DNA, 120 bp, Artificial Sequence
  ENSG00000238217_38 (sequence is synthesized)
tttagacaaaaggccagtgggtatcacagggagctttccagttggctgttttggcagaatggcaagactttccttcctcattctcaaagcttcctgacatttacagctttggaaggtggt

SEQ ID NO: 1026847 - DNA, 120 bp, Artificial Sequence
  ENSG00000238217_39 (sequence is synthesized)
gagtgagaaaattttccaagggactctagacattctcagaatcccctggttccacacttgctagattatggaagagagaagagacacctaaaaggaaaaaaaaaaggaaggagaaagggg

SEQ ID NO: 1026848 - DNA, 120 bp, Artificial Sequence
  ENSG00000238217_40 (sequence is synthesized)
aatcagctctttagtcccctaagacccacttggctgtggctcctggctgccaagggttgcctgtgagtggttctccaggcatgaactgtgaccaccctgctatagattaatcctttcctc

SEQ ID NO: 1026849 - DNA, 120 bp, Artificial Sequence
  ENSG00000238217_41 (sequence is synthesized)
ctacaaagttggtcttcagtatacttaatgagggagaaatgggatgtctttttttccttccagaatcactctagtatgacctgcagaatgattagcgtggctcagcctcagttgggatat

SEQ ID NO: 1026850 - DNA, 120 bp, Artificial Sequence
  ENSG00000238217_42 (sequence is synthesized)
catggcttaaattattcctattagtttccagctgaccttggaacacaagcattacatgtgatttcaatgaaactttagactttgttgttctcagttaactagtgaaacagttgaaccttc

SEQ ID NO: 1026851 - DNA, 120 bp, Artificial Sequence
  ENSG00000238217_43 (sequence is synthesized)
ccatgacttgtggtaattataataaagggtaagtattatcacaaataatgcaaaccgatttacaagatggcaaagtgatgttctggaagttgtgcgcaaagacaaaatgtgaactgaaca

SEQ ID NO: 1026852 - DNA, 120 bp, Artificial Sequence
  ENSG00000238217_44 (sequence is synthesized)
agtattactttacagtgagttttggcacaactcactggttacaagaaacattgtgttaacaggaaaagccactttaaaactctgtttgatacttaaagctctcaaatacactctaaacgt

SEQ ID NO: 1026853 - DNA, 120 bp, Artificial Sequence
  ENSG00000238217_45 (sequence is synthesized)
ttaaaccaacactccaaactgattaaagcatttatggaaaataaaagtgttttgccagtggggaaaggatgaggaatctttgttgttgttgcttgtttgtttgtttttatcgaggtgtaa

SEQ ID NO: 1026854 - DNA, 120 bp, Artificial Sequence
  ENSG00000238217_46 (sequence is synthesized)
aacaaaacccccaaatttgacagatttcccagttctaattaagttttatgaggttaagagtttatgccacccttctcaaacaatttatccaaactcaatggattttcaaatcacatataa

SEQ ID NO: 1026855 - DNA, 120 bp, Artificial Sequence
  ENSG00000238217_47 (sequence is synthesized)
tgacccttctggcctaggagagggatggtgtcctcttgatggccatattcctactgtggaatataattcctggcacataacagatgcttaataaatgtgtaatgaaggtgggaactgtgc

SEQ ID NO: 1026856 - DNA, 120 bp, Artificial Sequence
  ENSG00000238217_48 (sequence is synthesized)
ctcataattcactttgaagcacatctagcaactcatcatatttaaatagtcatttcagagatgtttcatatactctgttttctaggactggagtgtcatatctcagcttctcgccccttg

SEQ ID NO: 1026857 - DNA, 120 bp, Artificial Sequence
  ENSG00000238217_49 (sequence is synthesized)
atctccatatgcctgggaggaaatggcatgaatgagacttgaagctaaaaatgcacttgctgatttgaagaacattaactgtggctgtttgtgacctggctggaaaggacaacccatcat

SEQ ID NO: 1026858 - DNA, 120 bp, Artificial Sequence
  ENSG00000238217_50 (sequence is synthesized)
cacatctactggtaaacttatggtatccagaaaaagccaaaggactctattgcaagacagcatcacctggctgcagagaggggatcattttgggatacacagaaacctggggatgggcat

SEQ ID NO: 1026859 - DNA, 120 bp, Artificial Sequence
  ENSG00000238217_51 (sequence is synthesized)
accatggagtctggaggggctcagtagtgacatgagcccatgggatgggatcaagatacacctttgcttcagcctccgtcaccagtgtctttagacaccccagtttcttcaggaagtccc

SEQ ID NO: 1026860 - DNA, 120 bp, Artificial Sequence
  ENSG00000238217_52 (sequence is synthesized)
gatgtaccatcaggtatgaaaaccctaagagggagcaggtgtcagagcaggaggtcacagggcagccactgaaggaaagctgcattctgaggctggaagaaggaagaatgtcactgagta

SEQ ID NO: 1026861 - DNA, 120 bp, Artificial Sequence
  ENSG00000238217_53 (sequence is synthesized)
gacaaaataatggtcatcagggaattggtaaagtaaagaggaaaagaagaatcaagacagtacaatgccatgacagctcaagtgagaagacttttcataaggagaggggagacaacccca

SEQ ID NO: 1026862 - DNA, 120 bp, Artificial Sequence
  ENSG00000238217_54 (sequence is synthesized)
tgaatgagccatgtaggtcaagaagaatgaaggctgagatcagtgctgcagaaatcacaggtagcacaaggcaatctggagctcagcagtccggagctggtataatgactccatcgtcct

SEQ ID NO: 1026863 - DNA, 120 bp, Artificial Sequence
  ENSG00000238217_55 (sequence is synthesized)
tctgtcttggtccttttgagtgtggctccatcatcctcagtgagtggcttcttcctcacggttcaagatagatgtctgatgtttagtcttattcctgccagcaggaaggaagagcagaag

SEQ ID NO: 1026864 - DNA, 120 bp, Artificial Sequence
  ENSG00000238217_56 (sequence is synthesized)
aatggcatacccacccccaacctcctgttttgagacagagtctcactttattgtccatgctagagtatagtgatcatagctcactgcagcttcaacttcctgggcttgagggatcctccc

SEQ ID NO: 1026865 - DNA, 84 bp, Artificial Sequence
  ENSG00000238217_57 (sequence is synthesized)
accaagtctcactgtgttgcccagacttgtgtccagttactgagctcaagtgatcctcctgccttagcatcccaacgtgctggg

SEQ ID NO: 1026866 - DNA, 120 bp, Artificial Sequence
  ENSG00000238217_58 (sequence is synthesized)
ctcaagtgatcctcctgccttagcatcccaacgtgctgggactacaggaatgagccaccacaagtggcttcctttccttttaaggacacatctcagaagttgcatacatctgattatatc

SEQ ID NO: 1026867 - DNA, 120 bp, Artificial Sequence
  ENSG00000238217_59 (sequence is synthesized)
ccattagctataactcagtcacatatagcacccagtagtaatagaaactgaggaatgtgcatggtttaaaaatcatgggttctgctactaaggaggaagagagaacagatattgagagac

SEQ ID NO: 1026868 - DNA, 120 bp, Artificial Sequence
  ENSG00000238217_60 (sequence is synthesized)
aaccggaagtctccatttctatggcccattctaatgtttgccagaccttgctggtcagtgaatttctattttcatttaaattggtttttcatactccagcatatttgttcctattgagtt

SEQ ID NO: 1026869 - DNA, 120 bp, Artificial Sequence
  ENSG00000238217_61 (sequence is synthesized)
ctcaataaatatcaatagattccatttttaatgtagcaaaatataagttccaagctctgggaggtttcatatatattatatataatcaaaaatgttgggggccatttttatataaaacat

SEQ ID NO: 1026870 - DNA, 120 bp, Artificial Sequence
  ENSG00000238217_62 (sequence is synthesized)
aatggtctccaacttttttgatcatgaaccacaatcaatacagtttaatcccccagtatatttacacttatttatcaatatgctttataaaatgtacccctatattaatatattatatat

SEQ ID NO: 1026871 - DNA, 120 bp, Artificial Sequence
  ENSG00000238217_63 (sequence is synthesized)
aaagcattcgccatctagagagacacagagatgaggagcccaagagatgaaactggagagctcctaaaacccaggaggctcttaaaactcctctaccaacatctcccctccatgaaaaaa

SEQ ID NO: 1026872 - DNA, 120 bp, Artificial Sequence
  ENSG00000238217_64 (sequence is synthesized)
ggtaggtgggatcagctggtttgactgccgttacttaccccattaaggagattaaactaggggactttcaagcaaggggaataacctgatcagctgtttatgttagcagaacatctccag

SEQ ID NO: 1026873 - DNA, 120 bp, Artificial Sequence
  ENSG00000238217_65 (sequence is synthesized)
gctcattgtggtcatgagttacagggccctggagaagcgtgttgaggtactacggagtcttgatttcaatgtgccatgtgtgtactatgtgtgcttctatataacatgtatgtagacttg

SEQ ID NO: 1026874 - DNA, 120 bp, Artificial Sequence
  ENSG00000238217_66 (sequence is synthesized)
gaagcttttcaaacgaagctatagctggactagtcatgttacatttccctaaggccaaaacctaaaattgacagctttcactttgtgttacagaataaaaccaagcaatcaggactaggc

SEQ ID NO: 1026875 - DNA, 120 bp, Artificial Sequence
  ENSG00000238217_67 (sequence is synthesized)
agacccctgccacacagctacttgctgatatcaattacttagcctaattatcttgacaaagtatactattcatttaaatctttcattttctgagaccataataacaacagggactacaga

SEQ ID NO: 1026876 - DNA, 120 bp, Artificial Sequence
  ENSG00000238217_68 (sequence is synthesized)
aaaaagtgatcatgccatctaggaataactaatatataagatgttgagttttggtcagagtccagcatatatccaaggccttaagactaagaagatttgaaaagtagtttagaggaagtt

SEQ ID NO: 1026877 - DNA, 120 bp, Artificial Sequence
  ENSG00000238217_69 (sequence is synthesized)
gaaaatatagctttatgaagagagagcattgcctaagagagatggtgggctctaaaaatgaaattctgaccatgttatgataaataaatgtggaaataaggacatgagtaagactgccca

SEQ ID NO: 1026878 - DNA, 120 bp, Artificial Sequence
  ENSG00000238217_70 (sequence is synthesized)
gaaatcctctgatgagtttagattttgaaagaatacatatataaagcaaggaaggtcatataaccaaggtcacaaattgtgaaatgtctaagaaaattgtcagaatcgttaatgtgctca

SEQ ID NO: 1026879 - DNA, 120 bp, Artificial Sequence
  ENSG00000238217_71 (sequence is synthesized)
atcactgatgtgaacaagaaagtaaaatgtacaatactggagatgacagtacaatgctaatagatgagagaaacagttccattgaggaaaattattttcaaaacttaaacgtcaagtatg

SEQ ID NO: 1026880 - DNA, 120 bp, Artificial Sequence
  ENSG00000238217_72 (sequence is synthesized)
ggttaaaggggacacaaatttctagaaaagggagggctgcttaaatgaatcctaccctcatttccagaggaatctaaaggaactcctaggcatgattgtgaggtaaccattgaatcgagg

SEQ ID NO: 1026881 - DNA, 120 bp, Artificial Sequence
  ENSG00000238217_73 (sequence is synthesized)
acaaacagaaatatgtcgaaagacaaacaaaacagagtcgctttgggtttacaaaaggttggagattgggggtttggaagcaaattctagaaacagtaaataaataagtagacatgatgt

SEQ ID NO: 1026882 - DNA, 120 bp, Artificial Sequence
  ENSG00000238217_74 (sequence is synthesized)
tattatattgcaaaattccagagaggacaataaaagaggtggcttgtggacctcacaaaacaaaatgatgatcagtaggatctagtgagtattcataatgaaagtccattccaaatgggc

SEQ ID NO: 1026883 - DNA, 120 bp, Artificial Sequence
  ENSG00000238217_75 (sequence is synthesized)
tttcagtaaaatagatagattatctttttagtaaggtaaatagatgagcagatgtgggcacatgccataaccatggcacagaagaactgtaagatagcccccttagaaacttgaaatgca

SEQ ID NO: 1026884 - DNA, 120 bp, Artificial Sequence
  ENSG00000238217_76 (sequence is synthesized)
gttgttaaaggtatgccatgcaggactttctttcctttttaaagaataatttaattttttattatataagccatattttttaagtacgtggacacagtatttccttgactgtaagatgta

SEQ ID NO: 1026885 - DNA, 120 bp, Artificial Sequence
  ENSG00000238217_77 (sequence is synthesized)
tctattaatttaaatatagctttttgggttgtaaaaaatatttatattaagtgtatgatttatcctcattttggaatcactgaaatataaaaaaaaacaaccttagaattgaggaaatac

SEQ ID NO: 1026886 - DNA, 120 bp, Artificial Sequence
  ENSG00000238217_78 (sequence is synthesized)
agaattgaggaaatacatacacatatacaagaacacatttacagagttgaaatcatacattttgttcagttggcattttattgtagttcttgatccccatgtcataaaaaactctataaa

SEQ ID NO: 1026887 - DNA, 120 bp, Artificial Sequence
  ENSG00000238217_79 (sequence is synthesized)
tataactcatttaattactactttattctgaaattttttattgtttttcttataaaattgcaatttacttttcaaaaatatttatctgcatttctgattatttccttggggtacatttcc

SEQ ID NO: 1026888 - DNA, 120 bp, Artificial Sequence
  ENSG00000238217_80 (sequence is synthesized)
tctgattatttccttggggtacatttccagaagtggaatttttgaatgaaacaatacattatgttttaaagattcttgatacacacagtaccaaactacttctcagaaagcttgtaccaa

SEQ ID NO: 1026889 - DNA, 120 bp, Artificial Sequence
  ENSG00000238217_81 (sequence is synthesized)
ttcacactgccgctagcacttgtttgaatgaggacccatcttaccggcattcaaaatgttctttccttttcaaattctttgttgatttagcagggggagaaaaatctaattttaatttgg

SEQ ID NO: 1026890 - DNA, 120 bp, Artificial Sequence
  ENSG00000238217_82 (sequence is synthesized)
ttggtttgaatttcattaactacatatttaatattgaatatttttatatgaacattattgtttatggttcttctgtgaattgtctgttcttcccttttattcatttttctaatgataatt

SEQ ID NO: 1026891 - DNA, 120 bp, Artificial Sequence
  ENSG00000238217_83 (sequence is synthesized)
taaatgctactactttcaaatacaccaaggaataaaagaatttatatttaaagtgtttggagagtaaacattttacagtatttataacattccctaagtaaataaagcatttaaaaatta

SEQ ID NO: 1026892 - DNA, 120 bp, Artificial Sequence
  ENSG00000238217_84 (sequence is synthesized)
attgacatttccttaaaattaatcatgaataagattcagaccttccaaatcttctcaatataatttctactcttatttagcttctaatttttgctacataattttttcgtgatgacatca

SEQ ID NO: 1026893 - DNA, 120 bp, Artificial Sequence
  ENSG00000238217_85 (sequence is synthesized)
ttttttgttttaatttaattggcaaattttgttttgcacctactatatgctaggcatgtactaaaacaattggaatacagaaacaaactcatacagtccatgcgttcacaggaaattcac

SEQ ID NO: 1026894 - DNA, 120 bp, Artificial Sequence
  ENSG00000238217_86 (sequence is synthesized)
agttgaatttataattccatgtgacaactgcaaaattagatgcataaacaagacattgagatgaaatagatataagaaagaaaaataacctgataaaatcatatcatagagtgtcattct

SEQ ID NO: 1026895 - DNA, 120 bp, Artificial Sequence
  ENSG00000238217_87 (sequence is synthesized)
tttttcagacttgcaaaatgagacttttgattatgtctaatttaaatgtgccataaaccatattgttaatattaatatggaaagtattccttaatatagtccttcagggttaaagtcaga

SEQ ID NO: 1026896 - DNA, 120 bp, Artificial Sequence
  ENSG00000238217_88 (sequence is synthesized)
caaagattttccaagttaaaacacaaaaacataagcttaggatcccagtgtagaaataaattactgagatgtcatttgattcacccccatgcatccaggtagatttctcagcccagccca

SEQ ID NO: 1026897 - DNA, 120 bp, Artificial Sequence
  ENSG00000238217_89 (sequence is synthesized)
aaagcattcgccatctagagagacacagagatgaggagcccaagagatgaaactggagagggtcagcccaagaagcaggaagcagcagtgcagggagaaaagagtactggatttagagtc

SEQ ID NO: 1026898 - DNA, 120 bp, Artificial Sequence
  ENSG00000238212_0 (sequence is synthesized)
acagcggtaacttggttgggtgttcttctctgctgtgtaggctttgttcttttgctctttgcagtaaatgttgctgctgctgactgttgggtcccagccgtctttaaaagctattacact

SEQ ID NO: 1026899 - DNA, 89 bp, Artificial Sequence
  ENSG00000238212_1 (sequence is synthesized)
gtgttccgaaggaacaaactctggacacaccaaatgtaagaattgtaacactcaccgcgacggtccgtggcgtccaccctcgcagcttc

SEQ ID NO: 1026900 - DNA, 120 bp, Artificial Sequence
  ENSG00000238212_2 (sequence is synthesized)
actcaccgcgacggtccgtggcgtccaccctcgcagcttctttcttgaagtcgccgagaccaagagcgcaccgaaaggaaccaattgtggacacatccgttttgttaatttcccttggaa

SEQ ID NO: 1026901 - DNA, 120 bp, Artificial Sequence
  ENSG00000238212_3 (sequence is synthesized)
agttgattaggtcatgaggatggagcctggtgaatgggatcagtgaaagaggcctgatgtgagggtgacacaggcttaaactgagacaatccagcatggaacacttgcaggaagtactag

SEQ ID NO: 1026902 - DNA, 120 bp, Artificial Sequence
  ENSG00000238212_4 (sequence is synthesized)
gaaagtgcattttctttccatgagggttgccaaactggaagcatgttagctaaagctacctgtagtcattttgtggccacattgggtgagattgtctgagaaagcaaaccaactgaagca

SEQ ID NO: 1026903 - DNA, 120 bp, Artificial Sequence
  ENSG00000238212_5 (sequence is synthesized)
gagcagagaagatactctaccaacctagttggagccctggttccagccttgcctgaagctaaatgcacctctatgcttcctttttactgacccaataaatttccctatttgtttaaacaa

SEQ ID NO: 1026904 - DNA, 120 bp, Artificial Sequence
  ENSG00000238212_6 (sequence is synthesized)
actgtgcagtgaggcagcaactcacatctccagctgttggactggtcctgccagcgacgtctgctcagtagaacaagcagcacttcccccagctcagcactgtctcatttctgagactga

SEQ ID NO: 1026905 - DNA, 120 bp, Artificial Sequence
  ENSG00000238212_7 (sequence is synthesized)
acaccccgtggtcactctacatggatgggttaatttcccttggaaaagtattgatgatcaagtgatgctagcagcaacagtgttaaaggctttaacgcttttaaaggtgagacttttggg

SEQ ID NO: 1026906 - DNA, 120 bp, Artificial Sequence
  ENSG00000238212_8 (sequence is synthesized)
aaatggctaatttcaggactgaggcaggaaaaatacaagggaattcaatagatacctaacaccacgagagtgcaaccagcaaaatacagatttttggaagttctgtaggatgaaggccct

SEQ ID NO: 1026907 - DNA, 120 bp, Artificial Sequence
  ENSG00000238212_9 (sequence is synthesized)
tgtgtcctcaatacgcaactgcaaggaaaaaagaagatagaaggataatgtattgattaaaagacacttaagagacataatagccatttaaaatataaataaaaataattgccctcacaa

SEQ ID NO: 1026908 - DNA, 120 bp, Artificial Sequence
  ENSG00000238212_10 (sequence is synthesized)
atacccagggcctggtctcctatggcaggtggcacttaagttctctgcagaggcagacattttttgttttggagtctgcaagaatatctagccatcacttcttccccacaagaacaatgg

SEQ ID NO: 1026909 - DNA, 120 bp, Artificial Sequence
  ENSG00000238212_11 (sequence is synthesized)
gtgatgcactatgttgtacctggatctaatgatgaatgaaatggttgtaacatttggctttagaagttgtttcaaatgcaataaatcatacctggcacacaagcaggttgttacaaaaca

SEQ ID NO: 1026910 - DNA, 120 bp, Artificial Sequence
  ENSG00000238212_12 (sequence is synthesized)
tgaggatggagcctggtgaatgggatcagtgaaagaggcctgatgtgagatgtctttagctatgtcaaagaggcagacagtgcaaagcccatcactcaagaaacctctccacaaccagag

SEQ ID NO: 1026911 - DNA, 120 bp, Artificial Sequence
  ENSG00000238212_13 (sequence is synthesized)
agacaatgggtaccaccatcaaaagcagcagattcaagtcagcaaatgtttgagcaagcagggcattatccaatcagccttacctatttgggattcaagcttgaaaggcccctcagaaag

SEQ ID NO: 1026912 - DNA, 120 bp, Artificial Sequence
  ENSG00000238212_14 (sequence is synthesized)
acaataaacagtttccttgacacatcgaatgaagtccaaaccaaacaaattcctcgctaggcaagatctggagtctgacactttttctttgattgggacatacaaaaaaaagtgtcctca

SEQ ID NO: 1026913 - DNA, 120 bp, Artificial Sequence
  ENSG00000238212_15 (sequence is synthesized)
tgattggtaccgaaaaaataacggattcctttctcattgggcccaccttttcctaaatgtcatttagttcgtttttatctatttatgaacttttattccttttgctgttaaaaatgaaca

SEQ ID NO: 1026914 - DNA, 120 bp, Artificial Sequence
  ENSG00000238212_16 (sequence is synthesized)
acaaagtaataatgcaccatcaagaggaaaaactaagttcgcactctggcttctcatacgtgtgcaagtgtataaaaccatgttttcagatggattttaaaatggtcatggagctcttct

SEQ ID NO: 1026915 - DNA, 120 bp, Artificial Sequence
  ENSG00000238212_17 (sequence is synthesized)
ttgaatatcaatattcacgtgctgtgttttcatagttccttggtatttatatgacggctctctaatgttttaaagcaattcattttgtcaggaatgtaagtggtttccaaatttccactc

SEQ ID NO: 1026916 - DNA, 120 bp, Artificial Sequence
  ENSG00000238212_18 (sequence is synthesized)
tccaaaccgcactgcacggcagtgaacattcctataactaaatctatgctcatgtccttacagttaaatttcctgcactggaattactgggttaggataagaacattttcaagactgttg

SEQ ID NO: 1026917 - DNA, 120 bp, Artificial Sequence
  ENSG00000238212_19 (sequence is synthesized)
aaatatttgccacactttcctctagataagttgttccgattttcgccccattggcaatacgtactctttgaagtattatactgttgaaaatatgtgtcaaataaatgaattctcaatgtt

SEQ ID NO: 1026918 - DNA, 120 bp, Artificial Sequence
  ENSG00000238212_20 (sequence is synthesized)
ggccctgattaggttattgacattggccacatcagtgtcacagagtttcttcacagcctgtttgatctggcacttgttggctttggcatccacagtgaacacaggcatgtggttgtcttc

SEQ ID NO: 1026919 - DNA, 120 bp, Artificial Sequence
  ENSG00000238212_21 (sequence is synthesized)
tgtcttcatggtggactcggcagttgggagcctgacgatggatggcatgatggtcaagcttgtttctcctgggggtgctcttctgaagacatttgagctgcctctggaaccacagtgtct

SEQ ID NO: 1026920 - DNA, 120 bp, Artificial Sequence
  ENSG00000238212_22 (sequence is synthesized)
tgggtcccagaaggaaactccaaggaacagaggagctcagagaagactagaactctgtattccgtacccgtaaacaatttgtataagcaaaataaaactttttaactttcctcatcccaa

SEQ ID NO: 1026921 - DNA, 120 bp, Artificial Sequence
  ENSG00000238212_23 (sequence is synthesized)
acaagtttctaaacttgtcaggctaagaaccaaaccctggaccagagtaaattcacccaaaaactccacctgacaaggccttgtggatgactgacattcctgcatgcccctgacaatgct

SEQ ID NO: 1026922 - DNA, 120 bp, Artificial Sequence
  ENSG00000238212_24 (sequence is synthesized)
ccaacctcacccaacattttctcctttgcgtgtctacagatgccttatgtttgctatgggtcagatgtctgtcattatggaaactctcagtaaattcaagttgacttgaacttgactcaa

SEQ ID NO: 1026923 - DNA, 120 bp, Artificial Sequence
  ENSG00000235620_0 (sequence is synthesized)
taaaactgaggctcagaacagctggtagtttgtgaagctaagacttgaaatcccacgtctgggatgggttcttactgaaacagacacctccagtcctgctgctgtgcctgacatttgctg

SEQ ID NO: 1026924 - DNA, 120 bp, Artificial Sequence
  ENSG00000235620_1 (sequence is synthesized)
cttctctacctgggataaggcactggagttagaagcatggagtccacggatgagaagagtaagtttcagaaatccctttcaggaccccatcgtccttccaagatggagctgcttagatct

SEQ ID NO: 1026925 - DNA, 120 bp, Artificial Sequence
  ENSG00000235620_2 (sequence is synthesized)
cctccctatccttgctgtacatgcccaagattttgtgaacatgatgtgtgcgatttcaagagcaggatctggagcttccttctggtatctagactcatgatagatgctcaatacatgttg

SEQ ID NO: 1026926 - DNA, 120 bp, Artificial Sequence
  ENSG00000235621_0 (sequence is synthesized)
acctccctgctgttcctcacccaggatcaccaaggtctctcctaccccggggcctgtgcacctgctgtgcctctgcttggggtgctcttcccagggcttgcccacctcctcagagaggcc

SEQ ID NO: 1026927 - DNA, 120 bp, Artificial Sequence
  ENSG00000235621_1 (sequence is synthesized)
tcctgacccctgacacggccttgcccttcacctctatcgtcctttagaacagcccccacctcccgcacatcatgcagttgcaggttcaatggctactgcttgtcctccagactcgcctca

SEQ ID NO: 1026928 - DNA, 120 bp, Artificial Sequence
  ENSG00000235621_2 (sequence is synthesized)
tcactcctcagatgattctcgaaggataacacacaggccagtgggcagccctaggccagggggattaccaagacatgaagactttctttctgtctcagcaaccttcatgcttggtcaagc

SEQ ID NO: 1026929 - DNA, 120 bp, Artificial Sequence
  ENSG00000235621_3 (sequence is synthesized)
aaaggtgttgcttaagtcaaacccagggcaggggagagcagttgaagcaaagtgagtctttggaggccctgtggttgtggggtctggtgtggagacagtgagaacggaaaaggtgggaga

SEQ ID NO: 1026930 - DNA, 120 bp, Artificial Sequence
  ENSG00000235621_4 (sequence is synthesized)
ggagcagtcaacccgtgaatggccccattcagacgcctttacctggaagacgtggcaggtctactggggttcatcccatctgagccaggcctggcttttcttggctgcaagctgagagct

SEQ ID NO: 1026931 - DNA, 120 bp, Artificial Sequence
  ENSG00000235621_5 (sequence is synthesized)
atcttccttgagccagtgacaatcagaggcctatttctttcatgacggaaggcaggagaacaagcaggcaagaccagctgtgctagcacatggcacccctttcccacatcacacctgcta

SEQ ID NO: 1026932 - DNA, 120 bp, Artificial Sequence
  ENSG00000235621_6 (sequence is synthesized)
acatcccattgttcaaagcaagtaacacaaccaaacccaatatcaacaggacaagaaaacagactccacctctaggtgcacaaactacagagtcacggacagagaacacagatctaggga

SEQ ID NO: 1026933 - DNA, 120 bp, Artificial Sequence
  ENSG00000235621_7 (sequence is synthesized)
aggaagctggagaatgagaacaatgaccctcaataacacaacctcccacaggtttccaaatccccaacctgagcatatttccaaggaaacggaatcatgggttcagggttttagagcaag

SEQ ID NO: 1026934 - DNA, 120 bp, Artificial Sequence
  ENSG00000235621_8 (sequence is synthesized)
caatttctgctctcccagcttagtttccatacccttaacacaggggcaatgacgtcgcatcgaatcatatcttataagtctgtgatgatgtttcaacaactgaacgccagaaaagtgctt

SEQ ID NO: 1026935 - DNA, 120 bp, Artificial Sequence
  ENSG00000235621_9 (sequence is synthesized)
agagcaaggccaggtaggagggacagaagccaataataatgagtagcatcactgttaacccgcaaaattctgggaatttcctcgaaagtctaattagagaatcatgtccccaacaattaa

SEQ ID NO: 1026936 - DNA, 120 bp, Artificial Sequence
  ENSG00000235621_10 (sequence is synthesized)
atgatactgaggtactagggagctgtgaagcatatgctgtgagacaacacagctgagcagcccagccagagccccctggggaagccgtcagaggtcagcagctcccgtctccttccctct

SEQ ID NO: 1026937 - DNA, 120 bp, Artificial Sequence
  ENSG00000235621_11 (sequence is synthesized)
tgactcctaatagtctaggacagaactttgccctcccttcttcctgtcccaaagatgcacaatgataatgatgctgatggttatttagtaagaaacttcccaacaggaacagtcatcagg

SEQ ID NO: 1026938 - DNA, 120 bp, Artificial Sequence
  ENSG00000235621_12 (sequence is synthesized)
agggggcacagttggattctctccagtgaagatgtcaggatggacagaaatgtcagcgtaatccaaagaggacacaaacacccctgctattttcttgtcaccaggaaaaggccagctcta

SEQ ID NO: 1026939 - DNA, 120 bp, Artificial Sequence
  ENSG00000235621_13 (sequence is synthesized)
aggcctatttctttcatgacggaaggcaggagaacaagcagctcccggctcacccacccagcagctcagcacctgcgaaatccgtctcccgatgcacacttgctaaccgcgtgggtgtga

SEQ ID NO: 1026940 - DNA, 120 bp, Artificial Sequence
  ENSG00000235621_14 (sequence is synthesized)
gcacaacgatgggaaacagcggaagtccccggagtgcagactcaggagtgaacctgcctgaagagtggcgtctaacgcacacactgtggtcagctccaccccactatgggtcccgggaat

SEQ ID NO: 1026941 - DNA, 120 bp, Artificial Sequence
  ENSG00000235621_15 (sequence is synthesized)
aggagcaagtatgtattttgcttgcagggcaggtgtttcatccacattattgcaggaacagatgaatttaattaaaagaacaccacagtgggcacctcttccagggatgtctccctctaa

SEQ ID NO: 1026942 - DNA, 120 bp, Artificial Sequence
  ENSG00000235621_16 (sequence is synthesized)
gaacatgacactgagatgatcaaggttctaaaagggcgatcaaattactctccgaaaatgaaactgctcagacagaatgacaattaaattaataacaaccaagacaatgcccagatttca

SEQ ID NO: 1026943 - DNA, 120 bp, Artificial Sequence
  ENSG00000235621_17 (sequence is synthesized)
tctccgctcacagcccctcctgtgtgctgtatgatcaggttcttggggtggctccagatacagcaaacagtcaggattaatccacaagagtgagctgtcagcatgaggttcccctacagt

SEQ ID NO: 1026944 - DNA, 120 bp, Artificial Sequence
  ENSG00000235621_18 (sequence is synthesized)
ggagcttgccaaggtccgtgcctcccagggcacccgttccagggctaacagatgaagcatggaaatgctgtgtggagtgagctaagcagccgttctcaggagaaaacagacaaatcctcc

SEQ ID NO: 1026945 - DNA, 120 bp, Artificial Sequence
  ENSG00000235621_19 (sequence is synthesized)
tgcatcctggcaaaccagctttgtggcctgttttatgtcatctttgctgagctccaccgggtcacccctcctgttggctttgtgatactgacatttcaggcactggcacagatacattgg

SEQ ID NO: 1026946 - DNA, 120 bp, Artificial Sequence
  ENSG00000235621_20 (sequence is synthesized)
ccttcctggctgggatttcacggacggagtgagcagtgctggcttggaggagccgtggcggcacagggcctgtgctctcagctgatcaacgccttgatagccaggaaaggcctgtcctac

SEQ ID NO: 1026947 - DNA, 120 bp, Artificial Sequence
  ENSG00000235621_21 (sequence is synthesized)
agactcgttgttgtgactttggttttaatccagggacacaccgtggccagtggagtgtctcaacagcatctatgatcgctgtttcccagagacagcatctcagataccgatgctgaaaga

SEQ ID NO: 1026948 - DNA, 120 bp, Artificial Sequence
  ENSG00000235621_22 (sequence is synthesized)
gaaacagcagcctgtccccaagtggcaggaaatagtccattttaatggcaatttcataagtggcagatgatttttattgtaattttctggtgagctgattaagtggaggcagagtcagtt

SEQ ID NO: 1026949 - DNA, 120 bp, Artificial Sequence
  ENSG00000235621_23 (sequence is synthesized)
ctgaggcgtcaatgtctttaacaattcggggagacggaggccacgctcagcaggaacactgagtccatggaaaacaggccctgggcccgctgatgtgcataattccacgtttgcccctca

SEQ ID NO: 1026950 - DNA, 120 bp, Artificial Sequence
  ENSG00000235621_24 (sequence is synthesized)
tgtaaccaggatggtaaattacaggtgtcagataatcacgctctggagtggctacttgaggatgcgatcgaccaatttaagctccgtctgacacatgatcaatagcccgtgatgctgcat

SEQ ID NO: 1026951 - DNA, 120 bp, Artificial Sequence
  ENSG00000235621_25 (sequence is synthesized)
ggaattgcaggcacagtgtccaaacctgcagagcagtggctcccagctggggcaactttgccccccagaggacatttggcaatgtctggatatgtttgcaattgtcacaactaggaaagg

SEQ ID NO: 1026952 - DNA, 120 bp, Artificial Sequence
  ENSG00000235621_26 (sequence is synthesized)
aggtacccataggatacacaggaaagtcctcacacagttgtatcctgcccagactgtccgtagagccagggtgagatgctctgacagagccacagtgaacattgcattccatcatctggg

SEQ ID NO: 1026953 - DNA, 120 bp, Artificial Sequence
  ENSG00000235621_27 (sequence is synthesized)
tatctccaggaatgtatgtagctggatgtctggcttttcatctgggtttcacgagcctcctgcagaactgaaaccatgtgcaaatcagttctcatacttgctctcctgcctccttcctat

SEQ ID NO: 1026954 - DNA, 120 bp, Artificial Sequence
  ENSG00000235621_28 (sequence is synthesized)
tgtaattttttcttcccaccttttttattgttactagagaaatgatgaagaaaaagaataggctggagagtcactcaaaattttgttttcctcaattaaaaagaagtaatttagaagtta

SEQ ID NO: 1026955 - DNA, 120 bp, Artificial Sequence
  ENSG00000235621_29 (sequence is synthesized)
ctcaatgatgttttctttaattaaaaaaaaaagtagtttgggaaagcagaaaattaatgaagacagaaaacacaggtttcatgaaaaagttcagcatcccaggaaaggagcaaagagaag

SEQ ID NO: 1026956 - DNA, 120 bp, Artificial Sequence
  ENSG00000235621_30 (sequence is synthesized)
tctgcagatgagagttgctcagtgtcaggactcagaaaacaataccccaagataatgttcaaacctgagtgctttgaacaaaggatattgaaagacctcagaagagggcctcagaactca

SEQ ID NO: 1026957 - DNA, 120 bp, Artificial Sequence
  ENSG00000235621_31 (sequence is synthesized)
catgtctctctgaccttctcctgtctctccttcacttccaaagcatgatctttggccaggggatctctctgggattcccttatctgcctgagggatgtacttccaaaagaaatgtgactg

SEQ ID NO: 1026958 - DNA, 120 bp, Artificial Sequence
  ENSG00000235621_32 (sequence is synthesized)
gcatgacctcctccctaggaatctcttcaaacagccgggaaagactggtcacctgagaggagattggaagtcctcactgcactcagaaaggctgttgtccattcttctagagactttatc

SEQ ID NO: 1026959 - DNA, 120 bp, Artificial Sequence
  ENSG00000235621_33 (sequence is synthesized)
tgaataacaaggcaacttttgtttaccattcagttcctcccctttcctttctaacttgtcaccacctcccccaaaagcctcaagcctccactcctacaagctataaagacttcaaccatc

SEQ ID NO: 1026960 - DNA, 120 bp, Artificial Sequence
  ENSG00000235621_34 (sequence is synthesized)
agttcagcaggccacccaaagtgaagggactcctttgggggtctttgttgttatcaattatttattgagccctgatgtgttcctggcgccaccaagaccgaaaggagacagggtccctgc

SEQ ID NO: 1026961 - DNA, 120 bp, Artificial Sequence
  ENSG00000235621_35 (sequence is synthesized)
gcaggtgagcagcaagtgagcgggagagtgggagagagaatgaggaagtgagggagagaatggatgagtgagcacctgcttggatgagccgacacccaccagggatcatgagaacaccga

SEQ ID NO: 1026962 - DNA, 69 bp, Artificial Sequence
  ENSG00000235621_36 (sequence is synthesized)
gactctggctctggctctatatctaaggggtcaactgcaccattgtcaccacaatgccattttctggaa

SEQ ID NO: 1026963 - DNA, 120 bp, Artificial Sequence
  ENSG00000235621_37 (sequence is synthesized)
gtcaactgcaccattgtcaccacaatgccattttctggaaggaaaagctctatctgacttcacagtccttaggagccttgttatggaacctggtggacaaaccattttaactggacatga

SEQ ID NO: 1026964 - DNA, 120 bp, Artificial Sequence
  ENSG00000235621_38 (sequence is synthesized)
tctcagcagcctccccaggcctgtgcccctgggtcctgacatgagagctgatgaccatttattatcactggtgatgtcaagaggtggcttggaatggttgtaaccgtctgttcattttca

SEQ ID NO: 1026965 - DNA, 120 bp, Artificial Sequence
  ENSG00000235621_39 (sequence is synthesized)
tctcacctccacatccaccacaaatacacagtgacgttgctctgcaaaagcagcagcacacagccccccagaagccccttccaggtaattgccaaaagtttcttccatatggaaattctg

SEQ ID NO: 1026966 - DNA, 120 bp, Artificial Sequence
  ENSG00000235621_40 (sequence is synthesized)
gtagaaaagaaactgacataatggtagccaaacaggctttctctgcattagaagagctaaatatacccttgcatgtctgattagagaaaaacaaaacaaacaagcaaaagctcctccgat

SEQ ID NO: 1026967 - DNA, 120 bp, Artificial Sequence
  ENSG00000235621_41 (sequence is synthesized)
ttgggcctgccccttgggaacaggggtcaacatgatgcggtgggcagggacccatcatctgacaagaagatgccctgagggcaatggaaagcacggtgtgtcgggagaagatggccctga

SEQ ID NO: 1026968 - DNA, 120 bp, Artificial Sequence
  ENSG00000235621_42 (sequence is synthesized)
gggcaggtgcattcaggtgcttgtgaacgctgcagcatgttgggtctctagttttgtatcagtcagctactctcacaacaatgctgtgtaacaaaccaccccaaactcagttgcaaacaa

SEQ ID NO: 1026969 - DNA, 120 bp, Artificial Sequence
  ENSG00000235621_43 (sequence is synthesized)
tacttttattatagttttattcttaaggctgtttatttattttctgatgtaaaaggtaatagaaagtttataaactattcctagaatatagacaaaaaataaaattcgacttcgtccagc

SEQ ID NO: 1026970 - DNA, 120 bp, Artificial Sequence
  ENSG00000235625_0 (sequence is synthesized)
gacagcagcgggagaagaaaagggcctccctgggatgaccttccaggagacaactgctacaagaaagcctatgtacagttaaaagagcacaactgtccctgatcacatggaagccttctc

SEQ ID NO: 1026971 - DNA, 120 bp, Artificial Sequence
  ENSG00000235625_1 (sequence is synthesized)
gtggaacagtggctaaaacaacatgtaaagcattgatcctagtgcctggtaagaggaagccttcctatactttacttccccagcctcttcagtggcagtagtaaaagatttcaaatcctt

SEQ ID NO: 1026972 - DNA, 120 bp, Artificial Sequence
  ENSG00000235628_0 (sequence is synthesized)
ggcaaagatcatggggaccatttctgagtttgtctatccaaggaaggggactgtgctgaggacaccggagtattagtgcctccctgggtaccatgagagggggcaacagaggagtcagac

SEQ ID NO: 1026973 - DNA, 120 bp, Artificial Sequence
  ENSG00000235628_1 (sequence is synthesized)
acacatgcacaaatacagaaaagcacagctgagactgagaaggagcaagaggaggagagtcagggaggctgagaggctaaacaaccaagaaagcagagttcagagaagttgactgcactg

SEQ ID NO: 1026974 - DNA, 120 bp, Artificial Sequence
  ENSG00000235628_2 (sequence is synthesized)
catgcctctggtgtttttcaaggctatattttcatattcatcaggccctcaccgactggggagaccagaatgaaaaagtcattatgtgtgtcttcaaggatctcacaatatcagttcaaa

SEQ ID NO: 1026975 - DNA, 120 bp, Artificial Sequence
  ENSG00000235628_3 (sequence is synthesized)
cataaatgtaagagggtgaaagtgttgaaagcatggttttctcttcccccatgaggatggccttgtcctgaaaatccaccacttgggaattggccagctctgactaggttgagatctcag

SEQ ID NO: 1026976 - DNA, 120 bp, Artificial Sequence
  ENSG00000235628_4 (sequence is synthesized)
ggtctgaggaggctgtcaagcctctgcctcaagttcttgagcataatcccaacatctgggacattagcaaccttcctgtatgccaagaaagtagctggattagccagagtctgtcttgac

SEQ ID NO: 1026977 - DNA, 120 bp, Artificial Sequence
  ENSG00000235629_0 (sequence is synthesized)
tgagaatttagcttcctctgcacgatgcctgtcagggtccttggttgtcatctccatcttagcgatgcagtcttttaggtgctttaaataaagggggagagaggaaatcttctgaagcag

SEQ ID NO: 1026978 - DNA, 120 bp, Artificial Sequence
  ENSG00000235629_1 (sequence is synthesized)
aggacatgattacaggctggactcaccgactgtagcctgtgcagctattgtaatgttttaatcagtgattaagtcaagaggtttaatttagtaccgggctccgttaagcttgtgaaaatg

SEQ ID NO: 1026979 - DNA, 120 bp, Artificial Sequence
  ENSG00000235629_2 (sequence is synthesized)
gttttctgcctcctcaaactaaaaatgtgtctctcccccatgtgtccagcccgaagcatcttaacctttgttctatcttcaacaccgctggctctaacaaattactcagcagtgaatgaa

SEQ ID NO: 1026980 - DNA, 120 bp, Artificial Sequence
  ENSG00000233492_0 (sequence is synthesized)
ggagttgtctgtggccagatgttgagcacaccttttctcttggtccacgtctgcagaactggaaggtcatttgtatgcagggccaaggtttttacttggaaaagaaaccgcacacttcga

SEQ ID NO: 1026981 - DNA, 120 bp, Artificial Sequence
  ENSG00000233492_1 (sequence is synthesized)
atcacagaagtgtttacatagggcaggctggaggggacgagagagaccttggttgatggtgactcagttcataaacacagcatcaatattgatagactccaaaagatgcatatgcaggac

SEQ ID NO: 1026982 - DNA, 120 bp, Artificial Sequence
  ENSG00000233492_2 (sequence is synthesized)
atctctcgggatttgcagggaccgactgttcagagagaagaagttgctcattgccaactctgaggtgcagtggcagttctcttcaacaggggcctgttttccagaatccaaagaagggta

SEQ ID NO: 1026983 - DNA, 120 bp, Artificial Sequence
  ENSG00000233492_3 (sequence is synthesized)
taagtacagcatcttgcaagtcatgcagcaaaacagcacaaaagggactaagacacgctcattcctgcttgttactacagcatggctcctacgaagagcgccaaaacctgcagggaagtt

SEQ ID NO: 1026984 - DNA, 120 bp, Artificial Sequence
  ENSG00000233492_4 (sequence is synthesized)
gtgctttggatgaacctcttacttcttgggcatggaagtcctttcaccaagaacagagacagcccttgccaaatctaaactcaccgggcctatgttatttcaggtgaaaacactgtgttt

SEQ ID NO: 1026985 - DNA, 120 bp, Artificial Sequence
  ENSG00000233492_5 (sequence is synthesized)
gttccaggcacaaacacatacaggtgactcatcaggttctaagatggaacataatgacacaagagtaccaggcacaaaaccatgctctcaagccactcagaaggcactttagatgatgaa

SEQ ID NO: 1026986 - DNA, 120 bp, Artificial Sequence
  ENSG00000233492_6 (sequence is synthesized)
aaccaaacagaagctgagtgaccaacctccccacccccatcacactcagcaggctgagcagagtcacagaacacacacacctgggtggaacagatggcaccccggtgctattgttatttt

SEQ ID NO: 1026987 - DNA, 120 bp, Artificial Sequence
  ENSG00000233492_7 (sequence is synthesized)
gggattgtgtctcccaagaaaggattccaccatctcggtggagttaagtatagcttctccacacaggggaagtgaggacagctgagattttccaggagaagtgatttagattatataaag

SEQ ID NO: 1026988 - DNA, 120 bp, Artificial Sequence
  ENSG00000233492_8 (sequence is synthesized)
acccttaatgaattatttccaggcattgtctgcagtgtcatattgcttgagctttccgttagcagcttcctggaaaagaacttctgcttgtctgggtcttgagtttctgttgcttacagc

SEQ ID NO: 1026989 - DNA, 120 bp, Artificial Sequence
  ENSG00000233492_9 (sequence is synthesized)
agccagagttgccatctgtgcacatatagagcatatattttaaattttgacatttccaaaatatgactgttttgtaaaattatttggataaaatatgtctgatgggaaagcacacagcct

SEQ ID NO: 1026990 - DNA, 120 bp, Artificial Sequence
  ENSG00000233492_10 (sequence is synthesized)
gtgtgtgagaacttgggaagcaaactgacgagaggctcctggcaggttgtattaattcttaacatgcaaaacagccacatgttggaagctaatactggagcaaggctgaaatctattatt

SEQ ID NO: 1026991 - DNA, 120 bp, Artificial Sequence
  ENSG00000233492_11 (sequence is synthesized)
atttcagagtattagcattgtttggtgtagaataacttaaccgtaatgacacattgagaaatcaatatgacacgagagccagtgcgcattttcttaaagatgaactggctgatggtttta

SEQ ID NO: 1026992 - DNA, 120 bp, Artificial Sequence
  ENSG00000233492_12 (sequence is synthesized)
gcaatgttttaacagaaggaataagcaaatttcaaaagtaaatgaatccgaagctgataagcaagtaatacatttgtagtacatgaatgattttgtttgagtttgcgattatcaccatat

SEQ ID NO: 1026993 - DNA, 120 bp, Artificial Sequence
  ENSG00000233492_13 (sequence is synthesized)
tgctctagaaatatatagtacggccttttactttgtgttccaattactccacatgtcctatagttgtatgcattttatatatttgtcattcataagcaaggaactcaaattttctgttct

SEQ ID NO: 1026994 - DNA, 120 bp, Artificial Sequence
  ENSG00000233492_14 (sequence is synthesized)
gttcgttcgagcaggacacggcagatgcttctttcttgttttatggagggtggtggtggattactcttcccatcttgtgcttttgaggatgctccaaaaactttaaaaatttatccatgt

SEQ ID NO: 1026995 - DNA, 120 bp, Artificial Sequence
  ENSG00000233492_15 (sequence is synthesized)
tccctttcacacagtgggtgtttctttcctcaggcagaaggaaaacttaccaatggtttttgaatatgataggaaagaccacctgcagggagagagtgggacccctgctctctgcctctg

SEQ ID NO: 1026996 - DNA, 120 bp, Artificial Sequence
  ENSG00000269091_0 (sequence is synthesized)
agacgcagctgcgtggatcgccttctccaccccacatactgaagccagaataagccacgacttcgtgtgctccacgcgagggccgcctgacgccagagtttctcccgcatctgccatcag

SEQ ID NO: 1026997 - DNA, 120 bp, Artificial Sequence
  ENSG00000269091_1 (sequence is synthesized)
aggaccgtcgccctcaggagcccgagctcccgcggtactctgggaaggcttcagagcagtagtgcatagtgtatggatactacccgcccccgagcctagcaaattgcctggtgagcggcc

SEQ ID NO: 1026998 - DNA, 120 bp, Artificial Sequence
  ENSG00000269091_2 (sequence is synthesized)
ccatccttggataacatctctataatctcctgggagaatccttcttcgaagaaatcctccatcagaggagagttcttggtctcagtcacatctgaaagagcaagtgcaaatgtctcctgt

SEQ ID NO: 1026999 - DNA, 120 bp, Artificial Sequence
  ENSG00000269091_3 (sequence is synthesized)
catctgaaagagcaagtgcaaatgtctcctgttcactaaggactgagtcttgccctgttgcccaggctgaagtgctgcacgatctcagctcaacgcaacctctgcctcctgggttcaagt

SEQ ID NO: 1027000 - DNA, 120 bp, Artificial Sequence
  ENSG00000269091_4 (sequence is synthesized)
tggaactggcatcacagaaaacagacagagcccattcccaggagggtcaagaagggagttgggaaaccatagggttcaacgaggagggagattctaccattaccttcacacctaagtgac

SEQ ID NO: 1027001 - DNA, 120 bp, Artificial Sequence
  ENSG00000269091_5 (sequence is synthesized)
tgaccaagttccctaaaaaatcgcctggactcacctgcttctactctccactctatcctgtactgtcaccaaaatcttcctcctcatatcctgcatcctctatcccagacaacaccccgc

SEQ ID NO: 1027002 - DNA, 120 bp, Artificial Sequence
  ENSG00000269091_6 (sequence is synthesized)
ctcccttcctctcctctctttatcactgactcagcatctgaccccaggctgctcattggtctcctgtttgtctgtctctctctctctctagtcttccacactagccctaaagggctttgt

SEQ ID NO: 1027003 - DNA, 120 bp, Artificial Sequence
  ENSG00000269091_7 (sequence is synthesized)
agttaatggatctgactatatcactcctctgattaaacccttccatggcttcctgcctggagaaaagaaatgagtgtattagcccagtgttctttgtgctgacctcatagaactcttgcg

SEQ ID NO: 1027004 - DNA, 120 bp, Artificial Sequence
  ENSG00000269091_8 (sequence is synthesized)
gttccctaaatccaccagactttctcctctgtgcctttaatggtccctcatgctggatggcacttcctggactaactcctctaagtcttttaatacccagcttatcacccttctctgaaa

SEQ ID NO: 1027005 - DNA, 120 bp, Artificial Sequence
  ENSG00000269091_9 (sequence is synthesized)
ggcttccctgacaaccccatccccattctgctttaagtcccctgccctgtattctctgaaaaccagctgagcactgaccatcctctaccataacaggttatgaaagggtctgacccctga

SEQ ID NO: 1027006 - DNA, 120 bp, Artificial Sequence
  ENSG00000269091_10 (sequence is synthesized)
cccttaccagaaggtaagttctttaatggggaccttccactgctcatccatccactgccacagaggcggccacgagaaagattcacaggacagagtaattcccattcatggtatgcttgt

SEQ ID NO: 1027007 - DNA, 120 bp, Artificial Sequence
  ENSG00000269091_11 (sequence is synthesized)
tcacaggcaggagtgcctcaggcactctgttacactcgacaacctcctgtaaggtaggcacgtttctgctttcttacaggtaagtgagcagaagactgaggatttgaacccctctgacta

SEQ ID NO: 1027008 - DNA, 61 bp, Artificial Sequence
  ENSG00000266049_0 (sequence is synthesized)
tctcgatctcctgacctcggccaagattaacattcgagtcagtgggctggggaaggcagat

SEQ ID NO: 1027009 - DNA, 120 bp, Artificial Sequence
  ENSG00000266049_1 (sequence is synthesized)
aaggagagacaggcccagcctcccagcctacatcttcctcctgtcctggatgcttcctggcctcgaacatcggactccaagtccttcaattttgagactcagactggctctccttgctcc

SEQ ID NO: 1027010 - DNA, 89 bp, Artificial Sequence
  ENSG00000266049_2 (sequence is synthesized)
ctgtgagaccttgtgatcatagagaagatctcaccatattgcccgggctggtcttgaattcttgggttcaagtgatcctcctgcctcag

SEQ ID NO: 1027011 - DNA, 120 bp, Artificial Sequence
  ENSG00000266049_3 (sequence is synthesized)
gagccaccacacccagcccataatggcaggttatacatggcataatgtataatggcatataatggaataatgccataatgccataaaggcaggttatacattagcaacatggacttccac

SEQ ID NO: 1027012 - DNA, 120 bp, Artificial Sequence
  ENSG00000266049_4 (sequence is synthesized)
aggcatccccagccatgtggaactttttggagcaattgtggcagtgagatcattccaactcgtggatcacagatacagcagcgagttcctgaatcccagacccagtggtggtcctctaac

SEQ ID NO: 1027013 - DNA, 120 bp, Artificial Sequence
  ENSG00000266049_5 (sequence is synthesized)
gtggtggtcctctaactgaatgattatagcaaatgttgcagcatccctccaggataacttcagattcctggcatcattctagaaggcttagcccataattcattcctttggcccttccaa

SEQ ID NO: 1027014 - DNA, 120 bp, Artificial Sequence
  ENSG00000266049_6 (sequence is synthesized)
taatcagaaagcacaagctcgtgaacatcttgggaatctgcaggtttgcttatcatctgttaaatattaaaaagagtactttttaaattcctaataaactggttaatgcatttagacaga

SEQ ID NO: 1027015 - DNA, 120 bp, Artificial Sequence
  ENSG00000223410_0 (sequence is synthesized)
aaatcaacaaagtgcagacctgaatcacatcaatgccagcaaggccaagattccctgagtgacgtctcatagctcattggatttttcttcaaggcctttatccacccatataagtgtggg

SEQ ID NO: 1027016 - DNA, 120 bp, Artificial Sequence
  ENSG00000223410_1 (sequence is synthesized)
agggtaggactgcgtcgctggctgcagtattctggaggctggtctttgggctgtgatcactcttcattctaaaggagacattttcagaacatcagggatatatcctgccctgggatgctg

SEQ ID NO: 1027017 - DNA, 120 bp, Artificial Sequence
  ENSG00000223410_2 (sequence is synthesized)
atgaatggccgctttaagactcactgagacactttggtgcacggctcagagtgctctgaaggagtagttttaattcagcagttttgatgtggaagcaaaaatatataaaatggcattata

SEQ ID NO: 1027018 - DNA, 120 bp, Artificial Sequence
  ENSG00000262979_0 (sequence is synthesized)
ggtgatggtggtggtactggaggtgatggtggtggtgaaggtgatggtagaggtaatggaagtgatggtggaggtgatagatatttgaacatgcctgacctaagaaaagttcattttcat

SEQ ID NO: 1027019 - DNA, 120 bp, Artificial Sequence
  ENSG00000262979_1 (sequence is synthesized)
attttcatttttggctgggcactatggctgatgcctgtaaccccaactctttaggaagcctaggtggaagggtggcttgaacccaggaggtcagggctgcagtgagctatgactgtgcca

SEQ ID NO: 1027020 - DNA, 120 bp, Artificial Sequence
  ENSG00000262979_2 (sequence is synthesized)
cattttcatgtgtttcaacctcctagtgtccctgccaaaaatattttaatctgaatcaaatcatggggaaattatgagacaaatcaggtcaaaagacagtttacaaaacagttggcctga

SEQ ID NO: 1027021 - DNA, 120 bp, Artificial Sequence
  ENSG00000262979_3 (sequence is synthesized)
acttttcaaaactgtcaacatgttaaaagaaaaaagaaaaaaatgaccagggaactcttctagaaaagagatgtgataagtaaatgcagaaaagagacgtgataagtaagtacagcgtgt

SEQ ID NO: 1027022 - DNA, 120 bp, Artificial Sequence
  ENSG00000262979_4 (sequence is synthesized)
gtcccaggaggatctaggatccagtcaggacaggagctggagcacgagaggaacgggggtggagaccacttcctgggggcagagtgtcctcctctccacgttgcacgtcctgagtgggaa

SEQ ID NO: 1027023 - DNA, 120 bp, Artificial Sequence
  ENSG00000233424_0 (sequence is synthesized)
ttctcttccctataagctttggaagcagtttagtgacaatggtattcttgtctttttcttgattttaaaaggagtgatttcaatatttttaatcacaaaacatgatagatgctgtaggtt

SEQ ID NO: 1027024 - DNA, 120 bp, Artificial Sequence
  ENSG00000233424_1 (sequence is synthesized)
atttgtcgactccttttatcaggttaaggaagttaccctttattcataggtggaaatatcatgaattatttaatttttgtaaaataattttataggccttttgagacaatcatataactt

SEQ ID NO: 1027025 - DNA, 120 bp, Artificial Sequence
  ENSG00000233424_2 (sequence is synthesized)
ttgtctttaattcattgataaggagatgacttcagtagattttctaacactgaactaaatttgcattactaaccgagcttgttcatggtttttatactttgctaggtatacttcctagta

SEQ ID NO: 1027026 - DNA, 120 bp, Artificial Sequence
  ENSG00000233424_3 (sequence is synthesized)
ttttgtttacaatatttgtctctgtgtgcatggatgaggtacacaatagcaaggttaccctagtctcaaatgaattgaagaatggtctcttttttctcccctcgcaaataattagtgtaa

SEQ ID NO: 1027027 - DNA, 120 bp, Artificial Sequence
  ENSG00000233424_4 (sequence is synthesized)
cattggaactacttgtgacatcatctgggcatcctgttttctttgtagaattattaactatcaactcgattactttaatggtatgatttccatccagattttctaattatttgagtcaac

SEQ ID NO: 1027028 - DNA, 120 bp, Artificial Sequence
  ENSG00000233424_5 (sequence is synthesized)
aatttgttaatctcacttatttacaaatgcatatatttaattgtcattacttaatgaagtagatcataaatataaaagtgtgtatgtacagcttaagaagaatataaaatgagcatatgt

SEQ ID NO: 1027029 - DNA, 86 bp, Artificial Sequence
  ENSG00000233424_6 (sequence is synthesized)
ccattgcccttcttcaatgtcactcactccttccacaagaggtaaccactatccctaacttcctgttaatcattccattgcttgtc

SEQ ID NO: 1027030 - DNA, 120 bp, Artificial Sequence
  ENSG00000233424_7 (sequence is synthesized)
cactatccctaacttcctgttaatcattccattgcttgtcattacagactttatattgtttagttttgcacgtttgactttttaaataagtgaaactatgtattgtttcttatgatcaga

SEQ ID NO: 1027031 - DNA, 120 bp, Artificial Sequence
  ENSG00000233424_8 (sequence is synthesized)
tattcatacacacaaacatgtatatgtatatatatatacacacatacacacattatttttaagagcagttcaaagttcacagcaaaactgagcagcaggtatagatttcccatatactcc

SEQ ID NO: 1027032 - DNA, 120 bp, Artificial Sequence
  ENSG00000233424_9 (sequence is synthesized)
atttcccatatactccctgtcccccacacatgcatagcctcccccataataaacatcccccaccagagtggtgcatttgttacaattaaagaacctacatgatacatcttatagtttgca

SEQ ID NO: 1027033 - DNA, 120 bp, Artificial Sequence
  ENSG00000233424_10 (sequence is synthesized)
agtattcactattaaaatatcatacacgtactttcactgccctaaccatcctctgtgctctggttattcatccctctcttcctcctaactcctgggaaccactgattttttttttctatt

SEQ ID NO: 1027034 - DNA, 120 bp, Artificial Sequence
  ENSG00000233424_11 (sequence is synthesized)
aaccactgattttttttttctatttctatagttttaccttttccagaaggtcatagttggaagtgacagtatgtagcctttttagattggcttctttcattctgcaatatgcatgtaagc

SEQ ID NO: 1027035 - DNA, 120 bp, Artificial Sequence
  ENSG00000233424_12 (sequence is synthesized)
ttcctctgtgtcttttcatggcttgacagccatttattttatcactgaatggtattcagttgtctggatgtaatacagtttgtttaattattcacctactgaaggtaatcttgcttgtct

SEQ ID NO: 1027036 - DNA, 120 bp, Artificial Sequence
  ENSG00000233424_13 (sequence is synthesized)
ttgttgggtcgtataataagagtagatttagttttctaagatgccacaaaactattctccattttgtatttccatcagcactgaatgagagctcctgttgcttcacatcctcatcagcat

SEQ ID NO: 1027037 - DNA, 120 bp, Artificial Sequence
  ENSG00000233424_14 (sequence is synthesized)
ttggtgttgtcagggttctggatttttgccattctaatacgcatgcagtagtatctcattgcagtgctgtatttgagaatgtgaatagctgcagttcattcactcttagtgctgcgaggt

SEQ ID NO: 1027038 - DNA, 120 bp, Artificial Sequence
  ENSG00000233424_15 (sequence is synthesized)
actctattattggaatatatgatcatttagttacctattccacaatctacccatattgagagataattggattgtttccaggattttaaaatggtgaacattctcatatatccctaggta

SEQ ID NO: 1027039 - DNA, 120 bp, Artificial Sequence
  ENSG00000233424_16 (sequence is synthesized)
aacaaacgcaagaatttttctggggcctgtaacaggctgactaggctgcactaggttgtagtgaagccactgggacatagggtacattatgataagctgtatgagctaacatccattttc

SEQ ID NO: 1027040 - DNA, 120 bp, Artificial Sequence
  ENSG00000233424_17 (sequence is synthesized)
caaatggctgtccttctacttgcatgggatgaatgcttccacggttctttatccttgccaatactacacctttcagaacttccaaaaaattttgtcaatatgtgtgaaagggtatctaat

SEQ ID NO: 1027041 - DNA, 120 bp, Artificial Sequence
  ENSG00000233424_18 (sequence is synthesized)
tgttaattttcattttcatgattattatgaggttgagcactttttcacatgcttatgggtatttgtgctaacttcttaattgaggtgttatttttcacttattaatttataggagagctt

SEQ ID NO: 1027042 - DNA, 120 bp, Artificial Sequence
  ENSG00000233424_19 (sequence is synthesized)
tatatattctggatactaaacctttctaggcaacatgtgttgcaaatatctctgccaagttttacatatttttttctcattgtggtatccaataaacagaaatcttaaatttttatgtga

SEQ ID NO: 1027043 - DNA, 120 bp, Artificial Sequence
  ENSG00000233424_20 (sequence is synthesized)
tcaagttagtttttactcttgcagtttgttcttcttccccatgtaaaggtaaaagagatgctccacagtttttttctaagaatgttgagaaggtatctttatccattaaaatatattttt

SEQ ID NO: 1027044 - DNA, 120 bp, Artificial Sequence
  ENSG00000233424_21 (sequence is synthesized)
atgtttggtctatgggattaagtttcaatttcctttttttccccttatggacatcagtggtcccagtgttgcttattgtaaactttactatcttcacttaactacaataaaagctgtgtt

SEQ ID NO: 1027045 - DNA, 120 bp, Artificial Sequence
  ENSG00000233424_22 (sequence is synthesized)
acaaaatatgtttccaagtatgtgtgaaaaatatatttatctttatgattctactcagattaattagctctcaggactgctgtgtccggagtcgattccttctggtgggttcgtggtctc

SEQ ID NO: 1027046 - DNA, 120 bp, Artificial Sequence
  ENSG00000233424_23 (sequence is synthesized)
gctgacttgaagaatgaagccgccggccttcacgagcgctgattggtgtgttttacagagcacagattggtgcgttttacagagtgctgattggtgcatttcatagaactcttgtaagac

SEQ ID NO: 1027047 - DNA, 120 bp, Artificial Sequence
  ENSG00000233424_24 (sequence is synthesized)
agtcgcaggtggcgtgacttgatttgtgtgaaggcaatgaaatgatacaaagatacaccgaagcctcccaaaagaatcctggttccaagacttaagaagatggattaatgtttttccatt

SEQ ID NO: 1027048 - DNA, 120 bp, Artificial Sequence
  ENSG00000233424_25 (sequence is synthesized)
agttgtttgaaattatgtcattttttcactatgtgtcatcaattttaaagcacttctgaaaagagataacaatctacaatagctggcattttaaattcataaaaatatagtattttcttc

SEQ ID NO: 1027049 - DNA, 66 bp, Artificial Sequence
  ENSG00000283422_0 (sequence is synthesized)
ggtggctcatgcctataatcctagcactctgaaaggccgacgtggcacactccagtctgggtgaca

SEQ ID NO: 1027050 - DNA, 120 bp, Artificial Sequence
  ENSG00000283422_1 (sequence is synthesized)
aagtgagaccctgtctcaaaaaaaaaagaaggaactgggctctagaaggtccagaggagattccaggaaaaaaacaggaacattggagacaccaaaggagcatcatgtgcacggcatgga

SEQ ID NO: 1027051 - DNA, 120 bp, Artificial Sequence
  ENSG00000283422_2 (sequence is synthesized)
caaaggagcatcatgtgcacggcatggaacgagcaagtgggacaagctgacacaggggagaaacttccgtaccctcttcctgtgtccctacaaaagcctggacaatgcagtcccagccct

SEQ ID NO: 1027052 - DNA, 120 bp, Artificial Sequence
  ENSG00000283422_3 (sequence is synthesized)
gctgcagaacatgggcaggccccaccttcctccttcctgcagggatatcctttcctatagaagaggtccctgtgccctttgaagcagttgggctcttctgcactgactgcctcagagaaa

SEQ ID NO: 1027053 - DNA, 120 bp, Artificial Sequence
  ENSG00000283422_4 (sequence is synthesized)
ggatgttacagtggaaaacagaaccgggaaaagacttcctgactttggagtttcaaaagcttagttcattagagaaatggaaaagactcagaaaggattaaacactgggcagaagtattg

SEQ ID NO: 1027054 - DNA, 120 bp, Artificial Sequence
  ENSG00000283422_5 (sequence is synthesized)
tgagtgagaaccaaattccttactagtcctaccacctgagcttcaaggattgtggatatccagtggggaggagaactgatggggactggggcgagaaggtcagatctgaagaaactccag

SEQ ID NO: 1027055 - DNA, 120 bp, Artificial Sequence
  ENSG00000283422_6 (sequence is synthesized)
gggcatgagcagacccagcatccatggacaacgcagtatccactcacatgagcctgtgcaccaccggtgcatcggggctgcactggttgtcttgtcctttggcatccagtgaggacttcc

SEQ ID NO: 1027056 - DNA, 120 bp, Artificial Sequence
  ENSG00000283422_7 (sequence is synthesized)
taggagggctgttggcattttcctcactgaccatttagcaggaataacaactgtctttgcctccaaacctggctatgttgcagttaagaagactgattccatgcggtcaacctaatatgc

SEQ ID NO: 1027057 - DNA, 120 bp, Artificial Sequence
  ENSG00000283422_8 (sequence is synthesized)
aatatctcatggtgcttgtaagcccccaagaaggaggatggggcctttgtgtacgtggcaaggtagtgccatagaaggaaaagtttctgagtctacaattgaaggcaaatggaaccagct

SEQ ID NO: 1027058 - DNA, 120 bp, Artificial Sequence
  ENSG00000283422_9 (sequence is synthesized)
caagattttcctcaaagaataacaatggtcaagctctgctcccacaccaaactctccttattatatgatcctctggccttctacagagtgctacattgctcttccatgttgaaaaacttt

SEQ ID NO: 1027059 - DNA, 120 bp, Artificial Sequence
  ENSG00000283422_10 (sequence is synthesized)
gaactatttcccacagagctagtccagtggtctatttgggtgattctactctgtgttgcatttctagtctctgacctaaccttgaccttgaccctgatcttgggtacttgcttggttttc

SEQ ID NO: 1027060 - DNA, 120 bp, Artificial Sequence
  ENSG00000283422_11 (sequence is synthesized)
ctggttctcacacccctcatcataaaccatgccctccccagctcccaggccaggtgtgtagcaggctttatctccccttctttactggggtgtctcaatgtctcagccaccctacatacc

SEQ ID NO: 1027061 - DNA, 120 bp, Artificial Sequence
  ENSG00000283422_12 (sequence is synthesized)
taagcaccagatggagaagggttttgcctgggatgagtcaaggtattacattaatgggaccagcttgggccagccactggctgggatcccctctcgtcacatggaatcccttccttattc

SEQ ID NO: 1027062 - DNA, 120 bp, Artificial Sequence
  ENSG00000283422_13 (sequence is synthesized)
tctttcctcccatgactggtatggttagaccatcctggggacaaactcacccttctcttcactagaggaagggtggtgggagaggaaataacttcttctgcagcctagaggtgagaccca

SEQ ID NO: 1027063 - DNA, 120 bp, Artificial Sequence
  ENSG00000283422_14 (sequence is synthesized)
gaggaccacaggaatgggcctggagggcaagtggccatagctgagactttaaaccagagaagaaagagggcaaggaaaccagatcagtcaccaatgctaatgtcctctgggcatgtcaac

SEQ ID NO: 1027064 - DNA, 120 bp, Artificial Sequence
  ENSG00000283422_15 (sequence is synthesized)
actaagaagatgaaaatggaaaacatgaaaaggaagtatcacttctggcttatgttatgtacttggcacagtgttaatttccatccttgcaccttccccgtgcccttctctgcttcacag

SEQ ID NO: 1027065 - DNA, 120 bp, Artificial Sequence
  ENSG00000283422_16 (sequence is synthesized)
gggcctaattaacattacacagtgtcctataggcctcagatgaaagctattataaaagtgcagaaacggtcaccgtcatcacagaccctaatttgataagaaattcctttcagcctgaag

SEQ ID NO: 1027066 - DNA, 120 bp, Artificial Sequence
  ENSG00000283422_17 (sequence is synthesized)
tgagtattaactatattcgaaggtctaggaatgttgtcagtgtgtgtttcaaaggttaccactatctggggggaatgcaccatgaaaggagatttttcatggtgaaattataaaagtatt

SEQ ID NO: 1027067 - DNA, 120 bp, Artificial Sequence
  ENSG00000283422_18 (sequence is synthesized)
tagagttgaaaaaaagaaaagacacaaacattgagagattatgagtgacaatgaaatcagactagttagcagaaacaaagcagggcctcaaccaggtgacagcaggactgatttttacgt

SEQ ID NO: 1027068 - DNA, 120 bp, Artificial Sequence
  ENSG00000283422_19 (sequence is synthesized)
caggtcttcaggtcaagtctattaaaggaacagctgggcccatgagctttcattgcagtgctatttctctgcattgaatactggctaaaattaatggggcataggatagggctggaaaat

SEQ ID NO: 1027069 - DNA, 120 bp, Artificial Sequence
  ENSG00000283422_20 (sequence is synthesized)
ttttattaaaatgagaggcttttgtggtaaattatggtagctaggggtttaaggttgaggggaggggaaggtcctggaacatttcttctaccaattgccctagcaattatatccatcttt

SEQ ID NO: 1027070 - DNA, 120 bp, Artificial Sequence
  ENSG00000283422_21 (sequence is synthesized)
ggaatcttaatgcctggcttctaatcccaggtaaacttggaacaagtgatttaacctttttgtgccttaatgtcctcatttgtcaaatgaaaatagtgaaaatgccaaccgggcacagtg

SEQ ID NO: 1027071 - DNA, 120 bp, Artificial Sequence
  ENSG00000261773_0 (sequence is synthesized)
ctgatgccacaggatcgtatacttaaaatgatttggatggcaaatgttatgttatatatgtcttaccccaatacaaaagtacatctataaatatatagtattattttgggtgtgctcctc

SEQ ID NO: 1027072 - DNA, 120 bp, Artificial Sequence
  ENSG00000261773_1 (sequence is synthesized)
tctgtatagaggttatcccgtggtgtgtgtctgtaacttgattttttccaattctgccctcagtttcctgctctttccgggcctcaggaggcttgacatccctttgaccacagcactgaa

SEQ ID NO: 1027073 - DNA, 120 bp, Artificial Sequence
  ENSG00000261773_2 (sequence is synthesized)
aggtgttctctttgctgagaactcagtgtcttctgcctggcagaggcttcggccctctatttttgtttctatcccttatgcattctccccggcaggtgcccctcccagctttaagtgtat

SEQ ID NO: 1027074 - DNA, 120 bp, Artificial Sequence
  ENSG00000261773_3 (sequence is synthesized)
agagacgtctgctgcaggattgcccacccccattttgtaacatctgctatttgagaactgctgaagctgccctgatctatgagggctgacctggaagaacagatgactgtgagtgtaccc

SEQ ID NO: 1027075 - DNA, 120 bp, Artificial Sequence
  ENSG00000261773_4 (sequence is synthesized)
caggacgttggcctggatggtgacagaccatgtgctctagtcaccgtgctggccagacccccacaggaatccaaaccatcccagagaaaataagggacttttgcaaggctgccccaggaa

SEQ ID NO: 1027076 - DNA, 120 bp, Artificial Sequence
  ENSG00000261773_5 (sequence is synthesized)
gcacggaagacgtggaactgaatcccaggcctctggcccatcacccacgtggtgtccccaaggaagggagagttgtctcggaatgctcagggggactcattaaagcaacactttcataaa

SEQ ID NO: 1027077 - DNA, 120 bp, Artificial Sequence
  ENSG00000261770_0 (sequence is synthesized)
cactacccatggaccccaggcagtctaattatagagacaattgaatgacaccacacattctaatggaagacacttccggatgacccagacatcctaatgatagagacacttgtgcaaccc

SEQ ID NO: 1027078 - DNA, 120 bp, Artificial Sequence
  ENSG00000261770_1 (sequence is synthesized)
cagccagcctaatgatagaaacacctgggcgactttaggcattcttacgggagagacctccagctgaccccagtaattctgatgatagagacccctggttgacccctgtcattctgatgg

SEQ ID NO: 1027079 - DNA, 120 bp, Artificial Sequence
  ENSG00000261770_2 (sequence is synthesized)
gagaaactcctggctgacacaatgtagtctaatggtagaaacatcttggcgaccccaggcattctaatgggagagactcctgacaaaactttggcattctaatgataaagacaagtgggc

SEQ ID NO: 1027080 - DNA, 120 bp, Artificial Sequence
  ENSG00000261770_3 (sequence is synthesized)
aaccccaagcattgtaatggtaaagacacctgggtgatcccaggaattctaatgtgagagactcctggccaaccccaggcattctaataaagagacttctgtctgaccacaggctgtcta

SEQ ID NO: 1027081 - DNA, 120 bp, Artificial Sequence
  ENSG00000261770_4 (sequence is synthesized)
gtgatagagataccagggttactccaggcattctaatgaaagagactcctggcggaccccagacagtctatttaaagtgataacctgggccaccacaggcactctaatggaagagactcc

SEQ ID NO: 1027082 - DNA, 120 bp, Artificial Sequence
  ENSG00000261770_5 (sequence is synthesized)
tggctgaccccaggcattctaatgggagagaatcctggccgaacccaggcagccaatggatagagacacctgagcaaacccaggcattctaatgaaagagactcccggccgaccccaggc

SEQ ID NO: 1027083 - DNA, 120 bp, Artificial Sequence
  ENSG00000261770_6 (sequence is synthesized)
agtctaataatagagacacgtgagtggacacaggcattctaataggagagattcctggctgacccaagcagtctaattatagacacctgggtgactccaggctttctaataggagaaacc

SEQ ID NO: 1027084 - DNA, 120 bp, Artificial Sequence
  ENSG00000261770_7 (sequence is synthesized)
acctgggtgactccaggctttctaataggagaaaccccaggctgaccctaagcagtctgatgatagaggcttcttggtgacggcaagcattctaatgtgagagactctcggccaacccca

SEQ ID NO: 1027085 - DNA, 120 bp, Artificial Sequence
  ENSG00000261770_8 (sequence is synthesized)
ttattttaatgatagagacacctgagcgaccctaagcattctaatgggagacaacaaggctgaaaccaggctttctaatggggagacacctggctgatccccaacagtctaatcataaaa

SEQ ID NO: 1027086 - DNA, 120 bp, Artificial Sequence
  ENSG00000261770_9 (sequence is synthesized)
aacacctggatgactccagtcattttaatggcagagactcccggtctaccccaggtgttttaatggggagacttctgaccgaccccaggcagtctaatcataaagacagctgggctaagc

SEQ ID NO: 1027087 - DNA, 120 bp, Artificial Sequence
  ENSG00000261770_10 (sequence is synthesized)
cagacagtctaatgaaagagattgccagccgaacactggctgtttaattataaagacacttgggcaatcccaggcgttccaatggaggagactcccagctgaccacaagcagtctaatgg

SEQ ID NO: 1027088 - DNA, 120 bp, Artificial Sequence
  ENSG00000261770_11 (sequence is synthesized)
tattgacacctggaagtcccaagacattctaatggaagagattcccgtcctaccacaggcattctaatgatagagatacctgggccaccccaggcattctaatgggagagactcctggct

SEQ ID NO: 1027089 - DNA, 120 bp, Artificial Sequence
  ENSG00000261770_12 (sequence is synthesized)
gacaacagacagtctaatgatagagaaacttgggcgaacccagtattctgattggagagattctaggcagtctgatagtgacaactgggcaactacaggcattctaatgggagaggctaa

SEQ ID NO: 1027090 - DNA, 120 bp, Artificial Sequence
  ENSG00000261770_13 (sequence is synthesized)
tggctgaccacaggcattttaattggagagaatcctgactgacccaaggaaatttaaggatagagacacccgggtgatcccagacattctaacgggagagactcctgaccgacaccagac

SEQ ID NO: 1027091 - DNA, 84 bp, Artificial Sequence
  ENSG00000261770_14 (sequence is synthesized)
cagacattctaacgggagagactcctgaccgacaccagacagtctaattacagagacacttgggctatcccaggcattctactg

SEQ ID NO: 1027092 - DNA, 120 bp, Artificial Sequence
  ENSG00000261770_15 (sequence is synthesized)
gtatcggctaaccacaggcagtctaatgagagagacaacgtggagacctgattcattctaatcaaagagactcccagcgaaccccagtcattctagtaaaagagacacttgtccgacttc

SEQ ID NO: 1027093 - DNA, 120 bp, Artificial Sequence
  ENSG00000261770_16 (sequence is synthesized)
aggcagtctaagtatagagactgcggggcaaccccacacattctaatgggagagagtctgggccaaacccaggcagtctaattataggacacgtgagcgaccaaactcattctaatggga

SEQ ID NO: 1027094 - DNA, 120 bp, Artificial Sequence
  ENSG00000261770_17 (sequence is synthesized)
gaaactcctggcgggccccatgccacctaatgatagagacacttggacgaccccaggcattctaatgggaaagattcttggccgaccccatgctgcctaatgatagagacatctgagtga

SEQ ID NO: 1027095 - DNA, 120 bp, Artificial Sequence
  ENSG00000261770_18 (sequence is synthesized)
acccaggcattctaatgagagatgctccttgcctattccaggcattctaatgacagagacacctgggcaaccccaggcattgtaatgatacagacatgtgggcgatttcaggcattctaa

SEQ ID NO: 1027096 - DNA, 76 bp, Artificial Sequence
  ENSG00000261770_19 (sequence is synthesized)
tgtaatgatacagacatgtgggcgatttcaggcattctaatgaaagagactccctgcggacccaggcattctaatg

SEQ ID NO: 1027097 - DNA, 120 bp, Artificial Sequence
  ENSG00000261770_20 (sequence is synthesized)
gcaaccacaggcacagacaatctaataatagagacacctgggtgactttagacatttcagtgggagagactcccagccggccccgagcaatctaatgatagagacacctgggaaacctca

SEQ ID NO: 1027098 - DNA, 86 bp, Artificial Sequence
  ENSG00000261770_21 (sequence is synthesized)
ccccgagcaatctaatgatagagacacctgggaaacctcatgtattctaatgggagaaacttttggctggccccagacattctaat

SEQ ID NO: 1027099 - DNA, 120 bp, Artificial Sequence
  ENSG00000261770_22 (sequence is synthesized)
agactattgacagtccccagattttttaatgatacagacacctgcgtgagcctaagcattttaaaaggagagactcttggtgaccacagacattctaataatagagacaccttggcgatt

SEQ ID NO: 1027100 - DNA, 120 bp, Artificial Sequence
  ENSG00000261770_23 (sequence is synthesized)
ccagtcattctaataggaaagactctcttctgaacccaggcattgtcttgggagataatcctggctgaacccagacagtctaattataaagacacctgggcaagcctaggcattctaatg

SEQ ID NO: 1027101 - DNA, 120 bp, Artificial Sequence
  ENSG00000261770_24 (sequence is synthesized)
agacaccttgacgaccacaggcattattatgagagacacactttgccaaactcaggcagtctaatgctagagacaattgggcgacaagcattctagcgggaaaaactcccggctgacccc

SEQ ID NO: 1027102 - DNA, 120 bp, Artificial Sequence
  ENSG00000261770_25 (sequence is synthesized)
gcgacaagcattctagcgggaaaaactcccggctgaccccaggcattgtaataaaagaaaagcctgagtgatcccagccattttcatgggagagacacttgttcgaccccaggcattctt

SEQ ID NO: 1027103 - DNA, 120 bp, Artificial Sequence
  ENSG00000261770_26 (sequence is synthesized)
atgggagggactactggccaacaccagacagtctaataaaaaagacatgtagatgaccccatgcattctttttttttcacactttaaatactttatttatataaaaactcatttgttttt

SEQ ID NO: 1027104 - DNA, 120 bp, Artificial Sequence
  ENSG00000261770_27 (sequence is synthesized)
aaaagcattaacaagacagaaagaaaagagaaaaagtatggagcagaacacaagcccgttagcagtgttcggtgggaaggtgggatttttggttctctggaattgaatgtttagtgtttt

SEQ ID NO: 1027105 - DNA, 120 bp, Artificial Sequence
  ENSG00000261770_28 (sequence is synthesized)
gaatgtttagtgtttttataaacaaaagaggaaaaaaaagttaaaggtccccaaaagcccatggctatcctattacccataccccactgagaagggagggggcagggatagcattaggag

SEQ ID NO: 1027106 - DNA, 120 bp, Artificial Sequence
  ENSG00000261777_0 (sequence is synthesized)
cggcctcctcgcttcttaaaatgtctgagctctacgaagtggaactgttagccctccgtttattgccttacttcacactgaaataagccaacgtttattttattttatttattttattat

SEQ ID NO: 1027107 - DNA, 120 bp, Artificial Sequence
  ENSG00000261777_1 (sequence is synthesized)
tttttttcgagacggagtctcgctctgtcccaggctggagtgccgtggcgggatctcgactcactgcaacctccgcctccgtgttcaagctattctacctcagcctcccgagtagctggg

SEQ ID NO: 1027108 - DNA, 120 bp, Artificial Sequence
  ENSG00000261777_2 (sequence is synthesized)
cccggcccccaacgtttctttttaagcctgtcatatctcacattaaatgtgtaagtctctgaactgtagggctttgaacaaaggaaagttccatgagaatactatatgatgccaatttct

SEQ ID NO: 1027109 - DNA, 120 bp, Artificial Sequence
  ENSG00000261777_3 (sequence is synthesized)
actgttaggaacgcgataacagagtgcagtgggggagaaaataccgtcctcaagatctgagaaactggagaggaaaagtcacaggacaaccaacttctctatgacatagcccagcatctg

SEQ ID NO: 1027110 - DNA, 120 bp, Artificial Sequence
  ENSG00000261777_4 (sequence is synthesized)
aggaaagtcctgcaatagtggaggtggagcagagggtatgagctgggaagcaaatggagcaggagctggaggctgccccatccactccaagccagagaacaagcagaggctgccacagga

SEQ ID NO: 1027111 - DNA, 120 bp, Artificial Sequence
  ENSG00000261777_5 (sequence is synthesized)
gatcctgggcaagtaatcagccacagcatctagattagcatgaaggaaacactggccaaattaaaagatgaaacttccaaaaggtaaatctctgtgtattcatgcctaatcttccaaggt

SEQ ID NO: 1027112 - DNA, 120 bp, Artificial Sequence
  ENSG00000261777_6 (sequence is synthesized)
aagatgaaacttccaaaagtgcaaaggggaagagtcagaaggtgaataaatactcacagccgaagctcttcaaaagacttcaccgagtacagaggggagtttggatcccgctgcaggact

SEQ ID NO: 1027113 - DNA, 120 bp, Artificial Sequence
  ENSG00000261777_7 (sequence is synthesized)
tccacttggtttgtgttatcaacaaggttgcttctgatcagcttgttgagtaaggactgggcagctctgtcctctgtcaggaaaaagaaagcaaagaattttaaaaagtccttgaaacct

SEQ ID NO: 1027114 - DNA, 120 bp, Artificial Sequence
  ENSG00000261777_8 (sequence is synthesized)
accaggcgtttactctaattcaactgccatttgtattttaaataataatgtactgaacattcaaattcaaggtacgtcatagttttgacttataaattaaaatagttttattaaagaaaa

SEQ ID NO: 1027115 - DNA, 120 bp, Artificial Sequence
  ENSG00000261777_9 (sequence is synthesized)
aagttatgatacatcacccatttaggcctcatattcttttccagactctattctaacagccctcttttcctgcagttatctattcctcctatccagacccacatatttactccccaattt

SEQ ID NO: 1027116 - DNA, 120 bp, Artificial Sequence
  ENSG00000261777_10 (sequence is synthesized)
gtactatatataaacctaaagtaattaatgtagcaatcacaacaataaaaaaaaaaacaggaattaacaaagtctgtaccttaatattggacaagttggtctcgtcatccatgtcaaatg

SEQ ID NO: 1027117 - DNA, 120 bp, Artificial Sequence
  ENSG00000261777_11 (sequence is synthesized)
tgtcaaaataacattaagcttaattttactggacaatagagatgcaactgaaaattttttataatgccctattcaactgttcagttgttaaatgtaaaatttctctaaacgtaaaccatt

SEQ ID NO: 1027118 - DNA, 120 bp, Artificial Sequence
  ENSG00000261775_0 (sequence is synthesized)
aaaaggcagtgttcccataagaaataatggcaaagaaaggaactcccagtcacattcagcaaacctgttttcccagctacattcatgcactggttgatgcagatacatcagacagatggt

SEQ ID NO: 1027119 - DNA, 120 bp, Artificial Sequence
  ENSG00000261775_1 (sequence is synthesized)
tacatctcttcgtgactcaatctgctgaacgatgcaactgtcacagtatccaacaggcagggtcttactctgtcacctggcctggagtacagtggcacaatcacgcttcactgcagcctc

SEQ ID NO: 1027120 - DNA, 120 bp, Artificial Sequence
  ENSG00000261775_2 (sequence is synthesized)
aacctccctggctcaagcgatcttcctacctcaggcttccaagtagttgggacagatgatgacaagggctcaagtgatgacagatagaaacctgggtctgtggatgatggcaaagaggag

SEQ ID NO: 1027121 - DNA, 120 bp, Artificial Sequence
  ENSG00000261779_0 (sequence is synthesized)
aagtttcttgcccaggtcctgcagcaagaacacgagccgggattcaagcccaggtctgtcgggctccaaagcccatgtgtgttctctaggcaagaaatagggagtagtcctatccaataa

SEQ ID NO: 1027122 - DNA, 120 bp, Artificial Sequence
  ENSG00000269543_0 (sequence is synthesized)
ggagctccagcggcagctgccgagggagggaccgtccccgctgtgagctgggcggagctcgggaaggcccgcagccttcagctgaactgtctcaatgggaccagagctctggcgcgtccc

SEQ ID NO: 1027123 - DNA, 120 bp, Artificial Sequence
  ENSG00000269543_1 (sequence is synthesized)
ttggtggatccgctgggcctctacctgctggcttctcagtccggccgccgggtccaccagatgtcggccaagagtgtaggacttggccaccagcttgaaatatttaagacggaccagatg

SEQ ID NO: 1027124 - DNA, 120 bp, Artificial Sequence
  ENSG00000269543_2 (sequence is synthesized)
cagtagaggatgcataatctcaccgctgaacattcctgacagtgtgattatgacatatgactttacccagcaccagagtgagttggtgctccagccctggcccagcccacagaagagatt

SEQ ID NO: 1027125 - DNA, 120 bp, Artificial Sequence
  ENSG00000269543_3 (sequence is synthesized)
gtgacatatcactggacccaacactgagatgttgcccaaaaagagattgtgacataactttgggcccagcaccgaggtgatgtctcccctctcctgcctggggcttgcccaccgaagaga

SEQ ID NO: 1027126 - DNA, 120 bp, Artificial Sequence
  ENSG00000234579_0 (sequence is synthesized)
gtgagtgggggccagtgtatgagtatatatctggaatgaagagaccataaatggaagaatgcattcatctataattgtgtggagacttgaggaatgatgaagcttcgaggtgggagcagt

SEQ ID NO: 1027127 - DNA, 120 bp, Artificial Sequence
  ENSG00000234579_1 (sequence is synthesized)
tctctcggggggctgtcatccaggtgcgccagcaactttcctggctaggagaactccctttgtccctcaagaaagccctggcctctggactcaggacaagggtccacctgcctaagaccc

SEQ ID NO: 1027128 - DNA, 120 bp, Artificial Sequence
  ENSG00000234579_2 (sequence is synthesized)
agcggagcttctcaggttcctgtctcctgtctcctccctcttcccctctctcctatctgcagtttctgctcggggaaatacaataacctaatatttaaataaaattctctcagatgccaa

SEQ ID NO: 1027129 - DNA, 120 bp, Artificial Sequence
  ENSG00000234578_0 (sequence is synthesized)
tgccagccaccagtccctgtcactgtgcatctttgccaagctaatgtgctccctggaggatgggaccagcacagagtcagtaatgacacttcacctccctgaaggcaggagccaggttaa

SEQ ID NO: 1027130 - DNA, 120 bp, Artificial Sequence
  ENSG00000234578_1 (sequence is synthesized)
ttttgtatatgcatgggtagttgcatgttgtctccagtgcatgtacataatctgtgtcatgtattacatgtgttctatatgggggcaagaacaggttacacgttatatgtgatatactaa

SEQ ID NO: 1027131 - DNA, 120 bp, Artificial Sequence
  ENSG00000234578_2 (sequence is synthesized)
tgtatgagttacatattgtacagtttgggtgttacagtttttgggtttatgggctacatgtcagtattatggctgctgtattgttataatttatctgttgtatattgtatttaacttgca

SEQ ID NO: 1027132 - DNA, 120 bp, Artificial Sequence
  ENSG00000234577_0 (sequence is synthesized)
gagctaatcggggagataactatttgctgtgctgtaggagattaccaagagggttaactgctgagcccaggttttcagaagggcactgaactgttccagggcctgctccagttgagccac

SEQ ID NO: 1027133 - DNA, 120 bp, Artificial Sequence
  ENSG00000234577_1 (sequence is synthesized)
ttggcctgagaattcctgctccgaaagggccatctggctgaccaggttctccaaacagctctgcgtttggaatacactgtcttcccactgcttccagtcggcacgcagggcctgcatctc

SEQ ID NO: 1027134 - DNA, 120 bp, Artificial Sequence
  ENSG00000234577_2 (sequence is synthesized)
agacggcttgcaccaatctctctggaatctatcagctcctgtaatggaatatcaccatggtaactgaagagcctgtgagtcacttggactgcaagttttcaactgtgtacacagggggac

SEQ ID NO: 1027135 - DNA, 120 bp, Artificial Sequence
  ENSG00000234577_3 (sequence is synthesized)
cctgtcctgccaggaagttttaacaagtgtgccacaaggacccagaatcaattcatctgtccactcttaaattataatagcgggagttgtcatcacgagtgcctaaggcttatggcaaaa

SEQ ID NO: 1027136 - DNA, 120 bp, Artificial Sequence
  ENSG00000197813_0 (sequence is synthesized)
tagacgtggtccaggtttctgcacaggaatatcgagagcgtcatgaacccgagctatagagaaaggagatgaggtcagagaagtcgaaggggtgctggcgagacgggggtgatgcccacc

SEQ ID NO: 1027137 - DNA, 120 bp, Artificial Sequence
  ENSG00000197813_1 (sequence is synthesized)
acaggcgtgagccaccgcacccggctgacaagtgtccttctaagaaacacacagaggagaagacacagaagaggagagcaccatgtgatggtagacacagaaattggagttctacagcca

SEQ ID NO: 1027138 - DNA, 120 bp, Artificial Sequence
  ENSG00000197813_2 (sequence is synthesized)
gagtgtggccctggtgacaccttgattttggacttctggcctacagaaccatgcacacaggaggacttcatttcccaggtctccttgcagtgaagttgaggccatgtgactggtcttggg

SEQ ID NO: 1027139 - DNA, 120 bp, Artificial Sequence
  ENSG00000197813_3 (sequence is synthesized)
ccaatggaatgggtgcagaagggacacagcccatttctagactcagcctgaaatgtcctccataatccttactctttctcccttcactcactggctgcaggaagctgagaattatccttg

SEQ ID NO: 1027140 - DNA, 120 bp, Artificial Sequence
  ENSG00000197813_4 (sequence is synthesized)
gacttacataaagcattttggactttatgtaagtaacaacctgttgtattaagctactaagattttacggttgtttgttaaatcagctaaccttaaacatcctaacaactacaaatagaa

SEQ ID NO: 1027141 - DNA, 120 bp, Artificial Sequence
  ENSG00000234572_0 (sequence is synthesized)
attcgagaccttctgggtgggaaggaggcagccatgtggtgatctggggaagagtgctgcaagcagaaaggcaagtaaaaacaaaagccctgaggcagaaatgtgctccttatgcttaag

SEQ ID NO: 1027142 - DNA, 120 bp, Artificial Sequence
  ENSG00000234572_1 (sequence is synthesized)
aaacaccgtgaaggccaacgtggttggagcaatgtgagcaagaagaatagaggggccttgggaacataggtagctgagtcctcatggatcaaggcaccttgactttaagtgtctgttaca

SEQ ID NO: 1027143 - DNA, 120 bp, Artificial Sequence
  ENSG00000234572_2 (sequence is synthesized)
ccaaaggttatggcaaactgtgtctgcagcccacagtaaaatccagtttaaggctctccacactggagtgcagctatccagtttttcagccatttccaaaaggaattatattgatgtgtt

SEQ ID NO: 1027144 - DNA, 120 bp, Artificial Sequence
  ENSG00000234572_3 (sequence is synthesized)
agttgacaagcctacaatgaaaagatagatgggaaaagaagaccatcagacaggtggctggatatgtggagacaagcacgaagaagtccaggctctgtcacgacgttgctgactggcttc

SEQ ID NO: 1027145 - DNA, 120 bp, Artificial Sequence
  ENSG00000234572_4 (sequence is synthesized)
tgtcacattttcaggcatcttttagctagaggtgcgcgtgtgacaccacatggactgtgagaaatagtcaagttcagcctagtgacgcttctggcaaagcttgttttcctgatttttaaa

SEQ ID NO: 1027146 - DNA, 120 bp, Artificial Sequence
  ENSG00000234572_5 (sequence is synthesized)
aaaggagttgggggagtgccatgccttttgtccttcctccctcctcctgcctggaacatggatgtgagaccaggaagtacagcagccatcttgtgaccatgaggactaaaggcctgcgct

SEQ ID NO: 1027147 - DNA, 120 bp, Artificial Sequence
  ENSG00000234572_6 (sequence is synthesized)
gaggatggtacagtaaaatgaaagaagcagcctggatgcctgatgagcagctgtgccagccccagggtcatgcaaatcagtgtcaatcattgtggttctggttttctcctatttgtagcc

SEQ ID NO: 1027148 - DNA, 120 bp, Artificial Sequence
  ENSG00000234572_7 (sequence is synthesized)
aaataaattccttactgatataggcagggtccttgttggttccaaaaaaaagtggattcacagaaatataactgagagaaccatgaatttctaaagaagtcctagaaatagatcagtcag

SEQ ID NO: 1027149 - DNA, 120 bp, Artificial Sequence
  ENSG00000234572_8 (sequence is synthesized)
atcagtgttaaggaggtgagaatgccatcacttgaattgtatgactatatcttattaaatctcagatgccatcagttgtaaggtatagcattattttacatatcactatgagagaagaaa

SEQ ID NO: 1027150 - DNA, 120 bp, Artificial Sequence
  ENSG00000234572_9 (sequence is synthesized)
atgctctcaagacatatcactgattgtaagatgcatccaccttgatttcagagattttaaaatgtgaaaaaagggagggacatcttaggatcagtgaaatatggcacatatttatttgct

SEQ ID NO: 1027151 - DNA, 120 bp, Artificial Sequence
  ENSG00000234572_10 (sequence is synthesized)
tccttgattcctgcctgctgtgctcattagaccagagacactgtctgccatgctctctgccaagtcctccatacctagaattgggcctggcatagagtggggtctataaatattggttaa

SEQ ID NO: 1027152 - DNA, 120 bp, Artificial Sequence
  ENSG00000234572_11 (sequence is synthesized)
ttaataagttaactaataagttctagtccttgcttttccaataacttcccatgctaccctggctggagaaagcatttccctttctctgtacctcatttctccataatctagttcaactga

SEQ ID NO: 1027153 - DNA, 120 bp, Artificial Sequence
  ENSG00000234572_12 (sequence is synthesized)
ccctcaccagaactgaagaaacaaaaagccccaaatacatgcaaagcggacctacactctgcatcaccatggtgacgcctcccagggtcccagagggcagggaggcctcatcttccacca

SEQ ID NO: 1027154 - DNA, 120 bp, Artificial Sequence
  ENSG00000234572_13 (sequence is synthesized)
tccctagaaatctctctttccccagagcccaactccttctaaagctctgtggttaaccctttccaggcaagccttttccaacactctgttagggttactaaatgtgctccctacaaatgg

SEQ ID NO: 1027155 - DNA, 120 bp, Artificial Sequence
  ENSG00000234572_14 (sequence is synthesized)
actagggccaaggaattatgcaagatccttcaagcaaagagatggtattttgtaacttccctgagtttctccaggaagatgaaatgcacaacatattttagaataatatcaacctacata

SEQ ID NO: 1027156 - DNA, 120 bp, Artificial Sequence
  ENSG00000234572_15 (sequence is synthesized)
tgtcagagaggtagtcttgtctgaccaaagcccttgagctggtgaggggcggggttccaggtgccccttctgctgcactagcattgtattcagaagtaataaagatgatggctttcatgt

SEQ ID NO: 1027157 - DNA, 120 bp, Artificial Sequence
  ENSG00000197815_0 (sequence is synthesized)
ttttttttttctcttttctagtggcatgtgtattctttttctaaactcttgaatactaaatttaggtgtattattgccttttaaaatatttatttgagatgaggtctcactgtgttgccc

SEQ ID NO: 1027158 - DNA, 120 bp, Artificial Sequence
  ENSG00000197815_1 (sequence is synthesized)
actgtgttgcccggactggtctcaaaaactcctgggcgcaagtgatccttccgcctcagcctcctgagtagctagaatgactttttctttttctctttttgagatggagtcttgctctgt

SEQ ID NO: 1027159 - DNA, 60 bp, Artificial Sequence
  ENSG00000197815_2 (sequence is synthesized)
gcctcctggattcaagcaattctctgtttctgtttttttgagatggagtctagctctgtc

SEQ ID NO: 1027160 - DNA, 120 bp, Artificial Sequence
  ENSG00000197815_3 (sequence is synthesized)
aggcgtgagccactgcgcccagccctgggatgaccttttcttgactgacttggttggatttgatttgtagaggtgcggctacacgattttctcccattcattttattttatttatttttg

SEQ ID NO: 1027161 - DNA, 120 bp, Artificial Sequence
  ENSG00000197815_4 (sequence is synthesized)
ttatttttgagacggagtttcactcttcttgcccaggcccgagtgcaatggcatgatgtcggctcactgcaacgtccgcctttgggttcaagcgattctcctaccccagcctcctgagta

SEQ ID NO: 1027162 - DNA, 120 bp, Artificial Sequence
  ENSG00000197815_5 (sequence is synthesized)
caggcatgagccactgtgcccagccttccccttttttattgtgttcttaatttctcccttggcctcgttttcatttcgaggtcagcatggcttgggatgggacaaggtaacctgaaatgc

SEQ ID NO: 1027163 - DNA, 120 bp, Artificial Sequence
  ENSG00000197815_6 (sequence is synthesized)
tgggatgggacaaggtaacctgaaatgctgcaggtgggcaagaatatgtgtagacacacacagacacacacagcccacatgctctgctgccctgtatcgctaaggctgtggccatggcat

SEQ ID NO: 1027164 - DNA, 76 bp, Artificial Sequence
  ENSG00000197815_7 (sequence is synthesized)
gctctgctgccctgtatcgctaaggctgtggccatggcattgccccatggagcagcaaacatgaaaagcaatctga

SEQ ID NO: 1027165 - DNA, 120 bp, Artificial Sequence
  ENSG00000197815_8 (sequence is synthesized)
acgggcagagtgcctgaggtcaggagttcgagaccgacctggccaatatagtgaaaccctgtctctagtaaaaacacaaaaattagccggctgtggtggtgggcacctgtaataccagct

SEQ ID NO: 1027166 - DNA, 120 bp, Artificial Sequence
  ENSG00000197815_9 (sequence is synthesized)
agccaagatcgcgccactgcaccccaacctgggcgccagagcgagactccatctcaaaaaaagcaatctgcctactgctgggtggaaaacctgctggagtcatcaggacctttgaaaaca

SEQ ID NO: 1027167 - DNA, 120 bp, Artificial Sequence
  ENSG00000197815_10 (sequence is synthesized)
gagtcatcaggacctttgaaaacagggagctagtccaagccacacacacaaagggtgaagggcgggaagtcactcacatctcctgggctcagacccaggcctgggcgctgataatggcag

SEQ ID NO: 1027168 - DNA, 120 bp, Artificial Sequence
  ENSG00000228055_0 (sequence is synthesized)
gaactgctgtttgagcctcccctgagattgtgcgtagcctccgtgtaaatgtaatagcctccatggcttaattggctatcaagcgaattttcacagatgaaagcaatgttaggttagggg

SEQ ID NO: 1027169 - DNA, 120 bp, Artificial Sequence
  ENSG00000228055_1 (sequence is synthesized)
acgacggtgcagccacccagcctttaccagcagcgtgctgcagacgaaggcagtcaaggtgtggaggtgatcatgcaggtgcagctcagttgccgtgatgctccttgagtcaatgagctc

SEQ ID NO: 1027170 - DNA, 120 bp, Artificial Sequence
  ENSG00000228055_2 (sequence is synthesized)
tttggtctgctcttctgctcaagcagaaaatgatctgcgcttcacccttgagaagctgacaagaaccacaggcttcttcgggcaggtggtggaacatgggtgtatcctgcaggttctcac

SEQ ID NO: 1027171 - DNA, 120 bp, Artificial Sequence
  ENSG00000228055_3 (sequence is synthesized)
cctgattttctggctcataaggccaaagggagccggaaaggtccccacggcaggactcatggtggagagagaatggtctggaggattcaggcctctgcacactgtgtctgggtccctcct

SEQ ID NO: 1027172 - DNA, 120 bp, Artificial Sequence
  ENSG00000228055_4 (sequence is synthesized)
taaagaatgataaagacaagcaaagagcttgaagcagcctggagtccagccagaaacctttaactgagctttaaaggagatggtcacaacacttttcagaatactggcaaaggcctcctg

SEQ ID NO: 1027173 - DNA, 120 bp, Artificial Sequence
  ENSG00000228055_5 (sequence is synthesized)
tggccaggtttgtcctgggatgagcaaaatttaatgttaacctgctgtatctttgcttttaatatatctgcttgcccaccacaatgacgttatggttaatttcaccaatttggtaacctg

SEQ ID NO: 1027174 - DNA, 120 bp, Artificial Sequence
  ENSG00000228055_6 (sequence is synthesized)
agaaaacaaaaggaaggcccagagtgactggagcgtggcatttagggatgaaggtcaagtcagaaaagtatgtaagagtctggtcaagtaacagtctcgtaggccaaggtgcagctcagt

SEQ ID NO: 1027175 - DNA, 120 bp, Artificial Sequence
  ENSG00000228055_7 (sequence is synthesized)
aataataggatgaacttgccacccctgtcaggggggaatggggttcctgagagctgagaggccaggatccagatcctgagcctcttcaccaagcagatgctgtagagcaaaggcagcaac

SEQ ID NO: 1027176 - DNA, 120 bp, Artificial Sequence
  ENSG00000228055_8 (sequence is synthesized)
tatctatctatctatctatctaatttccccttccctttaaggaaatcctcaggactaggtgagatcttagatctagtggagaatctgagttgctccaagcaaaacctcaggatcctgcaa

SEQ ID NO: 1027177 - DNA, 120 bp, Artificial Sequence
  ENSG00000228055_9 (sequence is synthesized)
gttgctccaagcaaaacctcaggatcctgcaatctgaaaaggtagaaccaaggcaaatgtgggcagcaatacccagaagttgggtactgagcctgttagggagcatttttttcaggggag

SEQ ID NO: 1027178 - DNA, 120 bp, Artificial Sequence
  ENSG00000228055_10 (sequence is synthesized)
tgaagtaaataatgaggtgtagagagcagcgagaataagaagccaaatcacagactgcaaaatcacacagcatctgtcctttctccctggtcagagagagtatgatgggtagtctccaat

SEQ ID NO: 1027179 - DNA, 120 bp, Artificial Sequence
  ENSG00000228055_11 (sequence is synthesized)
caggagttcaagaccaacctgggcaccatgacaaaaccccgtctctaaaaaatatacaaaaattaaccaggggtggcagtgcatggctgtaatcccagctacttggaggctgaggtggga

SEQ ID NO: 1027180 - DNA, 120 bp, Artificial Sequence; identical to SEQ ID NO: 886230
  ENSG00000228055_12 (sequence is synthesized)

SEQ ID NO: 1027181 - DNA, 120 bp, Artificial Sequence
  ENSG00000228058_0 (sequence is synthesized)
acaatctccccaggaacaaggagattggagctcgattctactcctccaggttgcaggcagagccaaatacactgagaggcttaacattccagattaattcttccctccagtggtttgcaa

SEQ ID NO: 1027182 - DNA, 120 bp, Artificial Sequence
  ENSG00000228058_1 (sequence is synthesized)
aagctgtgagtttgaaaagaaacaaactcaaactttgagagtaagagtagggaagtgggagatggtactgtttcagacaagggtggggttggtggacatttcgcaacaaagccccagtgg

SEQ ID NO: 1027183 - DNA, 120 bp, Artificial Sequence
  ENSG00000228058_2 (sequence is synthesized)
cacaggctgtatttgggctttcctgctgcattgagaggtcagcaagattgccttggctgggaaccaaactcatcctggtttcctgtcttgggatctcaaggggctagaatgagctgctat

SEQ ID NO: 1027184 - DNA, 120 bp, Artificial Sequence
  ENSG00000228058_3 (sequence is synthesized)
tccaagggagagaagaaagcaaccccaggaagcctggccccgaagactgtgaggtatggtggggccttgctgtgctctggactggacaagaggcaccctgggctctggacacagccagat

SEQ ID NO: 1027185 - DNA, 120 bp, Artificial Sequence
  ENSG00000228058_4 (sequence is synthesized)
caacaggatctgcaccacctctgcctcccggacattggaaggactaaataagatcagagacctcattcctagatggaacgaggaatggtagcgaccacgatcctcccctcccaggatctg

SEQ ID NO: 1027186 - DNA, 120 bp, Artificial Sequence
  ENSG00000228058_5 (sequence is synthesized)
cgccacaagggaagatcagaaccttcagctgccagaagcactgtggcggaaatgtaggtccccatccaggctgatctgagcttggctttctggagcacgcaaacctcgatgcactgaact

SEQ ID NO: 1027187 - DNA, 120 bp, Artificial Sequence
  ENSG00000228058_6 (sequence is synthesized)
gctgccggacctcaccttgccaggcccactgtgctcacactcacacatcgctccatccactggaggctgcagaggcaagatccaccaagaagatggtcttcctgtccaggatgcccttcc

SEQ ID NO: 1027188 - DNA, 120 bp, Artificial Sequence
  ENSG00000228058_7 (sequence is synthesized)
ctgagagaagtgtatttaatcttaaattcagatgtttgtttgtctacccacttaaaacaccctgttgaataaaaattactcaaggaacacatggaggctttgtccatgtaaaagaacaaa

SEQ ID NO: 1027189 - DNA, 120 bp, Artificial Sequence
  ENSG00000228058_8 (sequence is synthesized)
gcaccacctctgcctcccggacattggaaggactaaataagatcagtggctggtgtcctgtctccatcctgcctgggataacactgaaaatcgccttaacttcctacgtcctgagacctc

SEQ ID NO: 1027190 - DNA, 120 bp, Artificial Sequence
  ENSG00000281131_0 (sequence is synthesized)
cgagggtccgcggcttcattcttgaagtgagtgagaccaagaacccaccagttctggacacaatttcaagtcctcaggtgccatcaatattctgaaaatggcagtgatttttattcaacc

SEQ ID NO: 1027191 - DNA, 120 bp, Artificial Sequence
  ENSG00000281131_1 (sequence is synthesized)
gcagtgatttttattcaacctgtataaggcactttcaccatgtacctggaagcaacatctacatctttttcagcaatctagatgctggggacacaaggtccaccttccaggaatatggcc

SEQ ID NO: 1027192 - DNA, 120 bp, Artificial Sequence
  ENSG00000281131_2 (sequence is synthesized)
atgacaccagaaatcacaaacatgatgagaatggaatgactggggaagaagtgccagatgcttcacttgtaaatgaagacccagcctctggggatgcagataccacctccctgaagaagc

SEQ ID NO: 1027193 - DNA, 120 bp, Artificial Sequence
  ENSG00000281131_3 (sequence is synthesized)
ctggagatggtgaacccaagaggctctgctgggagacaacaaaaataatgaagaattgaaccagagtccggtgaatatcagcactgggaccagttagcagaggaaaaggaaagaataaaa

SEQ ID NO: 1027194 - DNA, 120 bp, Artificial Sequence
  ENSG00000281131_4 (sequence is synthesized)
gcgaaaagaatgaagagtcatatgattaccaacttttcctttttcatataaattgagtgtatatgggtctggaacaacctgaatttccatcaagtcctggctaacctcattatgtcctat

SEQ ID NO: 1027195 - DNA, 120 bp, Artificial Sequence
  ENSG00000281131_5 (sequence is synthesized)
gaatatttttgactaatcccactttacattaatctgtattgtgaatgtggatattgaattatatttctttgtaatcccattatccaaaatccagttcagagactattagttaccaatgtt

SEQ ID NO: 1027196 - DNA, 85 bp, Artificial Sequence
  ENSG00000281131_6 (sequence is synthesized)
tatccaaaatccagttcagagactattagttaccaatgttcactgtgaaggaaaaaaaaaaaaaaaaagctcagaggataaacat

SEQ ID NO: 1027197 - DNA, 120 bp, Artificial Sequence
  ENSG00000281131_7 (sequence is synthesized)
agggacccggtgggagataattgtatcatgggggtggttcccccatactattctcatagtagtgaataagtctcacaaaatctgatggttttatgagggaaaacccctttcacctggttc

SEQ ID NO: 1027198 - DNA, 89 bp, Artificial Sequence
  ENSG00000281131_8 (sequence is synthesized)
tctgatggttttatgagggaaaacccctttcacctggttctcattctcttctctggtctgtcgtcatgtaagacatgcctttcaccttc

SEQ ID NO: 1027199 - DNA, 120 bp, Artificial Sequence
  ENSG00000287312_0 (sequence is synthesized)
accttactgactgactgactgagctataggcgaggggaaggctggtctattatcagagtttatggcagcagacagcctatattgagggatgatttcattgggtaaaaacttaactactgt

SEQ ID NO: 1027200 - DNA, 120 bp, Artificial Sequence
  ENSG00000287312_1 (sequence is synthesized)
gttggtggtttcgtttttggtagcaaatgccttagtctatctggagaaggtgtctactagtactagaaggtatttgtacttagcctggtgtggtttgacttctctaaactgaatttctta

SEQ ID NO: 1027201 - DNA, 120 bp, Artificial Sequence
  ENSG00000287312_2 (sequence is synthesized)
cttttttcttggcgagttttttcagagacagtggcctgggctgggtttaggactttgtttggcatttacttgggcgcaggttgtgcactggagagctgcttaatctcttaggctatgaag

SEQ ID NO: 1027202 - DNA, 120 bp, Artificial Sequence
  ENSG00000287312_3 (sequence is synthesized)
atgggggatcttaaaatgcctccggaggagctgaggtaactttgctcttcttaaatgggtggtagactgtaggtaactggtttaagttcagggtatgaagattccagagtcaggaagaat

SEQ ID NO: 1027203 - DNA, 120 bp, Artificial Sequence
  ENSG00000287312_4 (sequence is synthesized)
tggaaaggagactgtgggcagcaagtttggaggcatgactgaaagtctggcagcgacctgagctgctgaatcagctttctggttactatgggcaacggccgtgttttctttttgatgtcc

SEQ ID NO: 1027204 - DNA, 120 bp, Artificial Sequence
  ENSG00000287312_5 (sequence is synthesized)
tttgcagtggatcacagctacctgctgagacagacaaggggaggggatccagcgatgggatcagtcagatgcctgcctggccgctccccgtgaggggacttgggctcctcttagcattgg

SEQ ID NO: 1027205 - DNA, 120 bp, Artificial Sequence
  ENSG00000287312_6 (sequence is synthesized)
caggccggtataaacttccggctcagatcgagctatgcctgatgctgccttaagccttatgaggtcgccatggaaccgcagaaactcctggagggcagagctgtgtctgccatcttcatc

SEQ ID NO: 1027206 - DNA, 120 bp, Artificial Sequence
  ENSG00000287312_7 (sequence is synthesized)
ctggcacaaaagagttgctcaataaataaatcaggatgaatggataaatacatggataggcactttgaactacagatgagtttaaatactttgtgtttttcttagtcaaacatgtgcaat

SEQ ID NO: 1027207 - DNA, 120 bp, Artificial Sequence
  ENSG00000287312_8 (sequence is synthesized)
gtgtttttcttagtcaaacatgtgcaattaagcatgtgataaatgatatgatgaccgcacctgtgtcttgcctgatgttctttgcaatcactaaatgaagtcaattgtgcctgttttgac

SEQ ID NO: 1027208 - DNA, 120 bp, Artificial Sequence
  ENSG00000267393_0 (sequence is synthesized)
tgtggtggctcacacttgtaatcccagggctttgggaggccaaggcagcaggatcatttgagcccaggaggtcgagtctgcaatgaggtccagctagaaatgtctagatgcatagctaaa

SEQ ID NO: 1027209 - DNA, 120 bp, Artificial Sequence
  ENSG00000267393_1 (sequence is synthesized)
tgcatagctaaagcatggagactgcaatctgaaggccgcatggctgccctgctggcacggaggttttggaatccgactgcccctagtgggctctgactcctaaatggctgctgcacatca

SEQ ID NO: 1027210 - DNA, 120 bp, Artificial Sequence
  ENSG00000267393_2 (sequence is synthesized)
taccttggtctcctctgtgagttccctccatctatggcgtgtagagacatattccaaaactccatttacaaggtctatttggactgcaaaagactgaatgataaggtcactggaacagtc

SEQ ID NO: 1027211 - DNA, 120 bp, Artificial Sequence
  ENSG00000267393_3 (sequence is synthesized)
agctggcacaatcataggaaagcacgaatttcactcccatgctgataaactgagagaggtttcagtccacactgacagactatcagactagaatagccatccaacggtcctacacaaact

SEQ ID NO: 1027212 - DNA, 120 bp, Artificial Sequence
  ENSG00000267391_0 (sequence is synthesized)
acagaagctgtggaaggcgccatcctgcctgccacaggaagggccttggactgagaggaccggagctgactggggattattcaaagccaaaagccaacagagcccccatggagaagtgga

SEQ ID NO: 1027213 - DNA, 120 bp, Artificial Sequence
  ENSG00000267391_1 (sequence is synthesized)
ggatgctcagatactgctatggagccctgagaagtgaaatgggtccaagcccttgcccaggatagagcgctccaagcgcatcctccggggacccttttaatcagtgaattgttcacctct

SEQ ID NO: 1027214 - DNA, 120 bp, Artificial Sequence
  ENSG00000267391_2 (sequence is synthesized)
cactgtttcttcccagcagagctaagagacttctagagcctcttgtggatggtcagcgatagccctggaagtttttgcagaaggggtttgctgggtggcagtggaacacaggcagtggac

SEQ ID NO: 1027215 - DNA, 120 bp, Artificial Sequence
  ENSG00000267391_3 (sequence is synthesized)
agtgttcagctcttcccattgctcaagatgcttgtacccgtgatgcttcttttctctgcttaggtcacaatatgtggagctgacaaggttcccctattatcagtgacaatggtggaatgt

SEQ ID NO: 1027216 - DNA, 120 bp, Artificial Sequence
  ENSG00000267391_4 (sequence is synthesized)
ggaggtgaagttaacaccttcgtggctacagagtttccttagcagagctgtggagtgtgacaatggtgtttgtgtctaaactatcaaacgccattatcacactaaatagctactgctagg

SEQ ID NO: 1027217 - DNA, 120 bp, Artificial Sequence
  ENSG00000267391_5 (sequence is synthesized)
caatccttccctcgataaatgtcttggcatcgtttgctttgagcaagaaggttcatctgatatcagtcttctcaatcttgtgtacttactgaataaagtctggctcttttgcactcataa

SEQ ID NO: 1027218 - DNA, 120 bp, Artificial Sequence
  ENSG00000267391_6 (sequence is synthesized)
gctactgtgttaggaggagctgtagggaaagggaaggacaagatgggccaccacatgcctgtgtccactgctggccacacccagagtgctaggggtttgtggcagtgactggggccacct

SEQ ID NO: 1027219 - DNA, 120 bp, Artificial Sequence
  ENSG00000267391_7 (sequence is synthesized)
agagcagttctagggttcgtagtcattctctctgagtcatggaaaactgcccaggaggcgagtcccacctaagagagtatgtgtagcactggcacggcctgctgccttgcaaatgaccac

SEQ ID NO: 1027220 - DNA, 120 bp, Artificial Sequence
  ENSG00000267391_8 (sequence is synthesized)
atttcatgaaagaaagccagggccacagacaggaaccaaaggaaatcagtcacttaggggaagataacgaatccacaaagtgaaaaagggaaagaaaaaaagaggcaacttcaacactcc

SEQ ID NO: 1027221 - DNA, 120 bp, Artificial Sequence
  ENSG00000267391_9 (sequence is synthesized)
aacccatgggagcagaacgactttcagctttcgcagggggataatcactgcaagtccagcttgaagagggtgatttcaggatctacatgagaataaggcgcaattttttttttttttttc

SEQ ID NO: 1027222 - DNA, 120 bp, Artificial Sequence
  ENSG00000267391_10 (sequence is synthesized)
tgaaaaatacggaagggttcatttacagctgttaaagatgggccggttttagggctaaagcaagactctggtcagatgttaacaactcagttatcctggggaaaaaataactggctccca

SEQ ID NO: 1027223 - DNA, 120 bp, Artificial Sequence
  ENSG00000267391_11 (sequence is synthesized)
accctttcccttttcagcatttgcaggaaaagaaggagtaggtaaaatgctttatttcctctcattctccatggtgggcaggagttcacataacaattataaaccatctttaacaggaaa

SEQ ID NO: 1027224 - DNA, 120 bp, Artificial Sequence
  ENSG00000267391_12 (sequence is synthesized)
gccaagtaaatcctgtagggatttatttggagctccctttttgctagaaaatgagtatcatgaactaaaaatggactcgtttcctctctctccatcttcctctctttcttctctcccctc

SEQ ID NO: 1027225 - DNA, 120 bp, Artificial Sequence
  ENSG00000267391_13 (sequence is synthesized)
atctcccacccaccgccatggtggaaaatgactgtggtcaagaagattgaacatttgagcaagaccagatgcctttatatccaatagatgccacggagagtagatcacaacacatctaac

SEQ ID NO: 1027226 - DNA, 120 bp, Artificial Sequence
  ENSG00000267391_14 (sequence is synthesized)
tgctgtatccccatataaaataattttaattttcctagactgcagaattgatcacatttactgatgatggattgggaagtaggtgaagaggtgagagttggagagtatccattcattcgg

SEQ ID NO: 1027227 - DNA, 120 bp, Artificial Sequence
  ENSG00000267391_15 (sequence is synthesized)
ccagattattctcatttataatgtagtcttccaataagtatttatttccagaaatctattccctctagagattctttctctctcagccattttagaaaattgttgcaaacagagttcctg

SEQ ID NO: 1027228 - DNA, 120 bp, Artificial Sequence
  ENSG00000267391_16 (sequence is synthesized)
gttagctgaaccctgcctctcacatgctgttgttacataccttagctggtgattaattttcttgttttcccaagtcaataaaaagattgcagaccaggcacggtggctcacgcctgaaat

SEQ ID NO: 1027229 - DNA, 68 bp, Artificial Sequence
  ENSG00000267391_17 (sequence is synthesized)
attgagcccacgaggttgaggctgtagtgagctgtgatggtaccactgcactccagcctgtgtgacag

SEQ ID NO: 1027230 - DNA, 120 bp, Artificial Sequence
  ENSG00000267391_18 (sequence is synthesized)
cactccagcctgtgtgacagagcaagatcctgtctcaaaaaatgaaaataaaaagattgcagagttcctcagagcccccaacacaaggccaggcacgaggtaatcatttaacccatgctt

SEQ ID NO: 1027231 - DNA, 120 bp, Artificial Sequence
  ENSG00000267391_19 (sequence is synthesized)
catttaacccatgcttatagacttaaaatgaatagttaggaaagtgttagacgcagaaggctaagactgggctaaatctatgttatgcagacagaccgcaagcttataggtacaaaatta

SEQ ID NO: 1027232 - DNA, 120 bp, Artificial Sequence
  ENSG00000267391_20 (sequence is synthesized)
aggtgtgtgggtccttctcttttcgtcgttaaaaaatccaactttctaataaacttacacatggtttcactgacgtttcagaaattctagaatatgtttgatttctactgatttcaatca

SEQ ID NO: 1027233 - DNA, 120 bp, Artificial Sequence
  ENSG00000267391_21 (sequence is synthesized)
attactaggctgattactgaattcgtacactaggcctttcttcctcttgcatcagtgaattaccatcagaaaattgtttatgaagcatgtgtgagctgccatagcaaatctgggacccat

SEQ ID NO: 1027234 - DNA, 120 bp, Artificial Sequence
  ENSG00000267391_22 (sequence is synthesized)
gcagtttctaggacagttggcccagccaggtgctctggtttggaacccattctgtctctgagaggtgtctaaagtcaggagtaggtttcgtttgtgccagactaaagcttccctccccag

SEQ ID NO: 1027235 - DNA, 120 bp, Artificial Sequence
  ENSG00000267391_23 (sequence is synthesized)
gcttggttaaatgaagtaggacatgtttaatcaaatagacagggttagatcaaccatcagaaacaaattcaaccattcaaccattcacttatgaaataaatatgtgtagagactaccgtg

SEQ ID NO: 1027236 - DNA, 120 bp, Artificial Sequence
  ENSG00000267391_24 (sequence is synthesized)
tgcctgacactgtcctaggcattgaagacacttttaaattaaatgtgtctgatgttatttccagagatgggcattcactggctcgcattatattttgggaccattgtaattgttccaaac

SEQ ID NO: 1027237 - DNA, 120 bp, Artificial Sequence
  ENSG00000267391_25 (sequence is synthesized)
gggagccaaatgagcaaaactttgcgaaataattctgagtcccttgctggaaagcctcacctgaatgcagcccacacatttatgatacactacaaaggcttcaaggtcatgagatgcctc

SEQ ID NO: 1027238 - DNA, 120 bp, Artificial Sequence
  ENSG00000267391_26 (sequence is synthesized)
tgtccaaagaagaagaagagcacccctgcctgccctgcatctcttaccacctctcatttcttccctcctggcaccatctactgtcaagaagagaatcagactccctgaaataattgagac

SEQ ID NO: 1027239 - DNA, 120 bp, Artificial Sequence
  ENSG00000267391_27 (sequence is synthesized)
actgacattcctttttgtgtgtatttttttggcaaaggctctaattgaacaggcattaatagagggctctactgttatacagatcacgctcatgcacactgtattagtctgtgttttcat

SEQ ID NO: 1027240 - DNA, 83 bp, Artificial Sequence
  ENSG00000267391_28 (sequence is synthesized)
acctcagaatcatggcgggagatgaaaggcacttcttacgtggcatcagcaatagaaaatgaggaaaaagccaaagtggaaac

SEQ ID NO: 1027241 - DNA, 68 bp, Artificial Sequence
  ENSG00000267391_29 (sequence is synthesized)
tcagaatcatggcgggagatgaaaggcacttcttacgtggcatcagcaatagaaaatgaggaaaaagc

SEQ ID NO: 1027242 - DNA, 120 bp, Artificial Sequence
  ENSG00000267391_30 (sequence is synthesized)
attacctttccctgggtccctcccacagcacgtgggaattctgtgcgatacaattgaagccgagatctggatggggactcagccaaaccatatcacatgccatttcatttgatccataca

SEQ ID NO: 1027243 - DNA, 120 bp, Artificial Sequence
  ENSG00000267391_31 (sequence is synthesized)
acatggggcaaagatgatcggtttgacaaacagagtctaaagggttctggaatcgtctggtcctccagccacaactcaacatggatctcttaagtctaaagttctgtcctgtacctgcag

SEQ ID NO: 1027244 - DNA, 120 bp, Artificial Sequence
  ENSG00000267391_32 (sequence is synthesized)
cctcctttggcctagttattttgtgaaatctcatgcttcacagtcgaatctgtgtagaacctgggttaatcacgccagtatgcgatcaatatcctcatctccccatctgctttgtcagtg

SEQ ID NO: 1027245 - DNA, 120 bp, Artificial Sequence
  ENSG00000267391_33 (sequence is synthesized)
gattctgagggaaaacctgtaaattagagagggatgagccatataagaatgtctccttgtgagtgttcattgtgcagagaaagctgaaaattgcaaaaccctgtaatcatgaaatgaaag

SEQ ID NO: 1027246 - DNA, 120 bp, Artificial Sequence
  ENSG00000267391_34 (sequence is synthesized)
agaaggaacatctaagtggtagctttggggtcaggaagagggtagacaaactgtcccaacaccaagcagccatctacatgacccagccacctgatgtggcaccaaatgacccagagtctt

SEQ ID NO: 1027247 - DNA, 120 bp, Artificial Sequence
  ENSG00000267391_35 (sequence is synthesized)
gaggttctgaactgttcccagactcggggacaatgtgaggactgggtcttccatgctccttttcactcccactcaccctgagatttttctcaggtggaattaaacagggagccaagtgaa

SEQ ID NO: 1027248 - DNA, 120 bp, Artificial Sequence
  ENSG00000267391_36 (sequence is synthesized)
gttggtcaagagctctacgtagcatgagccaaggatctattgaacttagtaggctcctgtgaccggtgactcttctgtctctagaaatctggggaggtgaccaggtcatacatggcagtc

SEQ ID NO: 1027249 - DNA, 120 bp, Artificial Sequence
  ENSG00000267391_37 (sequence is synthesized)
ttcccgtgaggaacgttaaactggttggaagttggggttctgaggggaagatgtattcactaggtgacctgtcttctctgcctcggtggcctccatggctgcctgctggccgcacacccc

SEQ ID NO: 1027250 - DNA, 120 bp, Artificial Sequence
  ENSG00000267391_38 (sequence is synthesized)
cactcagcagaggaatggactttccaatcttgctgagtgtgtttgaccaaaggtggtgctgacttagtggcctaaggtcgtgccctccctcccccactgaatcgataaataatgcgactt

SEQ ID NO: 1027251 - DNA, 120 bp, Artificial Sequence
  ENSG00000267390_0 (sequence is synthesized)
aggccgccaccgccaccgccaccgccaccactgccagaatcgcctctcgggggtcgccgggtgtctcccactcccccggcctcgggacggggcccgcagtccgcagcctctcccgtggaa

SEQ ID NO: 1027252 - DNA, 120 bp, Artificial Sequence
  ENSG00000267390_1 (sequence is synthesized)
accgggcctcccgtccctgtgcgtcgcgagcgggctccggacagcgccagatgcgagcgcgccgggaagggctgcgaagactcgctcttcgggagctcgaatggcttcttaggaccccgc

SEQ ID NO: 1027253 - DNA, 120 bp, Artificial Sequence
  ENSG00000267390_2 (sequence is synthesized)
agggcgggtttccaggcctgccacggcctccagtgtgggcgtgacgagcgctcctccctggagttcagccctcggcttgggactgcccgctgggttgctcggaggccccggagcatcgga

SEQ ID NO: 1027254 - DNA, 120 bp, Artificial Sequence
  ENSG00000267390_3 (sequence is synthesized)
cgggctccattccatattttttggcgtttttagaagatggtcacggcccactttcgcttttcagaggaccggaaagccttaacagggagttttgaggaatcactaagaggcattgaagct

SEQ ID NO: 1027255 - DNA, 120 bp, Artificial Sequence
  ENSG00000267390_4 (sequence is synthesized)
tccgggattgggagtaagctgccatggaaagaaactcaggctggactactgcatgatgagagatcacatcaaagagaacagtccagccagcccaacttgagacaccagacatgtgatgga

SEQ ID NO: 1027256 - DNA, 120 bp, Artificial Sequence
  ENSG00000267390_5 (sequence is synthesized)
gccatcttggattcctcaccccagccaacaccatgtggagcagaggcaaaccctctccatggagttctgcctgaattgcagacttgtgaataataataaatggccattttaagccgttaa

SEQ ID NO: 1027257 - DNA, 120 bp, Artificial Sequence
  ENSG00000267397_0 (sequence is synthesized)
aacaaccaccggaaggcagaaagatctaagcagcagtctcagcagttgcccagcaccacaaacacagaggtcgaagttcaaatttggaggggcttggtaaacactgttaactttatggtg

SEQ ID NO: 1027258 - DNA, 120 bp, Artificial Sequence
  ENSG00000267397_1 (sequence is synthesized)
agatccaagaagggcatgtgtagaaattaagaccatttctaagaccttagggctgtttctagagccaactacaaaatggaaattgaccacatctaataaagtggctattttattgattat

SEQ ID NO: 1027259 - DNA, 120 bp, Artificial Sequence
  ENSG00000267397_2 (sequence is synthesized)
ttttgaaaatagtcaataaaaagcagacccactagtgacctagatgttggaattggcagacaaattcttcaaaataagtatcagtgttttaaaaatgtatacagagaaatgtggatataa

SEQ ID NO: 1027260 - DNA, 120 bp, Artificial Sequence
  ENSG00000267397_3 (sequence is synthesized)
taagtataataatgggaagtttcagaagaggtctgaaaacggggaaaaaaatcctaaaaccaaaaaagtatctaaaatcaaaaactcattgggatttacagcaaattggacacacacaag

SEQ ID NO: 1027261 - DNA, 120 bp, Artificial Sequence
  ENSG00000267397_4 (sequence is synthesized)
aaaggatcagtgaacttgagcacaggtcaataaaaaatgtccaaactgaaccacagagaaaaaagataaagggattaaaaaaaaaaaaacagccttgatgatcaaatacatgcattgacc

SEQ ID NO: 1027262 - DNA, 120 bp, Artificial Sequence
  ENSG00000267397_5 (sequence is synthesized)
tggaaggagagaagatagagagtggaggctctgaaggagactcttattttctccattctgtggttgctggtaattcttggcttgtcagatgcctcactccaatctctgccattgtcttca

SEQ ID NO: 1027263 - DNA, 120 bp, Artificial Sequence
  ENSG00000267397_6 (sequence is synthesized)
ttataaggacactagttacattgaatttatagcccactttaatccattatgaccttatcttaactggatctgcatagactccgcagtgagtcgaattgtgtccacaggtaagaaagacat

SEQ ID NO: 1027264 - DNA, 120 bp, Artificial Sequence
  ENSG00000267397_7 (sequence is synthesized)
gtttagtcctacccactaatacgtcagaatgtgacattatttggaagtcgggtctttacagaggtaagcaaattaaaatgagatcattacggtgaaccctagcccagtatgactgatggc

SEQ ID NO: 1027265 - DNA, 120 bp, Artificial Sequence
  ENSG00000267397_8 (sequence is synthesized)
cttattaaaaggggaaatgacacagacacatagagaaggaagatgatgtgcagatacagagaaacaccatccacaaaccaaagggtgtctgaatctaccacaacctaggagaggcatgaa

SEQ ID NO: 1027266 - DNA, 120 bp, Artificial Sequence
  ENSG00000267397_9 (sequence is synthesized)
gcagataacccctcacaatcctcagaaagaaccaaccctgccaacaccttgattttaggcatctaacctccaaaacagtcaaaaattattgtggtttaaaccactcaatttatagtactt

SEQ ID NO: 1027267 - DNA, 120 bp, Artificial Sequence
  ENSG00000267397_10 (sequence is synthesized)
tgttacaacagccccaggaaattaatataaatcatatttctaaattgagtctcatgctgatattctgaatagatgaaattcggatacactattcaacctaatacatctactaaacgttta

SEQ ID NO: 1027268 - DNA, 120 bp, Artificial Sequence
  ENSG00000267397_11 (sequence is synthesized)
aagaagaattaacaacaatcattcacaaactcttacaaaaagaagagggaacatttctcaatttattctatgaagccagcattagcctgataccaaagccagacagacataacaagggaa

SEQ ID NO: 1027269 - DNA, 120 bp, Artificial Sequence
  ENSG00000267397_12 (sequence is synthesized)
aacaaaacaagctgaagaccaatatttctgatgaatatacaggtataccctcatcttattgtactttgcagatactgtgtttttttaataaattgaaggtttgtggcaacccagcatcaa

SEQ ID NO: 1027270 - DNA, 120 bp, Artificial Sequence
  ENSG00000267396_0 (sequence is synthesized)
agaagaaggagaactagcacagtgtcacgtaggggctgcagaactgattaacccaggctctctttatacgtttttaaatttcagagatttgttagaggactggctgcagagaagcataaa

SEQ ID NO: 1027271 - DNA, 120 bp, Artificial Sequence
  ENSG00000267396_1 (sequence is synthesized)
catttcaggcaaaaaggaaaagagcactgaagctgggaatacaccgcaacacagacaatgaatgcctcactgctgccggctccagggccagcagtggagaggcacaggctgttggacctt

SEQ ID NO: 1027272 - DNA, 120 bp, Artificial Sequence
  ENSG00000267396_2 (sequence is synthesized)
catcccaccaggtgctctttccacatccttcctcgggccaacaaggggcaggaatggaaatacccgggacccacaggcagctgtgataactgatgttaagagaaccgcaacaggcagtgt

SEQ ID NO: 1027273 - DNA, 120 bp, Artificial Sequence
  ENSG00000267396_3 (sequence is synthesized)
actacagcttcagcagacaactaaagagactgcattaaggtgatttctctggctataaagagagcccggcctgcagagcagtgtgactgctgggacctctgggataggcaacactgccct

SEQ ID NO: 1027274 - DNA, 120 bp, Artificial Sequence
  ENSG00000267396_4 (sequence is synthesized)
ctctcccccagggctactccccgggcaggtcggggcccaaggaatgacccagcaactgctccttacccagcacactctctttactgccacctgcaattatgctgtgaagatgactgggtg

SEQ ID NO: 1027275 - DNA, 120 bp, Artificial Sequence
  ENSG00000267396_5 (sequence is synthesized)
tggtcatcacgattcagagaaatcaagatctatgaccattttaggcaaagagagaaacttggagaattgctgaggactactgaaccttgttttgcttttttaaaaaatactaaatcctca

SEQ ID NO: 1027276 - DNA, 120 bp, Artificial Sequence
  ENSG00000267395_0 (sequence is synthesized)
ccccaccagcgggcactggcccacagccacggccggggggccatctagctggagagagaagggacagcaactccatccgctcctgcaactgccggacgtgtgcctctaggtcccggttcc

SEQ ID NO: 1027277 - DNA, 120 bp, Artificial Sequence
  ENSG00000267395_1 (sequence is synthesized)
ggcttgtttctccttcaccagcgctcagctcaaagatcgacttctcagatccccagcaacacacacacccttacttaatgccccactgtaactacagagaccgtcccatgtctgaagtaa

SEQ ID NO: 1027278 - DNA, 120 bp, Artificial Sequence
  ENSG00000267395_2 (sequence is synthesized)
gatttgggaaggagctcggaatggagccgctggaagaggagacgcgtgcggggagagggcccgggcgggtgcctgtcccgtccacacttagtccccgcgccccgcgggcgcctgagattg

SEQ ID NO: 1027279 - DNA, 120 bp, Artificial Sequence
  ENSG00000267395_3 (sequence is synthesized)
tgagctggtcccgggagatgtccgaggacctcggcgcgccggccccagcagtgggcacgggggaagagggctggtggacgggatgtccccgggagagctggacttgcgccgcccgaggcc

SEQ ID NO: 1027280 - DNA, 120 bp, Artificial Sequence
  ENSG00000267395_4 (sequence is synthesized)
cctcacctcttgcagggcgcgccgcctccggccccggtccggtcgcgctgtcgccggttcttgaaccagttgctgacctgcgtgagcgacaggccggtgtctatacacgccccgcggagc

SEQ ID NO: 1027281 - DNA, 120 bp, Artificial Sequence
  ENSG00000267395_5 (sequence is synthesized)
cctcctcccggtcctccggggaaggggacacatgagggactcacctgtggctccctctgcctgcagcaactccatccgctcctgcaactgccggacgtgtgcctctaggtcccggttccg

SEQ ID NO: 1027282 - DNA, 120 bp, Artificial Sequence
  ENSG00000267395_6 (sequence is synthesized)
agcctctgcctcgcgtagttgactgtggggaggtaaggacggtgagtccgtccgggccggacgagaggggatgccaagggttgccaccggcccgcatcccggccccggccccggccccga

SEQ ID NO: 1027283 - DNA, 120 bp, Artificial Sequence
  ENSG00000267395_7 (sequence is synthesized)
tcccgacctggcgaagttctggttgtccgtgcggatggcctccatctcccggctcaggctctgccgggtgagcacctcctcctccagggcttcctggagctcccgcagcgtcacctcggc

SEQ ID NO: 1027284 - DNA, 120 bp, Artificial Sequence
  ENSG00000267395_8 (sequence is synthesized)
agcctctgcctcgcgtagttgactgtggggaggtaaggacggaacaaatcaggattcccacctgcccaaggcctttgccctggaggctctcgcctgaccacttggcacctttccttccat

SEQ ID NO: 1027285 - DNA, 120 bp, Artificial Sequence
  ENSG00000267395_9 (sequence is synthesized)
gcagcaggtggcggcggtgcatggggcctggccccaccagcgggcactggcccacagccacggccggggggccatctagctggagagagaagggacaggtgtctatacacgccccgcgga

SEQ ID NO: 1027286 - DNA, 120 bp, Artificial Sequence
  ENSG00000267394_0 (sequence is synthesized)
cacccaaggattcagacacagaacccacaacccagggcccctcggaacggtggactaaatttaccaaagaagagcagaggccaacagccaaatgaagcaggcagcatgacacccaggcac

SEQ ID NO: 1027287 - DNA, 120 bp, Artificial Sequence
  ENSG00000267394_1 (sequence is synthesized)
tggcccatgcctaccgcagaggcccaggcagtcagtacacaccaaaggccagcaacaaggggactaactgacctcaacctggttgtccatgctaacacctccgtcaatctcagcatgcta

SEQ ID NO: 1027288 - DNA, 120 bp, Artificial Sequence
  ENSG00000267394_2 (sequence is synthesized)
ctcagatagaaagtggcataactttaagccagtgctgtcaaccgtgccacctcccaaaatgcaaaggggcaggtagagagctaacgggagaccacatgaatgcctctcctggtctctttc

SEQ ID NO: 1027289 - DNA, 120 bp, Artificial Sequence
  ENSG00000267394_3 (sequence is synthesized)
cttcctgtttacagcctgtttcacttcccccaccacgctgagtggggggtatgtgtgtatgtcagaaaagggggatcagttacctcattagaaatctccacccatttgagcttgcacatg

SEQ ID NO: 1027290 - DNA, 120 bp, Artificial Sequence
  ENSG00000267399_0 (sequence is synthesized)
attcacagtgttcactcaaccagtactgcttcccttcttatccaatgcaatgattgattccatttaagtcaaagaaaagcaagagggaccataacatacattgatttgcctagaaatatc

SEQ ID NO: 1027291 - DNA, 120 bp, Artificial Sequence
  ENSG00000267399_1 (sequence is synthesized)
ctaccatacagttttttgttttacatttgtgagcttatataaaagttagaaatgacctagggaaaatgtattaaccctactgtacagaagaggaaactaaaactcagagaggttaagcct

SEQ ID NO: 1027292 - DNA, 120 bp, Artificial Sequence
  ENSG00000267399_2 (sequence is synthesized)
cctcctgcaaggctaaagtagccagcccagctaaccatcaggagcctatttgctctaactcacatttacagaatgcacttggtaaataggagttcaataactgtttgttgaagaaagaaa

SEQ ID NO: 1027293 - DNA, 120 bp, Artificial Sequence
  ENSG00000267399_3 (sequence is synthesized)
agaactatggtgggtcagatgagagacaaaaatcactctgcagagatacagcatgcaggagaccacctctgagactgaggcaagagtgtgcctgaaatgccaggggttcgatctaggtcc

SEQ ID NO: 1027294 - DNA, 120 bp, Artificial Sequence
  ENSG00000239628_0 (sequence is synthesized)
agactggactcttacttcctatttattatggcccaccatgatctctgcaatacttgcatggagcctaagttaaagcctgaaaaaacagctaggcatggtggcatgcacctatagtctgag

SEQ ID NO: 1027295 - DNA, 120 bp, Artificial Sequence
  ENSG00000239628_1 (sequence is synthesized)
gctagaccctatcttatttaaaaaagaaaagaaaggaaaaaaagctggaaaaaaataaaaggaagtgctgcatgacactattcagggagatgaggttaatagtttttaagcatgtggttt

SEQ ID NO: 1027296 - DNA, 120 bp, Artificial Sequence
  ENSG00000239628_2 (sequence is synthesized)
tcatcctattttataccttactataaggtataaaagtagaaatagggaccttgtagatccagtactgacttggcagataagaggagaaagcagtccagaggagaaaccctactcaacgag

SEQ ID NO: 1027297 - DNA, 120 bp, Artificial Sequence
  ENSG00000231114_0 (sequence is synthesized)
aaatcttggagaagtctccattctgggaacctcctccttctcatccatggaaagggaagaaggatgcctggagtgggataaagaaaatatagaaaaggaagggagtgtcttcacatccca

SEQ ID NO: 1027298 - DNA, 120 bp, Artificial Sequence
  ENSG00000231114_1 (sequence is synthesized)
gcagggcacatggaggaggaggaggaggtgctgactatggacagcaagaagcaacatcaccatcacaaaacacccacccagggcaggggccctttcaacaaggagcataagagactgttt

SEQ ID NO: 1027299 - DNA, 120 bp, Artificial Sequence
  ENSG00000231114_2 (sequence is synthesized)
gatggaagcccagcattttgtttttctccacatattttaatcaatatttaccaagccataacaatctggctttcactgtcaccctagggttgagtttcatgagtaactaccttttccact

SEQ ID NO: 1027300 - DNA, 120 bp, Artificial Sequence
  ENSG00000231114_3 (sequence is synthesized)
ggctgcagaaataatgactccatgtatgattggcagaaggtcattcatttgagcataggaaaacaagcagtttcaagaaaagagctggcatctctgcatgagtgaatcagtgcacatcta

SEQ ID NO: 1027301 - DNA, 120 bp, Artificial Sequence
  ENSG00000231114_4 (sequence is synthesized)
gtgtatgctgcgaattaatacgtgaatgaacaaatgactacaggcattatccgaatgatatgatcttccttccccatctttctgggtgtcggccttcattcaccatgaagttgtaaacac

SEQ ID NO: 1027302 - DNA, 120 bp, Artificial Sequence
  ENSG00000231114_5 (sequence is synthesized)
aacattgattttggagtcagacaacctaagttcaaatctagcctttgctaattactggctgaaatcattgagaaatctacttaacctgcctgagacctcagtttccttatttgtaaatgg

SEQ ID NO: 1027303 - DNA, 120 bp, Artificial Sequence
  ENSG00000231114_6 (sequence is synthesized)
agaagcctctcctcggccaattggcctcctttggaagatatggcctcacaccattccatgtgcatgtgaaatgtctagacgtgattatagagttttcttgagagctgatgcatccaagga

SEQ ID NO: 1027304 - DNA, 120 bp, Artificial Sequence
  ENSG00000231114_7 (sequence is synthesized)
ttctcagaaaataaaaattgttaatatggtcttaccacattttctaatgaaagcatgttgtgaatgctcaggaagaagaaggtacagtaatgggactagaaatctgcagcttggatggga

SEQ ID NO: 1027305 - DNA, 120 bp, Artificial Sequence
  ENSG00000231114_8 (sequence is synthesized)
gcccagtcaccaattaccaagtgctacaagcctgaggctacttctcattgaaagggcctcccaggcattgagggtgtccacagttcagtgagacctcagaagcctgcacgtagttcatgc

SEQ ID NO: 1027306 - DNA, 120 bp, Artificial Sequence
  ENSG00000231114_9 (sequence is synthesized)
tcagttcttaggataatcctgtctctccacaattccttcaggcttgcaacactctcttaccccaaatcagctcttcccctacatttcccctttctatcaatggcactagaattctcccaa

SEQ ID NO: 1027307 - DNA, 120 bp, Artificial Sequence
  ENSG00000231114_10 (sequence is synthesized)
attgatcaatgtcaacatctcattgtttactcacccttcatgtactcacctcccattataatgtctagattacagatagcctttattttacctcacggcatgtccagaaagaatctgtct

SEQ ID NO: 1027308 - DNA, 120 bp, Artificial Sequence
  ENSG00000231114_11 (sequence is synthesized)
taactacctacttacaccaaggcatcagcaattcatttatttattcattcatctgttattgtatgaagtattggctaagagatctatagtgaagtggggagagatagtcatttaaagtaa

SEQ ID NO: 1027309 - DNA, 120 bp, Artificial Sequence
  ENSG00000231114_12 (sequence is synthesized)
ctgtcatataagaatgagtaagcattcacaccgttgcttccaccagaactcacactttcttccttatatttttccatctttaaacacaagttaggagacactacctcctggaagcctccc

SEQ ID NO: 1027310 - DNA, 120 bp, Artificial Sequence
  ENSG00000231114_13 (sequence is synthesized)
ctgaatccaccctcagctgactaaaatgtctctccaatgggcttttacaagtgcatatctagttcattgcactgaaatttcactgattagctattcatgtgcctgcctgctccccccaat

SEQ ID NO: 1027311 - DNA, 120 bp, Artificial Sequence
  ENSG00000231114_14 (sequence is synthesized)
tagactgtcctattcaaaaacagggactgtgtcatattcatctctgtattcctgatacttaacatagagcccagctcattgtgtgcattgcatatttttaaatgaacacatgaatgaatg

SEQ ID NO: 1027312 - DNA, 84 bp, Artificial Sequence
  ENSG00000228566_0 (sequence is synthesized)
cagattccaaggaatgaaatcttgggccatgcgctccccaaatactggcagctgaaaaaaatgagtgaatgaagaaggaggaag

SEQ ID NO: 1027313 - DNA, 120 bp, Artificial Sequence
  ENSG00000228566_1 (sequence is synthesized)
ctggcagctgaaaaaaatgagtgaatgaagaaggaggaagccaggggagacaaagaaacaggatacacaacacaggggaaagatgaaaaggactccccaggatggtggtgaagagagttg

SEQ ID NO: 1027314 - DNA, 120 bp, Artificial Sequence
  ENSG00000228566_2 (sequence is synthesized)
ctaggatgacaactgtgcatcaagcttaaaacccagattggagcgtgtgaaccaagagatatatatggcatcatctttttgaactaaaaatggctgcgtgaacctggcccagtgtttatc

SEQ ID NO: 1027315 - DNA, 120 bp, Artificial Sequence
  ENSG00000228566_3 (sequence is synthesized)
cattccctccatagggatgttctgctcggacctgttcctgagagctggaggttggtcaaggccatcaagctccagatgatcctcagtgagggataccgctctctcagtattcaagagtca

SEQ ID NO: 1027316 - DNA, 120 bp, Artificial Sequence
  ENSG00000228566_4 (sequence is synthesized)
cccttccacagagaagccctagactgcccatcagtggaatatgagagaggtaaaatcctgcccctgtctccttctgacctggctggataccattttcaccaacagattcacccacacagt

SEQ ID NO: 1027317 - DNA, 120 bp, Artificial Sequence
  ENSG00000228566_5 (sequence is synthesized)
caccctgccttgacagctagcaagaggccaagacacacagaacaacgactaccacccctctgacagcaggaagcagttacagaagactgacctttgtccattttcccaaagaattgggtc

SEQ ID NO: 1027318 - DNA, 120 bp, Artificial Sequence
  ENSG00000228566_6 (sequence is synthesized)
ttgcagaagtcatagagaccctttaaataatattcttggattatttgtttgcctccagccatcttcaattgtcaaccttttcctcaaacagtagtgcattgaaaacttttatttttaaag

SEQ ID NO: 1027319 - DNA, 120 bp, Artificial Sequence
  ENSG00000228566_7 (sequence is synthesized)
aaaatttgaaagtgttaactgattaaactaattttctacttgaggataatccatgaagctaaaataatactgctttgattgattgcaaaagaaaaataagacaattgaatattttgtctt

SEQ ID NO: 1027320 - DNA, 120 bp, Artificial Sequence
  ENSG00000228566_8 (sequence is synthesized)
ttttctagatcaaacatcaaactgccaaagacagaaaattatttactgatgtacattatttgacaaactattcaaaggaatgaccccactatttatgcagttttaagcagagaaggagag

SEQ ID NO: 1027321 - DNA, 120 bp, Artificial Sequence
  ENSG00000228566_9 (sequence is synthesized)
tggagactactttttccaaaactctatgtgggatgtggtcacctagttggttggaaccagctcctgacagaccccagcaactgacagatgaacctgagtgaactttcctcattatcatgc

SEQ ID NO: 1027322 - DNA, 120 bp, Artificial Sequence
  ENSG00000228566_10 (sequence is synthesized)
taaagtctccatcccgaaaggaactatagcttcattaccagaacatgcaacctttgtgctggcataaaggctcactgcgtctaaagcaactgggacccgtcccgtacatgtgatgatgca

SEQ ID NO: 1027323 - DNA, 120 bp, Artificial Sequence
  ENSG00000228566_11 (sequence is synthesized)
cactctcctctctccatagcgccataaactctctcagggagacactgctttgaggaatgcttccttacttgtgctaagtaataaaactcctattgattaaaatttacattcttgtggatt

SEQ ID NO: 1027324 - DNA, 120 bp, Artificial Sequence
  ENSG00000228566_12 (sequence is synthesized)
agagactgtatggaaccctaccttccttcagatgatggcaaatcctcccgggtcctatagaacggttctctctcttgcctttaggttcttctccccagctagggttcacagggttacttt

SEQ ID NO: 1027325 - DNA, 120 bp, Artificial Sequence
  ENSG00000228566_13 (sequence is synthesized)
cctgacaatcaggtgaagctgactatgtgacctcaggccatcaagctccagatgatcctcagtgagggataccgctctctcagtattcaagagtcacccttccacagagaagccctagac

SEQ ID NO: 1027326 - DNA, 120 bp, Artificial Sequence
  ENSG00000228566_14 (sequence is synthesized)
tgcccatcagtggaatatgagagagagccagagccttcagaccaagacaatcgaacatccctggatatctgagatagccagcctttcttctggagagcttcccagttggcatgatgacaa

SEQ ID NO: 1027327 - DNA, 120 bp, Artificial Sequence
  ENSG00000228566_15 (sequence is synthesized)
cgtatttggccctggcaatagattatggctggtacaaaccagttctcaggatatcttacaactagaggcagccttaagaccctgttttgtcgagaatacctacttggaagtctagtcaaa

SEQ ID NO: 1027328 - DNA, 120 bp, Artificial Sequence
  ENSG00000228566_16 (sequence is synthesized)
ctggacaagtgagtgaattcattttttttcaggttagtcatcaaaataaactttgtggatatgattgtacattacttattcttttattctcatacctccatttatattcatgttctgtta

SEQ ID NO: 1027329 - DNA, 120 bp, Artificial Sequence
  ENSG00000228566_17 (sequence is synthesized)
attctacattcctaaagaattaaactttctcttccaaaagatctattatggcctttatacaatgtctttataattttctatgagaactattgaagtagctgcctaattaatatctccgtc

SEQ ID NO: 1027330 - DNA, 120 bp, Artificial Sequence
  ENSG00000228566_18 (sequence is synthesized)
ttaggtttgtaacctttttgttcattttctagtcttctatcaaagtaatctttctcaaatataaatctggtcatatttgttccatgcttacatctctttgattacttcccattatctact

SEQ ID NO: 1027331 - DNA, 120 bp, Artificial Sequence
  ENSG00000228566_19 (sequence is synthesized)
aaaaaatgttcaaatgtctggctcgagaaacatgatcttcttgatgattttgctggctttttcatcttcattttctacttgtgaccccttgaatccaacaaaccagttataataaagcat

SEQ ID NO: 1027332 - DNA, 120 bp, Artificial Sequence
  ENSG00000228566_20 (sequence is synthesized)
agagcagctttaatattgcagcaatttggatgtctgcataaaagcagacttgtttttttttctctccacttctggctcctggaaataatattctcttaaccttttggaattaaaccagcc

SEQ ID NO: 1027333 - DNA, 120 bp, Artificial Sequence
  ENSG00000228566_21 (sequence is synthesized)
aaatagagtgtaacatgtttcttaatcatttgggccaccttctcctttctgaatggatgttggtttcagtgggaatgttttctgtggttgtggatcattgagaagatggtgctgatttgc

SEQ ID NO: 1027334 - DNA, 120 bp, Artificial Sequence
  ENSG00000228566_22 (sequence is synthesized)
tctggtaagctgaaggaacaaccaggcacgtggcatgaagtgaaataaggacaaatgcaagagacatcctggagacaggcaactgaggacaaagaaagtctgtggggaaagggtggtgaa

SEQ ID NO: 1027335 - DNA, 90 bp, Artificial Sequence
  ENSG00000228560_0 (sequence is synthesized)
gtgccttgcttcccctttgccttccaccacaatgctaagtttcttgaggcctcccgagacatgctgaactgtgagtcagtcaacttcagg

SEQ ID NO: 1027336 - DNA, 120 bp, Artificial Sequence
  ENSG00000228560_1 (sequence is synthesized)
cccagtttcaggcaattctttatagcaatgtgaaaatggactaatatacaactgaagtcatttggtaaaataagcttcaagattcctcttttcatctctcactgaagaaatatacccctt

SEQ ID NO: 1027337 - DNA, 120 bp, Artificial Sequence
  ENSG00000228560_2 (sequence is synthesized)
ttcataagaaaatctacaaagagtatttataagaaattggtgcatggctgtgcttcaactcctcagtgcatgatatgaaagaaaatcagatgaggttgcaagaaataaattttgtgttag

SEQ ID NO: 1027338 - DNA, 120 bp, Artificial Sequence
  ENSG00000228560_3 (sequence is synthesized)
acatcagagaccatttcttgacaggaaaagttgtttgtgatgtgtgcagcatggtttctcaagatctggctgtataaacaatggacagggctgagaaccaggaagtgcagtgtctctggg

SEQ ID NO: 1027339 - DNA, 120 bp, Artificial Sequence
  ENSG00000228560_4 (sequence is synthesized)
agaatagccaaacattcttgaagaaaagaaacaaatggagagaacttgtccttcaaatatcatttactataataaagctgtagtaattaagaaggcatggttttggcacagggataagca

SEQ ID NO: 1027340 - DNA, 120 bp, Artificial Sequence
  ENSG00000228560_5 (sequence is synthesized)
ctcaaaccaatgagagaaaatggaattctaaaatatgaaaattattcaaacggggctggcattcctgattgatggaaagcacagactagtcaattaatgcaatagttggtcattcatatg

SEQ ID NO: 1027341 - DNA, 120 bp, Artificial Sequence
  ENSG00000228560_6 (sequence is synthesized)
aggaaaaaatgaaattaggttagcttataccatacaaaattcaatcacaaatggattaaaaacctataaacaaacaaaaaactctattaaatatttagaagacactatgtgagaatattt

SEQ ID NO: 1027342 - DNA, 120 bp, Artificial Sequence
  ENSG00000228560_7 (sequence is synthesized)
ttaaaacttgagataaatgattccttaaggtacaaaacagcaaaaaatgacaacctttattatataaaaattaatttgtgttttccagaatcacaaaaaagaaaaaaagcaaggtaaaaa

SEQ ID NO: 1027343 - DNA, 120 bp, Artificial Sequence
  ENSG00000267028_0 (sequence is synthesized)
caggagacactgggagtaaagcctggcctttggctctgccaaagaccacccaggggactggagaaaagagtggttggtggctggagctacaggcctgttgcgtgacaagggtgccctgga

SEQ ID NO: 1027344 - DNA, 120 bp, Artificial Sequence
  ENSG00000267028_1 (sequence is synthesized)
gaaggtcctggggaaagcaaagttaccttgattgcctttgacaacactcaagtacttcattggcccttctgctgcagaacttgaacacgtggttcttcaaatacagtactttcctcccaa

SEQ ID NO: 1027345 - DNA, 120 bp, Artificial Sequence
  ENSG00000267028_2 (sequence is synthesized)
ctcccaccactccactttcctactatgactatttcactcctctatcaactcagctgaatcatcatttccttgggtcagctttccttgtcccccctgactagcaataaatgtcctcctcaa

SEQ ID NO: 1027346 - DNA, 120 bp, Artificial Sequence
  ENSG00000267024_0 (sequence is synthesized)
gggaccggcaggctcttgcaaagggctggcgacctccagctgagaccggcggtgttattcccacaccagcataggcccgccatcagacctaaaaagtctaagggtcgccttctagcctgg

SEQ ID NO: 1027347 - DNA, 120 bp, Artificial Sequence
  ENSG00000267024_1 (sequence is synthesized)
aggagctaccttcctagctgccactgtgacagctggccctggaccctggaagggcagaccaacccacagtcaggaggtcctggcccggccccggccccggcaccagcacccaaaggcaaa

SEQ ID NO: 1027348 - DNA, 120 bp, Artificial Sequence
  ENSG00000267024_2 (sequence is synthesized)
aaggcaactcagaaaaacagaggttaataacttgtgagttaaaataaggtacatacaaacatatttggatgtaaacatttgttttaatttatattaataaaaggaaatgctctacttaaa

SEQ ID NO: 1027349 - DNA, 120 bp, Artificial Sequence
  ENSG00000239994_0 (sequence is synthesized)
gatgttaacagttagcatttgtccttactttgtgccaggtactgttttaagcagttcacatgtaattattcatttaatcctcctagaagatagtattttaatatccgcattctcagaaga

SEQ ID NO: 1027350 - DNA, 120 bp, Artificial Sequence
  ENSG00000239994_1 (sequence is synthesized)
gtggaattcaaccaagggtgtaatggctttgaagcaggctggcctcactttgaactcaggagaagtggaacagagttgcatattttcttaaggcgctgtttttccacctggcgccgacca

SEQ ID NO: 1027351 - DNA, 120 bp, Artificial Sequence
  ENSG00000267026_0 (sequence is synthesized)
cagtaatgaccagacacatcacacccgccttctagaagccctccctcacaaaccggatcaactgctatgataaaggtaagacaaggaacagtgttgaggaaggcaggaataaacaactac

SEQ ID NO: 1027352 - DNA, 120 bp, Artificial Sequence
  ENSG00000267026_1 (sequence is synthesized)
agcagggtggtcagagaaggctacacagagttgattgcactggacatcagaggttgaggaagaatgttcttggaagaaaaggtaggaagatcatgtcttccagtggaggtgtgagacagc

SEQ ID NO: 1027353 - DNA, 120 bp, Artificial Sequence
  ENSG00000267026_2 (sequence is synthesized)
ctcgtccattcagggatgtgcaggcggaacaggcatcttcttccagggggtgagaggtggcaggagctaagaggcaacatacatggctggacagtgagattgtgttaatgtggattattc

SEQ ID NO: 1027354 - DNA, 120 bp, Artificial Sequence
  ENSG00000267026_3 (sequence is synthesized)
tatgcattcttctcctctccattgtgaatagagttttggtttccttcttttcatgattcaccattagaagaacccacccaggtaatcactgcttgctcggatcccagcaaattctagatc

SEQ ID NO: 1027355 - DNA, 120 bp, Artificial Sequence
  ENSG00000267026_4 (sequence is synthesized)
ccagaactagtgctcttagagccaaggccagccgatccaagtctggactactgctcagatgagccgagcctgaatttgggagtggttgttacagagcattaccctggcaataactgactg

SEQ ID NO: 1027356 - DNA, 120 bp, Artificial Sequence
  ENSG00000267026_5 (sequence is synthesized)
atgcagagatgtaaatagacatcactggtggagcccccaggaaagctctttaacagaagacagactcagctggcaggtttcccgtctccttgaatgaagacaggctcaatgcttggaggg

SEQ ID NO: 1027357 - DNA, 120 bp, Artificial Sequence
  ENSG00000267026_6 (sequence is synthesized)
ttgtggcaaatgctacagtaatgaccagacacatcacacccgccttctagaagccctccctcacaaaccggatcaactgctatgataaagtgtccactaccattccttgagggcttacaa

SEQ ID NO: 1027358 - DNA, 120 bp, Artificial Sequence
  ENSG00000267026_7 (sequence is synthesized)
ccatggtgtgtggcttttctgggcagcctgcaaatgtcattgctagtgacaacatttttctgcaggaaaacatattccagcttttaatcatctttagaataaacccatttataagcagta

SEQ ID NO: 1027359 - DNA, 120 bp, Artificial Sequence
  ENSG00000267026_8 (sequence is synthesized)
gccttccctcccagcagcaaaagcagtcagaggacgatgttccctagtctaatctgctctttccttccttcattcattcaatcaatcattcacgcagctggccagcagacactggatgac

SEQ ID NO: 1027360 - DNA, 120 bp, Artificial Sequence
  ENSG00000267026_9 (sequence is synthesized)
cacccctgggccaggccttgtggcaaatgctacagtaatgaccagacacatcacacccgccttctagaagccctccctcacaaaccggatcaactgctatgataaagcaaattctagatc

SEQ ID NO: 1027361 - DNA, 120 bp, Artificial Sequence
  ENSG00000267026_10 (sequence is synthesized)
gccgtgtggaaagacagaaggagcctccatccctcagcaccacagagacattgtatcagcctagaaatgcctaaatctgaacttcctcttacctaagaaaaataaaacctcaatttgatt

SEQ ID NO: 1027362 - DNA, 120 bp, Artificial Sequence
  ENSG00000267026_11 (sequence is synthesized)
cagtaatgaccagacacatcacacccgccttctagaagccctccctcacaaaccggatcaactgctatgataaaggctctgtggtgcaagcagaggagatggtcagcaggcagtcgggta

SEQ ID NO: 1027363 - DNA, 120 bp, Artificial Sequence
  ENSG00000267026_12 (sequence is synthesized)
gagagagacccatgctggagagggatctggaattgccagtgtgtaggtggattaggcagtggaacagtccttgtgatcctgaagttagcaacgccctagcctccttctttcaacaccagc

SEQ ID NO: 1027364 - DNA, 120 bp, Artificial Sequence
  ENSG00000267026_13 (sequence is synthesized)
tctcacttcttgtcttagattgctttgcaccttcctgtcccttaattgatgtcaggacctgaatatatttgatagtgatttgaagcactgatgctacaaatgaaagagattgatgctggg

SEQ ID NO: 1027365 - DNA, 120 bp, Artificial Sequence
  ENSG00000267026_14 (sequence is synthesized)
agggctgatgggcatgtgctaggactgacacaggctagcatctcccgagaagacgtaaggacaagcaactccaaatggggatgacattgatgactcttccacctctcctgtttggtttcc

SEQ ID NO: 1027366 - DNA, 120 bp, Artificial Sequence
  ENSG00000267026_15 (sequence is synthesized)
ttgggaggccaaggtgggcgaatcacaagctaagaggcaacatacatggctggacagtgagattgtgttaatgtggattattcctccacaaatatgcattcttctcctctccattgtgaa

SEQ ID NO: 1027367 - DNA, 120 bp, Artificial Sequence
  ENSG00000267026_16 (sequence is synthesized)
cagtaatgaccagacacatcacacccgccttctagaagccctccctcacaaaccggatcaactgctatgataaaggaattcagcatgaacttggccactctgagcgcctagaggccacac

SEQ ID NO: 1027368 - DNA, 120 bp, Artificial Sequence
  ENSG00000267026_17 (sequence is synthesized)
tcaggtcgaaggcacgtggccctgtgacaacgtggcagctcacttcttcaaagccagcagcagacactctcagcaggtggcctctaggagctgaggttctcagtcctacaaccacaagga

SEQ ID NO: 1027369 - DNA, 120 bp, Artificial Sequence
  ENSG00000267026_18 (sequence is synthesized)
ccagtcccagccaacaccctgatttcagcctgcaagatccaaagctgcgatccccagttgagccaagcaagccctgatttctgacctacaggaactgtgagataataaatgggtattttc

SEQ ID NO: 1027370 - DNA, 120 bp, Artificial Sequence
  ENSG00000267026_19 (sequence is synthesized)
agctgctgcgtagccatagaaaactaatacagatttcggtgcctggaagtgagatgttgctgtaacaaatacctaaaatggagaagggtggagggattttgaggagcatgataaagcctg

SEQ ID NO: 1027371 - DNA, 120 bp, Artificial Sequence
  ENSG00000267026_20 (sequence is synthesized)
catctccttgtagaaatgtggatggttgctttgggaggccgaggcaggaggattgctggaagacaggagttcaagatcagcgtgggcaacaaagtgagactccgtctccacaaaaaataa

SEQ ID NO: 1027372 - DNA, 120 bp, Artificial Sequence
  ENSG00000267026_21 (sequence is synthesized)
cagtaatgaccagacacatcacacccgccttctagaagccctccctcacaaaccggatcaactgctatgataaagctccaccccactaaaaggaatgtcacttctgagcaacgtgggtga

SEQ ID NO: 1027373 - DNA, 120 bp, Artificial Sequence
  ENSG00000267026_22 (sequence is synthesized)
acagagctacttttagcccattgttctactgtggggaacagagggaaacccagggaacgaaacaaacagtgtcacctgccttctgtagtaatagtaaccaggggacagctagatacaacc

SEQ ID NO: 1027374 - DNA, 120 bp, Artificial Sequence
  ENSG00000267026_23 (sequence is synthesized)
tacttgacttgcccaccgatccctacacttcacatgacctgtgtagatatgcacagcaaccacttcccagtcacctgtgacctcccggaactcctgcctgcttgttccaaacccatcaat

SEQ ID NO: 1027375 - DNA, 120 bp, Artificial Sequence
  ENSG00000267026_24 (sequence is synthesized)
aatgacctgaataaatcaatacaatgttcctagtgacagtctctctatactgggaaaactttaaccccgcagctgaggtattatcagttaatgcaaagtacgttgcttgaacctgatttc

SEQ ID NO: 1027376 - DNA, 120 bp, Artificial Sequence
  ENSG00000267026_25 (sequence is synthesized)
cacccatgcagatatcttcgtacctgggaattcttgtaaataccaaaataaaatctttatcttttttgctaatgagagtaaaaggcacgactgtaaaatatacatcttgatagaaaaata

SEQ ID NO: 1027377 - DNA, 120 bp, Artificial Sequence
  ENSG00000267026_26 (sequence is synthesized)
ttataaggttttaattttctaaataccaagggttaacatcttacgattaccctttgaaaatagggtattttggaacatttaaaaagttctcaaaataagtacaaagcttattcacatttt

SEQ ID NO: 1027378 - DNA, 120 bp, Artificial Sequence
  ENSG00000267026_27 (sequence is synthesized)
tttttggtgggttctggtcactgcttagctaagtctttgttgggcagagtcctggctccacagtctccttcgatgggctccttgatacacgaggcttcataacatgcgctctttgaagaa

SEQ ID NO: 1027379 - DNA, 120 bp, Artificial Sequence
  ENSG00000267026_28 (sequence is synthesized)
ccatttctgatgatccgagttggtgcagtctcgtaagagtggaacgaaactgtcactcgactccttcctcgcagcctggacacatttcttggactgttcgtgaaataaagatccatccta

SEQ ID NO: 1027380 - DNA, 120 bp, Artificial Sequence
  ENSG00000267026_29 (sequence is synthesized)
cagtaatgaccagacacatcacacccgccttctagaagccctccctcacaaaccggatcaactgctatgataaagaaaccttttatttgcttgcatagtttggtttccttcttttcatga

SEQ ID NO: 1027381 - DNA, 120 bp, Artificial Sequence
  ENSG00000267026_30 (sequence is synthesized)
gagagagacccatgctggagagggatctggaattgccagtgtgtaggtggtgagtgagaagctgaagaagacaataatgatgcagactttggaaaccattctggactccctgcttcagga

SEQ ID NO: 1027382 - DNA, 120 bp, Artificial Sequence
  ENSG00000267026_31 (sequence is synthesized)
cagtaatgaccagacacatcacacccgccttctagaagccctccctcacaaaccggatcaactgctatgataaaggatggcaatgtgccaactagaaaagccacacttgaccgggcatgg

SEQ ID NO: 1027383 - DNA, 120 bp, Artificial Sequence
  ENSG00000267026_32 (sequence is synthesized)
gggaggccaaggtgggcgaatcacaagctccaccccactaaaaggaatgtcacttctgagcaacgtgggtgaggaatcagcagccgaagtagcagcaagctggaaaggatggatgcttct

SEQ ID NO: 1027384 - DNA, 120 bp, Artificial Sequence
  ENSG00000267026_33 (sequence is synthesized)
caatctgttccactgacccttacctcgtaaaagaaagttcaagatgattcagaaaggaatcatgacatggcgattgagacagaactctctatcccctgggtattaagcacactgaagatg

SEQ ID NO: 1027385 - DNA, 120 bp, Artificial Sequence
  ENSG00000267026_34 (sequence is synthesized)
ggtaagggctggatgaagcaatcgcagtcaatttggccactgcctgtaggcctctctgactgagcagcaagaacctcagagagggaaactgaagacatacctcccacccgcatcctgttt

SEQ ID NO: 1027386 - DNA, 120 bp, Artificial Sequence
  ENSG00000267026_35 (sequence is synthesized)
cagtaatgaccagacacatcacacccgccttctagaagccctccctcacaaaccggatcaactgctatgataaagggttctgcagagtggccgaagttcatcctcccttctccaggcaca

SEQ ID NO: 1027387 - DNA, 120 bp, Artificial Sequence
  ENSG00000267026_36 (sequence is synthesized)
taaacatccctgcagctcttggattcaatgttttcccagggagatggactaattacaagagaagtgttgaaaagttgatattcctgcagatggagaaggaaggaggattgggaacctcca

SEQ ID NO: 1027388 - DNA, 120 bp, Artificial Sequence
  ENSG00000267026_37 (sequence is synthesized)
aggacctctttgttctaccacatgcagcaaacagcacagaactcagggcttctgtgaagagcaacagttcccagacactctgctggctgaggctgatctggttcccaggacacttctggg

SEQ ID NO: 1027389 - DNA, 120 bp, Artificial Sequence
  ENSG00000267026_38 (sequence is synthesized)
taatgaccagacacatcacacccgccttctagaagccctccctcacaaaccggatcaactgctatgataaagatggctgccagcacctctctgaactacatccctccaggattaggcagt

SEQ ID NO: 1027390 - DNA, 120 bp, Artificial Sequence
  ENSG00000267026_39 (sequence is synthesized)
cagtaatgaccagacacatcacacccgccttctagaagccctccctcacaaaccggatcaactgctatgataaagctaagaggcaacatacatggctggacagtgagattgtgttaatgt

SEQ ID NO: 1027391 - DNA, 120 bp, Artificial Sequence
  ENSG00000267026_40 (sequence is synthesized)
ggattattcctccacaaatatgcattcttctcctctccattgtgaatagagtgtaagtacttacgcgttgatgttgagcttagtaacatgacttcctttggaatgttagtggaaggaata

SEQ ID NO: 1027392 - DNA, 120 bp, Artificial Sequence
  ENSG00000267026_41 (sequence is synthesized)
aggacaccaaaatgggggaaagtttgtgaaatgttgcaatgggagaaaggaactcagtggcccatgtaaatcttggatatgtttgagatgtggcattgcctgtctctgtgtcttcacaag

SEQ ID NO: 1027393 - DNA, 120 bp, Artificial Sequence
  ENSG00000267026_42 (sequence is synthesized)
gataataagcttctccagtgttactgtaagccagtgtgatccctatcttcattaatttttgcctggaaactcctggcccatgactattgtaaaaagtcctggcaaagtgtgcctagccaa

SEQ ID NO: 1027394 - DNA, 120 bp, Artificial Sequence
  ENSG00000239992_0 (sequence is synthesized)
catagctggttattcctcccttgcatgtacttttgtttcctgggggcactcgtagaagctgaagccacctagactctaagacacctgattgcagagacaggaaaggagttctcaagataa

SEQ ID NO: 1027395 - DNA, 120 bp, Artificial Sequence
  ENSG00000239992_1 (sequence is synthesized)
cattgttgattagagacatatccctattgaaaatatttcctggcaaaaaatagaagttctctttggctctgaaatctgcaactccctttcagatgtccctgtgtccttgtaccgtcactc

SEQ ID NO: 1027396 - DNA, 87 bp, Artificial Sequence
  ENSG00000263731_0 (sequence is synthesized)
tttatgaccttgacacttttaaagggtactctcagctattttgtagaatgtccctcacactggggactctgaccttatgactggaca

SEQ ID NO: 1027397 - DNA, 120 bp, Artificial Sequence
  ENSG00000263731_1 (sequence is synthesized)
gggattacaggcctgagccaccacgccctgctggtttattttattttttggcatgaataccacagctgggatgtcatcttctcaatgcatagtggagatatgcaatgtcagtctgtccaa

SEQ ID NO: 1027398 - DNA, 120 bp, Artificial Sequence
  ENSG00000263731_2 (sequence is synthesized)
ctgtccaactcctggtcctgttagttcaggtggtggcagcggctgccggggcttctcccctacatagttactgttttccctttgtcatccataaataccttggggagatacttccagact

SEQ ID NO: 1027399 - DNA, 83 bp, Artificial Sequence
  ENSG00000263731_3 (sequence is synthesized)
tttgtcatccataaataccttggggagatacttccagactaagtgaatgtctgtttcacttccaagttttacctgccgaggct

SEQ ID NO: 1027400 - DNA, 64 bp, Artificial Sequence
  ENSG00000263731_4 (sequence is synthesized)
ccactaattaatttcagcatccactggtgggtcttgcaatgcagtaattattaacttagttttc

SEQ ID NO: 1027401 - DNA, 120 bp, Artificial Sequence
  ENSG00000263731_5 (sequence is synthesized)
tggtgggtcttgcaatgcagtaattattaacttagttttcaaaggtgatttttgcattttcctcattcctttgacgtttattaattggaattcatctctaagaaagagcagtcccttcag

SEQ ID NO: 1027402 - DNA, 90 bp, Artificial Sequence
  ENSG00000263731_6 (sequence is synthesized)
ttttttgagacagggtcttgctctgcggctcaggctgcagtgcagtggctcgatcacgcgtgatctcccatctcagcctcctgagtaacc

SEQ ID NO: 1027403 - DNA, 120 bp, Artificial Sequence
  ENSG00000263731_7 (sequence is synthesized)
agcctcctgagtaaccagaaccacaggtgctcaccaccatgcccagctgactttttgtattttttgtagagatggggtttacccatgttgctcaggctggtctcaaattttcgagctcaa

SEQ ID NO: 1027404 - DNA, 120 bp, Artificial Sequence
  ENSG00000263731_8 (sequence is synthesized)
cgcctgacctacgatttctttctttatatatcagtatgaacgcaagggctgtttgttggattctgtgagtcataatctgatactgtttccacgctttggccattgggagctcctggagat

SEQ ID NO: 1027405 - DNA, 120 bp, Artificial Sequence
  ENSG00000263731_9 (sequence is synthesized)
tgtctcctgtgccctatccttatttaagcacttgtttattttgggatgtcttcagttttccttgtcccagctctgcacccagctgcttctccagggagccctccctcactggagactggg

SEQ ID NO: 1027406 - DNA, 120 bp, Artificial Sequence
  ENSG00000263731_10 (sequence is synthesized)
atttagcaaccaagacctgggcactggctgtgcttgttgcttctgggccctcctgggacagagctgggaagtggatctatgacacgtgcttgtgcatttacccgccctgttggtttctgt

SEQ ID NO: 1027407 - DNA, 120 bp, Artificial Sequence
  ENSG00000263731_11 (sequence is synthesized)
agctgtctagttcctgctgttcctgtctcacctgcccctttccttatgtgtagtttcttcctgtgacagggagaaacctggctctcagattgacaggacattcgcttaggccatgtcagt

SEQ ID NO: 1027408 - DNA, 120 bp, Artificial Sequence
  ENSG00000263731_12 (sequence is synthesized)
gctgtaggtgaactgttcaacctgtgccccagggaggcgcagtcactatggaggcaccttacttccttaatcgtgtactgttgtttttgtgtttgacctgtagcatctaagtactggttt

SEQ ID NO: 1027409 - DNA, 120 bp, Artificial Sequence
  ENSG00000263731_13 (sequence is synthesized)
caaaagttgcctagatgagttcttttctttctttccacctcctgcaaattatgtgatttgcataatttgtacatagttaggttcatttgttagtttgtattccttttggcttcccccata

SEQ ID NO: 1027410 - DNA, 120 bp, Artificial Sequence
  ENSG00000263731_14 (sequence is synthesized)
tcctcgttgactttttctttcttttgtaacttacatatgttatgaaatttatatgaggatatataattttcataaatgtttatggtttacatgtattagttgttattattaagatcaccc

SEQ ID NO: 1027411 - DNA, 120 bp, Artificial Sequence
  ENSG00000263731_15 (sequence is synthesized)
tgggattgactggccaagcatttggtggaagatagcaataaataatacatcataaaagactttaatgtaaaaataaagccatgaaagtaccaagaaataaatcttctcattttaattaca

SEQ ID NO: 1027412 - DNA, 120 bp, Artificial Sequence
  ENSG00000263731_16 (sequence is synthesized)
tcagcttgtctgtgatcatgtagcctaaggtaggccagagttaatttttgtgttatctatacacgttattgaagcgaattataaaatgttttagcatgttaattacttgtaaattaatat

SEQ ID NO: 1027413 - DNA, 120 bp, Artificial Sequence
  ENSG00000263731_17 (sequence is synthesized)
ctacatataaaaatgtgagcatatattctatttagtatattaatccttcataaacaagtaatgcaagttagtattaatgatatcttaagacttaacattccttttttagtttgtgttgaa

SEQ ID NO: 1027414 - DNA, 120 bp, Artificial Sequence
  ENSG00000263731_18 (sequence is synthesized)
taaatgaacatctaagagttcatgatgatgcttaaggaaagaagcctcatgtttacctttggaagttgtaaggcactgactcataaaaattggcaaataaaaggaaagaatcgggcattt

SEQ ID NO: 1027415 - DNA, 120 bp, Artificial Sequence
  ENSG00000286488_0 (sequence is synthesized)
gggagagggtggagtgcagacgatgctaaggctttgagatggaaggaagtccctgtcccctggagttcaccctctttggggaagcagggcatcatagcagttaagaccaaagtcagacca

SEQ ID NO: 1027416 - DNA, 120 bp, Artificial Sequence
  ENSG00000286488_1 (sequence is synthesized)
tgtcctgctcaggcctccccagtggcttcccattttattcagaggaaagtccccaacaggctgcggcccctgctacctcatgggccgaatgtcctagcctctcctcttgctaacacaaca

SEQ ID NO: 1027417 - DNA, 120 bp, Artificial Sequence
  ENSG00000286488_2 (sequence is synthesized)
cctccctctgtgctgttcctcaaaggccccgctcttgctccggctcctgctcccacttctgggactttgcatctgctcatccccctgccagaatgctcgctccaccaacacgcccaagac

SEQ ID NO: 1027418 - DNA, 120 bp, Artificial Sequence
  ENSG00000286488_3 (sequence is synthesized)
tccctgcatttgtgccttgctcaaacgtcttattagggaaaccccctagataacccactcacacctttccctggcacctttatctgggtttagttttccccaaggcacttaacgtctgat

SEQ ID NO: 1027419 - DNA, 120 bp, Artificial Sequence
  ENSG00000286488_4 (sequence is synthesized)
acttactagcacatccacgagatagaactacttacatttgtgttttgtctgtctcctcctgccttcattggaatctaagttctaagagggcagacactctagctgttttgagacatcaat

SEQ ID NO: 1027420 - DNA, 120 bp, Artificial Sequence
  ENSG00000286488_5 (sequence is synthesized)
atctgggttaagagcccagattctggagccagatggccagaatgagactgtggctctcttacttgctggctgtgtgaccttgggttagttactaaacctctctgtgcacccaccattctt

SEQ ID NO: 1027421 - DNA, 120 bp, Artificial Sequence
  ENSG00000286488_6 (sequence is synthesized)
attttaaaaatgaggatcacaacagtgccttacggttgttataaaaacagttaatttatatgaagtgcttacaatagtggctgacacacagtaatgctgtataaatgtttgctgctgctg

SEQ ID NO: 1027422 - DNA, 120 bp, Artificial Sequence
  ENSG00000286488_7 (sequence is synthesized)
ctgctgttattattgtctgctgaatctagggtccagaataggcctatcttcacagaataataagagaataatcattgtcacagatttcagatccacagcctcatgagaataactgcacac

SEQ ID NO: 1027423 - DNA, 120 bp, Artificial Sequence
  ENSG00000286488_8 (sequence is synthesized)
agcaggctctggaagaaagctttacagagaacacgtgatgtttttaatcaagtggagaggagttggaagagtcaacacttgagttaaaaccttcatatgggcagggttttgtgggacccc

SEQ ID NO: 1027424 - DNA, 84 bp, Artificial Sequence
  ENSG00000286488_9 (sequence is synthesized)
aaccttcatatgggcagggttttgtgggaccccaaccaccctctcagcaaaatccatgcaatcgggccaggcgcggtgaacggg

SEQ ID NO: 1027425 - DNA, 88 bp, Artificial Sequence
  ENSG00000286488_10 (sequence is synthesized)
ggtgacagcccatgtgatacctttgctacctggcatgagggcgtgatgctacccattatattgtgcattccaccaaaaagaagacagc

SEQ ID NO: 1027426 - DNA, 120 bp, Artificial Sequence
  ENSG00000286488_11 (sequence is synthesized)
ctacccattatattgtgcattccaccaaaaagaagacagcaatgggattcagcccctcagaaggaaggactctgcctcttattctgaaaattcctctctgtcagacccggcaccactgaa

SEQ ID NO: 1027427 - DNA, 120 bp, Artificial Sequence
  ENSG00000286488_12 (sequence is synthesized)
agtcaaagtgccccttttcacagaaggtccacagggaagtcacagttaggtctgagccatgtacctcaatgcaggaaattatccttaccctggaagaggttcacagaagcaaccacaagg

SEQ ID NO: 1027428 - DNA, 120 bp, Artificial Sequence
  ENSG00000286488_13 (sequence is synthesized)
atggttaaatcctctcacaaaacctggcttcgggggacataacggatgctccacatgggtggctggaagacagtgcagaatctcggaactgtggggtgcagaagagaaagctcgatatcg

SEQ ID NO: 1027429 - DNA, 120 bp, Artificial Sequence
  ENSG00000286488_14 (sequence is synthesized)
caggaaggcatggcagctcctccgggcatcactcaccgttggaactgatggtcccatcctcatatctcttgactagcaccaagtccacaaaatctctgggagaaatgagcttcatggcag

SEQ ID NO: 1027430 - DNA, 120 bp, Artificial Sequence
  ENSG00000286488_15 (sequence is synthesized)
cggagggagtggaggttctgcttacacacagggtctgccaaaccaaagaagcatgtagctgtgactgctggccagacatcttctcccaactcccaccccatccctcaaggtctgggaaag

SEQ ID NO: 1027431 - DNA, 120 bp, Artificial Sequence
  ENSG00000286488_16 (sequence is synthesized)
gtattaagacttggggcatcgtgtgttgctgcagaacttttcatcagggacactttcggcctcaggaaattaatcttcgaatggcatgagatgcatgggggcacttgagcactttgcaat

SEQ ID NO: 1027432 - DNA, 120 bp, Artificial Sequence
  ENSG00000286488_17 (sequence is synthesized)
aggtgagtcttagcatctgactaccaggtgggagaggacaaggaaatgagcccaggccaggggatccagggcacctatatattgggagaactgaaactgagtgcaggtgtgtatgtctgt

SEQ ID NO: 1027433 - DNA, 120 bp, Artificial Sequence
  ENSG00000286488_18 (sequence is synthesized)
gtgtggtagagcacagctgtgctattttcaaactcaaaattttgttacatctaagaaaagtcttcacatgatgtctgaaaagccagcttagcaaagagggtaacataaaggtgctaggtc

SEQ ID NO: 1027434 - DNA, 120 bp, Artificial Sequence
  ENSG00000286488_19 (sequence is synthesized)
tgggcttggtataatcccacgacaccgaggcccacctcctgggacaatgtggtagaaggacagaccccttccctccgggtgtctgtatggagactgcagggaacaccgggacacacctgc

SEQ ID NO: 1027435 - DNA, 120 bp, Artificial Sequence
  ENSG00000286488_20 (sequence is synthesized)
aaggcacagtttcttttgctgtcaacatgcatgattcccagggtaaacaagggaccttcaggtaattcattacacagaaatttcctggcaagagcctggccatgacctgtggcaaaatgg

SEQ ID NO: 1027436 - DNA, 120 bp, Artificial Sequence
  ENSG00000286488_21 (sequence is synthesized)
gaacagagagtccccggggtcaattctgaggctgacttacagtgtggtctcagaactgccctttaggcctgagttccgccacattccttgccgaggagagatgatcactgagtgaaatgt

SEQ ID NO: 1027437 - DNA, 120 bp, Artificial Sequence
  ENSG00000286488_22 (sequence is synthesized)
ggggtggggactgctatcctcaaagctgctcctgcctggcggagggtattcagggaggactcggagcacagaccctgccctgccaacctcctagcctttgagtcaggacacatcactgaa

SEQ ID NO: 1027438 - DNA, 120 bp, Artificial Sequence
  ENSG00000286488_23 (sequence is synthesized)
cctccccaaacctcagtttcctcatttgctaaatggaccatgacatttgcttaacctggaggctgcagggaaaatttcctgcatcaaaaataagagtaacgcctcccctcaattctttcc

SEQ ID NO: 1027439 - DNA, 120 bp, Artificial Sequence
  ENSG00000286488_24 (sequence is synthesized)
cttcatcccctaatgacctgcctgggaacaggctgcacctgcacacagggtctcctttcccacttgaagaaaagcacagcatatgcccattcatctagaatcatcctatcatgaattgtc

SEQ ID NO: 1027440 - DNA, 120 bp, Artificial Sequence
  ENSG00000286488_25 (sequence is synthesized)
ccagtgtgtaaaatcctccagggtggcaaagggacaattaggagtgcgggcggcaatatgtaatcaaggcagtacacactggtattagaatttcatgtttttccctttcttaagcatatt

SEQ ID NO: 1027441 - DNA, 120 bp, Artificial Sequence
  ENSG00000286488_26 (sequence is synthesized)
ccaaaacttggtgttaaaaactaggcaattttgccatttctaaattctggtattttgtaacagtaatggcagaagtgatgaaaattttgaaaaaaaaatcatactgcttccacccctgat

SEQ ID NO: 1027442 - DNA, 120 bp, Artificial Sequence
  ENSG00000286488_27 (sequence is synthesized)
gactgcctccaagtgcatcattcctgaggtacagtgtctggaaactaagatgaggaggactttggaaagaaattttgaagacagcagcagcacatgtcataaatgcgacaaactcatggc

SEQ ID NO: 1027443 - DNA, 120 bp, Artificial Sequence
  ENSG00000286488_28 (sequence is synthesized)
atggccctgtatcctatccatccatccacctatcatcgatcatctatctattttagaattaggatatttgagagttgccaaaagcatgctgagaaatgtcagtctgcaaggaagagccct

SEQ ID NO: 1027444 - DNA, 120 bp, Artificial Sequence
  ENSG00000286488_29 (sequence is synthesized)
ttctccacattttcattgtttcactaaatgataaagagctaccacttggcaattctccacttttttgtaaacctgagctcaccagtagcctgtgcttcccctctactttgcagttgtcta

SEQ ID NO: 1027445 - DNA, 120 bp, Artificial Sequence
  ENSG00000286488_30 (sequence is synthesized)
ttgaaaagtttgtatcttttcatgggcttatgagttaattagaaaaaagagagctcccattcatctcatctaaagacgcaaaatgttttacttgtcacgtttaatatttatcagaattta

SEQ ID NO: 1027446 - DNA, 120 bp, Artificial Sequence
  ENSG00000286489_0 (sequence is synthesized)
gaagccggagttgagcgaggcccgggctatccggcgccagagcagatcgcagctggtgaagcgccgcagccagcggcacacctgggccaggcggccgagggcccgcatgtccagctgttt

SEQ ID NO: 1027447 - DNA, 120 bp, Artificial Sequence
  ENSG00000286489_1 (sequence is synthesized)
gaaatacaaatagatgaatgaggaaaatcccctatgtttaaaatccaccatgaagagaaaagcaggaagaagttcaagctagcccctggggattttcccaggttcagtagattgacctgg

SEQ ID NO: 1027448 - DNA, 120 bp, Artificial Sequence
  ENSG00000286489_2 (sequence is synthesized)
aaacaaggagtgcagcttgagctcttcttcctttagcagaacaagcactggtcagagaaatttccaaacacatggagcttagcgagaccacctgctcctaacacaggacaatggccactg

SEQ ID NO: 1027449 - DNA, 120 bp, Artificial Sequence
  ENSG00000286489_3 (sequence is synthesized)
cgctagaagagtttcccagtaaaagagtgagcaaagaaatgctaaacttcacatctgcaatagaagctgataaatgagaagtgaaatggacaaattaaaaagctgaaactgaattcagtc

SEQ ID NO: 1027450 - DNA, 120 bp, Artificial Sequence
  ENSG00000286489_4 (sequence is synthesized)
ttatagtagaatcaaacaataattacatcgatatcagccctggcaagacagagctaagagctcaaattatctcttggcaagggtgtgggtctgtaaatgctatgcagcaactaatgagta

SEQ ID NO: 1027451 - DNA, 120 bp, Artificial Sequence
  ENSG00000286489_5 (sequence is synthesized)
gagaggaatttttgaccaggtgctcatgcattccctacactgcaccaagctcagcagatatgtggcacaacccagcacctttataatctctcaagatctccatctctggccgggctcggt

SEQ ID NO: 1027452 - DNA, 120 bp, Artificial Sequence
  ENSG00000286482_0 (sequence is synthesized)
gtttatcccgcgcagcagctgccgcctcgggacacgctcattcccacggccaccggcaagccactcctggcgactccccgggacctgaggagccgcggcgcggaggtgaccctccccggc

SEQ ID NO: 1027453 - DNA, 120 bp, Artificial Sequence
  ENSG00000286482_1 (sequence is synthesized)
ctgcgcctcccttcttcctcctccccagctgggcgcgtggtcgcgtcgcccggggactctggtgatgcccgagaaatgggctgggggtgccgggtgccaggatggggtggggcggcccta

SEQ ID NO: 1027454 - DNA, 120 bp, Artificial Sequence
  ENSG00000286482_2 (sequence is synthesized)
ggccggcctgacttcgggaccgggctgcgggcgagggtctcggggcccggctcggccggcttccgggccgagaaagaagggcagaggaagcggtcagggtcccctccggccccggcctcc

SEQ ID NO: 1027455 - DNA, 120 bp, Artificial Sequence
  ENSG00000286482_3 (sequence is synthesized)
ctcccggagtataagcccttggaggccaggttttgggttgctgccgcccagctctttcggtctccacttctccccacggacgtttacagctgctcgctttatttctccctccattccccc

SEQ ID NO: 1027456 - DNA, 120 bp, Artificial Sequence
  ENSG00000286482_4 (sequence is synthesized)
gtggagccccctcggcagcggaggggtcgcgtgcttctcctctcccgcctgcgcctccccccttcccacccgacagcccaggaggagctgcgggcgcggccctgggacggccggagcctg

SEQ ID NO: 1027457 - DNA, 120 bp, Artificial Sequence
  ENSG00000286482_5 (sequence is synthesized)
gggcttctgctcgctcgcgccctcccaggcgttgccgcgggtccgagcccccgcagaggtgggcatagccccggggccgcagaaaacgaaggcagctgggcagggatgctcaatttcccg

SEQ ID NO: 1027458 - DNA, 120 bp, Artificial Sequence
  ENSG00000286482_6 (sequence is synthesized)
agccccactttcctttcacagcccactgggatgtgtagttcttccgcccgcaggcctgcgccgaggagaagcacgactcggggccttagaaactacaagtccctgcatcccccgcgacaa

SEQ ID NO: 1027459 - DNA, 120 bp, Artificial Sequence
  ENSG00000286482_7 (sequence is synthesized)
gggcaggagaggcgtggtgctgggcgttctggggctaggtggtgggagatgggaaccaacaaagggggttgtggggaacggtgccttctctgtactgggcagtttgcacgttacacatgt

SEQ ID NO: 1027460 - DNA, 120 bp, Artificial Sequence
  ENSG00000286482_8 (sequence is synthesized)
tctttgtctaatcttcgccggaacccggtgaggcattattgtatccagcttagagaaagcttaactactggccaaacatcacaaagctcccaagtagtagagatggcatcgaacccagag

SEQ ID NO: 1027461 - DNA, 120 bp, Artificial Sequence
  ENSG00000286482_9 (sequence is synthesized)
ccctaagtatgtcccttacaaagcgtgcctcagtgaggagtgtcgaagggggatgagattggcttatccaagagggccagttgggaggagctgtggtaaggaaaaagtgatgggaatagc

SEQ ID NO: 1027462 - DNA, 120 bp, Artificial Sequence
  ENSG00000286482_10 (sequence is synthesized)
aattagagtatgacatgcaattacaaggagttttgaatacaagtgaaatttacaggggtccattccaaagccggttagagtctagggagaatggatcttaagcacacgataataattggg

SEQ ID NO: 1027463 - DNA, 120 bp, Artificial Sequence
  ENSG00000286482_11 (sequence is synthesized)
ttttaattattttagatattgtatgagagacaagcatattacagggacaattaagtatttgtggctggactagttttaaaaaaccaactggaaagcttcatacatttcaagtgaaagctc

SEQ ID NO: 1027464 - DNA, 120 bp, Artificial Sequence
  ENSG00000286482_12 (sequence is synthesized)
tcatatgctttcctgtcctttagctaatgagatcaacggggtattattcttattctgtttattgcaagcaccttttctgtgggtgtccaattaatataatagatccattgatttgatggc

SEQ ID NO: 1027465 - DNA, 120 bp, Artificial Sequence
  ENSG00000286482_13 (sequence is synthesized)
attaaaaaagactcccactcttattctcaatgaaaccgaatttttctggcattatggttatgcttttaaaaagtccttccttgtctgttagagatatgtactaaagtatctgccagcgaa

SEQ ID NO: 1027466 - DNA, 120 bp, Artificial Sequence
  ENSG00000286482_14 (sequence is synthesized)
ataatataaagtctgaaatgtgctttaaaacacaccagcccatccactcccctcctcccacccacccagctccagacatggaggtataaatgaaacaattggaaactgttgaaaatagtt

SEQ ID NO: 1027467 - DNA, 120 bp, Artificial Sequence
  ENSG00000286482_15 (sequence is synthesized)
gtacactcagtcccccacttagggtctcacgcctgccatcaaggggctggccaggctgcgttcacattcactggagaagaactggcttccactctgactccgggcacaggcaaaattcct

SEQ ID NO: 1027468 - DNA, 120 bp, Artificial Sequence
  ENSG00000286482_16 (sequence is synthesized)
ttccttgcagcagtaggaccgagggccctggcttcttgctggctggagactggagactgtcctcagctccaagagggaacctgcaattcctagaggttacctggacttcattgtcacttg

SEQ ID NO: 1027469 - DNA, 120 bp, Artificial Sequence
  ENSG00000286482_17 (sequence is synthesized)
ggctttccgagcacagccacttattttgtcaggcctgcaaggagagtccccagagtgagtctccagcaagacagaattttatataacataaagcaatcccacgggggcaacttcaaatgt

SEQ ID NO: 1027470 - DNA, 120 bp, Artificial Sequence
  ENSG00000286482_18 (sequence is synthesized)
gaacattctgttggccagaaagcatgttttgcacacactcaaagggagaggagtacacagggcatgaaccctagggtgagggacaccccggagtgcatccaccacagtgtacatgagagt

SEQ ID NO: 1027471 - DNA, 120 bp, Artificial Sequence
  ENSG00000286482_19 (sequence is synthesized)
ccattatgcttttcttacctaccacatctactcatgtttatgtttgacattttccataataaaaagaaatgaattcgttttaaaatgttacctaaagtttccacagcaaataagatatgc

SEQ ID NO: 1027472 - DNA, 120 bp, Artificial Sequence
  ENSG00000286482_20 (sequence is synthesized)
tgatatgatttctaaatagctgatacaattgtctgtagttgtcttccaggggataacttttttcttcccactccatgtgtactaagacctctgcggttaattcacttgtatgggttaccc

SEQ ID NO: 1027473 - DNA, 120 bp, Artificial Sequence
  ENSG00000286482_21 (sequence is synthesized)
tcccctaagagcgttcactagaacctggtgtgtgatagctgcagagttcacctcaccagctacagttgatcttgaacaatatgggtttgaacagcgtggatgcccttagacacggatttt

SEQ ID NO: 1027474 - DNA, 120 bp, Artificial Sequence
  ENSG00000286482_22 (sequence is synthesized)
tttcaaccaaatgcagatggaaaatacagcatccgtgggatgggaaatgcgagtattcagagggcaaaggcccactcttcctatatgcaggttctgtggagcctgtttaaggacctgaat

SEQ ID NO: 1027475 - DNA, 120 bp, Artificial Sequence
  ENSG00000286482_23 (sequence is synthesized)
atgtgcagattcaggtatacgcaggtgatcctggaaccaatctcctgaggatactgagggatgactgtaaaacctactgtataagggatggtagagtttattcatttattttacagttat

SEQ ID NO: 1027476 - DNA, 120 bp, Artificial Sequence
  ENSG00000286482_24 (sequence is synthesized)
ctatttcagggcctagattgtgctaagtactgttttagcagcagtgatacaaaaagatccaagatagaagcttatatttggggactgggggagaggtggagagaataaacaaataaataa

SEQ ID NO: 1027477 - DNA, 120 bp, Artificial Sequence
  ENSG00000286482_25 (sequence is synthesized)
atgactagtaagacaatttcagagagtaattacaagaacgaaaaaacaaagcagggttatgggatggagagactggggtcgggcagagaatcgaatgatgggaaggggcaagtaccaagt

SEQ ID NO: 1027478 - DNA, 120 bp, Artificial Sequence
  ENSG00000286482_26 (sequence is synthesized)
cctcaaggcagaacaacctggaaaattctaggggtacaaagaaaaaccagtctggctggagtggagcgagggccagggagagagggaaaaaggaacaggaattcattctgtgtgcaccag

SEQ ID NO: 1027479 - DNA, 120 bp, Artificial Sequence
  ENSG00000286482_27 (sequence is synthesized)
catcaattctgtatgccacactctgtacccaccatcggtgtaagtgttgaggggtctgaaagaaaaatcaccgtccttgccctccaggaatgtatagattccaaactttaatgctagagg

SEQ ID NO: 1027480 - DNA, 120 bp, Artificial Sequence
  ENSG00000286482_28 (sequence is synthesized)
gacgtcagcgtatctagaattagagaccaaaacttgtatttctcaaacaaggacactgaaaagtcaaaagacctgctaaaaattccttgagaatgcctcgccaataacaaataatccaaa

SEQ ID NO: 1027481 - DNA, 120 bp, Artificial Sequence
  ENSG00000286482_29 (sequence is synthesized)
ccaataacaaataatccaaaaatgagtcttgaattgaattgaaagagtgcatgatctacttttgctaaatggggtttagcctaatactgcctctttacatattttaagtttggcctaaag

SEQ ID NO: 1027482 - DNA, 120 bp, Artificial Sequence
  ENSG00000286482_30 (sequence is synthesized)
gtagcctaaatggaagtgtaaacagagtgtgatctactcgggtgtcaattactgagttttggccactcaattgtggccagctgttcaaaccatgttcaaataagacaaatgctgagctgt

SEQ ID NO: 1027483 - DNA, 120 bp, Artificial Sequence
  ENSG00000286483_0 (sequence is synthesized)
aggctccggcctgacctctccacggggtcgacgggaacgtctccagatgccaggagtcgcaaagcgccaaacaggatgaggaaaccccaggcggagtccgggaaaagcagcacagcatcc

SEQ ID NO: 1027484 - DNA, 120 bp, Artificial Sequence
  ENSG00000286483_1 (sequence is synthesized)
aagcagcacagcatcccagcctcaggcctgcccggaccgtgttggttgggttgactctccccaaaagtcgtgccgccatccgtgatctctaagacaggtcggcctgcgtgcccctgggct

SEQ ID NO: 1027485 - DNA, 120 bp, Artificial Sequence
  ENSG00000286483_2 (sequence is synthesized)
cactgcagacgaggacaagagccccaacaggagctctttgtcccacaggagagcagcggacccacgtcagagaagatgcttgtgtcttttcatggctcttctctgagaaatgaagccaca

SEQ ID NO: 1027486 - DNA, 120 bp, Artificial Sequence
  ENSG00000286483_3 (sequence is synthesized)
ggaatgagagatggcaacaatccctgtccctggaacgctggcctccctgcacaagccaccctttaggaaccccaccccttatgcctgtgacggtggcaaggtgctgtatcctgcctgggc

SEQ ID NO: 1027487 - DNA, 120 bp, Artificial Sequence
  ENSG00000286483_4 (sequence is synthesized)
tccggcctctgctctgtcctccctcttgctctgcctcccctgtttctcaggggcctggatgcctctcgctctggccaaatgccttcaacaaagatgacttcccactccgtcagggagaca

SEQ ID NO: 1027488 - DNA, 120 bp, Artificial Sequence
  ENSG00000286480_0 (sequence is synthesized)
agcttctcctggcttccagtgcatcttggccaaggaggctgcctcatttctgtcctttccttgctttcggtgcttcctagaacttctcggttgaattccagtgttttctcctagaggatc

SEQ ID NO: 1027489 - DNA, 120 bp, Artificial Sequence
  ENSG00000286480_1 (sequence is synthesized)
tattctaactactccccaaacagctgctccaatatattctacctaggatttttagctgcattcaatgggtgagacaggaggaatgtgcttactccatcttaccaggaaccagaacctgat

SEQ ID NO: 1027490 - DNA, 120 bp, Artificial Sequence
  ENSG00000286480_2 (sequence is synthesized)
aatcgtgatttttaatgcaataccagaaaccttgaataacactatcagttccctgtgaagtgccactagtgatgctggaatttctgccaagaagcagagaaaagtcctgacgttacaaga

SEQ ID NO: 1027491 - DNA, 120 bp, Artificial Sequence
  ENSG00000286480_3 (sequence is synthesized)
aaatgttgaataatgttgaattgcttgatatgtacaatggactggggatctgcagctgtggttgctcaccatttcaagataaatgaatccagcatgaggaccattctaaaaaaggaaaag

SEQ ID NO: 1027492 - DNA, 120 bp, Artificial Sequence
  ENSG00000286480_4 (sequence is synthesized)
cagctttcatgtgggtacaggattcctatgagaaagacatatccatagactataatgatttgagaaaatgtgaagtcattatatgacaacttaaagcaaaaggaaggtgaaggatctaaa

SEQ ID NO: 1027493 - DNA, 120 bp, Artificial Sequence
  ENSG00000286480_5 (sequence is synthesized)
gagaatttaatgccagcaaaggatggtctgataattttagacaggtgtttggctttaaaaatatcaagataacaagagaagcagcttctgctgaccaagaagcagcagacaagttctcag

SEQ ID NO: 1027494 - DNA, 120 bp, Artificial Sequence
  ENSG00000286480_6 (sequence is synthesized)
tcagccaccattaagaaaatcattgagaagaaaggatatctacctgaggtgtttaatgtagacaaaagtgcttgactcttggggaaaaaaatgccacaaaggacatttattagtaaggaa

SEQ ID NO: 1027495 - DNA, 120 bp, Artificial Sequence
  ENSG00000286480_7 (sequence is synthesized)
gacatgagtgcctccgactatgagtagtcagaccatgaggaagaagacatagaagaaccagtgccagaaaacaaattgacagacaatctggcagaagggttctgactgttcaagactgct

SEQ ID NO: 1027496 - DNA, 120 bp, Artificial Sequence
  ENSG00000286480_8 (sequence is synthesized)
tttgactacttctgacacagacccttctatgaaacaagcactgaaactaaagcaaacaatggaagaaggattggtacaatacagaaacattgttagagaaatgaaaaagaaataaacaaa

SEQ ID NO: 1027497 - DNA, 120 bp, Artificial Sequence
  ENSG00000286486_0 (sequence is synthesized)
acacacagagggcagacggccatgtggtgaagaggccgagattggagagatgtgtccagaaaaccaggaataccaaccactacggggagccaccggaggctggagtgacgccacgaagca

SEQ ID NO: 1027498 - DNA, 120 bp, Artificial Sequence
  ENSG00000286486_1 (sequence is synthesized)
tcttcccctagagccatcggagaaagcacgtccctgccaacaccttgacttctgacttctggcctccagaaaagcgacctcctccacatctacccttcagctggggcttctctcacctgt

SEQ ID NO: 1027499 - DNA, 120 bp, Artificial Sequence
  ENSG00000286486_2 (sequence is synthesized)
acatcctacccatcttttagagcacaactcagaccttcctcccacagggaagccttctgtggcagatgctgctggtgcccacccacatctccttggcacgcctcactcccagttcagctt

SEQ ID NO: 1027500 - DNA, 120 bp, Artificial Sequence
  ENSG00000286486_3 (sequence is synthesized)
ctcactgcaagctgctcctctctgcccgagtgctttctctggctgcaggagtgcgtgggggcagaacagaacggcagagaactgacacctccaggatcagcctccaacaacaatggatgg

SEQ ID NO: 1027501 - DNA, 120 bp, Artificial Sequence
  ENSG00000286486_4 (sequence is synthesized)
gagttgcagaatatataacccagcttcctcgcccccgaccagggacctagcctgtctcctggaggccccaggggactaagcctcccttgtccatgggtaacctgctgattaactaccccc

SEQ ID NO: 1027502 - DNA, 120 bp, Artificial Sequence
  ENSG00000286486_5 (sequence is synthesized)
atattggttttcttctttttctcacttctttaccctcctaacttgctcctgagattagcctgctcatcctcaaatccttatctcagggtctgcttctggggaaatctaaccaagacacct

SEQ ID NO: 1027503 - DNA, 120 bp, Artificial Sequence
  ENSG00000286486_6 (sequence is synthesized)
taactgaattaccagcctggggcaggttctctgatcattctttctaacagcacgaggaaccttggctgctcagatgcgattgcagtttacatgcacacatttctttctgtgattatttga

SEQ ID NO: 1027504 - DNA, 120 bp, Artificial Sequence
  ENSG00000286486_7 (sequence is synthesized)
gtaatgtctgttttttgtgctagagcaggggtcggcaaaacaacagccatcaggccaaatccagctgcaatggctcatttccgtattggctgtgactccttttgagctgcagtagcagag

SEQ ID NO: 1027505 - DNA, 120 bp, Artificial Sequence
  ENSG00000286486_8 (sequence is synthesized)
ctgagtagtttcaacaaagatcttatggcttgcaaagcagaagtatttactacccggtcccttacagaaaacgtttattggcccttgtggtaggctatacatttgtatcagttagcttgg

SEQ ID NO: 1027506 - DNA, 120 bp, Artificial Sequence
  ENSG00000286486_9 (sequence is synthesized)
ctgggtaagaaactacccaaaactaaattttttgaatttatgtagctcacaattctatgagccgactgggtagcttttctggtttaagcccgatcagctgatttctgctgagttctctaa

SEQ ID NO: 1027507 - DNA, 120 bp, Artificial Sequence
  ENSG00000286486_10 (sequence is synthesized)
agtgtctatggtcagctggtgggtcaagtgacaacaatggtactaggatggcctcacccacattttagaaggtggtagctgttggccagtgagacactggcaattaggccatgtgtctct

SEQ ID NO: 1027508 - DNA, 120 bp, Artificial Sequence
  ENSG00000286486_11 (sequence is synthesized)
ggacagagcacaaacattattcaagcctctgcttgcgtatgttgtctaacatcccattgctcaaagccagtcacatggctgagttcagcatcaaagtggggtggcaccaaaagggaaccc

SEQ ID NO: 1027509 - DNA, 120 bp, Artificial Sequence
  ENSG00000286486_12 (sequence is synthesized)
actaaacctatggctatttttacaattcaccatgaagctctacgagggcacagaccctgcacgtactcgctcaccattctatgtcaatgagtaaagcacagtgtctggcatagagttggt

SEQ ID NO: 1027510 - DNA, 120 bp, Artificial Sequence
  ENSG00000286486_13 (sequence is synthesized)
gctgaataaatcttcattaagtaaatgaatacaatttaactgtttgaataacaacgaccttttattgagcctttgctatatagttggagtggttttagatacttcacatgcattagctaa

SEQ ID NO: 1027511 - DNA, 120 bp, Artificial Sequence
  ENSG00000286486_14 (sequence is synthesized)
tgcttacctgagagacagaccccagtaccagacaagacagacaagacagccgaggctcaccatcaagaacttgccctgtgtcgcaaaggcagtctgaggaatcagaattttaaactagtt

SEQ ID NO: 1027512 - DNA, 120 bp, Artificial Sequence
  ENSG00000286486_15 (sequence is synthesized)
tgtttaattccaaagcctgctctgttaatcattatcccctccttttttttttcactaaaagctttaaattttttacagtttcaaatttcttcctttattttactattttattttatttct

SEQ ID NO: 1027513 - DNA, 120 bp, Artificial Sequence
  ENSG00000286486_16 (sequence is synthesized)
ttattttactaatttcattttaaaattgggagctgggtgtttctcttggcttccccagccctttctccttggtggcccagaggtcctgttaacacctcataaccaacctccatttcagtg

SEQ ID NO: 1027514 - DNA, 120 bp, Artificial Sequence
  ENSG00000286486_17 (sequence is synthesized)
ccgggtggtaattttgacttaaaaagttagcttgtgggacaaccaacagccacacacctaaaatcactgctcttgacagctcagcaaaattgaaggccaacatttcactcaagaaggcaa

SEQ ID NO: 1027515 - DNA, 120 bp, Artificial Sequence
  ENSG00000286486_18 (sequence is synthesized)
taaatccagcccccaaggcagctgctgagaggcgctgaaacagcgctgttatcttatctctcataccattcaggccgtacatgagggaatccatggatcaaaatcaaaaaagtctccaga

SEQ ID NO: 1027516 - DNA, 120 bp, Artificial Sequence
  ENSG00000286486_19 (sequence is synthesized)
gaacatagtcttcgaaatgaccattgtttattcagagttcaataattaatcaaccccacaaacctttcttcagcacttacggtattccaggcattatgctactcacaatgggagaacata

SEQ ID NO: 1027517 - DNA, 120 bp, Artificial Sequence
  ENSG00000286486_20 (sequence is synthesized)
agtgaacaagagcccctgccgtcgagatgctcgtctaaacagacaatgatttggcaatgtattgagtgttctggtggagacgtgcccaaagagtacacaaggggggcggtgagctcggtt

SEQ ID NO: 1027518 - DNA, 120 bp, Artificial Sequence
  ENSG00000286486_21 (sequence is synthesized)
tgggtgagctcggtttgggtgggaagctgaagaggagaataggaaagtctcttatacaaccttgggaatctaattcaggttcaaacaaggttgggcttccaaaatggtacaatggagtaa

SEQ ID NO: 1027519 - DNA, 120 bp, Artificial Sequence
  ENSG00000286486_22 (sequence is synthesized)
tcaagctcatggactgagatgtctatttgcagatttgttatttctgccacttgttatttgtgcaattttggaagagatgacttctctaagccttagtttactcattcatgaaatgggtga

SEQ ID NO: 1027520 - DNA, 120 bp, Artificial Sequence
  ENSG00000286487_0 (sequence is synthesized)
cttcttgtttgtctgtgaactatgcatgaaggagctatcctgagccatgaatactgaaaacacttgagtgcttttccatgtgtgaaaaccttaccctttgaaaaatccaaggcccaccct

SEQ ID NO: 1027521 - DNA, 120 bp, Artificial Sequence
  ENSG00000286487_1 (sequence is synthesized)
gggccacacatgtcgaatctgagctcagctgttaggcagctcctcacctgcgccaacagcgaaagcaaaagtggttcggcacagacattgtttaaaatggctgcgttaaaaataccatct

SEQ ID NO: 1027522 - DNA, 120 bp, Artificial Sequence
  ENSG00000286487_2 (sequence is synthesized)
cggcttcacagatttctggagctgtgaggagcatcctcatttatgtgctctgatgaaggacagatctcatatatcgcagcaacaaagatggcccccaggagttccatggacccttatttc

SEQ ID NO: 1027523 - DNA, 120 bp, Artificial Sequence
  ENSG00000286487_3 (sequence is synthesized)
aggagaaagcacctctttcctcagttcctctcttcaggactcccagtacccctgcttctggtgacagcccatggcaggtggggaggacgtgcagatggaaagaatgagaagggcaggttt

SEQ ID NO: 1027524 - DNA, 120 bp, Artificial Sequence
  ENSG00000286487_4 (sequence is synthesized)
gggccctcatgggtgacagaaaagtaccagagttctggttcctctttgaacacacatgttctctgggtttcgccttgcagcccaagaagagaggaggcttggaatcaccacacttcccac

SEQ ID NO: 1027525 - DNA, 120 bp, Artificial Sequence
  ENSG00000286487_5 (sequence is synthesized)
agcaagggcaatctttaaaggcagtaaggtgtgacgctccagactggcagcttggcaagacagagcccatggataccagcacacgggaatctggacggctcactctgacagcagtcagca

SEQ ID NO: 1027526 - DNA, 120 bp, Artificial Sequence
  ENSG00000286487_6 (sequence is synthesized)
ctgggaacaaaaggaatggagggaaaaaagcgcaaatgtatttttacatattgtaggcatatggccacaagaccagcagaaatatatttaattaccaattgcacgcattgaggagaaaaa

SEQ ID NO: 1027527 - DNA, 120 bp, Artificial Sequence
  ENSG00000268318_0 (sequence is synthesized)
agggattggtatccccgtgcaaggaggttggcgaggcctcaggggactcccagttcagcgaatccgttagccttcctctgccttagtcacttccccgtgaggcactccgtgtttgtgtac

SEQ ID NO: 1027528 - DNA, 120 bp, Artificial Sequence
  ENSG00000268318_1 (sequence is synthesized)
acggttattccacgtgtcagtcagttcatcgggcgcatccggagtcattgaaaacagtaataggaagtcaaacaaacccgcttgatgcaaaaattcaggaggacattcggtttttaagga

SEQ ID NO: 1027529 - DNA, 120 bp, Artificial Sequence
  ENSG00000268318_2 (sequence is synthesized)
cttgatgcaaaaattcaggaggacattcggtttttaaggaaatagtgctgaggaaggaccaggctggagctccttggaccctgagactgggagggtctcgctctgttgcccaggctggag

SEQ ID NO: 1027530 - DNA, 120 bp, Artificial Sequence
  ENSG00000268318_3 (sequence is synthesized)
tagcagcaggatacatcctggtcctctcttgcccctgagatctcgctggggctgatggcactgccactgctatggttggggctactttctcatgttttgatggaagtcaagaagatacca

SEQ ID NO: 1027531 - DNA, 120 bp, Artificial Sequence
  ENSG00000268318_4 (sequence is synthesized)
gtggaagaggggctgtgcactacaatcccttgtgcatttgaatttcccaaagaacccccaagcaattccatgatcatgcactactggctcaacaaaaacatcagctccctggtagctaca

SEQ ID NO: 1027532 - DNA, 120 bp, Artificial Sequence
  ENSG00000268318_5 (sequence is synthesized)
aataaacccaatgctaccattggtgataacaccaaggacaaattttacatgactgggaatcttgatgaagaagactgtaccctactcatccacgatatactcaaagggaacagcataata

SEQ ID NO: 1027533 - DNA, 120 bp, Artificial Sequence
  ENSG00000268318_6 (sequence is synthesized)
tatttattctacgcagatctaggagaacaaaaaagtgctttcctgggggagaatatcaaactttttgtgtcaggtgatgttcaatatcatccgataagtggtttggaaagaaggaaatcc

SEQ ID NO: 1027534 - DNA, 120 bp, Artificial Sequence
  ENSG00000268318_7 (sequence is synthesized)
agacccagaggaacctttcgaacacccaaacccgttctcccatggttcaaaaccattccataatttccatgacttcccccattgacgtgggagggagtccgagctcctcagcttggcatt

SEQ ID NO: 1027535 - DNA, 120 bp, Artificial Sequence
  ENSG00000286485_0 (sequence is synthesized)
caagctgacttcccacctggcagaacagaatgctaaacaggccgacctctttaggaatctggtgaaagctacaaaccctctctctagaaaagcacacacaaacataacgtcttgcaattc

SEQ ID NO: 1027536 - DNA, 120 bp, Artificial Sequence
  ENSG00000286485_1 (sequence is synthesized)
actttcaagagccccaggttcccataaagagactcaagaaccttgatagtagagaacaagttcctcaagggccaggcccatctcctagtcctccttccttccttcctcctccacctcctc

SEQ ID NO: 1027537 - DNA, 120 bp, Artificial Sequence
  ENSG00000286485_2 (sequence is synthesized)
agtccctcccttgaatgcttcccgattctattccgaaatgctcagccaagtctagaccacagccttgcactgcatctctcctagggaggatggtgtgaccacagagaccctgggcccagc

SEQ ID NO: 1027538 - DNA, 120 bp, Artificial Sequence
  ENSG00000286485_3 (sequence is synthesized)
tgggggagccctgagttcccctgggtaaaggcatcactcaccacactgtctcccgtgtcaggaactggcactgtcttcaccaccaaatccattcctgttgtctgccgaggaacaccaaga

SEQ ID NO: 1027539 - DNA, 120 bp, Artificial Sequence
  ENSG00000286485_4 (sequence is synthesized)
atgttagcactgagggcccccaaagggagagcatgttacaggaggacacacaagcaccccgatcccaggagggctatctccagtggaagggtttgttctggactcattcttgtgagaagc

SEQ ID NO: 1027540 - DNA, 120 bp, Artificial Sequence
  ENSG00000286485_5 (sequence is synthesized)
agctcagcatgcagaagtcagaggggaccaactagtcctctccacctccctgccctgatgtgagctgctacacgtggtggccaagttgcttgtggccattctgctctgtagccaacctct

SEQ ID NO: 1027541 - DNA, 120 bp, Artificial Sequence
  ENSG00000286485_6 (sequence is synthesized)
caccctgggctagtggaaaaaacgatctccacgtggccctctgagcagcctttcatcagctgtcttaaggcttccctcaaggaacttcgaagtcactcatcatggtgaaccgagcacttc

SEQ ID NO: 1027542 - DNA, 120 bp, Artificial Sequence
  ENSG00000286485_7 (sequence is synthesized)
tctataagctgtggccaggtcttgacaccccagctcaccagggtgtagcttttctggaaatgggctccatcactgcggaagatctgtgccagggcggtcttgcccactgctgggtctcct

SEQ ID NO: 1027543 - DNA, 120 bp, Artificial Sequence
  ENSG00000286485_8 (sequence is synthesized)
gaaaccaaaaacttcaatgagttttgagagatgtacttgcctctcacgggaacttgttctgaggccgcgggcagggcacaggtccatgagactgatctgcaaacctcacaacagccagag

SEQ ID NO: 1027544 - DNA, 120 bp, Artificial Sequence
  ENSG00000286485_9 (sequence is synthesized)
cacacttctgcacggctaagccttttatccacaggaactgacccagaaggtaacagaacttacagagggctttggggccctggaaacggaactgacgctcttccactgaaacacgcccta

SEQ ID NO: 1027545 - DNA, 120 bp, Artificial Sequence
  ENSG00000286485_10 (sequence is synthesized)
tggggaaaagctgtcacttccaaactggaatttactttgaagtcttgaaggtaaagaagtgtgactggcactgacaggcagagtcacctgtccaactgacccaacctgggttgacagctt

SEQ ID NO: 1027546 - DNA, 120 bp, Artificial Sequence
  ENSG00000286485_11 (sequence is synthesized)
ccacctgaatacttttttgtgtggggcgtggggggtggaagggtctctgcatttgtgggaagcaagaagtctgaggctgtgttcatcattctgaaatctctttccaaatgctatgctcca

SEQ ID NO: 1027547 - DNA, 120 bp, Artificial Sequence
  ENSG00000286485_12 (sequence is synthesized)
tctccatcgcagaatacctgtctgtgacccaaggattcttcttcccaggggcctctccaccaattctatctgcaatagcagtcacctcctccaagctcatctctcacctactggctttat

SEQ ID NO: 1027548 - DNA, 120 bp, Artificial Sequence
  ENSG00000286485_13 (sequence is synthesized)
ctccctctcctctgctggtcaacagccccagaaactggtccctcagaactaaaggtttatgtcgcagttttcagtctgagacctgagcctttcacaagactgctgggagccatttaatcg

SEQ ID NO: 1027549 - DNA, 120 bp, Artificial Sequence
  ENSG00000286485_14 (sequence is synthesized)
agcgctcctcccgtgcccgtcacgggtgctggaagctctccctgcccatctttaattccctttgccctccccattttccctctcatggctctgctgagcctcctttgatgctgattgttt

SEQ ID NO: 1027550 - DNA, 120 bp, Artificial Sequence
  ENSG00000286485_15 (sequence is synthesized)
ccatttgcagcctcttttcctcctgagtcttacgtggacttgcactccaccgtccaggtcctggcagaacacgtgctttctgcttctcatcctctggatccttagcaaaatcagcaccgc

SEQ ID NO: 1027551 - DNA, 120 bp, Artificial Sequence
  ENSG00000286485_16 (sequence is synthesized)
cctccgcggcttccaactcacatcacttggtaccatctcttcacctttgcttcccattttacagtcggcttcaacactcctttcctcgacttctcaacagtctgccactgttcacttttc

SEQ ID NO: 1027552 - DNA, 120 bp, Artificial Sequence
  ENSG00000225929_0 (sequence is synthesized)
agtcaggccaggtaagagcccctcgccttaactggtttgtgctgaagagacttcttgacttcctgcataggctcccccaccaccaggatgatgggggactcctgtgcagccccactccct

SEQ ID NO: 1027553 - DNA, 120 bp, Artificial Sequence
  ENSG00000225929_1 (sequence is synthesized)
ctgtcccaaggccaggatctccattcccagtaactcttgcgaggtccccacatcacccaaggctctggctttgtgcaggttcagagtctgcctctcatgcgtgctgtgaccactgcagac

SEQ ID NO: 1027554 - DNA, 120 bp, Artificial Sequence
  ENSG00000225929_2 (sequence is synthesized)
tcacagactgaggagcggctcagcccttcagtgatgagacggtgcaacatgtttgtggatcagaggagtcagggtcagcagattaattgatccttaattgttgttggggaagttttcttt

SEQ ID NO: 1027555 - DNA, 120 bp, Artificial Sequence
  ENSG00000225929_3 (sequence is synthesized)
tcctcttccaagtgaatgctatcaacacacttttccaagagtcattttgaattttcctaatttacaactgcaaagcccaccttcctgtccgttgctgaatatcacaaggtctcctattat

SEQ ID NO: 1027556 - DNA, 120 bp, Artificial Sequence
  ENSG00000225929_4 (sequence is synthesized)
cctgaatgtctccagatcggctttctgtgactgaggtggagcaaggtgttttctcctatacttgaatgtcaagagttttcatacagctacctgaatatcatgaagcatcatttttcccat

SEQ ID NO: 1027557 - DNA, 120 bp, Artificial Sequence
  ENSG00000225929_5 (sequence is synthesized)
ctgatcatcaggaactagcatctcacctaccagagtgtgacaaatgcttattgcaaacacctgaatgttaaaacatttcccatcgcctgcaagtgtcaggaggtcacactcttacctgca

SEQ ID NO: 1027558 - DNA, 120 bp, Artificial Sequence
  ENSG00000225929_6 (sequence is synthesized)
tgagggcagccttacctcttctacctgaattgccagaggccctcatcgcctccacctacaggttaagaattctcacctccaccacccaagtgtcaccctgtcgcactttctctacctgaa

SEQ ID NO: 1027559 - DNA, 120 bp, Artificial Sequence
  ENSG00000225929_7 (sequence is synthesized)
aatcaagaggtcttacatcttccagctgaatgtcaagaggttgtattttacctatatgaatgttctgaagtctccaccggtataccagagtgttgggagatctcattgcccccatctggg

SEQ ID NO: 1027560 - DNA, 120 bp, Artificial Sequence
  ENSG00000225929_8 (sequence is synthesized)
gtgtccaaagttctcatctcaaccccctgaggtctggaggtattctcacctcttcctggttgtctggaggtctcatctcccttacctgagagtcatgaaacctcctatctcctatatgcc

SEQ ID NO: 1027561 - DNA, 120 bp, Artificial Sequence
  ENSG00000225929_9 (sequence is synthesized)
ctatctaagtcatgacactttatctcctccgagtgtcaggggatttttctacctttatgtcaggtagccccacttcctctagctgaagggcatacaagttctatttcgtgacttgaatgt

SEQ ID NO: 1027562 - DNA, 120 bp, Artificial Sequence
  ENSG00000225929_10 (sequence is synthesized)
gaataggtttcagctgcactactgagtgttagcggacctcacttattttaactgagcatcaagttgtgtctcataaataaccagaaaaagactttggaaatatggttcaagaaatggcaa

SEQ ID NO: 1027563 - DNA, 79 bp, Artificial Sequence
  ENSG00000225929_11 (sequence is synthesized)
ccagaaaaagactttggaaatatggttcaagaaatggcaagaagaattgaagaagtgggcccagtgaggcaggcagatc

SEQ ID NO: 1027564 - DNA, 120 bp, Artificial Sequence
  ENSG00000225929_12 (sequence is synthesized)
agccgagatcgcaccattgcactcaagcttgggcaatgggagtgaaaccctgtctcaaaaaaaaaaaagaagaagattaaagttttgactgttaaagaaaatattattcgggtgttttta

SEQ ID NO: 1027565 - DNA, 120 bp, Artificial Sequence
  ENSG00000225929_13 (sequence is synthesized)
atggatagcacctatttctttacaaatatttaggaggtatcaataaaaaagtctgaagacccaatgtcagtgtctggattctagaagaccattacagtttgactccgcaaagcttaccca

SEQ ID NO: 1027566 - DNA, 120 bp, Artificial Sequence
  ENSG00000225929_14 (sequence is synthesized)
cttctgattctagaaggggctgccagtcatcgtgcctgcccgtggctatagtgatggttgcgggaaaagtacctggcccggcccatttaattttgtcattaaactaatggaagcaacaaa

SEQ ID NO: 1027567 - DNA, 120 bp, Artificial Sequence
  ENSG00000225924_0 (sequence is synthesized)
cctgaaagcctggcaggccaccctacttcagctgcattcggtccatacactgagggtctcagtggggaaaaagcagagtcattttaaagaaacatggatcttagtttctagaaggttttt

SEQ ID NO: 1027568 - DNA, 120 bp, Artificial Sequence
  ENSG00000225924_1 (sequence is synthesized)
ccccatctggcagacaaatttatgcctattccacacacagttctggaggctgggaggttcaagatcaagatgcaggcagattcatctcctggccctcgtgtgtgatgttctcctccctgt

SEQ ID NO: 1027569 - DNA, 120 bp, Artificial Sequence
  ENSG00000225924_2 (sequence is synthesized)
atcccagcggattaagatgctcatttcttaaaattcaggggaaagatggacactaccggttccgtggcccagggttttggaagaggcggcctccggatgactggatgcacttctccctgg

SEQ ID NO: 1027570 - DNA, 120 bp, Artificial Sequence
  ENSG00000225924_3 (sequence is synthesized)
gagtggctgcactggcagctctctaatgagttctaaccccataggggcagttatgaaactgatgcaaaaaggatacaatcaagatagaagtcaataaggagcacagaaggcatgagtaag

SEQ ID NO: 1027571 - DNA, 120 bp, Artificial Sequence
  ENSG00000225924_4 (sequence is synthesized)
acttgcatcagagaggccaaaacccaaaatgcgctgggggttgtgggagcggctgaagagcctggagaagccgcttatagtcattttaagtcagattaaaggagtgtgtttggctgacga

SEQ ID NO: 1027572 - DNA, 120 bp, Artificial Sequence
  ENSG00000225924_5 (sequence is synthesized)
gaggaccccatgcttgcatgtatggagccttatctcagcttccatacctacaaaggggacatgattggtgtctaccccagagagtggttttaagaattaaacaaaatgacgtgtgtgaaa

SEQ ID NO: 1027573 - DNA, 120 bp, Artificial Sequence
  ENSG00000225924_6 (sequence is synthesized)
actgtggagatggtgcgccttgggatgtccagaagacagtgaccagaatttcaagagatgttttcagatttcacagtataataagagaaaaggagccaatcccttaaatgaagaaccttc

SEQ ID NO: 1027574 - DNA, 120 bp, Artificial Sequence
  ENSG00000225924_7 (sequence is synthesized)
ccccaggtgcacgtttcaatttcatttcttttcatcaactccttccctttgatgatgggttgcattgaaaactattaagaaaagtaggatatttaaaatgaactgtgttaagaagaggat

SEQ ID NO: 1027575 - DNA, 120 bp, Artificial Sequence
  ENSG00000225924_8 (sequence is synthesized)
catttcaaagaatctattctgaggaagtgccttcagccaatcaaaaagctaaagaaactggatataatgtgaatctagtgtaaattaccatgatgtctccttcaacattcatcaagactt

SEQ ID NO: 1027576 - DNA, 120 bp, Artificial Sequence
  ENSG00000225924_9 (sequence is synthesized)
ctgactagtctacttgatctgtgaaaatgagattacttgaagacctgtcacagattttaaagcagaacacgatatattgattatacaaatatttttatgtcaccctgtatcttaataaaa

SEQ ID NO: 1027577 - DNA, 120 bp, Artificial Sequence
  ENSG00000229019_0 (sequence is synthesized)
gctctttcagaaccactggcctgtgaggcctcccctagactgcaaggcccttcaggacaagattgtgccttaatcatgttggcatcctagcatggcctggcttgtcacaagaactcgctg

SEQ ID NO: 1027578 - DNA, 120 bp, Artificial Sequence
  ENSG00000229019_1 (sequence is synthesized)
caagctaatagcctgtcaggagtatggaaatatatatctgaggtttgtgattctgcatgggatcaggatttccaggagtgcctgttggagaacactctgctctgtgcttctcatgtctta

SEQ ID NO: 1027579 - DNA, 120 bp, Artificial Sequence
  ENSG00000229019_2 (sequence is synthesized)
atgttggttcttaatgttaattcaaaccagctgtggcagacccagttgttcctagaagttgctatctctgtctttcacattctgcaattttatatgcacatacattctatgaaacttcat

SEQ ID NO: 1027580 - DNA, 120 bp, Artificial Sequence
  ENSG00000229019_3 (sequence is synthesized)
actgccacataaatggggaggtgatatcaattatgcagtactggattcaaacatcaactctgttacttactagttgggtgagcctggaaaaatctcttaacttttatgtccttcgctttc

SEQ ID NO: 1027581 - DNA, 120 bp, Artificial Sequence
  ENSG00000229019_4 (sequence is synthesized)
ttgatctgcaaaatgaagatgcaaatgatcttggtttggagtcttctagtggtctacagtatatggatgcaacacttttagggtctgctccagttacagtaccaggttataaggattgta

SEQ ID NO: 1027582 - DNA, 120 bp, Artificial Sequence
  ENSG00000229019_5 (sequence is synthesized)
ccatcttgttttaaaaatgatatgaagttaaactctgaagcacttagaacaggtctagcacataataaacttttcgtatgtattagttactacgattaccataaaaatctcaagaaaata

SEQ ID NO: 1027583 - DNA, 120 bp, Artificial Sequence
  ENSG00000229019_6 (sequence is synthesized)
ttaattctctgcttcggatattggacagaactctaattaaatctgatatatgcctaccgtgggaagctcactttttttctgcattgctagagcaataaatacaatcaaatgttaaaaaaa

SEQ ID NO: 1027584 - DNA, 120 bp, Artificial Sequence
  ENSG00000229012_0 (sequence is synthesized)
ctcgcttcctctgtttttgtgtgatctctgcacatgagtagaagcatcctgaatccctcaccagatgcccagtgatccagccagcagaattgatttgttacttgatctccatgtgtatat

SEQ ID NO: 1027585 - DNA, 120 bp, Artificial Sequence
  ENSG00000229012_1 (sequence is synthesized)
acatccatacagggtctcactctgtcaccaggctggaatgacagactgataggcagactcacatagccttcttgcctttccctgaggagttgactccaattgtcctacacattccttctc

SEQ ID NO: 1027586 - DNA, 120 bp, Artificial Sequence
  ENSG00000229012_2 (sequence is synthesized)
tatgatatagaagccctgggtctcagcggtaatggcctgggattcaccatctcctcttgtggccacctgagacatggcttctgttcctaagcccctattaaatgttcctttcagagaaaa

SEQ ID NO: 1027587 - DNA, 120 bp, Artificial Sequence
  ENSG00000229011_0 (sequence is synthesized)
aaataaaagcaagtctcattacttttcaaggggagtgtagaagcgattagtctctgatgataataagggtaccccccatgtaaaactgccacaagctctcagaagtgagactttagctcc

SEQ ID NO: 1027588 - DNA, 120 bp, Artificial Sequence
  ENSG00000229011_1 (sequence is synthesized)
gatggaaactcagaaacaaagtgactctgaggattaagaggaagtcaatgtcagcaccaggattagaattcacacttgcctggtttctcagcccacaaccagctcccccatggattcctg

SEQ ID NO: 1027589 - DNA, 120 bp, Artificial Sequence
  ENSG00000229011_2 (sequence is synthesized)
ctttgtctccctccccaagtgaggggacagggtgtttccaaactttaaaagaatcctgttatcctcaggcctctgccttgtaggaagatcctttcttttaataaattacagagctgagaa

SEQ ID NO: 1027590 - DNA, 120 bp, Artificial Sequence
  ENSG00000229017_0 (sequence is synthesized)
aaggaagcatgtatagggggtacatatggtggcagttgtatgctcagcagaagaagcaccagggaggtgaagctccaatgccaacggtcttgatcattggacaatgcctataatgactgc

SEQ ID NO: 1027591 - DNA, 120 bp, Artificial Sequence
  ENSG00000229017_1 (sequence is synthesized)
atgaaaatgaacgtggttcttcatatttcttaaatttgttcttttggtcttgtcgtttcataaaaattgtgttacgaatggaatggtacaaaatggagcttcaaatcaggatctgttttg

SEQ ID NO: 1027592 - DNA, 120 bp, Artificial Sequence
  ENSG00000229017_2 (sequence is synthesized)
agcttttcatggctgtgtttactgaggtcacgttgacagcatgaaccttcgatgtgatgtgaggaaaatggcattctacctctgtgttcttcctccccaaaatttgtaaccaccatctaa

SEQ ID NO: 1027593 - DNA, 120 bp, Artificial Sequence
  ENSG00000229017_3 (sequence is synthesized)
tcatgaggaaaacatcatacaagtccaaattgaggaagattctacaaaatgcctgattaatattcatcgaaactgtcaaggtcatcaaaagcaaggaaagtctgagaaactgccacagcc

SEQ ID NO: 1027594 - DNA, 120 bp, Artificial Sequence
  ENSG00000229017_4 (sequence is synthesized)
taaagacaatccagggaaacgtgatgactcagtggtattcggggtgggtttctggaacagcaaaaggacaacaggtaaaatctaagaacatacgaataaagtgtgaactttaattaataa

SEQ ID NO: 1027595 - DNA, 120 bp, Artificial Sequence
  ENSG00000229017_5 (sequence is synthesized)
agcaaaaggacaacagtgttaacatctgggccaaacatctgggcagcaacatcagaaagcccctctgctgtgcttcaggatcactcttatcactgcataaagaagagcctttcgcctcct

SEQ ID NO: 1027596 - DNA, 120 bp, Artificial Sequence
  ENSG00000229017_6 (sequence is synthesized)
aggcctccccagccatgtggaactgtaccctgagccactatctaaattgtctgcttaccttatgaagacaccataaggaggtataacgtgtggtgagcacaggtgaagagctagaggcct

SEQ ID NO: 1027597 - DNA, 120 bp, Artificial Sequence
  ENSG00000229017_7 (sequence is synthesized)
agctagaggcctgaaactagatggggagggagaagccagccatgcctgcatccagggctgcactcagcctcccagcatctgtgcagaggcatcagtcaagccacagctaactgcagtccc

SEQ ID NO: 1027598 - DNA, 120 bp, Artificial Sequence
  ENSG00000229017_8 (sequence is synthesized)
ggagataaaaatactgacttggactctgtctgaatgaaaggattagtagattagattagtgattcttaaaagactttcttggatgcatataagtgtccacaaaataagagtatgatggtt

SEQ ID NO: 1027599 - DNA, 120 bp, Artificial Sequence
  ENSG00000229017_9 (sequence is synthesized)
tccaggtacaaataagatggaaaactattttgtgaatcagaattaaattggtttatttactgtagaacttctaagaggctttaacatgtacatttaattatcataagccttatgaaaact

SEQ ID NO: 1027600 - DNA, 120 bp, Artificial Sequence
  ENSG00000229017_10 (sequence is synthesized)
ccaggaggacagaagagttgcctgtgactttttttaaagtgtttattcacatcccaaggaaggattcccagaagagatgatgcctaagcagtgtcccaaccatgaaataaagtctcctag

SEQ ID NO: 1027601 - DNA, 120 bp, Artificial Sequence
  ENSG00000229017_11 (sequence is synthesized)
ctactggacaagatcatctcgaagcttatttccagctccaaatgttattattttcctcaaacccattataaaatggcctctcttagcactatgagatctgtaatacaagaagtagaacaa

SEQ ID NO: 1027602 - DNA, 120 bp, Artificial Sequence
  ENSG00000229017_12 (sequence is synthesized)
acacatgaagttcctgttggaaattcaaacttctcatacagccttcactgagttctactcattatggataaaggcttctgctttgagtcacctaagtacttttgacccccaacttaatca

SEQ ID NO: 1027603 - DNA, 120 bp, Artificial Sequence
  ENSG00000229017_13 (sequence is synthesized)
atgccttgaagtgaaaatacagtgtcaggcagtccctattcatgacacaaacaaaccaaccaactcatatcatgacttaatggtgtgagacctcagtaaaaactttatatgaactaaatt

SEQ ID NO: 1027604 - DNA, 120 bp, Artificial Sequence
  ENSG00000229017_14 (sequence is synthesized)
tgtctcatttgtatcttctcatacctgtcacagaatttcctctgtccaatgacactggtccttcgatagtcttagctgtcttttccttcttaaactaacaaaaataaaagtgaaagaaac

SEQ ID NO: 1027605 - DNA, 120 bp, Artificial Sequence
  ENSG00000229017_15 (sequence is synthesized)
agaagataatggaatgctatctctagagtactgaaagaaactaaaggccaacgtgtgaaaaacaatcttcagaaatgaacgttaaatgatgacattttcaaacaaacaagcaacaaaaag

SEQ ID NO: 1027606 - DNA, 120 bp, Artificial Sequence
  ENSG00000229017_16 (sequence is synthesized)
aagcaaaaagtaaacaaaaaacaaaaattcacataatttattgctaggagttttacactgaaatgctgaagggatttctactagcaaaagtaaaaatgatctcatttgaaaagatggaaa

SEQ ID NO: 1027607 - DNA, 120 bp, Artificial Sequence
  ENSG00000229017_17 (sequence is synthesized)
ttcaaggagggaatgaagaatactggatgggtaaatgtgttggtaactgtaaatgaatactgactacacaaaattatgttgaataactgaaagatgaaaacacaatcacttgaaggagaa

SEQ ID NO: 1027608 - DNA, 120 bp, Artificial Sequence
  ENSG00000229017_18 (sequence is synthesized)
aatcaagaaggtgattagttggtgtacttcagcaggagcaaccagatgaattggcttctctatatccccgtattagccacaagctaggcagcagcctgcaggtgggagcaatgcctatgc

SEQ ID NO: 1027609 - DNA, 120 bp, Artificial Sequence
  ENSG00000229017_19 (sequence is synthesized)
agtcataatgggaaagccatgtggaggcagcagagtgcctggtgtccaaggaagcatgtatagggggtacatatggtggcagttgtatgctcagcagaagaagcaccagggaggtgaagg

SEQ ID NO: 1027610 - DNA, 120 bp, Artificial Sequence
  ENSG00000229017_20 (sequence is synthesized)
catggatgttttcctgaatgtttccaatcaagctctaaactaaaatgaagagacccactagatttttttaattggcattataattatgctaatagaactgatgtcagaagaagattctac

SEQ ID NO: 1027611 - DNA, 120 bp, Artificial Sequence
  ENSG00000229017_21 (sequence is synthesized)
tagcattaaaacgatgtattattgatgatttttggttaaatcttaatgtaaaagttggctttatttttttaattgtgcatccttggtacatggttataaactgccaaaaaaataaaaata

SEQ ID NO: 1027612 - DNA, 120 bp, Artificial Sequence
  ENSG00000229017_22 (sequence is synthesized)
aaaaagagtagatctattgaagatctacctaccttaataatgtgtctggaattggttcctgccggtagattagtggtctcagtgacttcaagaatgaagcggcagaccttggtgcgtaaa

SEQ ID NO: 1027613 - DNA, 120 bp, Artificial Sequence
  ENSG00000229017_23 (sequence is synthesized)
tgatgtatcaatattgattcattagttttgacaaatgtaccatagtaacggaagatgttaacaattagagaaactgggtgcagggttgtgggaaccctgtgtactatctttgcaacttcc

SEQ ID NO: 1027614 - DNA, 120 bp, Artificial Sequence
  ENSG00000229017_24 (sequence is synthesized)
ctataaatctaagaccattctagaatacaaagttcattttaaaataaatttttaaaatatttagaatactagaccacggtatcaaaataggtagaaatccttagtcataggactcttata

SEQ ID NO: 1027615 - DNA, 120 bp, Artificial Sequence
  ENSG00000229017_25 (sequence is synthesized)
atttcaaaattaaatttaaaaactcaatatatgagtttaacaataggttggacactattgaatacaagacttgtgaactggaaacatatcaatgaaaaatatacaaagtgaagcatggaa

SEQ ID NO: 1027616 - DNA, 120 bp, Artificial Sequence
  ENSG00000229017_26 (sequence is synthesized)
gaaaaaaagaaagagaaaaaataagaaacaaatgtaagagacatacaggacaagtatgaaaggtctaccatgtaaaactgaagtttcagagggcaaggagaaagaaatagagcagaagca

SEQ ID NO: 1027617 - DNA, 120 bp, Artificial Sequence
  ENSG00000229017_27 (sequence is synthesized)
atattcaaagggataatggttgggaattttctaaagcagataaaatacatttaacccactggttaagaagctcagcaaaccctcaagcaggataagtatagagaaaaccacaattatgca

SEQ ID NO: 1027618 - DNA, 120 bp, Artificial Sequence
  ENSG00000229017_28 (sequence is synthesized)
actcacaataaaactgctgaaccaaagacagagaagatggaaaaaccagccagaagaaaaaagacacattatctacaaaagagcaacaatgagactggcagctgtctctaatagcaacaa

SEQ ID NO: 1027619 - DNA, 120 bp, Artificial Sequence
  ENSG00000229017_29 (sequence is synthesized)
tatcactgcataaagggtatgctacatttttgcagaaagtcaggaggtttagaaaccacacagagaaacattgcttggaaaggggaactcttcaatcgtctaagattacagatcttggaa

SEQ ID NO: 1027620 - DNA, 120 bp, Artificial Sequence
  ENSG00000229017_30 (sequence is synthesized)
ttggaatggtatgcagttgagttttccattcacagttccaggaaaaaatgggatttttttcccattaagaatactgttatttagttattttgaagtatacagtacatacatgctttttta

SEQ ID NO: 1027621 - DNA, 120 bp, Artificial Sequence
  ENSG00000229017_31 (sequence is synthesized)
taaaaccactggatttcataagtagcacacatttgagtatttcaaaatctctctactgcttttaaatcagatctggggcttgactatagaaaaaaatttcatttcaagtacagaacagaa

SEQ ID NO: 1027622 - DNA, 120 bp, Artificial Sequence
  ENSG00000226694_0 (sequence is synthesized)
tttagttttatctttgttacctctttaatcataaatgctctttcataatcaactttttaatttccctctctatgcttcgtgttagacttaatcacatcattgcttttgttacccaaaatg

SEQ ID NO: 1027623 - DNA, 120 bp, Artificial Sequence
  ENSG00000226694_1 (sequence is synthesized)
ctctagggacaacagcatggactaaaaggcactgaaattaccccaaacacaaagagatctgcaggcttccagattatcttggggtaggggcagactgggaaatctacccagccactgaaa

SEQ ID NO: 1027624 - DNA, 120 bp, Artificial Sequence
  ENSG00000226694_2 (sequence is synthesized)
tggctcctttcttcagaaatccagatgccacataaggtgatggagaagaaaggacatctcagagtgtgaacccaggagccatgcagaccagtggactgaggaatgactctgggggtcaat

SEQ ID NO: 1027625 - DNA, 120 bp, Artificial Sequence
  ENSG00000226696_0 (sequence is synthesized)
taaactggcgtgacaggagttccgggattgtccacagcacggtgatgtggaagccctggggagagaatgataaagaaaggggatgaggaacagctccacccggaagagcgggcttcccta

SEQ ID NO: 1027626 - DNA, 120 bp, Artificial Sequence
  ENSG00000226696_1 (sequence is synthesized)
gcaaatgaatctggaagggcgcaggggagggggcacggcgagttcagatggaccgaggctggaagctgacgcggttggagggggatgggtgtagctgttggcagtggcgctggggtggaa

SEQ ID NO: 1027627 - DNA, 120 bp, Artificial Sequence
  ENSG00000226696_2 (sequence is synthesized)
tctgaactgcgcgccaccttttgagtgccatctgtttccgtccaggactctgatacaactatccagtccgctgcagggaccggtcactgtgtcacaggttctccagagggccagaactaa

SEQ ID NO: 1027628 - DNA, 120 bp, Artificial Sequence
  ENSG00000226696_3 (sequence is synthesized)
caggatatatgtatatattgaaagggagtatattagggagaactggctgacaggatcatcaggcaaagtcccactatagtccatctgcaagctgaggaaggaagaagccagtcacgtctc

SEQ ID NO: 1027629 - DNA, 120 bp, Artificial Sequence
  ENSG00000226696_4 (sequence is synthesized)
gcattagctctttctgcctcccacgcagccttattttttttattgttgttttcttgttgctgttgttgttgttctcggagacggagtcttgctcttgctctgtcgtcgcccacgatagag

SEQ ID NO: 1027630 - DNA, 64 bp, Artificial Sequence
  ENSG00000226696_5 (sequence is synthesized)
acggagtcttgctcttgctctgtcgtcgcccacgatagagtgcctcagcctccggagtagctgg

SEQ ID NO: 1027631 - DNA, 65 bp, Artificial Sequence
  ENSG00000226696_6 (sequence is synthesized)
ttctcgaactcctgacctcgtgatccctgcagccttgttttgactgagtcagtgggagccattac

SEQ ID NO: 1027632 - DNA, 77 bp, Artificial Sequence
  ENSG00000226696_7 (sequence is synthesized)
gagtccaaaggccaaagaacctggagtctaatctccaaagacaggaagtcagcccctcccaccttctgcgctgactg

SEQ ID NO: 1027633 - DNA, 88 bp, Artificial Sequence
  ENSG00000226696_8 (sequence is synthesized)
cattctgtacacagatacagcgataaaatgaaatgactggaacttaaatgtgaaaactctttacaaggttatgtgatctctgtctcag

SEQ ID NO: 1027634 - DNA, 83 bp, Artificial Sequence
  ENSG00000226696_9 (sequence is synthesized)
tcacccaggctggagtgcaatgatgtgatctctgtctcagcccacagcagcttacgcagtgctagagtgcagtggcatggtct

SEQ ID NO: 1027635 - DNA, 120 bp, Artificial Sequence
  ENSG00000226699_0 (sequence is synthesized)
gaggacaccactgtcagcacagacagtgcagctgagccactagcacatggagtcacctctggccttcaaggcccaggtctttagataataacttaactcttttgaccaattgtcaattgg

SEQ ID NO: 1027636 - DNA, 120 bp, Artificial Sequence
  ENSG00000226698_0 (sequence is synthesized)
acatttgaatatagaatttatttttctcttaaacagatgaccccatagaaagtttccgttatgggattctgggtgactcattttcgttttttttttttttgagatgtactttccatcttg

SEQ ID NO: 1027637 - DNA, 120 bp, Artificial Sequence
  ENSG00000226698_1 (sequence is synthesized)
tgcaaaaaattaggttggggtgccacctactggttgaaaaatatatgaactgcatccagccagttgcaagagcaaagaaaaaacttccaagccctcttgatttttgccacactctcatag

SEQ ID NO: 1027638 - DNA, 120 bp, Artificial Sequence
  ENSG00000226097_0 (sequence is synthesized)
ggtagagtatactgtggatacactagacaaagggatgatttatatcctgggcagaatggagtaggacagtgaaagatttcgccaacatattcagaatagcatgcaatttaaaacttattt

SEQ ID NO: 1027639 - DNA, 120 bp, Artificial Sequence
  ENSG00000226097_1 (sequence is synthesized)
agttggaagaagtggcaaaatgtgaaaagcaagaagcaagtattaccagagacacctatgaaaaagaaatctttctgaagaacatttttaaagtgccataatctgttcgctcatggccca

SEQ ID NO: 1027640 - DNA, 120 bp, Artificial Sequence
  ENSG00000226097_2 (sequence is synthesized)
tagtgttggtgaggccaacactatagctgcaagcacttacttcatttaagaagtttatcgagagctttataaataaattctgttctccatctactatgcaaataaaactgctgtatctca

SEQ ID NO: 1027641 - DNA, 120 bp, Artificial Sequence
  ENSG00000226097_3 (sequence is synthesized)
tgtggatacactagacaaagggatgatttatatcctgggcagaatggagtaggacagtgaaagatttcgccaacatattcagaatagcatgcaatttaaaacttgtaagttttttatttt

SEQ ID NO: 1027642 - DNA, 120 bp, Artificial Sequence
  ENSG00000226097_4 (sequence is synthesized)
tccataaaactaaataaaccataacccagaagtgcaatgagacacacacagcatgaccacattatttctgaaagctgaagagttgccagtctgttgatctcaaacttcatgaaccacaca

SEQ ID NO: 1027643 - DNA, 120 bp, Artificial Sequence
  ENSG00000226097_5 (sequence is synthesized)
tgctttgagcctctgccaaacagccactgaaggactccgaaaaatacaagaactgaaaggggcacatggcagatacaatcataaactttcatttcggagagcagtaaaaaaggagaagaa

SEQ ID NO: 1027644 - DNA, 120 bp, Artificial Sequence
  ENSG00000226097_6 (sequence is synthesized)
gaacacactggtactccaacaagtcatagtttctgccagatgttgcaaaagtgagttagataactgacctttcttctggggcctgtgtcaactttgaatggagctttcaattgtacaata

SEQ ID NO: 1027645 - DNA, 120 bp, Artificial Sequence
  ENSG00000226097_7 (sequence is synthesized)
agcatctggacagttttgacatctttataacactctttgagttcttaaaaagctaccattttgtttaaagatgatttatgtgaagattaaaacaattacttaagtgctaagaataattaa

SEQ ID NO: 1027646 - DNA, 120 bp, Artificial Sequence
  ENSG00000226097_8 (sequence is synthesized)
tcctgtaactccatatcaataccattatcttcccagaactgggtctctaactactaatcataatcaagacaccaactgtcaaatcaaatcaaaattaaaatttgattaattatttgatga

SEQ ID NO: 1027647 - DNA, 120 bp, Artificial Sequence
  ENSG00000226097_9 (sequence is synthesized)
ttgcaaaatttcccatagtccttatggtgcctgactgtcgttatcaacttctgactcattctaacacactgctttaccttggctgtaagctgggaaccctgctatcagaaattcatatca

SEQ ID NO: 1027648 - DNA, 120 bp, Artificial Sequence
  ENSG00000226097_10 (sequence is synthesized)
aatgtccacagaaacccaatcagcaacactactttcaaagtgtcttttgacaagtaatatgtgcattttacaaatccaaaggcaatatttgaagtagctcttcaaaacagctgcattact

SEQ ID NO: 1027649 - DNA, 120 bp, Artificial Sequence
  ENSG00000226097_11 (sequence is synthesized)
caaagctatctctgtatcatcgccttgtttcctggaagaaaatgtggaaatgtgtactgaaaatgtgtaaatgattaaagcatcagtataaagaaaaaacattctgaagatgaataaaaa

SEQ ID NO: 1027650 - DNA, 120 bp, Artificial Sequence
  ENSG00000226097_12 (sequence is synthesized)
ttcaaatctagttccttcttaggcctaattttgtccttatgtttgctttgcactgaattattgtggtttaaatagcccattttacatgacaactttcaaacaagagcataaattctcata

SEQ ID NO: 1027651 - DNA, 120 bp, Artificial Sequence
  ENSG00000226097_13 (sequence is synthesized)
aaaacaggctaaggaattcataatgatagctcttggccgccacctaaaggtttatttcttgttttattttacatgagacctactatgcattccttttataataaaattgttgtcttgtca

SEQ ID NO: 1027652 - DNA, 120 bp, Artificial Sequence
  ENSG00000226097_14 (sequence is synthesized)
gaagaagtggcaaaatgtgaaaagcaagaagcaagtattaccagagacacctatgaaaaagaaatctttctgaagaacatttttaaagtgccataatctgttcgcactgcccatacttct

SEQ ID NO: 1027653 - DNA, 120 bp, Artificial Sequence
  ENSG00000226097_15 (sequence is synthesized)
ttttcaactcagaggttgagcctggtttctcaactcaagctgcatattagaatcagctgggaagcttttaagaaatcccaacagccaggccacaaaccagaccaactaatgcagaacctc

SEQ ID NO: 1027654 - DNA, 120 bp, Artificial Sequence
  ENSG00000226097_16 (sequence is synthesized)
tgagggtagaacacagctcatggcccatagtgttggtgaggccaacactatagctgcaagcacttacttcatttaagaagtttatcgagagctttataaataaattctgttctccatcta

SEQ ID NO: 1027655 - DNA, 120 bp, Artificial Sequence
  ENSG00000270090_0 (sequence is synthesized)
ggagcgtcctgtgagggaggggctgcactgccactttactgatgaggaaattaaggttcagagagatgaggtcatttgttagaggccagacagcctcctcagcccatttctaaggttgtt

SEQ ID NO: 1027656 - DNA, 120 bp, Artificial Sequence
  ENSG00000270090_1 (sequence is synthesized)
tctgtggtatttgccataaagccataggttcattgatttgttcttaagtagttctgagtccttcctgcatatcaggcagggacaaacgggaaagtccctgcccttggcaagtgcggggga

SEQ ID NO: 1027657 - DNA, 120 bp, Artificial Sequence
  ENSG00000270090_2 (sequence is synthesized)
gtctgaacaatcacgtctcatgaccccagggacacggcttcccctgaacgcggatcctagaggccaggcagaagcagcatgggtttccactcacacgatttatctactgctcgtgaaatc

SEQ ID NO: 1027658 - DNA, 120 bp, Artificial Sequence
  ENSG00000270090_3 (sequence is synthesized)
tctggatttaactgtgatgaaagaccggaggctgaaggagaacttcaatatcatatattttaaaggttgactcacagtttggaacaagaattaaagaaccacgaacttcaaggtgatgta

SEQ ID NO: 1027659 - DNA, 120 bp, Artificial Sequence
  ENSG00000270090_4 (sequence is synthesized)
aaattctcaaacaatgagatagataaaaagtacgcagccaaaaagtgcaggaagaagtgttatggagatggagcaggcccttcgtaaaaacacgatgttggttttctggattttgtatgt

SEQ ID NO: 1027660 - DNA, 120 bp, Artificial Sequence
  ENSG00000270090_5 (sequence is synthesized)
aggcctcacaaaacctggatcagactcgcccactgccctgtgtctgccctcccgaccccctctcctgcccagcagggatgtgggtggcagtggtgctgtgtggagggtggcgggaggacc

SEQ ID NO: 1027661 - DNA, 70 bp, Artificial Sequence
  ENSG00000253206_0 (sequence is synthesized)
tgtggaagaaggccagaaacagctgcttcctaattatgaggagcatgaacagggcttcccctgcacaggc

SEQ ID NO: 1027662 - DNA, 120 bp, Artificial Sequence
  ENSG00000253206_1 (sequence is synthesized)
agtccattaagcctcttcttcccagtctcagataactacagttatttcttcctggttaaaagcaagcctccagaatcagacacaacagtgtccaaatatttactctgcaacacaaaactc

SEQ ID NO: 1027663 - DNA, 120 bp, Artificial Sequence
  ENSG00000253206_2 (sequence is synthesized)
aagactgaaatcaagatcagttacatttatgatgtgatttgaatgatccttggaaggtacaagctgcaaaaattacatcagaatatttgtttacaaataaaaatatatattgggaatgtg

SEQ ID NO: 1027664 - DNA, 75 bp, Artificial Sequence
  ENSG00000260558_0 (sequence is synthesized)
tttttttttgtgatggagtttcgctctgttgcacctgccgggtttaagtaattctctgcctcagcctcctgagta

SEQ ID NO: 1027665 - DNA, 90 bp, Artificial Sequence
  ENSG00000260558_1 (sequence is synthesized)
cactgttaatacaaataatctagtcaagtaaaccatactccattttggataaaaacagagaagaactcctccatgtggttgttgaagggt

SEQ ID NO: 1027666 - DNA, 120 bp, Artificial Sequence
  ENSG00000260558_2 (sequence is synthesized)
aaaaacagagaagaactcctccatgtggttgttgaagggtctttaaaggaatcaaatattctcacatttttctctttaaaagcacttttaacaaatcttcaaatcaataaaatatacaat

SEQ ID NO: 1027667 - DNA, 120 bp, Artificial Sequence
  ENSG00000260558_3 (sequence is synthesized)
ggcaagatctaatgcccgaagatctcgtgaggcactcaactagggcttcccagacagtgagaagcacagagcctggaagggctcacaggtaagctaagctacggttggaaggtggaggca

SEQ ID NO: 1027668 - DNA, 120 bp, Artificial Sequence
  ENSG00000260558_4 (sequence is synthesized)
ggaagttcagacagctggctccacgaacctccaccccattacctcgtgcactgtaaacttttctgctgttttttacctgtgccatgaggagaaaatagttcagaagccctagattattca

SEQ ID NO: 1027669 - DNA, 120 bp, Artificial Sequence
  ENSG00000260558_5 (sequence is synthesized)
cgctctaaaggaatgacttaattgtggctgcccaacaataggaaattcacatttttaaataacttagcattttattttatttatttaattgtttttgagatagagtcttggctctgttgc

SEQ ID NO: 1027670 - DNA, 120 bp, Artificial Sequence
  ENSG00000260558_6 (sequence is synthesized)
acaatcatggctcactgcagcctcgacctgctgggctcaatcaatttgtctgcctccgagtagccaggactacaggcatgtaccaccatgactggctaaatttttttagagacagggttt

SEQ ID NO: 1027671 - DNA, 85 bp, Artificial Sequence
  ENSG00000260558_7 (sequence is synthesized)
ttttttgtcaaacttttggtctcaaccaattggcccacttcagcttcccaaagtgctggggttacaagcattgagccactgcgcc

SEQ ID NO: 1027672 - DNA, 120 bp, Artificial Sequence
  ENSG00000286130_0 (sequence is synthesized)
gactccgtctcaaaataaactaaattaaattaaattaaaacaaaaaaacaaccagtcaaatgaagctgcacttccttaatgtgtacaatttgatgagtatggacataggcgtaaatccac

SEQ ID NO: 1027673 - DNA, 120 bp, Artificial Sequence
  ENSG00000286130_1 (sequence is synthesized)
gataccaccatcacaatcgagagatgccacgcccagagagaaggaatctagagaggcagtctgaccacagcagccttgctgtgaaagctttttacagtttggatcttctgagaacatcaa

SEQ ID NO: 1027674 - DNA, 120 bp, Artificial Sequence
  ENSG00000286130_2 (sequence is synthesized)
agctgagaagggtccctccacactcttggaactgtacatccattggaacccttaaggttttaaatgcttgcctgcagccatctctagaatggtctctcttcaactggaatgacaagagct

SEQ ID NO: 1027675 - DNA, 88 bp, Artificial Sequence
  ENSG00000286130_3 (sequence is synthesized)
tctctagaatggtctctcttcaactggaatgacaagagctgaaagaaatctgcaaccaggccaggcacggtggctcacacgtcagatc

SEQ ID NO: 1027676 - DNA, 65 bp, Artificial Sequence
  ENSG00000286130_4 (sequence is synthesized)
gcgtgtggcacgcacatagatattgcaatgagccgaaatcacaccactacactcctgcctgggcg

SEQ ID NO: 1027677 - DNA, 120 bp, Artificial Sequence
  ENSG00000286130_5 (sequence is synthesized)
gagaatcgcttgaactggggaggtagatattgcaatgagccgaaatcacaccactacactcctgcctgggcgacaagagcgagacttcgtttcaaaaaaaaaaaagaaagaaagaaaaag

SEQ ID NO: 1027678 - DNA, 120 bp, Artificial Sequence
  ENSG00000286130_6 (sequence is synthesized)
gagatgggaaacccaaaatgatggtaaatcagagtggcactaaggccattgtctcaccatggcaacccaaaaaacagcagtcacagtctaggtctttccagaaagtaaatgtagagcccc

SEQ ID NO: 1027679 - DNA, 120 bp, Artificial Sequence
  ENSG00000254278_0 (sequence is synthesized)
acttcattttgtcacactctggcttgtaattatctcataatgtctgcagatgctcaggaggaaagttaatgagatttccactgtttgaagttttaacagggtttctaatgggaaaatggg

SEQ ID NO: 1027680 - DNA, 120 bp, Artificial Sequence
  ENSG00000254278_1 (sequence is synthesized)
aagggagaagttttctattaggtaaaaaatagtgctattctcaaatggattctcccatttgcagggacaaggaaaactttaattttcaatgcccccatgacaccccaggaataatctaaa

SEQ ID NO: 1027681 - DNA, 120 bp, Artificial Sequence
  ENSG00000254278_2 (sequence is synthesized)
gtttcctatactctaaggaaacttcagtaacggttttaagcaaatactttatttctaatcaaaactttctttctgaacatttgccctcgcattattcatttattcacccaagaaattatt

SEQ ID NO: 1027682 - DNA, 120 bp, Artificial Sequence
  ENSG00000254278_3 (sequence is synthesized)
tggaagctctaagctctcattgttcctcacagcatttattttatcgtatcaaaggttaaaacttggattgcaatcttagaggaaaattaattcagtgattaagaaaaatgcactttaagc

SEQ ID NO: 1027683 - DNA, 120 bp, Artificial Sequence
  ENSG00000254278_4 (sequence is synthesized)
aatacacatttaaataactgacaggcatggggcaatgtatttctgaattttgttttttggaaaaacacttttttctacttaaaattttaggcagctgcaattcttctaccctatagcctg

SEQ ID NO: 1027684 - DNA, 120 bp, Artificial Sequence
  ENSG00000254278_5 (sequence is synthesized)
aaaatagattttttaaaatctactggttgcttaaagcatatttggaccttggctgtacttgagaacattttgcaatattctaccatccttgagcagaaggcatttggccccagagactac

SEQ ID NO: 1027685 - DNA, 120 bp, Artificial Sequence
  ENSG00000254278_6 (sequence is synthesized)
acttccaaataaagaaatgttcatttatatactaccttcaatgcttgacaaaatgtttccatcctctacgttggaactcaggatcccattaacttatgaaatatatatttaagatttaag

SEQ ID NO: 1027686 - DNA, 120 bp, Artificial Sequence
  ENSG00000254278_7 (sequence is synthesized)
ttttatgttactgaccttttgcttaaacagctttaccagcatcagtattagaaaggaggagagtacaaacagtgcaataatagaggtgcttttaaggaaggaaagggcttctggagactc

SEQ ID NO: 1027687 - DNA, 120 bp, Artificial Sequence
  ENSG00000254278_8 (sequence is synthesized)
atgcctggattgtgcatctgccccggagcagaatggaacagggaatttccccctgccctggtaactggaagaaatgacacatcaaaacatttgctcagtgcctgacagagacccagcaac

SEQ ID NO: 1027688 - DNA, 120 bp, Artificial Sequence
  ENSG00000254278_9 (sequence is synthesized)
atctgttcttgtgcattttaatgatcatgcctccagcttcctgatattttcctggaaggaaaataaattccaggatacgaaaaaagcatatcctaaggcagaagtattttactagttaaa

SEQ ID NO: 1027689 - DNA, 120 bp, Artificial Sequence
  ENSG00000254278_10 (sequence is synthesized)
acagcataacagtacaatgacaacctcatctccagaagggatttcttgacaaattgatataactcaactttggacttggtttcagctttgtccattcaaataagtaattagtggattaaa

SEQ ID NO: 1027690 - DNA, 120 bp, Artificial Sequence
  ENSG00000254279_0 (sequence is synthesized)
cacacttcagcccagcctttctgggccaactctccatctgtagagacacatccaaggcccagttatccctgcagctgagctccgtgatggccaagggcagggccgcacattcccgtggga

SEQ ID NO: 1027691 - DNA, 120 bp, Artificial Sequence; identical to SEQ ID NO: 995803
  ENSG00000260555_0 (sequence is synthesized)

SEQ ID NO: 1027692 - DNA, 120 bp, Artificial Sequence
  ENSG00000260555_1 (sequence is synthesized)
attgtcctgtagcgtgaacgatgagtgacacccgcaccctcccttgtaaatctgctccaacaagctctcctccaggacgctgtcttttctgtgctatcgagcacagccctgacattacag

SEQ ID NO: 1027693 - DNA, 120 bp, Artificial Sequence
  ENSG00000260555_2 (sequence is synthesized)
ctggccttgcagacatcaccagacgacacccaagaaaaatggcagcgccagagccgtgagcatcacaggaggtctcagggacacgccaaggccgcctcccaggaaaaagcagaacaccgg

SEQ ID NO: 1027694 - DNA, 120 bp, Artificial Sequence
  ENSG00000260555_3 (sequence is synthesized)
aaaagaccttgtgaagacttcttatcttcccctccaaatggtgtctcttgctttggctcttgtcgagttggggcttgttggaagaccaggtgaaggcccagctgctaaagcttccccttt

SEQ ID NO: 1027695 - DNA, 120 bp, Artificial Sequence
  ENSG00000260555_4 (sequence is synthesized)
ctacttcttgttactctattactcaattaggactggtgctgatttaggggaaaaacattatttgaaaacacagaggttccctctgctttgatcctacacaggcagagatatctccaagca

SEQ ID NO: 1027696 - DNA, 120 bp, Artificial Sequence
  ENSG00000260555_5 (sequence is synthesized)
gagagatccaaaaaagagcgccccctgcgggaaacgttcttttaatttagactttgccgttcctcctgtggagacgttgtcacagttacagtagtgggtgatacatccccaaatttctgc

SEQ ID NO: 1027697 - DNA, 120 bp, Artificial Sequence
  ENSG00000260555_6 (sequence is synthesized)
cacgtgctcagagagctaaggcatatcccacacccacgacaagcttacaggtgtgaacctgggtccaggcaggtgccctgttcctaactctggtcttggacgtgtgatttaagccaggcc

SEQ ID NO: 1027698 - DNA, 120 bp, Artificial Sequence; identical to SEQ ID NO: 995810
  ENSG00000260555_7 (sequence is synthesized)

SEQ ID NO: 1027699 - DNA, 120 bp, Artificial Sequence
  ENSG00000260555_8 (sequence is synthesized)
agggtgaaacaacagacagcaacccagcctgggcagcacatgtcctgcacctgggctgtgcagatactgagagcttcctgcctggagtggaaattcctgcagcatgcatgcagaaaggag

SEQ ID NO: 1027700 - DNA, 120 bp, Artificial Sequence
  ENSG00000260555_9 (sequence is synthesized)
atggccaggaagtcccaggaagatgtagaaagtagaaagggaggcaagagcgaggagttctcatttgggagaaaggctcaccagtgaggcaggaagtgacctttggaaacatgcgagaac

SEQ ID NO: 1027701 - DNA, 120 bp, Artificial Sequence
  ENSG00000260555_10 (sequence is synthesized)
caacgtgcatgggtcctcaccaacttactctcagcagcgaggcctgccaacaagaaggcataggctcaccagctgcacacggctaatgctcacccagcaccaccctgcctgtccgtgcat

SEQ ID NO: 1027702 - DNA, 120 bp, Artificial Sequence
  ENSG00000260555_11 (sequence is synthesized)
ctgctgtgcacgtcagaggtcaactacacgtcccagtggtagccatatgaggacagtgctggtcccagagaacaacactgatataagacccagagactggaaatctgccactccacactc

SEQ ID NO: 1027703 - DNA, 120 bp, Artificial Sequence
  ENSG00000260555_12 (sequence is synthesized)
agctctgaacatgcctcctagccatgcctcttcttcacaactgtgagatcaccgcaaacataattcagcacacagagcctgaatccttatttccagataacatgagcagaaacatgcagc

SEQ ID NO: 1027704 - DNA, 120 bp, Artificial Sequence
  ENSG00000260555_13 (sequence is synthesized)
tctctctgcgccgaaccaagtcccagtgactatatcacaccacaccaaatcacacagacgtggaaaactccaccagggccagcactcttccctaagaactcaactgcctgcatgcaacgg

SEQ ID NO: 1027705 - DNA, 120 bp, Artificial Sequence; identical to SEQ ID NO: 995817
  ENSG00000260555_14 (sequence is synthesized)

SEQ ID NO: 1027706 - DNA, 120 bp, Artificial Sequence
  ENSG00000260555_15 (sequence is synthesized)
tggcccgaggatgatcttgcatctattatgaagcgaatggcccattcctcaaggaggagttctcccggggataccgtctgtctagctaggattcaatatacatattttgtatacctgtat

SEQ ID NO: 1027707 - DNA, 120 bp, Artificial Sequence
  ENSG00000260555_16 (sequence is synthesized)
tttatatagataatttctaatcattttaattgttcaacattcttaccccagagcctcccttttcagacttagaaattgctgcagaaaacctcattcttctatgccagcaggaattaaagg

SEQ ID NO: 1027708 - DNA, 120 bp, Artificial Sequence
  ENSG00000260555_17 (sequence is synthesized)
aaacacccttggcccaaacatgaaaggaactttaataggaaacacactgtaatgggcacacacaggacccagggtgggaaggacgcgtggcgggatccccctacccacacccacaccaca

SEQ ID NO: 1027709 - DNA, 120 bp, Artificial Sequence
  ENSG00000260555_18 (sequence is synthesized)
cgtgccacacagccatgccgtggctcatcccagggttctgccgatcagccaaagcgcctccctgcctcacgcctgcatttactaacttcagaagacaggactaccaagtggaaagaagtt

SEQ ID NO: 1027710 - DNA, 120 bp, Artificial Sequence
  ENSG00000260555_19 (sequence is synthesized)
gagaatgccaactgatgggcacagatggagaaatgaaattagaagattgccatctgacaaccattgtaataatacttgacttgggtaagaatcatcaatgcatgcccaaactaggaggtg

SEQ ID NO: 1027711 - DNA, 120 bp, Artificial Sequence
  ENSG00000260555_20 (sequence is synthesized)
aaaatttgatgagtcaaaagatatgaatatagtccgaaaaaatcgccccacaattacttgttcatttcaaaggaaatagagcaacctacggtgggaaaaccttacagacaccaccttaaa

SEQ ID NO: 1027712 - DNA, 120 bp, Artificial Sequence
  ENSG00000260555_21 (sequence is synthesized)
taagatatcaaaatgactatccccagcaggacacactgatatcacgtgcctcttgatatgatgcatggcaaggacacaacatcacttctctaggattctggccaaaattctaattatgag

SEQ ID NO: 1027713 - DNA, 120 bp, Artificial Sequence
  ENSG00000260555_22 (sequence is synthesized)
gaaacatcaaacaaatcatagtgatgggcactgtacagaaaacctgttctgttctgaaaaatgtaacggccataacaggtaaagaaagagggaagaaatattctagttgaaaggaaatta

SEQ ID NO: 1027714 - DNA, 120 bp, Artificial Sequence; identical to SEQ ID NO: 995826
  ENSG00000260555_23 (sequence is synthesized)

SEQ ID NO: 1027715 - DNA, 120 bp, Artificial Sequence
  ENSG00000260555_24 (sequence is synthesized)
tactgtgccaactgcgaatatcctgattctggtcacggtcctgtgcctctgtaagaaaatgctctttttattggtaaatacagaaagagagaaaataataaagtaaatggagcaaaatgt

SEQ ID NO: 1027716 - DNA, 120 bp, Artificial Sequence
  ENSG00000254275_0 (sequence is synthesized)
atggcatcaccagaaaccaagaagatggtaaggcctggaggtggcagagctgaagagagtacatgacccagcagaagaaataagcacaaatacaaatggtgacagaaaaataagatgtgt

SEQ ID NO: 1027717 - DNA, 120 bp, Artificial Sequence
  ENSG00000254275_1 (sequence is synthesized)
cacaactgacttagattccaacaaccacaacagcacagaggaggaagcgaggtggtgctccctggaatgacccaaacacaacaatatctgagcttgctcttgaaggactagcagtttacc

SEQ ID NO: 1027718 - DNA, 120 bp, Artificial Sequence
  ENSG00000254275_2 (sequence is synthesized)
aagcaaaatggaaaacagaaattgagtccaggtctagatatcaagaagcacaaagagatccagaaaagaccatggagaattcaaagaccagcaacaggcttcaaaagccttctatgaata

SEQ ID NO: 1027719 - DNA, 120 bp, Artificial Sequence
  ENSG00000254275_3 (sequence is synthesized)
aggggtatggacagtgttggaacaagatggtcttggattcagaaataaaaggagtcagaagctgaagacctaagggtaacacaagacttccgggttctggccgggcgcggtggctcacgc

SEQ ID NO: 1027720 - DNA, 120 bp, Artificial Sequence
  ENSG00000254275_4 (sequence is synthesized)
acttccgggttctgaaagcagtgcagcttggaattttcagaaagtgaattgacttcctgtagctgattgttttttattttaggaaaataaaaattattactttttgtttaaatgacaaaa

SEQ ID NO: 1027721 - DNA, 120 bp, Artificial Sequence
  ENSG00000254275_5 (sequence is synthesized)
tcagtcagaagaaatgaaaacaagaatggaagattgggaagagatggcatagtgtggatctgcctgaaaaacatgcacaagaccactttgcctccaaactcaatttcaaaatctatggaa

SEQ ID NO: 1027722 - DNA, 120 bp, Artificial Sequence
  ENSG00000254275_6 (sequence is synthesized)
gctgaatcccaagaatgcctgcagactcaagggttatccatgggaggacatggcaccaaatctcatgagagtgacaataagctagaacagaagttttggaaagccaaagaaaagactgta

SEQ ID NO: 1027723 - DNA, 120 bp, Artificial Sequence
  ENSG00000254275_7 (sequence is synthesized)
actgcacacaataaacagaaaacatttgtgctttctgtctccatctatcacccaaacagtcaaacctggagaaaactacttttcctctctacaccaacatgcatgctatttgcataacac

SEQ ID NO: 1027724 - DNA, 120 bp, Artificial Sequence
  ENSG00000254275_8 (sequence is synthesized)
tggatactgcttattggatactctcacatctcaacaatccaaacaccttccacaatgacctgcttaatctgacccctggcacatctcaaatcacagtctctgtctgtagtagataaaaaa

SEQ ID NO: 1027725 - DNA, 120 bp, Artificial Sequence
  ENSG00000254275_9 (sequence is synthesized)
aaatggacacacactttgcaataccacccatcaagagattaagtaactttcttcatcccttgaatctagtgggctcttgtgactaccaatagaatttggtggaagtgacactctgccttc

SEQ ID NO: 1027726 - DNA, 120 bp, Artificial Sequence
  ENSG00000254275_10 (sequence is synthesized)
tgcaacaaggcacctgtgctgaaggagacttttagcctctgcccttgcctccctgaatagtgcctccatgtgaagaagaccaagctaacctactggagacatggctccaccaagaaccag

SEQ ID NO: 1027727 - DNA, 120 bp, Artificial Sequence
  ENSG00000254275_11 (sequence is synthesized)
gtacatgccctaacattactccaaaatctgatccccatcagccctatcagaacactatttaaaagctcagcttacttcaactgtggcaaaacagttatggcccaggtaaacagaagaagg

SEQ ID NO: 1027728 - DNA, 120 bp, Artificial Sequence
  ENSG00000254275_12 (sequence is synthesized)
tagactccaccgtaacaaatttagttaacaggaagcaatcccagatctataggcacagagaagaataagagagaaacttcaccctaatgaaatttagacttgagttttagaagattttcc

SEQ ID NO: 1027729 - DNA, 120 bp, Artificial Sequence
  ENSG00000254275_13 (sequence is synthesized)
gttaatttaattggcacgatctctcgaagacagatccactgcaaccacgaagaagaattatcctttctacacagggccatttttccacgatgctactacattggccatcacagagcacaa

SEQ ID NO: 1027730 - DNA, 120 bp, Artificial Sequence
  ENSG00000254275_14 (sequence is synthesized)
tggcatcaccagaaaccaagaagatggtaaggcctggaggtggcagagctgaagaggtgagagaaggaagcctgatgaagaaatacaattctaatggtaaacctagggaatcaggaaatc

SEQ ID NO: 1027731 - DNA, 120 bp, Artificial Sequence
  ENSG00000254275_15 (sequence is synthesized)
agatgaaattagtgaacaccatgcctctctcttgtactaaagaggccgcagggaagacaaagctcagttgtattcaacaaaggccactcaggtagcaccataaaggaagagctgtaacac

SEQ ID NO: 1027732 - DNA, 120 bp, Artificial Sequence
  ENSG00000254275_16 (sequence is synthesized)
cactcaggtagcaccataaaggaagagctgtaacacggacacgggagtagtggaatcagtcaagagggaatttcaaaggtcaaagatgaaaggctggctgggcgcggtggctcacgcttg

SEQ ID NO: 1027733 - DNA, 70 bp, Artificial Sequence
  ENSG00000254275_17 (sequence is synthesized)
caggagatagagaccatcctggccaacaaggtgaaaccatagttccagctactccggaggctgaggcagg

SEQ ID NO: 1027734 - DNA, 120 bp, Artificial Sequence
  ENSG00000254275_18 (sequence is synthesized)
cagaggggttcatacacatgcaaagataacttccccacttgtctctgatggaaactcaagggccatgtggaaatggcgtggatttgggactcagctgatgaacttggaagcccagcccag

SEQ ID NO: 1027735 - DNA, 120 bp, Artificial Sequence
  ENSG00000254275_19 (sequence is synthesized)
ccagtcagcagtttggtccagaacctgtctgcacctcagtgtctagtaaatggaggaagggagaaggagatgaaactaattgacattgggcctcttttatgaaccaggcactttgctatt

SEQ ID NO: 1027736 - DNA, 120 bp, Artificial Sequence
  ENSG00000254275_20 (sequence is synthesized)
ctcatccagtcttaccttgacggcaggaatgcaaaatggcaagaggctccatccttgaatcaccatttggagaagagttaactgacaaacaagatctgcactgaattatatgccacaggg

SEQ ID NO: 1027737 - DNA, 120 bp, Artificial Sequence
  ENSG00000254275_21 (sequence is synthesized)
acccaaccctagtcaagacagcagaatgactgcagctcggtgaattgtgttttaagctgctaagttttcagtggtttattaggcagcaatacataactgaaataccctttcaccctcccg

SEQ ID NO: 1027738 - DNA, 120 bp, Artificial Sequence
  ENSG00000254275_22 (sequence is synthesized)
actttaggctccagcctttctgatcttctcttaagccttggaacatgccattgacttttccaccctgagactttgcatgttattccttatgcataaaatacattcctctttccacctgtc

SEQ ID NO: 1027739 - DNA, 120 bp, Artificial Sequence
  ENSG00000254275_23 (sequence is synthesized)
aaatggtttaactcccttttatcatttaggccactagcttaaaattcacatgcagagagaattctttactgagcaaccatataccccagatttcttattcttcatatcaggcttttctta

SEQ ID NO: 1027740 - DNA, 120 bp, Artificial Sequence
  ENSG00000254275_24 (sequence is synthesized)
ttttttcattgcgcatatcacaaagggcaattaattaattaatttgtttgtttgtttgttattgcctattttccccctatccagatgtaagctccatgagagtggttggaggcaatgttt

SEQ ID NO: 1027741 - DNA, 120 bp, Artificial Sequence
  ENSG00000254275_25 (sequence is synthesized)
attctgttttccacttcaccttaagagagtgccgggaagagggtctcatccatatttctttggatccttttatcattttcctgcatactttcactgagagtgctctcatgtccatcagcc

SEQ ID NO: 1027742 - DNA, 120 bp, Artificial Sequence
  ENSG00000254275_26 (sequence is synthesized)
agcacttgcttctcttttctgagggctgccccaggctcctgaagtccagcttggattgcctgcatgaaaacatagagagctaaaggctgggaacttgcatagccttagccatttgctaag

SEQ ID NO: 1027743 - DNA, 120 bp, Artificial Sequence
  ENSG00000254275_27 (sequence is synthesized)
gaacggggtgataactgtaaacactctagctcccttgttccctgatcaggaaaacactaatgtgtgatctccctgtctgcagtgctcacctgcaggactttccttgctggttttcttcac

SEQ ID NO: 1027744 - DNA, 120 bp, Artificial Sequence
  ENSG00000254275_28 (sequence is synthesized)
ggtgtttgtaataagtgcattgtacccttgattgcctttcttccttgccctgtcctacttctccagttctctggaggtttttccaggaatgcttcttaataaacaccactttcacacaaa

SEQ ID NO: 1027745 - DNA, 120 bp, Artificial Sequence
  ENSG00000254275_29 (sequence is synthesized)
atggcatcaccagaaaccaagaagatggtaaggcctggaggtggcagagctgaagaggttgaactggtttgttgaactttatggatggagccagccaacaggatgacattgtggcagaga

SEQ ID NO: 1027746 - DNA, 120 bp, Artificial Sequence
  ENSG00000254275_30 (sequence is synthesized)
aagaagcttgcagcttcttgcatcagaaaatcagatagagcctctctggcaagaagctgcagacacaaaagaagcttgcattgaagacggcaggaatgcaaaatggcaagaggctccatc

SEQ ID NO: 1027747 - DNA, 120 bp, Artificial Sequence
  ENSG00000254275_31 (sequence is synthesized)
aagtgtacagcttttgaatcattgaaggattcaattgtttttcatataatctggctccacagggagccaggataggaggacaacatggtggatccagcatggaacttacaactgaggcta

SEQ ID NO: 1027748 - DNA, 120 bp, Artificial Sequence; identical to SEQ ID NO: 807653
  ENSG00000260550_0 (sequence is synthesized)

SEQ ID NO: 1027749 - DNA, 120 bp, Artificial Sequence
  ENSG00000260550_1 (sequence is synthesized)
gcacacgttagtaacaaggaggcctggtgaccgcctaagcgtccaatcgcggggaccaccgggtcgaggccgagaggatggagaccgcatcacaggcacctcgctgctggaatggagggt

SEQ ID NO: 1027750 - DNA, 120 bp, Artificial Sequence
  ENSG00000260550_2 (sequence is synthesized)
ctggtaagcagaaactcaagaaacctctagggtcctgttttctggtcgtatgatcccaggagtgcacatgagcccctcgggtgtctgaacagaagggcataggagggagggccgcagccc

SEQ ID NO: 1027751 - DNA, 120 bp, Artificial Sequence
  ENSG00000260550_3 (sequence is synthesized)
tgcagtcttactctgctggtgtagcggtcacctgccaactcccaccccaccctgcaccgcgggctcctgagtcggcagattaagcattttataaattctattttaaatacgtgttttaaa

SEQ ID NO: 1027752 - DNA, 120 bp, Artificial Sequence
  ENSG00000260550_4 (sequence is synthesized)
gaggtgggggaggggggaagagaggcgctcggggagctgggacgggcaccgggttggggggtcccggaacccctgaaagttcagtgacacctccatagttccctcttccccctgcaacaa

SEQ ID NO: 1027753 - DNA, 120 bp, Artificial Sequence
  ENSG00000260551_0 (sequence is synthesized)
atcatctgggcatgtatggtatctgtatctacgtcaagacctgggctttgctccacttggagtcagctgattgacaggagggcatctgaaattgagaggagatttcaggacgtttaccca

SEQ ID NO: 1027754 - DNA, 120 bp, Artificial Sequence
  ENSG00000260551_1 (sequence is synthesized)
gccctttagtggggatctgtccgggactgtgcagtctgaacctgcaactgtaaaagtgctgtttggactgtggacaagttaggttataaattttgacctctgaatggacgcaaccaatat

SEQ ID NO: 1027755 - DNA, 120 bp, Artificial Sequence
  ENSG00000260551_2 (sequence is synthesized)
tagcctttaatgcagttagactcattttgtcagaggtctggaaaattaggaaaaactaccatatgtccaagccttcatgcttttcgaaaatcaggattcataccatgagggaagatgcca

SEQ ID NO: 1027756 - DNA, 120 bp, Artificial Sequence
  ENSG00000260551_3 (sequence is synthesized)
gctgctagctataccaaaggacagaatggaaaaaaggctcttcacaagccagagagccaaactcaggcagaaagcaatgaagaagaattaggacttttaaatgtcctacacccaagctgt

SEQ ID NO: 1027757 - DNA, 120 bp, Artificial Sequence
  ENSG00000260551_4 (sequence is synthesized)
tttagcagctccaaccaccacagccagaacgcacctggcctctgctccacctcaacagctcccactgcagtaccaccatacggggcccttagcactggcctctgcgttggaccggattgc

SEQ ID NO: 1027758 - DNA, 120 bp, Artificial Sequence
  ENSG00000260551_5 (sequence is synthesized)
cttgatgctaccaagtgaggcatcagaccaataagagggagctactctgccgcctcagtataatgagagaacagagacggcctctccctccagtgcttgacagggaacatgatttagcaa

SEQ ID NO: 1027759 - DNA, 120 bp, Artificial Sequence
  ENSG00000260551_6 (sequence is synthesized)
ggaattgccatggccggagcaaaggaattaccgtttacagggatggccatgggtggcttggatgagagtgggcaacctgtcagacattactggacatccagcccattttcaacatctaac

SEQ ID NO: 1027760 - DNA, 120 bp, Artificial Sequence
  ENSG00000260551_7 (sequence is synthesized)
ttgtgaaatggaaaaactccaccccactttatacaatggatccccagaaaatgactgatctctatgtgtctatctgtgctacccaccagcgtacctgagcagatgtgtagtctctcctaa

SEQ ID NO: 1027761 - DNA, 120 bp, Artificial Sequence
  ENSG00000260551_8 (sequence is synthesized)
atatgtttctgactgcagaccaaagaaggtccagagtcttggtgcctccatgaaacaaatccaaataccccaaacctgaagggaccattctggatgcaaaccctaattggggctccaatt

SEQ ID NO: 1027762 - DNA, 120 bp, Artificial Sequence
  ENSG00000260551_9 (sequence is synthesized)
gataaggggacatggcccatctggaatattcacaaacattcttcctgtttggactcaggaaaggggtaccaaaacaggaagcctcactaggaatgaccccttccccgctccagagacaaa

SEQ ID NO: 1027763 - DNA, 120 bp, Artificial Sequence
  ENSG00000260551_10 (sequence is synthesized)
gaaacagaagtttcaaccataaacgtggaatgaacaaggaagcctctgcatcagaaaaatcgaggcaagcctctggaacacagccagtgtgcctagtgtaaggagaaaggccactgaaag

SEQ ID NO: 1027764 - DNA, 120 bp, Artificial Sequence
  ENSG00000260551_11 (sequence is synthesized)
gatgactgtcccaaaagaaaggaccaaggggccagaaaaaggaggaatatgatgaggaaaaagctcaaagtcaaatcatggagcagggtcactgctctgaccacagagagtgatgcctgg

SEQ ID NO: 1027765 - DNA, 120 bp, Artificial Sequence
  ENSG00000260551_12 (sequence is synthesized)
ggactctccttaatcactcagagacaattaaaatttccccacaggaaccctgggtacaactgacagtgaggaaaaagttaattgatttcctggttgatactgggcaaactattcagtttt

SEQ ID NO: 1027766 - DNA, 120 bp, Artificial Sequence
  ENSG00000260551_13 (sequence is synthesized)
aacactttatgagcaaaaagcaccaaaatgattgtacctgtgataggagttgcaagaataatgcaacaaaaggctttcctacaacctttagaatgcaaactagaaagtttggacctaagg

SEQ ID NO: 1027767 - DNA, 120 bp, Artificial Sequence
  ENSG00000260551_14 (sequence is synthesized)
cactgctatttctatatgtaagaatgcccaattcccttgctgggaaaagacccattatgcaaattaaatactcaagtaatttatccccagagaaacaactatggctgcaggtcctgctaa

SEQ ID NO: 1027768 - DNA, 120 bp, Artificial Sequence
  ENSG00000260551_15 (sequence is synthesized)
agcaagcactgcaactaagatgttactcacttgccttaagaagaaacaagaattctccctcagaagtctatgagagagtgcgtaattgtgaataggcagaaggaatcccaggaaaaacaa

SEQ ID NO: 1027769 - DNA, 120 bp, Artificial Sequence
  ENSG00000260551_16 (sequence is synthesized)
gaaatatacagtgagtgcatatagaaaaaatagaaggggctactgtgacctgggcggcggggaggaggcgaataaaaaaatcagtatacattaagaaaggaagccttagaaggaatacag

SEQ ID NO: 1027770 - DNA, 120 bp, Artificial Sequence
  ENSG00000260551_17 (sequence is synthesized)
aatatcaatttgcccaagacctgagaaccgttaataaaatagtcttggatattcacccagtggtgcctaacccagatactctactgactgctatatatagacattatgaatgcttttcag

SEQ ID NO: 1027771 - DNA, 120 bp, Artificial Sequence
  ENSG00000260551_18 (sequence is synthesized)
tgctagatctgaaagatgttttcttctgcattccaattgaagaaaagacccaacaattatcattattatttttaatgacaggaccgagagactaaaacaacctttcaatactgttagaca

SEQ ID NO: 1027772 - DNA, 120 bp, Artificial Sequence
  ENSG00000260551_19 (sequence is synthesized)
gtggggtctcaatgtgttaaaaaatgcaccaacaatttttggggaaatactggcaaaagacttaggagacctacaacaagattaagaagcctggctacaacacatagataattaatagcc

SEQ ID NO: 1027773 - DNA, 120 bp, Artificial Sequence
  ENSG00000260551_20 (sequence is synthesized)
agccacaactataggaaatgcttagctgatgtcattttagttctaaatcacctggtacaatatggatacaaagtattcccaagaagccccaaatatgtaagtagaaagtaacctgtcttg

SEQ ID NO: 1027774 - DNA, 120 bp, Artificial Sequence
  ENSG00000260551_21 (sequence is synthesized)
gctttaggttaaagcaaggccaaaggagcctggtctggtaaaaaaaaaaaacaaaaaacaggcaatagcagccataaagctccagagaatgggggcaaccatggggattcttagaaaggg

SEQ ID NO: 1027775 - DNA, 120 bp, Artificial Sequence
  ENSG00000260551_22 (sequence is synthesized)
ttagcttctgccagatttgattcctaagtttggactaatgactaaaacactttatgaatccttaaaggattcactagactcagaggcccttctctggacatctaaaggtcaacaaacatt

SEQ ID NO: 1027776 - DNA, 120 bp, Artificial Sequence
  ENSG00000260551_23 (sequence is synthesized)
ttataccatcaaagaaaagctgatatcaccccctgcactgggataccaaattcccaaaagctgttcaaactctatatccaagagaaacaaagcataggtgtgggttgtgctaatgcaaat

SEQ ID NO: 1027777 - DNA, 120 bp, Artificial Sequence
  ENSG00000260551_24 (sequence is synthesized)
gctgggagatgccccacaatccatggcctatttctctaaacaattacaccaaagattaagggatggctccccttcctctgggcaagagcacccactgtgaagtcctacaggaagtagaac

SEQ ID NO: 1027778 - DNA, 120 bp, Artificial Sequence
  ENSG00000260551_25 (sequence is synthesized)
aatttactctgggacagccagttaccttgtttgtaccccatcaggtgctgactctgctagaacaaacgggaggctactggctcactgtggggtgagtgggcagataccaggccatcctct

SEQ ID NO: 1027779 - DNA, 120 bp, Artificial Sequence
  ENSG00000260551_26 (sequence is synthesized)
tatatgatccaaatatcaccctacaaaccaccatggctctaaaccctgccacactgctctcagccactgaacacaatcctgggttaaagcatgactgtaaatccttgatgcagcttattc

SEQ ID NO: 1027780 - DNA, 120 bp, Artificial Sequence
  ENSG00000260551_27 (sequence is synthesized)
aagcatgctgaacctgtcaaactagacaatgagtgctctggacttgaactacactgatgggagcagcttaatgaaagatgtgcacagagccggatgtgccactgtgactaccaaaagggt

SEQ ID NO: 1027781 - DNA, 120 bp, Artificial Sequence
  ENSG00000260551_28 (sequence is synthesized)
aatagtagtccatacccttcctgcagctacctccgcacaaagagctgagttaattgctcttacctgagtctttagaactgtcccaggaaatgggagtaaagatttattctgattccatat

SEQ ID NO: 1027782 - DNA, 120 bp, Artificial Sequence
  ENSG00000260551_29 (sequence is synthesized)
atgcattcctggaaatgcacgccaattgggtgatctggaaacatagaggaggttgcttgaaatcagaaaatacagacattaaacacccaagagaaattctggacctagtaaaggcaattg

SEQ ID NO: 1027783 - DNA, 120 bp, Artificial Sequence
  ENSG00000260551_30 (sequence is synthesized)
ccttgcctgcccaggcttccatcatgcacttccccaacaccagagacataattcacaaccgaaggtaaccaggcagctggcaaagctgcaaaatgagctgcttgggaggcacaggtcctg

SEQ ID NO: 1027784 - DNA, 120 bp, Artificial Sequence
  ENSG00000260551_31 (sequence is synthesized)
ggacatgaatactccatttggaattactagattttaaacctcattacactgaacaagatcccaaacgtgcccaagccaggggtttgagaaaagagattccaattcccctagaaaactgac

SEQ ID NO: 1027785 - DNA, 120 bp, Artificial Sequence
  ENSG00000260551_32 (sequence is synthesized)
acctataagataacgcctacaggatgatgaaaccccaaggccttggtttatccaatctcaaaacatctacataaaggaatgcactatgggagtgatgtcctcgccaacctagtacaacca

SEQ ID NO: 1027786 - DNA, 120 bp, Artificial Sequence
  ENSG00000260551_33 (sequence is synthesized)
cacctcagtagaccacactttcaaaacatcactcggaaaattacacagggatgcatcttgtgcactacaaacaaacaatcccaagatggaatgtagtcctcctaaaaaggagatatagta

SEQ ID NO: 1027787 - DNA, 120 bp, Artificial Sequence
  ENSG00000260551_34 (sequence is synthesized)
caaagagctgagtcccttcaaagactgaaaggcgggcttcactcagatgcctacctggttatgtgcgccaaggaaagatctgaagttattaataaaagaaaaagaaggagatataagcaa

SEQ ID NO: 1027788 - DNA, 120 bp, Artificial Sequence
  ENSG00000260551_35 (sequence is synthesized)
ttgagaggagatttcaggacgtttacccagccctttagtggggatctgtccgggactgtgcagtctgaacctgcaactgtaaaagattgcctctggatggatacctatggtctggcacta

SEQ ID NO: 1027789 - DNA, 120 bp, Artificial Sequence
  ENSG00000260551_36 (sequence is synthesized)
cattatgcttccctttctttaaaaacctgccctcagtccaaccttgtgaactggtttatacaggtgtcatccagccatttccctactgctggatttgaaaaataaagtcactttcctttc

SEQ ID NO: 1027790 - DNA, 120 bp, Artificial Sequence
  ENSG00000260551_37 (sequence is synthesized)
caggagggcatctgaaattgagaggagatttcaggacgtttacccagccctttagtggggatctgtccgggactgtgcagtctgaacctgcaactgtaaaagtctcaggatgtaaccttg

SEQ ID NO: 1027791 - DNA, 120 bp, Artificial Sequence
  ENSG00000260551_38 (sequence is synthesized)
aagcaaactgcagaaaccattgcctcagtcttcaagtagaaccttgaaatatactttggaaccacaccccattcagtttcccactgtacatgtccatgccttatacacatttatctaact

SEQ ID NO: 1027792 - DNA, 120 bp, Artificial Sequence
  ENSG00000260551_39 (sequence is synthesized)
tatctaactatatgcctgtcaaaaaataccagaggctaatttaaaatgaatcaaacatacaggcccagctgtggtattgtctctctcttaaagattgcctctggatggatacctatggtc

SEQ ID NO: 1027793 - DNA, 120 bp, Artificial Sequence
  ENSG00000260552_0 (sequence is synthesized)
ccagcctcccagtctctcggaatccgcagcctaggtgtggcgccccgaccggactttcacttctggccagccctttccccacctgggcgcgggagcgggtgccagtctttaaacaacctc

SEQ ID NO: 1027794 - DNA, 120 bp, Artificial Sequence
  ENSG00000260552_1 (sequence is synthesized)
tcgatgggtcccacgaagatgtttccagacccttggaatgccaagttcaagtttagctatgtctcgcggagaggccggtggaagaagcaacgagaatgaagcaccccagttctctgctga

SEQ ID NO: 1027795 - DNA, 120 bp, Artificial Sequence
  ENSG00000260552_2 (sequence is synthesized)
catctgcaataaagatttaatttcccagcttctcctgaagctcggtatggccacaacactaaattctgcccgaggagattaagcaaaatagtatgggacttccaagaaatgtttttaaag

SEQ ID NO: 1027796 - DNA, 120 bp, Artificial Sequence
  ENSG00000260552_3 (sequence is synthesized)
tcaggggcaggcctttcttcatgccttcttcctctttgctggctggaacgcaaagaccatggcaggaggccaagcagccatcctggaaggtgaaagcctcatactaaggacgtcagacag

SEQ ID NO: 1027797 - DNA, 120 bp, Artificial Sequence
  ENSG00000260552_4 (sequence is synthesized)
cgaaataagagcctgggtccttgaccctgtagacatctccctccccatcctggtctgtctgccttgactcctttcatatgagagaaataaacttttaacttgcgtaaaccagaaagaaaa

SEQ ID NO: 1027798 - DNA, 120 bp, Artificial Sequence
  ENSG00000254271_0 (sequence is synthesized)
gttcttctgtatacaaggagaaagtattctctctcaaacagtaaactcccttttatcacagagcaggctccaggctcaaagccctagatggagataaagtattttgaggagggaggagag

SEQ ID NO: 1027799 - DNA, 120 bp, Artificial Sequence
  ENSG00000254271_1 (sequence is synthesized)
caaagttccatgtaagcaaggactgtggctgtcatgtctaccattgtatatcccagcacctagcactggacctagtataaattttgtgctaaattaatatttattgactgcatggatgaa

SEQ ID NO: 1027800 - DNA, 120 bp, Artificial Sequence
  ENSG00000254271_2 (sequence is synthesized)
ctctctattttatttatggttcttccaatttattgctatctgttttccattacttgccttctcttaccctgaaattatgcatctggaatgaagtattttaataaaattattgatgaacat

SEQ ID NO: 1027801 - DNA, 120 bp, Artificial Sequence
  ENSG00000248307_0 (sequence is synthesized)
actatttgaatgtgtgttgctccttgtggcaggtatactgttccaatgccctgggatctctgtagtggtcggtactgtattgattataaatggtgaagtcctagtatcttgctagagtga

SEQ ID NO: 1027802 - DNA, 120 bp, Artificial Sequence
  ENSG00000248307_1 (sequence is synthesized)
gctggccaggatggtggagctctaccaccatttcacaggttatagacaggggccaccaggtttcaggaaagcagcaatgacccctcagtaatagttggaaagtgtgatatgacactgagc

SEQ ID NO: 1027803 - DNA, 120 bp, Artificial Sequence
  ENSG00000248307_2 (sequence is synthesized)
ttcactgtgttggtgaagaagagctgcagtttgcctccacctctgaagaagcacaatacacctttctgggttaccaatgggatacttcccaacagctttgtcatcacatacaatattctc

SEQ ID NO: 1027804 - DNA, 120 bp, Artificial Sequence
  ENSG00000248307_3 (sequence is synthesized)
aaacaagatcttaatggcatctactttctccaggaacacagcccctgacctgtgtgtgtttgcgtagagaaggcatgctatgtaccccctaggatatcaagattcctgtagcagattgag

SEQ ID NO: 1027805 - DNA, 120 bp, Artificial Sequence
  ENSG00000248307_4 (sequence is synthesized)
gaatctgcccaccactcaagcctgggaaagctggcagaggatgcacgtgttttactcacctgagtgtttacaatgctcgtgaggtgcctccctgatagtacagaggaatgaagaaggaat

SEQ ID NO: 1027806 - DNA, 120 bp, Artificial Sequence
  ENSG00000248307_5 (sequence is synthesized)
aaacagaccttctggataattgcatcagccttccccactattccaatgccatgctaacatttcaagtaatgtcccttttgtcttgctgagaaaaaatcatttcatgatttattacactgg

SEQ ID NO: 1027807 - DNA, 120 bp, Artificial Sequence
  ENSG00000248307_6 (sequence is synthesized)
attaaaggctatgcacactctggagttggaacatgactgaagggcaagcaagcataaaggatatcagaaacagttgatgtgtttaaatttttctgaatttctcaagtaaactttttagaa

SEQ ID NO: 1027808 - DNA, 120 bp, Artificial Sequence
  ENSG00000248307_7 (sequence is synthesized)
agtagtctgaagataaaatggttatataagttacttaaactgtagatgatggcacctttatccctatataataaaattaagatttgtaggttaaaccttggatattcccatctgagcatc

SEQ ID NO: 1027809 - DNA, 120 bp, Artificial Sequence
  ENSG00000248307_8 (sequence is synthesized)
tgtaccaaacagaaaagacctgtgtgagttcctgagaaccagtgctcattccagaagagacaggtttctctccaggaagaaatgtctgaaattcagtgaattaaaatcctcattgagtct

SEQ ID NO: 1027810 - DNA, 120 bp, Artificial Sequence
  ENSG00000248307_9 (sequence is synthesized)
tacagagacatgcaaatcatccctaagacatgagtactccatgtgagggtgttgtgagggcctaagaagaaagacaatcatttgggacaacgttctgagaagggagatggttgctgccct

SEQ ID NO: 1027811 - DNA, 120 bp, Artificial Sequence
  ENSG00000248307_10 (sequence is synthesized)
atacctgaactgtggtactcaagagaatcatctgaagcttgtgttggacaggacaggcaataacttcaaactgaataatgaggcccaagatggacagtccctcgttgagggtcagagcca

SEQ ID NO: 1027812 - DNA, 120 bp, Artificial Sequence
  ENSG00000248307_11 (sequence is synthesized)
gcacccttgtagactgtgactactaggccaactcctagagctagagttccatatggacaaggacaagctctagctagatcagagcaatttcatcacaaagcaagttttattttcaatcat

SEQ ID NO: 1027813 - DNA, 120 bp, Artificial Sequence
  ENSG00000248307_12 (sequence is synthesized)
cgctgcagaccacaaaggtcaggctaaatatcgacagatctctattgtgggaaaatttggacttttggcttattatcagtactcaaccttgataggcagcaccagattaactgctaaaga

SEQ ID NO: 1027814 - DNA, 120 bp, Artificial Sequence
  ENSG00000248307_13 (sequence is synthesized)
ttctatgcatctttatctcattagccttttacattttatcctgtttcttagcctcggctgggggacgggtacagtcaactcccactggagcaacaacataaaaggtgggaaggaaaatgt

SEQ ID NO: 1027815 - DNA, 120 bp, Artificial Sequence
  ENSG00000248307_14 (sequence is synthesized)
ttatgttgacaccagggtagtgaaagctatccaagctatggggaatttaatgctgaggaaaggcaagatcagggtggagcatccggctggggtagctgcctttcactggacccctaccag

SEQ ID NO: 1027816 - DNA, 120 bp, Artificial Sequence
  ENSG00000248307_15 (sequence is synthesized)
cccagtttgggacatgcaaggggaacagcacatagataaagctttctcaaggtttatgaaagaacagacggcagcacagctaacctccagtgcaaataaaaatcatacatttaaggaaac

SEQ ID NO: 1027817 - DNA, 120 bp, Artificial Sequence
  ENSG00000248307_16 (sequence is synthesized)
gctgactttgcaagagagagtccgtttaccacttagaaccgtgaacaccacccccgccctcatttatctccagacttgaactagtggttaaatcccaacatgtcccagagaagtcaaaag

SEQ ID NO: 1027818 - DNA, 120 bp, Artificial Sequence
  ENSG00000248307_17 (sequence is synthesized)
acttagggtggaggtcctggacatgcaaacccaagcttcctctttgctgtggccaggaatctgcagtgattgagagcacagactgtatctaaaattccacctttcaaagttcagcatatt

SEQ ID NO: 1027819 - DNA, 120 bp, Artificial Sequence
  ENSG00000248307_18 (sequence is synthesized)
tcgtgaggtgcctccctgatagatagattgacggtgtctaaaaatttcaaaggatacagaaggacatcaacaccagaactgaattttcacactgggaacagcttattctatggaactgta

SEQ ID NO: 1027820 - DNA, 120 bp, Artificial Sequence
  ENSG00000248307_19 (sequence is synthesized)
ctgttagcacagaatgcattggccaaatatctctctgaggggagagtgagtgttttaaatcacacacagggtgataatatgaatgtggatgatattagaaaaatatcagtgatcatggta

SEQ ID NO: 1027821 - DNA, 120 bp, Artificial Sequence
  ENSG00000248307_20 (sequence is synthesized)
tgtgaagccaccgaaaggagactcatgcaggtgaatccctgggtgatgctcttctgtctggacatctggtagctgctgaaaacaatagctatcaactcaaagagttttatccaaaacaac

SEQ ID NO: 1027822 - DNA, 120 bp, Artificial Sequence
  ENSG00000248307_21 (sequence is synthesized)
atgctatgtaccccctaggatatgtgagtatgaaaaacttttaaactattgcattctgattgtgtcattaaactgcacctgcaatccaatccctaacagtgagaccacctagaggagact

SEQ ID NO: 1027823 - DNA, 120 bp, Artificial Sequence
  ENSG00000248307_22 (sequence is synthesized)
tcctgtgtgggcctctgatggctgctgaaaacagtagctaccaatgagttattaaagaaattcagagtttaaatgaaaacagggagtaaaatgtactattgttgtatcaaagttagttaa

SEQ ID NO: 1027824 - DNA, 120 bp, Artificial Sequence
  ENSG00000248307_23 (sequence is synthesized)
gccatcacagttaagttgttatcagcttgaaataggctgtcatacatatgagatgttccatgtaagcctcatggtaactacaaagcaaaaatcttcaatagaagcacaaaacaaaactag

SEQ ID NO: 1027825 - DNA, 120 bp, Artificial Sequence
  ENSG00000248307_24 (sequence is synthesized)
aaaatattcaaagcatactactattgaaaaccatcaaaccactaagaaagacagaaagagaggaagaaacaaattcttaataaaacaaccagaaaacaagtaagaaaatggcagtaataa

SEQ ID NO: 1027826 - DNA, 120 bp, Artificial Sequence
  ENSG00000248307_25 (sequence is synthesized)
gttcttacctatcaataattatcttatatgtaaataagttaaattctccaataaaaagaaagagagacagaatgaataagaaacaggacccagttatgtgctgactacaagagactcacc

SEQ ID NO: 1027827 - DNA, 120 bp, Artificial Sequence
  ENSG00000248307_26 (sequence is synthesized)
tcaattttaaggacacacatagagtaaaagtgaagggatggaaaaagatattccatgtaaatagaaaccacaagagagcaagggtagcaaccaaataaaacagactttatgtcaaaaacc

SEQ ID NO: 1027828 - DNA, 120 bp, Artificial Sequence
  ENSG00000248307_27 (sequence is synthesized)
atcaaaagaagggcattatataatgataaataaaccaaatcctgaagagaatatagcaattgtaaaaataccttcattcaacattagcacacataaatatataaaacaaatagtaaaaaa

SEQ ID NO: 1027829 - DNA, 120 bp, Artificial Sequence
  ENSG00000248307_28 (sequence is synthesized)
aagcaacaacgcaattgtgaagagagaaaactgcattcatccacatgtcccagcaagagctatcaccaaaggcattgtgaagcagttgagcagttacatctgctctcctttaacaggaat

SEQ ID NO: 1027830 - DNA, 120 bp, Artificial Sequence
  ENSG00000248307_29 (sequence is synthesized)
gagtctttagtacccggttgcaaatgttgacttttaccttttctttaaatgtctgctactctttgtcatatttcttctccttctctccaaattctaccaataaaagtaaaaattactgaa

SEQ ID NO: 1027831 - DNA, 120 bp, Artificial Sequence
  ENSG00000248307_30 (sequence is synthesized)
aataaaattaaggtaagaattagttctacaaaaagctttctcttttagagatttctgttttatcagattactgtttgccaaagtgaatttcataatatgtgactttttttcagtatcatt

SEQ ID NO: 1027832 - DNA, 120 bp, Artificial Sequence
  ENSG00000248307_31 (sequence is synthesized)
gattgtcattgagcttgagagcctgagtttttgctgaaattgttccaatgcacagaaaatgccataaaattgagcctaccgtgggtttttttttttttttttggatattacctacacttg

SEQ ID NO: 1027833 - DNA, 120 bp, Artificial Sequence
  ENSG00000248307_32 (sequence is synthesized)
tagaaaatcaaagtttattctagtctttgtatgctctgcatatctgaaatacaagaggggcttctgtcagtctggaagtgatgatatttgatttctcatttcttactatggtctctctcc

SEQ ID NO: 1027834 - DNA, 120 bp, Artificial Sequence
  ENSG00000248307_33 (sequence is synthesized)
agataagtaagttagctaattcatctacttgatcctcaattaatggccttcttgattaaataagaagatgacaaggtttctccttaatatgaaatttaaattacacagagcaaaaaaaaa

SEQ ID NO: 1027835 - DNA, 120 bp, Artificial Sequence
  ENSG00000248307_34 (sequence is synthesized)
tcactatccttcaatttcctcatccgtataaagtgcataataattgtccctatcccataggaatggcttggatattaatgaaataatatatgcaaaatatttaagacagtttttggcaaa

SEQ ID NO: 1027836 - DNA, 120 bp, Artificial Sequence
  ENSG00000248307_35 (sequence is synthesized)
gtaccccctaggatatgaaagagaggatccatttgcttcaaagagcccatcagcaagctgtccttcctgttttatcagtaagcaaagctgagagcaaataacagatgggactgtcccttg

SEQ ID NO: 1027837 - DNA, 120 bp, Artificial Sequence
  ENSG00000248307_36 (sequence is synthesized)
gtggtggcgcagagcatgcatgaaatatagcacaatcttcctccagtgtgttatgcttttaacagtggaagatcagagcaggagaggtgtgggccaggatgaatgactgtctctgatgaa

SEQ ID NO: 1027838 - DNA, 120 bp, Artificial Sequence
  ENSG00000248307_37 (sequence is synthesized)
agaagaccaaggtgaatccaaggcctgatctggactcttaatgggtggttaaattctagttcctttaaataagcatcaaagacgccacaaaaccacagataaagctgccatagacagcta

SEQ ID NO: 1027839 - DNA, 120 bp, Artificial Sequence
  ENSG00000248307_38 (sequence is synthesized)
ataataaaattaagatttacaatccaaagcagagtgggaggaagagacctacaagaccatgtttcattggatagctttggagtaatatctataattttagaaaaaagttaagaggaagaa

SEQ ID NO: 1027840 - DNA, 120 bp, Artificial Sequence
  ENSG00000248307_39 (sequence is synthesized)
gaaactggtgtcagctacacttagaagattttacaacagagactggcttccattcactgatcagacattcactgatttttaattcttaccaccagagaaaaagttgttatgatgagggtc

SEQ ID NO: 1027841 - DNA, 120 bp, Artificial Sequence
  ENSG00000248307_40 (sequence is synthesized)
ctcaggaaagacaatacagtcagccgagaaatacaattttctttgtctactgttgtttcctttacacggaccattgaaatatatacttaaccaccagcaaaactcctattaaacacaagt

SEQ ID NO: 1027842 - DNA, 120 bp, Artificial Sequence
  ENSG00000248307_41 (sequence is synthesized)
aaaaaaaaatcactacatgcaaaagagtgaacaccaggcaaagtgataatttatgaatttccaggatttttgttgtaatttacccgtgtaagtttacaataaatgattgatgtaactaaa

SEQ ID NO: 1027843 - DNA, 120 bp, Artificial Sequence
  ENSG00000248307_42 (sequence is synthesized)
cttcaaagagcccatcagcaagctgtccttcctgttttatcacaagattcctgtagcagattgagctctggcagttgatctcagtggcttgatagagtgtcattataaaaacgcacctgg

SEQ ID NO: 1027844 - DNA, 120 bp, Artificial Sequence
  ENSG00000248307_43 (sequence is synthesized)
ttatccctatataataaaattaagataactcttctgggcactttatttggaattaattatttaatcctcataacaacgccatgaagatcatactattaccatccaaagtttactgaggaa

SEQ ID NO: 1027845 - DNA, 120 bp, Artificial Sequence
  ENSG00000248307_44 (sequence is synthesized)
gaatcgctcaggaagtagatgttcaggattaaccatgcggtgtttagatatgagtcactgagtgacctttaatttactctgcatcttcaaaatcaggcggtgtgaagaaaaataaggcag

SEQ ID NO: 1027846 - DNA, 120 bp, Artificial Sequence
  ENSG00000248307_45 (sequence is synthesized)
tagattgtagatttatttccatttcagatcaactaagagtcacttgctgtttttatagcagaatggagaaacacaaccaaggagatacacctaagtaacaacagcaatgatgtcaaaaag

SEQ ID NO: 1027847 - DNA, 120 bp, Artificial Sequence
  ENSG00000248307_46 (sequence is synthesized)
tttttcttacacctataatagagggaaagaaaggatgttcctatccattcttaaggtacagaggaatgaagaaggaataaacagaccttctggataattgcatcagccttccccactatt

SEQ ID NO: 1027848 - DNA, 120 bp, Artificial Sequence
  ENSG00000248307_47 (sequence is synthesized)
atagctttagcctgcatctcacacgctccagtttgaagcacgtgtcctgtcctctctcggtgtgcctggcttcattaaggaatcctcatttttgtagcactcattaaaactgacaactta

SEQ ID NO: 1027849 - DNA, 120 bp, Artificial Sequence
  ENSG00000248307_48 (sequence is synthesized)
tgggtgagaagatttctttcttttgatcttatgacaacaaaacttgggactatgtgtactagtaattgaccttggacaggtaacgtgtaatttttcaaaagaataaatgtatcactctga

SEQ ID NO: 1027850 - DNA, 120 bp, Artificial Sequence
  ENSG00000259018_0 (sequence is synthesized)
gcaggtttatgtttttatttatgtattttaactgacttatttgtgtatcccactagaacaatacattcacaatatacttgcagaactgtgcctggcgcgtcatgggagcagagaacttgt

SEQ ID NO: 1027851 - DNA, 120 bp, Artificial Sequence
  ENSG00000259018_1 (sequence is synthesized)
ctaaaggcatccttttcgtaaggtgggtggtagtgcagtgacctccaccctaggctgaggagagaaggatctagttcctcactgccccagagcctagtacctgctcctgacaaagcaggg

SEQ ID NO: 1027852 - DNA, 69 bp, Artificial Sequence
  ENSG00000259017_0 (sequence is synthesized)
agtcctgaaattaacatttgaggcccacccagctgccagcacagctaggataaaagcaggcagaggaac

SEQ ID NO: 1027853 - DNA, 76 bp, Artificial Sequence
  ENSG00000259017_1 (sequence is synthesized)
aaggactagactggctgactcgaacattggactccaagttcttcagcttttcgactcttggacttacaccagtggt

SEQ ID NO: 1027854 - DNA, 77 bp, Artificial Sequence
  ENSG00000259017_2 (sequence is synthesized)
cgaacattggactccaagttcttcagcttttcgactcttggacttacaccagtggtttgtcaggggctctccagcca

SEQ ID NO: 1027855 - DNA, 120 bp, Artificial Sequence
  ENSG00000259017_3 (sequence is synthesized)
tgcagacggcctattgtgggacttcatcttatgatcgtgacctggcttcttgagactggaatagaagaagggggaaaagcctaggacaataaactgatccagtcaagactgcttctgaga

SEQ ID NO: 1027856 - DNA, 120 bp, Artificial Sequence
  ENSG00000259011_0 (sequence is synthesized)
tttccaggaaggcctagctcagctcacctctggaaaggtctccaagctgtgtgatctggggaatcgtggaggggttttgagctcaggtgtcttctgccagctggactctgagaccctggc

SEQ ID NO: 1027857 - DNA, 120 bp, Artificial Sequence
  ENSG00000259011_1 (sequence is synthesized)
ctgctggggcgaggatgaggctctgatgtggtctggtcaactctgggttggccatctgcaccacagggctctaacaagggcctgctataggccatgagaaccactgtgtcaaggagccca

SEQ ID NO: 1027858 - DNA, 120 bp, Artificial Sequence
  ENSG00000259011_2 (sequence is synthesized)
tctccattttagaaagacagagatgcgttctgggccgttgcccgggaaagaatgtctaccaggacagttctgagaaggctcagcatcatatctaaacacaggaaaggaattccctgttgg

SEQ ID NO: 1027859 - DNA, 120 bp, Artificial Sequence
  ENSG00000259011_3 (sequence is synthesized)
gatgacaactgtgggtagcaagccaaggcaaagggcagaacgtggagcagcatttgaggctccagccaattccagcctgtctgcaggcactgcctgcctccacggctgtcaggtgtcgcc

SEQ ID NO: 1027860 - DNA, 120 bp, Artificial Sequence
  ENSG00000259011_4 (sequence is synthesized)
cccaggagctacgtagggcgaagctaggcaggctttcagtgccagctgtggtttccccaacagctcacaggccagaggccccgcccaggccacctcctccagtccccctgccgcggggtg

SEQ ID NO: 1027861 - DNA, 120 bp, Artificial Sequence
  ENSG00000259011_5 (sequence is synthesized)
gtcttcggtggtctcactctccctcccactgcatttccatctctgctgtaatataccacctcagcccttcctttttgattcccaagagcaaattttggaaataaagcaacctgaaaacat

SEQ ID NO: 1027862 - DNA, 120 bp, Artificial Sequence
  ENSG00000258768_0 (sequence is synthesized)
ttgtcttctctttttttttggtagaatttacctgtaaagtcatcagtactgcacattttgttaatagaaaggttaactactgatttaaattctttgatgtttattggtttgaatcattca

SEQ ID NO: 1027863 - DNA, 120 bp, Artificial Sequence
  ENSG00000258768_1 (sequence is synthesized)
atttttctcttgagtcagttttaatattttgtatttttatagtaatttatccatttcatttacattttcaaattttctcctctaaactattagtaatacatgaccataacatcctctcat

SEQ ID NO: 1027864 - DNA, 120 bp, Artificial Sequence
  ENSG00000258768_2 (sequence is synthesized)
ttttctttttgtgggagcctgtctctccatcaagccaagaatctcctttaatgatatctaggacaggttgttcctcctcgtctgtcagtgacccatcagcctgttgagtactggggaagc

SEQ ID NO: 1027865 - DNA, 120 bp, Artificial Sequence
  ENSG00000258768_3 (sequence is synthesized)
acagtgcctgttactggcaagtttactgccttcattctttctaatcttgatcttttatgctgaagtgttagtttatctattctcagaagacatttggacaaaaatgctatttttaatttc

SEQ ID NO: 1027866 - DNA, 120 bp, Artificial Sequence
  ENSG00000258768_4 (sequence is synthesized)
aaatgaaaattatgttgttagaattagtctctgtataaatcagagtcacattttaaattttcctaggacttggttggttttctcagcacactctcagctcctggcaggtttgcatagagc

SEQ ID NO: 1027867 - DNA, 120 bp, Artificial Sequence
  ENSG00000258768_5 (sequence is synthesized)
aggcaacaatgggaaagtgctcacagaaaattttgcatctataagtggatagggaggtgatggaatagggcatatgtgggaagatacaggaaaaggaaaactgttcttactccttacccg

SEQ ID NO: 1027868 - DNA, 120 bp, Artificial Sequence
  ENSG00000258768_6 (sequence is synthesized)
ccccccccataggagatggtgctgtacagcgggaaagagaattggattatagttttctgctccctaattgtaactttctttttcatttatttcaggaagttatatatacaatggtgtaaa

SEQ ID NO: 1027869 - DNA, 120 bp, Artificial Sequence
  ENSG00000258768_7 (sequence is synthesized)
attgaaaagttattaaaaactatacagagaaaaaacttcattttcacgcctgacctctacttcccttactggagtaacgactccattttattgttttcttccggagatattctatctata

SEQ ID NO: 1027870 - DNA, 120 bp, Artificial Sequence
  ENSG00000258768_8 (sequence is synthesized)
taagcatagtggtatattgcttaaaaatacacaaataacactgcctgtgtgattttaggaaaatctcttgaacttcattattaacttctttaaattcctagatgaaaatacttacacaaa

SEQ ID NO: 1027871 - DNA, 120 bp, Artificial Sequence
  ENSG00000258768_9 (sequence is synthesized)
cctggaaaaactcagtgattttgtagaaatcaatcaagtagtgtttgtgaacatgtttggaaaatcatcagttattttataagtttgagatggagggagggtagtcatgaaagttttact

SEQ ID NO: 1027872 - DNA, 120 bp, Artificial Sequence
  ENSG00000258768_10 (sequence is synthesized)
tttctacacaaaagacaatgagtcacatgggatctgacttgacaagagtgattctgaattggcagcctggctgtgtgtcagcagccccctggctaattcctctcatagtgtgttggggtt

SEQ ID NO: 1027873 - DNA, 120 bp, Artificial Sequence
  ENSG00000258768_11 (sequence is synthesized)
ttcttcatggctaatgaggagatctattcgcttgagataggaagtggaagcttgccagagtgtgagacacctcactttcctccctccctccttccctttgcccttcctcacgtttaggga

SEQ ID NO: 1027874 - DNA, 120 bp, Artificial Sequence
  ENSG00000258768_12 (sequence is synthesized)
gttagtattggaactttggctgatgcaacagtttgagtcactgtctctctgtgctgtgggatccactcacttttaatggggagttgatggaatcactcctccctcccccaccctgacttc

SEQ ID NO: 1027875 - DNA, 120 bp, Artificial Sequence
  ENSG00000258768_13 (sequence is synthesized)
ctcctctaattggctctcaggggactccaactcctgctaatcaaccatggcagagctgctgcagagagcccgaaactggcactcagggacctaggttctgttgtgactctgctccttcaa

SEQ ID NO: 1027876 - DNA, 120 bp, Artificial Sequence
  ENSG00000258768_14 (sequence is synthesized)
ctttcttttctaatctgttaaaacaactttgcctttggattaggcctgggagaatggggttcctttgggcattgcctttgcagagacagttttaataatgccagcatcttctagactttg

SEQ ID NO: 1027877 - DNA, 120 bp, Artificial Sequence
  ENSG00000258768_15 (sequence is synthesized)
agagaagatgaaagagcatatcatttgaggaatgtgagcctcaacatattggtccacatactgcttctctattagcaaaaggccttgtggaaaacttaccttgtctgcttctgtttgtca

SEQ ID NO: 1027878 - DNA, 120 bp, Artificial Sequence
  ENSG00000258768_16 (sequence is synthesized)
ctgcccagaggaaagtaaacctagttgtgcagctttggccaatattattattgggttacatttaaaaaagttattttaaaaataggctttgtcttttaaagcagtttcaggttcacagca

SEQ ID NO: 1027879 - DNA, 120 bp, Artificial Sequence
  ENSG00000258768_17 (sequence is synthesized)
atattgaatagaaagtacagagggtttctatatacctcttcaccaaccttatgcccaaccttccccattatcaatgtcccatcccagagtggtacacttcctataattcatgagcctaca

SEQ ID NO: 1027880 - DNA, 120 bp, Artificial Sequence
  ENSG00000258768_18 (sequence is synthesized)
ttgacacatccttatcactccaagtccatggtttatattggagttcactcttagtgttgtacattttatgggttttgacaaatgtatactgacatgtatttattaaactatcatacagaa

SEQ ID NO: 1027881 - DNA, 120 bp, Artificial Sequence
  ENSG00000258768_19 (sequence is synthesized)
tcgtttcattgctgtacaatcctatgtgttctacctgtgtgtccttatctcccctcctccctcacccctggaaaccactatcttttttcattttttaattaaaaatttttttttcttatg

SEQ ID NO: 1027882 - DNA, 120 bp, Artificial Sequence
  ENSG00000258768_20 (sequence is synthesized)
cctcccagggcttccttgctagaaaccactatctttttactgtttctatacttttgcctttttcagaatgtcataaaattggaatcagagtatgtaccttttcaggttgactccttactc

SEQ ID NO: 1027883 - DNA, 120 bp, Artificial Sequence
  ENSG00000258768_21 (sequence is synthesized)
catggattacctttcaaaatggacatttaaaaataattttagaatgatactaaagctacaatagagggtaagtgtatctatggcatacccaagcatatttgtgtaacctcttttttgggg

SEQ ID NO: 1027884 - DNA, 120 bp, Artificial Sequence
  ENSG00000258768_22 (sequence is synthesized)
gttgggggaacagggtctcgctctgttattcaggttagagttcagtggaatgatcatagctcactgcacccataaactcgtggtcttaagcaatcctcctacctcagtctcccacatagc

SEQ ID NO: 1027885 - DNA, 86 bp, Artificial Sequence
  ENSG00000258768_23 (sequence is synthesized)
tggtcttaagcaatcctcctacctcagtctcccacatagctgggacattagccaccaagcctggctaatttaaaaaaaattcttag

SEQ ID NO: 1027886 - DNA, 120 bp, Artificial Sequence
  ENSG00000258768_24 (sequence is synthesized)
gagatgaggtcttactatgttaaccaggctggtctcaaactcttggattcaagtgatcctcctgcctcaatctcccaaagtgctgtgattataagtgtgagccactgtgcctggcctgta

SEQ ID NO: 1027887 - DNA, 120 bp, Artificial Sequence
  ENSG00000258768_25 (sequence is synthesized)
acctttgttttgacaaatggatagtattaaaggaaattttcttgatacgcagtttagtctgttcttggacaagcaatgcagtaggtttgactttgagtgctttattactaacactttctg

SEQ ID NO: 1027888 - DNA, 120 bp, Artificial Sequence
  ENSG00000258768_26 (sequence is synthesized)
gccaggccacagttaaggtccggttggaaaacacttgttgaggtttgaattgtaacctttttactggatgatagggtattttttagcccatagataaacttgcttaaaaaaccaagaaag

SEQ ID NO: 1027889 - DNA, 120 bp, Artificial Sequence
  ENSG00000258768_27 (sequence is synthesized)
acactgaaatctcagtctatacatagtttcatcagtgtttattgggaactgtgttctggataaagcaatcgtatgtatacatttttattatgtaatgtataagtgatttgtaaattataa

SEQ ID NO: 1027890 - DNA, 120 bp, Artificial Sequence
  ENSG00000258768_28 (sequence is synthesized)
agatctcctacgatactgtggtgtcttctagatagaaaatatatctttctaaaatgtgtgcctaattctagtgtagtgtcaatttatagtacacaataaatatttaatgaataaacatta

SEQ ID NO: 1027891 - DNA, 120 bp, Artificial Sequence
  ENSG00000258765_0 (sequence is synthesized)
actttaagagatcctgggaaagttgttatctggagttgtcagtttctatttcccaccaagatgaaaaagatggggatactgaggcccagtgttcctgtcatctattactgtaacaaacta

SEQ ID NO: 1027892 - DNA, 120 bp, Artificial Sequence
  ENSG00000258765_1 (sequence is synthesized)
tcatcgaattcaaatgcttaagacagcaacaattgaagctttgcgtacaaagaaatgttttgttacacttgacccttgaacaacaagacggggaaccaaaggaagcatctgtaaggacca

SEQ ID NO: 1027893 - DNA, 120 bp, Artificial Sequence
  ENSG00000206062_0 (sequence is synthesized)
cacccagagaatctctctgcaccacgtattccagctggaggtggcgtcagcaattctggactgctttttctatcttttcagtgcctcattcagtgatgtcaagttaaaaccagaaacgat

SEQ ID NO: 1027894 - DNA, 120 bp, Artificial Sequence
  ENSG00000206062_1 (sequence is synthesized)
ttcagtgatgtcaagttaaaaccagaaacgatgggtgttcaccagatttttggttcttatgaagggacatggatggagctggaaacacttatgctcagcaaactaatgcaggaacagaaa

SEQ ID NO: 1027895 - DNA, 120 bp, Artificial Sequence
  ENSG00000206062_2 (sequence is synthesized)
gtgggagctaaacaatgagaaaacatggacacatgtgggggaacaaaacataccggggcctgttgcagaagcaggcagggtgagggagagcatcgggaagaacagctaatggatgctggg

SEQ ID NO: 1027896 - DNA, 120 bp, Artificial Sequence
  ENSG00000206062_3 (sequence is synthesized)
ctgtgcagcacatcaccgtggcacatgtttacctatgtcacaaacctgcacatcctgcacctgtacccctgaacttaaaagttgaagaagaaaaaataaatttgcatatagtaattttta

SEQ ID NO: 1027897 - DNA, 120 bp, Artificial Sequence
  ENSG00000206062_4 (sequence is synthesized)
ggatacactgttagggtcaatacatttcatacggttttaacgtatggctcatcttaccctacaaggaatattggaaaattgtctgggggcaaaagagcctgacctttgtgctgtcatgtt

SEQ ID NO: 1027898 - DNA, 120 bp, Artificial Sequence
  ENSG00000206062_5 (sequence is synthesized)
gacaagtcttgtgaggaaagcggccctggaaaggcacgtgcctctgtgcaaattactttccagcagaggtaattcccatagaggctaatagttaaaggctttgtgccaagcctcactcca

SEQ ID NO: 1027899 - DNA, 120 bp, Artificial Sequence
  ENSG00000287359_0 (sequence is synthesized)
acttagagacagtctgcctttgagctctgctggtgaccaaaacctaaattgtagcagacaaaacacagtcttttatcatgaaacaacataaaccagagcagaaatttaaggttcttctct

SEQ ID NO: 1027900 - DNA, 120 bp, Artificial Sequence
  ENSG00000287359_1 (sequence is synthesized)
tttgaaaactcagaatgtctttcaaatatcttacccatgtgtaacacattctggaaattttaacccaatttcataatgagtgtagacttgagaacagacatagtttaaagaccagacata

SEQ ID NO: 1027901 - DNA, 120 bp, Artificial Sequence
  ENSG00000287359_2 (sequence is synthesized)
cttataagttaattagatctatgcctctcagggatatagcagtgttcttattctacatatacatgaagaatttatattttcacaccagtaggaagtatacctacattaagccttggcaac

SEQ ID NO: 1027902 - DNA, 120 bp, Artificial Sequence
  ENSG00000287359_3 (sequence is synthesized)
atggccaaactcatctctacaaaatatcaaaaattagccgggcatgatggctcatacttgtattcccagctactcagcaggctgaggtgaaaggatctcttgagccaggggaggttgagg

SEQ ID NO: 1027903 - DNA, 120 bp, Artificial Sequence
  ENSG00000287359_4 (sequence is synthesized)
ctgcagaaagccgtgattgtaccactgcacttcaacttgggtgacagagtgagaccctgtctcagaagaagaagaaagaggaaagaagaaagaaggaagaagaagaaaagaagtatacct

SEQ ID NO: 1027904 - DNA, 120 bp, Artificial Sequence
  ENSG00000287359_5 (sequence is synthesized)
atagaacaagctgcagtgaggacctgatagtcaaaattacttggaggaaaatcacagctcttctcccctagaaagtctgctgagtctcaccaggagaatctcacagggaggctgccacga

SEQ ID NO: 1027905 - DNA, 120 bp, Artificial Sequence
  ENSG00000287359_6 (sequence is synthesized)
attctctctgcaaggactgtgaaactcagggtcctggaacctggggagatcgagggacaactgtacatcagcctgctgagaaatgttttgcaggattcatgattgggatcttcgtactaa

SEQ ID NO: 1027906 - DNA, 120 bp, Artificial Sequence
  ENSG00000287359_7 (sequence is synthesized)
gcctttcttgagggagtgtctcagactcaaccagcctcaattttcccatgaatccttcttcattgccttcctagattgctactccgcatctcagctgaccccatacaaacaaactccaat

SEQ ID NO: 1027907 - DNA, 120 bp, Artificial Sequence
  ENSG00000287359_8 (sequence is synthesized)
agtgtctccaatcgcgtgctgtgttaaattttaactttataaccaaccatcatttgctacttccatctaaccaagccagtttccttatgatgcacacacttgtgtttagctcacaatttg

SEQ ID NO: 1027908 - DNA, 120 bp, Artificial Sequence
  ENSG00000287359_9 (sequence is synthesized)
ttctacatgcttgcttatttattcattcagcaagtatttattgagccccaactgtgcactagctgctgtctcaggtgctggggagacaggaagatcaaaataaaacccctgccttcaagt

SEQ ID NO: 1027909 - DNA, 120 bp, Artificial Sequence
  ENSG00000258760_0 (sequence is synthesized)
agtgctcatcacactgtgatacagttacttactaatatctttttctactcaattttctgtgcactcacagaaggcagaaactgtacctttcatttccatgattctcatggataaagccct

SEQ ID NO: 1027910 - DNA, 120 bp, Artificial Sequence
  ENSG00000258760_1 (sequence is synthesized)
caataaatgtttgccagatgaatgacttgcccaaggtcacactgctaatatatggcagaaccgggaccagaaccaagacctccgactccccagatcccatatccttgctgttctcctggg

SEQ ID NO: 1027911 - DNA, 120 bp, Artificial Sequence
  ENSG00000258760_2 (sequence is synthesized)
gattgcaagatgctgaggtttggggtacaaacaggacattggctttttccttcagctggctccctttgtggtaatacgacgtctgcaccaaacacaataacacgcagaaaaagaaagctt

SEQ ID NO: 1027912 - DNA, 120 bp, Artificial Sequence
  ENSG00000258760_3 (sequence is synthesized)
tcgtgttttttcagaagcatggaagcttttaccagcagtctcctgtagaatcttctttttgtaccattagccagaattggatacatgcccattctttagctagtccctcccaaggggaat

SEQ ID NO: 1027913 - DNA, 120 bp, Artificial Sequence
  ENSG00000258760_4 (sequence is synthesized)
accacgagctggcgacacggcagcgtgatggactgcagcaatttgaactcagcagctgatttattttctgtggctttctgcttctgctgcttctggtactgcaaaggcatgaagtggtca

SEQ ID NO: 1027914 - DNA, 120 bp, Artificial Sequence
  ENSG00000258760_5 (sequence is synthesized)
aagccaacatggggcccagggccttctatctggctcagattggaaatataccattagctgtcctgggcctcgagtttgccaacctcagatcttgggacttctctacctccataatcattc

SEQ ID NO: 1027915 - DNA, 120 bp, Artificial Sequence
  ENSG00000258760_6 (sequence is synthesized)
ctcagcctcccaagtagctgggaccacagtctggcttctcactgctgaacttttctggaacacacctggtcattgcattggctagccaaataaggccacatctggagatggaccttccca

SEQ ID NO: 1027916 - DNA, 120 bp, Artificial Sequence
  ENSG00000258760_7 (sequence is synthesized)
tctggagatggaccttcccacgtcaccctccaagagaagtagtacatcggcttcctctcggagtcataaatgttctgaatggagtaagtccacagagattcctcgactggagacggaaac

SEQ ID NO: 1027917 - DNA, 120 bp, Artificial Sequence
  ENSG00000258761_0 (sequence is synthesized)
gaagaattaaaatagtgcttttaatataattttcagcaaacgtacagtatgtactttacatcacatatttctaaactgctcatttggaaaataaacgctgcaaaaatacagagtaccaca

SEQ ID NO: 1027918 - DNA, 120 bp, Artificial Sequence
  ENSG00000258761_1 (sequence is synthesized)
ctcaaaaatctattgagtatgtgctttttcccccctccattctatgcaacaggttggtttttaccctctcggctgatttcattaaagctgttggagccctcagtcagaggagcattccca

SEQ ID NO: 1027919 - DNA, 120 bp, Artificial Sequence
  ENSG00000258761_2 (sequence is synthesized)
ggaagggaatttgcacaccaggtcagcatgactctttagagacccaggaaagatgcctactctgagagctgtttggagtactcctgaccataagtcacctctttggtcctcatcacagga

SEQ ID NO: 1027920 - DNA, 120 bp, Artificial Sequence
  ENSG00000258761_3 (sequence is synthesized)
tgaaggcgaaggatttgagcgcgatggcgatgctgacatacaggtatcggtagaccacattgtcgtagaggacgcaggcgccttgctccccacagaacgtgctccagaacaggcaggtgg

SEQ ID NO: 1027921 - DNA, 120 bp, Artificial Sequence
  ENSG00000282564_0 (sequence is synthesized)
cggcggcagtgccggtctcctcctacagggacgcgcagcccgggaccgccacgcgcagcgcgggagggggagggcgggaccggggaacaggaggggagggggacccgggtgcttccagcg

SEQ ID NO: 1027922 - DNA, 120 bp, Artificial Sequence
  ENSG00000282564_1 (sequence is synthesized)
aggaggggagggggacccgggtgcttccagcggtccgggcccgcggacggagtgcgggccgatcccgctcactgtccccttccgcagtccgcgtgcagctccagggagctgtccgccccg

SEQ ID NO: 1027923 - DNA, 120 bp, Artificial Sequence
  ENSG00000282564_2 (sequence is synthesized)
tgaagaggagcaggtgtttgcagagactcacaaaaaggcccggccccagttgaaagaccagccttgcactactttataagatgctgccaatgcagaattgttcatgaagcacatagagct

SEQ ID NO: 1027924 - DNA, 120 bp, Artificial Sequence
  ENSG00000282564_3 (sequence is synthesized)
tttctacctcagcacaaacagcattcactcttcaggtcactcatccaggcctgcaagagacggtgaagcaggtttattctccaggccacttaagtcatctaaagtatcccctttttgggc

SEQ ID NO: 1027925 - DNA, 120 bp, Artificial Sequence
  ENSG00000251578_0 (sequence is synthesized)
atgtgcctcagacttctctgctgtgtggccatttctttctggggagccaggctccacggacaccaaggtcacccagagacctagacttctggccaaagcaagtgaacagaaagcaaagat

SEQ ID NO: 1027926 - DNA, 120 bp, Artificial Sequence
  ENSG00000251578_1 (sequence is synthesized)
agcagaaataatcaatgagcgatttttagcccaatgctccaaaaactcatcctgtaccttggagatccagtccacggagtcaggggacacagcactgtatttctgtgccagcagcaaagc

SEQ ID NO: 1027927 - DNA, 120 bp, Artificial Sequence
  ENSG00000283317_0 (sequence is synthesized)
gagcacgcgcccggcccctgccgtcgggggaggggatcaaggcagggctaggcgtccgcggtcggagtggggtctggcgtcccggcgaccgtcgccgtcgtcctcgttagtatagtgtgg

SEQ ID NO: 1027928 - DNA, 120 bp, Artificial Sequence
  ENSG00000283317_1 (sequence is synthesized)
acaactggagcactacagcccccctttctaggacacccctgaaggacagcagtgaagaggaatcttcccagtaagcagaactttgagcagtgcacctagttgtgcactttgcatggaagg

SEQ ID NO: 1027929 - DNA, 120 bp, Artificial Sequence
  ENSG00000283317_2 (sequence is synthesized)
tggaaaatttgtgacaaagttggggaagaggtatgtggatgaacctctctgcgtggtcaaaaactgtgaatacttttgtattccatgtaggtgcccaccaacaggtgacctcagcagagg

SEQ ID NO: 1027930 - DNA, 86 bp, Artificial Sequence
  ENSG00000283317_3 (sequence is synthesized)
atctatggacaccactcagcctccttccccagccacccctgtgatcgcccaatgggcccacgaacaaagtggccatcgtggcaggg

SEQ ID NO: 1027931 - DNA, 120 bp, Artificial Sequence
  ENSG00000251573_0 (sequence is synthesized)
ccagggcaacgtggccccgggattggctgcaccacgcagctgttgtccagttccggagctgccgcgttcaatccgagtccctccgatgctttcactgatattaaaatttcacttttcgaa

SEQ ID NO: 1027932 - DNA, 120 bp, Artificial Sequence
  ENSG00000251573_1 (sequence is synthesized)
aaactaaaaatgagtgtgcgtacgcgtggagagggggaacaaggcttctctaatcagcaaaggggctgtcggcaggcgatgtacaaatgaaagcgcgctttctaaatttccaaagcacta

SEQ ID NO: 1027933 - DNA, 120 bp, Artificial Sequence
  ENSG00000251573_2 (sequence is synthesized)
aagggagagaaatgcgcaattactgtgggattcgcccagaggagcagcctcaggagttgaaggggatcctgtccctcccagaggaaagctcacgattggattggaacttctagcgactgc

SEQ ID NO: 1027934 - DNA, 120 bp, Artificial Sequence
  ENSG00000251573_3 (sequence is synthesized)
cgcgtcctccgggtcatggggaaacagaggcagagacttgggaaggagaaatggagaaaccagggcaacgtggtcagtgctgcagcgccatccctttttcactaagaccaccctgggccc

SEQ ID NO: 1027935 - DNA, 120 bp, Artificial Sequence
  ENSG00000251573_4 (sequence is synthesized)
ctgggcgggaagcccttcgcacactccagccggggagagtccgggctgggttccgcagcgcctgtggctgtgtggccgggaggctccttgctctcgcccgcgtggtcctgagatcggtcg

SEQ ID NO: 1027936 - DNA, 120 bp, Artificial Sequence
  ENSG00000251573_5 (sequence is synthesized)
ctcgttcccacaggccccgggattggctgcaccacgcagctgttgtccagttccggagctgccgcgttcaatccgagtccctccgatgctttcactgatattaaaatttcacttttcgaa

SEQ ID NO: 1027937 - DNA, 120 bp, Artificial Sequence
  ENSG00000251576_0 (sequence is synthesized)
tttgtctcaatgatctattaatgcactcaaaccacactaaattagctttgtcatctggtccaggttaggctgggcaattctgctggtttcatttaggctcacccaggcagctgaagacac

SEQ ID NO: 1027938 - DNA, 120 bp, Artificial Sequence
  ENSG00000251576_1 (sequence is synthesized)
cttggtgcagcatggtctaagttggccttgcctggcctggggtagctgccgttggctgagccgtacatctccagcaggctagcctgggctcctccattggatgcagccttcccagagcaa

SEQ ID NO: 1027939 - DNA, 120 bp, Artificial Sequence
  ENSG00000251576_2 (sequence is synthesized)
gccacatgtgcaaccgcttcccaagccgctgcttacattgcatttgctgctgtcccattggctaaagcgggtcatgtgaccaagccggcggccaatgtaggagaggattacacaagaggg

SEQ ID NO: 1027940 - DNA, 120 bp, Artificial Sequence
  ENSG00000251576_3 (sequence is synthesized)
gtgtggctcctgggcactcatggctgtaccaacctacgaccaattcccctgagcgccaggctgtttcctgcctctgcaccatcgcccaagctttccccttcgcttgttatgccctgctgg

SEQ ID NO: 1027941 - DNA, 120 bp, Artificial Sequence
  ENSG00000251576_4 (sequence is synthesized)
gcgatctcctactcgggcaagtcacaagcttctctgtgtctcagcctcctcctctgtaaaatggggatcacatgagtttaagttattctgaggattaaacaagttaacacacaaacattt

SEQ ID NO: 1027942 - DNA, 120 bp, Artificial Sequence
  ENSG00000251576_5 (sequence is synthesized)
aaaacagtgtctagcacgcagtaggtcctccagagatgccagccatcaccatcacagtggtgattcttggtatgacgacccctgccctcttcaaagccccgtttaaggaatctcctctct

SEQ ID NO: 1027943 - DNA, 120 bp, Artificial Sequence
  ENSG00000251576_6 (sequence is synthesized)
gaagctgtctctggttctctccaggcaagcatcctcccccaggcctggccctataattatcttttcctcatccacctactccatctacagtaggatccagagggaagggaatcccagggc

SEQ ID NO: 1027944 - DNA, 120 bp, Artificial Sequence
  ENSG00000251576_7 (sequence is synthesized)
ccagcccagggagtgcgaactatctgatttcctctgcaattagggaggcaagacagtcctcggtggccccatttgacagaggtgaaaactgccgctgtaggagatgtgctgatttgcccg

SEQ ID NO: 1027945 - DNA, 120 bp, Artificial Sequence
  ENSG00000251576_8 (sequence is synthesized)
gggttgcgcagctggtaggtgggtgagctgggagtggagccaggttgggctgtagcagctgtgtttgccctgcctcactgtccagctcccacctgggccgggtgtcggggtctcaaagag

SEQ ID NO: 1027946 - DNA, 120 bp, Artificial Sequence
  ENSG00000251576_9 (sequence is synthesized)
cagataccggctctgccgcacagagctcacagtttggtggaggaggaaggctcaagcagagagcaggaggtgtgagtagctctgtgggctgtgggggccagatgggtcctcgaccctgcg

SEQ ID NO: 1027947 - DNA, 120 bp, Artificial Sequence
  ENSG00000251576_10 (sequence is synthesized)
gggtcagagctggctgcccagaagacatgaaatggaataagcagagtgacatgctctgggccacaaacagggtgtgtggccgccctgaacacatcactgcagccacctccacagccacag

SEQ ID NO: 1027948 - DNA, 120 bp, Artificial Sequence
  ENSG00000251576_11 (sequence is synthesized)
ccctagccctgtgggtcatggggatgtgaccctccccactacctcccatcactgaggacacacctcctgggcctccagtaactacccaggcctccacacctgctacaccatgatggtgca

SEQ ID NO: 1027949 - DNA, 120 bp, Artificial Sequence
  ENSG00000251576_12 (sequence is synthesized)
gcccgcctccccaacgccttcagccctgtggaaattttctctggagattctaataccccggcctccttgaggtcagtgtctgcccagagcctcccggcaggagagaagaaaccccacagc

SEQ ID NO: 1027950 - DNA, 120 bp, Artificial Sequence
  ENSG00000251576_13 (sequence is synthesized)
tctttagggaatgcctgcctgtccaaatggacaaagacaagctgtgcagaaacctcccctgggaggactgagccatcacctgaggaatgggagtctgtggaaacgtgagtcacctctgtg

SEQ ID NO: 1027951 - DNA, 120 bp, Artificial Sequence
  ENSG00000251576_14 (sequence is synthesized)
ggaataaagcctttcatctggacatcgaaatggccaccagctccctgagtgactttgggcaagtcatgccccactccaagcctcagaaagccgacctgtgagatgaggatgaaagtaacc

SEQ ID NO: 1027952 - DNA, 120 bp, Artificial Sequence
  ENSG00000251576_15 (sequence is synthesized)
ccctcatgggcctgccatcccaccaccatggcgcactccacctgaatgaccttgaggactgtgaccgttgctgtgtgcatctgtgctgcttcccgtttcattgctgagtggtgttcctgt

SEQ ID NO: 1027953 - DNA, 120 bp, Artificial Sequence
  ENSG00000251576_16 (sequence is synthesized)
aaatggatatgccactgtctgcttcttcactcaccagccccaggcaccccgccattctaccgactgtctctatgaatgtgactaccaggatcaaggaacttcataccagttgaaccatac

SEQ ID NO: 1027954 - DNA, 120 bp, Artificial Sequence
  ENSG00000251576_17 (sequence is synthesized)
agtatttgtccttttgtgactggcttatttcactgaacataatagcctgaaggtttatccatgttgtatgatgtgtcagaatttccttcctttttaaggctaaataatattctattgtgt

SEQ ID NO: 1027955 - DNA, 120 bp, Artificial Sequence
  ENSG00000251576_18 (sequence is synthesized)
gcagagatcaattgtctttatccattcatctgttaatgaacacttgggttggttccaccttttggttattatgaatagtactgtgatgaacatgagtgcaaatatatctgtttgaattcc

SEQ ID NO: 1027956 - DNA, 120 bp, Artificial Sequence
  ENSG00000251574_0 (sequence is synthesized)
gagtacaagcaaaacaagaccaaaggaagctacctgagcaggtattccagatactcatgtcatacaccaaggttgtaccagtgcccctttctctgtgacacatccatccactggaaactt

SEQ ID NO: 1027957 - DNA, 120 bp, Artificial Sequence
  ENSG00000251574_1 (sequence is synthesized)
tcgtacaactagctgaaagaagagaaacatcctatttcatgtcactggagccctaatgatcgcagccatttcaggaaatgccatcaattacagtgaggagctcattcagaagtgaaagat

SEQ ID NO: 1027958 - DNA, 120 bp, Artificial Sequence
  ENSG00000251574_2 (sequence is synthesized)
aatcactggacgcttaagttgagtaatggctttttattgagggtattacaaagctcaaatctgagaaaaccttgtctaccatcaaccctgacctacagaggagaggcacccccaagctta

SEQ ID NO: 1027959 - DNA, 120 bp, Artificial Sequence
  ENSG00000251574_3 (sequence is synthesized)
ttagtgatcctgtctccgtcttattggcacatcctgatggccttgatctctagttcttcctgtggagcataaccatatggttctttgccaagatgttaagaccaaagtcggagagtgaac

SEQ ID NO: 1027960 - DNA, 120 bp, Artificial Sequence
  ENSG00000251574_4 (sequence is synthesized)
cccatgtcaatgaattcttgtttttctgatcttacattccatcactttgatccagtactctcaaaatgcaatcacagttgtacatgtcttctcctgtcaataaacgctaccttagtactg

SEQ ID NO: 1027961 - DNA, 120 bp, Artificial Sequence
  ENSG00000251574_5 (sequence is synthesized)
actccaagcaatatagatttataggccaacctggcaatcaagggtaactgacatgaaaatggattgcttcacattttaattacaaagatactcttcagtaccataaattgaagaaaacac

SEQ ID NO: 1027962 - DNA, 120 bp, Artificial Sequence
  ENSG00000251574_6 (sequence is synthesized)
taactttttgtggctactgtaattgtcaaagtataattacctgtgttttctcacctacgtatttgagatagagacaaaaccaagtaagttaatccacttataataaaaatgtcttctgag

SEQ ID NO: 1027963 - DNA, 120 bp, Artificial Sequence
  ENSG00000251574_7 (sequence is synthesized)
gtcgactaccaggctgcgttaggagctaccgtcttcagctttttctcgctgctgagagctgttttgttactcagtaaaactcttctccaccgtgctcacccttcagttgaccgtgcaact

SEQ ID NO: 1027964 - DNA, 120 bp, Artificial Sequence
  ENSG00000251574_8 (sequence is synthesized)
tcattcttcctggacataaacccgggacccacagaacagcgggtgcaaaaagggctgtaacgctttcctggccggatcgccaagctgcaggggtttagatagctcatggttctgctggtt

SEQ ID NO: 1027965 - DNA, 120 bp, Artificial Sequence
  ENSG00000251574_9 (sequence is synthesized)
aggaagttcaagcgcaaggccctgacttctggtaagtgctttcatgctgcatcaacacgactaagaaggtcaaagaagaagtggacatctttcaactgatggactgtacagagagaggag

SEQ ID NO: 1027966 - DNA, 120 bp, Artificial Sequence
  ENSG00000251574_10 (sequence is synthesized)
tttaaggaggtgattgatagaagatatttgatccctttggtttggagtctaccaactgagataaaggagaagagctgagaagccttgtaacattagtattctttgtctctttgtggatga

SEQ ID NO: 1027967 - DNA, 120 bp, Artificial Sequence
  ENSG00000251574_11 (sequence is synthesized)
ccctttcacattaatatcgacatcagaaactgaattcaagaaaagaaagggagagtcacacattctttcaataatcctttgtcagtgaacatttgagcaccataggaagccaaatcagac

SEQ ID NO: 1027968 - DNA, 120 bp, Artificial Sequence
  ENSG00000251574_12 (sequence is synthesized)
atcacttaaaatagtttttgggtcaagattacaaaaaaaaggaagacaggaaagaacagtggaatcagcaggaatgtgtcccctaaagtcccttaaactaagttggaacacaacccagag

SEQ ID NO: 1027969 - DNA, 120 bp, Artificial Sequence
  ENSG00000251574_13 (sequence is synthesized)
agtgctcaggggatataaaaataatgcattgtatgccggaagggataaatctggggctgagtacaagcaaaacaagaccaaaggaagctacctgagcagtcactggagccctaatgatcg

SEQ ID NO: 1027970 - DNA, 120 bp, Artificial Sequence
  ENSG00000251574_14 (sequence is synthesized)
attctgcatttcatatggcatttcaaagtcctgagaatgactctccgtagtcttctatgtactaattaaacatgaacatgtggtaaacaacatggactattccagtggacagaaagcgtc

SEQ ID NO: 1027971 - DNA, 120 bp, Artificial Sequence
  ENSG00000251574_15 (sequence is synthesized)
aagttaaaatgtttaagtgccccatatttttctaagtattcttatccagttggtctgactggtcattatctgttttgtaaaacttcccaaacaactcatcaatatttaaatagctatcca

SEQ ID NO: 1027972 - DNA, 120 bp, Artificial Sequence
  ENSG00000251574_16 (sequence is synthesized)
aattataaacttcaaatagcagaatccaaatgtcatttatgcataattcaaaagaactttgctgaaaacaatctttggattacaattgctctctaatccacctcttgaatttctacataa

SEQ ID NO: 1027973 - DNA, 120 bp, Artificial Sequence
  ENSG00000251574_17 (sequence is synthesized)
gcagaagataaacattttttctgtagaaagtttccaacttttacatttttgtggtaatttttaacattataggtataattaaattatcactaaagttatatctattaatcctaagtggtt

SEQ ID NO: 1027974 - DNA, 120 bp, Artificial Sequence
  ENSG00000251574_18 (sequence is synthesized)
tttctctgttcaaactgatgcagctcgctattacaatttaatataattttttcaaactataattgatttctaagactagtaaaatttttgagctaccattaaccccaaaatatctggaaa

SEQ ID NO: 1027975 - DNA, 120 bp, Artificial Sequence
  ENSG00000251574_19 (sequence is synthesized)
aagaaaatcatcataggtaactcctgatgactcctacctctttcagtcacatacttagcattatctgctgtacaggtttaaagaatgttggtcacaggattgaagtgaatatttcattta

SEQ ID NO: 1027976 - DNA, 120 bp, Artificial Sequence
  ENSG00000251574_20 (sequence is synthesized)
tgtgtagccaaaatattatcatatgaagcccaaaagaagagtaaaatacatccttgtgatattattaacatgactttgtgccagacaaagcatagttactctacagatggattatgaata

SEQ ID NO: 1027977 - DNA, 120 bp, Artificial Sequence
  ENSG00000251574_21 (sequence is synthesized)
gagaaaaagtgtgtagttgaattctttggaattatggactatattccataaatcccagatggagtcactatgattaatgttacctcaatgaatacaaaatgaataaataattatcctcca

SEQ ID NO: 1027978 - DNA, 120 bp, Artificial Sequence
  ENSG00000251574_22 (sequence is synthesized)
gccagctcctataatcaagttaattaactgatctatatatttaaccaataactattgagcacctactgtgtcatccctacaataatactggacccagagaaggcagaaggtctcagaaat

SEQ ID NO: 1027979 - DNA, 120 bp, Artificial Sequence
  ENSG00000251574_23 (sequence is synthesized)
aagctcaagaagacaacacagaatagacggctggagaaaaggattccttgctatttttctgttcttagtctaactaacacacttcaaaacaatcctgatatgggcctgttaaacattttg

SEQ ID NO: 1027980 - DNA, 120 bp, Artificial Sequence
  ENSG00000251574_24 (sequence is synthesized)
ctagtagccctacgaaaaattgttgtaaaaatgcatggtgctacatgatgaaatgagtttgttgacaattttagtacattgtgattaagtttcaatagaaggagaatgtgcctggaagat

SEQ ID NO: 1027981 - DNA, 120 bp, Artificial Sequence
  ENSG00000251574_25 (sequence is synthesized)
ctcattgtcaagtcttgtaaagagataagtaatttagagattcttgcattttaaaaagtgacattgggaaattactatcccttgagagacaagtcagatgtaataaacaaaagcagcaaa

SEQ ID NO: 1027982 - DNA, 120 bp, Artificial Sequence
  ENSG00000251574_26 (sequence is synthesized)
ctgtcagtgccatttttccaatagcatgtgcctactatgtgtctgtgtatgtcattttgttaatttctgcaacatttcaaacttttgtattattattatatttgttatggtgatttgcga

SEQ ID NO: 1027983 - DNA, 120 bp, Artificial Sequence
  ENSG00000251574_27 (sequence is synthesized)
tatgtttcctggcaacacattgagaaagaaagctggtatagaatcttcctaacaatggaccaagatgagagaagaagccagtcatatccatttctcaaccttcggtcttcttgcatatgg

SEQ ID NO: 1027984 - DNA, 120 bp, Artificial Sequence
  ENSG00000251574_28 (sequence is synthesized)
gggaaaggtgtgtcctcaatttcaaatatgtttgaagatttaactatcactcatgcttagaaattttaatttttggattgatactttgttttactcaggaatgatcagaaaagttttaaa

SEQ ID NO: 1027985 - DNA, 120 bp, Artificial Sequence
  ENSG00000251574_29 (sequence is synthesized)
ctgcacgattacaattcacaaaaagaggaaaaaccagttttaattagtaaatttaaccagaaattgagcttcatgatatttaaagggatggtgggttttatgattactcctcatagattc

SEQ ID NO: 1027986 - DNA, 120 bp, Artificial Sequence
  ENSG00000251574_30 (sequence is synthesized)
tgtctgttcaagtttttaattactagatctgacattttgcatgagtttgttcatttgacaggatctggacatttaaaaataaaactaaaaaaaaattgttcgatatacaaagatacaaaa

SEQ ID NO: 1027987 - DNA, 89 bp, Artificial Sequence
  ENSG00000251574_31 (sequence is synthesized)
tggatatcctcctccactgaatgcaaactattaagtaatgaaaagacagcactccaagcaatatagatttataggccaacctggcaatc

SEQ ID NO: 1027988 - DNA, 120 bp, Artificial Sequence
  ENSG00000251575_0 (sequence is synthesized)
gcttttggccaatctccatgagagaaagttctcaacctctgattgcaagtttattttgaccatttaccataacttcaacttcaatgctcgtcttgaagggcatgacttgtcatcctaata

SEQ ID NO: 1027989 - DNA, 120 bp, Artificial Sequence
  ENSG00000251575_1 (sequence is synthesized)
taattagcccctcttccagcagatcagacccacaatacgccccagcctctggaggacacagagagaatggaagtcgtggagaagaaaagagaaaagtctcagaggaccaggatataccct

SEQ ID NO: 1027990 - DNA, 120 bp, Artificial Sequence
  ENSG00000251575_2 (sequence is synthesized)
caggactagcactgtgcctgccgtagaacggggcctgctcagtgttttttgggttgagctgcatcttagaatgaaatcctacaactgagatggctaaaggaattaaaaatggtatctgta

SEQ ID NO: 1027991 - DNA, 120 bp, Artificial Sequence
  ENSG00000251575_3 (sequence is synthesized)
atgttaaatttcagactgctgcacaatatgtcagttttaggtactttttaaaagatgaacaagtacaagacttcaaagaagtctctcccttgtgaagggtcccttccggcttcactttag

SEQ ID NO: 1027992 - DNA, 120 bp, Artificial Sequence
  ENSG00000251575_4 (sequence is synthesized)
agtctctgcacttttagttcatctcatttgggtgtttcaagggaacagagaagccctggtttagatgatgcagggttttctgatgccaaagtgagaatgataaaatgtctgaaggaagaa

SEQ ID NO: 1027993 - DNA, 120 bp, Artificial Sequence
  ENSG00000251575_5 (sequence is synthesized)
gaactgattcacttttattttgtaaacatcctagaagaattccatttgcactgaactgtttgaatcactgcagagctcttgctccttctaatccccaaggaaagtcgatccatcgcgtcc

SEQ ID NO: 1027994 - DNA, 120 bp, Artificial Sequence
  ENSG00000251575_6 (sequence is synthesized)
tgctacactgtatttcttcactttgccccttttctcaattctttgtgatcagcataaagtttgaaccgtgcctcttctcgccttcctgcctggccacctgtccagccctgcggtcagctg

SEQ ID NO: 1027995 - DNA, 120 bp, Artificial Sequence
  ENSG00000251575_7 (sequence is synthesized)
taccgaccagcagacggtgcctctcttgccaagtggagccgatgctctgtgaccattgttcgtggggccacactgccatccccatcgttgccccttcaggacactcgtcaacagctgtaa

SEQ ID NO: 1027996 - DNA, 120 bp, Artificial Sequence
  ENSG00000251575_8 (sequence is synthesized)
gaggcttcccatcctcgcccatataaaaggaaggcctgaaaacacttctcggagcatcagttcataggtcaccgcaaccggccgaacaatacgcgattattcaacgggctccaattcatt

SEQ ID NO: 1027997 - DNA, 120 bp, Artificial Sequence
  ENSG00000251575_9 (sequence is synthesized)
ttcctctgctcctcccccaccgttacccttgagagaaaactaatttgcagaaaaatagcccctgccagccaacttcttctcctaaatgtatgctgaccccgaactcttgtctcagtgggt

SEQ ID NO: 1027998 - DNA, 120 bp, Artificial Sequence
  ENSG00000251575_10 (sequence is synthesized)
ggtgagtaaatatgatagaatttcaagacttccatacttcagaaaggagatcttaagtcaagaagagagatatgccatgttttatttatattgaaatatagtcaaatatcttctgtttga

SEQ ID NO: 1027999 - DNA, 120 bp, Artificial Sequence
  ENSG00000251575_11 (sequence is synthesized)
ttttataaaatataaaatggcatctgaatttttgtgggggcaggggagtaaataatactttaaattcctaggaagcgggagccatagggtgagtcactgtagaaagcaaaatccctttat

SEQ ID NO: 1028000 - DNA, 120 bp, Artificial Sequence
  ENSG00000228835_0 (sequence is synthesized)
aagcggaggcgcttcatgaggtcaggcgcatactgcatgcgggtctcgcggtcgtgctccagccacagcacggacatctggaagagcgccagctccgactccacggggggcggcagcgag

SEQ ID NO: 1028001 - DNA, 120 bp, Artificial Sequence
  ENSG00000228835_1 (sequence is synthesized)
tccagcagggcgcgcatctcctcgaagttgagcagcagcacatcctccaccagcaacagcagtggcagcagcgacggcaaagtggcggctgaggccgaggcacctcgtgggctcgtgtcc

SEQ ID NO: 1028002 - DNA, 120 bp, Artificial Sequence
  ENSG00000228835_2 (sequence is synthesized)
atgccgggccagatgaagggaaaggccgggaagtggggagccgggggtgccctgaaagctcagaggcgaccgacggcgaaggttccagggctgagcagaaagggaccctctgcttgcatc

SEQ ID NO: 1028003 - DNA, 120 bp, Artificial Sequence
  ENSG00000228835_3 (sequence is synthesized)
ccgcccgggggagagccgccgccgccgcccggctcggagggatcccggcggacctgccccttccactgcggctcactctgccctgcctggcgccggtcctggatcgccggcttcctattt

SEQ ID NO: 1028004 - DNA, 120 bp, Artificial Sequence
  ENSG00000228835_4 (sequence is synthesized)
gcctggcgccggtcctggatcgccggcttcctatttataccggactgggctcctttcgactcactttaccatcccgttccaggctggcgacttcgctgctgagctgaaactgctaatttc

SEQ ID NO: 1028005 - DNA, 120 bp, Artificial Sequence
  ENSG00000228835_5 (sequence is synthesized)
tgtgaccagcttttttcttagctgtgatctggatgaatgagtagctgtctcacagagatgacaaaaataaactctaatcccccccaaaatttccactacatctttctcatgcatagattt

SEQ ID NO: 1028006 - DNA, 120 bp, Artificial Sequence
  ENSG00000228835_6 (sequence is synthesized)
cccccacacctcccccccacccccagcactgtgaaatgcagaaacagtctgatctcaaagtatgctaagacactactttattctgttttggtatttggggtttgggtctgtcctgaaaga

SEQ ID NO: 1028007 - DNA, 120 bp, Artificial Sequence
  ENSG00000228835_7 (sequence is synthesized)
cactagcccttgcctaaaaggtgagtggctgaggatacacaccggggtgggggagtagagctggtagacagaatagaggacagccctttgctttacatttgcttcccacaaggcactgtt

SEQ ID NO: 1028008 - DNA, 120 bp, Artificial Sequence
  ENSG00000228835_8 (sequence is synthesized)
caaggtttatgatcttatttgaaaacatattttctctatcattttgtctggttaaacaactgcctctgaacttctctgtcagctcttcaacagataagggtgcagaagtcacgttttttt

SEQ ID NO: 1028009 - DNA, 120 bp, Artificial Sequence
  ENSG00000228835_9 (sequence is synthesized)
tttttttttttttttactgaaagattatcatattgttggatttgtatttcaattaggagtctttgatttgcaggagctagaatcaagtgctaggaaacccagccgcaatttcacaaatgt

SEQ ID NO: 1028010 - DNA, 120 bp, Artificial Sequence
  ENSG00000228835_10 (sequence is synthesized)
aacctttcaactttagagctcatctgatatataagggcaaccacatagtgctcacatttttgaccctgcttagcatgcaaaaggaaccccagcatgtttctggaattttagctgtaccag

SEQ ID NO: 1028011 - DNA, 120 bp, Artificial Sequence
  ENSG00000228835_11 (sequence is synthesized)
agattcatgtgcattttggtagaggacatgttctccagacttatctcatgatgtattgcacccttatgtttatagccctgcatttcggttgtcaatgggggttggaggtgtccaagaaag

SEQ ID NO: 1028012 - DNA, 120 bp, Artificial Sequence
  ENSG00000228835_12 (sequence is synthesized)
aaagaaaaaaaagaagcagaaaaaggaaggtatgcccttgagtaaaatgaacacgaagaaagctggacatgaactaaattgagctttgtttgctattaactatatgactatgattcattc

SEQ ID NO: 1028013 - DNA, 120 bp, Artificial Sequence
  ENSG00000228839_0 (sequence is synthesized)
ctcccccaccaacctcagtggttcagtggtgtctgcaaaatgcatccatcctgccatctgagtagcagaactgtaagagaaagcaacattcacctttgtgtcacagatcaaatggtaacc

SEQ ID NO: 1028014 - DNA, 120 bp, Artificial Sequence
  ENSG00000228839_1 (sequence is synthesized)
agaagcacatcctgagaacctgagagctcaaggtaagtggctgaacactgtcaacacatacagacatctaactgtctccttactgtacagccatagcaagaaacaaacgcatgcaatgct

SEQ ID NO: 1028015 - DNA, 120 bp, Artificial Sequence
  ENSG00000228839_2 (sequence is synthesized)
gtcaaggtagaagacaccactgtttactaccccagtcccaaatatctgtgtacgttagcacagcctacctagctcttctgtcattgtctttttaagtaaacattatacatttgaactgaa

SEQ ID NO: 1028016 - DNA, 120 bp, Artificial Sequence
  ENSG00000228839_3 (sequence is synthesized)
cagctagcttgctgcagcgcgagctgtttttcagctgaaaggcgccccctgggtcctaagcctcctaggtcatgcaaaatctaactgagccaagaaaggaactcagccaagagatatgca

SEQ ID NO: 1028017 - DNA, 120 bp, Artificial Sequence
  ENSG00000228839_4 (sequence is synthesized)
ggttgtgcttagcagccgatcagtttgagacctgcgaggccgcatccccagggtttttcatctcttctgtttccatttgtaactgtaagagaaagcaacattcacctttgtgtcacagat

SEQ ID NO: 1028018 - DNA, 120 bp, Artificial Sequence
  ENSG00000228838_0 (sequence is synthesized)
aggtagcaaggcagccccctctgataaccacgatgaggctcctctcccttccctttctgcccccattgtcggagtatctgctggagtgaggtacggatggaggagctggctgactgcagt

SEQ ID NO: 1028019 - DNA, 120 bp, Artificial Sequence
  ENSG00000228838_1 (sequence is synthesized)
gagggaaaagctccctgtggccacaaaccctccccaagcacacactccaggctgcacacgactctgcctcttgttagctgggcagccttgggcaagggggagaactgactccagcctcag

SEQ ID NO: 1028020 - DNA, 120 bp, Artificial Sequence
  ENSG00000228838_2 (sequence is synthesized)
agggctttgttccttctgaagctcaggacaaagcactgggcttccctcctgcctgggagccttcaggacggcatggagtttggccacgtggtgggagcgccctgagtgcgtggcacagaa

SEQ ID NO: 1028021 - DNA, 120 bp, Artificial Sequence
  ENSG00000228838_3 (sequence is synthesized)
tgttcaactggttacctctcctgagcctcacagcctctcaaggaagatctgaggaggaaactgaggcccacccccacccagactgaggggcaggactcactgcaagtggcctcggactca

SEQ ID NO: 1028022 - DNA, 120 bp, Artificial Sequence
  ENSG00000228838_4 (sequence is synthesized)
tcggagccatcaggacactcctcctcgccgtcacacttccaccgttcgtggatgcagtggccgttgtcacaggtgaagtcactgtctgcacaggtcttcttggctgcagggcaaggaaga

SEQ ID NO: 1028023 - DNA, 120 bp, Artificial Sequence
  ENSG00000281912_0 (sequence is synthesized)
gaagggctgaggctcacggtttcggagtaaggggagcggcccggcgagccgccgcgcctgggttaagagctgcaggaggaacgtggcttcacgagttcggctcctcggccatccacagcc

SEQ ID NO: 1028024 - DNA, 120 bp, Artificial Sequence
  ENSG00000281912_1 (sequence is synthesized)
cgggcctccgcctctgctgacctggcggctgtagaaggcagaagaggcctgaaacctgcagcaggagcaccaccctgccccgcggccccgcgcgccctccagtggcgtcatcccatccgc

SEQ ID NO: 1028025 - DNA, 120 bp, Artificial Sequence
  ENSG00000281912_2 (sequence is synthesized)
tttgatctcgactggcgcgcctaccctcggcagcggcaccccttgggagcgcaatcgcgggcagactccgaggacccatcttgcgaaagttctgcgaggtcctgactttaagggaacagg

SEQ ID NO: 1028026 - DNA, 120 bp, Artificial Sequence
  ENSG00000281912_3 (sequence is synthesized)
ggtcgtacttgggccatggccggaagggagatccaacatccatgacgacgtctaccccccagcctgccccttcagagcccagtctgtgccttgcgtcaaagtcaagcaagggctcttgta

SEQ ID NO: 1028027 - DNA, 120 bp, Artificial Sequence
  ENSG00000281912_4 (sequence is synthesized)
gggcaccgagccccagccaaaatcacccttttctttcagatagcccccacttacccccagaaaccttactctctccctcgggagcaggtgggaagtgaaaggccgggggggctgtttctg

SEQ ID NO: 1028028 - DNA, 120 bp, Artificial Sequence
  ENSG00000281912_5 (sequence is synthesized)
ctctgcttgtctgtacctgtggcccttgagtggaaaaccccgccgctggaccaaagacctggaggctccaggattgcccacttgggaccctgactatgaagggtcaagatagcccattct

SEQ ID NO: 1028029 - DNA, 120 bp, Artificial Sequence
  ENSG00000281912_6 (sequence is synthesized)
gccccagcactcagagccctattaccaaggcccctactccaagaatccaccatcaaaaccggggccctgccagtgccttcccagtgttcaggcctagggaagaatagccccattatgcct

SEQ ID NO: 1028030 - DNA, 120 bp, Artificial Sequence
  ENSG00000281912_7 (sequence is synthesized)
tttgtgaccccatggcctttgctgctatgtctgccctggccccacagagtgccaggtcagagccaccctggcctacatagcagggccccggttcacaggctaaaacctgggcctcctgcc

SEQ ID NO: 1028031 - DNA, 120 bp, Artificial Sequence
  ENSG00000281912_8 (sequence is synthesized)
aggctgcaactcccagctgcacaccgcaacctgagacatctcagcatattctaggaactagtaatggggacgcttccgactcgctggggaagggagatgagggcctctagctctccatgc

SEQ ID NO: 1028032 - DNA, 120 bp, Artificial Sequence
  ENSG00000281912_9 (sequence is synthesized)
ccagtctctcatcatcaaagtcatttaaggccccagcgaccccagggttcagcagcatcctgttcatcatgagcagaggggtgactgaatagaatgggaggcaggtgtggcctgagcagt

SEQ ID NO: 1028033 - DNA, 120 bp, Artificial Sequence
  ENSG00000281912_10 (sequence is synthesized)
tcccaacctgaattttcctttgagcttggtgatttggggcgggggattgagatattttcctttcacttgtgggaaatcttggggccccacaaatcactaagctgaagggaaaagtcaagc

SEQ ID NO: 1028034 - DNA, 120 bp, Artificial Sequence
  ENSG00000281912_11 (sequence is synthesized)
tgggaactactcagggcaaacctgcctcccattttattcagtcactcctctgctcgctgagatagacacatacctgattgcctcctttggagaggcttgtcagaaacaaaataatgcaac

SEQ ID NO: 1028035 - DNA, 120 bp, Artificial Sequence
  ENSG00000281912_12 (sequence is synthesized)
catttgtctctcagctacctgcgacctggaagccccctccccacttcgagttgtccccgcctttctggacggaaccaacgtacttcttacatatatcgattgatgtctcatgtctcctta

SEQ ID NO: 1028036 - DNA, 120 bp, Artificial Sequence
  ENSG00000281912_13 (sequence is synthesized)
aaatgtatgaaaacaaactgtgccctgaccaccttgggcacatgtcgccaggactccctgaggctgtgtcacgggcacgcatcttcaaccttggcaaaataaagtttctgaattaactga

SEQ ID NO: 1028037 - DNA, 120 bp, Artificial Sequence
  ENSG00000185433_0 (sequence is synthesized)
gcaaacattggatgaagaatgtgtattttcagtttcagaagctgaacaaatatgaaacaatctctggaaaatggaatttgattttgattcaacaacaggagaattctactgtttttctcc

SEQ ID NO: 1028038 - DNA, 120 bp, Artificial Sequence
  ENSG00000185433_1 (sequence is synthesized)
agcagctccacgataaaagtgaattacacacttcttgagggtggtgacagatattatctttcaaccctactcatcatgatgcaattgaaaagtggatgagttgatttgctgaaggttgaa

SEQ ID NO: 1028039 - DNA, 120 bp, Artificial Sequence
  ENSG00000185433_2 (sequence is synthesized)
ttcttgcaggaggcatgatgaagaagaaaagcttcacttctctggagacaggaagtctgaattctactctgtggctgccacttacaagtacataggaactgaaaacaaggacaccatgtg

SEQ ID NO: 1028040 - DNA, 120 bp, Artificial Sequence
  ENSG00000185433_3 (sequence is synthesized)
aacttgtatggccactttcaacgctgagcagtggcagatgcttttgggaaccctgagcagaacacatgcacaaactcatgccataccctaagggacaaggttccccacatctacttggaa

SEQ ID NO: 1028041 - DNA, 120 bp, Artificial Sequence
  ENSG00000185433_4 (sequence is synthesized)
atctttgggatgctcaatgattagctctttggaactgagagatgagatgaggcctggaaaacttcccccagtacagtcaagttcctgttgactaattctgtgaccaccagtgacagtctt

SEQ ID NO: 1028042 - DNA, 120 bp, Artificial Sequence
  ENSG00000185433_5 (sequence is synthesized)
gaggggagaatccagcaggcctctagtcacactggacagttgctctgattcatttctggacttcagtggaagaagcagcccttatttaggatattgttagtctttggcagagggaataca

SEQ ID NO: 1028043 - DNA, 120 bp, Artificial Sequence
  ENSG00000185433_6 (sequence is synthesized)
aagcaatggaagggtgatgtgatggctccgaaagcttctgttggatgtagaatataaagtttgctcaccttttttaatccaaagagaaaaacaaggagagaaaaatctaaacccagcaga

SEQ ID NO: 1028044 - DNA, 120 bp, Artificial Sequence
  ENSG00000185433_7 (sequence is synthesized)
agagaaagtttaagaaagcggtcgtcgccaataccaaaattagctatgatattcaggaagaaaaaaatggaaacacgataaccacagtcaataaagaccaaggccacattccattgacca

SEQ ID NO: 1028045 - DNA, 120 bp, Artificial Sequence
  ENSG00000185433_8 (sequence is synthesized)
gagctcagccacgcgccacacctggctaaagagactctggctgaagaattccctgaatattttaatgtagctctaggttataacacagaacaaccacaaggtggcagaagaactccattc

SEQ ID NO: 1028046 - DNA, 120 bp, Artificial Sequence
  ENSG00000185433_9 (sequence is synthesized)
ttgtaaatctcttagttgcttctttatttcatcttccctattccatctaatgttccctgaattttactattttgttggtttgaaaatatgtgtgacttacgtcctttaaaggatttggtt

SEQ ID NO: 1028047 - DNA, 120 bp, Artificial Sequence
  ENSG00000185433_10 (sequence is synthesized)
ggttcgtaaggttttgaatagactggaatataaaacatttatagaaaagaaaaatacctacagtatgatgttagtgaactattaataatccaattaaataaaatatatttgctttggatt

SEQ ID NO: 1028048 - DNA, 120 bp, Artificial Sequence
  ENSG00000185433_11 (sequence is synthesized)
gacttcatcaggcactgctatcatggggcactggtaacaaataaatatcactttggaggccatgtgcagatcagatttggaagtgaccaagactggaggcagggacaccagagttttctg

SEQ ID NO: 1028049 - DNA, 120 bp, Artificial Sequence
  ENSG00000185433_12 (sequence is synthesized)
ttaaaaactggtccatgcaagaaaagatgactcctgaaataagacagtgatcattaggatgaagaggaagagaagatttgaggaatacttagaacagaatttactgaatttactggttga

SEQ ID NO: 1028050 - DNA, 120 bp, Artificial Sequence
  ENSG00000185433_13 (sequence is synthesized)
attgaatgtgaagaggagatgaataaagaagaaaacaccctcaaaggaaatcaagggatttctcctcattagaaggaattgccctaggagtaagaatttatccctttccactttcagagt

SEQ ID NO: 1028051 - DNA, 120 bp, Artificial Sequence
  ENSG00000185433_14 (sequence is synthesized)
cccctctgagcatacactatacagcaaacattggatgaagaatgtgtattttcagtttcagaagctggaaccctgagcagaacacatgcacaaactcatgccataccctaagggacaagg

SEQ ID NO: 1028052 - DNA, 120 bp, Artificial Sequence
  ENSG00000185433_15 (sequence is synthesized)
aaggatgtcctttttaccactgagcttgttctaagtttcctctggacctcctctgttgataagctagtggggacttgaggagtgaggctggaagtccagcctccctgccaacacctcagg

SEQ ID NO: 1028053 - DNA, 120 bp, Artificial Sequence
  ENSG00000185433_16 (sequence is synthesized)
agtcactctgttctccctcccccaggcacacagattctccctccacttgctgctgctggagggtaagggagaagtgctgtatacagggcaggcctgcctttcctaaccccatcggtgcct

SEQ ID NO: 1028054 - DNA, 120 bp, Artificial Sequence
  ENSG00000185433_17 (sequence is synthesized)
agtggggaatttccttatttgaagtcttgccacttcagtgactttctaaatagaaattagagaacccagaaaggttttgaaaaaatttttagttcttcctggcaattgcatgtatatttt

SEQ ID NO: 1028055 - DNA, 120 bp, Artificial Sequence
  ENSG00000185433_18 (sequence is synthesized)
tttctgcatgttatttggatgtgaggagctgtcattattattttaggaacaaatatgaaacaatctctggaaaatggaatttgattttgattcaacaacaggagaattctactgtttttc

SEQ ID NO: 1028056 - DNA, 120 bp, Artificial Sequence
  ENSG00000185433_19 (sequence is synthesized)
ggattaatctaagcttctgctgtgtatggacctgtggctacattacaaaattcagttgtgaagctataaaatcaattagtctagacctcaaatcttatttcctatgaaaagcctcaaact

SEQ ID NO: 1028057 - DNA, 120 bp, Artificial Sequence
  ENSG00000185433_20 (sequence is synthesized)
tgtagctgtatgaacaagtgtttttggaatttttttttttttgctagaatggagagaacacactggagatcacaaatgcatttattctttttcaccaactgtttcattggccttaaaaaa

SEQ ID NO: 1028058 - DNA, 120 bp, Artificial Sequence
  ENSG00000185433_21 (sequence is synthesized)
tactaggctaaacttaagtggtaaagatctgaaataaaaagatgcatctttatgtctgaacagcaatttttcataggtctctaataacttgcatttccttatctatggataaggagatct

SEQ ID NO: 1028059 - DNA, 120 bp, Artificial Sequence
  ENSG00000185433_22 (sequence is synthesized)
gaaattgatctacattttctttagtaatgttttctctgtttattgagaacagatatcttcatctccttcatgcattatccttagtaacagatgtcagtaggatccagagccattttggaa

SEQ ID NO: 1028060 - DNA, 120 bp, Artificial Sequence
  ENSG00000185433_23 (sequence is synthesized)
tgaacattttcatattatttaataagccagtttcaaggcatacatgctaaatttgttcttaaggaaaagttgaatttttgctttcatgaaattacaaactctaaggcaattttacacgtg

SEQ ID NO: 1028061 - DNA, 120 bp, Artificial Sequence
  ENSG00000185433_24 (sequence is synthesized)
taaatccaatgtgttctgaagtttaaagtgtcaaaggctgttggatttaaacagatcttgtatgactctctgtttcatctcttcagaggttgatagtaagcaactttggcagcaactcac

SEQ ID NO: 1028062 - DNA, 120 bp, Artificial Sequence
  ENSG00000185433_25 (sequence is synthesized)
agcttctgctgtaacatgaggctaataatgacgactttataaggttgttgcaaagagtcagggatgccacaagcaacgttctttatatatgcagaattttaaaaataaagtaaataaaaa

SEQ ID NO: 1028063 - DNA, 120 bp, Artificial Sequence
  ENSG00000185433_26 (sequence is synthesized)
atggtgggagatggtggtgtgagtggagggtctgtgggtgtgatgaacacctgaatgactcatggggagagggatgttaacaggacagatgccacttgctgtaattttcatatgatgtgt

SEQ ID NO: 1028064 - DNA, 120 bp, Artificial Sequence
  ENSG00000185433_27 (sequence is synthesized)
ttggaaagccccctgcatggaggaaagatagatcgaggtccctttcaaaagtgctccagatgaagaggcatttccactttcagaaaccctgagaatccccgaaagaacctctaactagtc

SEQ ID NO: 1028065 - DNA, 120 bp, Artificial Sequence
  ENSG00000185433_28 (sequence is synthesized)
aggggagaatccagcaggcctctagtcacactgccccctgcatggaggaaagatagatcgaggtccctttcaaaagtgctccagatgaagaggcatttccactttcagaaaccctgagaa

SEQ ID NO: 1028066 - DNA, 120 bp, Artificial Sequence
  ENSG00000185433_29 (sequence is synthesized)
tccccgaaagaacctctaactagtcattgtactggaggccgctcctctattccgaatactgctgttcactgtccctctcagcaaactgtactgctcctattgcaacctgagtttaggaag

SEQ ID NO: 1028067 - DNA, 120 bp, Artificial Sequence
  ENSG00000185433_30 (sequence is synthesized)
acttaaagctatgtcaactgtttatttctctccttggagaagtacctgtgtcagctacccaaggttaacgtctccaccaggttcattattttatattttaaatatattttaagatcaaaa

SEQ ID NO: 1028068 - DNA, 120 bp, Artificial Sequence
  ENSG00000185433_31 (sequence is synthesized)
tctccagcagctccacgataaaagggaaccctgagcagaacacatgcacaaactcatgccataccctaagggacaaggttccccacatctacttggaaatctttgggatgctcaatggag

SEQ ID NO: 1028069 - DNA, 120 bp, Artificial Sequence
  ENSG00000185433_32 (sequence is synthesized)
gacaatctctcagagttcagagactcatctcttgctggcagctatctcctgttttcctgggatttggctcaggaaagaggacactggaagaggcagggatttttgtccttgggcaatcat

SEQ ID NO: 1028070 - DNA, 120 bp, Artificial Sequence
  ENSG00000185433_33 (sequence is synthesized)
taaccaaggacaatgggaagctgttggagaaaattttcagcctcttgtctttggccagaagtgggagaggtggaaggggatgactgcagggcgtttggtttgcttctcagagggcccggc

SEQ ID NO: 1028071 - DNA, 120 bp, Artificial Sequence
  ENSG00000185433_34 (sequence is synthesized)
agaaaaaacccacatttataacacagccttatgtttcctttccttcttctcactcttctgctcatttatttcagcttcctgatatctccttccaaataaaccacttgcccccaagtctaa

SEQ ID NO: 1028072 - DNA, 120 bp, Artificial Sequence
  ENSG00000280744_0 (sequence is synthesized)
atagtgaaggcagaccacaggctggcaaatggaaatgcatgatgcttcctaaggcctaggctcagacctggcaactgtcaattccactttcctcatcttataaaattctggttctcaatg

SEQ ID NO: 1028073 - DNA, 120 bp, Artificial Sequence
  ENSG00000280744_1 (sequence is synthesized)
cttcgtttccccaaggcctgcagctttcataagaaggcaggagtttttggaggagagcgtcgtgttcgtctgtctgtagaccctgagacactgatttacagcaagactcacggtgacaag

SEQ ID NO: 1028074 - DNA, 120 bp, Artificial Sequence
  ENSG00000250198_0 (sequence is synthesized)
ggggcccgaggccccgagaagggcaggatgcgatgctgggtgtgtgacctcagccatggaagggccacctgccaccggggggctgggccgtcgggcctttggttgtggagggaaaagagt

SEQ ID NO: 1028075 - DNA, 120 bp, Artificial Sequence
  ENSG00000250198_1 (sequence is synthesized)
ggccacttgctggagctgggaacgtgcagtgatgagcactaggacaagaggaccgtgacaaacagacatagaagatctggagactggggaagtccaagatcaaggctccagcagattcag

SEQ ID NO: 1028076 - DNA, 120 bp, Artificial Sequence
  ENSG00000250198_2 (sequence is synthesized)
tatctggaaacctggttggggcttcaacaggaacacctgcaaggaccagctgacttcctgcccagacacccttgcattctcagcctctgcctgggaggaggaagaggcacttccacattt

SEQ ID NO: 1028077 - DNA, 120 bp, Artificial Sequence
  ENSG00000250198_3 (sequence is synthesized)
cttgtgacaggacagcattgagttcattgcctcaaaattgctgcgctctccttctgccagtgcccagagatgctccccacaccacactgcactgctgggggatgttagaggtgattcaag

SEQ ID NO: 1028078 - DNA, 120 bp, Artificial Sequence
  ENSG00000250198_4 (sequence is synthesized)
aaccaggtactatgagaactcacctgatttttagttcttatgaaggtgctttccttgtgtaaatatttgttaaattgttttccttgccagaggaatgatcagtggagccttctattctgc

SEQ ID NO: 1028079 - DNA, 120 bp, Artificial Sequence
  ENSG00000250198_5 (sequence is synthesized)
cacctttctctgcctctctccaatcctcttacctttttcacacagccttcgtggttatcacagagacttaagatggaatgttaaatacactcttttatattggaaataaaatgaaaacca

SEQ ID NO: 1028080 - DNA, 120 bp, Artificial Sequence
  ENSG00000250198_6 (sequence is synthesized)
gatataaacaaataaacaagccacggagaaaagaaaacaaactttgaataattaatttattgtaactcataagcccagcgttgtataaaaaatgttgtcatcctgttatatttctttgtc

SEQ ID NO: 1028081 - DNA, 120 bp, Artificial Sequence
  ENSG00000250198_7 (sequence is synthesized)
ttcttcctgttagcaagaatttggcttttaacttctaagcactatccctgtttctctgtagtggtgcatcccagaatggccattcctagctttttgattaaatactctttaaaatagaaa

SEQ ID NO: 1028082 - DNA, 120 bp, Artificial Sequence
  ENSG00000250198_8 (sequence is synthesized)
tgaagttaaaaccagaggaatgatcagtggagccttctattctgccacctttctctgcctctctccaatcctcttacctttttcacacagccttcgtggttatcacagagacttaagatg

SEQ ID NO: 1028083 - DNA, 120 bp, Artificial Sequence
  ENSG00000250198_9 (sequence is synthesized)
ccagccacacactatctcatggcagaagacaccacttaacccaggcatcccacatggaggctgtatgtactggcagatttttaatgaccaggaccactatggatcatagaacaacttgga

SEQ ID NO: 1028084 - DNA, 120 bp, Artificial Sequence
  ENSG00000250198_10 (sequence is synthesized)
agctagttctttttttaagcattgacatccatcaatctttcgcctttacctaatgctgcattcaaaagaaatatgtggagcagcagcaaattaaagaagaccaaaatctgaaccactgcc

SEQ ID NO: 1028085 - DNA, 120 bp, Artificial Sequence
  ENSG00000250198_11 (sequence is synthesized)
aggctctctccatggcctccttttcttatagaggttgtcaggggaacattcagcacagcacgcctgactccagtgaactcggagttaatggaccctgaatgagacttcagtacatgaagt

SEQ ID NO: 1028086 - DNA, 120 bp, Artificial Sequence
  ENSG00000250198_12 (sequence is synthesized)
accttctatcctggaataagatgatggacatattaatagcacacatacagcttttgaggctgaagattcaggtcaagttaattgctttaaaaacccagtaatttaacctacagaaaaaca

SEQ ID NO: 1028087 - DNA, 120 bp, Artificial Sequence
  ENSG00000250198_13 (sequence is synthesized)
atcacattggtaatagcagtcttaaatatagttttgtgtactttaagactttagttagtgtttttacacaagatgagagaaactcatgacaaatacaatggcagtgaagattaaacatca

SEQ ID NO: 1028088 - DNA, 120 bp, Artificial Sequence
  ENSG00000250198_14 (sequence is synthesized)
gtaaaagaaaaagcacatgcaagagagaacaaaaatgctaataaccaattacatcagatccaggagaaagtcagctatatattcttgttgagattgaaacaaaaatgtgaagataatgta

SEQ ID NO: 1028089 - DNA, 120 bp, Artificial Sequence
  ENSG00000250198_15 (sequence is synthesized)
atggagttaagaagtggtcaatagttgaatgcatcctaggccacttaacaaaaccagaaactctcagccgtaggagaatgcagatgccctttctttaccaaacaaggggagagcaaggaa

SEQ ID NO: 1028090 - DNA, 120 bp, Artificial Sequence
  ENSG00000250198_16 (sequence is synthesized)
acaagaatggatcacaggatctcatccttaaaaaagtacccatgggagatgtggacgttccttgtcgggaaaccatcagtactaactctatttcatgtacacaaaatgagaattttgcca

SEQ ID NO: 1028091 - DNA, 120 bp, Artificial Sequence
  ENSG00000250198_17 (sequence is synthesized)
caaacttcttgaaccggagatagtagacatattcagcctctggatagcctacattataaagaacagagattcatcccatctccttctttccccaacaaaaatataatcatatgaaaagaa

SEQ ID NO: 1028092 - DNA, 120 bp, Artificial Sequence
  ENSG00000250198_18 (sequence is synthesized)
gtcaagagaacaattctccaacctgagatttcctgtattttttattttatctccctattgtttcttttatttgtcgttgttttcattccagtttcaaccagagtcacatttgcttcctaa

SEQ ID NO: 1028093 - DNA, 120 bp, Artificial Sequence
  ENSG00000250198_19 (sequence is synthesized)
tccagtgcttgtaaatttctgtcttcttggataattgttgttaataattgctgtggatgattctctaacttaggaaggtatctagatgaaccgtttcttttttctgtgacctggtgctga

SEQ ID NO: 1028094 - DNA, 120 bp, Artificial Sequence
  ENSG00000250198_20 (sequence is synthesized)
agggcatgtgttgcctgggaagtcaataaaatgagatgagcattatatcctcaattgcttttcaaacagtcctttgatatgcaacagtcctttgcccctttctgaatcagcccatcctcc

SEQ ID NO: 1028095 - DNA, 120 bp, Artificial Sequence
  ENSG00000250198_21 (sequence is synthesized)
aagtgttcccaggtcacagcgctgtcagtacccatgggacagcataaaaggaagaggtgtgttacttcttttcttcccttgaagtttttttctttggttggtttaaccattaaagataag

SEQ ID NO: 1028096 - DNA, 120 bp, Artificial Sequence
  ENSG00000250198_22 (sequence is synthesized)
gtttgaacttaatgagccttttattcgatgtaagtgatgtttcatttttacatgattcatctagcctcagattaattaagtataatattttctatttaattactgggcatatttaggtaa

SEQ ID NO: 1028097 - DNA, 120 bp, Artificial Sequence
  ENSG00000250198_23 (sequence is synthesized)
ttaatttttgaagagaagaagtggttttgtgtaggctactttatctcattttttaattgactgaattttttttctctgttagactgaagaatattctatataattttcatcaatgagtta

SEQ ID NO: 1028098 - DNA, 120 bp, Artificial Sequence
  ENSG00000250198_24 (sequence is synthesized)
cgataattttctgtaaaaaactttcacaataagttttgttccatgagcaggtggctccaaatccttcatcattaactctggtaccctgcttcctttccctcaattcattcctatggcttc

SEQ ID NO: 1028099 - DNA, 120 bp, Artificial Sequence
  ENSG00000250198_25 (sequence is synthesized)
ttgggaaattccttagaagcaattgactgagaaagtagagactcaagcctggtttacaaatggttctgcatagtatgctggtaacacttgaaagtcagtaggtaaagcactaccaggcca

SEQ ID NO: 1028100 - DNA, 120 bp, Artificial Sequence
  ENSG00000250198_26 (sequence is synthesized)
ctcaaagtcctctctgagaattggaggtggccccttttccctctgagcctctacacagcaccagccttcaacctggatgcccagaagctctaagacctactctgggtcttcagtgttctc

SEQ ID NO: 1028101 - DNA, 120 bp, Artificial Sequence
  ENSG00000250198_27 (sequence is synthesized)
aggaggcatgggaggcaagaggtttttccagaggctttgtaggcagagctcataggcccctgagaaattatccagagagaaaggaaaagaggcagacttgtatgcttacgaggacacacg

SEQ ID NO: 1028102 - DNA, 120 bp, Artificial Sequence
  ENSG00000250198_28 (sequence is synthesized)
gggtgaggacacacggggttccctctaaggacttccacaaataactggaggcccttgaagaaaagacagatgctccatcactaacacagaagaaagttttcaatgcaatggctgccaact

SEQ ID NO: 1028103 - DNA, 120 bp, Artificial Sequence
  ENSG00000250198_29 (sequence is synthesized)
cactccctctcctaattaaatacatacatgttctcagcatctttcacaattccaggatagctttacttctaaaaccgacaaagattgaaaaaaggaaaaataaaaacaaaaaaacacaga

SEQ ID NO: 1028104 - DNA, 120 bp, Artificial Sequence
  ENSG00000250198_30 (sequence is synthesized)
tatttttcccctagtactggtgaaggtatttggcaatgagatggaaatataaactggaataatgtttccaaagaataatttaaccatcaaatcaaaagcctcaagagtgtgccagacatt

SEQ ID NO: 1028105 - DNA, 120 bp, Artificial Sequence
  ENSG00000250198_31 (sequence is synthesized)
ggccctgtaacttcatttatgggaaatgtcttaagacagacttacaaagattgtcatcacagccttgtttgtaatgaaagactcggaatccacctaacttcccacaagcaaaaactggac

SEQ ID NO: 1028106 - DNA, 120 bp, Artificial Sequence
  ENSG00000250198_32 (sequence is synthesized)
attcctgacagggaaactttggaaccactcaatatgatgaagaatatccaacaatttgttgcatggaacaatgtcatgtagaatgttaagaaaggaaaaacaagttaaagagtattcaat

SEQ ID NO: 1028107 - DNA, 120 bp, Artificial Sequence
  ENSG00000250198_33 (sequence is synthesized)
ttcatatttataaagatatgtatatatgagtaataatataaacatcctcactggaataacacattctgaatatcaatttgccttgtgagcagcaccatgcatagacttacagaattctta

SEQ ID NO: 1028108 - DNA, 120 bp, Artificial Sequence
  ENSG00000250198_34 (sequence is synthesized)
tccatcagcatggtattctgcacaataatgcttctgatctgcaacttacttcacagcaataagtacagcaatgggcttatatgcatagaattaactggtcttatcacattacctggaagt

SEQ ID NO: 1028109 - DNA, 120 bp, Artificial Sequence
  ENSG00000250198_35 (sequence is synthesized)
agatggcctaattgcgcagtgggatggtttactagggactcagttatggtaccagtttgagcagaatgctcaaagagaatgacattctgtattacaagatgtagcatatttttttgaatt

SEQ ID NO: 1028110 - DNA, 120 bp, Artificial Sequence
  ENSG00000250198_36 (sequence is synthesized)
ggagatcactatatgatgttttctccctccagaggcagaatactcgagtctaaggatcaaggtgtagaaggtggtccatctcctttcaaaattattcctaatagccaacttgcaaaagca

SEQ ID NO: 1028111 - DNA, 120 bp, Artificial Sequence
  ENSG00000250198_37 (sequence is synthesized)
ttgctttttgtccaagagatctactggttttgaggtcttgtttcctaaagggtgagaattcactgcattggaaaatgagactgccatctggacattttgatctttttatgccaagagaga

SEQ ID NO: 1028112 - DNA, 120 bp, Artificial Sequence
  ENSG00000250198_38 (sequence is synthesized)
gaaaatgaaattactctgcctggtggaggaattgattcttattattgaggaaaaaatccattgctgctaccaacggagggtaaggaagactgtgtctagaacccataatggttctcaggg

SEQ ID NO: 1028113 - DNA, 120 bp, Artificial Sequence
  ENSG00000250198_39 (sequence is synthesized)
ctaatgcttagtactccccattctcaacattaaaagttaatgaaaaactatagtaatcaaaatagaatttttgagcatcaatactatacaggatttgggccactccactagaaaaggaac

SEQ ID NO: 1028114 - DNA, 120 bp, Artificial Sequence
  ENSG00000250198_40 (sequence is synthesized)
cctgaccagctttggttatggctgaaggaaaagggaatgtgaaatgattagtaaaggagaaaaaaaacaaaaacaaagataaactacaaccatgttaccagtttcaaaactgagcattat

SEQ ID NO: 1028115 - DNA, 120 bp, Artificial Sequence
  ENSG00000250198_41 (sequence is synthesized)
agtttatttgcatattatattatttgtaataaaataaaactacagtaatcaaaatgcactttttgagtatcagtaccgtatagggatgaggatttgggccacttcactagaaagggaacc

SEQ ID NO: 1028116 - DNA, 120 bp, Artificial Sequence
  ENSG00000250198_42 (sequence is synthesized)
ttgaccagctttggttatgggtgaaggaaaggtgaaatgtgaaatgattagtaaaagagaaaaaaaagagctatcaactacagccttgttaccaatttcaaaactgaggattattgttta

SEQ ID NO: 1028117 - DNA, 120 bp, Artificial Sequence
  ENSG00000250198_43 (sequence is synthesized)
atttatatttaataaacattttccttcttcatttttattttatgtacaagttgtttcaaaataactttatatagtttttaggtagtagaatatttaatgctgccgtaactgaatttgacc

SEQ ID NO: 1028118 - DNA, 120 bp, Artificial Sequence
  ENSG00000250198_44 (sequence is synthesized)
gtaactgaatttgaccagtaattaatatagccaacaaaggaatccaacagactgctacaactgtgtgcatcttcctgatagaaaaaaaggatagcttattcaattatatggaggatggct

SEQ ID NO: 1028119 - DNA, 120 bp, Artificial Sequence
  ENSG00000250198_45 (sequence is synthesized)
tcccctttttaggtggaaacacagagtcacattattgtacagaagttcaaaaatgtgtagaagggtgcactggaagctgagagtctaaaggaacagtctgtatcatgtaacagttgattg

SEQ ID NO: 1028120 - DNA, 120 bp, Artificial Sequence
  ENSG00000250198_46 (sequence is synthesized)
ccccttggctcaaagctacatttttttcactcttcctggttatgctagacctgtacctgtgaacatttattatttgccagctgacaggatatttaaggacactgaagagtcactgcaaga

SEQ ID NO: 1028121 - DNA, 120 bp, Artificial Sequence
  ENSG00000250198_47 (sequence is synthesized)
ggtagagtttcatcttcttcccacagcatggctacccgaggcacaccacctctagggaatttcccatgtacctccgtagttagtttcctactggccaaccgtgtcccacggcacctcaac

SEQ ID NO: 1028122 - DNA, 120 bp, Artificial Sequence
  ENSG00000250198_48 (sequence is synthesized)
acacttcactgatcgtgaatagtggtttgttgctgttgctacttgttattttgggagagctggattggggcccccaggtatattctcctcagtaaggtttgaatctcagccttgggggtt

SEQ ID NO: 1028123 - DNA, 120 bp, Artificial Sequence
  ENSG00000250198_49 (sequence is synthesized)
gaatggagaggattttccacaacaattccttccgtaggtattttctctcatccttcaatattccactttcagtcttgcatagaacaactagacagaagatcactaagaaaattggaggct

SEQ ID NO: 1028124 - DNA, 120 bp, Artificial Sequence
  ENSG00000250198_50 (sequence is synthesized)
tggacaatactacaaaccaactaggtgtaataaacatctatagaacactcgcccaacatactcttctcaagcgtgcacggagcagtctgcaggaaaggtaatgttgtttcatgaacaaga

SEQ ID NO: 1028125 - DNA, 120 bp, Artificial Sequence
  ENSG00000250198_51 (sequence is synthesized)
aagactcaacacattttgaaggactgaaatcatacttttaaaaaattgaaatcatatatagtatgttttctgatcacactggcttaaaattaaaagtcaataacaaaaggaggttttgaa

SEQ ID NO: 1028126 - DNA, 120 bp, Artificial Sequence
  ENSG00000250198_52 (sequence is synthesized)
ccagggagaggcctcaggatggatttggaaatgcaggacaggttcatgaaatcctcacacacctgccacatactcaaggagggtgctgtttacttgattgattgtgctggtcctgaacat

SEQ ID NO: 1028127 - DNA, 120 bp, Artificial Sequence
  ENSG00000250198_53 (sequence is synthesized)
ctgacatgatttgtggttataaatgggtgtttgccgttaactataagtatcttggagtaatttaacaaacaacaataggtattggggcaggtcagcgcgtctccacctgaaagacaaagg

SEQ ID NO: 1028128 - DNA, 120 bp, Artificial Sequence
  ENSG00000250198_54 (sequence is synthesized)
aaagccgtgaacgcaggaccagcagttgtggctcacggtgagaggtgacagcgtggtagcatcccttgctggctctgggcgcgtcctcggcctcggcgtccgctctggccgcgctcaagg

SEQ ID NO: 1028129 - DNA, 120 bp, Artificial Sequence
  ENSG00000250198_55 (sequence is synthesized)
agctcttcagcccgccgctgcgctatgagggcctctctctggggctggcggaggccggagcctgctccctctgctggcggggaggtgtgaagagaaaggcactggctggagccggcgctg

SEQ ID NO: 1028130 - DNA, 120 bp, Artificial Sequence
  ENSG00000250198_56 (sequence is synthesized)
cgcgcggcgctcgcggcccagcgcttgggttccaggtgagctccggctctgcaagccccgcactcggcgtggccggccggcgcctgctgggcttgatcggagactgaatccctgcgtgga

SEQ ID NO: 1028131 - DNA, 120 bp, Artificial Sequence
  ENSG00000250198_57 (sequence is synthesized)
ccaccgttccctcttcgcgggattgttggccaccatagccgatctccgtctctttctctcttcccctcttttcctcttgattgtctggaactagctccctctgggctgccggattacccg

SEQ ID NO: 1028132 - DNA, 120 bp, Artificial Sequence
  ENSG00000250198_58 (sequence is synthesized)
cccggcccgccaagttccgcagcgagagccagtgagagatgatgccggctgggcttctgggacggttggggacttggagaacttttgtgtctaactaaaggattgtaaacgcaccaatca

SEQ ID NO: 1028133 - DNA, 120 bp, Artificial Sequence
  ENSG00000250198_59 (sequence is synthesized)
ggtggggccaaataagggactaaaagcaggccaccagagcaggccgctgcagcttgctcgggttctctctctgctctgtggaaacgttgttgtttagctctttgcagtgaatctggctgc

SEQ ID NO: 1028134 - DNA, 82 bp, Artificial Sequence
  ENSG00000250198_60 (sequence is synthesized)
ctaatttcagtctttccggtagctgggactacaggcgcccaccacaatgcctggctaatttgcgccatctttaagagctgta

SEQ ID NO: 1028135 - DNA, 120 bp, Artificial Sequence
  ENSG00000250198_61 (sequence is synthesized)
tatttcagtctttccggtagctgggactacaggcgcccaccacaatgcctggctaatttgcgccatctttaagagctgtaacactcaccgctaaggtctgcagcttcactcctgaagcca

SEQ ID NO: 1028136 - DNA, 120 bp, Artificial Sequence
  ENSG00000250198_62 (sequence is synthesized)
ggaacaattccagacaattccacacaggaggaagcaacaactctggatgtgccacctttaggaactgtaccactcacgggaaggtctgcagcttcactcctgaagtgagcaagactacga

SEQ ID NO: 1028137 - DNA, 120 bp, Artificial Sequence
  ENSG00000250198_63 (sequence is synthesized)
cagcttcactcctgaagtgagcaagactacgaacctaccgggaggaaggaacaaattacggacacaccattctttaagaactgtaacaaacccgcgagggtccgcagcttcattcttgaa

SEQ ID NO: 1028138 - DNA, 120 bp, Artificial Sequence
  ENSG00000250198_64 (sequence is synthesized)
cgcaatgggttcatttcttttttttttttttttacaaaagtcttctctgtgctgacttaaggggacactttgtgtcacttccagggaaggatgcgctggggtcccgacattctgtcaggg

SEQ ID NO: 1028139 - DNA, 120 bp, Artificial Sequence
  ENSG00000250198_65 (sequence is synthesized)
tccaaacaccctcgttcctcatccagggcatggagcacctgagtaggatggaacatttgggaaaaaccccacctcagtcccaggcccggcagcctgaggagatctaaggctggctgggca

SEQ ID NO: 1028140 - DNA, 120 bp, Artificial Sequence
  ENSG00000250198_66 (sequence is synthesized)
ttcgagctgtaagagcagggagtgtttactgcacccaggagaggtgatcaggacacaatttcactatttctggttgttttagaatcaggttcctttgtctccttattttacctcagttac

SEQ ID NO: 1028141 - DNA, 120 bp, Artificial Sequence
  ENSG00000250198_67 (sequence is synthesized)
attttccaagatcctaggactcacagaaggatgcagtcggtgggggcagagtgctgtaccagggcctccagacatggtttctagacactggctcatgtgatggcaccagggcccccagcc

SEQ ID NO: 1028142 - DNA, 120 bp, Artificial Sequence
  ENSG00000250198_68 (sequence is synthesized)
atggtttctagacatttggtcataccatggccttggttgatgaccccatccatcggatttcatcctcctcaaaacgaaacagaaggtttagcccagcagatctctggagtctgtgatttt

SEQ ID NO: 1028143 - DNA, 120 bp, Artificial Sequence
  ENSG00000250198_69 (sequence is synthesized)
cagatgagagcccaattgatggtgaagcataacaagagtacggttgatttcattccttcagcattcacttattccatgtgtgtgtaaagcctgatctgtgttggagagctcagcatgcag

SEQ ID NO: 1028144 - DNA, 120 bp, Artificial Sequence
  ENSG00000250198_70 (sequence is synthesized)
acatgacgtgatggagctgtggctctacagttacccctcaccatagtaaacagatgcacaattacttttgattatgttcgtgtaataaaggtagttaaagttcaacatttatcagaaaaa

SEQ ID NO: 1028145 - DNA, 120 bp, Artificial Sequence
  ENSG00000250302_0 (sequence is synthesized)
acatcagagttctactcctaataacaaatgtttaatttttaatgaaatattcaagcctcatgttttccaacagaacacaaatgtgacatgacgcttctccacggaagcaacaagtgtggg

SEQ ID NO: 1028146 - DNA, 120 bp, Artificial Sequence
  ENSG00000250302_1 (sequence is synthesized)
gttaagcagggagaacgaaggtggtaacagaggccggtgtcaagggagtgtgaaggtttcagagagtgattcatcctaaatcctgcttctccctatatggcatgtaaacccttccagatt

SEQ ID NO: 1028147 - DNA, 120 bp, Artificial Sequence
  ENSG00000250302_2 (sequence is synthesized)
cctggaaactacatcctggttgtttatctcagcaaggtgagccgtcgaccgaaggctcgtgaccactatctcgaaaagcaggctttaagcagtcttgaatttgaatctgagctcctcact

SEQ ID NO: 1028148 - DNA, 120 bp, Artificial Sequence
  ENSG00000250302_3 (sequence is synthesized)
ttaagcatgtctatgaatcttctgagaccatctcctcatctgcaaaattggggacaagacttgctgcttatcaatctttgcagtagagggaattctgtggcaggcagctatcagacttga

SEQ ID NO: 1028149 - DNA, 120 bp, Artificial Sequence
  ENSG00000250302_4 (sequence is synthesized)
actgcaataccggctcttcctggctttccagcttgtgggccccgcctccataatcatgtgaaccatttccttaaaatcaatcaccccctgtgacttatttatatatatatgtatatgatc

SEQ ID NO: 1028150 - DNA, 120 bp, Artificial Sequence
  ENSG00000250302_5 (sequence is synthesized)
tgtttctctggggaaccctgactaatacaatgatctaaaccaattttctgttttgattttagctttgtattacggcaatttgctatctatccaaaaatcaataaaatagaattaaaaact

SEQ ID NO: 1028151 - DNA, 120 bp, Artificial Sequence
  ENSG00000250302_6 (sequence is synthesized)
gtgctcagggctgggtaatttcctcccgctcaagggtaggaacatacctgcgcttaaaactgaggctgccgcacctccgcagacgtagacaacgaattcctggagcccaaggtcggccgg

SEQ ID NO: 1028152 - DNA, 120 bp, Artificial Sequence
  ENSG00000250302_7 (sequence is synthesized)
ggttgggttcctgtcgccgcacgcgtggcccgcccgaaacccgctacaaagtagcggcgtgtctgccctagggaggcaaagcgcaaacttgttaccgcgccgggacctgccccgggattc

SEQ ID NO: 1028153 - DNA, 120 bp, Artificial Sequence
  ENSG00000250302_8 (sequence is synthesized)
cgggattctcccagcggctccgcaggacgcagcgcctgtgcctcgcgcggccctgggacgggcacggccgtccgccccctgggccgccgagggctgctttacccctccgttctggccgcg

SEQ ID NO: 1028154 - DNA, 120 bp, Artificial Sequence
  ENSG00000250302_9 (sequence is synthesized)
aggagctcggggcgggcaaagctcgaggggacacggggcgagcccagaccctgcctgggagccctccccgccggagaccaaagggcagaaacgcactcacagtgcaactccgagggataa

SEQ ID NO: 1028155 - DNA, 120 bp, Artificial Sequence
  ENSG00000250302_10 (sequence is synthesized)
actggccgacgatcgccgccaggccagaagaccaagaagaaggctcgcggcgggaactgaagtattcagcacgccttcatcaggtgtgtactctgtgccaggcaatcttctaatccttaa

SEQ ID NO: 1028156 - DNA, 120 bp, Artificial Sequence
  ENSG00000250302_11 (sequence is synthesized)
atggacgaaacaaaggcctcccttggactgacatttttaatgaagaataaaaacccataatgaaatataaaaatattaacgttataagagctaagggaaaaaacatgtgttacaacttga

SEQ ID NO: 1028157 - DNA, 120 bp, Artificial Sequence
  ENSG00000250302_12 (sequence is synthesized)
aaatacaaaaataggaaatcatctttctctgtggacgaatgaaacccctgattctaagaaacaaagaaacaaaactcatcatgactggtgttctgtactctttggaaaatacgttttact

SEQ ID NO: 1028158 - DNA, 120 bp, Artificial Sequence
  ENSG00000250302_13 (sequence is synthesized)
gtagaaatgactaaatgcgatgaaagactctttaccagaagcagtggctggttggcggcgcctgtacgcctgaggagcaccctttttgtgtccatgtttgataaagcagaagagacctaa

SEQ ID NO: 1028159 - DNA, 120 bp, Artificial Sequence
  ENSG00000250302_14 (sequence is synthesized)
cctgtaatgccagctacttgggaggctgaagcaggaaaatcgcttgaggcagaggttgcggtgaaccgagactgcgctattgcactccagcgggcaacaagagccaaactctgtctcaaa

SEQ ID NO: 1028160 - DNA, 120 bp, Artificial Sequence
  ENSG00000250302_15 (sequence is synthesized)
aacaaacaaacaaacaaacaaaaaaaaaaccacaagggccatcgctctggggcgtgggacatatggtccgcagttgggatactaactgttgtatggatgggggagtggtcctcaaaccct

SEQ ID NO: 1028161 - DNA, 120 bp, Artificial Sequence
  ENSG00000250302_16 (sequence is synthesized)
atgggggagtggtcctcaaaccctggagcttctcagtccctgcctctttcaacctctaaatgggcccactgcttttcccttcccactgttctgccggctggagcacccccagcaccagca

SEQ ID NO: 1028162 - DNA, 120 bp, Artificial Sequence
  ENSG00000250302_17 (sequence is synthesized)
gcgcggctcccacgcctctggtctgggctctgccagccccacgggtctaagctctccccaggccattattttttgtctcctctttcttcattgaggtcctctctctgtcacttgctcttt

SEQ ID NO: 1028163 - DNA, 120 bp, Artificial Sequence
  ENSG00000250302_18 (sequence is synthesized)
tgcctggctcaagacatgggtttaaacactgtttatactaccccttgctaatgttgactcactaccccatatctttttcttttttctttttttttccaagtagcactctttgagatgtcc

SEQ ID NO: 1028164 - DNA, 120 bp, Artificial Sequence
  ENSG00000250302_19 (sequence is synthesized)
ttttattgatgtttctttacacgttgtttttacatgcattacagtgtgatgaacatatccatccactgaaataacattattctcaactacgcaaaagaaagcaatactcttagaagaatc

SEQ ID NO: 1028165 - DNA, 120 bp, Artificial Sequence
  ENSG00000250302_20 (sequence is synthesized)
ctttctgcatatgtctttagacacttttacattcataacactggtcaccaacccatttctatgtttaagtaacttgactttttctccttctccctttctctacctattaaattcacattt

SEQ ID NO: 1028166 - DNA, 120 bp, Artificial Sequence
  ENSG00000250302_21 (sequence is synthesized)
gcccttgcccagagtcttcccgggattggctgcgggcctcgcgaccctcctgcttccctccccgccccgcgccgcctctctggtttgtgcgcccgtcgcaggtcgcaggcctctttgtca

SEQ ID NO: 1028167 - DNA, 120 bp, Artificial Sequence
  ENSG00000250302_22 (sequence is synthesized)
gctggagttgcgcgggctgacgcgccactatgtagcgggtttcgggcgggccacgcgtgcgggacaggaacccaaccccagccgaccttgagctccaggagttcgtctcttacgtctgcg

SEQ ID NO: 1028168 - DNA, 120 bp, Artificial Sequence
  ENSG00000250302_23 (sequence is synthesized)
gaagtgcagctgcctcagttcttagcgcagactcctgaagactctcgcttttagccatatgggtgaagggtgatctgcacatccattcatgctcttaatcagacaacagatccaaggccc

SEQ ID NO: 1028169 - DNA, 120 bp, Artificial Sequence
  ENSG00000250302_24 (sequence is synthesized)
gacactgctgtaaccatcagcacatgcttgaagatgatgctgacacagaggacagcaaagccagtcaagtcacaagcacatggagtcataggcactggatttaatacttttgaagcaggt

SEQ ID NO: 1028170 - DNA, 120 bp, Artificial Sequence
  ENSG00000250302_25 (sequence is synthesized)
taggcactggatttaatacttttgaagcaggttctacttcaggactttcagtgaggtaaatcgatcaatttccagactgagtctcactctgccgccaggctggagtgcagtggcacaatc

SEQ ID NO: 1028171 - DNA, 120 bp, Artificial Sequence
  ENSG00000250302_26 (sequence is synthesized)
gtcttgaatttgaatctgagctcctcacttcttggcttaagcatgtctatgaatcttctgagaccatctcctcatctgcaaaataccatagagagtggagccaagatggccgaataggaa

SEQ ID NO: 1028172 - DNA, 120 bp, Artificial Sequence
  ENSG00000250302_27 (sequence is synthesized)
acgggtgatttctgcatttccatctgagcactggtggtccggttcctcaccaaacgattcatcggtgactatgaaagaaatgcaggtaatctctatactagacaagttcagatagaaggt

SEQ ID NO: 1028173 - DNA, 120 bp, Artificial Sequence
  ENSG00000250302_28 (sequence is synthesized)
gaaaccctggctcttcaggttcaagacactccaggtattcaggtccatgagaacagcctgagctgcagtgaacagctgaataggtgcattcgctgggcagatgctgtggtgatcgttttc

SEQ ID NO: 1028174 - DNA, 120 bp, Artificial Sequence
  ENSG00000250302_29 (sequence is synthesized)
ggtcgtggccaacaaagctgacctgttgcacatcaaacaggttgaccctcagcttggactgcagctagccagcatgctaggctgctcattctatgaagtgtctgtcagtgaaaattataa

SEQ ID NO: 1028175 - DNA, 120 bp, Artificial Sequence
  ENSG00000250302_30 (sequence is synthesized)
tgatgtctacagcgccttccacgtcctctgtaaagaggtcagtcacaaacagcagcctagcagtacacccgagaagcgaagaacctccctcattcccaggcccaagtcacccaacatgca

SEQ ID NO: 1028176 - DNA, 120 bp, Artificial Sequence
  ENSG00000250302_31 (sequence is synthesized)
ggacctgaagaggaggtttaagcaagccctctctgccaaagtgaggactgtcacctccgtctgaagcaggaggagcactcaagggggtttggtcttcccaggaagagggcctgaggttct

SEQ ID NO: 1028177 - DNA, 120 bp, Artificial Sequence
  ENSG00000250302_32 (sequence is synthesized)
cctagtgcaggaacgttgaatattggcaatgattcctggttccagaaagggctggagcagaagggccaagagggcctgtggaactgctacagaaaaggaagtgttgttctgagcaggggg

SEQ ID NO: 1028178 - DNA, 120 bp, Artificial Sequence
  ENSG00000250302_33 (sequence is synthesized)
acaggattgatgaggcttgaaagagcccactgagccactctctgaatatgtgaaatgtactctgtgtcttttcctttagagtggggagggggcataatcgtttcggtttctgcattcaac

SEQ ID NO: 1028179 - DNA, 120 bp, Artificial Sequence
  ENSG00000250302_34 (sequence is synthesized)
taccttgtaaatggtggtccgttgcagtttcaccaaatgtattgatgtgatttacagtgggaatgaaagaacagattaagcattgataggctttcttttttcccccttttttcttttttc

SEQ ID NO: 1028180 - DNA, 120 bp, Artificial Sequence
  ENSG00000250302_35 (sequence is synthesized)
tcttttcttctttcttttcctctttttccccaagaggaagaattgcttttctcttaccagtatgatttgtaactctggaacactattcttacagaatgcctttctaacctgaaggatacc

SEQ ID NO: 1028181 - DNA, 120 bp, Artificial Sequence
  ENSG00000250302_36 (sequence is synthesized)
cagatttctttctttatgtacaagatggaaaatcccctacccctcaaaaacaggttgagtttatgggccagaatattttgtataccagacattggtaagctctcatggtttacaggaagg

SEQ ID NO: 1028182 - DNA, 120 bp, Artificial Sequence
  ENSG00000250302_37 (sequence is synthesized)
ctctggttccccctcacaggatgagcatgctcagttgggcgtgtgtggaggagctgtgaacttcacgctcttcaaccccagactttgactgtatagttttttgtttttttaactgttcca

SEQ ID NO: 1028183 - DNA, 120 bp, Artificial Sequence
  ENSG00000250302_38 (sequence is synthesized)
tcaggaaaaaaatgtgtcagttgattttggtgtgacttgtgtaaatggttcatggcaatgacgttgggttgcttcctaggcctggctgagttgtgcctaagggtggctgaaatactaaaa

SEQ ID NO: 1028184 - DNA, 120 bp, Artificial Sequence
  ENSG00000250302_39 (sequence is synthesized)
cacttatcttacagcaagtgaacaggggctacctgccacatcccctccacagatgcactttaaaaagccactcatgctttggcttaaactgtaattaatttattttatgtacaataaatc

SEQ ID NO: 1028185 - DNA, 120 bp, Artificial Sequence
  ENSG00000250195_0 (sequence is synthesized)
aggtgaaagaaaactaaagaaataccagtgcagaaaggaagttctttattttcaggttgctcaagctaaaacaataagcagcatttcatggatgactggcatgtcgccttttactcctca

SEQ ID NO: 1028186 - DNA, 120 bp, Artificial Sequence
  ENSG00000250195_1 (sequence is synthesized)
ccaggctgatccagccttgtctcgcccctctctgcaagagactcgtgggtacaggatgattgagggggccccagcctccccagcagctgctgacttgcgcttggaaattcaatcctctca

SEQ ID NO: 1028187 - DNA, 120 bp, Artificial Sequence
  ENSG00000250195_2 (sequence is synthesized)
aggcaagaatttctgacatgacatgggaaaagctgaagaagtcagtctttggggtgtgttttcatctaggaggtggcttgagatggattcatggcaaatcacaataaattatttatcaga

SEQ ID NO: 1028188 - DNA, 120 bp, Artificial Sequence
  ENSG00000250195_3 (sequence is synthesized)
gaatttctgacatgacatgggaaaagctgaagaagtcagtctttggggtgtgttttcatctaggaggtggcttgagatggattcatggcaaatcacaataaattatttatcagataataa

SEQ ID NO: 1028189 - DNA, 120 bp, Artificial Sequence
  ENSG00000250195_4 (sequence is synthesized)
gtagctgggattacagatgcgtgccacctcacccagttacatcttcctgaggatagagcctacatagaagttcagcaaatatctggtcttttccacacctgggaagatgtgggtataggc

SEQ ID NO: 1028190 - DNA, 120 bp, Artificial Sequence
  ENSG00000250192_0 (sequence is synthesized)
agtgattggcattctgcgtggtgaacagcaggacctagactgacctttggcattggggtaacagtggctgatgctactggtggaggaaccacaccttgagaagcactgatctaggcacct

SEQ ID NO: 1028191 - DNA, 120 bp, Artificial Sequence
  ENSG00000250192_1 (sequence is synthesized)
tccactcctctcagtctatagatgggaaaatggaaactcggagaggttggtgcttaccccacgtctcaagtttcctgctcctggagaagcaagacaccaggagattatggggtttccctc

SEQ ID NO: 1028192 - DNA, 120 bp, Artificial Sequence
  ENSG00000250192_2 (sequence is synthesized)
gacttgcgaacacaaatttatgaagtgacagctagtgtcatgatgctcctgcctcaagatgacctcccaacccagagcccggctgcttgggtgaaacattttcccctccctgaattgtct

SEQ ID NO: 1028193 - DNA, 120 bp, Artificial Sequence
  ENSG00000250192_3 (sequence is synthesized)
tgcaaaatgtaaacacacattgtcactccgaaggagttagtttatcagatttcttcccttggtgataggagggatctagggcaggctgagcagggaggtgaggtggaggatgacagaagc

SEQ ID NO: 1028194 - DNA, 120 bp, Artificial Sequence
  ENSG00000250190_0 (sequence is synthesized)
agaacaagaaaaggctctgaaacagatccaagatgttgtttgagccatgcaactagaagatctcatagaactaaagttatctaatttacagaaaaggttttacgtgacgtctattgtaca

SEQ ID NO: 1028195 - DNA, 120 bp, Artificial Sequence
  ENSG00000250190_1 (sequence is synthesized)
gattcatatgaaaaccatagttcaaactccaaggtttaagaagtaagaaagatcatgccatttgcaacaaacatgcatgcatatttgaaaagcaactgtaagtatgctattggacattgg

SEQ ID NO: 1028196 - DNA, 120 bp, Artificial Sequence
  ENSG00000250190_2 (sequence is synthesized)
taaagattgaatatctgaccatggcatatcaagaaaccatggaatgagtactgcttatcaagatctgggtgtgagaagacttaaaaagtcagatagtcagtgagaaccagctagaatcca

SEQ ID NO: 1028197 - DNA, 120 bp, Artificial Sequence
  ENSG00000250190_3 (sequence is synthesized)
cttttcacatgaaagtggctgtgctaatggtctatcaagatatcctgagtttccagtagagatgtttcagccataacacaggcctggtagaaaaagcctgaagacaaatactgctatgaa

SEQ ID NO: 1028198 - DNA, 120 bp, Artificial Sequence
  ENSG00000250190_4 (sequence is synthesized)
tggttacatctaggacttctgaaattagccccagattcaactcatttttttctgcatttgctgagcaatatgacatgtttacaccgattagctaaaaagttatgtgaagaatgggcaaca

SEQ ID NO: 1028199 - DNA, 120 bp, Artificial Sequence
  ENSG00000250190_5 (sequence is synthesized)
atatctctaaggcaagatatgttcagatccaatatagttcatatagaccttgtcagagtaaatgaccatgtgcctttcagaacactaaagaataaaatccttccacattagaatgacaaa

SEQ ID NO: 1028200 - DNA, 120 bp, Artificial Sequence
  ENSG00000250190_6 (sequence is synthesized)
attgagagaagaggatcaaactatttgaaccggattgctgtacttcaacatgtaaagtgaaaatgcagacccagttgactatatttcactcatttgggccaaagaagcagaagtttatta

SEQ ID NO: 1028201 - DNA, 120 bp, Artificial Sequence
  ENSG00000250190_7 (sequence is synthesized)
acaaagaaggagaataacaaaagaaatataagatggaaagaaaagcaaaaagaaagaaaactaaagaaaaagcaaaagaaagaatactaaatctgaaatacattttcgtccccaaatcaa

SEQ ID NO: 1028202 - DNA, 120 bp, Artificial Sequence
  ENSG00000250190_8 (sequence is synthesized)
aaggaaaaaagaaagaaaaaatcaattaatagaaaaaaaaaaaagacaggaaagaagacagacctctattttgcatggagatcattaaaaagcccgtattaaaagttactttgtggaggc

SEQ ID NO: 1028203 - DNA, 120 bp, Artificial Sequence
  ENSG00000250190_9 (sequence is synthesized)
gcaggaaagtcaaagctagaaatctgttgtgggaaaactagaagaccaaaaaaagcacgaaagtcaagaaagaagtctcttttcacatgaaagtggcctgaagacaaatactgctatgaa

SEQ ID NO: 1028204 - DNA, 120 bp, Artificial Sequence
  ENSG00000250190_10 (sequence is synthesized)
tgaaattgtgaccaataagaatcccagagaagttctgccctaatggagtcaacttgatttgagatgcaaatagatttgcgcaattgaaaaagtgggaagatgaagtgtttggagggcttt

SEQ ID NO: 1028205 - DNA, 120 bp, Artificial Sequence
  ENSG00000250190_11 (sequence is synthesized)
aacgtgattgtggttaataaaggcatttgcattattctcacggtctcctaaaaatagaaggcccagcacactatgcctgggaagtatctgcatgagatgagcaggcagagaggagagctg

SEQ ID NO: 1028206 - DNA, 120 bp, Artificial Sequence
  ENSG00000231332_0 (sequence is synthesized)
ggaagtggtaacctacgcagctgctccagggagtgggccggagtctgtttgccccgctgggactcagcggcaccagcatcatcgaccatactgggaccagcagccgcggagcgcgctcga

SEQ ID NO: 1028207 - DNA, 120 bp, Artificial Sequence
  ENSG00000231332_1 (sequence is synthesized)
cggggtgagcgggtgcaagcgacgccccggcatagcggcaccattggacacttcctgcgctgcttcaatcgccgggattgcctctttgaccttgaactagtattcatttggcctcctgtt

SEQ ID NO: 1028208 - DNA, 120 bp, Artificial Sequence
  ENSG00000231332_2 (sequence is synthesized)
accttgaactagtattcatttggcctcctgttgggtctccaatgctctccttcgtcatctctgctcgtaaggctggagtgtagtggcgtggtgttggctcactgcaacctccacctcctg

SEQ ID NO: 1028209 - DNA, 120 bp, Artificial Sequence
  ENSG00000231336_0 (sequence is synthesized)
ttgtccagagtcaaagatgctccactgaggctgtttcgcttagaaatatttgggagcctgctgtgctggaacagggtctcactggtgactgctaccacttcagggctggggtgctgaggg

SEQ ID NO: 1028210 - DNA, 120 bp, Artificial Sequence
  ENSG00000231336_1 (sequence is synthesized)
acttcagggctggggtgctgagggccgcacagctgtacccagcaaaaacactactgagaatgaaggcagggaacgtcaacgaacgtcaacgtggctggagtgcagtggcatgaacatggc

SEQ ID NO: 1028211 - DNA, 66 bp, Artificial Sequence
  ENSG00000231336_2 (sequence is synthesized)
catgaacatggctcactacagcctcaacctcctgagctcaagcgcctggctactttttgcattttt

SEQ ID NO: 1028212 - DNA, 120 bp, Artificial Sequence
  ENSG00000231334_0 (sequence is synthesized)
aggccaatttgagttgggttctgttaccctgaactgaaagtctctaaacaccaaaaaactgtggtggtgatgccaataagctaactgctcacaccagctctttatggcttcccagaggag

SEQ ID NO: 1028213 - DNA, 120 bp, Artificial Sequence
  ENSG00000231334_1 (sequence is synthesized)
caagcaacctaatgctgtagactggctggccttgtgctggaccagtgatgaagacagcaaacaagatactctggccctttagcctgaagaagaaaaaccaaaaccagattccatattctc

SEQ ID NO: 1028214 - DNA, 120 bp, Artificial Sequence
  ENSG00000231334_2 (sequence is synthesized)
caatccaggatcttgtcctatagtagtatgttgccaccacctgaacatcagtctagcagaccttttaccttattatgcagaaagcacacttggcatgaaaagaaagggtatcctcggcta

SEQ ID NO: 1028215 - DNA, 120 bp, Artificial Sequence
  ENSG00000231334_3 (sequence is synthesized)
gatttgcttctgtcatggctgaaaaggtgaagtgacccgctctgaaaacatgaagcccttggactctcaggtcactgcatagggtgttctaattagaaaaacaagtgtagcattttaccc

SEQ ID NO: 1028216 - DNA, 120 bp, Artificial Sequence
  ENSG00000231334_4 (sequence is synthesized)
accaacacagtggtgacatttggtgaagttctaaaaatctttaattattacttacactttacatatttaccaaaatgttatgtatctccttgatatttaataaaatcacttttaaaatcc

SEQ ID NO: 1028217 - DNA, 120 bp, Artificial Sequence
  ENSG00000265394_0 (sequence is synthesized)
atcagatccaactcctttagtttctcacgttttggcctttaagatgcggagatcacgggaggccgcatcaaaagtaaggattacacatcaaaggtaaaactttcaaagaactcgccaagt

SEQ ID NO: 1028218 - DNA, 120 bp, Artificial Sequence
  ENSG00000265394_1 (sequence is synthesized)
ctttcatcattttctgtagatctttatattcttgacacaacaacatcctattttggccgatgttaaaatcgaggactcccagagcctctcctgttctctcacgaagtggaactactatat

SEQ ID NO: 1028219 - DNA, 120 bp, Artificial Sequence
  ENSG00000265394_2 (sequence is synthesized)
gcgtttctccacaggcagaagccagaacaacttctgaactgtcagtacatttaaagaggaaatctctgaaatcaaaaccaaataagcacaaggatattaaacatctgtctgttcacatca

SEQ ID NO: 1028220 - DNA, 120 bp, Artificial Sequence
  ENSG00000255655_0 (sequence is synthesized)
atcttgcccaccctctaatgacacgttggactgcgcactgaacatagatcctgtcgagggtgtttagaattgcgccttcgggtgacctggggtctgcttccagaaggtgacattttaaat

SEQ ID NO: 1028221 - DNA, 120 bp, Artificial Sequence
  ENSG00000255655_1 (sequence is synthesized)
aaggtgccatggggcagctgaggagctgggattaggctttggcctaacgcccctcagtttcttcagatgtgatctgttagtgctgcgggcctggtaccttgaagaggtagctaactggat

SEQ ID NO: 1028222 - DNA, 120 bp, Artificial Sequence
  ENSG00000255655_2 (sequence is synthesized)
atccccacttcccctgtagtttcctcagttggagcaaaaatggcgatggtagaggtcagacgtcatcctctatcaggacttcctccggactgacacctgggagagagtcacacttcggtt

SEQ ID NO: 1028223 - DNA, 120 bp, Artificial Sequence
  ENSG00000255655_3 (sequence is synthesized)
tacagcccttccccgctccctttgcgcaaaaggaaacagttatcacctcaactgtcaccattagcaagacttgttcttccagtccagtgtcgaaaactattgtgccttcttttcccggac

SEQ ID NO: 1028224 - DNA, 120 bp, Artificial Sequence
  ENSG00000255655_4 (sequence is synthesized)
taataaaaaactgtaaacttaaaatacacaaagtgacacattactgacatactgtattttcttctctcaacctttggtctacagaagaaattcacttattaaattctactagtttcaaga

SEQ ID NO: 1028225 - DNA, 120 bp, Artificial Sequence
  ENSG00000255652_0 (sequence is synthesized)
agtcactgcctttctgtctttcctcctctctccgcagcccgggtcaaccagccgacggtggcggaacggcgggcaggtcggcggagttagatggccgcaaagaacccagagttgatctct

SEQ ID NO: 1028226 - DNA, 120 bp, Artificial Sequence
  ENSG00000255652_1 (sequence is synthesized)
gcaaagaacccagagttgatctctacaccacgccatcactgccaggggtgaggaaattctggcaccagtgattcagcactgtttttttctctctcttcagtgcctctttcagtgatatga

SEQ ID NO: 1028227 - DNA, 120 bp, Artificial Sequence
  ENSG00000255652_2 (sequence is synthesized)
gggattgctagatcagacagagccaattgatgatcagcagggcctgaaaatgccaaaaccctgaaacaactgaccttcgaaaacttcaacatccctgaacgaaacgtccaaacacattta

SEQ ID NO: 1028228 - DNA, 120 bp, Artificial Sequence
  ENSG00000255652_3 (sequence is synthesized)
tccaccaatcaaagaccctttatagtctgtgctctgtgcatctcagaagtctctctttaccacactgtctatatactgcatgagccattatatgaaactccaaggcatcttatactatat

SEQ ID NO: 1028229 - DNA, 120 bp, Artificial Sequence
  ENSG00000255652_4 (sequence is synthesized)
tttctcactaaaaataaagcattacagttcgcaagcaatgtacttccttttttacaaatgagatcgactttaatcttatcccctaataacattattttcatttacttccatctaaatata

SEQ ID NO: 1028230 - DNA, 120 bp, Artificial Sequence
  ENSG00000255652_5 (sequence is synthesized)
ctgtcctaagagagcaataagaaagagagttaaagctggagcttgaagaattgtacatggtccacagtgtggcctgacgtgcactgctcacctgagcttcatctgttaggtatgtcaggg

SEQ ID NO: 1028231 - DNA, 120 bp, Artificial Sequence
  ENSG00000255652_6 (sequence is synthesized)
aagataagcagggcgagagtgaccccaacagaggactccagatctctggcttccccatctgacaagtacacttcagtgaacaaagacttcagagctagatgacaagaatagccaaagcag

SEQ ID NO: 1028232 - DNA, 120 bp, Artificial Sequence
  ENSG00000255652_7 (sequence is synthesized)
tccaccagggaaacctgggcccagtgtacatcaatgcagagcatcaagcacagcataacaggtgttatagttgcctattcctgttcagagataactgcatcccacacactgtaaaatgag

SEQ ID NO: 1028233 - DNA, 120 bp, Artificial Sequence
  ENSG00000255652_8 (sequence is synthesized)
gaaatgcagagaagcagatgtaactgaaggagacagcaggagcaacaaggagggacaaccatgacctaggagggcaccatgccagagacgcctggaccccatgctaggctcagtgcccat

SEQ ID NO: 1028234 - DNA, 120 bp, Artificial Sequence
  ENSG00000255652_9 (sequence is synthesized)
cggagccccgaagcacgcagcaggtgtccctcccgagagaccactggtgcccgctgtgtcttcgggaggcgcccgtccccatctgcgggctttccaaggtgctgtgctggggtttgccga

SEQ ID NO: 1028235 - DNA, 120 bp, Artificial Sequence
  ENSG00000255652_10 (sequence is synthesized)
tccaaggtgctgtgctggggtttgccgagcccgggtcaaccagccgacggtggcggaacggcgggcaggtcggcggagttagatggccgcaaagtcttcctctgttgcccaggctggagt

SEQ ID NO: 1028236 - DNA, 120 bp, Artificial Sequence
  ENSG00000255652_11 (sequence is synthesized)
agcaccggataaaagcagcgaggctggggtccttccatggaggacagtgccttccagcagcccctgcgctgggcccgggggtgtcgtggagtccctggcttgcacccagggtgcatgtct

SEQ ID NO: 1028237 - DNA, 120 bp, Artificial Sequence
  ENSG00000255652_12 (sequence is synthesized)
agcccatgggggacaccccaaagcggcaagaagtcccccagtggaagggaacaggacgccagactccaaaggggacgttgaggcaatcaggggaaaaaattcccacggagaacagtgcct

SEQ ID NO: 1028238 - DNA, 120 bp, Artificial Sequence
  ENSG00000255652_13 (sequence is synthesized)
cgacggtggcggaacggcgggcaggtcggcggagttagatggccgcaaaggtgggcaggctcggtgtgataaggttccaactgggtctgatcgcttccgtccgcgagcgccgggtccacc

SEQ ID NO: 1028239 - DNA, 120 bp, Artificial Sequence
  ENSG00000255652_14 (sequence is synthesized)
catggcagaccaaagaacatacgatgagtactttgctaaatgccctgtttattctcccaaccgggctcataaaagtacggacacatttggtgggttgagagatctctatgtagtcgtgac

SEQ ID NO: 1028240 - DNA, 120 bp, Artificial Sequence
  ENSG00000255652_15 (sequence is synthesized)
cctgtaattatacttgacgagagcggtgatgacagacaggcggcacagaaatctgcccttctttggtgccaattgagcatggtgacaacagattaaaaatggcctatgtctcaagttgaa

SEQ ID NO: 1028241 - DNA, 120 bp, Artificial Sequence
  ENSG00000255650_0 (sequence is synthesized)
ctcttcccagagagccagggatcccaaggtgcaaagtttggagccaggggcaggctgagcctctgttctcctagttccagcctcggctctttaatgaaaattgtcagtcaagtaagactc

SEQ ID NO: 1028242 - DNA, 120 bp, Artificial Sequence
  ENSG00000255650_1 (sequence is synthesized)
cgtcatcaccttccagcaaagaatgagtggggagatctgagaatcgatactgaacagcttcagtactacgatgtcataatggggctgtgagctcagccgaaagccccccgcccagttttt

SEQ ID NO: 1028243 - DNA, 120 bp, Artificial Sequence
  ENSG00000255650_2 (sequence is synthesized)
atgccaccagatgacactgggatcccggaagacggaacactgtgtgcaacgggcaaagaacttttcaaaagggatttcaacctctgaccacctggagacaggcgactggcgctcattgta

SEQ ID NO: 1028244 - DNA, 120 bp, Artificial Sequence
  ENSG00000255650_3 (sequence is synthesized)
aatgcaccgacatgacagggaacagctgctggggaggtggagacgggtgccgggagagacaggaaaccccagaggcttggaaatccaggagccacaggaagcagtgagctttctgcggag

SEQ ID NO: 1028245 - DNA, 120 bp, Artificial Sequence
  ENSG00000255650_4 (sequence is synthesized)
tgggcaggcgcagtggtgctgggcacacgtggagctgcgcgtggaggagtccaggctgcagccgagggagctgagtagggcaaagttaggagtcgctgtttggatggcaagttcagaagt

SEQ ID NO: 1028246 - DNA, 120 bp, Artificial Sequence
  ENSG00000255650_5 (sequence is synthesized)
ccggtggagccaattcaccagcaggtcccggcagcaactcttctacaacagattcctgcccgtccctgtgccccatcgcccccctgccgtcaatctccacctcaagggagccagaccaag

SEQ ID NO: 1028247 - DNA, 120 bp, Artificial Sequence
  ENSG00000255650_6 (sequence is synthesized)
gtcaatctccacctcaagggagccagaccaagcctttctgtgtgtagcgcacatctctcctgcgtagagctcacctagtggcttccatagcttttttttttttttttttggagacagggt

SEQ ID NO: 1028248 - DNA, 120 bp, Artificial Sequence
  ENSG00000255650_7 (sequence is synthesized)
ctccagaaatggggttgtgatataaagacagggatatgagtgaagaaaacacagagccaccctggaaaggcaccctcttacgcacagtcggatggtctatggagactcacaatcatgtgc

SEQ ID NO: 1028249 - DNA, 120 bp, Artificial Sequence
  ENSG00000283215_0 (sequence is synthesized)
gtgcctgcctggctgcccctaccctggggctccctcctagcccccacctcacctactggctcactgagacagagccaaacatgaaagggaaggtgacggcctggccatagggcccaggaa

SEQ ID NO: 1028250 - DNA, 120 bp, Artificial Sequence
  ENSG00000283215_1 (sequence is synthesized)
aatgcagccaggattgaaggagatcccatcttgggtctaaaggaatgggggtgaagactgcatcttgtcgttccagttccaccccattctggcatgggaagcatgtgtgggcttctactc

SEQ ID NO: 1028251 - DNA, 120 bp, Artificial Sequence
  ENSG00000283215_2 (sequence is synthesized)
tatgggagattcatagcctcaatccttaaggaattctcaatctgaaaggaaaacacaaaccctgacctcagggagctcccagtttgacagtggagacagagaggccctgcatcaagtaga

SEQ ID NO: 1028252 - DNA, 120 bp, Artificial Sequence
  ENSG00000283215_3 (sequence is synthesized)
aaaacaacccccactgctctcaagcacacagcaatgaagatatgtatccttggtgctacaggcaaatgctgacgatacgacagtgaatacaacatgaaaaaacaagcacacttctcaccc

SEQ ID NO: 1028253 - DNA, 120 bp, Artificial Sequence
  ENSG00000283215_4 (sequence is synthesized)
acatgcaaggagcaactttttggcactcccattttgcagaagaggaaacagcctgcctaggtctgctgattcctgtcctgggcaagctaaagtcaatggagttcacaccccaagcaagag

SEQ ID NO: 1028254 - DNA, 120 bp, Artificial Sequence
  ENSG00000283215_5 (sequence is synthesized)
aagagcttgccctagccttcatccagcctcatgtgtctgcgatttggctagaaattgttcaggggaatcttaattagcattcacctgtggtgttgtgttaaaaaaacaaaaaaacaaaaa

SEQ ID NO: 1028255 - DNA, 120 bp, Artificial Sequence
  ENSG00000283215_6 (sequence is synthesized)
acacctcacttcaggttccaaagtctgagttggagtaaaaagattgttggaatccaggatccaccatacaactgctaagcctgtttcttcatctgtaaaatgagaatgacaatgtctacc

SEQ ID NO: 1028256 - DNA, 120 bp, Artificial Sequence
  ENSG00000283215_7 (sequence is synthesized)
tcataggataggtttgagggtagagtgtgttaaagaactcttaaggaccttttgtcagacccagcttgaccacaagattgagctgaatctgaataaacattctagaacactgccagaaaa

SEQ ID NO: 1028257 - DNA, 120 bp, Artificial Sequence
  ENSG00000283215_8 (sequence is synthesized)
tggaggtgctcttacagaagttctgagcctgattctgctgctgcttctccagctaaccttaggatgtgtccccatcgttaggtgatgcatgactctactctgacatcctctccagctttc

SEQ ID NO: 1028258 - DNA, 120 bp, Artificial Sequence
  ENSG00000283215_9 (sequence is synthesized)
atctgtttttatttttatgatgtgctgaagacaggacattgtatctgctcttccctctgtaagtcttgccatgccctttggccaaaggcaactcaaatatggacttcctactgtcaccat

SEQ ID NO: 1028259 - DNA, 120 bp, Artificial Sequence
  ENSG00000283215_10 (sequence is synthesized)
aagaagatgccccctgccttctctgctccccatcatgtaggaaagaagacacaggctgagccccgggaggagagatcaaagctttggatctgaaagagtggttccagcccagcagcatga

SEQ ID NO: 1028260 - DNA, 120 bp, Artificial Sequence
  ENSG00000283215_11 (sequence is synthesized)
acatggcctgggaatgtgttagacatgcaggttctcaggccccaccccacacctgctggatcaaaaactctgatttctgcacttgagcatacatcactcaagtttgagaaccactgcatt

SEQ ID NO: 1028261 - DNA, 120 bp, Artificial Sequence
  ENSG00000283215_12 (sequence is synthesized)
agagaacagaaaccctcaaccatagcatgcaggaacagcgaagccatgaagacacatccaggtctgaggaagtcattttagcctggaaaggaaaagaaggagggcatcatcggcataggc

SEQ ID NO: 1028262 - DNA, 120 bp, Artificial Sequence
  ENSG00000283215_13 (sequence is synthesized)
ctgggagccccccacactcagcactcctgaaagcgcacagacagggaggtctggggtctggaaaaacaacaggaatcttgggaattataaggctgagaaggaggtggggaggaggcaacg

SEQ ID NO: 1028263 - DNA, 120 bp, Artificial Sequence
  ENSG00000283215_14 (sequence is synthesized)
tgcctggctgctgctcagtcctcctcactggcagggggtcccagcagccttgttccccaggcccatgctgaatttgctagtgatgctggcattcccagctgtggttcggcaccaaggtcc

SEQ ID NO: 1028264 - DNA, 120 bp, Artificial Sequence
  ENSG00000283215_15 (sequence is synthesized)
agtgacccccctagacccagcccagggccatttccctaatagagacctaaccagagggccagagtttggggtgctgacgcattgactatgtaagggccccgacccactaccccatccact

SEQ ID NO: 1028265 - DNA, 120 bp, Artificial Sequence
  ENSG00000284240_0 (sequence is synthesized)
gttttgactggaaaagctggttttaaacactgacattatgaatgcttgggataagccattgaaatggctgcagacttaattggactaatgacccattgctgttatgcacaacactctgtt

SEQ ID NO: 1028266 - DNA, 120 bp, Artificial Sequence
  ENSG00000284240_1 (sequence is synthesized)
attcacagaaaattgacaaagccgtggaaacggtccacaaatatgaacccaggcacaaaggcttctgctctagaactcccttcttcttactcctgaaatgttggatgatgctatgggaaa

SEQ ID NO: 1028267 - DNA, 120 bp, Artificial Sequence
  ENSG00000284240_2 (sequence is synthesized)
gagatggatgggcccgggacatcttccccagtggctcttgtccacgggacacctggcttgtacccacagaaagttggcttccagccatgcttgagtgagaacagtgagggcccttgcctt

SEQ ID NO: 1028268 - DNA, 120 bp, Artificial Sequence
  ENSG00000284240_3 (sequence is synthesized)
cctacagtgagtactcgataaatgatcactgccattgtcacataataatgtggctattatgatcatggacagagcaaaaataagtgactatttttcaagagtctatttggtgtagacttc

SEQ ID NO: 1028269 - DNA, 120 bp, Artificial Sequence
  ENSG00000284240_4 (sequence is synthesized)
tccagaggcagaactgtggaataaaattatttctagtggtccctcccagccccttggctccataattctcccactttaatatgtgactagtaattaagaactatcttgaaattttgattt

SEQ ID NO: 1028270 - DNA, 120 bp, Artificial Sequence
  ENSG00000284240_5 (sequence is synthesized)
atggctgagaaatgatggaggaagcgagtgagactgaagagatgaagaaactgaggcacacagagagagacccggacgtggcattcccagcagtactcagatgaggaaactgagtcccag

SEQ ID NO: 1028271 - DNA, 120 bp, Artificial Sequence
  ENSG00000284240_6 (sequence is synthesized)
aggaatgaagtaacttgctgaagttcacccagcacatgctggagctggaaaaggaagaaagtaccggattccacactgggattgatatgtgtgggacaaaggtagctggttcagaaattg

SEQ ID NO: 1028272 - DNA, 120 bp, Artificial Sequence
  ENSG00000284240_7 (sequence is synthesized)
gagctgaaaaccttgagaagaggtcccttggaagtggcagcaatctggaggagagctttgggtttccaaaggccacagaatgggtgggaggcacaaaggcttctgctctagaactccctt

SEQ ID NO: 1028273 - DNA, 120 bp, Artificial Sequence
  ENSG00000284240_8 (sequence is synthesized)
ctggcccagagtctatcattatacttccaaattttattgagaaaatatttgaagccaaagagagattttcaatttgttgactttaaaagaagcattattcatattcatccaacaaatatt

SEQ ID NO: 1028274 - DNA, 120 bp, Artificial Sequence
  ENSG00000284240_9 (sequence is synthesized)
catttatcacttgctcacataaacagccctctgctaggtacaatggtgaagccaggtaagtacaaaatctctgtccccaggctgtctgtaatctagataaggaggaggtgagcatacatg

SEQ ID NO: 1028275 - DNA, 120 bp, Artificial Sequence
  ENSG00000284240_10 (sequence is synthesized)
tagaggtaaatatcaatggaggaggtacttgatcaaaatcaacttttttgagagttatttcaaagcgatttatggctaagtcttggaaaatatagattacagaaggatagaggtgagaga

SEQ ID NO: 1028276 - DNA, 120 bp, Artificial Sequence
  ENSG00000284240_11 (sequence is synthesized)
gacagacagacagacattgagagtgagagcaagaaagagaagaatgagaaggaatgagagaaaggaatgagcttgaagctggccttgagattgggtaggatttgaacagtcagagatgag

SEQ ID NO: 1028277 - DNA, 120 bp, Artificial Sequence
  ENSG00000284240_12 (sequence is synthesized)
gccaattccaggagggagagaaggtctgagtggaaaagagaaggcaaagatagtccaggtgtgttgtaagaaggggagccaattagcctgaggttagcagggaactgtccaggtacatcc

SEQ ID NO: 1028278 - DNA, 120 bp, Artificial Sequence
  ENSG00000284240_13 (sequence is synthesized)
ttggggcctaaggtagaaagaggaagggagggttacaggtcacggactataaatgtgtcttcacacattcacttggaccaggctcatcctagacttctcatggtcatcctggggaggcca

SEQ ID NO: 1028279 - DNA, 120 bp, Artificial Sequence
  ENSG00000284240_14 (sequence is synthesized)
tcatctgtcccttacaaagtggattttacaggcaactcagtcccaagccatcctcttgagatgtgtattttgaaagaaacgtggttaccaacatctctcaggcattggaaaaaaccattc

SEQ ID NO: 1028280 - DNA, 120 bp, Artificial Sequence
  ENSG00000284240_15 (sequence is synthesized)
actgcatgcatattggtgactagcacagttctgtccatttcccagaacttttactattactggaatgcctcctcttcactccctttcccaaggtcatgaagcctgccaggatgctgccat

SEQ ID NO: 1028281 - DNA, 120 bp, Artificial Sequence
  ENSG00000284240_16 (sequence is synthesized)
ggtaagaaactgaggcaaggttctgaggacaaccaatgattgagaggctgtttgatttctccttcctatagcttctaatctggttcctcagtgatttgtgtcctctacttatttgggatg

SEQ ID NO: 1028282 - DNA, 120 bp, Artificial Sequence
  ENSG00000284240_17 (sequence is synthesized)
atgcactcccagctttgtgtagcgcctggatagccaaagatagggcctagggaaaggtttcttagacaccaaataacatgtagatgatttatacataaatgagtcagaaatatggagatt

SEQ ID NO: 1028283 - DNA, 120 bp, Artificial Sequence
  ENSG00000284240_18 (sequence is synthesized)
aagttttcgctgagatgcacatgaattaaggagaaaagtgtttgaggcaatttaaaaagaaatgccatgaaacttaaagcatatggaaaataatacaagatgttggagaaatctctaaac

SEQ ID NO: 1028284 - DNA, 120 bp, Artificial Sequence
  ENSG00000284240_19 (sequence is synthesized)
ggatggggtttggcctaacaaatccttggagcccctccccatttcacaaaaaatctcttgatttaaaggaattaacttgactttagagactggctgaaaagggtctatggctccagcttt

SEQ ID NO: 1028285 - DNA, 120 bp, Artificial Sequence
  ENSG00000284240_20 (sequence is synthesized)
gactggctcatccccagtctaattgttcagattttaattttttttttaccttgttctgtggttcatgtctaaatactcaaagatgtttatattgcatacattcggctctaattggccctt

SEQ ID NO: 1028286 - DNA, 120 bp, Artificial Sequence
  ENSG00000284240_21 (sequence is synthesized)
aaaagaaggtgttgattagaatctgctcaacatcaacagctagctcacacaacattctgtaattactgtttattaatttagttcaagtggcatagttgaaagccctgttcagatgggaga

SEQ ID NO: 1028287 - DNA, 120 bp, Artificial Sequence
  ENSG00000284240_22 (sequence is synthesized)
agtaaattgtcactggtattgaatatgtaaattatgtgcattgtaaatttccatgaagaaatgtttaaagtcaaatgctgtgcacataaacccttctggttttatctaacccagcccttg

SEQ ID NO: 1028288 - DNA, 120 bp, Artificial Sequence
  ENSG00000284240_23 (sequence is synthesized)
gagtcgaatcaggtcttcactcagaaagcacacagcagagcaacctgtgggggctatgccattgtcccagggtggtgcatcttacctagagttcctaaaatgagattttgtaatcaagtt

SEQ ID NO: 1028289 - DNA, 120 bp, Artificial Sequence
  ENSG00000284240_24 (sequence is synthesized)
ttgttgtgtgtgttccctttttttatgaaacaagtcaacgctaatgtgccctctttatccttgttcacaaagcccttctgtggagttccccagcagattttctaaggatgtttggcaacc

SEQ ID NO: 1028290 - DNA, 120 bp, Artificial Sequence
  ENSG00000284240_25 (sequence is synthesized)
tagcaaattcccctctttccctgaggaagcttctagatgctgttgggtggcatgctgaaaacaacaggaattgaagacagcttttcttcagcaaatagctgaaataagttactgtgaatg

SEQ ID NO: 1028291 - DNA, 120 bp, Artificial Sequence
  ENSG00000284240_26 (sequence is synthesized)
tgtggggttttttcttcccccagagcattaaagaagatggcaggaactgggacatactctctagttgggcttgtttcctgaagcccaaacactatgatctcaggaagctgtattaaaggc

SEQ ID NO: 1028292 - DNA, 120 bp, Artificial Sequence
  ENSG00000284240_27 (sequence is synthesized)
tctgcagctcttcccaggagagggtgtggcttaatctggttgggataaccttattataccaaagattgtcttggattcttgctgtattaaggttgaattaagtgaaatttttctttaaac

SEQ ID NO: 1028293 - DNA, 120 bp, Artificial Sequence
  ENSG00000284240_28 (sequence is synthesized)
atcaaccaaaacatttttcttttttctgtcttaatggtgcttcgggcaagttacttaattgatctattccttggattccttacctataaaatagaaaaaatagtagtaccaatttcatga

SEQ ID NO: 1028294 - DNA, 120 bp, Artificial Sequence
  ENSG00000284240_29 (sequence is synthesized)
attgaatgcaaagattaagtgaaataatacctgtaaggtgcttaaaagacagcttgcccatagtttagggacaatacgtgttaactattatttgtccctgtaaaattttacatggttaca

SEQ ID NO: 1028295 - DNA, 120 bp, Artificial Sequence
  ENSG00000284240_30 (sequence is synthesized)
actgaaccccagaatgcttttgtatgttattataagatttccttttgtagaaatttctgattatttgagagaatcttaaatttacaactagtccaaaaagatacttttaaaaaattaggg

SEQ ID NO: 1028296 - DNA, 120 bp, Artificial Sequence
  ENSG00000284240_31 (sequence is synthesized)
atgaaaaccaaaggtttttgtaaacatgaaaatttaattattattttagtctttcttaaggttgaaaagagtagttgaggcaaaaagtacatctggctcctctgccactgaagcccacac

SEQ ID NO: 1028297 - DNA, 120 bp, Artificial Sequence
  ENSG00000284240_32 (sequence is synthesized)
gtgcccatttggggggctttctgtctttgtataagtttttcagcccagatgttggatgttttcaattttgccgaatctgactataaatgaactgaaaataaatggcccaactgttactgg

SEQ ID NO: 1028298 - DNA, 120 bp, Artificial Sequence
  ENSG00000284240_33 (sequence is synthesized)
attacctcatttgcttcacagcctaatgaatgctttatggctgagaaatgatggaggaagcgagtgagactgaagagatgaagaaactgaggcacacagagagagacccggacgtggcat

SEQ ID NO: 1028299 - DNA, 120 bp, Artificial Sequence
  ENSG00000284240_34 (sequence is synthesized)
atattcgttgggtgaaaggtgcctaggagatggcgtggcagagaaggaaaatgtgctggagtggaagaaaccagagcgagagaagctaacttgccggagtccattgcctggccaaagagc

SEQ ID NO: 1028300 - DNA, 81 bp, Artificial Sequence
  ENSG00000284240_35 (sequence is synthesized)
agggaaggacaaaaagctggactgagaagttctactttcactttttgttgtttttgttcctttatttaagaaaagcaacaa

SEQ ID NO: 1028301 - DNA, 77 bp, Artificial Sequence
  ENSG00000284240_36 (sequence is synthesized)
gggagactgaggtgggtggaacacctgaggcagtatgaaaaatacaaaggttagccaggcatggtggtgcacacctg

SEQ ID NO: 1028302 - DNA, 77 bp, Artificial Sequence
  ENSG00000284240_37 (sequence is synthesized)
caccaagatcgcgccactgtactccatccagggcaacagagcaagactccaaaaaaacaaacaaacaaaaaaaaaca

SEQ ID NO: 1028303 - DNA, 120 bp, Artificial Sequence
  ENSG00000284240_38 (sequence is synthesized)
aagaagaagaaaggaagaaaagcaacaagggagaaatgtcaagagagtgctaaaaggaagtgaaggcaaatgtgggagataagaattaattctttgtttctcttttctctctgagaatgt

SEQ ID NO: 1028304 - DNA, 120 bp, Artificial Sequence
  ENSG00000284240_39 (sequence is synthesized)
tagacctctgatctaattctccactgcttcctgctctttgtatctgtttttattattctctcccattaaaccataagcaacttgagggcagacaatcagttttactccttttatatccac

SEQ ID NO: 1028305 - DNA, 120 bp, Artificial Sequence
  ENSG00000283213_0 (sequence is synthesized)
gattcctaagtgaatgcctacaggacagttctcggtgaccatgtccagaacaggcataagtgacgatccccagtacttccctgagggaccacactggtaccttggatcagaaccctgcat

SEQ ID NO: 1028306 - DNA, 120 bp, Artificial Sequence
  ENSG00000283213_1 (sequence is synthesized)
cagaacaggcctaaatggccatggctaagaacacggctgagttgtccttcaacagcaatgccaatgccaattcaccatgtccgagtgttcacaaggctcctctcctggatgtaagctaat

SEQ ID NO: 1028307 - DNA, 120 bp, Artificial Sequence
  ENSG00000283213_2 (sequence is synthesized)
ttgtctatgtctcttctaaaatctcacacctgggactgcgcgaggaatttcagatatggattgaaaagttcaacaggactctcacctctcttttcttcaagagatgcttcaaaatgcagt

SEQ ID NO: 1028308 - DNA, 120 bp, Artificial Sequence
  ENSG00000283213_3 (sequence is synthesized)
cttgattctggatggctgtatgcctggctaacactttgagattttggtatcaagaaagaactaaagaatggttatggaggacaactagtaatccttgccatccttggacaaacagttttc

SEQ ID NO: 1028309 - DNA, 120 bp, Artificial Sequence
  ENSG00000283213_4 (sequence is synthesized)
cctcttttattcccatgtggtttgtatgggttgaacatagttcaaagacaggcatatgaccaagcctgacatcatcactttctaattatatttcaagaactgaaagtaactcaaatcttt

SEQ ID NO: 1028310 - DNA, 120 bp, Artificial Sequence
  ENSG00000283213_5 (sequence is synthesized)
ctagtgagaataaaccacacaacatttgtgaaaactattggaaaagagaaacttctttttctgagatgatgaattaatctaaaataagcctgaagcttccaatggtcatctctgctatca

SEQ ID NO: 1028311 - DNA, 120 bp, Artificial Sequence
  ENSG00000283213_6 (sequence is synthesized)
agaggagaaaccaacaataaagccaacaaagaggagagcagaactgatggagggagaattagattcctgataatatcctttgaacctctgaatctagccatgcggaatgcatggaccctg

SEQ ID NO: 1028312 - DNA, 120 bp, Artificial Sequence
  ENSG00000283213_7 (sequence is synthesized)
gactttattgctgcagtgattagctatctttctgttagcacttgcaactgaaagagtgctgaccaatacaacaaacaaacaaaaagagttgctccctccgttgcaaggaatagataccat

SEQ ID NO: 1028313 - DNA, 120 bp, Artificial Sequence
  ENSG00000283213_8 (sequence is synthesized)
tttaataaaaagtgttggaggtgggggggcttattttgaaggatatgcatgtatcaggactgcaacccttccaaatttgagacagtcataggatccagttactttcttcaacttctctac

SEQ ID NO: 1028314 - DNA, 120 bp, Artificial Sequence
  ENSG00000283213_9 (sequence is synthesized)
ttttcttgtatcttatttattttgcttctcattcttaactgccattgctctttatttatgaaacagtaagggttactagaagtgaaaaaaagagatttgggatatcttacacaggaaagg

SEQ ID NO: 1028315 - DNA, 120 bp, Artificial Sequence
  ENSG00000283213_10 (sequence is synthesized)
aactttggggtagctcacaaaattaagaagaaggctggagaactgggctcaaatagaatagcaaccaaagagcacattacactctctttcttttctttttctgagtccatttctctttca

SEQ ID NO: 1028316 - DNA, 120 bp, Artificial Sequence
  ENSG00000283213_11 (sequence is synthesized)
cattagcattctcttgaatcttccttcccactctaatgccctgcattcaagactttgaatttaaaatcataaaataggaaattttcttccccttcagtctttgggcctaatcaagccttg

SEQ ID NO: 1028317 - DNA, 120 bp, Artificial Sequence
  ENSG00000283213_12 (sequence is synthesized)
ttattcagttttatttcagtgtgtaagcttcaaatctgttccctaaagcagagttttgcaaaaatgtgagaaaatgtcccaaagagggtgactcctatgaggcaaaggacagtgaagtgg

SEQ ID NO: 1028318 - DNA, 120 bp, Artificial Sequence
  ENSG00000283213_13 (sequence is synthesized)
agccacatggtctgcagggtctgtgaggtacaaagtttgcatctgaatcagaggatgtgcatatatctgctacatttaggaaagaggttgagagcgagaatgagagatttcagttgtgct

SEQ ID NO: 1028319 - DNA, 120 bp, Artificial Sequence
  ENSG00000283213_14 (sequence is synthesized)
tcattctttggataaaatcagagggtaaaagctcaaggggcttccagatactgcctgtagaaatgatccaaatctagaagaccggagacctggttgatttttaagaactctataagattc

SEQ ID NO: 1028320 - DNA, 120 bp, Artificial Sequence
  ENSG00000283213_15 (sequence is synthesized)
caaacgctttgttattctccatgtaggtgacttctgtttttgccagaaataataggtaccatttattgagcatttactcgcatcatggactggtgcatttagatgcattacttaatttaa

SEQ ID NO: 1028321 - DNA, 120 bp, Artificial Sequence
  ENSG00000283213_16 (sequence is synthesized)
tagtctcaataaaccaataaagtaggcattattattattatccctattttataaataaggaaagtctcaagtaggttgaattttccatgttctacagatgttacaggctgagggaggggg

SEQ ID NO: 1028322 - DNA, 120 bp, Artificial Sequence
  ENSG00000283213_17 (sequence is synthesized)
aaattagttcaaaaaaagcattaatgtggagatccaggatcaggtttactcatcttataatcttcttgtgggtcagtactgtttagcacctccacctcttatcctgcattatttaaacca

SEQ ID NO: 1028323 - DNA, 120 bp, Artificial Sequence
  ENSG00000283213_18 (sequence is synthesized)
cactatcttatctcacccaaccttaccatcttgtcttcttcatgcaactgtgaactccttggggacagggacaaaatgacaagttccaactcagtctagctcttggaatttgggcttcat

SEQ ID NO: 1028324 - DNA, 120 bp, Artificial Sequence
  ENSG00000283213_19 (sequence is synthesized)
catgttgggactcctcccttggtttctttatccccttctccttcttcgatggaccactaactattacccacgttggggcttccaaggaagaactaacatttcatttccaaatatatccag

SEQ ID NO: 1028325 - DNA, 120 bp, Artificial Sequence
  ENSG00000283213_20 (sequence is synthesized)
catggattatttgtaatggcaaagatgatactaagcctgttcacttgcacaataatacagtagggctgacctagtaatgcaccctctcccctaattttccttttatctggaagcagataa

SEQ ID NO: 1028326 - DNA, 120 bp, Artificial Sequence
  ENSG00000283213_21 (sequence is synthesized)
aaatgacactactgaaccagaggtgagcacaattgtcatcaattttctaaaaaacagaccttaatggtataggatggaatgaatggaagaatatctagctatagagaacaatatagggag

SEQ ID NO: 1028327 - DNA, 120 bp, Artificial Sequence
  ENSG00000283213_22 (sequence is synthesized)
atatctttattgttttgtactgatttttttgtttccctttaacatttttgttatataggtaatatatcttcagtgtagaaacaatgaaaatactgagaagaaaaaagaaaaaaggtcctc

SEQ ID NO: 1028328 - DNA, 120 bp, Artificial Sequence
  ENSG00000283213_23 (sequence is synthesized)
taaatcataacacccagaaataactattgctaatattttatttacatccttccaattataaatgtatttgtatgtttgtttgcttatggctcagcccatacctactgttttgtaaagttt

SEQ ID NO: 1028329 - DNA, 120 bp, Artificial Sequence
  ENSG00000283213_24 (sequence is synthesized)
tgatttttttcagctttgtaatagtgtgactctattccatgccattaaacacagacttatgtaataatgagcctagtacttttagaaagagaaaataactttatactgaaaatgctagat

SEQ ID NO: 1028330 - DNA, 120 bp, Artificial Sequence
  ENSG00000283213_25 (sequence is synthesized)
gtaaggatggtgtgagtctgcagctaccacgaatggagaaaatctaacctgcatgtgcattaactcagtacagaagtaagcagagtgacagtgaaaggctgtcttgaaataatgcttgaa

SEQ ID NO: 1028331 - DNA, 120 bp, Artificial Sequence
  ENSG00000283213_26 (sequence is synthesized)
tccctggatccagttttgcctaaagctctctctttaagagtcagtaaagcatagtggttaggagtgcagtctctggaagcagactgcctcggttcaaatcttggctctgctgctaggatt

SEQ ID NO: 1028332 - DNA, 120 bp, Artificial Sequence
  ENSG00000283213_27 (sequence is synthesized)
taacagggtaataaatgtcattcacttagaacacagtctggctaacaataggccctcaataaacattagccattatcatgctgaacatttttcaattacatccatcaataaatttttttg

SEQ ID NO: 1028333 - DNA, 120 bp, Artificial Sequence
  ENSG00000283213_28 (sequence is synthesized)
gcttaagccatttcgactgatatagatatgtacttttcaactagacatacatcttttgaccaacttgaaaattttattaaaaacaaaataaaatcattttctgttctcagtaatcactta

SEQ ID NO: 1028334 - DNA, 120 bp, Artificial Sequence
  ENSG00000283213_29 (sequence is synthesized)
agacccctcttgctttgaatccaatgtatctccttggtattttaaatgtttctagggaagaaaccaaatatcctctctggacatagctcatggcaggtgttcaataagtgcttattggat

SEQ ID NO: 1028335 - DNA, 120 bp, Artificial Sequence
  ENSG00000283213_30 (sequence is synthesized)
aaatagacagataataccttcaaacacccctttgcctgaaggacaacaattttagccatgaggacatggtacaacttatcttaaaggaccaaattctctgtttattgatcacctccttca

SEQ ID NO: 1028336 - DNA, 120 bp, Artificial Sequence
  ENSG00000283213_31 (sequence is synthesized)
tgtcctctcttccctctttattcagccaagattccatggataaacacggtaatcaacttttcgcttataaccatcaactccttgaccctctctcactgtgctgtatttcttgggttaaga

SEQ ID NO: 1028337 - DNA, 120 bp, Artificial Sequence
  ENSG00000283213_32 (sequence is synthesized)
tcaactttcttcccactcaatgtctgcacccgcacaaccgaacacagcgaatgtacaagcatgacgactagtctcacttaaaattcatcatttctattctcaagagggcccttaacactt

SEQ ID NO: 1028338 - DNA, 120 bp, Artificial Sequence
  ENSG00000283213_33 (sequence is synthesized)
cctagcaatcatactatgtttcctagtccattcattctcaggctgtatatagctacttagcaccctccctcctctttgcaaacctctaacgctttctccactatccccatcagccaatgg

SEQ ID NO: 1028339 - DNA, 120 bp, Artificial Sequence
  ENSG00000283213_34 (sequence is synthesized)
ccttgcctttactttactggtaaaatagaagaaatcagaagagaatttttacgaccacctctactcacctacctgcatctgtgttcatatactttattttctctcttgttagtatgattt

SEQ ID NO: 1028340 - DNA, 120 bp, Artificial Sequence
  ENSG00000283213_35 (sequence is synthesized)
ttttctctcttgttagtatgattttgttatggtctgtttgtttttttattttttaattttatgagtacacagtaggtgtatatatgtatggggcgcatgagatgttttgatacaggtatg

SEQ ID NO: 1028341 - DNA, 120 bp, Artificial Sequence
  ENSG00000283213_36 (sequence is synthesized)
agaatgaggtattcatcccctcaagcatttatcctctgtattacaaacaatccagttgcactcttttagttatgtttaaatgtacaattaagttattattgagtatagtcaccctgttgg

SEQ ID NO: 1028342 - DNA, 120 bp, Artificial Sequence
  ENSG00000283213_37 (sequence is synthesized)
gctatcaaatagtaggtcttatttattctttccagctactttttcgtacccattaaccatccccaccttcctcgctccacacacaccccactacacttcccagcctctggtaaccatcct

SEQ ID NO: 1028343 - DNA, 120 bp, Artificial Sequence
  ENSG00000283213_38 (sequence is synthesized)
tctactctctgtgtgcatgagttcaattgttttgatttttatatcccacaaatcagtgagaacatgagatgtttgtccttctgtggctgaagatcacttaacataatcatccccaattcc

SEQ ID NO: 1028344 - DNA, 120 bp, Artificial Sequence
  ENSG00000283213_39 (sequence is synthesized)
acaaggacactccccccgctctcgacatctcgccaaatggacacacacagcccggaatcggacaccgagcgcacgcacgccctggactgggacacgcgctgtagacgggatgggtggagg

SEQ ID NO: 1028345 - DNA, 120 bp, Artificial Sequence
  ENSG00000283213_40 (sequence is synthesized)
agccgagcgtgagtgagattccgtgactattcacccagcttcttagcccccagcgcgctgactcacaccccggcggctcgctctgtctcgcacctatgaggcacgcgcgcaccccaaccc

SEQ ID NO: 1028346 - DNA, 120 bp, Artificial Sequence
  ENSG00000283213_41 (sequence is synthesized)
attgtcaccccacctctccccgggcctgccggagagcgagccccggagcggcagactccgcgtcaggagggttcctctcttagcagccgccgcctagcggtagactgctccccggggagc

SEQ ID NO: 1028347 - DNA, 120 bp, Artificial Sequence
  ENSG00000283213_42 (sequence is synthesized)
tcacactgctgacatctcaaacttgcagccaagtaacatctctaaatgtttcttacaagtgctgctgattaaggcacagctaccccatactgtgcttgtacagtgggcctttttggaccc

SEQ ID NO: 1028348 - DNA, 120 bp, Artificial Sequence
  ENSG00000283213_43 (sequence is synthesized)
aatgtgtaggtccttatagatttgacttgattgcatttcatcttgtctcatcagttcgctgccctagttttttttaaatgtctatttgaagtcaaaccacgaggtagctttcatttattc

SEQ ID NO: 1028349 - DNA, 120 bp, Artificial Sequence
  ENSG00000283213_44 (sequence is synthesized)
aaaaagaaaaagtagaaagattgtatcccagctttaccctttattccaggtgtactttgggcaagtggaccccctttaagcctcaggttcctcagctgtaaaatgggacgctatgattca

SEQ ID NO: 1028350 - DNA, 120 bp, Artificial Sequence
  ENSG00000283213_45 (sequence is synthesized)
ccttaaaagtctctcaaagtttagatgttgcatgattctatgattccattacccaaagcatgaaccactcacttggcatcatgtaatttccacagttgatcacaatttaattaattcctc

SEQ ID NO: 1028351 - DNA, 120 bp, Artificial Sequence
  ENSG00000250220_0 (sequence is synthesized)
ggccgaaaggcgaaagtgagatttcaagggccgggtctggggccccgcgggcgcgcagtgctgcggcgtgtggggagtacggggaggctggagaggagccggccccgggcagtgtgaggt

SEQ ID NO: 1028352 - DNA, 120 bp, Artificial Sequence
  ENSG00000250220_1 (sequence is synthesized)
gcggaagcgcggtccagacactttgctgacgggaggccggtccgccagatccgggaggtggggcctcgttctggactgctgattttcttcacagaaatcatgccgtctgtgaatgaaggg

SEQ ID NO: 1028353 - DNA, 120 bp, Artificial Sequence
  ENSG00000250220_2 (sequence is synthesized)
aagtgataagaaacagaggcaaatgcaggttaaggaacctcacagtaagggataaaactcatattttaacctgatctgcctgattctggagcctgcaccatcattccattgtcgtgcttg

SEQ ID NO: 1028354 - DNA, 120 bp, Artificial Sequence
  ENSG00000250220_3 (sequence is synthesized)
ccacatgtctctttgaggcttgctaaaattgatatccatgagttctatcaattctgggacagagaacaaattgtgttctgtaaggatggagggacagcgaggaatttgccaagacatttt

SEQ ID NO: 1028355 - DNA, 120 bp, Artificial Sequence
  ENSG00000250220_4 (sequence is synthesized)
ggagtttctgaaataaaacccacttgatcccttctatgttcatctcctgcgctggatttgattcattaatattttatttcagtttttaaatctgtatctataaatgacattcacacacca

SEQ ID NO: 1028356 - DNA, 120 bp, Artificial Sequence
  ENSG00000250223_0 (sequence is synthesized)
ctcccctgaattcatttgctgtggcaaatatggcttccttaaaatctgctgtttatgaaaatacaggacacaacaaaaagacagctgtctgcaagtcatgaagacagccattaccaggaa

SEQ ID NO: 1028357 - DNA, 120 bp, Artificial Sequence
  ENSG00000250223_1 (sequence is synthesized)
ccaaactgaatggtaccttgatcttgtgcttttcggtctcgagagctgtgagaaacaaatgcctgctgttcaaattgtccagcctatggtattttgttacggcagtctgagctgaccaag

SEQ ID NO: 1028358 - DNA, 120 bp, Artificial Sequence
  ENSG00000250223_2 (sequence is synthesized)
ataaccggaaacctagaaaaaaaactgagagactagataacacatgctccagaaaaaaaagtacttgatccagaaaaagttgaggaaggagatatctttttcagttgtgcgtcaatttca

SEQ ID NO: 1028359 - DNA, 120 bp, Artificial Sequence
  ENSG00000250223_3 (sequence is synthesized)
tttacagaggaacacccaagtaatggtcacaggaattgaagagcttgcaagggtcaagcgctaatcagtgatggaacttggttttaaactccattatttcctgcagcagagtctacatcc

SEQ ID NO: 1028360 - DNA, 120 bp, Artificial Sequence
  ENSG00000250223_4 (sequence is synthesized)
tcaaatgtttcaccatgccatctacagtctgatgtgctttccagatttctcaccattccacttgatctcctttaaatgactttgatttgagagtgtgcatcttcaaatatagtgctcaga

SEQ ID NO: 1028361 - DNA, 120 bp, Artificial Sequence
  ENSG00000250223_5 (sequence is synthesized)
actggatgcaatgctcacaatatcatgtgaccagcactaagtcgatacaagtttattcctttgaatttgtcctggcgtttgacaaggatattgtggatattaaagatatttatttcacaa

SEQ ID NO: 1028362 - DNA, 120 bp, Artificial Sequence
  ENSG00000250222_0 (sequence is synthesized)
cccggcagagggctccgcgaagacagtgccgtcgttgggcgcgcgcgcgggcgggagctgtcggggcggggcggcaccgccgagctccgagctttccagaagcaaaaacaaaaaaagttc

SEQ ID NO: 1028363 - DNA, 63 bp, Artificial Sequence
  ENSG00000250222_1 (sequence is synthesized)
agtctcttaaaagaaaattaaaaagaaagagtaaataaagttccagaagctttgctctcctta

SEQ ID NO: 1028364 - DNA, 120 bp, Artificial Sequence
  ENSG00000250222_2 (sequence is synthesized)
aggattggggagcacgttttgcgtcttgctgtgcgtgaggaagcggggatccaggtcaaggctatggaaaggcaggactttgaaatgaccctgtcctcagcctggaggatgcggtattct

SEQ ID NO: 1028365 - DNA, 120 bp, Artificial Sequence
  ENSG00000250222_3 (sequence is synthesized)
tctgggatagtgttgtggctgccccacgagaaccctatatgccagttccagaagcaaaaacaaaaaaagttcgggtacagcggctcacacctgtaatcccagctcttagggagatggaaa

SEQ ID NO: 1028366 - DNA, 80 bp, Artificial Sequence
  ENSG00000256101_0 (sequence is synthesized)
gattataagttttctaattatgtaagtcaaaagtagaaaaagggacacaaactaagaagggtgctgagcgctcgtcacct

SEQ ID NO: 1028367 - DNA, 120 bp, Artificial Sequence
  ENSG00000256101_1 (sequence is synthesized)
cttcttcctgccacggtcatgattgagaggcaatgggtggcgagcctacaggggacgtcgtcgaggagacatgggataactttaagggagaagacagacaaggggaggggttcctgtgat

SEQ ID NO: 1028368 - DNA, 83 bp, Artificial Sequence
  ENSG00000256101_2 (sequence is synthesized)
tccggctcagattgagctatgcctgatgctgccttaagccttatgaggtcgccaaggaaccgcagaaactcctggagggcaga

SEQ ID NO: 1028369 - DNA, 120 bp, Artificial Sequence; identical to SEQ ID NO: 972366
  ENSG00000256101_3 (sequence is synthesized)

SEQ ID NO: 1028370 - DNA, 120 bp, Artificial Sequence
  ENSG00000256101_4 (sequence is synthesized)
caggatgaatgaataaacacatggataggcactttgaactacagatgagtttaaatactttgtgtttttcttagtcaaacatgtgcaattaagcatgtgataaatgatatgatgaccaca

SEQ ID NO: 1028371 - DNA, 120 bp, Artificial Sequence
  ENSG00000256101_5 (sequence is synthesized)
aactttaagggagaagggtttaaggagtgagagcagagccaagtcctggagacgctgaacttgctgtcgcaccggaaaacgagatgtgcggggtagggggcagggacaaggtggaaaagg

SEQ ID NO: 1028372 - DNA, 120 bp, Artificial Sequence
  ENSG00000256101_6 (sequence is synthesized)
tactcggatcatttttaagatgggagagtagccacagaggaacagagtaagaatctaaacgaagtaaagcagtacgggcgtacatttctttacatagtgttctacttcagggcacaggaa

SEQ ID NO: 1028373 - DNA, 120 bp, Artificial Sequence
  ENSG00000253559_0 (sequence is synthesized)
gctagcgagcggcatgcttagtgaagaaaagcttaaaggccgtctttgcccaaaacgctctctgtgcgcacctgcatttcccccagatttgcagatggagtctcactctgttgccaggct

SEQ ID NO: 1028374 - DNA, 120 bp, Artificial Sequence
  ENSG00000253559_1 (sequence is synthesized)
ggcatgagccaccacgcctggcccaaatcctatttttcaatatttatttcctaattatgtcctactaggttaggttttattttcatttgttacatatttattgggttatttcctttatgc

SEQ ID NO: 1028375 - DNA, 120 bp, Artificial Sequence
  ENSG00000253559_2 (sequence is synthesized)
ttgggttatttcctttatgctaggaactttattagtataaggatacagataaggtccattctctgttctcaagaatctgagtctacaggcagaagacaaaatgcagtacagaattatgga

SEQ ID NO: 1028376 - DNA, 120 bp, Artificial Sequence
  ENSG00000253559_3 (sequence is synthesized)
agctagcacttgtctcctttccctactaaagactgtcgactgcccttatcgctgcaggagaaagcccgaacctggcgcccggaagtgatgtcatcggaactgtgcaaggtcccgtccaga

SEQ ID NO: 1028377 - DNA, 120 bp, Artificial Sequence
  ENSG00000253559_4 (sequence is synthesized)
gctggctgctgttccgctagcgagcggcatgcttagtgaagaaaagcttaaaggccgtctttgcccaaaacgctctctgtgcgcacctgcatttcccccagatttgcaggtgatgagagt

SEQ ID NO: 1028378 - DNA, 120 bp, Artificial Sequence
  ENSG00000253559_5 (sequence is synthesized)
ttccgagtagctgggactacaggcttgaaattggtttatcaggtctggaagtgactggactctggagtactgagttacccaccacaaactgctaataaaatgctgtgtaaaagccattaa

SEQ ID NO: 1028379 - DNA, 120 bp, Artificial Sequence
  ENSG00000253557_0 (sequence is synthesized)
gaagattggaggggatgagtcaggggcaaggaaggattaacagattctgcctcaagtcctggtgaaccaactcctctccccaagacagacacatactagtgaaataaattggatttaaat

SEQ ID NO: 1028380 - DNA, 120 bp, Artificial Sequence
  ENSG00000253557_1 (sequence is synthesized)
catcacctgaggcaatcctgaaagagaaaagcagtcctagaaaagagtggaggaaaagaggacagccccattctctttgtgaccacgaagactgccgccatgtggttgggagccacgtaa

SEQ ID NO: 1028381 - DNA, 120 bp, Artificial Sequence
  ENSG00000253557_2 (sequence is synthesized)
cagctggaaggtggggaaagcaaaatgttgtgagcacctaccatatgccaggcactgttcagtgaactggttgtacaggagtgaatgagatcatcttgattttgagaagtttataatcta

SEQ ID NO: 1028382 - DNA, 120 bp, Artificial Sequence
  ENSG00000253557_3 (sequence is synthesized)
ctcaagggaaacacgtgtaatcaactatgtttcagacataacccctcaaaaccaaagcagaacctcttcaaggagctgagagatgcaagcctggtacagggtcagcatgactcaaaaaga

SEQ ID NO: 1028383 - DNA, 120 bp, Artificial Sequence
  ENSG00000253557_4 (sequence is synthesized)
agtcatcaatggatgtagaatttcaggcttactcttatttcatttcagcatattggagaccatgaattcaggtctcaaaccgtggaaggctggcttgcagttgtgaattaccaggaagat

SEQ ID NO: 1028384 - DNA, 89 bp, Artificial Sequence
  ENSG00000253557_5 (sequence is synthesized)
cgtggaaggctggcttgcagttgtgaattaccaggaagattttgtttgtttgtttgcttccaatgagaatcaagatcaagagcctgcaa

SEQ ID NO: 1028385 - DNA, 120 bp, Artificial Sequence
  ENSG00000253557_6 (sequence is synthesized)
ttcctccgagttattgccaggcctggagattgaattcctgcagctggaaggtggggaaaggtacggacaaatgagctatgaatttaacaggctaacatcccagctccacagggctgtggc

SEQ ID NO: 1028386 - DNA, 120 bp, Artificial Sequence
  ENSG00000253557_7 (sequence is synthesized)
cagagaggaattctcccctttcaaagctgactccggattgcttagagaaagaagcgaataataattgagtcagaatgagaagtccttccttccttctcaggaggatgtcctgttagcaac

SEQ ID NO: 1028387 - DNA, 120 bp, Artificial Sequence
  ENSG00000253557_8 (sequence is synthesized)
ttctttggacacaaggaggaaattaagaagcatcattactgttaatatcattttctttttcagaatgttaacagccttgatattatacaaaggttgataaaaatgtatttcataagtcaa

SEQ ID NO: 1028388 - DNA, 120 bp, Artificial Sequence
  ENSG00000253557_9 (sequence is synthesized)
cacaagtgtccaatgagtcactgatcctgaagaacaagagaagactgaccacagaccccaaaaggaagcaggagtacaaccttcgaagttggtgggcaacaagaggtcagaggttgacaa

SEQ ID NO: 1028389 - DNA, 120 bp, Artificial Sequence
  ENSG00000253557_10 (sequence is synthesized)
gcatccacacagctctaagactagcatcatgtggctacccaggacctgggagagtgctgcagagcaggagcaggaaagggaccggctgttcccatagaacttcatgtcacaggtctggga

SEQ ID NO: 1028390 - DNA, 120 bp, Artificial Sequence
  ENSG00000253557_11 (sequence is synthesized)
gccagggggccttggttctagtcccaactctccctctaagttgtcttatggccacaggtgagtgaaatagcttctctggcctcagcttcctcacgattaaaatgacacagttgtgcaaaa

SEQ ID NO: 1028391 - DNA, 120 bp, Artificial Sequence
  ENSG00000253554_0 (sequence is synthesized)
gaagatgctggagactttgttgcaagaaaggatggctttaggtcatgttgctgaggcctgatcttaaagatctaattgctattggaagagaatcctgtttcccaactgggcctcccctct

SEQ ID NO: 1028392 - DNA, 120 bp, Artificial Sequence
  ENSG00000253554_1 (sequence is synthesized)
ggagatggagcaaggaagactgtccaactctgctctgggcaccctgctgatggatgaggtgtcaggccagtcgtcatgtgaggactggtttccaaatgcagatacaaaaagaaaaattac

SEQ ID NO: 1028393 - DNA, 120 bp, Artificial Sequence
  ENSG00000253554_2 (sequence is synthesized)
tgaagcatcacatataaaaagccaagaccatcctcaaggagtttaatgaatgtggcatcacaagaaaaatatgcatcaacattgaaaagaaaagaaataaaattccattaacagagcttg

SEQ ID NO: 1028394 - DNA, 120 bp, Artificial Sequence
  ENSG00000253554_3 (sequence is synthesized)
aggaagtggacttgactaagctggagtaaggagtgcagagagtgaggagacaggatgcgaaacaagaagatgaggaaactgaagcctgagaacaacatgaattctacaatacatttaccg

SEQ ID NO: 1028395 - DNA, 120 bp, Artificial Sequence
  ENSG00000253554_4 (sequence is synthesized)
aaaatatgcatcaacattgaaaagcaaagccttccagccagttcaatggtgggagtctccccctgctcttcctgcacaatcatttcccattgaggaagaatgtgaaaatgacgcacaggt

SEQ ID NO: 1028396 - DNA, 120 bp, Artificial Sequence
  ENSG00000253554_5 (sequence is synthesized)
gagggaggcatactataagaccgcttcttacctttcgtttcctggagccaatatgaatgaagacccagagagaggagaagggaaagagaagctgccaaaaacagacaatgggagaaaaga

SEQ ID NO: 1028397 - DNA, 120 bp, Artificial Sequence
  ENSG00000253554_6 (sequence is synthesized)
agtgagcaccaagagcatcctgggatgaaaatgaggaaggctggagatttgtcattgtcagtgttgtcattttctgtcgtattttaaatctgagagcttttatggtaggagtatatgtgc

SEQ ID NO: 1028398 - DNA, 120 bp, Artificial Sequence
  ENSG00000253554_7 (sequence is synthesized)
tgttttataatagcttagagaaaatttttcattggatgttttagtccattcattccttagcacttacaaaagtcacaggcaaaaatcaaacgtgcaagcaaatcccaaactctctacatg

SEQ ID NO: 1028399 - DNA, 120 bp, Artificial Sequence
  ENSG00000253554_8 (sequence is synthesized)
taaagtggtgaattctaattatttttcaaatttgttcagttgttatagttatgccattgctgtgtatttgtatttatcttttttattaaatacatattcactaatctgcctgatttgtga

SEQ ID NO: 1028400 - DNA, 120 bp, Artificial Sequence
  ENSG00000253554_9 (sequence is synthesized)
ttgttttatttagttttctttactccttgtttgtactttgggcctgaggttttagaagatgatctgacaaaagtgtatttcaatctgggagaagtgatcattgctcaataaccatgattg

SEQ ID NO: 1028401 - DNA, 120 bp, Artificial Sequence
  ENSG00000253554_10 (sequence is synthesized)
atcattgatcattaaccatggattagccatgggatgatttgtcctagaggatgaggttttagcccctgtcattgtcactctatcttatgtggggcttagaatctcatcaaatttttcttt

SEQ ID NO: 1028402 - DNA, 120 bp, Artificial Sequence
  ENSG00000253554_11 (sequence is synthesized)
tcactgcacatagttttgtgattaattcatttaaaaataaactgtccttgaattatgctgagtcgtgtcatccgtttcctgaagaaatcctggttgatacacctagtcaataattaggtg

SEQ ID NO: 1028403 - DNA, 120 bp, Artificial Sequence
  ENSG00000253554_12 (sequence is synthesized)
tgagaccagcctctaaaaaggcattctagttggatactttacagatactggatttccagtgcctgtgctccactggtcccttggattaaggaaaactggtagagatacttttcaaagaaa

SEQ ID NO: 1028404 - DNA, 120 bp, Artificial Sequence
  ENSG00000253554_13 (sequence is synthesized)
acaaaaggaacatatttgcttccctgaagggtccctggggaaggcagataggtctggtggggatttgcaacattctgcataatgctgtctgcctctgtctctaagagggcctagcacgta

SEQ ID NO: 1028405 - DNA, 120 bp, Artificial Sequence
  ENSG00000253554_14 (sequence is synthesized)
gtccatgccagatgtattctgtattctccagatccatttttcttccttttgcaccttgctttctgcctgtgaaggctgaatttcgtggactgcatcaactggctctgcacaggctaatag

SEQ ID NO: 1028406 - DNA, 120 bp, Artificial Sequence
  ENSG00000253554_15 (sequence is synthesized)
ttaggttcagccaatggggaggcttggcaagagaaaaaggaaaaacaaatgaggtcagggcaaatattgccctggtttcctacataaggggtcatctcaggctgaccgtgtcccttcacg

SEQ ID NO: 1028407 - DNA, 120 bp, Artificial Sequence
  ENSG00000253554_16 (sequence is synthesized)
gaaagtcacttctctccggattccttttctatgtaactattctgtatttcagtaatttctcccatctgtcatccctcaagactacgggcaataacagcccacctactgttagccctcggt

SEQ ID NO: 1028408 - DNA, 120 bp, Artificial Sequence
  ENSG00000253554_17 (sequence is synthesized)
tcctcaaccatacgttgaggaattccgtgtaccctgcacacacctttgtgattaattcagatgaaaataaactctccttgaattatgctaatgtgtgagtgtcatctgtttcttgttgaa

SEQ ID NO: 1028409 - DNA, 120 bp, Artificial Sequence
  ENSG00000253554_18 (sequence is synthesized)
atcctcattgatatagctagtcaataattaatagttaatatttattgaatgtttactattctaaaagatgcatgggaactgacacattaaatcatctcaataggaaatatcaagagatac

SEQ ID NO: 1028410 - DNA, 120 bp, Artificial Sequence
  ENSG00000253554_19 (sequence is synthesized)
tattattatccctatttcacagcttagaagagattaagccatatccctggggtgcacaaaataaagtggtgggatgtgatttgcaccagagcattcttctgtctccagagtctgggctct

SEQ ID NO: 1028411 - DNA, 120 bp, Artificial Sequence
  ENSG00000253554_20 (sequence is synthesized)
agtctacaggattgcagaagatgcccctggtcagatacaaaaagaaaaattactgtcatgtgatgtgtgatccatgataccgtcatagttttgttttgctgtgctccaccttcatacctt

SEQ ID NO: 1028412 - DNA, 80 bp, Artificial Sequence
  ENSG00000253554_21 (sequence is synthesized)
tcctattcggccatcttggctcctcaggcaacctcttttctttataaattactcaatctaagtcctttggctggaggcaa

SEQ ID NO: 1028413 - DNA, 120 bp, Artificial Sequence
  ENSG00000253554_22 (sequence is synthesized)
tcctttacaatatggggagcaggagaaaggcagatcttacttgagaggaccgtgaggggagcaaggtcgagagtccacatggaaccccaaaaactaggagagctagaacaaggacatttg

SEQ ID NO: 1028414 - DNA, 120 bp, Artificial Sequence
  ENSG00000253554_23 (sequence is synthesized)
gcgagactccgtgggcgtaggaccctcctagccagatacaaaaagaaaaattactgtcatgtgatgtgtgatccatgataccgtcatagttttgttccaagaccatcctcaaggagttta

SEQ ID NO: 1028415 - DNA, 120 bp, Artificial Sequence
  ENSG00000253554_24 (sequence is synthesized)
gttttgttccaagaccatcctcaaggagtttaatgaatgtggcatcacaagaaaaatatgcatcaacattgaaaaatatggtgcctccctctggaacagagcgcagttatatttcctgca

SEQ ID NO: 1028416 - DNA, 120 bp, Artificial Sequence
  ENSG00000253554_25 (sequence is synthesized)
taaggagtgcagagagtgaggagacaggatgcgaaacaagaggtcccacaataggctgtctgcaagtttgaggagcaaggagagccatcccatgtctcaaaactgaagaacttggagtcc

SEQ ID NO: 1028417 - DNA, 120 bp, Artificial Sequence
  ENSG00000253554_26 (sequence is synthesized)
agatgtaggctgggaggctaggccaatcttgcctttcaagtttttctgccggttttatattcacttacagctgattacattgtgtccaccagattaagggtgagttggtcgtccccagcc

SEQ ID NO: 1028418 - DNA, 120 bp, Artificial Sequence
  ENSG00000253554_27 (sequence is synthesized)
actggtgttggtcgaacaagcgcgaaactcacagaagtttccccgaaaacgaacagctttaaatgccaggagggaaaatgtcgggggaaaaagtggaggtcggtgtttccctaaatgcaa

SEQ ID NO: 1028419 - DNA, 120 bp, Artificial Sequence
  ENSG00000253554_28 (sequence is synthesized)
aacatcagagaggaatctgaaaagagctttactttccctgcgaaatctccattgttgctcagcaaacaatgggagcctgggcgactggagggctgtgcgaatgaataggcgatccgcggg

SEQ ID NO: 1028420 - DNA, 120 bp, Artificial Sequence
  ENSG00000253554_29 (sequence is synthesized)
atgtgtgcgggtcagtgcctggggtcccgggcctaaagcccctttctcagcttgccacaataaaccagcgcaaggtttagtccttactgggtcaccggccatcctctattattcaacact

SEQ ID NO: 1028421 - DNA, 120 bp, Artificial Sequence
  ENSG00000253554_30 (sequence is synthesized)
tcacaacaaaaaacacttattaatcagcgctgaccagaggccccttttgaaacaagagaagaggggagagagagagggagtgagagagagaggggtgaaaagaagattgagaagccctgg

SEQ ID NO: 1028422 - DNA, 120 bp, Artificial Sequence
  ENSG00000253554_31 (sequence is synthesized)
tttctaaagccagagcaaccatggggtactttcctccagtggccaaagtttatttgacacaacaaagtttctaatcaggccacggagacctggatttctcctcatttgcctcactcccgg

SEQ ID NO: 1028423 - DNA, 120 bp, Artificial Sequence
  ENSG00000253553_0 (sequence is synthesized)
aagctaatgtgacacatttgcaagcatagctgcacatgttctggtttaattgggaaatctctcctttgactttcaggatagcacagaagcagagactttaagtctaaacagacctagatt

SEQ ID NO: 1028424 - DNA, 120 bp, Artificial Sequence
  ENSG00000253553_1 (sequence is synthesized)
cagagccgacccgatgctgcttgaagaaggctggaggttattcatgttaggctcctgaaaacaccacaaggacctaccctccgggagccagccagagaacccttcttcctgcactgtctc

SEQ ID NO: 1028425 - DNA, 120 bp, Artificial Sequence
  ENSG00000253553_2 (sequence is synthesized)
ttgctattatatggagagccaagaatctcgaaccagtaagagttgtgaagtcaccctcaatatttcccaagtcttcaaaggaattgagacactataatcattacccaggactccacgctt

SEQ ID NO: 1028426 - DNA, 120 bp, Artificial Sequence
  ENSG00000253553_3 (sequence is synthesized)
gtcaaatttgttgatgacctcctactttgcaaccaaactgaatagaatgcttgtatagactccctaatccttctgaaggtactgactgagcaaggctacaaagcctccaaatctaaatgt

SEQ ID NO: 1028427 - DNA, 86 bp, Artificial Sequence
  ENSG00000253553_4 (sequence is synthesized)
gccgacccgatgctgcttgaagaaggctggaggtatgttaaggagacaagggctgtcaagaagcagggatgtctctggaaaggttc

SEQ ID NO: 1028428 - DNA, 120 bp, Artificial Sequence
  ENSG00000253553_5 (sequence is synthesized)
gcttccccttctgccatcatttttcctgaggccttcccagccatgcagagctagagaagtaatacgacacgtaaagaaacctggattgaaacaaagaaatgaagaacactagaaatgaaa

SEQ ID NO: 1028429 - DNA, 120 bp, Artificial Sequence
  ENSG00000253553_6 (sequence is synthesized)
taaataaaggtatcctggcttcctcccacaccccaaagctgtgcacacgaggtgaactagcgtacccacatggacctcatctgtgtgagtgtgggtgtgtttgagtgcaccctctgatgg

SEQ ID NO: 1028430 - DNA, 120 bp, Artificial Sequence
  ENSG00000253553_7 (sequence is synthesized)
catatcatcctgtccagggtcgttcttctattgctctgaactgccaggagtggctctacccacctgtgaccccaaactcgtctcagcagacatggtttccctttatcgctgaagctggaa

SEQ ID NO: 1028431 - DNA, 120 bp, Artificial Sequence
  ENSG00000253553_8 (sequence is synthesized)
tacagggattatagctcactgcagccttcggctcctgggctcaagtgataatcttgcctcggtatcccaagttgctgagtacctgagactaaaggtttatactcacctgtccatcatgtg

SEQ ID NO: 1028432 - DNA, 120 bp, Artificial Sequence
  ENSG00000253553_9 (sequence is synthesized)
gaagctggagagtcacttcttttgataattcaagaatcttgggatacttcagagaacaattctcaaacaacaacttcaaactgacagacagacttcaaggaactatgcaggatagatggg

SEQ ID NO: 1028433 - DNA, 120 bp, Artificial Sequence
  ENSG00000253553_10 (sequence is synthesized)
tggccaaatgacaagcttggaaagctacaagggagtgctacctgctcctctccgtccattctttgctctctactctgaactccatgtcttccaccaaggttcacttcaccactgtgtcat

SEQ ID NO: 1028434 - DNA, 120 bp, Artificial Sequence
  ENSG00000253553_11 (sequence is synthesized)
taaaatgttcagtaccaatatgcagactgtccgcaatgataggtataaactgttcaagaagacacccatttctagcaaaatttctgactcctttcaaaataaaaattggccctcttacag

SEQ ID NO: 1028435 - DNA, 120 bp, Artificial Sequence
  ENSG00000253553_12 (sequence is synthesized)
taatttcacactgatatatggcagggattaatccaaaatgcctgcatatattcaggatagctttcctgagttgattggcctttgactgtgaaattttaactacaaaaatcaagtttatga

SEQ ID NO: 1028436 - DNA, 120 bp, Artificial Sequence
  ENSG00000253553_13 (sequence is synthesized)
atcatatttgtatgtacaaagacattcactgtcaactgacctgtgaaaacataaatcatattaccagtatggggattattattataaaagaaatctttatgtagagaagaattactaatg

SEQ ID NO: 1028437 - DNA, 120 bp, Artificial Sequence
  ENSG00000253553_14 (sequence is synthesized)
tgtttcataatgcaggaaaaattccagtctgtctacaaccctttccctatagctctgtggttctgtatgataatgagggaaatttattattgctatttctgaaaatcctaactgcaataa

SEQ ID NO: 1028438 - DNA, 120 bp, Artificial Sequence
  ENSG00000253553_15 (sequence is synthesized)
aaatatttaaaaatcagtgtgaatattcacattttgtatggttcctaaatatttaattatttaatatcttcaaataatcagcaccttttctttattttttgatgttgccttatttatgat

SEQ ID NO: 1028439 - DNA, 120 bp, Artificial Sequence
  ENSG00000253553_16 (sequence is synthesized)
tttatgatttttgcttgaagctaggagagctctaagtggaaagatatattattgtattgcggagtcccaaacccccaggacggggactggtaccagtccatggtctgttaggaacagagc

SEQ ID NO: 1028440 - DNA, 120 bp, Artificial Sequence
  ENSG00000253553_17 (sequence is synthesized)
cacacagcaggaggtcaggggcctgccagcgagcattacattattgcctgagctccatctgctgtcagatgagtgatggcattagatcttgtaggaacaggaaccctattgtgaattgtg

SEQ ID NO: 1028441 - DNA, 84 bp, Artificial Sequence
  ENSG00000253553_18 (sequence is synthesized)
gaaatgttacccccgctgccgcccatcctgaaaaaattgcctccacaaaactggcccgtggtgccaaaaaggctggggactgct

SEQ ID NO: 1028442 - DNA, 120 bp, Artificial Sequence
  ENSG00000253553_19 (sequence is synthesized)
acaaaactggcccgtggtgccaaaaaggctggggactgctgctatattgtgtattaaatcctgatatttttatttgattcatttcactttaaagagtcaaaaaagaatagacttctttta

SEQ ID NO: 1028443 - DNA, 120 bp, Artificial Sequence
  ENSG00000253553_20 (sequence is synthesized)
ttataaattaaattatgaaaataataaatattactcctaatatttttaatgttatcaattttcaaaaagctttaattgagaacctgggaaacgttatatttcattttgctcttgaacagc

SEQ ID NO: 1028444 - DNA, 120 bp, Artificial Sequence
  ENSG00000253553_21 (sequence is synthesized)
tatttcattttgctcttgaacagctaataatgtataacaggctattaatttttttttctattttatcttccagtataaatttcctttttgtgaattgagtgagtcaattgaggaaataaa

SEQ ID NO: 1028445 - DNA, 120 bp, Artificial Sequence
  ENSG00000253553_22 (sequence is synthesized)
ttatttgacctgggttatctacactttgcctccaaagcagaaactgttgttccgtatcttcaggctgctcttttctttttgtatttatgccagttaaagtagagaaagaaaaatgaaaac

SEQ ID NO: 1028446 - DNA, 120 bp, Artificial Sequence
  ENSG00000253553_23 (sequence is synthesized)
aagaaaaataaaataaagttcacatgggtagatgtctatggaaaattaaatatctaaggatgcaaatttatttttttgcatgcatgtacatgtgaatgaatataaacacagtatattgca

SEQ ID NO: 1028447 - DNA, 120 bp, Artificial Sequence
  ENSG00000253553_24 (sequence is synthesized)
tttatattctattctgtttctttaggatttaaaatttactatgttgtactattcttaaattaagatttatttaatgatgttgttggattttggaggggttctccatagaataacaggctc

SEQ ID NO: 1028448 - DNA, 120 bp, Artificial Sequence
  ENSG00000253553_25 (sequence is synthesized)
agacctagattcagagccgacccgatgctgcttgaagaaggctggaggtatgttaaggagacaagggctgtcaagaagcagggatgtctctggaaagggtgagcagctgacgtccttttt

SEQ ID NO: 1028449 - DNA, 120 bp, Artificial Sequence
  ENSG00000253553_26 (sequence is synthesized)
tttctaaattctttccccaaccacaactcatcacaatttttgcaaaggattgaatggaacattagagaccttccagaatatttgtactgattaattttaaaggtataagatgctaggaga

SEQ ID NO: 1028450 - DNA, 120 bp, Artificial Sequence
  ENSG00000253553_27 (sequence is synthesized)
aagattatttgacatgatttcctactgaaatctctgtatttgtggatgcataatcgaaaactctttctttaacatgacacagtagcattgctgtttgatttgtctttaaattcctatatt

SEQ ID NO: 1028451 - DNA, 76 bp, Artificial Sequence
  ENSG00000253553_28 (sequence is synthesized)
aaaatccattcttaatggctttctcttctgatgcaaaatcctgattgccttcaaatattactattagatagaaatc

SEQ ID NO: 1028452 - DNA, 120 bp, Artificial Sequence
  ENSG00000253553_29 (sequence is synthesized)
aatcctgattgccttcaaatattactattagatagaaatctccccacctttagctgaaagagataaggaggttttgcactgaggaaacaaacaaacaaacaagcaaacaacattcatcaa

SEQ ID NO: 1028453 - DNA, 120 bp, Artificial Sequence
  ENSG00000253553_30 (sequence is synthesized)
tttttaaaaaaagtatgtattgaactatagtcaggttcaatgaggaaatgcattacattgtcactaaactggccttagttggagaaagaacactggcagattaattaaagttattagcgc

SEQ ID NO: 1028454 - DNA, 120 bp, Artificial Sequence
  ENSG00000253553_31 (sequence is synthesized)
ttatggtaggaaactgcatgatatatgtgaaagatcttttagggactggaaacacagtgtaaattcaaactcctcccaaaactttaacaaggctggatgaaatgaaaggaatactgtgat

SEQ ID NO: 1028455 - DNA, 120 bp, Artificial Sequence
  ENSG00000253553_32 (sequence is synthesized)
caggaaacaaacaaaaccttttgatgaaggaaaagtaacttctggacaaagtataattggttacaggtaaacagatatgtcatccaggcagatatgacagtttataggaaaaatataatg

SEQ ID NO: 1028456 - DNA, 120 bp, Artificial Sequence
  ENSG00000253553_33 (sequence is synthesized)
ttatgatctaaaaaatgcaagccacaaacctattgcctgggcaataattagcctgaagttgggctactaaggagctggctaagcagcagtgataacaccagatactggaagaaacttctg

SEQ ID NO: 1028457 - DNA, 120 bp, Artificial Sequence
  ENSG00000253553_34 (sequence is synthesized)
tgatcagaaaccaatacaactagtgaacaattcacagtatttctaaatccgggcaccaaggaagttgtttggttagtcatgatggaagccaggaacaaatagatctcaaatgtgtgataa

SEQ ID NO: 1028458 - DNA, 120 bp, Artificial Sequence
  ENSG00000253553_35 (sequence is synthesized)
taattatcaagcggaatgtctagaatattatagtgagtgccaagatttccatctaagacattaccaacatagcaactgaggcatgaattacaggttttacacaaaaaaagcattataaga

SEQ ID NO: 1028459 - DNA, 120 bp, Artificial Sequence
  ENSG00000253553_36 (sequence is synthesized)
ataatacatataatatattaacagttcaaaagtgaaacaaacatttatgaatgggctactcagatttaaaataaaatattgcctgttcattgaatgctttctggattttactttctaatt

SEQ ID NO: 1028460 - DNA, 120 bp, Artificial Sequence
  ENSG00000253553_37 (sequence is synthesized)
attgaatgctttctggattttactttctaattgtatacctctctttctttcttaagataactactatcatatatttgttttggactgcatgttaataaaattatataatatgtattttat

SEQ ID NO: 1028461 - DNA, 120 bp, Artificial Sequence
  ENSG00000253553_38 (sequence is synthesized)
acacacacagagacacaccgcgacacacacacacacacgcgcgcatacacacagcccgacacacacgcacgcgcgcttcttaaaggagacggctcataaaggattccccactacgccagc

SEQ ID NO: 1028462 - DNA, 120 bp, Artificial Sequence
  ENSG00000253553_39 (sequence is synthesized)
agaggggaagaggagcccacgggaaagaaaagcaggcgaggttaagaataaagagtgttccaggtatgacagctacctcggtgaggtggaagagagaattgacaaggcaaatttcatggg

SEQ ID NO: 1028463 - DNA, 87 bp, Artificial Sequence
  ENSG00000253553_40 (sequence is synthesized)
gtgaggtggaagagagaattgacaaggcaaatttcatgggtgagttggaaaggcaagaagcaggactacaagaggtcctatgtgttc

SEQ ID NO: 1028464 - DNA, 120 bp, Artificial Sequence
  ENSG00000253553_41 (sequence is synthesized)
taagaagaaagaaaaaaaaccagaaatttttagaggcagctggttattgccatcaatggattcttaattttgccatcctagccaagcctttatatgttttcctctcaggtataacctcag

SEQ ID NO: 1028465 - DNA, 120 bp, Artificial Sequence
  ENSG00000253553_42 (sequence is synthesized)
aaccccttttatggccctctgagacactggcctcctttgaagcattaaaataagcattatctacacccccagctctcagtttatccaattttgacaaaccttttcaacaatattgccatg

SEQ ID NO: 1028466 - DNA, 120 bp, Artificial Sequence
  ENSG00000253553_43 (sequence is synthesized)
aaattaatgagattgttgctagtattctagaacagccgtttgtctctcaattactttttatggcatatttcttatttcgatcaaccctgtgacatcaggcatgcctccatgcctgtgtgc

SEQ ID NO: 1028467 - DNA, 120 bp, Artificial Sequence
  ENSG00000253553_44 (sequence is synthesized)
gaaagccacagctgccaccctaatggaaaaagcctttattcttacattaggcctccctactcacctctatgttacccttgatgtgtcagcgctcttacaagctcataaaacacagcaccc

SEQ ID NO: 1028468 - DNA, 120 bp, Artificial Sequence
  ENSG00000253553_45 (sequence is synthesized)
tctttatacaatggcagaccactgatgaacaggacctattaacaattctctctctattgtatcattgtaacaccctgaaccgtgctattctattactcctccttgatgatggacagccca

SEQ ID NO: 1028469 - DNA, 120 bp, Artificial Sequence
  ENSG00000253553_46 (sequence is synthesized)
ttctattctacgtgattcctttgtagctatataaatggtctcaaaactatgattttttagacatcttcttagacagtccagacttctgttttgtcatggctgtcaagcagaattctcacc

SEQ ID NO: 1028470 - DNA, 120 bp, Artificial Sequence
  ENSG00000253553_47 (sequence is synthesized)
gatacatagtaactgactgtgccatggtttccttaaatgaaacacttgagacaaattctgccttctatataatcagcctgaaccactgagtctagatcttacacgagccttggcaaagag

SEQ ID NO: 1028471 - DNA, 120 bp, Artificial Sequence
  ENSG00000253553_48 (sequence is synthesized)
ggactctgccatactgttggctgtattgaaaagtcccgtttctgacctctgctggtacccctattgccaatggccatgtaattgttaacctattacgcctattcatcttctaattgaggt

SEQ ID NO: 1028472 - DNA, 120 bp, Artificial Sequence
  ENSG00000253553_49 (sequence is synthesized)
tgcttttgtttattgttggcacatgccaaggagactgacactgtatctctggtagacaatacgtctgacaaagctgccaaacatgaacccccaactctggcaataacccattttttaacc

SEQ ID NO: 1028473 - DNA, 120 bp, Artificial Sequence
  ENSG00000253553_50 (sequence is synthesized)
cagcttacaaccctgcctttaacacttactgacgtcaataatatttggcagataccctacaatgaaaaaaaaggctgcaagaagattccagacaattgttagaaggattatacgttggac

SEQ ID NO: 1028474 - DNA, 120 bp, Artificial Sequence
  ENSG00000253553_51 (sequence is synthesized)
caaatggacttcctatagtcctttatcttttattgttttgtgcttctatttattgcccatcaaatggaatatatgtgtaaagaagggcaaatcaaagaggtaaatgacagtgattttgcc

SEQ ID NO: 1028475 - DNA, 120 bp, Artificial Sequence
  ENSG00000253553_52 (sequence is synthesized)
ctggaatccacagaatttctgatcaaattatttaccaatgtattacttgtaaatcttatgatatttctggatgtaagtagcataccccatgaaatcctctgagacccacattccctttgc

SEQ ID NO: 1028476 - DNA, 120 bp, Artificial Sequence
  ENSG00000253553_53 (sequence is synthesized)
aacactcctggtggactttatagatttccctcaggattcaggttattctcattataggttgactatacctaatctgaaaatccaaaatctgaaatgatacaaatccaaaacgttatgagt

SEQ ID NO: 1028477 - DNA, 120 bp, Artificial Sequence
  ENSG00000253553_54 (sequence is synthesized)
gttgtcataatgctcaatggaaatgctcatgaaagcattttttatttaaggtctttggattaaggatgctcatccagtaaatatgatacagctattccagtgtccaaaactatcccaaat

SEQ ID NO: 1028478 - DNA, 120 bp, Artificial Sequence
  ENSG00000253553_55 (sequence is synthesized)
ctgaaacacttctggtcccacccaagcatttcagataaggaatactcaactcataattggtgattacctgcacagttagtagatggactgagtactatccaactagacatgctgatgcca

SEQ ID NO: 1028479 - DNA, 120 bp, Artificial Sequence
  ENSG00000253553_56 (sequence is synthesized)
catggtagtaatgaaaaaaaaaattgagattattcttcattttggcattacttaatgtattaaatcagaccaaggaactcacttaacaacagaagtaaatcacatgttcacaaaaactct

SEQ ID NO: 1028480 - DNA, 120 bp, Artificial Sequence
  ENSG00000253553_57 (sequence is synthesized)
aggatagtcattaaaattctatactctttaccatcctcagtcctcagagaggtggaatgtgataatttagacagcaaaagaactataaaatatgtcagtacaatagacctaagtggccag

SEQ ID NO: 1028481 - DNA, 120 bp, Artificial Sequence
  ENSG00000253553_58 (sequence is synthesized)
aagcatcacccctgaccccaataaaatctggaaaaccccaaacaagagagatggattaactgctttttgaataatttttgatagctttatgcctattagcatctccaaactttttgttcc

SEQ ID NO: 1028482 - DNA, 120 bp, Artificial Sequence
  ENSG00000253553_59 (sequence is synthesized)
tgaagtgagtgagcattatggggacctgagtgaaaggttcagtattatgactagatatctaaaagaactatctcttgtacttggagcttaccattaacaggcaaaaaagtcatggccatt

SEQ ID NO: 1028483 - DNA, 120 bp, Artificial Sequence
  ENSG00000253553_60 (sequence is synthesized)
gtctaccaacaagctttctatcccttttgaccaagctatcaagtatacatcaaaattttgacaagaaagcatacactgtcatctttctgggaagtaccttgtgaagcattgctgaacacc

SEQ ID NO: 1028484 - DNA, 120 bp, Artificial Sequence
  ENSG00000253553_61 (sequence is synthesized)
tacatggccatcaaaataaaaagaaatatttcctggattcatgcaagtcatgccaagctagacccagatcataatttccagaaaaattgaaaagctattcttacagctgacttcaaacca

SEQ ID NO: 1028485 - DNA, 120 bp, Artificial Sequence
  ENSG00000253553_62 (sequence is synthesized)
aggattttcagggccaattcacagggtcccaaagcagatgacaacataaagtggactattttttccaatatcttggatcaagaactacctttccacctattttcccttgatatctttctc

SEQ ID NO: 1028486 - DNA, 120 bp, Artificial Sequence
  ENSG00000253553_63 (sequence is synthesized)
gcccacccaacttgacccaagacccaagaagttctcagggagaccttcctgacagtctgccttgtgcccagcatgtgctgcccacaaaataattttgaagatgtaataaaaagcaatgtc

SEQ ID NO: 1028487 - DNA, 120 bp, Artificial Sequence
  ENSG00000253553_64 (sequence is synthesized)
ttatattgtatagtacattagaatattcagaatgtttccagacatagtatctcatttaattctcacaccatctctgaggattttgtttttattttacagatgaagtaaatgatagcaata

SEQ ID NO: 1028488 - DNA, 120 bp, Artificial Sequence
  ENSG00000253553_65 (sequence is synthesized)
aaaaccttaaaaacctctttgagctttaaacagaaaccttcccctttatttattgatggactgtctagagattgctacttttttcttcttctgtttcttcacaatgagatattttctaaa

SEQ ID NO: 1028489 - DNA, 120 bp, Artificial Sequence
  ENSG00000253553_66 (sequence is synthesized)
ctgtgtcttgcttcaactaacccttatggctttttttgacaattctagcataaatccagcacctactcgcgccagtcttctaaacactggcaactttcatcaatccgaattttggttatg

SEQ ID NO: 1028490 - DNA, 120 bp, Artificial Sequence
  ENSG00000253553_67 (sequence is synthesized)
tcaacatatcggtatacagaagaagctaactagtttttgtttctgccaatgcaaacacctggtggacacagactggactatggatgtacaaaagggtatggtatctacaaacaggaagac

SEQ ID NO: 1028491 - DNA, 120 bp, Artificial Sequence
  ENSG00000253553_68 (sequence is synthesized)
aaaaatcatgccacctctctttctggtaaactgatttggcgcttggaaaattccatggaagctcaagttctattctttgttcaggtgatgttattgaatggacaaatttcccttttcatt

SEQ ID NO: 1028492 - DNA, 120 bp, Artificial Sequence
  ENSG00000253553_69 (sequence is synthesized)
ggaaacagaaatggtactggaccctttctagatctcttgcctcacagcttctaacccaaatcttatttctacagcaaccaacacagcttctcgtttgtaaaacttctcaagatgtttcaa

SEQ ID NO: 1028493 - DNA, 120 bp, Artificial Sequence
  ENSG00000253553_70 (sequence is synthesized)
aatggaagaaataccaaaacccacaaagaatccttgagttggtatggttatttttagttgaggacatttgagattccacagatgcagaaaagaatcttctcagagcttccttcttctgat

SEQ ID NO: 1028494 - DNA, 120 bp, Artificial Sequence
  ENSG00000253553_71 (sequence is synthesized)
taaaagcagccacttctgggaaataaggctggcataaatcctctcttgagagtggctttactcccagaaacaagaccaagggtaaatctaccataaatcccctctccaggggagtttgat

SEQ ID NO: 1028495 - DNA, 120 bp, Artificial Sequence
  ENSG00000253553_72 (sequence is synthesized)
ggccataaagaagatgaaaagagttctcacacctgcataaacaaatgttatcacaaactttcttatctcttgtttgttctcccaaaaaactatttgtctttcctaaagaaatccatttgt

SEQ ID NO: 1028496 - DNA, 120 bp, Artificial Sequence
  ENSG00000253553_73 (sequence is synthesized)
tttccttatagaagtcttttctcccggcttgcttctcctattaagttagatatataaacttctaatttaacttttaggaaactacttcttttgtaagctcttgtatgcaaataaactgtt

SEQ ID NO: 1028497 - DNA, 120 bp, Artificial Sequence
  ENSG00000253553_74 (sequence is synthesized)
aattgtgtctttgagcgcgcagcatcgtgctttgtgctgccggggataacggattctgggtctcacacgcatccgtcacctaaaacacccttaaactgaaccagggtctccacagctgga

SEQ ID NO: 1028498 - DNA, 120 bp, Artificial Sequence
  ENSG00000253553_75 (sequence is synthesized)
agggaaacaacgtgctgggacccaggctgctctgagctacaaggatcccaggagtgaaggaaatgtttcagggagcagcccaggcagcggggggaggaagaaagccctcgcactcttacc

SEQ ID NO: 1028499 - DNA, 120 bp, Artificial Sequence
  ENSG00000253553_76 (sequence is synthesized)
tccacattgaaatactgctccgttccgcagactgtagcacataaaatccaaagcaaggtttgcaagaaaaacacccccgaatgatgcacgaaatccaaccgtcttccagtgctgaatcca

SEQ ID NO: 1028500 - DNA, 120 bp, Artificial Sequence
  ENSG00000253551_0 (sequence is synthesized)
cttgattataaaccttatctctctacactataatcatcttcccagtaacctggaaacacctacaagagaacagaaactgtttcttgctcctttttatatctctggtgcataatatgaggt

SEQ ID NO: 1028501 - DNA, 120 bp, Artificial Sequence
  ENSG00000253551_1 (sequence is synthesized)
ctgtgtgttaggagcatgctcagtgaaagaccactgaagttgagccccacccagatgtgagcatatgaagatgaatgttggtgaaagcatgcgtcttgcatctggagaactgccttcctc

SEQ ID NO: 1028502 - DNA, 120 bp, Artificial Sequence
  ENSG00000253551_2 (sequence is synthesized)
cgggagagccatcaacaaccacccattactgtgcagatgatgggactaacttcccttatccatgtgggcttctctgcccagctccccgccactgaggatgtgtttttgcaagacagtcaa

SEQ ID NO: 1028503 - DNA, 120 bp, Artificial Sequence
  ENSG00000253551_3 (sequence is synthesized)
atctagacaacatggacagtagcacccacctcctggtactacagatcaagcaagacaaggcattcaaaggggtctgcacagtttctgagacacaggcaatgcttcagggcatggaagggt

SEQ ID NO: 1028504 - DNA, 120 bp, Artificial Sequence
  ENSG00000253551_4 (sequence is synthesized)
tcaggatgctgtgtttaccatttggccctcatgctggctggctggacttctgggagctatcctgcaaatgtaaatcattacttatagggctgttcccgtggtacacagggatcgtggggt

SEQ ID NO: 1028505 - DNA, 120 bp, Artificial Sequence
  ENSG00000253551_5 (sequence is synthesized)
taaaaacctgtctgcagccttggtctattgtgttgccaagaaattgccctgcatctgttataaatatagaaataaacagaacatcaaacctttattcatgaaggcacaaaattataaaaa

SEQ ID NO: 1028506 - DNA, 120 bp, Artificial Sequence
  ENSG00000246084_0 (sequence is synthesized)
gaagtccgagctgaaactttggccactaaattgccctgtctcactacagaattcaatccacgttactccattgccatttgttaccacgtccttcagtctcctcaatctctcagtcccctt

SEQ ID NO: 1028507 - DNA, 120 bp, Artificial Sequence
  ENSG00000246084_1 (sequence is synthesized)
atttttcgtgaccttgacaactttgaggaggactcatcagccctcagagattccttctcctcgctgctcctcctctcccagacaaagctgcagcactgccaaggacatggatctctcaag

SEQ ID NO: 1028508 - DNA, 120 bp, Artificial Sequence
  ENSG00000246084_2 (sequence is synthesized)
ctcctgtctggcacattgcaggaagtaaggggcatgtctaaccaccacgctcagccaagccaaagaacaaaggcagcggcactctctctggaccttggggaataacacagccctcccagg

SEQ ID NO: 1028509 - DNA, 120 bp, Artificial Sequence
  ENSG00000246084_3 (sequence is synthesized)
cagaagatgcaagcattcctgttgcagtgcaattaggagcagcgaagaaactcagacatgtgccccttctgtgttggcaactgatatgacagaacttcatgaggtgcaaaatacaggctg

SEQ ID NO: 1028510 - DNA, 120 bp, Artificial Sequence
  ENSG00000246084_4 (sequence is synthesized)
aacttgaagctgatgagatgggatattgtgtcttttttaaaaatgtaaccaacaacaaactttgcttggtgtaattttagcaaggacgcaagtgtgccaaggtgcagtatgttattgttg

SEQ ID NO: 1028511 - DNA, 120 bp, Artificial Sequence
  ENSG00000246084_5 (sequence is synthesized)
aactactgttttgacaaaatagtatgtatgtgtggttgtgtctgtgagtataaaggaggcaagcaaaaagagaaaaaatgatatgtactttttagggaagtgaatgcaataacagagaga

SEQ ID NO: 1028512 - DNA, 120 bp, Artificial Sequence
  ENSG00000246084_6 (sequence is synthesized)
caagaaatttagattagaaagctgttaagtttcactgttgtcacaggtcttcttggaagctgtttgtctgtaaagaggcacccaaatactcagctaattcttaaaacattttttctagca

SEQ ID NO: 1028513 - DNA, 120 bp, Artificial Sequence
  ENSG00000246084_7 (sequence is synthesized)
agtatctctggagcttaccctgtgctaggcacagtagtagcccaggccactccaagatgcacaggacatatttctgctgccccatggtccactggggacaattatatagatctgcacaga

SEQ ID NO: 1028514 - DNA, 120 bp, Artificial Sequence
  ENSG00000246084_8 (sequence is synthesized)
actgccccatcattccataagtcaccagagtggacaatattttattgctataattaatgcaaagctctgctggtagtgactgtcatatagcagcatccccaataaattaataggcacagg

SEQ ID NO: 1028515 - DNA, 120 bp, Artificial Sequence
  ENSG00000246084_9 (sequence is synthesized)
ggagaacaggtaggagtgttttgctggagtggtcctgatgtgggatgatggcggcccagatgagaggggtggcaaatgaaacaagcagaaaggagagatgtaggccatggaacagacaga

SEQ ID NO: 1028516 - DNA, 120 bp, Artificial Sequence
  ENSG00000246084_10 (sequence is synthesized)
tttggccactaaattgccctgtctcactacagatgaggaaaacaaaagctcagaaactatcttggagtcagcaagtaagaaggagcttagaaaggcttaacattttccatgcttctgcct

SEQ ID NO: 1028517 - DNA, 120 bp, Artificial Sequence
  ENSG00000246084_11 (sequence is synthesized)
ggcttcagagcccatgcactctgccttaccacggcaggtgaaagatggccccaaattcttaggtacatctcctgccaaaagacccctcctatgggttctgtgactacttcaatgaaaaga

SEQ ID NO: 1028518 - DNA, 120 bp, Artificial Sequence
  ENSG00000246084_12 (sequence is synthesized)
atagggcagaagagatgatgagaacttaacatctggcagtgtccatttcctgtcttttgaaactttctgttaaaggcctgagccacgtatgaagtgtgaatcttcacaccatgcaagaga

SEQ ID NO: 1028519 - DNA, 120 bp, Artificial Sequence
  ENSG00000246084_13 (sequence is synthesized)
agccacatgttattgctctggtcaacaatcccagctgacccaaccagatagtgtatcaggcatatgagtaaagcattcttagattcttcagtccagcccttcaccagcagaacaccattc

SEQ ID NO: 1028520 - DNA, 120 bp, Artificial Sequence
  ENSG00000246084_14 (sequence is synthesized)
agcaacccttgtcggcatcatgtgggacagaagaaccacccagctgagccttatccaaattcctgaccacaaaatcataaggcacactaagacattctgtggaggaaggaaagccattgc

SEQ ID NO: 1028521 - DNA, 120 bp, Artificial Sequence
  ENSG00000246084_15 (sequence is synthesized)
ttttagccccagatctggaggactatttgggatcttttgcccatgtctcctctgcaagataaataggtctttattccctccaccacttggtgagctcctaggtgcagtcgtgtatgagcc

SEQ ID NO: 1028522 - DNA, 120 bp, Artificial Sequence
  ENSG00000246084_16 (sequence is synthesized)
acaataaaagcactgaggctcacaaaagtgaagtaactttcctcaagtcccagggctgagaaattgcaaacacataatttggactgaagtttgccccctattcactggggccacctgtct

SEQ ID NO: 1028523 - DNA, 120 bp, Artificial Sequence
  ENSG00000246084_17 (sequence is synthesized)
agttcctgtcccagggaggagaaccttcagcttgcaacaagtcctggccgttggagaaaccatgagactagaccttgtgtaaagcagctgattctgccatgggggaaatgcccttttgtt

SEQ ID NO: 1028524 - DNA, 120 bp, Artificial Sequence
  ENSG00000246084_18 (sequence is synthesized)
tactgagcttctcccacccatgccttgctccactttcctctagaagcctgagatattgggaataagagtctcagcctccaagagatggagaacatatcaagagagtctggatttctgggg

SEQ ID NO: 1028525 - DNA, 120 bp, Artificial Sequence
  ENSG00000246084_19 (sequence is synthesized)
tgattaagttcacttgattcattagcctaagtgctcaagtaaatttcaaatcacagtgttatgtgtgattgtccacgtccttcctccaaacactccccacctcccacccaagggcccatg

SEQ ID NO: 1028526 - DNA, 120 bp, Artificial Sequence
  ENSG00000246084_20 (sequence is synthesized)
taacttgctattgagaacctttgatttcttaggtatttgggtgatagggttttgttgcctctcctgaagaaaatagtggcaatttgtactcagctgtggaataaaggaaatcatgacata

SEQ ID NO: 1028527 - DNA, 120 bp, Artificial Sequence
  ENSG00000246084_21 (sequence is synthesized)
cctttcctggctgcctacacagaaagcagccatgggagacttgccgaggactttgtccaccaagtgatgaaagcatgcaaatgcctccgaatcaaaggcctgagccacgtatgaagtgtg

SEQ ID NO: 1028528 - DNA, 120 bp, Artificial Sequence
  ENSG00000246084_22 (sequence is synthesized)
accacaaaatcataagccctgagagagcaagaccagccccttcttttcttccacctcctcatctactcaacatgtatcttcattctcaagacgatgaggatgaagacctttatgatgctc

SEQ ID NO: 1028529 - DNA, 120 bp, Artificial Sequence
  ENSG00000246084_23 (sequence is synthesized)
cactcccagttaataaatagcacactaagacattctgtggaggaaggaaagccattgctattcttgtgctgatgaaaagtggcttctactcaccttttagccccagatctggaggactat

SEQ ID NO: 1028530 - DNA, 120 bp, Artificial Sequence
  ENSG00000246084_24 (sequence is synthesized)
tggtaacacaagataaatacgagggtcaaccagggaccccggagaacaggaaatgagatgaagaggtaaaaaagcgaagtatgtacccaagattacagctaaactaggacttgaacccat

SEQ ID NO: 1028531 - DNA, 120 bp, Artificial Sequence
  ENSG00000246084_25 (sequence is synthesized)
catggagcagcactgagattaatggcacatgtgcagaggccctggtgtggggcttttgtgaatgttttttaagttcctgcccaggctgactctatcatacaagctgtaacttctgccagt

SEQ ID NO: 1028532 - DNA, 120 bp, Artificial Sequence
  ENSG00000246084_26 (sequence is synthesized)
acagagggatccgcccctttcctggctgcctacacagaaagcagccatgggagacttgccgaggactttgtccaccaagtgatgaaagcatgcaaatgcctccgaatcaaagaattcaat

SEQ ID NO: 1028533 - DNA, 120 bp, Artificial Sequence
  ENSG00000246084_27 (sequence is synthesized)
tcctcgctgctcctcctctcccagttcctgcccaggctgactctatcatacaagctgtaacttctgccagtcctatcagccagcaaacaacaaagctgcagcactgccaaggacatggat

SEQ ID NO: 1028534 - DNA, 120 bp, Artificial Sequence
  ENSG00000246084_28 (sequence is synthesized)
ccagggatggtgaagccggagctctggatggcactcctggatctcctaaatcttgattccgtgctcttttctccccacttggctccactgttttggcagagtcccttaagatggacctga

SEQ ID NO: 1028535 - DNA, 120 bp, Artificial Sequence
  ENSG00000246084_29 (sequence is synthesized)
ttggatgatgtggaactagccatgcagaaagaacagagggtgggaaaacaaatgaggtcagagagtcctcatattagtcggttcttgcactgctataaagaactatctgaggctggataa

SEQ ID NO: 1028536 - DNA, 120 bp, Artificial Sequence
  ENSG00000246084_30 (sequence is synthesized)
tttatgaagaaaagaggtttacttgactcacggttccacaggctgtacaggaggcatagctggggagtcctcaggaaacttaacaatcatagcagaagacaaaaaagaagtaagcatgtc

SEQ ID NO: 1028537 - DNA, 120 bp, Artificial Sequence
  ENSG00000246084_31 (sequence is synthesized)
ttcacatagccagcaagagagagagacagagaccaaagcaggaggtgctatacactttaaaacaaccagatctcatgagaactctttcaggagaacagcaaggggaaagtttgcctccat

SEQ ID NO: 1028538 - DNA, 120 bp, Artificial Sequence
  ENSG00000246084_32 (sequence is synthesized)
ccaggcctttcctctaatactgggaattacaattgaacatgagatttgagtgaggacaaagagccaaccatatcagtcctcttcagttgttggtacctatgtggggagaaggagctgtgt

SEQ ID NO: 1028539 - DNA, 120 bp, Artificial Sequence
  ENSG00000246084_33 (sequence is synthesized)
agagtgggtgtgactaagtcggtcagaactgggaagcatggcagactaggctgtcctgcaaccggagggtggtttcagaatccagagcctgggatagcattccctggaccctcagtccat

SEQ ID NO: 1028540 - DNA, 120 bp, Artificial Sequence
  ENSG00000246084_34 (sequence is synthesized)
acctgctatctacaggcagctagagaaaacgtaagaatcagcatcggtcacaggtgacattggggcagggcactgagctccctgctctccactgcggctgcagtctttaaactccttatt

SEQ ID NO: 1028541 - DNA, 120 bp, Artificial Sequence
  ENSG00000246084_35 (sequence is synthesized)
ctatccagcacagacagtttgcagacgaaggtttctgcaccggcatctctgctcagaagagatttgctgatgtaacaattatttgcactatttatattcaaatgttcttttaaaaaaatg

SEQ ID NO: 1028542 - DNA, 120 bp, Artificial Sequence
  ENSG00000246084_36 (sequence is synthesized)
cagcctctaaatttacggatagtaactgtgtgcaaatcaggaaacttatctcctttttatagtctaaaatcaaattacactttacatttttctcacttgcagaatattagattgtgatgc

SEQ ID NO: 1028543 - DNA, 120 bp, Artificial Sequence
  ENSG00000246084_37 (sequence is synthesized)
ctaaatgacttgtgtttatgaaaaaggtgaattttaagaacaaattttaaaactgcataagcagtttaatgggtgtttttagaaagtgagaatgatcagctggtaagcatttattatata

SEQ ID NO: 1028544 - DNA, 120 bp, Artificial Sequence
  ENSG00000246084_38 (sequence is synthesized)
ttaaactggaagttatatcgtcgcatccgttagcactgaattctgaaaatcatcatggcccaggtttgtgtttatgaaatgatggaccacaggactgttaaataaagttgtaaaaaaaaa

SEQ ID NO: 1028545 - DNA, 120 bp, Artificial Sequence
  ENSG00000246084_39 (sequence is synthesized)
tttggccactaaattgccctgtctcactacaggatgaatcctcctgtcctgttgggacctgccctatggagagggccataggacaagcaaatggggatgattcccagctggtgaagaact

SEQ ID NO: 1028546 - DNA, 120 bp, Artificial Sequence
  ENSG00000246084_40 (sequence is synthesized)
gagacctttagtccagcagtccttgtggagctgattcctgccagcaaccacgtagtcgtgtatgagccacctctcaaacaggctgtgagtgatccaggtgcaggggacctgctggagtga

SEQ ID NO: 1028547 - DNA, 120 bp, Artificial Sequence
  ENSG00000246084_41 (sequence is synthesized)
tcagagagcaggacatggagatgaagcctggagctcatttgtcctgaaaggcggaatcttacttcacagagaaacacctcatcggagcatttgcagattctgtttctcctgcctgcagaa

SEQ ID NO: 1028548 - DNA, 120 bp, Artificial Sequence
  ENSG00000246084_42 (sequence is synthesized)
agggtgggtgtggccaagttcatctccagcttcggaaaggcttggtgccagaagccctcactttgcccttctcaagtgggctgtaaggacaaagctgcagcactgccaaggacatggatc

SEQ ID NO: 1028549 - DNA, 120 bp, Artificial Sequence
  ENSG00000246089_0 (sequence is synthesized)
gtttccgggatttctctgtaggtgaggcgggaggctggagggagctgagcccccggggagggggcccgattccgcctcgccgcgcctctggctgctgggccgtgggtttttctcttctcc

SEQ ID NO: 1028550 - DNA, 120 bp, Artificial Sequence
  ENSG00000246089_1 (sequence is synthesized)
tgggagtaaggaggacgacggcccctaacccctgaattagccttctatttccattagtgacttagaagctacccggcgcctcatctgggctcacctgagctgaggatcaggaaggggagg

SEQ ID NO: 1028551 - DNA, 120 bp, Artificial Sequence
  ENSG00000246089_2 (sequence is synthesized)
gggcacagtcattccctcgcggacgcggcgggaccccagcggacggctttgtgcggactttcggcaccgttatgcccccctagcccgacaccacctggggctggcgcgccacgttactgt

SEQ ID NO: 1028552 - DNA, 120 bp, Artificial Sequence
  ENSG00000246089_3 (sequence is synthesized)
tcagggccagacgcaccgccctgcctgctccggggagccggacctccgatcccggggatgggggaccccgagacctcagacccaacggaggggactctgatacctcagaccccacgcggg

SEQ ID NO: 1028553 - DNA, 120 bp, Artificial Sequence
  ENSG00000246089_4 (sequence is synthesized)
gaccccgaggcttcagacccccacagggtgaccccgagatctcagacccccgcaggagtacctccagacctcaaatccccagtaagggaatgaaagagacttcggatccctgaggcagca

SEQ ID NO: 1028554 - DNA, 120 bp, Artificial Sequence
  ENSG00000246089_5 (sequence is synthesized)
aatccctgtaggggcatcccaggactcaggtcaccgcggggtgaacccagacctcacattcaggcaatccccaggacgccgatcggctggcactacccactgtcccggccaccccccctg

SEQ ID NO: 1028555 - DNA, 120 bp, Artificial Sequence
  ENSG00000246089_6 (sequence is synthesized)
gagctcaaaggcttggccctccagctgctccaccctgccggcaaccaggctcaaacctgcagcccgcggatcccctgccccggaagcaaccagattcgcgggaggttacctgactgatcc

SEQ ID NO: 1028556 - DNA, 120 bp, Artificial Sequence
  ENSG00000246089_7 (sequence is synthesized)
ggtgtaatcacagctcactgcagcctcaacctactggactcaaaggataagatctgcttttaattaatttttgtatacggtatgggatagggaccaaagttcatttttttgcatgtatac

SEQ ID NO: 1028557 - DNA, 120 bp, Artificial Sequence
  ENSG00000246089_8 (sequence is synthesized)
tatgggatagggaccaaagttcatttttttgcatgtatacatatccaaatgttccagcatcatttattaaaaagttatttttgtctctactgcatttcctttgtgcttacatcaaaatct

SEQ ID NO: 1028558 - DNA, 120 bp, Artificial Sequence
  ENSG00000246089_9 (sequence is synthesized)
gtgttgcatatgtatgtgtttcattttaggcttcctattgtgttccattgagctatttgtctttttgctgccagcaccatgctgttttgattattgtagctatataaataagtgatgaaa

SEQ ID NO: 1028559 - DNA, 120 bp, Artificial Sequence
  ENSG00000246089_10 (sequence is synthesized)
gtcctacaactttatttttcaaggttattttgtatcttctagattcttcagatttccttttaaatcttagagtcgacttctcattttgcacaaaaaaatactgctgggattttgattgag

SEQ ID NO: 1028560 - DNA, 120 bp, Artificial Sequence
  ENSG00000246089_11 (sequence is synthesized)
attgtgttgactctacagatgaatttggggagaattgacattttaaccatattgaatcttctgacccattaacatttaggtcttttaaaatttctctggccagacgcagtggctcacgcc

SEQ ID NO: 1028561 - DNA, 66 bp, Artificial Sequence
  ENSG00000246089_12 (sequence is synthesized)
tcttttaaaatttctctggccagacgcagtggctcacgcctgccactttgggaggccaaggcgggc

SEQ ID NO: 1028562 - DNA, 120 bp, Artificial Sequence
  ENSG00000246089_13 (sequence is synthesized)
ttttgagacaggatctcactctgtctcccaggctgaagtgcaatggtgtgatcatggctcatcttgaagcctcgaccctcctgggatcaagctatcctcccacctcaacctcctgagtag

SEQ ID NO: 1028563 - DNA, 77 bp, Artificial Sequence
  ENSG00000246089_14 (sequence is synthesized)
tcaacctcctgagtagctgggactacaagtacacatgaccatgcccaattcattttttaaattctttgtagaggcgg

SEQ ID NO: 1028564 - DNA, 120 bp, Artificial Sequence
  ENSG00000246089_15 (sequence is synthesized)
tagggattacaggcatgagccactgtgcaaggtcttgtgttttttgataatatcgtaaatggtgattttttcatttgtttctgattgttgctaatatatggaaatatagttgatatctgc

SEQ ID NO: 1028565 - DNA, 120 bp, Artificial Sequence
  ENSG00000246089_16 (sequence is synthesized)
aattgatctcatgtcctgaaaacttgctaaatctgcttaataattttttgtacattcaaaatgatgttctacaggtagtcgtattgtctatgttggaaggaaagcttttcctcattcaat

SEQ ID NO: 1028566 - DNA, 120 bp, Artificial Sequence
  ENSG00000246089_17 (sequence is synthesized)
gtcggtcctgtgtttgaagacctgcaaattaactgataacaacaggttaacaggagaaaagacaaggtttagagtaactcactaaatagaaataaaggtttatagatccacttaacaaaa

SEQ ID NO: 1028567 - DNA, 120 bp, Artificial Sequence
  ENSG00000246089_18 (sequence is synthesized)
caggactctgcctgccagtgagccccagatccagggactaaggcagcaggggtgaaagcaggcagcaggaagtacctcacctttcaggatgggggccgccatgacagacggcgggatccg

SEQ ID NO: 1028568 - DNA, 120 bp, Artificial Sequence
  ENSG00000246089_19 (sequence is synthesized)
gccagctggcctacgcggtgcttgcgagcctggcggcgcgcgcgggcactgggcatgcgcggggtgagcgcgccgccgtcaccgcgctccgctgaatccgcgtttccgggatttctctgt

SEQ ID NO: 1028569 - DNA, 120 bp, Artificial Sequence
  ENSG00000246089_20 (sequence is synthesized)
tctatggaatctagaggtagaatacatgtaaaagaatatcgactaccgtctactcaggtctctgttttatctgtttattcattcactctcagcttttaataggatccaatgagccctctg

SEQ ID NO: 1028570 - DNA, 120 bp, Artificial Sequence
  ENSG00000246089_21 (sequence is synthesized)
tggttctgaagaattgccttgagtatatgcagcctcaaaaaacccacttcctaggctcagtctttgatcaatatttatcattatcaccagttattgttctaataaactctactctggaaa

SEQ ID NO: 1028571 - DNA, 120 bp, Artificial Sequence
  ENSG00000230061_0 (sequence is synthesized)
cctacgtgaccaggttcagacacagtctgcagccgcccgcctcgcacccccactctgcagtgcggtatgtggggagctcagggcacagcaggccaggcctccccgtggacgtccaggaac

SEQ ID NO: 1028572 - DNA, 120 bp, Artificial Sequence
  ENSG00000230061_1 (sequence is synthesized)
cagaaccaaactgcccagggccccagaggggaagatgtctcagcagacggacagccgaggctcacatggcaagctctggcagcctgtcggtcccaggagagagggggagatggcagacgg

SEQ ID NO: 1028573 - DNA, 120 bp, Artificial Sequence
  ENSG00000230061_2 (sequence is synthesized)
gagtttccaccccagggtcccagtaactccgcccaaatgtgcacacgagacctatgaggagacataactttccagaacccccttttcttccaccagccacttactcatccaagaacccac

SEQ ID NO: 1028574 - DNA, 120 bp, Artificial Sequence
  ENSG00000230061_3 (sequence is synthesized)
ccccgaaccttccctaatagaaacactgcattaaagccagcgcggggagacagacgtgaactgcgcccctgtctccttgtgggttggcctagaataaaagcttttcttttctcaaaaacc

SEQ ID NO: 1028575 - DNA, 120 bp, Artificial Sequence
  ENSG00000230061_4 (sequence is synthesized)
agagagcagagccacgccacacgggaggccagctccaggcacagaactcagcccacagacctcacaattccaggcttcctgggaaccaaagcaagaaaaaaggagaagcacacagacttt

SEQ ID NO: 1028576 - DNA, 120 bp, Artificial Sequence
  ENSG00000230061_5 (sequence is synthesized)
cgatattataagcctcactggctaataacacgaagtgggtgtttatcaggagacagacactgtctggcactgaactctaggacctgatctgtggattctgacgagcacaagagccagacc

SEQ ID NO: 1028577 - DNA, 120 bp, Artificial Sequence
  ENSG00000230061_6 (sequence is synthesized)
ctccaggggtgcatgtggaaggggcagggctgcaggggcctccttggtgtgtctcagggtgacaggcacagagccctccgcagtgggagccggaagtgtgggtgccatacttgctgcagg

SEQ ID NO: 1028578 - DNA, 120 bp, Artificial Sequence
  ENSG00000230061_7 (sequence is synthesized)
gacagtgtcctgccaccagccccttggcctcgagatgacagtcctggcccatgctcgggttctctcaatgttcagaacccacgttctgaaaggtggcaacctcagcaacttagccaatga

SEQ ID NO: 1028579 - DNA, 120 bp, Artificial Sequence
  ENSG00000230061_8 (sequence is synthesized)
aacaagaagagaaacggttggttcctaacaaaaccaggaacacaaggattttcagagtcctgggtagcacagggtctgtctgcagatgctgggaagggctctgagggcctgggaggcttt

SEQ ID NO: 1028580 - DNA, 120 bp, Artificial Sequence
  ENSG00000230061_9 (sequence is synthesized)
ctgaattatgggggcaacgtggggagactgggctttctgtggaccatgacagctccgcagccgtgctgggctcctcagctccactgtcagggctaggaattggccacagaacccccagag

SEQ ID NO: 1028581 - DNA, 120 bp, Artificial Sequence
  ENSG00000230061_10 (sequence is synthesized)
ccaaccctggggcccactaggaccccaaacacctgtgttttcattctgcgtggcctcctggttccctggagttcttttttatgctgcctctggtgtgaggtcctcagcatttaatttgtt

SEQ ID NO: 1028582 - DNA, 120 bp, Artificial Sequence
  ENSG00000230061_11 (sequence is synthesized)
ctaagtttaaaagctgcaagagcaaaacagaacccccaaagcctggggcccacagctgctgcggctgatcagagatacgaccccagaggaccacgtccaccaggggccggatggacagcc

SEQ ID NO: 1028583 - DNA, 120 bp, Artificial Sequence
  ENSG00000230061_12 (sequence is synthesized)
ttgtttcaaaagcaacaatagcaaataacattccaaaagttctatgataagacttcaagacactaggatttaaagaaaatcctagacattttcaaagagaagaaacagctactgcatggg

SEQ ID NO: 1028584 - DNA, 120 bp, Artificial Sequence
  ENSG00000230061_13 (sequence is synthesized)
tctcctgatgctgctgtagtgaaccgccacggccttggcagcttaaagcaatcagactcttctctcagtcctggaggtcaggagtctcactgggctaaaaccaaggttcggcagggctgt

SEQ ID NO: 1028585 - DNA, 120 bp, Artificial Sequence
  ENSG00000230061_14 (sequence is synthesized)
gctcctcccgtaggtcgggagcctccatgccttgcctttcctgccttccagaggctgcctgcattcctgggctgaggctctcccctcccgccgacgctcactgccaccgtcacattcctt

SEQ ID NO: 1028586 - DNA, 120 bp, Artificial Sequence
  ENSG00000230061_15 (sequence is synthesized)
ctccgcctccctcttccacggcccctcatgatgatgtcgggcccatgcagataaccccagataatttcccacctcaggatcctccacttaaccccaccctcccagtcccttttgccacat

SEQ ID NO: 1028587 - DNA, 120 bp, Artificial Sequence
  ENSG00000230061_16 (sequence is synthesized)
agggccccatagccacagggttcgagtgtggacctccctggggctgttattcaaactgccacagatgccacaaacaccaggcccagaggaggtggacacgtgtgtgcaaatccacaaaac

SEQ ID NO: 1028588 - DNA, 120 bp, Artificial Sequence
  ENSG00000230061_17 (sequence is synthesized)
cagcaaagcacgtgaagacgtgcagatgaggaagaccccaatggcacgggagggcagacacagagccgtccacagatggatcggagctctggggaaggcaccgcagagccagcgccgtct

SEQ ID NO: 1028589 - DNA, 120 bp, Artificial Sequence
  ENSG00000253889_0 (sequence is synthesized)
atggcctgaatccctctgctgctcaccctcctcagtctctgcacaggagggtcctgggcagtcagggctcacttggtggcctgcacagtttgtctgtgactaaaccagccaccatctcct

SEQ ID NO: 1028590 - DNA, 120 bp, Artificial Sequence
  ENSG00000253889_1 (sequence is synthesized)
ccttggaattgtgtcctggtaccaacaatgaacaggaagtgtccttaaacctctgatctgtggatgtaaatatccacctgcagatccagaactgattcttgagtgatcagtctggcaagg

SEQ ID NO: 1028591 - DNA, 120 bp, Artificial Sequence
  ENSG00000253889_2 (sequence is synthesized)
aggccttcctgagcatatctgggctccaggctgaggacaaggctgatcattaacgttggatttggacagttctctggaggcccccacggtgctgcagtctgtggggaagtgagatgggaa

SEQ ID NO: 1028592 - DNA, 120 bp, Artificial Sequence
  ENSG00000230063_0 (sequence is synthesized)
tgcataaggtgaaaagtgagtggaaattgtagaagctgaatgagtaagtctttagactatagtctttaatctaactaaagactaagactaagcctagagcctgtagtctttagaccttta

SEQ ID NO: 1028593 - DNA, 120 bp, Artificial Sequence
  ENSG00000230063_1 (sequence is synthesized)
gactgtagtatagtcttaggctataggtgctgggcaagtaagccagtattgaacgtagatttttctaagacctgttaaagcaagggatctttgtttcttaaattcttctgatataaaaat

SEQ ID NO: 1028594 - DNA, 120 bp, Artificial Sequence
  ENSG00000230063_2 (sequence is synthesized)
aagtttttctcaaaaaaatatgagagcatttgttttatgaatgagtactgagaaacaagatgaatgaattgttaatcattcagcacatttgtgtcacagttagattttggagtcacccct

SEQ ID NO: 1028595 - DNA, 120 bp, Artificial Sequence
  ENSG00000230063_3 (sequence is synthesized)
caaagttataatgatctgtaattagcttgaagaaattgtagattatcaagaactgattagaatctacttgtttttgcttcttttggaaatgttgggtatattctggtccccttttacaca

SEQ ID NO: 1028596 - DNA, 120 bp, Artificial Sequence
  ENSG00000230063_4 (sequence is synthesized)
aagtttttgaaaactttttaaaatactcttccacattagcatagtactatctttctgatcattttttctcaatttgatagaggaaaaaagttaggtcaggataacagagactgggatata

SEQ ID NO: 1028597 - DNA, 120 bp, Artificial Sequence
  ENSG00000230065_0 (sequence is synthesized)
aaagaattaatggcacatctcatagttctttcatttgctggctgattcattccagagtggttttgaggacagaatgaagcaagatgaaaaacagcactttgaaaatggagtgtgtggtat

SEQ ID NO: 1028598 - DNA, 120 bp, Artificial Sequence
  ENSG00000230065_1 (sequence is synthesized)
cttttagagaagaagaaatgtgtctcagaaaaaggacctcttctgactcaaatttagcttacatccccttctcaaccatatcccaggtgataaaatatgacacccaggtaagcagtggcc

SEQ ID NO: 1028599 - DNA, 120 bp, Artificial Sequence
  ENSG00000230065_2 (sequence is synthesized)
ttgtggactctgaagaagttcttaacgtgtccacggcacattctcattttgtctggctctaaactactgtctcaagaaagctgcaaatatttgaaagtaacaataaagtgttaacagtaa

SEQ ID NO: 1028600 - DNA, 120 bp, Artificial Sequence
  ENSG00000253880_0 (sequence is synthesized)
ctctttttctcttactctggggatgtgaaaatgtgtctgcttcccctttgcctttcaccatgattgtgagtttcctgtgcagcctgcttcctgtacagccaggcttcccatacggcctgc

SEQ ID NO: 1028601 - DNA, 120 bp, Artificial Sequence
  ENSG00000253880_1 (sequence is synthesized)
agaactgagggggatgaagaacactctcaggaccttactctaagagtaaggtagagctgggagctgcaaggagcctggttcctcagtcacttcatggagcagagagcctcctcgctacct

SEQ ID NO: 1028602 - DNA, 120 bp, Artificial Sequence
  ENSG00000253880_2 (sequence is synthesized)
tcactgacagagtaacaggtgtgtgggctttgagcagtcgctacaccttccctcttcaggcatgatgagaggattcctgcagcgttttgcaagagggtccacactacctttatgagctgt

SEQ ID NO: 1028603 - DNA, 80 bp, Artificial Sequence
  ENSG00000230068_0 (sequence is synthesized)
tgcctccgcacggggccttaattatacatttgaacttaagtgacattttattgaaaactaattgtggtgacgaggaatgg

SEQ ID NO: 1028604 - DNA, 120 bp, Artificial Sequence
  ENSG00000230068_1 (sequence is synthesized)
tgacattttattgaaaactaattgtggtgacgaggaatggtctaagcatatgattaggataattcatattcattatgaaaacttaggtgaaatacagacttggcatttagcttgtcaaat

SEQ ID NO: 1028605 - DNA, 81 bp, Artificial Sequence
  ENSG00000230068_2 (sequence is synthesized)
aaaatgttaagaaccaaaatcatctttttcagctacccgcctgaaaaaattattgctatttttcttttcttttttttgaga

SEQ ID NO: 1028606 - DNA, 120 bp, Artificial Sequence
  ENSG00000230068_3 (sequence is synthesized)
ttacaggcgtgagccactgcgccaggccttcacagtcatctttagtatgtataacatttcatcctgtggtgtattattacttgttttttttttgttacattaactgttttgatgatacag

SEQ ID NO: 1028607 - DNA, 120 bp, Artificial Sequence
  ENSG00000230068_4 (sequence is synthesized)
tttttgttacattaactgttttgatgatacagcatctcattgtttcttgataaagtatttccttctttttggataaattacctgaagtggaaatgtatgtgtagggcattaaaaaaacaa

SEQ ID NO: 1028608 - DNA, 71 bp, Artificial Sequence
  ENSG00000253883_0 (sequence is synthesized)
cagtgacatgaactgggtccgccaggctccaggaaaggggctggagtgggtatcgggtgttagttggaatg

SEQ ID NO: 1028609 - DNA, 120 bp, Artificial Sequence
  ENSG00000253883_1 (sequence is synthesized)
cactatgcagactctgtgaagggccgattcatcatctccagagacaattccaggaacttcctgtatcagcaaatgaacagcctgaggcccgaggacatggctgtgtattactgtgtgaga

SEQ ID NO: 1028610 - DNA, 120 bp, Artificial Sequence
  ENSG00000253887_0 (sequence is synthesized)
gcatatgtgaaggtgtggcctcatgaaaccacagcacactgttaggagctaccagcctgtcacaagtgggtgtgaaggttgcctagaggagactaccaggagataacactgaaggggtgg

SEQ ID NO: 1028611 - DNA, 120 bp, Artificial Sequence
  ENSG00000253887_1 (sequence is synthesized)
gggctttaagcaaggcccaggcctcactgaatctgtggtttagaaagaactctctggttacaagatggagcatggatgcaagcgaggttagaaaaaagtgaacatctggacaaaatgagg

SEQ ID NO: 1028612 - DNA, 120 bp, Artificial Sequence
  ENSG00000253887_2 (sequence is synthesized)
actcttgactgtaaggaggaaggaaagaagtggccactgggtggagaaccaagtgtaacttcatccaagtgaagtgtgaaaacttctctgaaaaaagatcatataaaatctggattctca

SEQ ID NO: 1028613 - DNA, 120 bp, Artificial Sequence
  ENSG00000197176_0 (sequence is synthesized)
caaaactcatgttgaaatgtaatccccaaggtagcagtatggagaggtagagccttgaagaggtgattggtctgccctcatgaatggattaatccattgatggatcaatgggttaatgga

SEQ ID NO: 1028614 - DNA, 120 bp, Artificial Sequence
  ENSG00000197176_1 (sequence is synthesized)
ttatcataggaggggaacgggtggctttatattaggaggaagagatacctgggctaacatgctccacttcctcatcatgtgatgtcctgtgctaccatgagactctacagagttcccagc

SEQ ID NO: 1028615 - DNA, 120 bp, Artificial Sequence
  ENSG00000197176_2 (sequence is synthesized)
agcaagaaggccctgagcagatatggccctctgaccttggacttctcagcctccgtgactaagccactgagacagtggtggggcagccaccttctcgttcttcttcttcttcctgctttc

SEQ ID NO: 1028616 - DNA, 120 bp, Artificial Sequence
  ENSG00000197176_3 (sequence is synthesized)
cctcagagatggactcttaataagatatctcagaagctggactggcctaactggagataaaacttgaattaaaagaagaggcaagaactggtgcttcattcatctctcccatcaactctc

SEQ ID NO: 1028617 - DNA, 120 bp, Artificial Sequence
  ENSG00000197176_4 (sequence is synthesized)
tctttgtggtcctgatttgtcagtgagaatgtactggagtttgcaaaggagaaaaaaaaaccacagagcttttctcccaattgtctgctttcagaatgaagaaggagaagtcaacatttg

SEQ ID NO: 1028618 - DNA, 120 bp, Artificial Sequence
  ENSG00000197176_5 (sequence is synthesized)
ggaagtgtttaccatggaccaggagggtctcagtgattttgcagaaatcgtaattgaagaaaatgatggaaaggaagctttgaatatggagtgttgttattgcactgactggacaaccag

SEQ ID NO: 1028619 - DNA, 120 bp, Artificial Sequence
  ENSG00000197176_6 (sequence is synthesized)
ctccgtaggcagggttcctcgggcttctcagctggcttccttggagaaatttcatatgctgattcctttcaattatctgtcaattttcaaaatgcaaatagaaacatgcagtcatcactt

SEQ ID NO: 1028620 - DNA, 120 bp, Artificial Sequence
  ENSG00000197176_7 (sequence is synthesized)
tggtactcaccagctgatttcttccaagcacccagaccataagtgaatgcagttcaatatgttctcttcctttttttaagtggagttaatattactgagcagattttggttagcttccag

SEQ ID NO: 1028621 - DNA, 120 bp, Artificial Sequence
  ENSG00000197176_8 (sequence is synthesized)
gaacccagtgtgtggagaggcagaattttattttagaagcacaagttggtttgaaaaatgtgaacttaccccaactctttctttgtttcatctttcttactagacatgttttattttcct

SEQ ID NO: 1028622 - DNA, 120 bp, Artificial Sequence
  ENSG00000197176_9 (sequence is synthesized)
ttttacatatttataacacagaaaaaaagtaagaagaaaaggaaaaatggtgtataatcttaagaccaggagataaccaataataaatattttgctataatttcttttcatattctatgc

SEQ ID NO: 1028623 - DNA, 120 bp, Artificial Sequence
  ENSG00000197176_10 (sequence is synthesized)
atatacattttatggaattgagttcacactgttcacataattttgctttctctattttgcctttacctttatcaataagcattttctttatatccttaaaatttctttattaacgtaacc

SEQ ID NO: 1028624 - DNA, 120 bp, Artificial Sequence
  ENSG00000197176_11 (sequence is synthesized)
taatacatatgcacaaaatgttacctaatcattcgcctgtttaagggcatttggtaatttccaatattttttccttcacgatttcgggtaatgtttaaataaaccaatttatggaaaaga

SEQ ID NO: 1028625 - DNA, 120 bp, Artificial Sequence
  ENSG00000197176_12 (sequence is synthesized)
aggaggtaatataacacatcatttaactctcccaactagcctggagcacagattccactacctccccataacaatgagaaaagcaaggctcagagaggcttagacactcatgctgtatgt

SEQ ID NO: 1028626 - DNA, 120 bp, Artificial Sequence
  ENSG00000197176_13 (sequence is synthesized)
tgaccttggacttctcagcctccgtgactaatgaagaaggagaagtcaacatttgggaagtgtttaccatggaccaggagtctccggaaactcgaagattacaagcagaaaactagcctg

SEQ ID NO: 1028627 - DNA, 120 bp, Artificial Sequence
  ENSG00000243613_0 (sequence is synthesized)
aagtcccggtaacactgtgagaagtaaagtttgtgatcagccagcaagctgaggataaggtcctcaccccacccacagtggaccccttgccctctaatcccttaaacttaaataacacca

SEQ ID NO: 1028628 - DNA, 120 bp, Artificial Sequence
  ENSG00000248733_0 (sequence is synthesized)
atgcatcacacctggtgtatcccaatgagtggagaaaaaaagtttaaaggagcagctgccaacttttcagaaacacgatcaccttccctcctcctgcaaacagtaggtaccattattttc

SEQ ID NO: 1028629 - DNA, 120 bp, Artificial Sequence
  ENSG00000248733_1 (sequence is synthesized)
tgaactactaacttgtacactctcctgcttctccagatacactgaaaaaaggcaggcggcactgttcgtgagatgcatgagctttgcactgtggtccagcacatctctgttgtaggcttc

SEQ ID NO: 1028630 - DNA, 120 bp, Artificial Sequence
  ENSG00000248733_2 (sequence is synthesized)
ctcatgcctgatcctgaaagggtcactcctaccctttccaaaaaccactacaggtacagcgggacactaatcccttcaggttcacctgatgttagggaccaaataaaagcttggaaaggt

SEQ ID NO: 1028631 - DNA, 120 bp, Artificial Sequence
  ENSG00000248734_0 (sequence is synthesized)
gtaagcaacccataactttctcccccattgctttttctcacttcaggaggcccagtatggtggtgagaagaaccagaaggcactcaaaatttaggccagaaggatacgggtatgaggaga

SEQ ID NO: 1028632 - DNA, 120 bp, Artificial Sequence
  ENSG00000248734_1 (sequence is synthesized)
aagagataatccttcccacctgcatgcttcctcttaggactttaggtctgcctacatgttgaagaagtttgagttttaggctttgggagcatttccttaaaaaccattgtcatgggggag

SEQ ID NO: 1028633 - DNA, 120 bp, Artificial Sequence
  ENSG00000248734_2 (sequence is synthesized)
gaaaaaaaaagggtagtgttaattctgtcttcacacactcagagatcatttggttgggctacattttatgagctatattccataaagatgctgcaaagttcaggtatctggtttaggaaa

SEQ ID NO: 1028634 - DNA, 120 bp, Artificial Sequence
  ENSG00000248734_3 (sequence is synthesized)
ataaagacccagtggtgggagaaacctgatccggtatagcggggccagaagaagctgcgggaccatgccgcggggacaagaaatcaagaatttgaacaataacagctgctttcagaaata

SEQ ID NO: 1028635 - DNA, 120 bp, Artificial Sequence
  ENSG00000248734_4 (sequence is synthesized)
aaccgcgactttgtgcagcgtgtattacctgacgagctgaaatgcattgttaatgagactcgcccgatcattactgctgactgctgtgtgtgttccttttaaaaggccagtcaaagagtc

SEQ ID NO: 1028636 - DNA, 120 bp, Artificial Sequence
  ENSG00000248734_5 (sequence is synthesized)
ccatccatcatcctcgtaatgcacaatgtaatagccattcatgcccacattaaatttgatccattccacctcttctgggaggatgagcacatctagagtaaataaaataaatcaaagttc

SEQ ID NO: 1028637 - DNA, 120 bp, Artificial Sequence
  ENSG00000248734_6 (sequence is synthesized)
tcttctccatttcaaagacactgcatatccttagaaacccttcattacagagggttagtgttaaaaacctcagtggtagggtatatattatataagttaaaaaataaaaaagaagaagcc

SEQ ID NO: 1028638 - DNA, 120 bp, Artificial Sequence
  ENSG00000248738_0 (sequence is synthesized)
ggttactttctcagctgtaaccaggaggcagggaagaaggcaatgcagtcctcattctttagagactcaacctgtgtccccagccctccccacctcctcccacacccccctccaaactca

SEQ ID NO: 1028639 - DNA, 120 bp, Artificial Sequence
  ENSG00000248738_1 (sequence is synthesized)
gcttggctgggaaaggaaactccccagtctgctgtgctcctgcaagctgagtgtttgcaggtgaatctactccaggccgtgagcgccccagaggtgggaactatatcttagtcacccttg

SEQ ID NO: 1028640 - DNA, 120 bp, Artificial Sequence
  ENSG00000248738_2 (sequence is synthesized)
ttttgtttctgatgctgagacccttcctgaaccggatctccatcccttcactgagcagggttcacacatatttatgttggagtgcaaaggcttccgatgcccggacacgtgtcctccaat

SEQ ID NO: 1028641 - DNA, 120 bp, Artificial Sequence
  ENSG00000248738_3 (sequence is synthesized)
ctgagaagggaaccagggaaggggctggagttgatgcatcttgacttaagggctgaagagttggcaattttggaggccagtgaagagccacgtagaaaatgtcccgctgcctgccatcat

SEQ ID NO: 1028642 - DNA, 120 bp, Artificial Sequence
  ENSG00000248738_4 (sequence is synthesized)
gacacagggacctctttaaaatgaagatgaaatgcacctggttctaccacctagttagaagcagttatgaaggttgaagagctgttatctgagatttatagccccaaatctatgagatag

SEQ ID NO: 1028643 - DNA, 120 bp, Artificial Sequence
  ENSG00000248738_5 (sequence is synthesized)
actctcctaattaataagacaaggatgactagaaagttgtgaaaactacctggcagggcttggagcctgctgtcaccaccacgatgatagcactgtctttgctgctgagcctattagaat

SEQ ID NO: 1028644 - DNA, 120 bp, Artificial Sequence
  ENSG00000248738_6 (sequence is synthesized)
gtcaggatgtgcattcttctctcctagtgggatggcacggttcacctggctattacagagaagcaagtgcagatcgtgacttaaggctccgggaggagagttaatcagggaagagctggt

SEQ ID NO: 1028645 - DNA, 120 bp, Artificial Sequence
  ENSG00000248738_7 (sequence is synthesized)
tgacaagactcactcagtgcatgacttgagagcaccaagagggggaaagggagaagaaagaacctcttccaaaggcagcatccacccccttgacaaagggccatttcccccagcccgggg

SEQ ID NO: 1028646 - DNA, 120 bp, Artificial Sequence
  ENSG00000248738_8 (sequence is synthesized)
tgctttctgacttcctttgttccccgatgagcattttcttccttgtccccagccttcacataagttcaattcaacatcctctctctcttctcccaatgtcctctccttaattttgctgca

SEQ ID NO: 1028647 - DNA, 120 bp, Artificial Sequence
  ENSG00000248738_9 (sequence is synthesized)
tcctccaatgtgaatgtttgcctcctggtctgggatctgtcttattccctttatctcacctgaaaaaactctcccctttaatctctgctcattcaagtcctgcccatccttcaaagtatg

SEQ ID NO: 1028648 - DNA, 120 bp, Artificial Sequence
  ENSG00000248738_10 (sequence is synthesized)
gccaagctcacctcttccagaaagccccaccctgtggtgttatctccatcctgaatcacagcagcacttactgtgagataactatcaggttacatctatcagagttcaatgcactctccc

SEQ ID NO: 1028649 - DNA, 120 bp, Artificial Sequence
  ENSG00000248738_11 (sequence is synthesized)
caaatgaagtggacacttgttggcagtaagaagagaagctttttgcaccaagtggtgcattcaatgcaatgcaaggagactgtgacgatactgaaatgagtattacccggccccaggaga

SEQ ID NO: 1028650 - DNA, 120 bp, Artificial Sequence
  ENSG00000248738_12 (sequence is synthesized)
tgaacaccgtccttgcttgatgccagttcataaagagagctcttgtttattgagagcttatgagtgctgaggaattcacataaatcatctcatctaaattttccaacaatcatgagatgg

SEQ ID NO: 1028651 - DNA, 120 bp, Artificial Sequence
  ENSG00000248738_13 (sequence is synthesized)
tttctcttatttcctccttttacgcatgaagaaactggggctcaggaggttagatgactttctcagagtcacacagatagtacagggctgacccagaattcaagcccaggtctggcagac

SEQ ID NO: 1028652 - DNA, 120 bp, Artificial Sequence
  ENSG00000248738_14 (sequence is synthesized)
tccagcacccgccctttgcctccacgaccaagtacaagcagcaggctggcactggcctttccctgctatgactgccgagctgggttacacctgctgctggtccccagcaccaggcacacg

SEQ ID NO: 1028653 - DNA, 120 bp, Artificial Sequence
  ENSG00000248738_15 (sequence is synthesized)
acgtaactgtgagtcctccgagtatgtgagggagctggcactcaccttctgcctgaagcaaaggagctgtgctcttccgtttcagtgtgaaaaagcctcagaagatgcccagcttagaag

SEQ ID NO: 1028654 - DNA, 120 bp, Artificial Sequence
  ENSG00000248738_16 (sequence is synthesized)
ggcgtcctcagcactgttgctagtgaagctactctgcccaaggtctccagagagcttctgaaagaagtcaggactcatgcatgcagatgaatacgcctcgtgggtattcaccaggtcctc

SEQ ID NO: 1028655 - DNA, 120 bp, Artificial Sequence
  ENSG00000248738_17 (sequence is synthesized)
ttgggaagccagctctgtgtcccaggcacaccgtctgtgtgcaagagaaggggagcacctgagtttgggaactgctttcgtaccagcttataggccaccccaagaaccggcctcctggct

SEQ ID NO: 1028656 - DNA, 120 bp, Artificial Sequence
  ENSG00000248738_18 (sequence is synthesized)
tcctagtcacagaccgcctgcagggttgacttatgcatccttttgcaggagacaggctcacttctctcctgtgactaacatggaattacgggttaaggagggaagttgtactcacctgtt

SEQ ID NO: 1028657 - DNA, 120 bp, Artificial Sequence
  ENSG00000248738_19 (sequence is synthesized)
gattcatttattcactcacttgctcactcatcaatcatttcttcaacaatgaaacccttactagacaaatactgactccctgctccagaataactatctgttcggtgctaggactgtcaa

SEQ ID NO: 1028658 - DNA, 120 bp, Artificial Sequence
  ENSG00000248738_20 (sequence is synthesized)
atgagtaagcgtttcttcccacaggcgttcagggtctatttctgcactttacagacaggcaagacagaagtgatcagaagcggccaccaaccatggagttcagaaacacggcacagttct

SEQ ID NO: 1028659 - DNA, 120 bp, Artificial Sequence
  ENSG00000248738_21 (sequence is synthesized)
ggaagaggcgaaaggcggctcttccatccatgctggtcaagaggaaattcaacacacctcacagccattgaatctgaccaggcgtgtaatacatcccatcgtcttgtcagttagcagctg

SEQ ID NO: 1028660 - DNA, 120 bp, Artificial Sequence
  ENSG00000248738_22 (sequence is synthesized)
tgggaccttgaaggcttcttaaattccccaagtctagactttcttatctttaaaatgcagctgaaaacaatgcctgtctcatggaggtgtaagggttaaatggaatcatgtagcaagcat

SEQ ID NO: 1028661 - DNA, 120 bp, Artificial Sequence
  ENSG00000248738_23 (sequence is synthesized)
tcagcacatgtcaagtccaggtcaaggccaacatgcaggggcagggagaggtgtaacctctttcagtttggagccatgcaggaccctgccatttgcagccctttggggtaagactgtagc

SEQ ID NO: 1028662 - DNA, 120 bp, Artificial Sequence
  ENSG00000248738_24 (sequence is synthesized)
ccccaaacatcctgctgccccagagcagtggcccagcaggtgcactgagagctctggtgcacctggcatgccccgactcctcacacagcagcaacagggacagtgacagggacctgagat

SEQ ID NO: 1028663 - DNA, 120 bp, Artificial Sequence
  ENSG00000248738_25 (sequence is synthesized)
ggggtggcccacctggctggcagctggcactgggcacattgcccagaagttggggagttctcaggtaggggcagaggtgggtgtttgagggagcagttagcagcactgtctgctgtggca

SEQ ID NO: 1028664 - DNA, 120 bp, Artificial Sequence
  ENSG00000248738_26 (sequence is synthesized)
ggggtctcctgggtaaggtcagagggattcgaggaggcccagggatcaccccagggtggggtgggacgctgctcaagtcacaaagcaaagttgcagggtgtaggggaggggatgggactg

SEQ ID NO: 1028665 - DNA, 120 bp, Artificial Sequence
  ENSG00000248738_27 (sequence is synthesized)
ttagtctaattgtgactcatctctccttatttttctccttatctcttgtatttatttttttcaatcctcccaagttactgggccttgaggacactcctagtgtgtgtgtgtgtgtgtgtg

SEQ ID NO: 1028666 - DNA, 120 bp, Artificial Sequence
  ENSG00000248738_28 (sequence is synthesized)
cccaggaagtcgaggctgcagtgagccatgatcatatttgccagcctgggtgacagagcaagaccatctcaaagaacgtatttaccgaatgaagttttatgatgttctctagcacttttt

SEQ ID NO: 1028667 - DNA, 120 bp, Artificial Sequence
  ENSG00000248738_29 (sequence is synthesized)
ttatgatgttctctagcactttttagtttattgtctttaaaaagaaaccctctgaagtgtctctggagaatacaaacgcatgcgcgcatgcacacgctgggaacaggagctgcttcagta

SEQ ID NO: 1028668 - DNA, 120 bp, Artificial Sequence
  ENSG00000248738_30 (sequence is synthesized)
ggtaactgagtgggagggaggttagcttttcactgtgacccttatctgtacacctgctaactcaaaataatttaataacaacaacaatgacaataaaaagggagtgagtgctctcatttt

SEQ ID NO: 1028669 - DNA, 120 bp, Artificial Sequence
  ENSG00000259617_0 (sequence is synthesized)
tattcttccttggtaaagtcacttgactgctgacagtctgtttcctggactataaaatgaagatgctatgaatactgctgaagtgactaactgatgacgtatcaatgtcaaacataagta

SEQ ID NO: 1028670 - DNA, 120 bp, Artificial Sequence
  ENSG00000259617_1 (sequence is synthesized)
tcggtgaaagaactattttgaaataaacatcctggttaatcactaaggtctaaggaggaaaactgaagacgaagttcaacagacccgtcactagtggagcctggctttctccttggagaa

SEQ ID NO: 1028671 - DNA, 120 bp, Artificial Sequence
  ENSG00000259617_2 (sequence is synthesized)
tattacaatgagaagctgcactcaggataattatggctcggtaaaccatcagcattcagcaggcagtaattgaaatttcataggctcattagcaggtgggagaggtactgtggctgagag

SEQ ID NO: 1028672 - DNA, 120 bp, Artificial Sequence
  ENSG00000259617_3 (sequence is synthesized)
ctgccagctgagtagattgtacagtattgcaatttgtcataaggcactgtactgctactatgttaaaaggaaagcaggaaaataaaaggtactttttcttatacaaaatgaaacacagaa

SEQ ID NO: 1028673 - DNA, 120 bp, Artificial Sequence
  ENSG00000259615_0 (sequence is synthesized)
aagtgttgaaaaggaccttaagtttctattaaaggtaatgtgtgcatggcgtagtctgcttaatgttgcttacaacagaatagctgaaactgggtaatttataaagaaaaggaatgtatt

SEQ ID NO: 1028674 - DNA, 120 bp, Artificial Sequence
  ENSG00000259615_1 (sequence is synthesized)
tcttacagttatggaggctgagaagtccaaggccagggggttgtactttgcaaaggccttcttgctggtggggactctgcagagtcccaaggcagcacagggcaaagcagggcgatgagg

SEQ ID NO: 1028675 - DNA, 120 bp, Artificial Sequence
  ENSG00000278341_0 (sequence is synthesized)
tgttgtgaacacatctgagaaccccccaagtgtccaggccgcagggtggactgctctctagccccaaccaagagcccctcagcaggctgagaagggaggcccccagcctgaagctcagcc

SEQ ID NO: 1028676 - DNA, 120 bp, Artificial Sequence
  ENSG00000278341_1 (sequence is synthesized)
cagcagcccgggcccacggggtggtgaacacgcacctcaagaacctgccagaccatggagctggacgaaggccccccagaccacgccaagagcacctgggggagaaaaaacatcactcag

SEQ ID NO: 1028677 - DNA, 120 bp, Artificial Sequence
  ENSG00000278341_2 (sequence is synthesized)
ggcaccgcacctccaacacaggcagacaccccacctcgtggacatctaggacatcgagtctgtcctcaaaggccaaggaggagctggcgggctgcagcaggccaggctgcctgtgggagg

SEQ ID NO: 1028678 - DNA, 120 bp, Artificial Sequence
  ENSG00000278341_3 (sequence is synthesized)
gacaagcagggacctcgaggggccaggctgctcagtcagacccccaggacccagacgctaccttctcgcctggaaagatgagccggttcttgcccagcatggctctgaacttgtggacgt

SEQ ID NO: 1028679 - DNA, 120 bp, Artificial Sequence
  ENSG00000278341_4 (sequence is synthesized)
agaaggccttgaaacagtccctgcaacacagacctgagatgagggaaccgcctgctacccgcacagtgagcagcgtcctgaggcgctgccaggtgacgacgtcctttgccaatctccatc

SEQ ID NO: 1028680 - DNA, 120 bp, Artificial Sequence
  ENSG00000278341_5 (sequence is synthesized)
tttaaaagcagcatcttcacatccaggctctgtccagagactggtgaaaggggcggggttggcccctctggcagtggcttcctcagggtgaacacgaggctcaccggcccctcccacgac

SEQ ID NO: 1028681 - DNA, 120 bp, Artificial Sequence
  ENSG00000278341_6 (sequence is synthesized)
gagggcagagccccggcacccctccccacaggcgctcagaagggcccagctggtggagtggacagacttaggcacgtacagggcaaggccaacccagaccccataaaaaaagacccacca

SEQ ID NO: 1028682 - DNA, 120 bp, Artificial Sequence
  ENSG00000278341_7 (sequence is synthesized)
catacagacaccacctcttggaggtgaaacgtggaaatggagcgggccacagcgaggacccaccatgcagagacaccacctctttggggtgaagtgcggaaatggggtgggccacagcga

SEQ ID NO: 1028683 - DNA, 120 bp, Artificial Sequence
  ENSG00000278341_8 (sequence is synthesized)
gggctcagtatcctggggccccagagctggcatctttagtgtgctgggctcaactgggccaggaatggctaagaggctcactcacagagtggcctgggctcctcccctaaccccacagaa

SEQ ID NO: 1028684 - DNA, 120 bp, Artificial Sequence
  ENSG00000278341_9 (sequence is synthesized)
tcagaacttccaggcctgggaactgcatttttaagagacagggtctcgatgtgtcacccaggttggagtgcagtgccacagttatagctcactgcagcctcaaactcctcgattcatgtg

SEQ ID NO: 1028685 - DNA, 120 bp, Artificial Sequence
  ENSG00000278341_10 (sequence is synthesized)
atccttctgcctcagccacccaggtagataggactacaggttacagatatatgccaccatgcctagctaattgttgtattttttgtagagacaaggtctcactttgttgcccagactggt

SEQ ID NO: 1028686 - DNA, 120 bp, Artificial Sequence
  ENSG00000278341_11 (sequence is synthesized)
ctcaaactcctggccttaagtgaccctcctgcctgggcctcccagagtgctgagattccaggtatgagccactgcgcccagctgtaatctttgttcataataaactttccagccatctga

SEQ ID NO: 1028687 - DNA, 120 bp, Artificial Sequence
  ENSG00000237590_0 (sequence is synthesized)
tgccctgtgcctgggtgagtgaggtgtgcaaggtgggcctctgttctgctgccagcccagccaatgatggcaaggacagagggttcaaagctctgacccccattgtaaacagggggcaga

SEQ ID NO: 1028688 - DNA, 120 bp, Artificial Sequence
  ENSG00000237590_1 (sequence is synthesized)
ggagccgcccacctgagcagcatcagatccatgcaaagtgccaggtggaggtgaaacacagccagcgacacgactgttggtatttcgggtcaactcaccttgagctggagggagcagtca

SEQ ID NO: 1028689 - DNA, 120 bp, Artificial Sequence
  ENSG00000237590_2 (sequence is synthesized)
gcctccaagaaggcacgacgtgacacagtccagaccccttgcccgcctctgctggcctttcctcatcagcaaaatgtggagataacagcgcctacctaattgggatgctgtgaggattga

SEQ ID NO: 1028690 - DNA, 120 bp, Artificial Sequence
  ENSG00000237590_3 (sequence is synthesized)
agaatacacagaaacagcttagaacactacctcaattgttctacacacacctgagttggcaagtgtgtgaagtaacctcctccgagtcctggactgtggacagtgatgccaccttttggc

SEQ ID NO: 1028691 - DNA, 120 bp, Artificial Sequence
  ENSG00000237590_4 (sequence is synthesized)
acaactcccctagaatttaaggagaccaagacattgtgaaaaccaagtgtctcccaccttgccaggacctataaagtcaagggcggtgctggcatattttgttcctgtgacaggggctga

SEQ ID NO: 1028692 - DNA, 120 bp, Artificial Sequence
  ENSG00000237590_5 (sequence is synthesized)
tgaggtcactgtgggaatcacagcaagtccaagtccatgaggcttagggagaaggctgtgcatcaccctcatgggccgggagctccaggaacagctttcccagatttacgctgagggagt

SEQ ID NO: 1028693 - DNA, 120 bp, Artificial Sequence
  ENSG00000237590_6 (sequence is synthesized)
cctgaatccaggaaggaggttccatggccacctggcaccatgtgtcaatctcccaggtctgtgagtactctggtctcagccagctgaggaagccgtgggtcaacatgaaaatgcacaccc

SEQ ID NO: 1028694 - DNA, 120 bp, Artificial Sequence
  ENSG00000272329_0 (sequence is synthesized)
gttggatcagtggagataaggcagttggatgatttgctcttttcccgctttctagctgtaagaagaaatgtcttctgattttcttctttttccaagtatatacatctcctcatcaaagtt

SEQ ID NO: 1028695 - DNA, 120 bp, Artificial Sequence
  ENSG00000272329_1 (sequence is synthesized)
cagactatctgagatactattgtttttggaaaatcttctgaagatctggcttggaagcagtatccaaggtgttttccccatcaacactctcttcagcattttctcccagaacaggggagc

SEQ ID NO: 1028696 - DNA, 120 bp, Artificial Sequence
  ENSG00000272329_2 (sequence is synthesized)
tgactgaaagaacatgaactttggtttccaaatcttgagcatctggcttcatgactgcagccggaccatcaatgccatgaagacgacattgctgtggggggtatgagagtccatcaaagg

SEQ ID NO: 1028697 - DNA, 120 bp, Artificial Sequence
  ENSG00000272329_3 (sequence is synthesized)
agtctgctcctcattggcctttggcttcacccaacttagcctgacttctggatttggctgcaccatgaatggctgaaggtgcttttttctctgcttcttcttaagcagtgctctctgatt

SEQ ID NO: 1028698 - DNA, 120 bp, Artificial Sequence
  ENSG00000272329_4 (sequence is synthesized)
atccagtgccagctgttaaagtttcatcgtctcatcgtgaaagacactgtccccactggaaccaagccggcagcaactggcattcatgcctgctgctgtttaagtggcagccatgtcccc

SEQ ID NO: 1028699 - DNA, 79 bp, Artificial Sequence
  ENSG00000272329_5 (sequence is synthesized)
tggcagccatgtccccactcctagccacccatggctctaaactacttttaagagcttgagggaggccaaggcggataga

SEQ ID NO: 1028700 - DNA, 120 bp, Artificial Sequence
  ENSG00000272329_6 (sequence is synthesized)
cagtgagctgagatcgtaccattgcacttcagcctagcgacagagtgagactccgtcttaaaaaacaaaagagcttgtttggagagtgtatcatgggggtgcagctactcctataccttt

SEQ ID NO: 1028701 - DNA, 120 bp, Artificial Sequence
  ENSG00000272329_7 (sequence is synthesized)
gctcaaagactggtcctcttctctgggggacgacctcttccacggagcgtgcacttagggagggacaggagggatgcacatagagcggtgagcgaagaagagcacacacgcctagccagc

SEQ ID NO: 1028702 - DNA, 120 bp, Artificial Sequence
  ENSG00000272329_8 (sequence is synthesized)
caggtcagccgaatcaaccctggcgatcaatagggtaacagacgtctcagccagatcaccctcatatcctaaagcactcttaattaattttttacaaataataaaatgctttcatcctca

SEQ ID NO: 1028703 - DNA, 120 bp, Artificial Sequence
  ENSG00000272329_9 (sequence is synthesized)
gttaccggccggttgggcagcagcataggaaccggaagcatttgcatctgtggtcgagtgcaggctggatgtggaattgggtctttctttttctgaatatgtagcctgggatcttatttt

SEQ ID NO: 1028704 - DNA, 120 bp, Artificial Sequence
  ENSG00000237594_0 (sequence is synthesized)
gggctgtagagcgactatgggcgcacgccgggtatccgcgccgcagccaggctcggagcgcgcggctggaggggcgcgggcggcgcgcgctccagagatgccttcctgcgaggctccgtc

SEQ ID NO: 1028705 - DNA, 120 bp, Artificial Sequence
  ENSG00000237594_1 (sequence is synthesized)
agcgcggcccggggagatcgcccgcaggcagcggaggcgcggcgggccgggggacgaccagggagcccctaacaaagcagctttgggagggccggaggcctctgcctccctcggcgatag

SEQ ID NO: 1028706 - DNA, 120 bp, Artificial Sequence
  ENSG00000237594_2 (sequence is synthesized)
gtccgcgaagctgcctgtcatctcgcataggtggaggtggccaatggcgtgcacagacggagctctagttggcgcgcgcgcgcggctcggcatcggtgggattggtcggaggttgtggag

SEQ ID NO: 1028707 - DNA, 120 bp, Artificial Sequence
  ENSG00000237594_3 (sequence is synthesized)
tacaacaaaggctgggatgtatgttccttacaccttgattccatacacacgtgttcgccccgggagctgggaaggtctgcgctcccggggtgatcttgttgaaaacaaaaagaattgccc

SEQ ID NO: 1028708 - DNA, 120 bp, Artificial Sequence
  ENSG00000237594_4 (sequence is synthesized)
acgctgtggaagataaacctaaaccggaaaattgaaagtcatccctgattcctccttcttcttaaccctctcccatccatttttgttaacctcccaaacccattcctcccatcctgtctc

SEQ ID NO: 1028709 - DNA, 120 bp, Artificial Sequence
  ENSG00000237594_5 (sequence is synthesized)
acctggacctcagtaaagggctcccatcgtccttctgtcccaggccttgccccctgaaatctgttctccactttgcagaatgatccttctaagcagaaaaatctcattttgcgctcccaa

SEQ ID NO: 1028710 - DNA, 120 bp, Artificial Sequence
  ENSG00000237595_0 (sequence is synthesized)
agttatatccctaagtcataaagcagcagctgggcccaagattcctggcatccttccaatctcacctcccccgccctatttacccaggagcaaaagaagcggagggaagcaacacagcgc

SEQ ID NO: 1028711 - DNA, 120 bp, Artificial Sequence
  ENSG00000237595_1 (sequence is synthesized)
agcgtgactacgtgcttgatctgtctcctcctaacgggcatgcagtgagtacaaatgaagtctgtgggccaacaaggagcgaggagcagtttcctggaagccctgggctggtgtttgact

SEQ ID NO: 1028712 - DNA, 120 bp, Artificial Sequence
  ENSG00000237595_2 (sequence is synthesized)
tgctttgagatagaataaatgggagaaagagactttatgggacatctgggcctagggctcctggatgctgtgctgaaaacaccacgtacagaagccagtctaaccttctggatgatgaga

SEQ ID NO: 1028713 - DNA, 120 bp, Artificial Sequence
  ENSG00000237595_3 (sequence is synthesized)
tgaatcccatctggatcccatctgaatcccatgtcaccatgaatgaggccaccttagcccagccagcacagctgaaagccagaagcagccgcatgcacaagcccaggggaagcccacaga

SEQ ID NO: 1028714 - DNA, 120 bp, Artificial Sequence
  ENSG00000237595_4 (sequence is synthesized)
ggaaccaccagccaacacacagaattgcaagcaaaccccagcttttaagttggtctccgcagaggacaactgcattctccagcctcctgtacagcagagagtgccatgtgactaagacca

SEQ ID NO: 1028715 - DNA, 120 bp, Artificial Sequence
  ENSG00000237595_5 (sequence is synthesized)
agttctaaccagtgggatcaaagcagggaagtgttgccttctttgccccttcctgctggctggaatatgacaaaacggctgcagcatgagcaaccttcttgggccctgaggtggaagcca

SEQ ID NO: 1028716 - DNA, 120 bp, Artificial Sequence
  ENSG00000237595_6 (sequence is synthesized)
cctgttggttgaccgaccagatggtggagtgaccagatagaaggggcctggtgattgtggattctgccacactacctctggtcccctatacctatgtgaaaggaaaagaaatgtctgcca

SEQ ID NO: 1028717 - DNA, 80 bp, Artificial Sequence
  ENSG00000237595_7 (sequence is synthesized)
ttaagacaacaattttaaaatgaaccaggtccggccgggtgcggtggctgcgggtcaccggaggttgggagttcgagacc

SEQ ID NO: 1028718 - DNA, 120 bp, Artificial Sequence
  ENSG00000237595_8 (sequence is synthesized)
aggagcaaaagaagcggagggaagcaacacagcgcagcgtgactacgtgcttgatctgtctcctcctaacgggcatgcaggttggttccagtttccagcgatcctaaacacacttggctg

SEQ ID NO: 1028719 - DNA, 120 bp, Artificial Sequence
  ENSG00000237595_9 (sequence is synthesized)
gacctccctgtgcctacagaggcaacccaggtgccttaggtaagtgaccccattccctgccctgccttggagggccggatgagtcaaagagtaatcttatccctctgctagtgagtacaa

SEQ ID NO: 1028720 - DNA, 69 bp, Artificial Sequence
  ENSG00000237595_10 (sequence is synthesized)
taaggttataacatggcctggcgtgcagtacgtgctcaataaatgctcaccgttattgttgatcaggca

SEQ ID NO: 1028721 - DNA, 120 bp, Artificial Sequence
  ENSG00000237596_0 (sequence is synthesized)
gttccagtgcgacccggaacaaggcggacacggcaggagcacctcattcttcctcctagtcttctcctggagcagggagagcctgcccgtgggatcagctcccacgttactgaatggagt

SEQ ID NO: 1028722 - DNA, 120 bp, Artificial Sequence
  ENSG00000237596_1 (sequence is synthesized)
gagttgctcatttcggcagcgaatgctgaggtgacaaatggcttctgtacatttgcgaaaaggaggggaggcagcacttctccttcctgtcaccatgtgaagaaggacgtgtttgcttcc

SEQ ID NO: 1028723 - DNA, 120 bp, Artificial Sequence
  ENSG00000237596_2 (sequence is synthesized)
ctgaggcctccccagccctgcagaactgtcagtatgaaatataacttagaatgagtcagacatgtgtctgtcttttgtaaagtggaaacagggtgactgtgaaagttaagtggaaaagtg

SEQ ID NO: 1028724 - DNA, 120 bp, Artificial Sequence
  ENSG00000237596_3 (sequence is synthesized)
gcaagcacattccagaaatccaaagaagccactatgctgaaaatactttgagtgggttagagtttcgctcaaggaagtgctgtagtagaaaatggccatttctctgtgctgtgttcagag

SEQ ID NO: 1028725 - DNA, 120 bp, Artificial Sequence
  ENSG00000237596_4 (sequence is synthesized)
taagagacatgggtgaaagagttatccggaatggaatgctgaggagaccctaaagggaatttccgggtggatggccagcactgtcactcgatgagtggaggattgacaaacttgccaaat

SEQ ID NO: 1028726 - DNA, 120 bp, Artificial Sequence
  ENSG00000237596_5 (sequence is synthesized)
actgcaagaaaagatgttgctgatcacggataggaaatactccaagtcccaggagatagtctgttcttaggagacttccacaccaagtctgctgaccagagaaggaccagtcaaccacca

SEQ ID NO: 1028727 - DNA, 120 bp, Artificial Sequence
  ENSG00000237596_6 (sequence is synthesized)
cgtggggggggacctggtgagaggtaattgagtcatgggggtggggttttcccgtgctgttcttgtgacagtgagtaagtctcatgtgatctgctggttttataaagggcagtttccctg

SEQ ID NO: 1028728 - DNA, 120 bp, Artificial Sequence
  ENSG00000237596_7 (sequence is synthesized)
ctcatgtgatctgctggttttataaagggcagtttccctgcacctactctcttgcctgccaccatataagacatgcctttgctcctcctttggcttccaccatgattgtgaggcctcccc

SEQ ID NO: 1028729 - DNA, 120 bp, Artificial Sequence
  ENSG00000237596_8 (sequence is synthesized)
aaagctctcttaaatctgtttaaaaaaatctaagttaaggattggcaaccttgttctgtaaagggccataggagtaagagacatgggtgaaagagttatccggaatggaatgctgaggag

SEQ ID NO: 1028730 - DNA, 120 bp, Artificial Sequence
  ENSG00000237596_9 (sequence is synthesized)
cagctgagccagaaagcaccactaccacagccagtgccttgcctttcttctagaggaagagtaagagacatgggtgaaagagttatccggaatggaatgctgaggagaccctaaagggaa

SEQ ID NO: 1028731 - DNA, 120 bp, Artificial Sequence
  ENSG00000237596_10 (sequence is synthesized)
aatttaaggacaaacttgccaaatactgcaagaaaagatgttgctgatcacggataggaaatactccaagtcccaggagatagtctgttcttaggagacttccacaccaagtctgctgac

SEQ ID NO: 1028732 - DNA, 120 bp, Artificial Sequence
  ENSG00000237596_11 (sequence is synthesized)
aaagttcttggtgaaggttccgaagatgaaggtggagaaaacaaaaagagacagctgagagaggggtcagaaccaggcaaggggacgaatgagagtgaacctgagacactcaagctttaa

SEQ ID NO: 1028733 - DNA, 120 bp, Artificial Sequence
  ENSG00000237596_12 (sequence is synthesized)
ggagaggaactgtctccatgaaggccccacatttgagaacactgggtaacagcctaagtggtctcctacggattccttcttttgagcagcttgttcctagcctggcattcaatgaacttg

SEQ ID NO: 1028734 - DNA, 120 bp, Artificial Sequence
  ENSG00000237596_13 (sequence is synthesized)
ccaccaacagagaagcaggggatgagggccaaagaaaggaggagaagagctctcagaatttccaattagcacatttaagcagtgaaaatgtatcagacctgaccagaatacaatacattg

SEQ ID NO: 1028735 - DNA, 120 bp, Artificial Sequence
  ENSG00000237596_14 (sequence is synthesized)
aaaaccaaccagaaagaaaagaaaaaagaaactgtttgcagagaacgagcagagatcttgggaataccatcctccattgagagccagcccctcaaaagctcattcgtagggctgggtaaa

SEQ ID NO: 1028736 - DNA, 120 bp, Artificial Sequence
  ENSG00000237596_15 (sequence is synthesized)
cacacaccttttgcactctatttttgaaattatgttcaggagtctacagactgttatctgtagaagaagccacttttgaaattttagtttatgtaaagtgttccaaaatgcatgaacaga

SEQ ID NO: 1028737 - DNA, 120 bp, Artificial Sequence
  ENSG00000237596_16 (sequence is synthesized)
gtaattattttaaaagtctataaatgcatgcatttgctctaaaattttgtaattatcagtagattacaagttctctataggaagagagagctgtctcatattagttttgcacttatacct

SEQ ID NO: 1028738 - DNA, 120 bp, Artificial Sequence
  ENSG00000237596_17 (sequence is synthesized)
tttttaatagttctgaacttcactcttgtgtattcttttattttaaaagctataatgactaatcctgatcttctgctggaatatgtttaaataggattccattaaaaacaagagctagaa

SEQ ID NO: 1028739 - DNA, 120 bp, Artificial Sequence
  ENSG00000237596_18 (sequence is synthesized)
aggccagtttccatcgcacatgtgtcccgcagctccaccgaaaaggatcaagaaagtcaggattctaaataccaacagcatcactctgtcaaaaccacccttgcaacctttctcagaaaa

SEQ ID NO: 1028740 - DNA, 120 bp, Artificial Sequence
  ENSG00000237596_19 (sequence is synthesized)
ggaaatgtaatgacaagatgaaagttagccagaacggccatgtccagaaaagctctcagtagtacagccatctgtccgaaatactctaacctacaaggtggccacggtctcttcagaggg

SEQ ID NO: 1028741 - DNA, 120 bp, Artificial Sequence
  ENSG00000237596_20 (sequence is synthesized)
tcatggagctctgcaaagcttgtcttaaaactgattaaggttgttaaactgaaccatcttgactggccccagccaagtttcttacagtggaaatggcacattaactatgcagctgtcatg

SEQ ID NO: 1028742 - DNA, 120 bp, Artificial Sequence
  ENSG00000237596_21 (sequence is synthesized)
agagaagtcagtactcttagattctaacccaaaagaattcaaatatattggatttcctctcctgttcaattggaattcaaggacttaatccacttttaattacactgttcctgttgttgc

SEQ ID NO: 1028743 - DNA, 120 bp, Artificial Sequence
  ENSG00000237596_22 (sequence is synthesized)
gagtaatctgtccctaaaaagatgttcattcatgcatctgatggcaatttgtaagctattttattccttctgataattttattttttcacatatcaaaatgtattgagtggctgacatgc

SEQ ID NO: 1028744 - DNA, 120 bp, Artificial Sequence
  ENSG00000237596_23 (sequence is synthesized)
aacagatcttagggaaaacatgaaaaaaacagaatgttctccagactctcaaagagctggaatctagaaggagaggaagaaatgtacactaattgtaacaaaattaagtgatttgcctgt

SEQ ID NO: 1028745 - DNA, 120 bp, Artificial Sequence
  ENSG00000237596_24 (sequence is synthesized)
taaataaatacaaagaaagttctgtggaacttcagaagagaaaggcatattttccttcagtaatctcaggagggattcatgaaggggctagcatacgagcgggatattaagtaaggaatg

SEQ ID NO: 1028746 - DNA, 120 bp, Artificial Sequence
  ENSG00000237596_25 (sequence is synthesized)
ggataaattagggacatggagcaaagtcattttaagcattgagaacaatgagcagaaaacaagtaggatgctgtgggaggtttgtcttgtctgggtggaatatgagtactcagagggcaa

SEQ ID NO: 1028747 - DNA, 120 bp, Artificial Sequence
  ENSG00000237596_26 (sequence is synthesized)
taatgacaaataagactggaaaaatgagttcgtgccagatggagaactttgaatgcaggaggaaagaatctggattttctctgtagacactagagaattattaaaggattttgaagaagg

SEQ ID NO: 1028748 - DNA, 77 bp, Artificial Sequence
  ENSG00000237596_27 (sequence is synthesized)
ccatataagacatgcctttgctcctcctttggcttctccttcctgtcaccatgtgaagaaggacgtgtttgcttccc

SEQ ID NO: 1028749 - DNA, 120 bp, Artificial Sequence
  ENSG00000237596_28 (sequence is synthesized)
cttcattccagacatctgtgccaacatggcacttgggattcttttaaactccaagtgttgttcattttttgtttgtttttcaggaaggaaacagatggaaaaacctagacttggtgatat

SEQ ID NO: 1028750 - DNA, 120 bp, Artificial Sequence
  ENSG00000237596_29 (sequence is synthesized)
taagaactgaggccttttgggaagtgattaagtcttgagggctctgccctccgtgaatggaactataaaaaaggttgaagggagctggcttgccccttgcaccacaagaggacacataga

SEQ ID NO: 1028751 - DNA, 120 bp, Artificial Sequence
  ENSG00000237596_30 (sequence is synthesized)
ggagctggcttgccccttgcaccacaagaggacacatagaaggtgctgtcttatgaggcagagagcatgccctccccagacagagaacctgttggcaccttgatcttggacttcccagcc

SEQ ID NO: 1028752 - DNA, 120 bp, Artificial Sequence
  ENSG00000237596_31 (sequence is synthesized)
gaaagggtgggctcaagaggataattttcttggttgaagaagagactcaggctacgtttcatcacatatttgagtgcgcaaacttgaaatctctgttacaaatgttttaaacagtgactg

SEQ ID NO: 1028753 - DNA, 120 bp, Artificial Sequence
  ENSG00000237596_32 (sequence is synthesized)
attactttgcccagatgacatggccagtgagtatggagacagaccggaaattaaggctctgttctagattctcggaatatagcagtgaacaaaacagataaaacgtgcctgcccctgtgg

SEQ ID NO: 1028754 - DNA, 120 bp, Artificial Sequence
  ENSG00000237596_33 (sequence is synthesized)
cctctcctgttcaattggaattcaaggacttaatccacttttaattacactgttcctgttgttgcatcaaaagctaaaatgactgagctgctgaaaaccttgctgctctcctgttctcct

SEQ ID NO: 1028755 - DNA, 120 bp, Artificial Sequence
  ENSG00000237596_34 (sequence is synthesized)
caatgtagcaggggttgaccagactgcagaggacggggagttcagctcacaatgaggatggagaagcaaggaagctcttttgtggattaagcaacaacaaaaaccaaaacaaaccaaaaa

SEQ ID NO: 1028756 - DNA, 120 bp, Artificial Sequence
  ENSG00000237596_35 (sequence is synthesized)
gccggaggagagccgcgtctaagttgggccggcccctaggggctgtcgccttcctgctcctcgctctcagtcccttggcctgcgtggtcgtggtcaggcccgctgccactgctgcccctg

SEQ ID NO: 1028757 - DNA, 120 bp, Artificial Sequence
  ENSG00000237596_36 (sequence is synthesized)
cttctgtgctgcctgggcaacaggctcttccactgggccttgttgtgtgcgaggtggcccagcatgttctccgacagggtgctgttacccgtgaaatgggcccattcccggaagagcggc

SEQ ID NO: 1028758 - DNA, 120 bp, Artificial Sequence
  ENSG00000237596_37 (sequence is synthesized)
ttattcatttattccacaaacatgtttttgtttgcctactatgtgccaggctctgttctagattctcggaatatagcagtgaacaaaacagataaaacgtgcctgcccctgtgggactga

SEQ ID NO: 1028759 - DNA, 120 bp, Artificial Sequence
  ENSG00000237596_38 (sequence is synthesized)
gggtggggaaagggtggggttgttatgtgatcaaaggaatcatggaacagagaagacccatctaggtaacttgtgaggattcttacacatgttaatatcagtaattaatgggttgcagac

SEQ ID NO: 1028760 - DNA, 120 bp, Artificial Sequence
  ENSG00000237596_39 (sequence is synthesized)
aaagtcaaaacagcttgttccaatggacaatggacacctacttgtatcaaaaagactttgctgttcctggaagtactgttacttgttgagggtgtgatggcttcatggcttcgaggttac

SEQ ID NO: 1028761 - DNA, 120 bp, Artificial Sequence
  ENSG00000237596_40 (sequence is synthesized)
tttgaggagctggggtgccggctgtgcgggccctgagggcccagggtccctgaggggtggttgaagtgcactccaatgcatctggaggtgatgttcttactgacaatgagcaggtgactg

SEQ ID NO: 1028762 - DNA, 120 bp, Artificial Sequence
  ENSG00000237596_41 (sequence is synthesized)
ggttggagagggatatcatgatggctgcacggaagggactggacccatataatatactacccccaaaggcagcttcaggtaccaaagaggaccttaatttagcccccctccttcaccagc

SEQ ID NO: 1028763 - DNA, 120 bp, Artificial Sequence
  ENSG00000237596_42 (sequence is synthesized)
agtgggcagcatctgtgaagagaatagtgccatcatctggttttggctggacaaaggtgagccccggtgatgccctgactggaaactattacaagctgccccaccagtgggcccactgag

SEQ ID NO: 1028764 - DNA, 120 bp, Artificial Sequence
  ENSG00000237596_43 (sequence is synthesized)
cccctgcactaagttactcaaaatgtgctaaaaagtttcttctttttaataaaaactagccattgcattggctccttcttccaaaaactaaaaataaaaagactttgctttgtggttgga

SEQ ID NO: 1028765 - DNA, 120 bp, Artificial Sequence
  ENSG00000237596_44 (sequence is synthesized)
gctataaaagaattgataaccccgatactaaagtatacaaccaagaaaagtgtcaaatatatagttgatttagaacctggattatgttgaagaatttttggtgttctgagggctatgtaa

SEQ ID NO: 1028766 - DNA, 120 bp, Artificial Sequence
  ENSG00000237596_45 (sequence is synthesized)
aaatcttgtagactatgggtgctccagtcactaggcagataagcatttattatacatgatttgtaaaataaggcatttataatgttaaatatttctaacaattctagagaatgtaccttt

SEQ ID NO: 1028767 - DNA, 120 bp, Artificial Sequence
  ENSG00000237596_46 (sequence is synthesized)
caaaaaaatggaaacttagaaacatatatcccttgtcattttctttcactttgaatctattaatagattcttacaaaacaaaaagtttaataaaaattttctcactcagatattttggaa

SEQ ID NO: 1028768 - DNA, 84 bp, Artificial Sequence
  ENSG00000237596_47 (sequence is synthesized)
ccaccatgattgtgaggcctccccggtcatgtggaactcacttctccttcctgtcatatgattgtaagcttcctgaggcctccc

SEQ ID NO: 1028769 - DNA, 88 bp, Artificial Sequence
  ENSG00000237596_48 (sequence is synthesized)
gcactttgggaggcagaggcaggaggatcccctgaggccaggaactcaagaccagcctgggcaacgtagcaagaccatgtctctactg

SEQ ID NO: 1028770 - DNA, 60 bp, Artificial Sequence
  ENSG00000237596_49 (sequence is synthesized)
aaattagctgggtgtggtggtgtgcatccatagtcccagctacttgggaggcagaggagg

SEQ ID NO: 1028771 - DNA, 120 bp, Artificial Sequence
  ENSG00000237596_50 (sequence is synthesized)
agcaagacctcatttcaaaaacaaacaaacaaacaaaacaggcaatctaagtactggaagaaatgtgagttggcgatgtaagaaggatagactgttctgagactatggcgacaacctgtg

SEQ ID NO: 1028772 - DNA, 120 bp, Artificial Sequence
  ENSG00000237596_51 (sequence is synthesized)
gagatgacagattgtagaactaaaagaatcctgggtctctaatgttttgtggagctattgtgccttccttggacttccaactgcccaacttttatgaagcacttctccttcctgtcacca

SEQ ID NO: 1028773 - DNA, 120 bp, Artificial Sequence
  ENSG00000272320_0 (sequence is synthesized)
cctaaggcaaatgaattccttgaaaatctcttgggagaaaaagtgcattcataatttaaatgactatgctgctaatttatctgttacaaaagctcagaaccttgtgtctcttttgtcttt

SEQ ID NO: 1028774 - DNA, 120 bp, Artificial Sequence
  ENSG00000272320_1 (sequence is synthesized)
caaagtgatatacactgaggctccaaaattctgctctagaaaaattatggtggaaatctcttgggagccctgggtttgtgtgccaattttgtagccctgggcaagtcaccttattccttt

SEQ ID NO: 1028775 - DNA, 120 bp, Artificial Sequence
  ENSG00000272320_2 (sequence is synthesized)
gggcctcagtttccccacatctgtagaccgggttgtggaacggcaccaaggtcttgcctggcttcaacactctccatctagactcagggctaacgctcactgttgcctccttccggaagg

SEQ ID NO: 1028776 - DNA, 120 bp, Artificial Sequence
  ENSG00000272320_3 (sequence is synthesized)
tgaagaagatgctgctcctgacaacgcactgaataaatgagcttatgctgctttaagtttttgccagaccaaatgaagtcagtgcctaagacaactttggagtcagacttttcatgatta

SEQ ID NO: 1028777 - DNA, 120 bp, Artificial Sequence
  ENSG00000272320_4 (sequence is synthesized)
accaactccaaatgtataacaattggcatacatttaaaacatcccttaattcatattataagcggatgaatacttggagtccagttgcaggttcacctacaatctataaccttccatgtg

SEQ ID NO: 1028778 - DNA, 120 bp, Artificial Sequence
  ENSG00000272320_5 (sequence is synthesized)
gctgggttaaccttctccctctgtctgcacctttcactcatttatccgtagaagcaattatcaggctgcagaaaatataaggcacacagagccttcgaaatacaacgtggtagggggatt

SEQ ID NO: 1028779 - DNA, 120 bp, Artificial Sequence
  ENSG00000272320_6 (sequence is synthesized)
aatttggcaaatgacttttaaaaagtctgatgttgtaaaacagtgtgaggaggtaagtaggcagaggaacaagggcactctgtcgcttctgctcctgagcagaattttatccacacctct

SEQ ID NO: 1028780 - DNA, 120 bp, Artificial Sequence
  ENSG00000272320_7 (sequence is synthesized)
atgatagcagcctcacctcctactcacctcctaatgaaacaagtcgcgacaccttagccaattctgatggctgagtgaggctgtcccggtcgcactcaggactgccactctttagtactg

SEQ ID NO: 1028781 - DNA, 120 bp, Artificial Sequence
  ENSG00000272320_8 (sequence is synthesized)
ccaccatgtggatgtttgccagacgccagcaatggcaacaccctagcaactgaccccggacacctgtcaccagaggcccactcacttggtctctgtcggttgccaacagcccagcccacc

SEQ ID NO: 1028782 - DNA, 120 bp, Artificial Sequence
  ENSG00000272320_9 (sequence is synthesized)
accccacaaagtgcacacacgtgcacatctgtacatgtgcacacatgcacacacagatgcatgctgcctgcgctctgcctgtttgaaagctgcagtgcatctcaaactggcctggagcaa

SEQ ID NO: 1028783 - DNA, 120 bp, Artificial Sequence
  ENSG00000272320_10 (sequence is synthesized)
ccccagcttcccggtgggagcagggtggtgagatggactcttggggcacatcttagcatgaggacaggaagggcgaaggctggcccccgggacagccacactggcctccagagcagaggc

SEQ ID NO: 1028784 - DNA, 120 bp, Artificial Sequence
  ENSG00000272320_11 (sequence is synthesized)
tcagtgctcacttcccccttgcaggagtctctccgcttctccttgcaggcatttgtgttgacgcagaggttcctattgtcttacacaatctctgtggagtgttgtctgagggctccctaa

SEQ ID NO: 1028785 - DNA, 120 bp, Artificial Sequence
  ENSG00000272320_12 (sequence is synthesized)
acttccatgccatcagcaaatcccagaatacccacttacagaaaacatttgaatctcacttttaattgctccatttttatgactgaaatatgggtgaccattttatttccacatctgcct

SEQ ID NO: 1028786 - DNA, 120 bp, Artificial Sequence
  ENSG00000272320_13 (sequence is synthesized)
tttgtcagtattacctcatctatctcccatctagatagtttgtaggcagaaaagatttgaccaagaaattttttttatgtttcctattgatctctcaaattgattattggataacttgta

SEQ ID NO: 1028787 - DNA, 120 bp, Artificial Sequence
  ENSG00000272320_14 (sequence is synthesized)
aaaataattattgcctattgattcaagctcccggagactgcatggttttcatgacgcacctcttccgttttcctttgaggagagcattttcccgcatgcttaattgttgctgtaactgaa

SEQ ID NO: 1028788 - DNA, 120 bp, Artificial Sequence
  ENSG00000272320_15 (sequence is synthesized)
ttcagtttccctcctctcatgtagggaacccacagcacttattttatctgtaatagagtctctttgtataatgcagcattttgccccccttttggaataaaactggttttaatagaggaa

SEQ ID NO: 1028789 - DNA, 120 bp, Artificial Sequence
  ENSG00000272321_0 (sequence is synthesized)
actttactgtgcagcagaatcctctggggagctcttcacaatgtagatttctgggcatcacccatctacaaattcagactcttgaggtgaaaccaggaatctgcagttaaaggctcccag

SEQ ID NO: 1028790 - DNA, 120 bp, Artificial Sequence
  ENSG00000272321_1 (sequence is synthesized)
gtgacttgggttcaggtggctttcagaccactcatggggaaacactacttcaggggtgccccttgcagtagtgcctctgtctcctcacctgcacccaccggaccaggtgtcacccacact

SEQ ID NO: 1028791 - DNA, 120 bp, Artificial Sequence
  ENSG00000272321_2 (sequence is synthesized)
ttcctcggtatcttgcacatcggtcctcttgtatccatcctaaggctctcaccccgcttctgtccgtgttaactcatgttcattcccaacagactcatccctaggctctcccccaacaac

SEQ ID NO: 1028792 - DNA, 120 bp, Artificial Sequence
  ENSG00000272321_3 (sequence is synthesized)
ccatccttttctgcaacccctccactcccctcacacacaggctaatctttctctttccagtgtcttagacttactagtgacttcttggccaccgttggtgctcctgttgaatataaccgc

SEQ ID NO: 1028793 - DNA, 120 bp, Artificial Sequence
  ENSG00000272321_4 (sequence is synthesized)
agatgccaagggccacagccgaggaagtggaaaatctgcacgggcccagtaaggctctatctaaaagacagaaaaggatttaggaaggagttgcctttcaaccagcaaccaggcacaggc

SEQ ID NO: 1028794 - DNA, 120 bp, Artificial Sequence
  ENSG00000272321_5 (sequence is synthesized)
agaagagacattagagctttgtaacaagggacacacagagttggcagcacaaagggcctgggcctctgaaggttggatgaccaggctcatcatccatccagggatgaccgagcctgtgcc

SEQ ID NO: 1028795 - DNA, 120 bp, Artificial Sequence
  ENSG00000272321_6 (sequence is synthesized)
ctagactattggcctcccacagcagccagtccatctgcccagcagtccctgggcacccaggaatgcagcctacacggcatgagcgggcaggctgggggtatgtgtggcaggaacagaatt

SEQ ID NO: 1028796 - DNA, 120 bp, Artificial Sequence
  ENSG00000272321_7 (sequence is synthesized)
ggggttcttggggaggtttttttccacttaaaactctttttgtcgcctacgtctccagacatttaaagatttctgagctattttcagacctactatgaaaagaactgaggtgccagcagt

SEQ ID NO: 1028797 - DNA, 120 bp, Artificial Sequence
  ENSG00000272321_8 (sequence is synthesized)
cagacacccatcgaactgtttcctaagaggagaactggcatgactcacttttgatctgtcagctttgtattgatttttctggcaaactttgtaggtctgcccagggttgactccaccagg

SEQ ID NO: 1028798 - DNA, 120 bp, Artificial Sequence
  ENSG00000272321_9 (sequence is synthesized)
agcggctacgttgtaacccactgcgtccagagtcagtcattacaaaggccaccatcacaggatcggattctgcatttctttttgtgggaatgtgggaggagaggagggaaaccacaatcc

SEQ ID NO: 1028799 - DNA, 120 bp, Artificial Sequence
  ENSG00000272321_10 (sequence is synthesized)
gaaagagggactgatgggagctgacagaggcccagaggcaaaccatttccaccctgtcctttcctctacactgggaaccggggagccagcgattggaggctcagaaggaggatggtgagg

SEQ ID NO: 1028800 - DNA, 120 bp, Artificial Sequence
  ENSG00000272321_11 (sequence is synthesized)
ttttatgcacagtttaaatatattgctatgtaattttccaattttaaaacatgagatcactgattattcagtagcttccccatttttttacaaagccctcctgtgtgtatgtttgtgtgt

SEQ ID NO: 1028801 - DNA, 120 bp, Artificial Sequence
  ENSG00000272321_12 (sequence is synthesized)
gcgtgtgtgtgtttaaagccttttcagtcaaactgagatatcctaccgaccttcccattgttcctgagcccccatgagaatgtgtagatgtgtgtcagagctttagagcctgcaaggagc

SEQ ID NO: 1028802 - DNA, 120 bp, Artificial Sequence
  ENSG00000272321_13 (sequence is synthesized)
tcccgagtctgaggactcacttgtgctgatatttcagggaagagcttgatgcctagaaactggaatgtgcagatgttgcatattcagagactgaagtgctggcctcagcaaacaatgcca

SEQ ID NO: 1028803 - DNA, 120 bp, Artificial Sequence
  ENSG00000272321_14 (sequence is synthesized)
ggagaagaaccaagaggtggaaccacgtcaaccaggagccattgtttcgctgagggcaaagccatttgccaggccctgtgctggctgccctagccctcagtgcctcccctcaactttcct

SEQ ID NO: 1028804 - DNA, 120 bp, Artificial Sequence
  ENSG00000272321_15 (sequence is synthesized)
gtgggtgccctcaggtgaaacggcccctcagacagcccctcaggagcaggtttgacatgtcactgagagatgcatatgtgtgtgtgtgccggtgtgcatgtgtgtatctatgtgtgtgta

SEQ ID NO: 1028805 - DNA, 120 bp, Artificial Sequence
  ENSG00000272321_16 (sequence is synthesized)
tgtgggtctctgtgtgagtctctgtgtgtgtgtgtgtgtgtgtgtccattatgtctgtgtgcctggatgtctgtgtgtttctgtgtggccatatggatgtctatgagtcttgtgtgtatc

SEQ ID NO: 1028806 - DNA, 120 bp, Artificial Sequence
  ENSG00000272321_17 (sequence is synthesized)
tgtgtgtgcatgtgtatatgtgtctgtgtgtgaatctctgtgtccacgtgtctgagtgtatgcatgtgggtgtgtctgtgcatctgtgtgtgtctgtgaacatgggggtggaatggaagg

SEQ ID NO: 1028807 - DNA, 120 bp, Artificial Sequence
  ENSG00000272321_18 (sequence is synthesized)
ggacagcctcacccgtggggagaaggggatggaaacagctgctctccagggctcctggtagacatcacttccacagagaggctttctctgcactccttccaatttaaattctgctttctg

SEQ ID NO: 1028808 - DNA, 120 bp, Artificial Sequence
  ENSG00000272321_19 (sequence is synthesized)
ccagccaatatctctccctcgtgttgtctcactgcatccaatgcttttccttcttagctgttattgtaatttgtcatttttatttattgggtgatgtctgtcacccccgctagtctggaa

SEQ ID NO: 1028809 - DNA, 120 bp, Artificial Sequence
  ENSG00000272321_20 (sequence is synthesized)
gctccatggatacagggatattttatctccagtgcccaatacaatgcctggcacagaataaatgctgacaaataataaatgaaacgaggtcagaagggccttgtcattgcccttctggat

SEQ ID NO: 1028810 - DNA, 120 bp, Artificial Sequence
  ENSG00000272323_0 (sequence is synthesized)
cctcctgaccctggcgcacctcggtccgggcgccaaagcggtgcctcgcgaaagctgcacagcctgcgacgtccccagttaccttccgcagcccaggttagacgcgcccggcctccggct

SEQ ID NO: 1028811 - DNA, 120 bp, Artificial Sequence
  ENSG00000272323_1 (sequence is synthesized)
cgccccaaaactggcctctgcatattgtatctcacgagaccttacccctcggaggtgaaggcgtaggaagagaagatacattccgtccaaggatggaagggagcgccgggccccacggcc

SEQ ID NO: 1028812 - DNA, 120 bp, Artificial Sequence
  ENSG00000272323_2 (sequence is synthesized)
ctacttatttaaagctgcgacgtgtgcgggctgtattcggcgacgatcctggccacggtgcacccccacagctcctcgggagttttgtttttatggaccccagaggaaaggcttagatat

SEQ ID NO: 1028813 - DNA, 120 bp, Artificial Sequence
  ENSG00000272323_3 (sequence is synthesized)
ggctgttgactgtgctggcaccgtctgtgttacccagtaagattggagctaggcatggttaggaaagctgattgcaggaagagagtagggtaagaaatcgactactagatctgctaatgg

SEQ ID NO: 1028814 - DNA, 120 bp, Artificial Sequence
  ENSG00000272323_4 (sequence is synthesized)
ttagctgttcattatttatttagcacttagccctaaataatgcagccatatcttaccctttcgttggcatggaatacagtgtgtgtaatacacacaaggtgcagaggcaattgtggccat

SEQ ID NO: 1028815 - DNA, 120 bp, Artificial Sequence
  ENSG00000272323_5 (sequence is synthesized)
acccaaagaaacagcgccagctcttgcaacgctatgttgaaggatgttattatgaaccctatcatagactaggcctatggcaagtcaagttggagtgaatgtgtcccagttgttttcaga

SEQ ID NO: 1028816 - DNA, 120 bp, Artificial Sequence
  ENSG00000272323_6 (sequence is synthesized)
gcagactaggtagagagacaaggagaacattgagaatgtgaaagatggtgtttacgtttggtgtttgttatttccagctctaggctggaagtttaattgccattgatccaagactgccaa

SEQ ID NO: 1028817 - DNA, 120 bp, Artificial Sequence
  ENSG00000272323_7 (sequence is synthesized)
gaaagcctttttggagttaggttggaggagttatttaaatgagtttgcttgaatatctcttaagtaaaacctgtatggtctgttaactcaagatttaaatctgtactttcgagctccata

SEQ ID NO: 1028818 - DNA, 120 bp, Artificial Sequence
  ENSG00000272323_8 (sequence is synthesized)
gtcacaattttggaaagattcccccactttattctttttcctaagaaaactctcagcatggaacaatgatgacagcaatgaacctgatttcagaatgtcaaggttctggttttgactctg

SEQ ID NO: 1028819 - DNA, 120 bp, Artificial Sequence
  ENSG00000272323_9 (sequence is synthesized)
tagcctgggccgagtcacggccagtgggtcccaattttcttgcctatacggtgaaagtttttgtaccacttgctttctgaagcgccttctggttccaggtttctgtaaggggtaaacgat

SEQ ID NO: 1028820 - DNA, 120 bp, Artificial Sequence
  ENSG00000272323_10 (sequence is synthesized)
ttttgtgactctatgaacagtatttaacatgtatgggagtaaaaaggaagaacctgtttcctgttctccaacatttatttcttttaccccttgttaagttggtcatcaaattgaaaggtt

SEQ ID NO: 1028821 - DNA, 120 bp, Artificial Sequence
  ENSG00000272323_11 (sequence is synthesized)
ttaatgttctttcattctaggaaatggctgtgagattgtttctaagtatattaaaggtaatgtctcttttctaaacctttgcttttgctgataattgtggagagaagaaccagaacaggc

SEQ ID NO: 1028822 - DNA, 120 bp, Artificial Sequence
  ENSG00000272323_12 (sequence is synthesized)
actgaattcccattcctaaagccaacgctctaattcggcctccatttcattagctctgaccggaagcatgttgcctgcatctgtaaaaattataaatcaaaataaaataactttggcgac

SEQ ID NO: 1028823 - DNA, 120 bp, Artificial Sequence
  ENSG00000272324_0 (sequence is synthesized)
acatgacgcggcggggcttccgcggggccgaggcggcggcgcggttctcgggccgggcgggcgtgcgcgagtgagctcaggagtgggctcccgataagaggatgaattcagccctccttc

SEQ ID NO: 1028824 - DNA, 120 bp, Artificial Sequence
  ENSG00000272324_1 (sequence is synthesized)
ctcttgcccttccaccctccaccatgggatgacacaccaagaaggccttcaccagatgtgggcccttgaccttggacttcccagcctccagaactaaggagaaaccaactccaagttctt

SEQ ID NO: 1028825 - DNA, 120 bp, Artificial Sequence
  ENSG00000272324_2 (sequence is synthesized)
attggaatatttacagggtactggaggggctcacagtattaaggagaagactccggcagcctctgaaagaaagaaaactagggaagctctggaaacaccaataaacgacctctgtctagg

SEQ ID NO: 1028826 - DNA, 76 bp, Artificial Sequence
  ENSG00000279440_0 (sequence is synthesized)
ttaaatatattttacagataaggaaattgaatatcatagagataaagagacaaacacgggggagtttgggaattat

SEQ ID NO: 1028827 - DNA, 70 bp, Artificial Sequence
  ENSG00000279440_1 (sequence is synthesized)
ctttctttctttctctctccctcctctctctttctttccttctttctttctctctttccttccttccttc

SEQ ID NO: 1028828 - DNA, 120 bp, Artificial Sequence
  ENSG00000279440_2 (sequence is synthesized)
tctttctttctttctttctttccctccttggagtttgcagaaggaaaatatctttcagggctctattttctcttgatcggaaaatgcccagcaccaaaacacacctcccttggcatcctg

SEQ ID NO: 1028829 - DNA, 120 bp, Artificial Sequence
  ENSG00000279440_3 (sequence is synthesized)
cctgtcatttttcttttaaaatttcttagctatgatgaatctgatgcagccagcttcatggcttctggcttctctcctttcagtctgacccaacagtagctaccagagaggtctccctaa

SEQ ID NO: 1028830 - DNA, 120 bp, Artificial Sequence
  ENSG00000279440_4 (sequence is synthesized)
aaggcaaaaagaccaagcctttctcctgcttagaaccttccctggcttcccattccttttagggtaaagtgcaaactgcacaccgtgatccaggccctgctgactcacctgctgagaatc

SEQ ID NO: 1028831 - DNA, 120 bp, Artificial Sequence
  ENSG00000279440_5 (sequence is synthesized)
ccctcattcttcgacacttgggttagttctttagggctgtcattccacaggtcgctttatgctccttaccatatagtatccctttgccccgacacccttctggctcttgactgcctgatg

SEQ ID NO: 1028832 - DNA, 120 bp, Artificial Sequence
  ENSG00000279440_6 (sequence is synthesized)
gacttctagtctttttccaccactgctctcaaatatgcagagctgcatctagtcatatacctgtatgtgatggagagaagcagaaagagaggtggggggagagagaatgggagggagata

SEQ ID NO: 1028833 - DNA, 120 bp, Artificial Sequence
  ENSG00000279440_7 (sequence is synthesized)
gggaggcagacagagaagagaggataggaggggaaagaaagggaggaagacaaaggggcgaagagaaagacagaagaggggagaggaggagaggggaggggataagagggataaagaaag

SEQ ID NO: 1028834 - DNA, 120 bp, Artificial Sequence
  ENSG00000279440_8 (sequence is synthesized)
agaggaagagacaagcagagagagatgggaaggctgagagagagagtaagggaagagaggggaggtgaggggaaaggaaagaagggaaggagagaggagacagatggggaggaagagagg

SEQ ID NO: 1028835 - DNA, 120 bp, Artificial Sequence
  ENSG00000279440_9 (sequence is synthesized)
aaaatagaaggagatatctaaaacgatatttgccccccaccaaatgttaagtgattatccttggggggaagaactttggaagttacactttcaattttgtattttaaaattgtgtgtatt

SEQ ID NO: 1028836 - DNA, 120 bp, Artificial Sequence
  ENSG00000279440_10 (sequence is synthesized)
tttagtccacttacagatacactttttccaaacagcatacaacgacaagaaagtaacattcaaatattaccaggtcacttcagctgtgaattcttttcaggaccccccttttttcttcca

SEQ ID NO: 1028837 - DNA, 120 bp, Artificial Sequence
  ENSG00000279440_11 (sequence is synthesized)
gaattatgcacatcttcccttccacccacctgccccaaatggaggggtgtagctggccacctgggagttgttgaaagacaggaagatcagtgccttatcttcctggtctccagtgttctg

SEQ ID NO: 1028838 - DNA, 120 bp, Artificial Sequence
  ENSG00000279440_12 (sequence is synthesized)
caccgaacccggccaggacaggccgggccttgtaaatattggtttaatgaccagacgctggaaactcattataacaccatgcattgtccaggttaaataatggaaaggattattacagca

SEQ ID NO: 1028839 - DNA, 120 bp, Artificial Sequence
  ENSG00000279440_13 (sequence is synthesized)
atgatgctgcaatatactctcaattagccatggcaatgaggagcacggggacagctcatgccactaagctggggatcatcaaaaggcaattttcccttctgtggaccaccatgccctctt

SEQ ID NO: 1028840 - DNA, 120 bp, Artificial Sequence
  ENSG00000279440_14 (sequence is synthesized)
tgtgttttagttattggtgattccctatgaatacaccatcccccacacccacatccatacaccttttttctttttctttttagggcaggggcactgactcaaatctcaatcatatctggt

SEQ ID NO: 1028841 - DNA, 120 bp, Artificial Sequence
  ENSG00000279440_15 (sequence is synthesized)
tggagttgatcacaaaaccagctagtttcttaacacaggtgatgaaccgccagtgagcagctgttctcaaagcgtgggccccgtatttgcaacctcggcattgctgcctgagaacttgtt

SEQ ID NO: 1028842 - DNA, 120 bp, Artificial Sequence
  ENSG00000279440_16 (sequence is synthesized)
agtaaggcacattttgaggtccacctctgaatcagaatctttaggttggtgttcagaaatctacactcccatgagtttttcaggcgattctgatgcatgctcaagcttcaggatcattgg

SEQ ID NO: 1028843 - DNA, 120 bp, Artificial Sequence
  ENSG00000279440_17 (sequence is synthesized)
cccgaaaggggactcagttgcttgggttccatttctggctgtgctgcttgttggctgtcccacctctggcaagtcccctcacctcttcatgtctctgcgtcctcacctgtaatatgggta

SEQ ID NO: 1028844 - DNA, 120 bp, Artificial Sequence
  ENSG00000279440_18 (sequence is synthesized)
catccacagtgcccatctcataggatgtgtcaggatgggtgaagagcagtcaaacagcactcacacttagtcccagcagatgctacctggtaccatatttcatggagtagaagctgcctt

SEQ ID NO: 1028845 - DNA, 120 bp, Artificial Sequence
  ENSG00000279440_19 (sequence is synthesized)
tgatcatcagactcatccagaattcacatagtaagtgtagggcataagttttccttaaaacagtatttctcaaacttcagcgtacacacaaatcacctgggaatgttgttaaaaggcaga

SEQ ID NO: 1028846 - DNA, 120 bp, Artificial Sequence
  ENSG00000279440_20 (sequence is synthesized)
ccagagacgctgcattcttagcaagctctcatgtgggaggatgctgctggtccctggaccacatttttgttgtatgggttggatccagaaccagcacctttgtgtacggattggatctca

SEQ ID NO: 1028847 - DNA, 120 bp, Artificial Sequence
  ENSG00000279440_21 (sequence is synthesized)
cagtgggctcacatgatgtgctggcaatggtcatggactggtcctgggacagggtggtggaacaggatgtagttcattttgctcattcttctctggccaaaggacagcaaggattgacat

SEQ ID NO: 1028848 - DNA, 120 bp, Artificial Sequence
  ENSG00000279440_22 (sequence is synthesized)
aagaactggagacatggtttgagctccttgtaagcccactcactggcctaaaggaagccctttgatctcagcatccttatctgccaaatagaccactcaatgcccaccaagtccattcta

SEQ ID NO: 1028849 - DNA, 120 bp, Artificial Sequence
  ENSG00000279440_23 (sequence is synthesized)
agggcaagtggggaaaatcaaatacccatgttctcagtgagtgaattaatgacatatctttccttgggaccatggtttttccagagtttaaaaataatgaaatgatgtggatatttaaag

SEQ ID NO: 1028850 - DNA, 120 bp, Artificial Sequence
  ENSG00000279440_24 (sequence is synthesized)
gcatcaggacaaggcattgctggtgaagttggctaattattacattaccatatgatcatcatcggtgtgagtcataagccctgcactctgattctcttctgagcaccagccctaggaatg

SEQ ID NO: 1028851 - DNA, 120 bp, Artificial Sequence
  ENSG00000279440_25 (sequence is synthesized)
gccagtccttacaatcaccctggaattctgacagttccaggggacacctgtcaggccaccctcctgggtgggcttagcatactgagggccatgcagagggagacccggttgtatcctcaa

SEQ ID NO: 1028852 - DNA, 120 bp, Artificial Sequence
  ENSG00000279440_26 (sequence is synthesized)
agcctcattactacaaccatcgtctttgcagccactctgatttcaaggcactgctcacttcctaggggacatgacagggctggagagagaaggggtcatgcaccgctcagttccagaatg

SEQ ID NO: 1028853 - DNA, 120 bp, Artificial Sequence
  ENSG00000279440_27 (sequence is synthesized)
aacaaagaacacttatgagggagagaaaaaatgcctcttgaccgcccccagcatatgtatgcacaaatacacacacaaacacacacatacacacatgcatgcacatgcacacacatacac

SEQ ID NO: 1028854 - DNA, 120 bp, Artificial Sequence
  ENSG00000279440_28 (sequence is synthesized)
acacacacacacacacacacacaggctgccccagcctgcatgtcaccatcaatcagcgccttcccacttgccgtttgcaggcagagttccccacagatgtgctcggggggctgggagaag

SEQ ID NO: 1028855 - DNA, 120 bp, Artificial Sequence
  ENSG00000279440_29 (sequence is synthesized)
gctcggggggctgggagaaggagaagaaggtggagctggggctagggagggagggaggcagagatgtcctcaaagagttaaaaccttgcctcaccagactgcgaatcctcctcgactctc

SEQ ID NO: 1028856 - DNA, 120 bp, Artificial Sequence
  ENSG00000279440_30 (sequence is synthesized)
ccccacccccatccccctcaatccagccaaacaacagcttgacattttccatccttcacgagaaagacaaagacgggaagatattcccatgatccctttctgcatgcctaaccgtgagct

SEQ ID NO: 1028857 - DNA, 120 bp, Artificial Sequence
  ENSG00000279440_31 (sequence is synthesized)
caggtgccgtagcgtttgccctgcgccggccccatcaacatgaagggcgaactcatcctttctgcatctttttctcgccactgcttgattaattggctgactactacgccggcggaatac

SEQ ID NO: 1028858 - DNA, 120 bp, Artificial Sequence
  ENSG00000279440_32 (sequence is synthesized)
ctaatgcttttccttcccctattcttccttcacagtttttttttcctcctttgctccatttacatatactttatattccataattttcacccaaaaagaaaaaaaaaaaagagcgggccc

SEQ ID NO: 1028859 - DNA, 120 bp, Artificial Sequence
  ENSG00000279440_33 (sequence is synthesized)
aaaaagaaaaaaaaaaaagagcgggcccatctcagtaatttgatgtaatgacggcatgtcaccaaaaagaggaattagaaaaatctgtaggtatttaatttattcttgtttttttttttt

SEQ ID NO: 1028860 - DNA, 120 bp, Artificial Sequence
  ENSG00000279440_34 (sequence is synthesized)
cattaatattcatgggcaagagaaaaaagtatactcaataggaaaattccagattttttaggggtggggaggcagctacattcaatgcatttttaagcaccattatttaactaatagtgc

SEQ ID NO: 1028861 - DNA, 120 bp, Artificial Sequence
  ENSG00000279440_35 (sequence is synthesized)
ctgagtccctctggccctagttcctccctttcaatgaaaataagtgggttttagtttgccttcaagggttgtgtgtgttgggctcacacccacgctgttgaagcaggaaagctgggctct

SEQ ID NO: 1028862 - DNA, 120 bp, Artificial Sequence
  ENSG00000279440_36 (sequence is synthesized)
gtgctttcctcccctcctgggaggactcaaatgaagaagaaaaacataaataaaggcctttcagagtcccagggctggagttttggttctccttcagcctcccctgttggctgtcatagt

SEQ ID NO: 1028863 - DNA, 120 bp, Artificial Sequence
  ENSG00000279440_37 (sequence is synthesized)
tttctgatggctctacagacagaacaatttccttgaggtttcccactagaccaaccccttcctgttaacttgggtttgggttttatgctattaattaactacttacttatcaaaataagt

SEQ ID NO: 1028864 - DNA, 120 bp, Artificial Sequence
  ENSG00000279440_38 (sequence is synthesized)
gttgagttataccataatcatgatcgttaccaatgaagcaggaaataaaataatgaagcatcagaccgatgccataaatatgagacctgagacctggaatgggagcagtttttctctctc

SEQ ID NO: 1028865 - DNA, 120 bp, Artificial Sequence
  ENSG00000279440_39 (sequence is synthesized)
caaggcaggtctttccaaagggtcccagggtgtgtggctctcctagtaacagtggtaagtttgaggcatctgaggatttgactcagtctagtaggaagatgagttctcagccatggggac

SEQ ID NO: 1028866 - DNA, 120 bp, Artificial Sequence
  ENSG00000279440_40 (sequence is synthesized)
ccaaatgcccaccctcatcttaatcagtgggatcggaaacatgtatgagtttatgggccctgagtctaaattatttgccaattgtgatcataaaaattattattagcataatgattataa

SEQ ID NO: 1028867 - DNA, 120 bp, Artificial Sequence
  ENSG00000279440_41 (sequence is synthesized)
taagcaattctatgtactattatttttctttatttttaaatggggttataacttacattaagctgcacgaatcttatgtgcagcttgatgaatattttacccatgtttgtactttaccca

SEQ ID NO: 1028868 - DNA, 74 bp, Artificial Sequence
  ENSG00000279442_0 (sequence is synthesized)
gtgtgagatggtatctcattgtgatttagtctgttggctgcataaatttcttcttttgaaaagtgtctgttcat

SEQ ID NO: 1028869 - DNA, 90 bp, Artificial Sequence
  ENSG00000279442_1 (sequence is synthesized)
gccattgcttttggtattttagacatgaaatccttgcccatgcctatgtcctcctttatggttttagatctaacatttaagtctttgatc

SEQ ID NO: 1028870 - DNA, 83 bp, Artificial Sequence
  ENSG00000279442_2 (sequence is synthesized)
tcatgtcatcttcaaacagggacaattcgacttcctcttttcctaactgaataatctttatttctttctcctgcctgatttcc

SEQ ID NO: 1028871 - DNA, 89 bp, Artificial Sequence
  ENSG00000279442_3 (sequence is synthesized)
cttgatcatggtggataagttttttgaggttctgctggatttggtttgccagtattgtattgagtattttcgcatcgatgttcatcagc

SEQ ID NO: 1028872 - DNA, 120 bp, Artificial Sequence
  ENSG00000279442_4 (sequence is synthesized)
ctggtagaattcagctgtgaatccgtctgatcctggactttttagtttatgtccaatcaaaagtttataaccagaatatatgaagatttgtaggaaatttttatatattctggatataaa

SEQ ID NO: 1028873 - DNA, 120 bp, Artificial Sequence
  ENSG00000279442_5 (sequence is synthesized)
taaatttttgattggacctaaacattgcagatatattctcccaatttaacttgtcttttctttctcttaatggtgacttcgttaaaaccaatttcttaattttaatgtagttcaatttat

SEQ ID NO: 1028874 - DNA, 120 bp, Artificial Sequence
  ENSG00000279442_6 (sequence is synthesized)
cagaatttttctgtgtagttaatgcttatttaatcttgcttaagaaatttctgtctaccccattgtcataaaggtattcttctgtgttacagaagctttttttttaatttttaacctttc

SEQ ID NO: 1028875 - DNA, 120 bp, Artificial Sequence
  ENSG00000279442_7 (sequence is synthesized)
agattgagctttataacccacttacgattgatttttgtttgtgatgcaagacaggggttaaagtcttttattcccccatattgatatccaaattatctaccaccatttattgagaagatt

SEQ ID NO: 1028876 - DNA, 120 bp, Artificial Sequence
  ENSG00000279442_8 (sequence is synthesized)
attatttcctcactgcactgcagtttcacctttgtcataagtcaggtgatggtataagtatgagtttgtttttggtttctctatttgtatgtcctgctaataccatcttattttaattgt

SEQ ID NO: 1028877 - DNA, 120 bp, Artificial Sequence
  ENSG00000279442_9 (sequence is synthesized)
aataaagttggagacatctgatggtatacattcttgagatctgttcttcttcagaactttcttggttcttcttgtccttttaaattttcaaaaaaattttaaattagcttgtcaattttt

SEQ ID NO: 1028878 - DNA, 120 bp, Artificial Sequence
  ENSG00000279442_10 (sequence is synthesized)
aaattacctgataggattttgagtaggattgcattcaaccataatttaatgagtagaaatgacttttttacaatataaaatctttctattcataaacattgtgtgtcttttttatgtata

SEQ ID NO: 1028879 - DNA, 120 bp, Artificial Sequence
  ENSG00000279442_11 (sequence is synthesized)
tatgtacaggtttgttacataggtatatatgtgctgtggtggtttgctccatctatcaacctgtaatcttagttttaagccccatatgcatgaggtatttgtcctaatgctctccctcct

SEQ ID NO: 1028880 - DNA, 67 bp, Artificial Sequence
  ENSG00000279442_12 (sequence is synthesized)
cttccagtacattccatggtgtactctaatttgtacgtgtacaaattagaactcaggattaagaaac

SEQ ID NO: 1028881 - DNA, 76 bp, Artificial Sequence
  ENSG00000279442_13 (sequence is synthesized)
acatggaaattgaacaacctgcccaaagttgtttgaaaccagtgagaacaaagagacaacgtaccagaatctctga

SEQ ID NO: 1028882 - DNA, 120 bp, Artificial Sequence
  ENSG00000279442_14 (sequence is synthesized)
gaaataacaaagttgtttgaaaccagtgagaacaaagagacaacgtaccagaatctctgagacacagctgaagtagtgttaagagggaaagttatagcactaaatgcccacaacagaaag

SEQ ID NO: 1028883 - DNA, 120 bp, Artificial Sequence
  ENSG00000279442_15 (sequence is synthesized)
ccccttaatatcacaattaaaaaacctagagaagagtaaacaaattcagaagctaccagaagacaagaaataactatgatcagagtagaactgaaagagatagagacacgaaaaaccctt

SEQ ID NO: 1028884 - DNA, 120 bp, Artificial Sequence
  ENSG00000279442_16 (sequence is synthesized)
caaaatatcagtgaatccaggagattaacaaaataaatggaccactagctagactaacagagaaaaaagagaagaatcaattagacataataaaaaatgataaagggggctgggtgcgat

SEQ ID NO: 1028885 - DNA, 120 bp, Artificial Sequence
  ENSG00000279442_17 (sequence is synthesized)
agagtgagactccatctcaaaaaaaaaatgatgaaggaggtatcactattgatcccacagaaatataaattaccctcagagaatactataaacacctctctgcaaataaacctgaaaatc

SEQ ID NO: 1028886 - DNA, 120 bp, Artificial Sequence
  ENSG00000279442_18 (sequence is synthesized)
aataaacctgaaaatctagaaaatacagatacattcctggcacatacaccctcccacaacaaaatcaggaagaagtagaatccccgaataggcccataacaagttctgaaattgaggcag

SEQ ID NO: 1028887 - DNA, 120 bp, Artificial Sequence
  ENSG00000279442_19 (sequence is synthesized)
taccaaccaaaaaaagcccgggaccagatggattcatagctgaattatactggagatataaagaggagcgggtacgattccttctgaaactattccaaacaatggtaaaagggggactcc

SEQ ID NO: 1028888 - DNA, 120 bp, Artificial Sequence
  ENSG00000279442_20 (sequence is synthesized)
ggcagcatcatcctgataccaaaacctgacagacacaacaaataaagaaaatttcaggccaatagcccttataaacattgatgtgaaaatcctcaataaaagactggcaaaatgaatcca

SEQ ID NO: 1028889 - DNA, 120 bp, Artificial Sequence
  ENSG00000279442_21 (sequence is synthesized)
agactggcaaaatgaatccagcagcacatacaaaagcttatccaccatgtgcaacactttttttaaaggcatgcttcaaaaagaaacactcctatttagtcaggagactatctctttgaa

SEQ ID NO: 1028890 - DNA, 120 bp, Artificial Sequence
  ENSG00000279442_22 (sequence is synthesized)
tctaacatagattacaaccttgacatgaataagattcttcttttatgtactcaataaatgtttacttacagcctattttatgctgggtagtattatgggaactggagagagaaggtctgt

SEQ ID NO: 1028891 - DNA, 120 bp, Artificial Sequence
  ENSG00000279442_23 (sequence is synthesized)
ctttatggagattgcagtatagtgacagagatagaacataaatgcataaacagttgcacactaaagtgatggatgtactaagcgctatgaagaaatatattagccaagtgctgtggtgct

SEQ ID NO: 1028892 - DNA, 120 bp, Artificial Sequence
  ENSG00000279442_24 (sequence is synthesized)
gtcccagctactagggaggctgagacaggcggtctgtttgagccccagagtttgaggctgcagtgatccatgattgtgccactgcaccccagccttggtgacagagtgagaccgtgtcta

SEQ ID NO: 1028893 - DNA, 120 bp, Artificial Sequence
  ENSG00000279442_25 (sequence is synthesized)
cgtgtctaaataaaaagtataataatacaaagaaaataaggtagggtaatcacattcagggtgtcagggactgctactttagatagagagctcttgaacaatctttctgaggagatgacc

SEQ ID NO: 1028894 - DNA, 120 bp, Artificial Sequence
  ENSG00000279442_26 (sequence is synthesized)
cttgagcaggtcagaatggtatgacggagtgagttaagcgaatgtctagagggcagagagaagagacattgtgcagagtctggatacagacagcgcttgatgagctcaaagatcactaca

SEQ ID NO: 1028895 - DNA, 120 bp, Artificial Sequence
  ENSG00000279442_27 (sequence is synthesized)
aagaccagtcaggctgcaggcactgggaggaggaaaggagaatgcacactctgaggagcagacaaatacagaacatagtaaagagcttggatttctttgttaattgtgatagataaccac

SEQ ID NO: 1028896 - DNA, 120 bp, Artificial Sequence
  ENSG00000279442_28 (sequence is synthesized)
tggaggattcagagctgggaatgaaatggtataagatatgttcttacaggaattgtccagctttgtgggagaatagattacagattaccataaatagaataataataaatacaaaggcag

SEQ ID NO: 1028897 - DNA, 120 bp, Artificial Sequence
  ENSG00000279442_29 (sequence is synthesized)
cttagaaatgattatatctgtccaggggttgatactggtggtgttagaactgtgaggtccagtatgatagccaccagctgcatttagttttttacatttaaattaattaaaataccataa

SEQ ID NO: 1028898 - DNA, 120 bp, Artificial Sequence
  ENSG00000279442_30 (sequence is synthesized)
aatttattcctaccagggacttgggaggaaagggagaatgaggagttattgcttaatgagtacagagtttcagtttggggtgaaaaaaaattttggaaatacatagttttgatgattgca

SEQ ID NO: 1028899 - DNA, 120 bp, Artificial Sequence
  ENSG00000279442_31 (sequence is synthesized)
caacattctgaatgtaattaatgcctccgaattttatgtttaaaacggcaaagcttattacataggctttaccacaataaaacattataaaattaatcacagaaccaaaactctaaaacc

SEQ ID NO: 1028900 - DNA, 120 bp, Artificial Sequence
  ENSG00000279442_32 (sequence is synthesized)
attttttaaaattgtataaatttaaggagtgcaagtgcaattttgttacatgggtatatggggtaggagtgaagtctgagcttttagtgtgtttatcactggaacaatgtacactgtatc

SEQ ID NO: 1028901 - DNA, 120 bp, Artificial Sequence
  ENSG00000279442_33 (sequence is synthesized)
cactaagtaatttctcatcaaccttccccctcccacccctcacccttctgagtctacagtgtcttatcattttacactctttgttcatgtttacgcattatttatttcccatttttaagt

SEQ ID NO: 1028902 - DNA, 120 bp, Artificial Sequence
  ENSG00000237048_0 (sequence is synthesized)
atgattctggggaaactctaccaccatctgtgtgccttgcctagcaatatgtcactatccaggtatgttcctggcagaaaagttgcataacttgggggttaaagacaggaatatggcaca

SEQ ID NO: 1028903 - DNA, 120 bp, Artificial Sequence
  ENSG00000237048_1 (sequence is synthesized)
atgcccattgtgggcagtgtccagacagaagaagagactcatatcacctaaatgacaaacccagaatatgtcacaatgtatcctgttgaaaggaccaggacaatggaagaagagtcaaat

SEQ ID NO: 1028904 - DNA, 120 bp, Artificial Sequence
  ENSG00000237048_2 (sequence is synthesized)
caccaggatgccgattttagtgatttatcaagattccccctgttaacagggattaggaagaaacgaggatgaattgccacatcatctggttctgagttctgagatattcacaagtcccct

SEQ ID NO: 1028905 - DNA, 120 bp, Artificial Sequence
  ENSG00000237048_3 (sequence is synthesized)
tagaaaacaactcaggcaagagagttacatcacctaggagcccgttccacccttatgtcacagtgcttcatgtgtacaggactaagaagaaagtcacatcacctagatgatagacccaga

SEQ ID NO: 1028906 - DNA, 120 bp, Artificial Sequence
  ENSG00000237048_4 (sequence is synthesized)
agtacaatcacctttgtacctggtctagcaatatgtcattattcaagtgtgcaggtaccaaggagaggagccatactacctatgttatatgccctgtgctatgtcaaaatgccttctttt

SEQ ID NO: 1028907 - DNA, 120 bp, Artificial Sequence
  ENSG00000237048_5 (sequence is synthesized)
cagcatggccctggaagaatgtatcatctcatatgtgactggcctaggaagatgtcactatcctgccatgtgtgcagggcccattttagagattagagttatgtcttcttctaagtcatg

SEQ ID NO: 1028908 - DNA, 120 bp, Artificial Sequence
  ENSG00000237048_6 (sequence is synthesized)
gacccagtgatatatcactatgatgtctgtgagaatgggcaggcaggaatgtaatgtcacttgcattctagatccagtgatgtcacaattcttactgagggcagagcccagtcagaagag

SEQ ID NO: 1028909 - DNA, 120 bp, Artificial Sequence
  ENSG00000237048_7 (sequence is synthesized)
tcatatcttttacaggttggcccaagtagatgtcaaaaacccctatggattagatttacaataccacacatctcttgttttcatgtaggagagttgcctgcattcatctgtgatgatgaa

SEQ ID NO: 1028910 - DNA, 120 bp, Artificial Sequence
  ENSG00000237048_8 (sequence is synthesized)
agtccttactgtcagccaagtgtgcatatgagactcacaatttcctctgtttgctaaccactattatgacactctctattcaacccaacggttttataaaacatttgtcattgttataaa

SEQ ID NO: 1028911 - DNA, 120 bp, Artificial Sequence
  ENSG00000285809_0 (sequence is synthesized)
tttttttttttttctcctgcagctttcagagaaatggaaaattgcctatcttctagtttctcttcttcacttttatgtacaggaaagcctggtaatcaaggaagggcagaaaacaaagct

SEQ ID NO: 1028912 - DNA, 120 bp, Artificial Sequence
  ENSG00000285809_1 (sequence is synthesized)
gaagcacacacccgtaattgcaattgccttttaaaaagggtcacacatcatgatctgatgtttcttccagtcattctcacttcttggccatttttttttcatagagatcaatgcaaatgg

SEQ ID NO: 1028913 - DNA, 120 bp, Artificial Sequence
  ENSG00000285809_2 (sequence is synthesized)
taccaagtggtctgaaaaaacagatagtaaatatggcgatgtgaaactggctcacctgccaactggcaattgaaaaaagatgagatcctgattagtagatggggcatggaggaatggcat

SEQ ID NO: 1028914 - DNA, 120 bp, Artificial Sequence
  ENSG00000285809_3 (sequence is synthesized)
gctgaattgataaaaatttctcattgatgatgtcccagtggagaatgctgtgacaagtgacaatgcatttgaaaaatatggaggaaacaactcctacaaaggcagcaaagttggctggtt

SEQ ID NO: 1028915 - DNA, 120 bp, Artificial Sequence
  ENSG00000285809_4 (sequence is synthesized)
actaaactaaattttattgacaactggcagacagataatgaaggactcagtggtgttagcaagaagtcaatggctaattgcaagagccagaaagccttcatgggatcttacaaataggcc

SEQ ID NO: 1028916 - DNA, 120 bp, Artificial Sequence
  ENSG00000285809_5 (sequence is synthesized)
tttaccacctacagtgaaagagcagataacactgggctttaggctgaaaatctaattgtgagagtcatagggctctaagacattagaatactcagccaaggcaggattattgtagaaaat

SEQ ID NO: 1028917 - DNA, 120 bp, Artificial Sequence
  ENSG00000285809_6 (sequence is synthesized)
attcctccaccaagactccggtggaggaatatctgggatcttgaaagcagagaatctgaatgaatgttctggaggatgttgactctgtagacccctttaccatctgggctcacataggtg

SEQ ID NO: 1028918 - DNA, 120 bp, Artificial Sequence
  ENSG00000285809_7 (sequence is synthesized)
gcgcacttttctgtagtattagctagtatttctgctttgttggaagaagcagtggaagtctctttcccaaaactatttcctcaggatttgtttctacattcttccctgattctaagactt

SEQ ID NO: 1028919 - DNA, 120 bp, Artificial Sequence
  ENSG00000285809_8 (sequence is synthesized)
agagttacatcctaacataatctggctagggatctactgagcctgaaaaagggggaaagtgtttatacaaatgagaaactgcaataactagttagcatatactggcaagaaccaggaaag

SEQ ID NO: 1028920 - DNA, 120 bp, Artificial Sequence
  ENSG00000285809_9 (sequence is synthesized)
tattactggaattaaattttgagtatgcctaatcaaagaacagggttgtaagtctggatgaataagaattattggcttggggcactctaatgggaaccagtatttaatgtcctagcaaga

SEQ ID NO: 1028921 - DNA, 120 bp, Artificial Sequence
  ENSG00000285809_10 (sequence is synthesized)
atcttgggggatggagcaaattaaccactgggttagttcctagaagcttggaataaacagtgactcacactcagggaaatagacatgcctgagtttccctggatgatggtagaggaggga

SEQ ID NO: 1028922 - DNA, 120 bp, Artificial Sequence
  ENSG00000285809_11 (sequence is synthesized)
ttaaaaaggcagagtaaagttaatatgttggaatgggtttattatgcagaagatacatcacagaataatgtttcacaagaaggctcaaggaacacatgattcaccaaggccaccagtaat

SEQ ID NO: 1028923 - DNA, 120 bp, Artificial Sequence
  ENSG00000285809_12 (sequence is synthesized)
gtgctggtgtgaagaacactaacattactaagaagtatgatggtacttctcctctgtatatcaaggctgatgtggtcccagagctgtgctcgttattcatggagttggagaatgaataat

SEQ ID NO: 1028924 - DNA, 120 bp, Artificial Sequence
  ENSG00000285809_13 (sequence is synthesized)
cagatgtaagaatgaccttatggcagcatttaacttctagaagctaagaggccacaattaatgtaatgactggtaaccaagaaggcttgaccagctgggagctgtgaaatgttaatagac

SEQ ID NO: 1028925 - DNA, 120 bp, Artificial Sequence
  ENSG00000285809_14 (sequence is synthesized)
aatgaaataacaaaagaaggcataaatgtaggagcaaaaattaaagagtggttcttcaataaaaagtcatgatcctctctcaagtgttcagacccgaggccatttttatatctagaaaac

SEQ ID NO: 1028926 - DNA, 120 bp, Artificial Sequence
  ENSG00000285809_15 (sequence is synthesized)
gggaatctacagccatttatacatgtgaactcaaactgggaaaaggagtctaaacccagacacttttaggactatgggaagcaggttcagagttggcattgaaatctatagacccaacca

SEQ ID NO: 1028927 - DNA, 120 bp, Artificial Sequence
  ENSG00000285809_16 (sequence is synthesized)
tcatcatggttcctgtgttggcgtggatgtatataaggtccagataataaatgaaaacctggttcataatgggtccactgggtcccagatccatctagtcatcatctctctaatccccaa

SEQ ID NO: 1028928 - DNA, 120 bp, Artificial Sequence
  ENSG00000285809_17 (sequence is synthesized)
atgcataattaaaatcagtctatttggcaattggattaattgtttcattcatggtctatagaggaagaactatcattagacgaggacgaccaaatggaaacttctgaaactgcctttcta

SEQ ID NO: 1028929 - DNA, 120 bp, Artificial Sequence
  ENSG00000285809_18 (sequence is synthesized)
ggacaacacagtaaatagaaaaccctatgaaatcccagcgggatggcagggattaatgccacgaatgaagacttaaaccttgcagagcagtggtctctataatatctttgcttaattagc

SEQ ID NO: 1028930 - DNA, 120 bp, Artificial Sequence
  ENSG00000285809_19 (sequence is synthesized)
cagtctgacccatttgcaatttgtcagactggagaatgatttcagactaccatggacttacccaaagagtacaccctgtcacagctactaggtcagatgtggtattactccttgaacaga

SEQ ID NO: 1028931 - DNA, 120 bp, Artificial Sequence
  ENSG00000285809_20 (sequence is synthesized)
ttaataataccttgggtacagactacgccactactgatttggtgtatgttattttctcttccaattaaaagaggatccaaaacagtttgtattcatatgaaacaaacagcaatatttagt

SEQ ID NO: 1028932 - DNA, 120 bp, Artificial Sequence
  ENSG00000285809_21 (sequence is synthesized)
gacagtgttatctcagggccttcttaacactctggccctttgtcacaacatagttccaagagatctggactgcataagcattctaccaaaaatggtactgatctattacattaatgatat

SEQ ID NO: 1028933 - DNA, 120 bp, Artificial Sequence
  ENSG00000285809_22 (sequence is synthesized)
catgctgattggacacaatgagcaagaagtgactagttaactggaagcattggtaaaacacaggtattccaaagcatgaaagttaaatcctgtgaaaatttagggaatagtcacatcagt

SEQ ID NO: 1028934 - DNA, 120 bp, Artificial Sequence
  ENSG00000285809_23 (sequence is synthesized)
gagatttattagttggtggccaagagtatgcttgaatattctctccaaagtaagacacctttctgcattttgcatacactaccaccatgaaagaggccatctatggtgcctggcgtactc

SEQ ID NO: 1028935 - DNA, 120 bp, Artificial Sequence
  ENSG00000285809_24 (sequence is synthesized)
tttggaggctggaggcacatatagcaagtgacgcagaggctacccacttaaatagaacctggagtgggaaaggctactgcagtaattttaggcagtagtgcaagctgccttgtcatctag

SEQ ID NO: 1028936 - DNA, 120 bp, Artificial Sequence
  ENSG00000285809_25 (sequence is synthesized)
cctaagcaattcgtcaagtgctgtgatgttacaagtgttactggtgggaaaagatgcagtgtggagcgtgtggcaacaccaagtgagagagtcacagagtagtccctaggattctggagc

SEQ ID NO: 1028937 - DNA, 120 bp, Artificial Sequence
  ENSG00000285809_26 (sequence is synthesized)
aaaaccatgccattcaaagcaaataattacatgccctctcagaaagagcacttagctttgctgagccctaatgggggtggcttaatcctggacataaagtgaccatgcatctgtaacttt

SEQ ID NO: 1028938 - DNA, 120 bp, Artificial Sequence
  ENSG00000285809_27 (sequence is synthesized)
ctattatcatctggattcttttgggcccactacatcataaaattggtggggacaacatccgttcattgtaagatgaacatagtacatctaagatcgagtctaagcaggaccagagggcat

SEQ ID NO: 1028939 - DNA, 120 bp, Artificial Sequence
  ENSG00000285809_28 (sequence is synthesized)
tagtagatttttatgtcacatattgccagttctgttcccctgacttgcacctatatcaatatgggagatccagtataaccaactctaagggaagggaaaaagcctgaacttgatttatgg

SEQ ID NO: 1028940 - DNA, 120 bp, Artificial Sequence
  ENSG00000285809_29 (sequence is synthesized)
atggataagtgagttcctggatgcaagccagaactggatgttggctgcagtggagccactttcaggggtgatcctgagagacagtggggagaaaaaaaatcatcccatgagtagtgccaa

SEQ ID NO: 1028941 - DNA, 120 bp, Artificial Sequence
  ENSG00000285809_30 (sequence is synthesized)
gaggagtgcaccaagttatgtactttgtatcaaagacaagtggcttgtgatatttaattttaatgtgttaacttgtctgggctagggcatgcccagatgggtgattaaatattatttctg

SEQ ID NO: 1028942 - DNA, 120 bp, Artificial Sequence
  ENSG00000285808_0 (sequence is synthesized)
aggaatggagtaaatgctgtgtaaaagtgtaggctcataaggtggacaagaggaaaaaagaattggtatttaacttaggatctgaagagcaaagaatattttaggctgaagaaataatag

SEQ ID NO: 1028943 - DNA, 120 bp, Artificial Sequence
  ENSG00000285808_1 (sequence is synthesized)
caaaagatgggtaaagaagaatacaagtagattttgggatgtgtctgcaaatgcaagtgtggaatacatagaagaacactaaataggaatcaacagaaaggaagagtaaatttttagggt

SEQ ID NO: 1028944 - DNA, 120 bp, Artificial Sequence
  ENSG00000285808_2 (sequence is synthesized)
tggacaacctctgtaggcatgctggaccactcctcatgatagaagtacctgaagctgtttccaggatcagcaggtctctgcagcttttcctgaagatacaaggttgctgaatggcccaga

SEQ ID NO: 1028945 - DNA, 120 bp, Artificial Sequence
  ENSG00000285808_3 (sequence is synthesized)
ctgtcacccaggctggagtgcagtgttgcaatctcggctgcccaggctggaagatgaggctgaaatttctatgtattccagtgttacacatatcaatttttatccagctgtgttgagtgt

SEQ ID NO: 1028946 - DNA, 120 bp, Artificial Sequence
  ENSG00000285808_4 (sequence is synthesized)
tgttcccgataaatatgccaaactgcagtgctctttgttgtgatcagcatttttaaagacactgagaaaaagcagccatctatgatccagaaaaatgggaacttaccagacattgaatct

SEQ ID NO: 1028947 - DNA, 120 bp, Artificial Sequence
  ENSG00000285808_5 (sequence is synthesized)
gccagcacattgaccttggatgtcccagtctccagaactatgattaatgttgttatggaagctggaggctgagaagtcccattatctgccaccagtacgagccagaatcccaggaaaact

SEQ ID NO: 1028948 - DNA, 120 bp, Artificial Sequence
  ENSG00000285808_6 (sequence is synthesized)
catggtataatttcaacctgaatccagaggcctgagaacgaggagagccactgatataaagaatcctatactgacaaagaagacttctttaacactgacaaagaagattcaccagaattt

SEQ ID NO: 1028949 - DNA, 120 bp, Artificial Sequence
  ENSG00000285808_7 (sequence is synthesized)
agggctcaatgtttccagcttcatcaaggtcttccaacacatctctgtggcaattataggatagcatttttttttgctcaataagtactctcatgttaaaatacacatcttgtgagtctg

SEQ ID NO: 1028950 - DNA, 120 bp, Artificial Sequence
  ENSG00000285807_0 (sequence is synthesized)
gagacccatttaactgtgagatggaagcagtagcacagatcttcacgttacagaacagctagaattacagagggatagaaatctgcaaaccatttgtatgacaaggtgttcttcttctat

SEQ ID NO: 1028951 - DNA, 120 bp, Artificial Sequence
  ENSG00000285807_1 (sequence is synthesized)
catcacacagaaatacagctaccactacactagtgaagctggctgtctgatttctacatgttcatgggtggtcacagtccatttcttccggagacaaagtctccctattaaaagcattaa

SEQ ID NO: 1028952 - DNA, 120 bp, Artificial Sequence
  ENSG00000285807_2 (sequence is synthesized)
caatacaaacagtaataaaactaatgtttaaaaaaatggaccacgcaaagaaaatgggagcggggggacaaccccaaactgactgatgcctcacaactgaagtcgttccttgcacctgca

SEQ ID NO: 1028953 - DNA, 120 bp, Artificial Sequence
  ENSG00000285807_3 (sequence is synthesized)
gtggatatacagagaaaaataccaaaggaaacgagcagtatttagaatgcaaagaattatttttacaattggatccttctgtacaggattgcagagcacaagtatccagaattgggtgtt

SEQ ID NO: 1028954 - DNA, 120 bp, Artificial Sequence
  ENSG00000285806_0 (sequence is synthesized)
gtggtcagagagcccccctaacactgtcgccatcctgattcccaaggcagccctggcctgctcactgaagctggggagagaggatgatgacaagctaagaccacaaatctctcctgaggg

SEQ ID NO: 1028955 - DNA, 120 bp, Artificial Sequence
  ENSG00000285806_1 (sequence is synthesized)
agtcaggggagcaggagatgtgggtggtgctgagctcccactgcctcccagggcagagaggaccgcagtccagtcctcaacctgtgcgaaaggtttggggaaatgacaactgaggctagc

SEQ ID NO: 1028956 - DNA, 120 bp, Artificial Sequence
  ENSG00000285806_2 (sequence is synthesized)
acagacttgctcttatggaaatggtagaattctgaaagaaaaacaaagcattcaagaacttttgagcctaagccccaagctggcacactgttatgtttgcagtcttctattggccacagc

SEQ ID NO: 1028957 - DNA, 120 bp, Artificial Sequence
  ENSG00000285806_3 (sequence is synthesized)
cacactgcaaagggtctggatacagggaaggatgatgaattgatgccatttttgcaatcagtatcactatgcattttcttgcagagctactaatgtgtggacagagtctgcggccgtggc

SEQ ID NO: 1028958 - DNA, 120 bp, Artificial Sequence
  ENSG00000285806_4 (sequence is synthesized)
aggtggcacacactggcaatgatgaccagagccacggtgacagtggcagcctgctccctggactctgcgtcccgaagcacgtgccaggctgcagcagcatccacagtggacagggagcca

SEQ ID NO: 1028959 - DNA, 120 bp, Artificial Sequence
  ENSG00000285806_5 (sequence is synthesized)
cgggaagcgggctgccatcaagccacaatttcaccagctctgctcttgggtggaaccactacttcccgccagagcttgcagatgaagcaaagaggggccatggagggatccagggctgac

SEQ ID NO: 1028960 - DNA, 120 bp, Artificial Sequence
  ENSG00000285806_6 (sequence is synthesized)
tgcttggagccttggttttcctgcattttacaaatggagttgtagtcataaacctgccacctcatttaatttccagtgatgctgtaaaactaaacgaaattttgaaaattgtgtaagacc

SEQ ID NO: 1028961 - DNA, 120 bp, Artificial Sequence
  ENSG00000285805_0 (sequence is synthesized)
aggcccgagaacgcccgaccccgcggccgacgctaccgggcccagctttcgcaaggaaagggcatctccgaacttcgtcggaggccacagcagcaggcgtctcggcctcgcagctaggga

SEQ ID NO: 1028962 - DNA, 120 bp, Artificial Sequence
  ENSG00000285805_1 (sequence is synthesized)
tcggaaagatgaacgtaccatgcgaggaaactttgttttctggttatccactgggcttattttgatgtaagaatcaccgaaaagcactcatgaagcgtgggaggacacagaactagctac

SEQ ID NO: 1028963 - DNA, 120 bp, Artificial Sequence
  ENSG00000285805_2 (sequence is synthesized)
gaacagatgttaacatgaagccaatgtacagcctcaacagctgcataccagacaatcgccacagcggctgatcgtcgttaagacatagcgtggccggaggcaaatgttaccctttatcta

SEQ ID NO: 1028964 - DNA, 120 bp, Artificial Sequence
  ENSG00000285805_3 (sequence is synthesized)
ataagggtggtctggaattatggaattcctgattagaagagtcagactaggacaggctaaggaaaatattcttacaggaagcactctgaggagaaggttcctcctaactagaatgtaagc

SEQ ID NO: 1028965 - DNA, 120 bp, Artificial Sequence
  ENSG00000285805_4 (sequence is synthesized)
gccatgcaggcaggaattttgactggctcactgctgtatcctctggtacctaatactgagtaacacatagtaagtgttcgggaaaatattcattgatgtatgaataaagagatttgaagt

SEQ ID NO: 1028966 - DNA, 120 bp, Artificial Sequence
  ENSG00000285804_0 (sequence is synthesized)
gaaaatatcttatacttctttctattcaatcatccttgactccgaaagtgcctcttattttcttttggtggaacagtggaaaaaaaatatcacactggaaggccaattgactgaaatcaa

SEQ ID NO: 1028967 - DNA, 120 bp, Artificial Sequence
  ENSG00000285804_1 (sequence is synthesized)
gtcccttttcctaactgtgtgaactgggtccttcacatcactatccttcaacaacaagaaaaacaaaaaacatcctataaatgtataaagaagaaaatgaaagttctttctttgctaccc

SEQ ID NO: 1028968 - DNA, 120 bp, Artificial Sequence
  ENSG00000285804_2 (sequence is synthesized)
ctagttctcttccccttcctagaggctaaactattttgtgtgcatgtgtgtgtgtgtgtagaatgtacacatatatgtaggggattggttctaggactctgtcccctgtgaataccaaaa

SEQ ID NO: 1028969 - DNA, 120 bp, Artificial Sequence
  ENSG00000285804_3 (sequence is synthesized)
ttcagggacgcctaagttccttatataaaatgatgcttataacctacgcacatcctcctgtatactttaaataatcttgattacttataatatctaaaacagtgtaaatgctatgtaaat

SEQ ID NO: 1028970 - DNA, 120 bp, Artificial Sequence
  ENSG00000285804_4 (sequence is synthesized)
agttgttatactgtattgtttaggaaataatgacaagaaaaaagtctgcacatggtcagaacagattcaaccattctttttttatatatttttttctgaataattacaatccatggtttg

SEQ ID NO: 1028971 - DNA, 120 bp, Artificial Sequence
  ENSG00000285804_5 (sequence is synthesized)
ttgaatccacagatgcagaactggtggatatggagggctgactgtatacatgtatcttccccatataaatagaacaatattttatatactgttcttcaaatggcattttccctttgaagc

SEQ ID NO: 1028972 - DNA, 120 bp, Artificial Sequence
  ENSG00000285804_6 (sequence is synthesized)
tcttttcaaatatgtaaaaatctatttttaaaaactgctgcacagtagctcatagaatgaatctaccatatttcctttactctttcccctcttggtggtcctttaggtggtgtttggttt

SEQ ID NO: 1028973 - DNA, 120 bp, Artificial Sequence
  ENSG00000285804_7 (sequence is synthesized)
ttttctattataaatagtgtgcaatgaccatgcttgtaagtgcttctatactcatatatgtttctctgagcacagatgcctagatctagaagccaaacagatgggttgaaggtgatacct

SEQ ID NO: 1028974 - DNA, 120 bp, Artificial Sequence
  ENSG00000285804_8 (sequence is synthesized)
acatttgatgactcctgccaaattaccctctgaaaagaatttaacaatttatattccttccacatcattgcctctttccccacatcataatgtaagtcttcttattttttactcaccaaa

SEQ ID NO: 1028975 - DNA, 120 bp, Artificial Sequence
  ENSG00000285804_9 (sequence is synthesized)
gggagagaaatatttactgtttaaaactgagcaccttttaaactgcttttctttctttattggcttaactcttcaagatgtgtcttttttctgattggactattgtttttatctttactg

SEQ ID NO: 1028976 - DNA, 120 bp, Artificial Sequence
  ENSG00000285804_10 (sequence is synthesized)
gcttttagaagctctttatataatctggataataagctttcgtcatcaatatatgttgcagatatttcctctcagtgtgtcatcagattttgtatttatgtctatttattatgtctgtga

SEQ ID NO: 1028977 - DNA, 120 bp, Artificial Sequence
  ENSG00000285804_11 (sequence is synthesized)
ccatacaaattattaaatttcttataaggttaggctaagcttctttctttatgagttaatgggggttgtctgtcttagaaaggatctctcattccaaaccttaaaactattctcctaata

SEQ ID NO: 1028978 - DNA, 120 bp, Artificial Sequence
  ENSG00000285804_12 (sequence is synthesized)
attttagatttgttcaactgagagagtgcttaactcaggagatcaataaaggttcatagaggaagaagtatttgaaattgtcctggaagaacaatatttttcaacaggcagagatggaga

SEQ ID NO: 1028979 - DNA, 120 bp, Artificial Sequence
  ENSG00000285804_13 (sequence is synthesized)
aaggacaatctacatgaacagaacagcatgagcaaaaagaactggttagagactatccataggataaatttctagcaaattgctgagtccaggatatgcatgtttgcaattttggaagat

SEQ ID NO: 1028980 - DNA, 120 bp, Artificial Sequence
  ENSG00000285804_14 (sequence is synthesized)
cttaaaaacttgcctcctataggtgttgtaccagtatatacttctgccagtaatagatgggtgggctgctgatgcctcaaaatagatgaaggtagaccttattttgaaaaatattcaaat

SEQ ID NO: 1028981 - DNA, 120 bp, Artificial Sequence
  ENSG00000285804_15 (sequence is synthesized)
tgtcataattaaattcaaattattggaagaaggaaagaggagctaccacgggagtgtcagaagattctgcttaaacagaatttcagtgctcactgcttcatcttcaaaaatttgatcctg

SEQ ID NO: 1028982 - DNA, 120 bp, Artificial Sequence
  ENSG00000285804_16 (sequence is synthesized)
aaacctgtgaactcagcttatactgtgttaatttacacatagtcatattattttgtactgtggctgcagattaatgctgctttaaactcattttaaaataccactttaaaaattaacacc

SEQ ID NO: 1028983 - DNA, 120 bp, Artificial Sequence
  ENSG00000285804_17 (sequence is synthesized)
gcatttcacttagcgggagaggcggtggccaactcagcacaggctgcggactcagcgtggtgacagatccctcaagctagaagacttctgttaggagaagcgttatcctgtcagttgatt

SEQ ID NO: 1028984 - DNA, 120 bp, Artificial Sequence
  ENSG00000285804_18 (sequence is synthesized)
agcaggcacatctacacatggccagagcaggaggaagagagagaaggaagaggtgctacacccttttaagcaaccagatcttgtgagatctcactatcgtgagaatagcaaggaggaaat

SEQ ID NO: 1028985 - DNA, 120 bp, Artificial Sequence
  ENSG00000285804_19 (sequence is synthesized)
ctgcccccatgattcagtcacctcctgccagacccctcctccaacattagggattacaattcgacacgagattgccggtgggacacaaatccaaaccatatcatattctttatacatttg

SEQ ID NO: 1028986 - DNA, 120 bp, Artificial Sequence
  ENSG00000285804_20 (sequence is synthesized)
ggaaattaacttttttctgtaatatgatttacaaatatttttctcagattggcatttgttttttgacttttcatattgtgcattttgccatgggaagttttttttgtcattaaatttacc

SEQ ID NO: 1028987 - DNA, 120 bp, Artificial Sequence
  ENSG00000285804_21 (sequence is synthesized)
tattctttcattcatatggcttctgggtcctatattatacttagacctttaccattctgaaattatgtaagaaaaattctctcagggttttttcctagtaattttaagactttactttta

SEQ ID NO: 1028988 - DNA, 120 bp, Artificial Sequence
  ENSG00000285804_22 (sequence is synthesized)
atattttggatttatccagatgtagactataagataaggatccacattttttccccagctctacattttgctgctagaagattttacaaaattttgcaattacttagtaacttacatttc

SEQ ID NO: 1028989 - DNA, 120 bp, Artificial Sequence
  ENSG00000285804_23 (sequence is synthesized)
ttcccaattgattttgaaatctgtaagagcagaaactttgatttcatatttttattctctcacatgcctgccctttaatgcacttcaaccccagccccaagttttgcctagtacttggca

SEQ ID NO: 1028990 - DNA, 120 bp, Artificial Sequence
  ENSG00000285804_24 (sequence is synthesized)
ttaggtagttgttacttctgcatctcttgactgctggggaggaaagattccacctgagttaaggcaagtcctacccaggatgtggctgcaaatgagactgcaaagttctcgaccgatgtc

SEQ ID NO: 1028991 - DNA, 120 bp, Artificial Sequence
  ENSG00000285804_25 (sequence is synthesized)
ttttcattaaactctggcttttaccaagtacaagtaccaagtgagtcataccgacacatgtagaggatggcatcctgaggggaaaagaattatagtggaaataaccaaggctgcttggag

SEQ ID NO: 1028992 - DNA, 120 bp, Artificial Sequence
  ENSG00000285804_26 (sequence is synthesized)
aaaagcttctcagctggcactgcagaacagcagccactgccacagcaaacagcaaaacaataacaagcttacttgcagaaggtgggaagctgcagacgtaaatgcaggctcccttcccag

SEQ ID NO: 1028993 - DNA, 120 bp, Artificial Sequence
  ENSG00000285804_27 (sequence is synthesized)
gctaccagcagtccctggggatgaagtagtctaaatgggcagcagttgtggagtcctccccgctcacaggaatggaagatgtcactcactagcagaagtgctctggggtggcaatgagga

SEQ ID NO: 1028994 - DNA, 120 bp, Artificial Sequence
  ENSG00000285804_28 (sequence is synthesized)
gtactgtctttggactctgacaggaacatctggatggcaccaggctcagggagacgggtcttgtgtgtcctgctaagcactaacagcaataattgagcagcagcaatctgcctcacatca

SEQ ID NO: 1028995 - DNA, 120 bp, Artificial Sequence
  ENSG00000285804_29 (sequence is synthesized)
ttctaggccctaggagggcacaaagttggttcttggctcaggttatcaggaaagtaacgtatgtgcgtacaaataaagtgtccaacagcagaaagggatgccctgaacagtccaggttgc

SEQ ID NO: 1028996 - DNA, 120 bp, Artificial Sequence
  ENSG00000285804_30 (sequence is synthesized)
acaaaggagtatggacaaacaagtagtttcatccagctgggagcactaggaaagctcagaaggaggatgcctccaggagccagtgagtgtattctgtcaccaggtgccttggagagtgga

SEQ ID NO: 1028997 - DNA, 120 bp, Artificial Sequence
  ENSG00000285804_31 (sequence is synthesized)
ggatctggagggcactttttgaggctgataggaagaaagcagacgggtggagtggtagatggaatgacgccctcaccctctgcaatgttcacattctaatccctgagatatgtgaatatg

SEQ ID NO: 1028998 - DNA, 120 bp, Artificial Sequence
  ENSG00000285804_32 (sequence is synthesized)
ttactctagctgacaaaagggactttgcagatgtgattaaggattttgagctggggaggtgactctgaattacatgaatgggcccagtataatcacaagggtccttataatagggagact

SEQ ID NO: 1028999 - DNA, 120 bp, Artificial Sequence
  ENSG00000285804_33 (sequence is synthesized)
ggagtgtcagagtcacagatgagctgtgatgatggacgcagtggtgagagagagatgtgaagatggaaggagagggccatgggccaaggaatgtgggtggtctctaaaagctggaaaagg

SEQ ID NO: 1029000 - DNA, 120 bp, Artificial Sequence
  ENSG00000285804_34 (sequence is synthesized)
caagaaaatggatcctcccctagagactccagcaggaacaaaaccctgctgacaccttgactgtaggacttccaacctccagaactataaaataataaattcatgttgttttaaaccact

SEQ ID NO: 1029001 - DNA, 120 bp, Artificial Sequence
  ENSG00000285803_0 (sequence is synthesized)
ggtcctcaccaacttcaacagtcacctcagcaggctgtacagcagcagccatgggcgctcctgccatcctgtccctagctcctgcctcataggtctcagattcagagggacacaccgacc

SEQ ID NO: 1029002 - DNA, 120 bp, Artificial Sequence
  ENSG00000285803_1 (sequence is synthesized)
cctgctgctggtcaaactcgaggctgacgctagggtgcacacgacagagaatggagaaagcaattgaagccatgggtgtggaggtgactgccctgagaagttgtgtatagtaaggagaac

SEQ ID NO: 1029003 - DNA, 120 bp, Artificial Sequence
  ENSG00000285803_2 (sequence is synthesized)
tgggaagaaagaagacctggagaatagggtgatttgcacggcattaagtgaagcttgcaaaagtgagcaatgagactcaagagacctgcatatgaatcaggaatggctgctcctgcagtg

SEQ ID NO: 1029004 - DNA, 120 bp, Artificial Sequence
  ENSG00000285803_3 (sequence is synthesized)
ataaacggagtaaaaaaccacagccatggatcgggagaccaaggtacctccagaggagtccagtgggtccagaagccctttggatgttggtcagaggctcctcttgggcagagatcacag

SEQ ID NO: 1029005 - DNA, 120 bp, Artificial Sequence
  ENSG00000285803_4 (sequence is synthesized)
tcttgtctttgctggttttatgatcctctgcagatgggtctattctcattacctcagccacctttcacttcctatcagttcagttcaggtctctcatgatcccaggcagcagtagttgtt

SEQ ID NO: 1029006 - DNA, 120 bp, Artificial Sequence
  ENSG00000285803_5 (sequence is synthesized)
atcacgtgagttcattcatatatgtttatctctggggatggggggacaacttcactgtggacttaattctactggagatgagtgaccccattttaagacaacaggatcacaaattattat

SEQ ID NO: 1029007 - DNA, 120 bp, Artificial Sequence
  ENSG00000285803_6 (sequence is synthesized)
agtgaccccattttaagacaacaggatcacaaattattatcacatatcagcagggcagacaatagctacgacctggggctgaaagcagagaataaacaggccaggtgcggtggctcacgc

SEQ ID NO: 1029008 - DNA, 74 bp, Artificial Sequence
  ENSG00000285803_7 (sequence is synthesized)
gatcatctgaggtcaggagttcgagaccaacttcgcctacatagtaaaacctcatctctactaaaaaaaaaaat

SEQ ID NO: 1029009 - DNA, 120 bp, Artificial Sequence
  ENSG00000285802_0 (sequence is synthesized)
acatcagctaacagagcccacctgaaactgctgggcttgggaatgctcctgggagttgaagcccccagccgactggaaaggctatcccaagagccatgaggattacaataaaaatcacga

SEQ ID NO: 1029010 - DNA, 120 bp, Artificial Sequence
  ENSG00000285802_1 (sequence is synthesized)
tgatgtctcgcttttcacagtgcttggtggttcttgagcacttgttctatgccaggccctggtccaaaagcagacatcctcttcattgtgcacctactatgggcagactgtctagaggac

SEQ ID NO: 1029011 - DNA, 120 bp, Artificial Sequence
  ENSG00000285802_2 (sequence is synthesized)
ggaccaggcaaagctgcgcaatggctaaaaccatgggtcccagattgactgaattcaaggtggagctctgccactttctagctgtgtgacctcaggcgcggtggcttatgcctgtaatcc

SEQ ID NO: 1029012 - DNA, 120 bp, Artificial Sequence
  ENSG00000285802_3 (sequence is synthesized)
atggatcacgaggtcaagagatcgagaccttcctggccaacatgctggaagaatttttcaaatggtttttgcgagaaagttcaaaccctggaatgactaagtcgctggaagaatttggac

SEQ ID NO: 1029013 - DNA, 120 bp, Artificial Sequence
  ENSG00000285802_4 (sequence is synthesized)
gtcgctggaagaatttggactttgtgaggggaatttgcacttggtatgaatcacccagtcactgattcctgcagtgagaagacctttcggaaagcttctgggtcagccccctcgtacaca

SEQ ID NO: 1029014 - DNA, 120 bp, Artificial Sequence
  ENSG00000285802_5 (sequence is synthesized)
gggaaaccgaggctcaaggaggggaaggacttcagccaaggtcccacagcatgtctgtggaaatgacaggactggaatcaggtctagctcctggaacagctttggatttgcaagaagctc

SEQ ID NO: 1029015 - DNA, 120 bp, Artificial Sequence
  ENSG00000285802_6 (sequence is synthesized)
tcaagcacccagtctccataggtgggcacattttccaaacagtagaggaacagaaagaacaagagggttctgaggagttagaactcaccatagagttatggaaggaatggggaagggatt

SEQ ID NO: 1029016 - DNA, 120 bp, Artificial Sequence
  ENSG00000285802_7 (sequence is synthesized)
gccggaaggtattttatatgaaatagctcatttaatcctccccaggatcctattaggcagtggttctaaactagggttgattttgcccccagaggacatttggcaagatcaggggacatt

SEQ ID NO: 1029017 - DNA, 120 bp, Artificial Sequence
  ENSG00000285802_8 (sequence is synthesized)
ttaggtttgtcacagcttgagtgggagttgctactggcatctcttggcagtgaataccctatgtggtagaggccagggataccgctaaacatcctgcaatgcacaggacagcctcacaac

SEQ ID NO: 1029018 - DNA, 120 bp, Artificial Sequence
  ENSG00000285802_9 (sequence is synthesized)
aaagaattatccagcccaaaatgtcaatagtgttgggtctgagaagccctgctatgcagagggcgcttgtatatacatatcaatttaacagccaagaaagccgaggctcagaaagtgtag

SEQ ID NO: 1029019 - DNA, 120 bp, Artificial Sequence
  ENSG00000285802_10 (sequence is synthesized)
ccactcgctagccacgtggtcttgggcaaattagcctctctgtgtctcagtttccttatctgtaaaatggaggcaacagtacctctgttacctaaataaacatttgtaaagcacttagaa

SEQ ID NO: 1029020 - DNA, 120 bp, Artificial Sequence
  ENSG00000285801_0 (sequence is synthesized)
gagagaggcttttggagagcctggatctctcggccttcaggaaatgatcttctttcaaagaaaacaaggaggacagccgctctcacttaacaaacaaaaaaagagagaactattggcctg

SEQ ID NO: 1029021 - DNA, 120 bp, Artificial Sequence
  ENSG00000285801_1 (sequence is synthesized)
aggcccctggaaacattgcttcattgcttggccttataagaatttacttgacctattttgtggaagcacatttaccccagtcttaaaggtttttccatgcaaaagagataaatgaaaatt

SEQ ID NO: 1029022 - DNA, 120 bp, Artificial Sequence
  ENSG00000285801_2 (sequence is synthesized)
tttactgctaagtttcattcacctgagccaatcacagctactgaaatgaccaggggtcaaggctcccagcatatgatatccaattcaactagcatatttatttaaaagactgcaccttct

SEQ ID NO: 1029023 - DNA, 120 bp, Artificial Sequence
  ENSG00000285801_3 (sequence is synthesized)
aaggaaggaggaaggagatggggagagggaggacagcaaccaccagaacaaaacattctaaaatgttttgggtgatgcaagtgtagaaattaaagcacaaagggattgactaaattgccc

SEQ ID NO: 1029024 - DNA, 120 bp, Artificial Sequence
  ENSG00000285801_4 (sequence is synthesized)
agtgtccccagactgtctgttggagcctggatccgcacccaggtgttcttgaatgcatgtttctgatagctctggagactgtgacatcaaaatagagaaaaaacttcgaggactcatgga

SEQ ID NO: 1029025 - DNA, 120 bp, Artificial Sequence
  ENSG00000285801_5 (sequence is synthesized)
atgttcatgaatatcaagcagaacaagaattaactgcatggactaaactaatagaagtttgaagtaatcttttttaactttttgcttaaaatgttgctgataatttgtttttcaaaatca

SEQ ID NO: 1029026 - DNA, 120 bp, Artificial Sequence
  ENSG00000285801_6 (sequence is synthesized)
caaaatcaagaaacttttaagctatttacagctttttaacaatggagtatactcctttgaacaaaatttggagcatatttgtttttaaaactacctgatttctacagaatttggaatcta

SEQ ID NO: 1029027 - DNA, 120 bp, Artificial Sequence
  ENSG00000285800_0 (sequence is synthesized)
gactcaccctcaatctgggtgggcacaatttaatcagctgccagcgtaaccacaataaaagcaggcaaagaacgtgaaaagactagactcgtttagtcttctggcctacatctttctcct

SEQ ID NO: 1029028 - DNA, 87 bp, Artificial Sequence
  ENSG00000285800_1 (sequence is synthesized)
tcttcaattctggcttccctgacatcctgtgaccattctcccattgagaacattaagagatggaaactacttcctactccttgaata

SEQ ID NO: 1029029 - DNA, 120 bp, Artificial Sequence
  ENSG00000285800_2 (sequence is synthesized)
gaacattaagagatggaaactacttcctactccttgaatatggactgctcttgtagcttgctttgacccatgcattccagtggaagtgatggtgtgcacttttgctgtcagaatcctgca

SEQ ID NO: 1029030 - DNA, 120 bp, Artificial Sequence
  ENSG00000285800_3 (sequence is synthesized)
ccatgcagaaaagcctaggtgaacctgctggaggatgagagacaatgtggatgagagccaaggcatcccagccaacagccagaagtagtgttgcctagctgacccacagctaactgcaga

SEQ ID NO: 1029031 - DNA, 120 bp, Artificial Sequence
  ENSG00000285800_4 (sequence is synthesized)
tcaataagggagcccagttcagaccagaagaaacatccaactgagcccagcttaaattgctgacttgcagattttctgcgaaataaacagttgttttaagctactgtatgttgagatctg

SEQ ID NO: 1029032 - DNA, 120 bp, Artificial Sequence
  ENSG00000285800_5 (sequence is synthesized)
cagacgaaggtccaaaggaagaagattttgttgaagactgaaaagagaaatatacttggtggacagagataactcctttcagcacagaggtcagaagactcaagaaaaagtccaagataa

SEQ ID NO: 1029033 - DNA, 120 bp, Artificial Sequence
  ENSG00000285800_6 (sequence is synthesized)
gaaattccatttataagaaaaggaaggcacaggttaatttggtttatctcctccaacctcaacaatggatgtgagttctgacaattgcttgtggccagaaccaatcaaactttccttcct

SEQ ID NO: 1029034 - DNA, 120 bp, Artificial Sequence
  ENSG00000285800_7 (sequence is synthesized)
aggtggggagactggagtgctgggaaaagggtcagcagaagctagcaaacatgaaagacacaacacaaaacaagcagttgtgcaaattaggatgataaggggggagtggtcaaaggtgtg

SEQ ID NO: 1029035 - DNA, 120 bp, Artificial Sequence
  ENSG00000285800_8 (sequence is synthesized)
tttctcatggctcaaccagtgcaaactcagtcttatgaccctacatgactgactgcacctggcctctgcatcccttcagcctcttccccaaaaggactcctccttattgccagccacaca

SEQ ID NO: 1029036 - DNA, 120 bp, Artificial Sequence
  ENSG00000285800_9 (sequence is synthesized)
agccttccttcatttcctctaacaggccagacttgttcctggctcccggtcttggcattcactgttttttctgccatagctggctccttcccaaacatggaatctcagcccaaacaatat

SEQ ID NO: 1029037 - DNA, 120 bp, Artificial Sequence
  ENSG00000285800_10 (sequence is synthesized)
ctcctctgagacaccagccttgatcacctttatacaatacagatctgctcctgcccatcactttctatctcatgaccctacaatgtgccccttcgtgatagctcacaccagctaaaacca

SEQ ID NO: 1029038 - DNA, 120 bp, Artificial Sequence
  ENSG00000285800_11 (sequence is synthesized)
tcttgtttgtggattgctcacttgccccctgcctgtctctagctctaggaggtcggctccctgtcactgtctggtctactgtgtcgtaccacccatgcccagcacctagccttgcacatt

SEQ ID NO: 1029039 - DNA, 120 bp, Artificial Sequence
  ENSG00000285800_12 (sequence is synthesized)
ataggacttaatgcaaacttcttgactgaaagaaaaatgaagaaactcagccttgggagagaaaacaaccattaaatgattatttaataaaatagagtattaatctattttatattaatt

SEQ ID NO: 1029040 - DNA, 120 bp, Artificial Sequence
  ENSG00000285800_13 (sequence is synthesized)
attaatttagttcataaaatattaattgtctttacaacgaatgtgtccttagtcattggtgtttgtgctttgtgaatcttcacatcccatggggccagtaatgggggtgggggtgtagtg

SEQ ID NO: 1029041 - DNA, 120 bp, Artificial Sequence
  ENSG00000285800_14 (sequence is synthesized)
tgggaagtggggcagggaaccaatctggcctgcaggggttacctgccccatgggtgcctgcaggcttcatgtggtttcagtggcatggcaccctgatgggaagagtggctcagaattggt

SEQ ID NO: 1029042 - DNA, 120 bp, Artificial Sequence
  ENSG00000239552_0 (sequence is synthesized)
aaggcactaccctgtgatttcctggttagaatacttggcttttgccttctcccatctggatgcaccagaagagggaacgggactggggacaacaaagtattaacgaagatttcaaagctg

SEQ ID NO: 1029043 - DNA, 120 bp, Artificial Sequence
  ENSG00000239552_1 (sequence is synthesized)
ggagttgtaaagtgggaattgctaatgaagaaggctcttggcatttggatccccatctccagctctccaataagccagagcaggagggaacaaaggggcacccggaagggagaagaggag

SEQ ID NO: 1029044 - DNA, 120 bp, Artificial Sequence
  ENSG00000239552_2 (sequence is synthesized)
actcgcatagacactgctcagcaatagtggggatcaaaagaagaaaaaggtcgctgcagtggaagaagaaaaatccaagctgtactttttccccaccccacgtgtgggggcgctgccctc

SEQ ID NO: 1029045 - DNA, 120 bp, Artificial Sequence
  ENSG00000239552_3 (sequence is synthesized)
agctgagcctgtgaaggggtggcaggacaaaaagggcagccacaagggtctgcgaagtccactcgatgaccacggaggccgcctgaacatgctaatgaggggatggcggtgctgccagcg

SEQ ID NO: 1029046 - DNA, 120 bp, Artificial Sequence
  ENSG00000239552_4 (sequence is synthesized)
agttgggagcctcaggcaggtgggctccttggtggtgatagatcccaatctgaatcagggctcccgcctcacctagaagctcagccttagcctggcaaaccccacccccagcaagtgttg

SEQ ID NO: 1029047 - DNA, 120 bp, Artificial Sequence
  ENSG00000239552_5 (sequence is synthesized)
agacaaaggtgggcagagcagagaaggcagaggaagggaggctgcaaatcctgggcagcttgggggctgcagggggtgctgggaaagggagggagaagcaggaaaagaggaacgggccca

SEQ ID NO: 1029048 - DNA, 120 bp, Artificial Sequence
  ENSG00000239552_6 (sequence is synthesized)
gtccctgaggttcagcgggcctctcctgacagactggatgtttctctcccagtgacctctgtttagcagacaataactcagtggattaatgaccaatcagcgaaaggccttccgaattgc

SEQ ID NO: 1029049 - DNA, 120 bp, Artificial Sequence
  ENSG00000272491_0 (sequence is synthesized)
gtgattgtcagcttcccctcagcaacacgcacatggtgatgcactcagcagttccctaattagcatttccagacacagtgaccacattgcagtgacacctaccgagatcttggtgaagat

SEQ ID NO: 1029050 - DNA, 120 bp, Artificial Sequence
  ENSG00000272491_1 (sequence is synthesized)
gtagaggatgagagacaggacagacatgtacacctggatcctctggcccccaaatcgcttcttcagatactgcggcattgtgaccacacctgctgcgatgtacacagggacgaagaccca

SEQ ID NO: 1029051 - DNA, 120 bp, Artificial Sequence
  ENSG00000272491_2 (sequence is synthesized)
gccaagggccaggagcagccaggttgcctgggagagtggggagaagaagaaggtatccaggtcctggatgtagacagaggggcggcttcccacccagaggcagtgctgtgctgtgggagg

SEQ ID NO: 1029052 - DNA, 120 bp, Artificial Sequence
  ENSG00000272491_3 (sequence is synthesized)
cccccgaacagagaaataagagacctgggacctgaccccagtcctcccgtgtgaccttggatggatccctctgtctcctccagaccttgatttcctcatctgtgaaatggattctcaatt

SEQ ID NO: 1029053 - DNA, 120 bp, Artificial Sequence
  ENSG00000272491_4 (sequence is synthesized)
gtgaaatggattctcgattcaccatgtagcctcccaggcatctctaaggatcctcccagcactaatgccagagacagaggtgggttagaccctcagtattctggagaaaccaggccagct

SEQ ID NO: 1029054 - DNA, 120 bp, Artificial Sequence
  ENSG00000272491_5 (sequence is synthesized)
tccttacgttccactcgaagccacctacggcaaggcctccggcagcccctgtcccagccaggccgatgaacaagccactgcccacattgctggacatcagagatgctccaatctgcaagg

SEQ ID NO: 1029055 - DNA, 120 bp, Artificial Sequence
  ENSG00000272491_6 (sequence is synthesized)
ttcataaatacatttaattccacagatatccgcagggaggggtattagtcatcccaggttacagaggaaggaactaatgtaaggaaagatgaattcatggctccaggtcacccagtgagt

SEQ ID NO: 1029056 - DNA, 120 bp, Artificial Sequence
  ENSG00000272491_7 (sequence is synthesized)
aaatggtgaagtgggaaaaaagggaaagtgggaaggaagcctggaagtggggagtgtggacctccgccctgaggccatgggtctgagggcctccaaaggaaggaagctgaaggggatagg

SEQ ID NO: 1029057 - DNA, 120 bp, Artificial Sequence
  ENSG00000272491_8 (sequence is synthesized)
gaagccccacaggagggaaggaaaggccctcccaccaccccagggatagccaggcagagggaggagccgagggactgagcacaggccaggtcgacctctgagttagttctccaggggcgc

SEQ ID NO: 1029058 - DNA, 120 bp, Artificial Sequence
  ENSG00000272491_9 (sequence is synthesized)
agccaagcacttggaggcagtagagagcaatgatgatggtgagcatgatcagggcagtcagggcctgtgcagcatctccaggaaccagctggccttctgagtttggggactcatttaatc

SEQ ID NO: 1029059 - DNA, 120 bp, Artificial Sequence
  ENSG00000272491_10 (sequence is synthesized)
ctcgccacaaccctcagtgctacttttatccccatcttacccatgagtgaactgaggcacagataggtaacttgcccaagtctcagaactagtaagtgaccaaatgagaattcaatccct

SEQ ID NO: 1029060 - DNA, 120 bp, Artificial Sequence
  ENSG00000272491_11 (sequence is synthesized)
ggctgtctggctccagtaacactacacaaatggtgcttgccacttaatgagcacttggtcaatattctctcttattattagatgggatctctgactgggaggggagaagggggagaggaa

SEQ ID NO: 1029061 - DNA, 120 bp, Artificial Sequence
  ENSG00000272491_12 (sequence is synthesized)
ggggctctggagcctgggaggaggcttaaggagacctcggggagagggctgggggcagctaggggcagagccgtgttcctttttgtatactatgtcaccacagtaaaatcacttcctcta

SEQ ID NO: 1029062 - DNA, 120 bp, Artificial Sequence
  ENSG00000272498_0 (sequence is synthesized)
ctcttatttaaaccaaattgcattgcactaatcccacagcatgctctttgaggacccagctctgatagggcttctgaggtgccagaaacctccagctggaatatcctgccttcaggacac

SEQ ID NO: 1029063 - DNA, 120 bp, Artificial Sequence
  ENSG00000272498_1 (sequence is synthesized)
atcagacatctggctgttcattagtccaatgttacaagtcctgcagtccacctcccattctatctggctccctgctctaccagagacaaatccaccagagccataacagatgcgctgccg

SEQ ID NO: 1029064 - DNA, 120 bp, Artificial Sequence
  ENSG00000272498_2 (sequence is synthesized)
cagagagactggccaatcctatttggggtcctctagaaaattctcccatcactcttccctgtcctaccatttccacatattgatcatgacttggtgcttcgtttttctgcccctgcacta

SEQ ID NO: 1029065 - DNA, 120 bp, Artificial Sequence
  ENSG00000272498_3 (sequence is synthesized)
gaacacaaactccacaaaggcaaggagtttatcttgttcttgatgaatcccaggcacttaaggaagtatttgttcgataattagttgttgagtgagtgaataaatgcacctgtcctagca

SEQ ID NO: 1029066 - DNA, 120 bp, Artificial Sequence
  ENSG00000205622_0 (sequence is synthesized)
cccattcctctgtgtctgtaacaggggagcttcttccttctttcttctcccttctttcttgcctgttaaactctctgcttcttaaaaccactccatgtatgtccaggtcattttatctaa

SEQ ID NO: 1029067 - DNA, 120 bp, Artificial Sequence
  ENSG00000205622_1 (sequence is synthesized)
tttggagacggagaaccctggtgttcctctgctcatcagagccgtctcacctgcaagggccaggatccagcactagggctgccctttatgttcatgcagcctccactaggaagatcctcc

SEQ ID NO: 1029068 - DNA, 88 bp, Artificial Sequence
  ENSG00000205622_2 (sequence is synthesized)
gcctgtcgagagagagagaggtttattataaggaattgactcatgtgattatggaggctgagaagttccacagtctgctgtctgcaag

SEQ ID NO: 1029069 - DNA, 120 bp, Artificial Sequence
  ENSG00000205622_3 (sequence is synthesized)
ttatggaggctgagaagttccacagtctgctgtctgcaagctggagacccaggaaggctgctggtgccgttccagtttgattctgaaggcctgagaaccagaactgatggtatgagttct

SEQ ID NO: 1029070 - DNA, 120 bp, Artificial Sequence
  ENSG00000205622_4 (sequence is synthesized)
agtccaagtccacagaaatgaaactggagaaccaaaggtgtaagtcgcagtctgagggcaggagaacacaataacccagctcaagcaattaggcagagagaaagaattttctctccctcc

SEQ ID NO: 1029071 - DNA, 120 bp, Artificial Sequence
  ENSG00000205622_5 (sequence is synthesized)
actttttgttgttgttgttctactgaggccttcaatggattgaaggagttccactcattaagtcaattaacttctgaagtctattattgtcattgcctccccaggtaggggaaatgagaa

SEQ ID NO: 1029072 - DNA, 120 bp, Artificial Sequence
  ENSG00000205622_6 (sequence is synthesized)
gcctggggatatggcttacagtgaagtgtggctggtccttttttattctcttggccaggctccttccctctgccaagttgcaggtggtccaggtgtttgcttccagatgtttagcaaaca

SEQ ID NO: 1029073 - DNA, 120 bp, Artificial Sequence
  ENSG00000205622_7 (sequence is synthesized)
ttagggggactcttgctcccgttcctacctgcatcttctgagaggtcttccccctttacattcacctcagctcaacattggaatccctgctctttcactgcacacactgaccacccactg

SEQ ID NO: 1029074 - DNA, 120 bp, Artificial Sequence
  ENSG00000205622_8 (sequence is synthesized)
caggctgggggtcctagaggatttcacgtgctaggctgtcccaaatagaggaggtcctgctacagcaccggcaccattagtcctttctgggccgtgctctgtgagcccttgagaggacaa

SEQ ID NO: 1029075 - DNA, 120 bp, Artificial Sequence
  ENSG00000205622_9 (sequence is synthesized)
gaaaccaatgtcaaagccatggaatgatcccattcaattctcatcaaggaatagagaagacataaaattcagcaaatggaggagcccactcaacatgaagatgacaaggatgaagacctt

SEQ ID NO: 1029076 - DNA, 120 bp, Artificial Sequence
  ENSG00000205622_10 (sequence is synthesized)
tatgatgatccattcccacttactgaataatatcaagcattttattcaactatggaatggaagcaacagattacagcagcattaacaagacctgggataccatcaccaatcaaaatcatg

SEQ ID NO: 1029077 - DNA, 120 bp, Artificial Sequence
  ENSG00000205622_11 (sequence is synthesized)
gatatttcatagcacaagaacgttgtttcagaatctcaaagtactcctcctactcaacatgactttgaaattgcaatagttgttagaacggtcactgcagtttgatatatgatgtgttta

SEQ ID NO: 1029078 - DNA, 120 bp, Artificial Sequence
  ENSG00000205622_12 (sequence is synthesized)
caaagaggcacatatattgctctttcagaattataactctgtatgcatttcaatgtaattggtttcctttgtcatcttctgaattttatgtatttaaaaatattattctgatgttaatac

SEQ ID NO: 1029079 - DNA, 120 bp, Artificial Sequence
  ENSG00000205622_13 (sequence is synthesized)
acaacaaagaaaggatagaattttcaataaatggtgttggggaaattggatatccatatacaaaaaataaaaataaaattggattcttatcttaaaccctacacaaaaattaactcaaaa

SEQ ID NO: 1029080 - DNA, 120 bp, Artificial Sequence
  ENSG00000205622_14 (sequence is synthesized)
ggacctcgggagggaagaggtcgctgggacaagtcctgtcaggctgcggggagcccttcccggacactgctggctcctggaactgacttgcctcctcacgcacaccccactcaacatgaa

SEQ ID NO: 1029081 - DNA, 120 bp, Artificial Sequence
  ENSG00000205622_15 (sequence is synthesized)
gatcactggatggtcaacgttgccccttgcacagcagcaaaggcctatacaaattttttgagtagctttatctagtggttcagctactgggaataacttgtaaaatcccctggatagtca

SEQ ID NO: 1029082 - DNA, 120 bp, Artificial Sequence
  ENSG00000205622_16 (sequence is synthesized)
acagcattggggcttgctttgtaaacagagacctgacctacttaattcttcccagaggttggaaaaagaggctggactcacacagacatgaaaccttggcttaattggacactaattact

SEQ ID NO: 1029083 - DNA, 120 bp, Artificial Sequence
  ENSG00000205622_17 (sequence is synthesized)
cataagagatctgtttacccgaacttcccctagaccaagctcagtataaaatgagaggatgcataaagaagcaagatatttagaggaaaatgtcacaaatacatttatcagtcccaaaag

SEQ ID NO: 1029084 - DNA, 120 bp, Artificial Sequence
  ENSG00000205622_18 (sequence is synthesized)
tgcacaaaaataaacaatacaggggttgataaattccacatttaagggctgaggatagtgtccctacatttctaagaagctgtatatttggaaatgaatacaattgaaagtaaggataag

SEQ ID NO: 1029085 - DNA, 120 bp, Artificial Sequence
  ENSG00000205622_19 (sequence is synthesized)
tggcattctaaagccaattggataacttgaatgaacaagcagaatttaccatattttgatatgtttctttttgattaaagtatctgtaaaggaaacaaattatagtattgctatagattt

SEQ ID NO: 1029086 - DNA, 120 bp, Artificial Sequence
  ENSG00000205622_20 (sequence is synthesized)
tattactgaacaagaaaaaaaggcttgatgttgtgcatttccttttggcctttggtcttggctgatattgggcatccaatgagcttctttgtcttgaatgaagacttaagagggagtgaa

SEQ ID NO: 1029087 - DNA, 120 bp, Artificial Sequence
  ENSG00000205622_21 (sequence is synthesized)
aagtaggaagagcatcaaaacttctttgcaggatgtaatcaaaccacctactacttattgtcttacgatccatttattcaacaaatggaacatctcaattgcttgatgctattacagaca

SEQ ID NO: 1029088 - DNA, 120 bp, Artificial Sequence
  ENSG00000205622_22 (sequence is synthesized)
ctaggtatagtcttagaaaaacaaattgctgtttttatatagcttgtgttatgggttgatgtagtacagtcaaaattatttaaataaaggaagatgtgaggaagactttgaacttagaaa

SEQ ID NO: 1029089 - DNA, 120 bp, Artificial Sequence
  ENSG00000205622_23 (sequence is synthesized)
gcgatagatgcaaaaatatttaaagtgcagctcactttcaaacggttcagccaaatgtcgatgatttttgaatctaagtgatgttttacagacataacgttaagcagaagaaagcagatc

SEQ ID NO: 1029090 - DNA, 120 bp, Artificial Sequence
  ENSG00000205622_24 (sequence is synthesized)
tcaaggagcccacattgtacaattccgatctatatgaagctcaataacacatggtactagaagttgtaatagcagttacctgtaggactggaggtttgtattgaaagagaaggaacatca

SEQ ID NO: 1029091 - DNA, 120 bp, Artificial Sequence
  ENSG00000205622_25 (sequence is synthesized)
ggaagtctgctggagcctggaaatgtctgagatgttgctctgggaggcagttgcatggctgtagacatatgtaagacattattggatggtatacctgagattggagcacctacaatagaa

SEQ ID NO: 1029092 - DNA, 120 bp, Artificial Sequence
  ENSG00000205622_26 (sequence is synthesized)
ggtacagtgttacatctcagtgaaaaagagaaaatattaaagaagaaaaagactgtggatcattttggacttgaaccttatgcagtagtgggtactacagagtcatgtctcaactacaat

SEQ ID NO: 1029093 - DNA, 120 bp, Artificial Sequence
  ENSG00000205622_27 (sequence is synthesized)
tgtgttgaaaagaatgaatatttgggaatgtaattctgtgtttgtgataaagtcctccataataactgattcaaagcaaaggagactacagtttcccctggtgccctgcccctgtctctg

SEQ ID NO: 1029094 - DNA, 120 bp, Artificial Sequence
  ENSG00000205622_28 (sequence is synthesized)
attggtgcatgtttgttgggacatctaccagaggggattaatgccccaggctaatgccactccctgtgcccaactcatatcaggtggctggggggcaggcaatccagagccttcttgctt

SEQ ID NO: 1029095 - DNA, 120 bp, Artificial Sequence
  ENSG00000205622_29 (sequence is synthesized)
ccccagtgagggatggacagcccaggaagtgccctccaaagggccggcctgtcccatggattgtccaggaggaggacaacacaaaggcgaggttgtttctcggtgagcccatgcctggcc

SEQ ID NO: 1029096 - DNA, 120 bp, Artificial Sequence
  ENSG00000205622_30 (sequence is synthesized)
ttgcagagcaaatactggggatcatgcatcacgcctccaacaggcaagtggccccacgcccataagccacaggatgccagggatgtgggattggagctgccctgtgggttttctcaacga

SEQ ID NO: 1029097 - DNA, 120 bp, Artificial Sequence
  ENSG00000205622_31 (sequence is synthesized)
agtaaatacctccgaagaaatttgggtcctctaccgctctcagtcagttgcttcctgactggtccacatgtgctgggattctgggttcaactggatcataccatcgtggagggctggagc

SEQ ID NO: 1029098 - DNA, 120 bp, Artificial Sequence
  ENSG00000205622_32 (sequence is synthesized)
cacatcagaaatgtccctgtagctcctgcctccacaactacaggcctgtaacgctgctcgccctaagtggtcagttaacacagtgcatggatggtctggtccacgaatgccttttccggg

SEQ ID NO: 1029099 - DNA, 120 bp, Artificial Sequence
  ENSG00000205622_33 (sequence is synthesized)
cgtgtttgacttacagccatctctgttctcactacgaagacaggagaggagcttcatagaggtgaagtcagtggaagatgctccaaccctcctttgaacacacctgcaacaaggaaacct

SEQ ID NO: 1029100 - DNA, 120 bp, Artificial Sequence
  ENSG00000205622_34 (sequence is synthesized)
atctgatttccccagctttcctccctcctgtcttgtggcagagcagtgcctccctgcagctgacttagagcaaaccaaacacaattggacctgttttcaccgagcaacttgcagtgtttt

SEQ ID NO: 1029101 - DNA, 120 bp, Artificial Sequence
  ENSG00000205622_35 (sequence is synthesized)
gcccagattccagcagtgaactcaatatcattggatgggttcataatgcatgcatttgttcataccagggaattccctggaaggttacttgtaaaataaatatcttgtaaaacgggggaa

SEQ ID NO: 1029102 - DNA, 120 bp, Artificial Sequence
  ENSG00000205622_36 (sequence is synthesized)
gcacacttagaaacaatggcaatcaagggaaatgccccatcttacatggagctcttctagtggaaacaccatggttgccaccacgtactgctccgtacctaagtttctaggaaccagact

SEQ ID NO: 1029103 - DNA, 120 bp, Artificial Sequence
  ENSG00000205622_37 (sequence is synthesized)
ctggaaactcttctagaactgccccaggagaaccaacgtgtctgttgcttgcaaagacctccagtgtccctgagcctggccactgcctcccattgctcaaaccctcctagtctcgtatgt

SEQ ID NO: 1029104 - DNA, 120 bp, Artificial Sequence
  ENSG00000205622_38 (sequence is synthesized)
acagctttaagcttcacatttaatcacttcccacaaggagaagcaggctgggtgtgctccaggctccggaagctccagcagccccagagatgagggtggtctgccccccacactccctgc

SEQ ID NO: 1029105 - DNA, 120 bp, Artificial Sequence
  ENSG00000205622_39 (sequence is synthesized)
cccagcccatcctggaccttctcctgacacacagcaaaccacacttagctgtcattgatgaatcggagcctctgccagacagccggccaagccgacgctaactcaccccacagcctgaaa

SEQ ID NO: 1029106 - DNA, 120 bp, Artificial Sequence
  ENSG00000205622_40 (sequence is synthesized)
tagaaactcgctcgttttccagtgtgtgacaaagaaggaaggacatcaactgggagtggcccagaagcccgaagctgagaggacaaagctcactgggcacaggaaaagagagtggagggg

SEQ ID NO: 1029107 - DNA, 120 bp, Artificial Sequence
  ENSG00000205622_41 (sequence is synthesized)
ctgctgccccaggaaggctgggcccacccctcctcacaggcaccctgatgcctgttcagcttggctctctggatgacaggcagaagccccagttgcttctcttctccacggtgatttctg

SEQ ID NO: 1029108 - DNA, 120 bp, Artificial Sequence
  ENSG00000205622_42 (sequence is synthesized)
ctcttcctgcccgtgctctgaggccagctgggggcctcccaggtgactcctgctgctgctgtcactggaccctgacgctgtgccgcacccgaattcctccgaatggagccttggccagag

SEQ ID NO: 1029109 - DNA, 120 bp, Artificial Sequence
  ENSG00000205622_43 (sequence is synthesized)
caaggcgtgccgtgtagaggagcggatctgagcctggcaggagatcgctaaaacctttgcccttcacacaaacgcggaagcacggggcgggtgctgaagagccaagcaagtgtcccccat

SEQ ID NO: 1029110 - DNA, 120 bp, Artificial Sequence
  ENSG00000205622_44 (sequence is synthesized)
ttccttccaaggcagagcagcagcccagggaggcccagtttccatcgcggcagaagggcagaagagtgggggaggtcccaggaccacagcccaggggacactcaggatgcgccaggaagg

SEQ ID NO: 1029111 - DNA, 120 bp, Artificial Sequence
  ENSG00000205622_45 (sequence is synthesized)
acatggcagacaggccctttaggtggaaaagcaaccctcagctgcccagagagcggcccctccaggccctccccgccgtctgcaaagctcttcagctgggagaggaggaaagggtttgtt

SEQ ID NO: 1029112 - DNA, 120 bp, Artificial Sequence
  ENSG00000205622_46 (sequence is synthesized)
cttgacctccttcctttcctttcttctccactgtccaccagagagcaggaagacaggctgatgctcttgttaaagatgaaggcataattcacatgccataaaattcaccattttaaccat

SEQ ID NO: 1029113 - DNA, 120 bp, Artificial Sequence
  ENSG00000205622_47 (sequence is synthesized)
gcccctccaggccctccccgccgtctgcaaagctcttcagctgggagaggaggaaaggataagaagataagtgggaaggggaagaaagaataattgctctccttggaaggtctggatctt

SEQ ID NO: 1029114 - DNA, 120 bp, Artificial Sequence
  ENSG00000205622_48 (sequence is synthesized)
aaagaataattgctctccttggaaggtctggatcttaggcagataaagaaacttcagcttctttgggaaagacgcccactcaacatgaagatgacaaggatgaagacctttatgatgatc

SEQ ID NO: 1029115 - DNA, 120 bp, Artificial Sequence
  ENSG00000205622_49 (sequence is synthesized)
agagcacagctgccaccaccaaggagctgcaatcaccaccaccaagaagctgtagcaacagagaccagcgcaacggtactgtgaggacccaagaaaacccagctgtgagccaggagcttt

SEQ ID NO: 1029116 - DNA, 120 bp, Artificial Sequence
  ENSG00000205622_50 (sequence is synthesized)
tctcattcctcgtggactctcagcatctttagaatgacctgaacattgtggagggagtccagaatccctacccctgggctctgaggcaatgccttgggtttttgcattgtctcttttcta

SEQ ID NO: 1029117 - DNA, 120 bp, Artificial Sequence
  ENSG00000205622_51 (sequence is synthesized)
gtaatggcagcaacaacaacaacagcgaaaaccccagctcaacccactctgaccctagcgctctcttcctggtgtcttcacttgcacagcttaaaaactataaataacaaggcccttttc

SEQ ID NO: 1029118 - DNA, 120 bp, Artificial Sequence
  ENSG00000205622_52 (sequence is synthesized)
caaatgtcttttggtaaactatgcctgaccctgaaaacaaggccaccatcttccaggtgggagtggcctgtgagattataacctcagtcctctttcctaataactggctgctgtgatcta

SEQ ID NO: 1029119 - DNA, 120 bp, Artificial Sequence
  ENSG00000205622_53 (sequence is synthesized)
atagaacctactggggagggacagagacccagagacccagagggagacactgacacagagagagtgatagagagagagaggcaaagtcacagagacagaaagaggaggggagagggatgg

SEQ ID NO: 1029120 - DNA, 120 bp, Artificial Sequence
  ENSG00000205622_54 (sequence is synthesized)
agagagacaaagtcacagagatagatggagggggaagaagggaggaggcagagagagagaggagaaaaacagagagacggttgacagattaggagaggtgcttctggtgctgctggttgt

SEQ ID NO: 1029121 - DNA, 120 bp, Artificial Sequence
  ENSG00000205622_55 (sequence is synthesized)
gctaggaaaagacatgtttctctttggacagatgtgctgccagtgctggaagtaggctgactgtgtctctctccctgctctgagcctggcaccagatttggcaaaaccagacagagcaaa

SEQ ID NO: 1029122 - DNA, 120 bp, Artificial Sequence
  ENSG00000205622_56 (sequence is synthesized)
agctgcttccagcccacagcacccaaggctggtctcctctttcatcgcagggctgctatgtacagttgcacaggctgtgccctgcaccaagcacccagaagaggatacaagagcctgcct

SEQ ID NO: 1029123 - DNA, 120 bp, Artificial Sequence
  ENSG00000205622_57 (sequence is synthesized)
gtgctccttgaagtatccctgagccctgatgaacacctgtgtctacgtggagagaggggagcctctgctcacatgagcaaaggcaacagggggggactgcagaggcctgttccctcccac

SEQ ID NO: 1029124 - DNA, 120 bp, Artificial Sequence
  ENSG00000205622_58 (sequence is synthesized)
agtctctattttgcaataaggacatcaactgggagtggcccagaagcccgaagctgagaggacaaagctcactgggcccactcaacatgaagatgacaaggatgaagacctttatgatga

SEQ ID NO: 1029125 - DNA, 120 bp, Artificial Sequence
  ENSG00000205622_59 (sequence is synthesized)
attcaataatggcccttccagccccatctctatatgaaagggaaaccacagtatgggcccatggggaagatcatggactttggagtaaaacatttctggcttggtcaattatttaatctc

SEQ ID NO: 1029126 - DNA, 120 bp, Artificial Sequence
  ENSG00000205622_60 (sequence is synthesized)
ttgatcccgatcaattcatgtaactactctgaccctcagtttccttgctgcaaaatgagatactaatatttgctcaaataagataacaggcaaaacaatcatgagggctcctggcacacc

SEQ ID NO: 1029127 - DNA, 120 bp, Artificial Sequence
  ENSG00000205622_61 (sequence is synthesized)
actgtgcatggcttttgctcccttggggagcttataaatgaaaaaaagattttacaatgcaaagacagtaagcattttgttagtgaagcaacaaaataattgggcaatttcctctcaatt

SEQ ID NO: 1029128 - DNA, 120 bp, Artificial Sequence
  ENSG00000205622_62 (sequence is synthesized)
gcaccatcaactgatgcccaacctagaaagcatttggctaagaatggaaaaggaatctttgcccagatccctcaattttgaccatcatggcatatacatgaattggcagactaaatttat

SEQ ID NO: 1029129 - DNA, 120 bp, Artificial Sequence
  ENSG00000205622_63 (sequence is synthesized)
gctgggctgccacactgtcatgctggggcaaagatggcagcagacagctctcttgggtaacagcaggaagctcttttcacaagagtgatctcatctcttaggggactatggtagaaacac

SEQ ID NO: 1029130 - DNA, 120 bp, Artificial Sequence
  ENSG00000205622_64 (sequence is synthesized)
agggcaaaagctataggaatggtccaacataataactgtttttttttttaattttcaaaacatgataaatgattaagaatataaaactggaatttagaacttacagagaacttgtatgaa

SEQ ID NO: 1029131 - DNA, 120 bp, Artificial Sequence
  ENSG00000205622_65 (sequence is synthesized)
taaattaaaaagacaacctaattttaaaatgggcagaagtcttgggcaggcacattacaatatagcaggggtcaccaaattaaagcctcaccagcaaaatccacctcccatcccagcctg

SEQ ID NO: 1029132 - DNA, 120 bp, Artificial Sequence
  ENSG00000205622_66 (sequence is synthesized)
tttttataaataagctgtgttggaacacagccaatcccattcattcacacattgcccatggctgcttttgcttgacaacagcatagttgagtagtagggacaagaccatatgacctccaa

SEQ ID NO: 1029133 - DNA, 120 bp, Artificial Sequence
  ENSG00000205622_67 (sequence is synthesized)
agccagagatattaactgtcaggccctttatagagtgattcacggagacccccataatagaggaaaatacaagtggccaatagcacataagaagatgcccagtattacagccaagaggaa

SEQ ID NO: 1029134 - DNA, 120 bp, Artificial Sequence
  ENSG00000205622_68 (sequence is synthesized)
aatgcaaattacacccacagtaagataccattatgcatccattagaaaggctaaaattaaaaggactgacaacaacaagtgttgacaatggtgggtaacagcaagagctctcatacactg

SEQ ID NO: 1029135 - DNA, 120 bp, Artificial Sequence
  ENSG00000205622_69 (sequence is synthesized)
atggttgaagtgtaaattggttcagttttggaaaagagtttggaggtgtctactacagttaaacatacatatttccatgccccagaaactcctgggcatattctcaaaagaaacgagggc

SEQ ID NO: 1029136 - DNA, 120 bp, Artificial Sequence
  ENSG00000205622_70 (sequence is synthesized)
tgtggccaccaagagacatgtgtgagaaaggtcctagcacctttatatatcatagtcccaaacagaaaacaacacatacccatccacgttaggatgaactaaataaattggggcatatgc

SEQ ID NO: 1029137 - DNA, 120 bp, Artificial Sequence
  ENSG00000205622_71 (sequence is synthesized)
aaggatgaagacctttatgatgatccattcccacttactgaataggcagagcagggagatgaggacctgcttgccaatgttgaaaacatccaggaggggcagctcaggggttcccctgca

SEQ ID NO: 1029138 - DNA, 120 bp, Artificial Sequence
  ENSG00000205622_72 (sequence is synthesized)
cccctgcagtttcctaacagcggctcactggggggcgtctggcactcaagacatcagaatccacatcagaatcaccaagttgatacaaatgaaaaactgccttctcccaggtccagaact

SEQ ID NO: 1029139 - DNA, 120 bp, Artificial Sequence
  ENSG00000205622_73 (sequence is synthesized)
tctggctattcatatcaaagattccagataccaacatttctcacttaggaactgtcatctctttattaactgaactacttaggaaaatcatgcacaatttgtcaagtctgaggaaccaat

SEQ ID NO: 1029140 - DNA, 120 bp, Artificial Sequence
  ENSG00000205622_74 (sequence is synthesized)
taccatgagaaatggaatccaagcctgttggcacttcttgcagtgtttgctcttcatttagagaaggaaaaacagcaaacagggacccatcaaaggtgtcaaaggctggctggcgctgca

SEQ ID NO: 1029141 - DNA, 120 bp, Artificial Sequence
  ENSG00000205622_75 (sequence is synthesized)
aaaacagatggaaaaaaaatggaaatacaatatttaaactgattgaattacctgttgtaaaagtggtctgtgggcaatcctaccaatagtccctgattaaactggcaattttgaagcaaa

SEQ ID NO: 1029142 - DNA, 120 bp, Artificial Sequence
  ENSG00000205622_76 (sequence is synthesized)
ccatgcgggtgcatcataaagagagatgcttgatgaccaagttgttctggacaaatcaagctcatctgtttgcagcccctgttcctggggaacaaaacctcctagtcaagaatcatcacg

SEQ ID NO: 1029143 - DNA, 120 bp, Artificial Sequence
  ENSG00000205622_77 (sequence is synthesized)
cccatggctacactaccacaaacactccagtaaatcaggagggaatattgaaattggaaccacaacacttgggtatatcaggttggaaaagacagttcaacagatggctggtcaccttga

SEQ ID NO: 1029144 - DNA, 120 bp, Artificial Sequence
  ENSG00000205622_78 (sequence is synthesized)
aatcaattcaaggggttcccctttccagggtcttggacagcgaggtgacatgaaatggccgttctagtctatgcaatggcagcatgaacacagaaagctgaaacgggggatcagttctgc

SEQ ID NO: 1029145 - DNA, 120 bp, Artificial Sequence
  ENSG00000205622_79 (sequence is synthesized)
aattgcctacacctgaaaaaatgtggcaaacttatttgtaaagcttatctgacacttttgtctatatttgatacattcagtcctccacaatctctactttaccaaaatccatgcgggtgc

SEQ ID NO: 1029146 - DNA, 120 bp, Artificial Sequence
  ENSG00000205622_80 (sequence is synthesized)
gcaggtaaagctgacacgtggcatccaggaggtctccactcaacttgaagaaattgaatgagtgcattttgtttcctgcttataatttccacttaaagcacctctgtagttgacctcaag

SEQ ID NO: 1029147 - DNA, 120 bp, Artificial Sequence
  ENSG00000205622_81 (sequence is synthesized)
gcctgctttgatatcaatctccaaagcacaaaaggaatcattttgcactttttttcttcaagggacttacaaatgaaggatctgataagcacagttgatgattaaacctaataagctggc

SEQ ID NO: 1029148 - DNA, 120 bp, Artificial Sequence
  ENSG00000205622_82 (sequence is synthesized)
aaggaagctttcagtaagtggttggtggtgcttatttgcggccatggcttattgagactggaagctgtggggactccggtgcacgatggtggatgttccatgaatgctggcaagaagagt

SEQ ID NO: 1029149 - DNA, 120 bp, Artificial Sequence
  ENSG00000205622_83 (sequence is synthesized)
gagtgctttgatttactttggcaaaggctctttgagcttggtggaaaacagaatcagtttgtttgtttttgtttgtctctggcttttctgttgaagaccttgatttaagtcttaaaagca

SEQ ID NO: 1029150 - DNA, 120 bp, Artificial Sequence
  ENSG00000249460_0 (sequence is synthesized)
acaccgatctgcgccctgtcactggtttaggaagctgagccccagccgctgagccgttttctaccggctgaagcacgcatgcttcctttgcttcctttgcttctgcaagggaacaatgag

SEQ ID NO: 1029151 - DNA, 120 bp, Artificial Sequence
  ENSG00000249460_1 (sequence is synthesized)
caagtgcatgtgtgggaaccctcctgcctgctgggcgctcagctaggagtcccagaataccagacaccattatattcaaataccacaaaagatgtgagaattcaaactgagccatagctc

SEQ ID NO: 1029152 - DNA, 120 bp, Artificial Sequence
  ENSG00000249460_2 (sequence is synthesized)
catctcctggaagtgtatatcagcagcaacaagagtaaagacccagaggcatgagaaacacttcctcactgaagcactcacgttccgactgtgtgcaaaagaccttttgtgtctcactca

SEQ ID NO: 1029153 - DNA, 120 bp, Artificial Sequence
  ENSG00000249460_3 (sequence is synthesized)
ctgagggagattgttcttcactcaatcaatgagaagaacagacgtcttagaaaaccttcagtacctgggggaaatgaatgagctcaaacacaagggaaagtcagcccgtgttcaagataa

SEQ ID NO: 1029154 - DNA, 120 bp, Artificial Sequence
  ENSG00000249460_4 (sequence is synthesized)
gcccatctcaggaaggcaggcaccatgctcctgagactactttacccccagataagaaagcccttattgataagccaaaatcacagattattttattaagctcatattttaaaagaatgc

SEQ ID NO: 1029155 - DNA, 120 bp, Artificial Sequence
  ENSG00000249460_5 (sequence is synthesized)
ctttaatgttactttccattataaatgtaaaattacagtttgcacataatatctggattctggttaactattttccatactgtattttgcaattgcatatctgcatttctatttttatat

SEQ ID NO: 1029156 - DNA, 120 bp, Artificial Sequence
  ENSG00000249460_6 (sequence is synthesized)
agggttatgcaaataatatttctaattgtgcatatttatgtatttatattaagttttagtatgtctgcttgctcacataatttatcttctctttatgtataatttcatttacttacaata

SEQ ID NO: 1029157 - DNA, 120 bp, Artificial Sequence
  ENSG00000249460_7 (sequence is synthesized)
ttacttacaataactaattattagggaaacaaataaaatctttgagaaattaccagaggttaattcataagtgctttatcttgcttcacagataatcatatactttatttctaaactttg

SEQ ID NO: 1029158 - DNA, 120 bp, Artificial Sequence
  ENSG00000249460_8 (sequence is synthesized)
aaatgttattgtccatattgtttcttcgtacttacaaaagtaagaaattggattgtaatgtttccaatttatgttgtcatgctttcctctctttaatataacttgagtttatgtaaagtt

SEQ ID NO: 1029159 - DNA, 120 bp, Artificial Sequence
  ENSG00000249460_9 (sequence is synthesized)
tgagcggttcaagttatttccaaaaatataataggagccccacccttctcagttctttcacactaacacttttattgacacatttggaatggggaaggatgtaagccacactagtcaatt

SEQ ID NO: 1029160 - DNA, 120 bp, Artificial Sequence
  ENSG00000249460_10 (sequence is synthesized)
tggatcagctgtttatttacaatttactccaaagatttaagtaagcaaagtcagtgagcaattgaaattgttttcctactctcttttattctttttttttttaaaaaaaaaaaaaaacaa

SEQ ID NO: 1029161 - DNA, 120 bp, Artificial Sequence
  ENSG00000249463_0 (sequence is synthesized)
ctgacaaatgatcatagcacgctacaacctctacatcctgggctcaagagcttctcctgcctcagcgtcccaagtaactgggactacagatttcagtttaggtttatccgtggaaagatg

SEQ ID NO: 1029162 - DNA, 120 bp, Artificial Sequence
  ENSG00000249463_1 (sequence is synthesized)
agagggagagggagacttatttgaggatttattttttaatcagtagttgatgttgattttttcaaataattcttaagtctttagctttttgtgttattaaaattttaaaatatagaaaaa

SEQ ID NO: 1029163 - DNA, 120 bp, Artificial Sequence
  ENSG00000249464_0 (sequence is synthesized)
ggcgcctgccactgcgcccggctaatttgacattgctcttaaaagtatgttagaacacttccttattcttcatgcatccatagagaaaaggaaaagtcttcttaactctccggaagaatt

SEQ ID NO: 1029164 - DNA, 120 bp, Artificial Sequence
  ENSG00000249464_1 (sequence is synthesized)
aaagtcttcttaactctccggaagaattaatcagaggagcatttctaacttctttccacccactcactcactctccttccactgaccattgaaaatgggggaagaaaaaagcgatgaggc

SEQ ID NO: 1029165 - DNA, 120 bp, Artificial Sequence
  ENSG00000249464_2 (sequence is synthesized)
ttcctctttgaagatcacaggtgagaagattaggtgctttctcagaagcccagcaacctgatgggagtgtggagtgagcaagacccaaatcggagcttcatccctgcatggttcattttg

SEQ ID NO: 1029166 - DNA, 120 bp, Artificial Sequence
  ENSG00000249464_3 (sequence is synthesized)
agaggacgtcttattatctggtgtctggcttgctgatttaataacctaggagacagtgtttgaagaacacaaactctaaagtccttcacttaaaaaaaaaaaaaaactttcccaaattgc

SEQ ID NO: 1029167 - DNA, 120 bp, Artificial Sequence
  ENSG00000249464_4 (sequence is synthesized)
ttaccatttggaaaaattgccttaccttcttcagtcatctctgatgttgtcatcctcagagtaagaagtacgcattcataaggaaccataacgtccttcaggaaatccagtacaccctac

SEQ ID NO: 1029168 - DNA, 120 bp, Artificial Sequence
  ENSG00000249464_5 (sequence is synthesized)
aattttacctaaaactttgatgttgttttttctgagcattttaccttctagggaaatggatctcatgctgtttatcagtttctgaaagttgttattaatctcccctcatcccaaaattga

SEQ ID NO: 1029169 - DNA, 120 bp, Artificial Sequence
  ENSG00000249464_6 (sequence is synthesized)
agaactttgcttaaatcttagaatcagaactttggctccagtaataaagacttttcaatatctttatctgccattgagtcttacctaacgaaataaagcctccaaagtgggaatttgaaa

SEQ ID NO: 1029170 - DNA, 120 bp, Artificial Sequence
  ENSG00000249464_7 (sequence is synthesized)
ggggcaacctgctcaggtccccttccacactgtggaggctttgttctttcgctctttgcaataaattttgctactgctcactctttgggttcacgctgcttgtatgagctgtaacactca

SEQ ID NO: 1029171 - DNA, 78 bp, Artificial Sequence
  ENSG00000249464_8 (sequence is synthesized)
gcagcttcactcctgaagccagcaagatctggaagagctgtaacactcacagcaaaggtctgcagcttcactcctgag

SEQ ID NO: 1029172 - DNA, 89 bp, Artificial Sequence
  ENSG00000249464_9 (sequence is synthesized)
cagcttcactcctgagccagtgagaccacttccggacatcagaaggaacaaactccagacccgccaccttaagagctgtaacactcacc

SEQ ID NO: 1029173 - DNA, 120 bp, Artificial Sequence
  ENSG00000249464_10 (sequence is synthesized)
agaacccaccaattccggacacagtaagagaactattagtccctgagaagtcaatttgaaggtgaaccagaaataggcattggacagatcattaacattctgatcggtgttcatcaagtc

SEQ ID NO: 1029174 - DNA, 120 bp, Artificial Sequence
  ENSG00000249464_11 (sequence is synthesized)
cagatcattaacattctgatcggtgttcatcaagtcaaactcaaaaatcccaggcacctggagatacccaatttgtatcctttgatatcaccagtgttgagaatttactctgagcagaaa

SEQ ID NO: 1029175 - DNA, 120 bp, Artificial Sequence
  ENSG00000249464_12 (sequence is synthesized)
ccacatatgctacgttttagaggacataagacagggccagatctgctgttagaggagaattcttctgtcctagctgtgtctctgtgatctgtggatgagggtgggaaagcaccactcagt

SEQ ID NO: 1029176 - DNA, 120 bp, Artificial Sequence
  ENSG00000249464_13 (sequence is synthesized)
gtacaaaatggagtttgagaaggtctcacatccaggttgttttgaagcaaagtccaagcattgtatcacttcatctgcaaatatttcaataagtacccaaaagacttcctaggatagagc

SEQ ID NO: 1029177 - DNA, 120 bp, Artificial Sequence
  ENSG00000249464_14 (sequence is synthesized)
ttggaaaggttggaaaagtaaggatgattgaacttgaaaggtgtgaatgaaagaagaattatcttttgggatggagaatagtagctgttttcaaagaagattttattttatctttcattt

SEQ ID NO: 1029178 - DNA, 120 bp, Artificial Sequence
  ENSG00000249464_15 (sequence is synthesized)
ttggcctataagttttgcagagaatctgtgattagagtatttagtaaagtactatgtaattattgttctgttatttggacacatgtttaaactagaattttgaagatagcaattagcaat

SEQ ID NO: 1029179 - DNA, 120 bp, Artificial Sequence
  ENSG00000249464_16 (sequence is synthesized)
aattatgtatgttctagccactttattcattctacctcttttaccatatactttaaagatatctatatggtaaaaggtaagtggcaactgaataatcacaaatacatcaacaagtaaaga

SEQ ID NO: 1029180 - DNA, 120 bp, Artificial Sequence
  ENSG00000249464_17 (sequence is synthesized)
gatgctttgttttattgagtgcattcttatattttctcttttgctggaataataagtggggttttaaactgatctgttctaacattgtttttcctcattttctctctctttagagggttt

SEQ ID NO: 1029181 - DNA, 120 bp, Artificial Sequence
  ENSG00000249464_18 (sequence is synthesized)
cagcaggttttcatacattctcagttagaagctgttataatttttaaaataatactctagttctagttattctatcacgagctgattctatttatacaacaaataaatactaattaaaac

SEQ ID NO: 1029182 - DNA, 120 bp, Artificial Sequence
  ENSG00000249464_19 (sequence is synthesized)
gaatgcagactggatttttgcctgactacggtgctcagccttctagacaatagttatgctaagggattatcttttaacattgtgcagttatctcctttgtttgttttcttttttcattat

SEQ ID NO: 1029183 - DNA, 120 bp, Artificial Sequence
  ENSG00000249464_20 (sequence is synthesized)
tcacataagccaagggaaatgaaaagcatcttatttcaggcaaaaaggcctgtgaatgattaactctggttccatgcgttgggactttgcatagcaaccccgtggcttgcaacgacaaaa

SEQ ID NO: 1029184 - DNA, 120 bp, Artificial Sequence
  ENSG00000249464_21 (sequence is synthesized)
aagtacccaaaaggtccagattgactgcaagaacaaatcagcaatcctgagaggacccacaggccctctgaaggaagcagactactcctgcaggacctgggagataccctgaatacttgg

SEQ ID NO: 1029185 - DNA, 120 bp, Artificial Sequence
  ENSG00000249464_22 (sequence is synthesized)
actctccttccactgaccattgaaaatgggggaagaaaaaagaattattgatcaaatttggatctctgtgtgctgtcctccaatttaatactttctgtgttgctgttttattttctttct

SEQ ID NO: 1029186 - DNA, 120 bp, Artificial Sequence
  ENSG00000249464_23 (sequence is synthesized)
ttgttttcttttctttctggccgatcatggaaataacataaccatgggtagcctgctggtcagcagagccaccctaggtaattaatagacatgcagtgacaaaaagagcttcccagttga

SEQ ID NO: 1029187 - DNA, 120 bp, Artificial Sequence
  ENSG00000249464_24 (sequence is synthesized)
gccaagcctatgtcaatcagattctagtagattcacagatgcatgagcagtaagaaaagtttacacttattggagtgatttgttatgtagcaataagtaaccaatacaatacgttttaaa

SEQ ID NO: 1029188 - DNA, 120 bp, Artificial Sequence
  ENSG00000249464_25 (sequence is synthesized)
gaagagttgattatttgggacttgaaggaggtttgacatgagaacctgcatttaaaaccacagattgggctctgcttgctggaccccaggtgacgatatatccacgtattctgttataaa

SEQ ID NO: 1029189 - DNA, 120 bp, Artificial Sequence
  ENSG00000249464_26 (sequence is synthesized)
tttgggtttgtatgttcataatgtgtggcactctctaaagtgtgaggcccaaaggaggatattcttacacaggcctgaagtggttggactgagtcccatgaagccagatcacttctgact

SEQ ID NO: 1029190 - DNA, 120 bp, Artificial Sequence
  ENSG00000249464_27 (sequence is synthesized)
attcagtttccataattcagtatgactaaaaactacttgaaatagaatttgagcattcaaccttctccttctactttcatcttcatttcaccctggcctctattgctttagtattctgtg

SEQ ID NO: 1029191 - DNA, 120 bp, Artificial Sequence
  ENSG00000249464_28 (sequence is synthesized)
gttgtaaggctaagcactaagcaaaaggtcaacttttataatggtatagcattttgttttttgtggatgtgtttattttttatgactttccaggtctggagaaggaaatgtactgttatg

SEQ ID NO: 1029192 - DNA, 120 bp, Artificial Sequence
  ENSG00000249464_29 (sequence is synthesized)
actataaagacatcctgctgaatatcctgatgcttgggaaagtaaaactcaatatagaaaaagcatcactaatcaaatctacaaaattattgatcaaatttggatctctgtgtgctgtcc

SEQ ID NO: 1029193 - DNA, 120 bp, Artificial Sequence
  ENSG00000249464_30 (sequence is synthesized)
acttgccctgcaggtgaaaacattggaatcttgtgaacctcaacctgtgttttacatatgtatacatgaagcatccaatggcattacacctcagccagagaagaagctcttaagagatca

SEQ ID NO: 1029194 - DNA, 120 bp, Artificial Sequence
  ENSG00000249464_31 (sequence is synthesized)
ggtgcctcatttcacccatgggctgctccagcatttccagcctcctcactcctgacacatacaggcacgtgctctctgtggagtctttgcacttctcctttccttcctgaaatgctcttc

SEQ ID NO: 1029195 - DNA, 120 bp, Artificial Sequence
  ENSG00000249464_32 (sequence is synthesized)
ccctgggtgtcttcatcctacctccctcaactctttcatcttgtttaaaaaatgtcattttctcagtgagaacttccttgtcttattcagtttgggcttctctaataaaaatactataga

SEQ ID NO: 1029196 - DNA, 120 bp, Artificial Sequence
  ENSG00000249464_33 (sequence is synthesized)
ttttaaattttgtcattatttattttatagcttgttagaaacaggcttttaataagagctatagattataattgtttgatatgtttcttaaatctcatggaattgtaaattcttcctcta

SEQ ID NO: 1029197 - DNA, 120 bp, Artificial Sequence
  ENSG00000249464_34 (sequence is synthesized)
tcaattttttcttttaaaaaatataattatttttatttttaaaatagatttagggaatataacttttttcttgcatttttttttttttgctaaaactgcatcatttgtgttctgtgttgt

SEQ ID NO: 1029198 - DNA, 120 bp, Artificial Sequence
  ENSG00000249464_35 (sequence is synthesized)
gtcttatataatgtgccacaatctggaatttgctgcctggatccccatggcatcgtataagacattcatctgtcccttgtatttcttgtaaattggtagttagatccagaggcttaagtt

SEQ ID NO: 1029199 - DNA, 120 bp, Artificial Sequence
  ENSG00000249464_36 (sequence is synthesized)
tattcaggtttgatttttttttttttgcaagaagctgttatgcactttcatcactcaaagtttggcagcaattgaagttcatcatctactccagactctctagagcagcattcgctaata

SEQ ID NO: 1029200 - DNA, 120 bp, Artificial Sequence
  ENSG00000249464_37 (sequence is synthesized)
caagtttctatggtgatggaagtattctatatctgttctatctaatatggtagccactagccacacatggctactaagcacttgaattgtggctagtgtggctgagaaattggcttttta

SEQ ID NO: 1029201 - DNA, 120 bp, Artificial Sequence
  ENSG00000249464_38 (sequence is synthesized)
tttaaaaacttttaattacttttaatttaaatagtcacatgtggctaatgattaccatagcagataatatagctcttgactcattaattcattaatggctaaaaaataataatcttattt

SEQ ID NO: 1029202 - DNA, 120 bp, Artificial Sequence
  ENSG00000249464_39 (sequence is synthesized)
tataattttttcttcattaattaaaatatttttataaagagaaacttcctcttatcaactgaattgttgccatgagattcagttcatacaatacaggcagaaaagtagtttaattttccc

SEQ ID NO: 1029203 - DNA, 120 bp, Artificial Sequence
  ENSG00000249464_40 (sequence is synthesized)
ccatatttatcagttatcaaataatgagttgattccctagtattctccaaaggtgacccaaggagattttttttgttatgaagtcatattttgtattttaattcattgtaattattctta

SEQ ID NO: 1029204 - DNA, 120 bp, Artificial Sequence
  ENSG00000249464_41 (sequence is synthesized)
ttgatgctcaaattgatctaaccttggccagagagaacctatttcttttgagtgctcttcatatgatcctgtgaatatcagtgtcctgacttcatctacattgttccagggtcatcttat

SEQ ID NO: 1029205 - DNA, 120 bp, Artificial Sequence
  ENSG00000249464_42 (sequence is synthesized)
acatggcctgtctcatgtctaaaattagccatttgtccaagaagccctgattccagttagtagtctatttcaagaacatatctggacacttggggtgatcattgctattgggttggtaat

SEQ ID NO: 1029206 - DNA, 120 bp, Artificial Sequence
  ENSG00000249464_43 (sequence is synthesized)
tcttctagcttgataaaagcacaactagaaatagatttttttaaaagataaactagatcataaatttatcttgatacattcaacttaaagtcaggcaatggaattgtctttgattttaac

SEQ ID NO: 1029207 - DNA, 120 bp, Artificial Sequence
  ENSG00000249464_44 (sequence is synthesized)
tttttttttgtttttatggtgaaaacctggagttttaataacattaatttagttacccatttcctttatgccacaatatatacacagtaatttcagaataaacaataccaacaataccag

SEQ ID NO: 1029208 - DNA, 120 bp, Artificial Sequence
  ENSG00000249464_45 (sequence is synthesized)
caacaaaattattattgagaaagtataagattttttttttgattttgcataatttttgtccttagggtccttctcatggatgacattttattgtattttaggtttatatgaagtagttca

SEQ ID NO: 1029209 - DNA, 120 bp, Artificial Sequence
  ENSG00000249464_46 (sequence is synthesized)
tccttgtgtggttttgccacaaactggatacacttttatatttctttcattttatttttagataaatgagatatctttttaagaaatgtagtttaattttatgattatgtaagatattta

SEQ ID NO: 1029210 - DNA, 120 bp, Artificial Sequence
  ENSG00000249464_47 (sequence is synthesized)
taaatgtggtttgagagtaaaatctataaaacaaagtattcaaagatgtttagattctctatctccttaactcaatttcctcactccaaggatttatttaaaaacatttacgatttaatc

SEQ ID NO: 1029211 - DNA, 120 bp, Artificial Sequence
  ENSG00000249464_48 (sequence is synthesized)
cttcatttattgttattagcaaagatgtgtatatatttttatccttcttatattaaccatagtatactatataaaatttctcccctactctttgtaaaaactaaatgtatcctggagatc

SEQ ID NO: 1029212 - DNA, 120 bp, Artificial Sequence
  ENSG00000249464_49 (sequence is synthesized)
actgaacaataatatgtagagattggtctcatttctttttacagctgcatgtgttctatatttcattcaataattgcctccccccagcaacccttttttttaaagacagagtcttgctct

SEQ ID NO: 1029213 - DNA, 120 bp, Artificial Sequence
  ENSG00000249464_50 (sequence is synthesized)
tgtgatcatagctcactgcaaccttgaactcgtgggctcaggtgatctacctgtttccaagttgcttgactacaggtgctcaccactgtgcctggcatttttgcattgtttgtagagaca

SEQ ID NO: 1029214 - DNA, 120 bp, Artificial Sequence
  ENSG00000249464_51 (sequence is synthesized)
gggattataggtgtgagctaccactcgtggctaataatccccttattaatgagcagttacgttgtggaaagttttttttttttccaaatgatagctgcagtagcagtagcagcagcagca

SEQ ID NO: 1029215 - DNA, 120 bp, Artificial Sequence
  ENSG00000249464_52 (sequence is synthesized)
gcagcatcaaatatgttacctttctccataatctttgcttattcactaggtttatgtaggtattcataaaaatttaaaacataaatacgttatattaatgacccaagacaagtgttggta

SEQ ID NO: 1029216 - DNA, 120 bp, Artificial Sequence
  ENSG00000249464_53 (sequence is synthesized)
aaaaactaaggtacattaatgcaaagttataggtcttggtatcctccaactcaaataaaatattttaattttcattaattatcccattaggggactgattagtatttttctgattttcag

SEQ ID NO: 1029217 - DNA, 120 bp, Artificial Sequence
  ENSG00000249464_54 (sequence is synthesized)
ttcgaatcaagactctcaaatagtaaaatgcactaagccaatatggatgggaatagcctcctgctgttttcccaactatttgaatttttaatatcttctcttatagctatatacttttgg

SEQ ID NO: 1029218 - DNA, 120 bp, Artificial Sequence
  ENSG00000249464_55 (sequence is synthesized)
ttcatttatgctagcggtgttatcagtgaatgtatttttagattctgtattccatattttagattctgtattccatatttaatgaaattttatttataggaaagaaagaatgggtatgca

SEQ ID NO: 1029219 - DNA, 120 bp, Artificial Sequence
  ENSG00000249464_56 (sequence is synthesized)
taaggacctaatcaaagaggcctctgacacctgttgagcagttgtgtgagtgtgtgattatccatggaaaagaagatcagagggaaacggtgtttaaagcctttgattagttagcagaga

SEQ ID NO: 1029220 - DNA, 120 bp, Artificial Sequence
  ENSG00000249464_57 (sequence is synthesized)
gaatgaagcaagccaagtgctttgcacaaagtgacagaaatgaaggtagaagaaacagttacaaatggtggtggtactagaagtaagcttcccataacttctactccgaacttcaagaag

SEQ ID NO: 1029221 - DNA, 120 bp, Artificial Sequence
  ENSG00000249464_58 (sequence is synthesized)
gctgtggttttgtggatattcttcctttggcagtctactaaattagaagaactggaatattaatagtattgaattctagctcttcaaaaatatcaccaacacaatctgttgtttataaaa

SEQ ID NO: 1029222 - DNA, 120 bp, Artificial Sequence
  ENSG00000249464_59 (sequence is synthesized)
gctgagtttattcttaccatcgtaaggaaaagaactgccttgacagagtcttactagtcttggaatgaggatggcaaagttgggattcttaggaggtttggggtctagtatgaggtgagt

SEQ ID NO: 1029223 - DNA, 120 bp, Artificial Sequence
  ENSG00000249464_60 (sequence is synthesized)
tttcattgtggaggcttgcttgatcaaggttgagtaaggtgggtgtaaacagcaaggctagggcattgaggtgaggaaattcagagtcttgggaggtaaactataatttcatactatgta

SEQ ID NO: 1029224 - DNA, 120 bp, Artificial Sequence
  ENSG00000249464_61 (sequence is synthesized)
tggaagagttgaacaatgcgatattaatttaatggggttcttggaaagttcctgggaagattagtaatttgcaacttttatcttactgggctatagtttcttggaatagtaaggtaatga

SEQ ID NO: 1029225 - DNA, 120 bp, Artificial Sequence
  ENSG00000249464_62 (sequence is synthesized)
taaaacaaatactatatgtgattattagccaaattaatcaagtttatgatttcgttggttgcttctcagatttttttttaaagattccagagaaatctactgggatgtgagcacaacatt

SEQ ID NO: 1029226 - DNA, 120 bp, Artificial Sequence
  ENSG00000249464_63 (sequence is synthesized)
cttaacctaaaacagcatatgttcaccctttgtagcttgacattctgtctagagcaatgatccccaacctttttggcaccaggcactggtttcgtggaagacagtttttccatggacagc

SEQ ID NO: 1029227 - DNA, 120 bp, Artificial Sequence
  ENSG00000249464_64 (sequence is synthesized)
ggtagtgagggatgatttcgggatgaatttgttccacctcggatcatcaggcattagattctcataaggtgtgtgcaacctagatccctcacatgcacagtttcacgatagggtttgtgc

SEQ ID NO: 1029228 - DNA, 120 bp, Artificial Sequence
  ENSG00000249464_65 (sequence is synthesized)
ttctatgataatctaatgctgctggaggaggaggtagagctcaggcagtaatacccccttgcctgctgttcacctcctgctgtgtggcctggttcctaacaggccacggaccagtgctgg

SEQ ID NO: 1029229 - DNA, 120 bp, Artificial Sequence
  ENSG00000249464_66 (sequence is synthesized)
tccacggcctggggactggggatcctggtctacagtgtctctgttctgaacaactgcctgtctgatttcatgaatctctcatgtaaggaattctatagacttggtgtcattgtttaacta

SEQ ID NO: 1029230 - DNA, 120 bp, Artificial Sequence
  ENSG00000249464_67 (sequence is synthesized)
tctaataccctacatcaggtacgttcctaaataaactggaacttacctcagaagcctcagaaaattaggaaaataaaatgcattactttgtatattaagaagctcaaaatcccatatttg

SEQ ID NO: 1029231 - DNA, 120 bp, Artificial Sequence
  ENSG00000249464_68 (sequence is synthesized)
attcactatagaattacttcagaatctcatatgttgtttaagcaaaacctgtctcatattaaaacatacctactgctgtgttgtctatttgcttttctctttttaaatgcccttttgaga

SEQ ID NO: 1029232 - DNA, 120 bp, Artificial Sequence
  ENSG00000249464_69 (sequence is synthesized)
aatgctgcaaaaattttgtcctgacatgtgggggcccaactgtttcctgctatactcagcttggaggacatagcctctaggttatactcttttgaaattgtcctgttgaaatgcatgttt

SEQ ID NO: 1029233 - DNA, 120 bp, Artificial Sequence
  ENSG00000249464_70 (sequence is synthesized)
tgattttgggattttccagatgcttcctaagtaggtcccatgtgttaaaacttgtggaaattcagcatgtttctcaatgtgaggcatctaagtagttcacaaatttaaggcaattagtct

SEQ ID NO: 1029234 - DNA, 120 bp, Artificial Sequence
  ENSG00000249464_71 (sequence is synthesized)
attactgggataagacgattaattctattatattccattgtttacatattacttgtttaatccatttcctattctatgctttgttttttcatttgtctgaattattaaaagtcactacat

SEQ ID NO: 1029235 - DNA, 120 bp, Artificial Sequence
  ENSG00000249464_72 (sequence is synthesized)
agaattctggaatgtaagataatttggacaaagacagaagccaagtggaactctcagagcactgtatgtccttgtaaagtggttggactgagtcccatgaagccagatcacttctgactg

SEQ ID NO: 1029236 - DNA, 120 bp, Artificial Sequence
  ENSG00000249464_73 (sequence is synthesized)
acacatctactgtgaagttggtagtggctctgtgattctcttattttgaaaattcactgccggtggttggactgagtcccatgaagccagatcacttctgactgcaaggagcttggaaaa

SEQ ID NO: 1029237 - DNA, 120 bp, Artificial Sequence
  ENSG00000249464_74 (sequence is synthesized)
aggggagataatgcctgtcaacatctatcacaaaatgttgctcaacttactgatgaattaataaaaagtcatctgtactctcttctgaagcccatcatctgctccttggttggactgagt

SEQ ID NO: 1029238 - DNA, 120 bp, Artificial Sequence
  ENSG00000249464_75 (sequence is synthesized)
agtgggaagggggactggaaaggggatgtagtgggaaggtggtcctcccctggaatttgggtgtcatgccatcaagctgtccctttgaagccaagctgcttctctctgatgtccagatgc

SEQ ID NO: 1029239 - DNA, 120 bp, Artificial Sequence
  ENSG00000249464_76 (sequence is synthesized)
gtaccagcctggttggattctcagtttagagacagctatcttctcattgtatctcacctggtggagagcagagagggaggaagcaagctctctcacgtctcttcttataaggacactaat

SEQ ID NO: 1029240 - DNA, 120 bp, Artificial Sequence
  ENSG00000249464_77 (sequence is synthesized)
cccattcatgatggctccatcctcatgaccaaaggccttgcctccaaatatcatcacactggggatttggcttcaacatttgattttgggggtgggaaacaaaaaatttagtccatagca

SEQ ID NO: 1029241 - DNA, 120 bp, Artificial Sequence
  ENSG00000249464_78 (sequence is synthesized)
ttcccaagtgatttgtttaaattttctacttaatctcttctgtgcttaaatgtatctccttagtattgtcctttatctattgccaatgtaactcatctatgtatctctctatttatcacc

SEQ ID NO: 1029242 - DNA, 120 bp, Artificial Sequence
  ENSG00000249464_79 (sequence is synthesized)
tgtgtatgtatgtatgtatgtactgtgaatgtgtgtgtatgtatgtaggtatgtatgtatctacctgtctagtttatctaacttgcttcagaaacaggaaactctttgaagagcagtgtt

SEQ ID NO: 1029243 - DNA, 120 bp, Artificial Sequence
  ENSG00000249464_80 (sequence is synthesized)
tttttctttttagttgttcatttatgtataaccatggcactagaaagtaagaaggcaaaaagattctttgcatatacatttattgaagtacatactaattgaataaaagtattttatatc

SEQ ID NO: 1029244 - DNA, 120 bp, Artificial Sequence
  ENSG00000249464_81 (sequence is synthesized)
gggacttgaaggaggtttgacatgagaacctgcatttaaaaccacagattgggctctgcttgctggaccccagtggttggactgagtcccatgaagccagatcacttctgactgcaagga

SEQ ID NO: 1029245 - DNA, 120 bp, Artificial Sequence
  ENSG00000249464_82 (sequence is synthesized)
tggaaggatatggtggctgaaataaggcatgaggcacagatacagatttcctgactcaacttctggtgcagataacattgttatactacacatatttataatgcccttttggtggttgga

SEQ ID NO: 1029246 - DNA, 120 bp, Artificial Sequence
  ENSG00000249464_83 (sequence is synthesized)
ctgagtcccatgaagccagatcacttctgactgcaaggagcttggaaaagcaagtatctggatcttttaccagctaaatttggaggcttggccttgggacctgcttaaaccaagagatat

SEQ ID NO: 1029247 - DNA, 120 bp, Artificial Sequence
  ENSG00000249464_84 (sequence is synthesized)
gccacatccgagcagttcttttccttgtggcccctgccatgagagcagcgtgtacaaggtggatgctgctccattagcgtggatcctgggatgagaagactcagggagcaggctctgcca

SEQ ID NO: 1029248 - DNA, 120 bp, Artificial Sequence
  ENSG00000249464_85 (sequence is synthesized)
acccacagtctacagcagagccacagccagcagtagtcctcattcaacaggagggggaaaaaactgctcgtcatccttagctctgagatttgggggttgttatcacagaagatactgtct

SEQ ID NO: 1029249 - DNA, 120 bp, Artificial Sequence
  ENSG00000249464_86 (sequence is synthesized)
catagaagtttttaatatgactgctactacaacaactattgctataatgtttacagcaatcattgctactttacgttccaacagtattattgcttgcaaggggctatcaaatagatgatc

SEQ ID NO: 1029250 - DNA, 120 bp, Artificial Sequence
  ENSG00000249464_87 (sequence is synthesized)
ttgttggaaactcacagctacaagggcaggtgaggaagctgaagtaatgagtaggagaagttaatgaattatcccaaggtcaaagtgctagaaactagaaggagaggatttgaactctga

SEQ ID NO: 1029251 - DNA, 120 bp, Artificial Sequence
  ENSG00000249464_88 (sequence is synthesized)
ttttcttatttcaagttgttgtttttctggaccttagtttactagtctccaatacactttacagatttctcaaggcatcttaagtgtagcatgctatctcaattgtccatcacttcacct

SEQ ID NO: 1029252 - DNA, 120 bp, Artificial Sequence
  ENSG00000249464_89 (sequence is synthesized)
ataaagactctgtctttttaggtacttcattatacaattccctcactggcatttccaaggccttctagtaggctcaagggacagatgaaaatccttaacatgtttgacacaattctgact

SEQ ID NO: 1029253 - DNA, 120 bp, Artificial Sequence
  ENSG00000249464_90 (sequence is synthesized)
tgtctaagttctgcacatctcccaagcctcaaattcctccttagttgcctcctggattgctctctggcctccagctatactaacgtttcttggaagcccatggggaagtcatgccttttt

SEQ ID NO: 1029254 - DNA, 120 bp, Artificial Sequence
  ENSG00000249464_91 (sequence is synthesized)
tgtcacctctgtaccctaaattcttaccatgtaccatccttgttctcctcaccatctattctggatctctactcaatagtcaatggctgggagacctccccggactttctgatcaagtca

SEQ ID NO: 1029255 - DNA, 120 bp, Artificial Sequence
  ENSG00000249464_92 (sequence is synthesized)
gtccccatacttaaagggcatttacctctgcctcagtggtggttgatgtggttcactttgtgtaatgtctctttttcctttattattctatttataattgcttgtttattcattttgctc

SEQ ID NO: 1029256 - DNA, 120 bp, Artificial Sequence
  ENSG00000249464_93 (sequence is synthesized)
accctagtacctagcacactgcctgctacataggaagtattccgcaaacatttcttaaatctctgaatactcagatataatgctgaacactaaatattcagctgcagtgctgtagctgag

SEQ ID NO: 1029257 - DNA, 120 bp, Artificial Sequence
  ENSG00000249464_94 (sequence is synthesized)
ctgtcagaaatggggtagaagtgttttgagttttgataaggagagggatctgcttgttacatgaactggaaatagtgatgagatggaaatttggtgtgaagaagccaagaggtcatttgt

SEQ ID NO: 1029258 - DNA, 120 bp, Artificial Sequence
  ENSG00000249464_95 (sequence is synthesized)
ggtcattgtaacatcaccaggtaatgatcagagaggcaatagagagcatccctcagtggctgtgtctacacaaggctcaccactttgaagaagcacatgccaagaactcacatcccatta

SEQ ID NO: 1029259 - DNA, 120 bp, Artificial Sequence
  ENSG00000249464_96 (sequence is synthesized)
gtggcttaagtttttgaactttctttccagttttcataaaagttttgtttacagacttgaccagcagtaaagctaagacgtttgcatgtgttttaccagccctatcattttagtaggcct

SEQ ID NO: 1029260 - DNA, 120 bp, Artificial Sequence
  ENSG00000249464_97 (sequence is synthesized)
tgatttctggaagattatttttctctgcagattttattcttttttccccatttgttttaataaatagcatctttcaggccaagtagaaaagaggatgaagtatatcctgtaagtctaagg

SEQ ID NO: 1029261 - DNA, 120 bp, Artificial Sequence
  ENSG00000249464_98 (sequence is synthesized)
atggcacaatggcaaccactgttatggagcactaactgctttctggtattattgtttagttatgagggcaacctaggttgttcatgtctatattttcaaatgtcttttcattttctatcc

SEQ ID NO: 1029262 - DNA, 120 bp, Artificial Sequence
  ENSG00000249464_99 (sequence is synthesized)
ttttatttttagtagagatctgttaaggattttcactctctttcactgggctgcttttcaatcttatttcacagatagcaatattatatttctactaaaaaaaaaaaacgaactaaaaac

SEQ ID NO: 1029263 - DNA, 120 bp, Artificial Sequence
  ENSG00000249464_100 (sequence is synthesized)
catttggtgtttctcagtggggtttgtggatgtcccgcatcagaaccacctggggtctggccaggccgactggatctgaaaggggtgggagctgcagaggggtctgtttgtttttcaagc

SEQ ID NO: 1029264 - DNA, 120 bp, Artificial Sequence
  ENSG00000249464_101 (sequence is synthesized)
gaggggtctgtttgtttttcaagccctcctggagattctctcaccagagttcaagaggcactgctctaattttttttttcttcttttagaggctgggtctcactatgttgcttaggctgg

SEQ ID NO: 1029265 - DNA, 120 bp, Artificial Sequence
  ENSG00000249464_102 (sequence is synthesized)
ttgtccggcctcagtctctgagtggttgggattacaggcagaacaactgtgcccggctcacactgctctaattcctgatacccacccagctaagttcctgattctgctttacaccctttg

SEQ ID NO: 1029266 - DNA, 120 bp, Artificial Sequence
  ENSG00000249464_103 (sequence is synthesized)
ccctttctcttagggagttcatactctccagcaggctttgttcttctgctacccagaggcccccctccagctcccacctcttatctagcatccagccttctatttgcagttattcccagg

SEQ ID NO: 1029267 - DNA, 120 bp, Artificial Sequence
  ENSG00000249464_104 (sequence is synthesized)
gaagattgctacccgttcaagtagaaaaactcaagctggaaaattagcacagctggaaaggctaatgaacttagcatttaaaaatgcttgtagagccgccagatctacccctcaatccca

SEQ ID NO: 1029268 - DNA, 120 bp, Artificial Sequence
  ENSG00000249464_105 (sequence is synthesized)
aatagatttgtttgtaccacgaccttcacaatttttctcacgattgtctttcaccacccatcatttgctcctgacaaagtgccatttcttattttctctttaaatagacaagtggcaaat

SEQ ID NO: 1029269 - DNA, 120 bp, Artificial Sequence
  ENSG00000249464_106 (sequence is synthesized)
tgaccagcaaggtagctggccagggttagaactctgttattgaattcctatggtgggagtgaaaacaaaaatactgatggatacctatgttatgcctacaattaacagagtaaacatctt

SEQ ID NO: 1029270 - DNA, 120 bp, Artificial Sequence
  ENSG00000249464_107 (sequence is synthesized)
aataggcatagaagacacaaacagatgttctaattgcatgtctgtgagaaactgatgtttactagttccactctggcttggcctttgagacctcaggaagtttctctcccagtggggatt

SEQ ID NO: 1029271 - DNA, 120 bp, Artificial Sequence
  ENSG00000249464_108 (sequence is synthesized)
tcagtgatttattgatttcagtacaatgaatatttcagagactcgcaggatttttaagaggttaaatacatccttacaaaggttagcattattcacgcttgaagggaatgcttactctac

SEQ ID NO: 1029272 - DNA, 120 bp, Artificial Sequence
  ENSG00000249464_109 (sequence is synthesized)
tttaaccagggtagctatggccacatttgccacattcttgcctaagtgggagagaagatggatggggtaatggaagggactttctaatagaaattgtagaaataaaacattggcacagaa

SEQ ID NO: 1029273 - DNA, 120 bp, Artificial Sequence
  ENSG00000249464_110 (sequence is synthesized)
actctggttccatgcgttgggactttgcatagcaaccccgtggcttgcaacgacaaaaaagctcaaggcaggaacagcagcccagggacctgagaccagcgttctcaaatgaaggtgatc

SEQ ID NO: 1029274 - DNA, 120 bp, Artificial Sequence
  ENSG00000249464_111 (sequence is synthesized)
agaacttgatagctctgtaaacactgaaatccttgttgccataacaccaggaaaaataatatgggctcctgcatataaatataacgaaggccttggggaatgggagcatttctaaatgac

SEQ ID NO: 1029275 - DNA, 120 bp, Artificial Sequence
  ENSG00000233746_0 (sequence is synthesized)
ttttacagatgacacactaaggcgcaaggcagctgcacatccacggccagcctcgttgtcttcagggatttgttcaaagttcattctgaattgtaaggtaaccactgcagaacacgagcc

SEQ ID NO: 1029276 - DNA, 120 bp, Artificial Sequence
  ENSG00000233746_1 (sequence is synthesized)
tttcctgggtatgtgtggttatttctgcccttcacggtcccactcaagtcctgcctccctcagggagacctcccagacctcaccaagccgtgggcacgtggaccagaagccgtggacccc

SEQ ID NO: 1029277 - DNA, 120 bp, Artificial Sequence
  ENSG00000233746_2 (sequence is synthesized)
agaggctcatttagggatctgctttctgaacccaggtcctaacatctgcactgcagcgagcatttctggtgcctcaagtgagtcactccaacttccaggagccaccagccacaggcagcc

SEQ ID NO: 1029278 - DNA, 120 bp, Artificial Sequence
  ENSG00000233746_3 (sequence is synthesized)
actgagcccttggcatgtaacccggtaacccatgcaacagaagacctgagcgtccagtgttgctagcttgaagtaacttcagtggtgttccccagcgtttttctcatccccctcccttcc

SEQ ID NO: 1029279 - DNA, 120 bp, Artificial Sequence
  ENSG00000233746_4 (sequence is synthesized)
cttcccctacagctttcttcctctttcccctccttctgagtctttcgtccccagtcctgggaaccttttttctgacttggtgttttctcctgaatgcctccttcctggccccctaatcag

SEQ ID NO: 1029280 - DNA, 120 bp, Artificial Sequence
  ENSG00000233746_5 (sequence is synthesized)
aaatgcagaagccacctgccccacacagggggccactttccctgcatctggcactcaccaggacagtcatagaactggccttgggtgcttggggagagtggagaggtctggggggcatcc

SEQ ID NO: 1029281 - DNA, 120 bp, Artificial Sequence
  ENSG00000233746_6 (sequence is synthesized)
actggcctcagcctcagagcttctcatcagtaacccaggaggcaaaggcccagctcaagattagcccaggccactgtatctgtgccaagacctacagctgtccctgcagggcgtgcatct

SEQ ID NO: 1029282 - DNA, 120 bp, Artificial Sequence
  ENSG00000233746_7 (sequence is synthesized)
aggctatcacaatggtgtcccttttggtggggatgtgaggcctgctgctgcctgggaagaagctgacaggattgttggtgctgtggggagaagctggtgtaactgagacccatgagggag

SEQ ID NO: 1029283 - DNA, 120 bp, Artificial Sequence
  ENSG00000233746_8 (sequence is synthesized)
gccctttgtgggtctgtggctgggaggagctctggggaagatgggccttgagaaatcccagcttagcacctttgacagttgctccactgagtcaccctagactgcaatctcacagatgtt

SEQ ID NO: 1029284 - DNA, 120 bp, Artificial Sequence
  ENSG00000233746_9 (sequence is synthesized)
ctaaccaccctctccctggggagcccttgggggtgctgcaagcccagtcctcactcactggctttgtgcttctcttcccgacttcctttttttgctcctgttgagaaatgtgggtccagg

SEQ ID NO: 1029285 - DNA, 120 bp, Artificial Sequence
  ENSG00000233746_10 (sequence is synthesized)
gctgcgtgctccagtgtgcggaaggaagggcagcgtgctctttggactgagctggctcaagggaagctgggtctgaggggagactgacctcgacccttcttaaatgaaacaccttttccc

SEQ ID NO: 1029286 - DNA, 120 bp, Artificial Sequence
  ENSG00000233746_11 (sequence is synthesized)
tgcgtctcagtcaccgttacctggcctgatcactgtgtgccacaccccatcacatccatccccacaagaatgccaggaggaggggtcattggcctttttgtcagcacaaacctctggagg

SEQ ID NO: 1029287 - DNA, 120 bp, Artificial Sequence
  ENSG00000233746_12 (sequence is synthesized)
cccagctcccaagacccgccaggcacacctgccagagtgccttaacttgggatgtctgcaaacctctgtccatggccgaacccaccccactgcctgttactgtaaataaaggtctattag

SEQ ID NO: 1029288 - DNA, 120 bp, Artificial Sequence
  ENSG00000233746_13 (sequence is synthesized)
catgccaccatgcccctcctccgatgcatacagtgcccagctcagcacctggtgcaagtaagcacaatctggcttccagccatcactgctgttgctactaacacaaatattaggcccctt

SEQ ID NO: 1029289 - DNA, 120 bp, Artificial Sequence
  ENSG00000233746_14 (sequence is synthesized)
ctagaatgcaaagataacccagggctgctcgttctgtgtccagatcacagagtttttctttttatccttatcaactttattgagggataatttacaggcaataaatcatatccatttaaa

SEQ ID NO: 1029290 - DNA, 120 bp, Artificial Sequence
  ENSG00000245975_0 (sequence is synthesized)
ttctttaaagggaaggcaggaggcggacagcttggctgtgaccctttagcgctgggtcgcgtgtggcccaccctcggcctgaggcattgttgggtggttggaggtggttgtagtatttgg

SEQ ID NO: 1029291 - DNA, 120 bp, Artificial Sequence
  ENSG00000245975_1 (sequence is synthesized)
aaaagaacttgtccctgaagggctcaggggacttggtttctcagctcctaatatggaaaattaaggcatttcttacgagatgcagattttaaagcaggcatatctactcgacggctttgg

SEQ ID NO: 1029292 - DNA, 120 bp, Artificial Sequence
  ENSG00000245975_2 (sequence is synthesized)
attactgcactgcacaaattccagtctctgtcggttttggctgagaagagctgtgcttctcaccagctactggtgagacattcgccctacaggaaagggtcggtatgattgtggacattg

SEQ ID NO: 1029293 - DNA, 120 bp, Artificial Sequence
  ENSG00000245975_3 (sequence is synthesized)
acatgcgtagcaaaagaaagtggctaatttgcgccaataataataaattagcttgtatttgaattagccaagtctttgcggttttgctaacttggcttcactttgcatggagtgggaagc

SEQ ID NO: 1029294 - DNA, 120 bp, Artificial Sequence
  ENSG00000245975_4 (sequence is synthesized)
gcctgcttctgaaaaggtgacttttttcctaattagaatggactcctcttaaggccatgcagttttcaaagaagaaagacaagctggacgttttgttagtaacaaaatgtagctgaagca

SEQ ID NO: 1029295 - DNA, 120 bp, Artificial Sequence
  ENSG00000245975_5 (sequence is synthesized)
ctttaagactttcactgtttcttctaccgctatctactacgagcttcaaagaggaaccaggagtatgggaggagcatgaaagtggacaaggaacgtgaccattgaagcacagcaccacag

SEQ ID NO: 1029296 - DNA, 70 bp, Artificial Sequence
  ENSG00000245975_6 (sequence is synthesized)
attgaagcacagcaccacagggagggatttaggccccaggactgcgttccctgactcctccaaggaaagg

SEQ ID NO: 1029297 - DNA, 67 bp, Artificial Sequence
  ENSG00000245975_7 (sequence is synthesized)
tgaccaaggagccctcaagcggcccttacgcgggcgtgaccgaaggctcacctcttgggttattcct

SEQ ID NO: 1029298 - DNA, 60 bp, Artificial Sequence
  ENSG00000245975_8 (sequence is synthesized)
cacccacatcctactcttggacaacaggaaaattagaaaagataatggagagctttttca

SEQ ID NO: 1029299 - DNA, 120 bp, Artificial Sequence
  ENSG00000245975_9 (sequence is synthesized)
acaacaggaaaattagaaaagataatggagagctttttcagaatgttgaatttaggagttgtgtgtgcttttgatctccatgtcaatccataaacaataaatcctgttcttaaatttgaa

SEQ ID NO: 1029300 - DNA, 120 bp, Artificial Sequence
  ENSG00000245970_0 (sequence is synthesized)
aaaacaagcaaattttattaaaggaaaattttgcaggtttaaggtttgcaggtgaaattttgtaggtgaaaaggtttacttttcaccagtctgttctggcatgcttctaatgatgtcaga

SEQ ID NO: 1029301 - DNA, 120 bp, Artificial Sequence
  ENSG00000245970_1 (sequence is synthesized)
gtcacctaaaaaataaaaataaaaaaacagtaattttacaattcatttaatagcaactggtaccataaaatttctctacctttggttatcccttctgtagacaatggtctgcaaattagc

SEQ ID NO: 1029302 - DNA, 120 bp, Artificial Sequence
  ENSG00000245970_2 (sequence is synthesized)
actgactttttgcaaaagttatcacattagctgtactgtcatttttcttaaggttgaccaaagataacctagaatcacagccattatataatcacataaaatgatcatataataaaattg

SEQ ID NO: 1029303 - DNA, 120 bp, Artificial Sequence
  ENSG00000245970_3 (sequence is synthesized)
gtttatcaccagcatttataaaaccagacctagggaaagaactaggtttggggacacatgcatggtcttaatatagcgaatgtttagcctgtcctgactattacaaaatcagaacagcga

SEQ ID NO: 1029304 - DNA, 120 bp, Artificial Sequence
  ENSG00000245970_4 (sequence is synthesized)
gaatattcgcagtattctatgaatcaaagattcacaattggaaaacagaatgatgtagattttttggcacttttttttttctcaagctaattttacatgtctgttctcaagaagcaagaa

SEQ ID NO: 1029305 - DNA, 120 bp, Artificial Sequence
  ENSG00000245970_5 (sequence is synthesized)
ttactttcttctgttttgccagattattctctccttataatttcaccttttaccaaatctatgtcattatttcataggtacttcatcaaatgaaattcattatctgacagtaaaaatttt

SEQ ID NO: 1029306 - DNA, 120 bp, Artificial Sequence
  ENSG00000245970_6 (sequence is synthesized)
aacttataataaagccaattataatgtattggcattcattaccaattctctacaaaatacaactacacgatatgccttgctagatccatattctatctgaatttaggaaccaaagacatt

SEQ ID NO: 1029307 - DNA, 120 bp, Artificial Sequence
  ENSG00000245970_7 (sequence is synthesized)
tgcgtagtaagaaatacttgtccagacattacattagaaaggcaaaaaaaaaaaagactttatgatttaaaaagcatacctggatcaatgatagccagtgtgcacactctgtagtatttt

SEQ ID NO: 1029308 - DNA, 120 bp, Artificial Sequence
  ENSG00000245970_8 (sequence is synthesized)
tagtactctatttcagatttcctttgggaaccaaaatgggcaaataaataaatgcgataccaagtgactgacagactaaatgttactacttcttttactagtgttaatgttgttaaggcc

SEQ ID NO: 1029309 - DNA, 120 bp, Artificial Sequence
  ENSG00000245970_9 (sequence is synthesized)
ttcaaaaagtaacaaaatcacatattactcttaaaaacatcatattcattatccaatacaaaccaacatttgtatgtatcccttgcaagtgaaggggcaaccagcaaatatctaatcaac

SEQ ID NO: 1029310 - DNA, 120 bp, Artificial Sequence
  ENSG00000245970_10 (sequence is synthesized)
ccctactatgtttaagacagtatcaatactcacggaagagggtaagatgcaaataaaagaaagcaaagcattatctagcattagtaaggaccacatactttatatttccatgacaatctc

SEQ ID NO: 1029311 - DNA, 120 bp, Artificial Sequence
  ENSG00000245970_11 (sequence is synthesized)
gaccacatactttatatttccatgacaatctctaaagtaggtattatgtacttttttttttgagatggaatctcattctgtcgctcaggcggatcgtgcagtggcacgatctcagctcac

SEQ ID NO: 1029312 - DNA, 81 bp, Artificial Sequence
  ENSG00000245970_12 (sequence is synthesized)
tggggtttcaccatgaatcggaaaggagtcctatactatcttgccactcaattatgtgaatccacataccagcaatagtgc

SEQ ID NO: 1029313 - DNA, 120 bp, Artificial Sequence
  ENSG00000245970_13 (sequence is synthesized)
tactatcttgccactcaattatgtgaatccacataccagcaatagtgctacaatgtattagttaaaaaaacacctcaagccgggcacggtagctcacacctgtaatctcagcagtttggg

SEQ ID NO: 1029314 - DNA, 72 bp, Artificial Sequence
  ENSG00000245970_14 (sequence is synthesized)
actcgggaggagattgtgccattgcactccagccggggtgacaagagcaaaactctgtcttaaaaaaaataa

SEQ ID NO: 1029315 - DNA, 81 bp, Artificial Sequence
  ENSG00000271670_0 (sequence is synthesized)
ttgtactctataaaagtctaccatctatgaactcaaatatcccacttaaggaaatctgtaactgttactgtagatgtttgt

SEQ ID NO: 1029316 - DNA, 120 bp, Artificial Sequence
  ENSG00000271670_1 (sequence is synthesized)
actgtagatgtttgttccttaaaaatacatctgtgcaaagcagattttaagttatctaacagtcctgaacttgagctgaccaaaacaaataaaacagggattttttttcttttttttaag

SEQ ID NO: 1029317 - DNA, 120 bp, Artificial Sequence
  ENSG00000271670_2 (sequence is synthesized)
tcaatgatactagacaacagcattttatccctgggatcactagacacagggccagtaccattctgctggcaaattaggaacttggggatgagagtcagtggacaggtcacttccaatgag

SEQ ID NO: 1029318 - DNA, 120 bp, Artificial Sequence
  ENSG00000271670_3 (sequence is synthesized)
actagagcagcaacactggactaaagacgggaatgattcctggaagttcagcaacataccctgagaagtaagaacaactggatctttgagagcttgaaaatacatatggagaacataaaa

SEQ ID NO: 1029319 - DNA, 120 bp, Artificial Sequence
  ENSG00000268941_0 (sequence is synthesized)
tacaggaagtcaaggtcaggccatacccaccacagttcgggcagccatagaggagagctttcttaacggtccgctgggacccaagtgggcctcccctgggactgcgtgctcccctacaga

SEQ ID NO: 1029320 - DNA, 120 bp, Artificial Sequence
  ENSG00000268941_1 (sequence is synthesized)
acctgatggctggaaacactcacactactgcctgtcccggcatctctccctccgccgcaggggctgatgctgccacaggacacagagcagcaggccccagaggcttctctgcacctctgc

SEQ ID NO: 1029321 - DNA, 120 bp, Artificial Sequence
  ENSG00000268941_2 (sequence is synthesized)
tgcctttctgagtaatcagaggaggccacacccactccaggacacccacacgggccttctgggcgatgacgctcctggcccaggagtggggggctgcctcacacctgctgctgtggggca

SEQ ID NO: 1029322 - DNA, 120 bp, Artificial Sequence
  ENSG00000268941_3 (sequence is synthesized)
gagtctctcctgggtcggggcctcgctggcggatctgctccatgtcgtgtgatgtgctgcagccccgcgtcaccgagagcctcttatgggccaccaagtccacacagccactggccatgg

SEQ ID NO: 1029323 - DNA, 120 bp, Artificial Sequence
  ENSG00000268941_4 (sequence is synthesized)
tgcagggcctctggacacggagacctgtggttctcagccagtggtgattttgtgtccagggaacacctggccaagtctgggttcaattttgtttgtcacagtttaaggttggggtgtcac

SEQ ID NO: 1029324 - DNA, 120 bp, Artificial Sequence
  ENSG00000268941_5 (sequence is synthesized)
tagacatcctacagtgcacaggacggccccacagcagaccagcccgactgtcagcagcaccgagccgggaaagcctggtctggagccgtttctctctagggtccctgctagggaacccct

SEQ ID NO: 1029325 - DNA, 120 bp, Artificial Sequence
  ENSG00000268941_6 (sequence is synthesized)
cactgccatggagaacccctctcctcctgtctctcaggactctccgagggtcaaggatggatgcctccccatcgagggccaaacaaactgacaaatcgagtgggcaaacggcttactcaa

SEQ ID NO: 1029326 - DNA, 120 bp, Artificial Sequence
  ENSG00000268941_7 (sequence is synthesized)
aggccaggagcagctacccgatgactgctccctcgacctctctcttctcactttcttccctattccatcctttgatgggtggcctgttacacgtttggaaataaaaacaagtgggaaaga

SEQ ID NO: 1029327 - DNA, 120 bp, Artificial Sequence
  ENSG00000268947_0 (sequence is synthesized)
ttagattgtcgtttacttcctccaacttttagtttatttttatttatgttgttcttttcttttgtaagtataatccatacacatggtaaaaatgtccaacagtacaagatactagtcaca

SEQ ID NO: 1029328 - DNA, 88 bp, Artificial Sequence
  ENSG00000268947_1 (sequence is synthesized)
acatggtaaaaatgtccaacagtacaagatactagtcacatggaagtaaagccctctaaaaaaaccaaatcttggctaggcgcagtga

SEQ ID NO: 1029329 - DNA, 90 bp, Artificial Sequence
  ENSG00000268947_2 (sequence is synthesized)
gttccagatcagcctggccaacatggcagtccgctcccccgcacccctaccttggcctcccaaagtgttaggactttaagcaaatgtttg

SEQ ID NO: 1029330 - DNA, 120 bp, Artificial Sequence
  ENSG00000268947_3 (sequence is synthesized)
cacaggaatgctgcacattttacccagctactatgtctagggtcgtatctagcacaccagcatggctactgtggagagctgggactggatgtgagatgagagctaaaggggaagtaagca

SEQ ID NO: 1029331 - DNA, 120 bp, Artificial Sequence
  ENSG00000268947_4 (sequence is synthesized)
tatgagaggagtcagacatgtgcaattgaaaaagacttgctcctgtctctcttctgtgaatgtttgtgaatatcccaacgggacactttcacagaggagctgattgacgtggtcacagcc

SEQ ID NO: 1029332 - DNA, 120 bp, Artificial Sequence
  ENSG00000268947_5 (sequence is synthesized)
atcagccttgggacaccagaccacagtgtgtacactaagtggcactgatggacacttcagcatccctctagctgctgtcccgtttcccctcctcggggaccacagctgttgccagtcctt

SEQ ID NO: 1029333 - DNA, 120 bp, Artificial Sequence
  ENSG00000268947_6 (sequence is synthesized)
ggtttccttcaggagggtgtctgggtagaccagcctgtgtgcacacagtccaagatacatgaacagtgaagtgccaggcaatccttgcaagcatgggcaggtggagagctgaggcctgct

SEQ ID NO: 1029334 - DNA, 120 bp, Artificial Sequence
  ENSG00000268947_7 (sequence is synthesized)
tgacaccttcctgctcagaagcccagtgagcagtttccctccctagggctcagtgtcatcccctataaaatggggcttatggcagagctcaccacactgggtgcatctggggatttggcg

SEQ ID NO: 1029335 - DNA, 120 bp, Artificial Sequence
  ENSG00000268945_0 (sequence is synthesized)
cactgcactccagcctgggagacagcgcaagactctagctcaaacaaacaaacaaacaaaacagcaacaacaacaacaaaaccatcctcccctcccgaggggacagaacagaaacgaatg

SEQ ID NO: 1029336 - DNA, 120 bp, Artificial Sequence
  ENSG00000268945_1 (sequence is synthesized)
ctcccgaggggacagaacagaaacgaatgggcgagtgccgggccaagcagtgggtctccagcaggtggcattaaaataggaattttggctggggacggtggctcacacctgtaatctcag

SEQ ID NO: 1029337 - DNA, 70 bp, Artificial Sequence
  ENSG00000268945_2 (sequence is synthesized)
acacctgtaatctcagcactttggaaagcccaggcgggcggtcacctgagggcagaaccagcctcctggt

SEQ ID NO: 1029338 - DNA, 120 bp, Artificial Sequence
  ENSG00000268945_3 (sequence is synthesized)
aggagaatcgcttgaaccaggggggcagaggttgcaatgagtcaagattgcaccaccgcactccagcctgcgtaacaagagcgtgtaactcttgtctcaaaaataaattaaataaataaa

SEQ ID NO: 1029339 - DNA, 120 bp, Artificial Sequence
  ENSG00000244564_0 (sequence is synthesized)
gtgcgcagccgcggggcgcagtggggctgcgcgcgggcgctcgcggccggctggaggtgcccggcgatcggccccgctcgagcgggggacactcaccgagcggctggagagtcttttccg

SEQ ID NO: 1029340 - DNA, 120 bp, Artificial Sequence
  ENSG00000244564_1 (sequence is synthesized)
tccgggagctccggctgaacatggccggacgcctcctgctcgcagcgccgtccgtcggcaatacagttactaaaggaacttgaagagatcctcatacataattgtcaacacgggaagacg

SEQ ID NO: 1029341 - DNA, 120 bp, Artificial Sequence
  ENSG00000244564_2 (sequence is synthesized)
gaaagaaatacacaacacgttaaaatgccactgtttgcagaatacattcaaaagtattatattgggactccaagactcacagtgaggtcagaaaaggaaacaaacactcgctgaagctgt

SEQ ID NO: 1029342 - DNA, 120 bp, Artificial Sequence
  ENSG00000244564_3 (sequence is synthesized)
gtgacttccccgacacgtatgctgagtgctccaccggattgtctgaatccgacctgcagacaagaaaagagaaggtaaagagtcagtgaggactggtggacgtattttccccagatttca

SEQ ID NO: 1029343 - DNA, 120 bp, Artificial Sequence
  ENSG00000244564_4 (sequence is synthesized)
taagaagaggagaagcacggacatgcatgagcccttgggcatccctgtcccagtggccttatcagaattgcaatactatctcacactgcattccttgtattcctaggagaactggccagg

SEQ ID NO: 1029344 - DNA, 120 bp, Artificial Sequence
  ENSG00000244564_5 (sequence is synthesized)
cttctaaagaacataaccttactttggattaggcctcagagatgttaactcttgctgtcggtaagggttgactcagatgcagaaactcagacaatagttaaccacttcacttgaaagaga

SEQ ID NO: 1029345 - DNA, 120 bp, Artificial Sequence
  ENSG00000244564_6 (sequence is synthesized)
ttctgtacaggttcggataggagctatttaaggctttgtggatcatacagtctttatcacaacaactcaactccacaattgtagtacaaaagtgccatagatgaaggagagtgacagtgt

SEQ ID NO: 1029346 - DNA, 120 bp, Artificial Sequence
  ENSG00000244564_7 (sequence is synthesized)
ttcaataaagctttgtttacaaaagcaggcagtaggtccagtttggtctagcatagtttgctggctcctgctctaagtcttcaccaggtcctcttcacttcctagcagactcacctttct

SEQ ID NO: 1029347 - DNA, 120 bp, Artificial Sequence
  ENSG00000244564_8 (sequence is synthesized)
cttcttcctgtcccctccaaaaaagaatggtaaaaagaagaatggaaatgttggtatatgtagagagccaacattttgcagtgctaagcactttactcaagttaatttaattctcacaac

SEQ ID NO: 1029348 - DNA, 120 bp, Artificial Sequence
  ENSG00000244564_9 (sequence is synthesized)
accttgagtaagatttttatggttgcccatttacagatgaggaagctgacacacagagaaattaagtcatcaggtttagctcatgaagagactaaaattctaagtgtgatggcataattc

SEQ ID NO: 1029349 - DNA, 120 bp, Artificial Sequence
  ENSG00000244564_10 (sequence is synthesized)
actataagtcactggtgcatgaagcagtattgtttaatatcccccaacatggtaatcagggaagaacttagccatagacattatcagagggagggaactagagtagggcatggggaaaaa

SEQ ID NO: 1029350 - DNA, 120 bp, Artificial Sequence
  ENSG00000244564_11 (sequence is synthesized)
aaatacatacctgagttggtagttgatgggatttgtttgtgaacacctatgacacatgttaggggtggggagatggcaagaagaatgaggagcaaatgtgtaaaccatgtaggggtctgt

SEQ ID NO: 1029351 - DNA, 120 bp, Artificial Sequence
  ENSG00000244564_12 (sequence is synthesized)
ggtcttgcaatggcagatggggaagtcattattgtgatgaacacaaggcttattaatgtgcaacagtgcccaattttaaccctttcctgtcattttcaataaagggaattttgtctttga

SEQ ID NO: 1029352 - DNA, 120 bp, Artificial Sequence
  ENSG00000271401_0 (sequence is synthesized)
cagaaagcattaataacagccaagaacagccttcaaagaacatacaagcagcattcgaaccatgaaaacagactgcagttttactccaaagttcagtagttaattaaagaccagcagaaa

SEQ ID NO: 1029353 - DNA, 120 bp, Artificial Sequence
  ENSG00000271401_1 (sequence is synthesized)
attaacagatgggtggcctttcaagaggtgccagaaggtccccctaatggctatgagggttgtagagggcaagaatcaccagcagcaatgtcttatgctggaagactgtggtttgaagat

SEQ ID NO: 1029354 - DNA, 120 bp, Artificial Sequence
  ENSG00000271401_2 (sequence is synthesized)
acataggtctgtatagggaaagtgcatatctaagattatatctagataattttagattggggaatcatatgacgtcacaagacaactttttattaaaataagaataatatgtttctgcca

SEQ ID NO: 1029355 - DNA, 120 bp, Artificial Sequence
  ENSG00000230149_0 (sequence is synthesized)
cagctcttgggcgtcatttattttttgcataggcataaattaggatctggagataaaaaacttaagaaccaatagtgcagcatttgtaacagggactgaagtgctgtctcccaccctagc

SEQ ID NO: 1029356 - DNA, 120 bp, Artificial Sequence
  ENSG00000230149_1 (sequence is synthesized)
tcctcctcttccaaatccactcccctcccttccagtccaagggtgaccctgacttgatcctcagtagagaggcccacaggatccccctgcagcccctctggccccaccacaggacagata

SEQ ID NO: 1029357 - DNA, 120 bp, Artificial Sequence
  ENSG00000230149_2 (sequence is synthesized)
gggtgacaaggccttgggcacatgctctaaggtaacggctgtggggcggatgcgggcagagaggcggaccacggcgaagccttgtggcccctggaaggcccagcagttgcctgggtgccc

SEQ ID NO: 1029358 - DNA, 120 bp, Artificial Sequence
  ENSG00000230149_3 (sequence is synthesized)
acctggaggatgactcggggtgactgggagtggtaccacagggggatgccgaagaggctgaggagggccgtcttggtctcgtaggtctcagaacatcgggtgctgatgacgctggcccct

SEQ ID NO: 1029359 - DNA, 120 bp, Artificial Sequence
  ENSG00000272417_0 (sequence is synthesized)
cattcattcagtagacatttattgcacatccattatgtgttagatttagaggagaaattgtgacataagggtaataatattctaatttgctggtgccagagagactgtagcagcaatgta

SEQ ID NO: 1029360 - DNA, 120 bp, Artificial Sequence
  ENSG00000272417_1 (sequence is synthesized)
tgattttaattcacccaattcttaatattgttatcaggcacttaattatttattcctctttgaaaatttgactactgatttccacttgatagtctcattgcttggcaatggctaagttaa

SEQ ID NO: 1029361 - DNA, 120 bp, Artificial Sequence
  ENSG00000272417_2 (sequence is synthesized)
aaagtgatttacaatttttgttctttcagactatgttataggtgacattttgttcttttaatattaattcacaccaattaaattatatttaataaaggagttttgatctcaggactttaa

SEQ ID NO: 1029362 - DNA, 90 bp, Artificial Sequence
  ENSG00000224525_0 (sequence is synthesized)
tgaagactgagttttcagttcatgcgagatctgattgtttaaaagagtgcagcacttcctccaccttgctccctctcttgccacttggat

SEQ ID NO: 1029363 - DNA, 120 bp, Artificial Sequence
  ENSG00000224525_1 (sequence is synthesized)
tgtaagctccctgagaacctcaccagaagcagatgccagcaccacgcttcctatacagcctgccaaaatgagctcctgaatttcacagacaaatccagacccctgtgtggaaagcctgcg

SEQ ID NO: 1029364 - DNA, 120 bp, Artificial Sequence
  ENSG00000224525_2 (sequence is synthesized)
atccagacccctgtgtggaaagcctgcggtggtgttctccgtcttcccacaggactccctgcagccaggaattctaggggagcacctgacgcgaggtatacgcccagatggcctgaagta

SEQ ID NO: 1029365 - DNA, 76 bp, Artificial Sequence
  ENSG00000224525_3 (sequence is synthesized)
ccttgtgaaagtccttttcctggctcattctggctcaaaaggaacaatccccctttgactgtaattttcctttacc

SEQ ID NO: 1029366 - DNA, 120 bp, Artificial Sequence
  ENSG00000224521_0 (sequence is synthesized)
atgataaagaaaaaatgaggaaatgctgtgaagaactaatagaacgtttcagaagcagaacaagtcgagagcagtgatgacccttttgttcctgctagtacctcctgtctgtctggccga

SEQ ID NO: 1029367 - DNA, 120 bp, Artificial Sequence
  ENSG00000224521_1 (sequence is synthesized)
actcaccatcagatgatgtcttgaacctcacctagatgggctggtggtgtgtggccaggttaagagcaccaacaggagtaagaaagtgacctgcctggttttaccgtgtgtactagggga

SEQ ID NO: 1029368 - DNA, 120 bp, Artificial Sequence; identical to SEQ ID NO: 1004153
  ENSG00000224521_2 (sequence is synthesized)

SEQ ID NO: 1029369 - DNA, 120 bp, Artificial Sequence
  ENSG00000224521_3 (sequence is synthesized)
cctccacaaatcagtaccttgattaaaactaaaattggagtcatcttcatatctccatctttctccctcttcattaggaccgattgtagtctgtttccctctcactcacttgcaatcttt

SEQ ID NO: 1029370 - DNA, 120 bp, Artificial Sequence
  ENSG00000224521_4 (sequence is synthesized)
tagtgttgcatttgatttttatctttgtttttgttttaaatactgtcattaaagtcatagaaaaatctaaaataaaactggttgaataaaaattttaaaatcgactctaatgtaataaac

SEQ ID NO: 1029371 - DNA, 120 bp, Artificial Sequence
  ENSG00000224521_5 (sequence is synthesized)
cagacaaaaatgatactttaaatgttatatcttccctttaaactacaaatattcattgagtgtataccctgtattaggctgttggaataaaacagggaagaagacagaagaaactgcacc

SEQ ID NO: 1029372 - DNA, 120 bp, Artificial Sequence; identical to SEQ ID NO: 1004157
  ENSG00000224521_6 (sequence is synthesized)

SEQ ID NO: 1029373 - DNA, 120 bp, Artificial Sequence; identical to SEQ ID NO: 1004158
  ENSG00000224521_7 (sequence is synthesized)

SEQ ID NO: 1029374 - DNA, 120 bp, Artificial Sequence
  ENSG00000224521_8 (sequence is synthesized)
cagcacctgagaggcagtttcagtcgtattggggagatgcaggcatctgggttgctgcacatcaccagggcagggttctctcagcagccctggagtgcagagttcccatcagctcagcag

SEQ ID NO: 1029375 - DNA, 120 bp, Artificial Sequence
  ENSG00000224521_9 (sequence is synthesized)
ggtgaggactcttggtccttggatgacaacactcccctgcccacttctccagccttccctgtaaccctttgccacctctaaccaatcttctgtgttacatctcttcggtttgcaatatgt

SEQ ID NO: 1029376 - DNA, 120 bp, Artificial Sequence
  ENSG00000224521_10 (sequence is synthesized)
agtgttcgtatatgactggacagtatctactggagttaatatctatcagagtaattatatcacaattgcaatcttctcctaagagtgaatagtgacattaaaaatttcaacattataaat

SEQ ID NO: 1029377 - DNA, 120 bp, Artificial Sequence
  ENSG00000224521_11 (sequence is synthesized)
tatgcagaaataaaactaattatacaaaaaatacactctgaatgtcagtttttccctgagacaatctaccatttgatatacggtgattcacacttcttaatatacaacattgaattactt

SEQ ID NO: 1029378 - DNA, 120 bp, Artificial Sequence
  ENSG00000224521_12 (sequence is synthesized)
ttccaaaagcctcttcaaattttgctgcagaattaaacttcacttgcaccagctctgaattatgtgtgcttttccttcttggtcaatttcataggtgtatcattatttgtcttttttaat

SEQ ID NO: 1029379 - DNA, 120 bp, Artificial Sequence
  ENSG00000224521_13 (sequence is synthesized)
taatatgtttatataacttttcatgtttatccatgtaactactgcttttgtgaaacgtgtgtttttatccttttcacatttttttctattgaaatgttttctttataaatataaatgtgt

SEQ ID NO: 1029380 - DNA, 90 bp, Artificial Sequence
  ENSG00000224521_14 (sequence is synthesized)
ggcgtggtagcacgtgcacaggagactcagtcgaacctaggaggcagaagttgcagcaagccaagatcacgctattgcactccagcctgg

SEQ ID NO: 1029381 - DNA, 120 bp, Artificial Sequence
  ENSG00000224521_15 (sequence is synthesized)
gcaaaaagagcgaaactctgtctcaaaaagaagaaaaaaaatagtaactctttgtgaatagtatcaactaaaatatttatatttcagttttcattctgatattttgtttcatcagaattt

SEQ ID NO: 1029382 - DNA, 120 bp, Artificial Sequence
  ENSG00000224521_16 (sequence is synthesized)
atttcagttttcattctgatattttgtttcatcagaattttttaaagtattttgtttaatatattaactttaataatttcattaactgtctcgtgcttacaaagtctttatgcatttggg

SEQ ID NO: 1029383 - DNA, 120 bp, Artificial Sequence
  ENSG00000224521_17 (sequence is synthesized)
gattatgtaaagcatctacctttacacttttaatgagtttcagaggttttttggtacctttgagttataatacaaaaataatttatttgggtgtgatatgcagtgaattgctaacattat

SEQ ID NO: 1029384 - DNA, 120 bp, Artificial Sequence
  ENSG00000224521_18 (sequence is synthesized)
aatgcaaacttttaaccaatattagtaatagtaatctcaaatctcatcatcatcaaaatcttatttatgaaatataggagttagttcatatacagccttagccttttccacattataaaa

SEQ ID NO: 1029385 - DNA, 120 bp, Artificial Sequence
  ENSG00000224521_19 (sequence is synthesized)
tatattccatatatatgtgtgatcttcatttaatattcaagtaaatgttgtaagatattgttatttttattctaacatttcacaggtatagaatctgaaactcagaggtcaactgatgtg

SEQ ID NO: 1029386 - DNA, 120 bp, Artificial Sequence
  ENSG00000230140_0 (sequence is synthesized)
tggttttttttttttttaaagaacagtgaaaggactcgtctgaagttattccgacacggcccctagttgctagggcctatataaaaaagcagctcaaatggaaagtgtcacccaggacag

SEQ ID NO: 1029387 - DNA, 120 bp, Artificial Sequence
  ENSG00000230140_1 (sequence is synthesized)
cattgggaggaaatgacaccaggagaccttgtttcagtgagaaatcccaggcacagggctgatccagaagctggtctgggttctgtttccctgcgcagctgggaggagacagaagcactc

SEQ ID NO: 1029388 - DNA, 120 bp, Artificial Sequence
  ENSG00000230140_2 (sequence is synthesized)
tgggcctccgttgttggcaaagtgagtcacactggacaggagagtctggaagaatggcaggcacagcttgcaagcgcatctggaggtggctggagagaaataaaacggattctctgggga

SEQ ID NO: 1029389 - DNA, 120 bp, Artificial Sequence
  ENSG00000230140_3 (sequence is synthesized)
gacgcagcacatcgcctggctctgcagcccccaccacattgtagcgtacacccgtggaggagtttggggtcacacacttaccggcatggtggctgcctggctgagcccggggacagcatg

SEQ ID NO: 1029390 - DNA, 120 bp, Artificial Sequence
  ENSG00000230140_4 (sequence is synthesized)
tgagctgaaccacagaagcccagcctgggagcaggggtgagagatgcttctgttggaccacagacagcctgaaagactggaccattgctgtggcaccagcctctggcccaaggctctgga

SEQ ID NO: 1029391 - DNA, 120 bp, Artificial Sequence
  ENSG00000230140_5 (sequence is synthesized)
ttcgcagtcactgggcaccctggaagttgagcttcaccagttctaagagaatggactccgaggaacagggctctggtctacttgcagatgatccccaaggttccctgaagctgtgtgatg

SEQ ID NO: 1029392 - DNA, 120 bp, Artificial Sequence
  ENSG00000230140_6 (sequence is synthesized)
gaccaggaccagggacaaagagacgtctggctaggcagagggatgggcgtacctttagtgctgaggagtggagggcctcggatggcgggtcttccagagccagctcctgcctcctttcca

SEQ ID NO: 1029393 - DNA, 120 bp, Artificial Sequence
  ENSG00000230140_7 (sequence is synthesized)
cccggacatctgcgtaactgtacaggaaattaagagaccacagtggagatggggcattccaggaagggatgacaccacctgaacagacagcaaggtacatcgaggttctctacgtaaccc

SEQ ID NO: 1029394 - DNA, 120 bp, Artificial Sequence
  ENSG00000230140_8 (sequence is synthesized)
ctgccccccacaacagtcaacacagaggagcctagcctgtgacttgttggaaggaatgagcgtcgttctctgccttaaattcgacctgagtgacttataatattacattcaaaatctttt

SEQ ID NO: 1029395 - DNA, 120 bp, Artificial Sequence
  ENSG00000230140_9 (sequence is synthesized)
ggtctgaggcaggagctgctgtgtgaggtcgcaggacgatggggaaggcagaggggcctgtgggagagaaaggggctttgttaccactgcttctgccattccaggggacagggatgtggt

SEQ ID NO: 1029396 - DNA, 120 bp, Artificial Sequence
  ENSG00000230140_10 (sequence is synthesized)
ctcttggtccggtgggttctctgcgttccgcactggggtgaacagctccaagtcaagagttctagaaagtataggtgtctgttccctggctgcactgcttcctacgcagggcacaagggc

SEQ ID NO: 1029397 - DNA, 120 bp, Artificial Sequence
  ENSG00000230140_11 (sequence is synthesized)
agagcccctgcacaactggtgcaggcttccaccccaccacagtgtgctctgccaggctgctgctacctgcccaagcctggtagctcagctctacttcccttcccttgcctgctgtcctgg

SEQ ID NO: 1029398 - DNA, 120 bp, Artificial Sequence
  ENSG00000230140_12 (sequence is synthesized)
actccgccctgggtggatttggttgctctcctcccaaatggattaattcttagcggtgtcatcaagcaggacgacgtgcgtggactgctaccatgagctgctgtgcgtccgtatcttttc

SEQ ID NO: 1029399 - DNA, 120 bp, Artificial Sequence
  ENSG00000230140_13 (sequence is synthesized)
tgctcagcgctaatgcagatggacagacacgccatgcatgtttgtccatgaactcatccaggcagtgaggactggggcagtttcaccagcctctgcccagaaccttttaagagactcctg

SEQ ID NO: 1029400 - DNA, 120 bp, Artificial Sequence
  ENSG00000230140_14 (sequence is synthesized)
ccaccatgcagggttgagctgaaccacagaagcccagcctgggagcagggctccaggactccccaaggatcagaaacctcaatgataaatttccgactggatgatacacactacacctgt

SEQ ID NO: 1029401 - DNA, 120 bp, Artificial Sequence
  ENSG00000230140_15 (sequence is synthesized)
tcttcagcgatgatgtatggtgtgtctaacatctgcctattagcagctgaattcccttctatgacgtgatacataatgtatggtgtgacacagctgggtaataaacaatgtcagctgcgt

SEQ ID NO: 1029402 - DNA, 120 bp, Artificial Sequence
  ENSG00000253764_0 (sequence is synthesized)
gggttctaattaacgctggacccctgctgtctttgccagttccatgctgtatacacataatgagccgttacaactccagcaccaaagctaacgccccgggaacatctttaaaaccttttt

SEQ ID NO: 1029403 - DNA, 120 bp, Artificial Sequence
  ENSG00000253764_1 (sequence is synthesized)
cactctgttgccaagaagagtagtacctgctgtcagtacttgaattacaggaggctgaaactcagcgagctactgggattttttgaaaattgaaaacttccgttaactatagcagaaaca

SEQ ID NO: 1029404 - DNA, 120 bp, Artificial Sequence
  ENSG00000253764_2 (sequence is synthesized)
gacccttttggtggaagctaaaataattcccatgctgctccgtttttattttgttcagtttactccaaaaatgttccaaactctactgtgatcttcttagtgcatctctacttcctttcg

SEQ ID NO: 1029405 - DNA, 77 bp, Artificial Sequence
  ENSG00000253764_3 (sequence is synthesized)
ctctactgtgatcttcttagtgcatctctacttcctttcggctgcagaataatacttctttttctcttttgtttttt

SEQ ID NO: 1029406 - DNA, 72 bp, Artificial Sequence
  ENSG00000253764_4 (sequence is synthesized)
ctacccccattcttttccagagaaacgtgaacaggccaaacaaagcctcacctggctatcccgccaccctgg

SEQ ID NO: 1029407 - DNA, 120 bp, Artificial Sequence
  ENSG00000253764_5 (sequence is synthesized)
aggccaaacaaagcctcacctggctatcccgccaccctggggttgggcctccaaaggcccgggaggtcacctaagacacggtgttctgaacatgcaagcccgacagcatcttctctacca

SEQ ID NO: 1029408 - DNA, 120 bp, Artificial Sequence
  ENSG00000253764_6 (sequence is synthesized)
aactgaaaacatccatccaaaccccacaccatctggtagataagtagtctgtggggagtcccatatttttcttaccttagatatttatttggaaatggactgtaggcccaatatggtcaa

SEQ ID NO: 1029409 - DNA, 120 bp, Artificial Sequence
  ENSG00000253764_7 (sequence is synthesized)
tgaaacttgcagaggaacatttcatgcctttaattagttcttcataactgcagggacctctagagttcctgaaattgaactgggttgtaatactgtcaagaaaaaggaggacctatctta

SEQ ID NO: 1029410 - DNA, 120 bp, Artificial Sequence
  ENSG00000253764_8 (sequence is synthesized)
aatctatttcaagggtaatactattttactatgtaaattttcccctggtcagggacagcctgatcatgcatggtagactcgaagcatgcaaatatttcaacatgcaaaaccgccctaaaa

SEQ ID NO: 1029411 - DNA, 120 bp, Artificial Sequence
  ENSG00000253764_9 (sequence is synthesized)
atataaccgaagcttatggagttgtccagggtacagtggtttactggcccctgaatgcgggactccatcaaactgggttccaggctgggaggtctctgaacccaatttctagacagcctg

SEQ ID NO: 1029412 - DNA, 120 bp, Artificial Sequence
  ENSG00000253764_10 (sequence is synthesized)
ctttggagttcaactgatgggaccttagacaccagccttaccctctgcaagtcttgtgatttggagccagatacttggcctctctgtgctccagggagacaccactgcacctacctgaga

SEQ ID NO: 1029413 - DNA, 120 bp, Artificial Sequence
  ENSG00000253764_11 (sequence is synthesized)
ggactgaaggagaggatctgtgcaactcactcaggatactggatcttaagccaatgggtggacttacattcgtcacctctgattctgtctcctcctgcgcggtgacttagcaaacacttc

SEQ ID NO: 1029414 - DNA, 120 bp, Artificial Sequence
  ENSG00000253764_12 (sequence is synthesized)
ttcctctccagctctgcttcttactctccagctctgctgccctgttccagtgctgacgccagacaacagataatttcccaaatgcttgtattagcccttaggagttcatgtgttcctccc

SEQ ID NO: 1029415 - DNA, 120 bp, Artificial Sequence
  ENSG00000253764_13 (sequence is synthesized)
ccagccaataaagctgttaaatcccaataactgtcaggaatggagccaattgctataaagtacttccagcttcttggcatgaagaaataattagaatatatgtgttggctttgaaacaac

SEQ ID NO: 1029416 - DNA, 120 bp, Artificial Sequence
  ENSG00000253764_14 (sequence is synthesized)
aggactcgggagccgcggcgcggtggggcggattccagaattttttaaagttcacaacacgagagtggacgaaatgtcggagcttttgctcatatccagaaatgtggcctctgcctccca

SEQ ID NO: 1029417 - DNA, 80 bp, Artificial Sequence
  ENSG00000253764_15 (sequence is synthesized)
gcccgccgggcgcttctccccctccaggaccgcggcccacgtcgccactcgagcccgagcccgagcccgcgcccacgcgc

SEQ ID NO: 1029418 - DNA, 120 bp, Artificial Sequence
  ENSG00000253764_16 (sequence is synthesized)
gggggccgcttcctgcgaggaggcggggacaggtgtccgcgggcgcaaacagcggagtttcgtgcgcctattttttggtaaaagtagaggcgatgcgttgttgacatatttagtggttaa

SEQ ID NO: 1029419 - DNA, 120 bp, Artificial Sequence
  ENSG00000268366_0 (sequence is synthesized)
attgcctccggggccgcgagtctgagctccaggcccggaacacccctcccccaccccagactccggctctaaatttgctttctcccggtccctctgttccttgaaagtccgcgattctcc

SEQ ID NO: 1029420 - DNA, 120 bp, Artificial Sequence
  ENSG00000268366_1 (sequence is synthesized)
ttccaaactgcccttggatccagagacccagatccgaacacatcgctcaaagacgacaatgctccgatctagttcgggagactacgtatcctaattctgatacttcctcccacttctcct

SEQ ID NO: 1029421 - DNA, 120 bp, Artificial Sequence
  ENSG00000268366_2 (sequence is synthesized)
tcccggcaacctccttcccccgccaaacacgataaagccccgaattcaacccgtccggaagacccaagtggaatcgaatctccaggttccctgtctcaaaagttcctcccctctgttctc

SEQ ID NO: 1029422 - DNA, 120 bp, Artificial Sequence
  ENSG00000268366_3 (sequence is synthesized)
tcgcttctccaaaagcccaacgtcccagcttcaaactccctccacttgaaaatactgccccaacaacctcgcctcccctcctgggtcttgaactcagtctcaggtccccagaccctccct

SEQ ID NO: 1029423 - DNA, 120 bp, Artificial Sequence
  ENSG00000268364_0 (sequence is synthesized)
gttctgcttccgtctgctcacattcatctagtaagccctctcgttaaagaggaggcagcacaccgaggcctgtctagaacttctttcatttaaccaacagtgaatatctaatctacaaga

SEQ ID NO: 1029424 - DNA, 120 bp, Artificial Sequence
  ENSG00000268364_1 (sequence is synthesized)
aactggagccgtggcagtttaggagcctgccaaggttgcatccctgggagcttattttctattgtgggagacaggaaaagaacaagtgaatcaactgtgaaattaaataattcaaactta

SEQ ID NO: 1029425 - DNA, 120 bp, Artificial Sequence
  ENSG00000268364_2 (sequence is synthesized)
atcaggaagaccaaacagagacagaggcgcacacaccaagaaaggccatgtgggcacacagcaagatggtgcctgtctgcaaactaggaaaagagccctcaccaggaactgaaacagctg

SEQ ID NO: 1029426 - DNA, 120 bp, Artificial Sequence
  ENSG00000268364_3 (sequence is synthesized)
gcaccttgatgttggactttccagcctccacaactgtgagaggtaagtttctgttgtttaaaccacctagtctatgatattttgttatggcagcccaagcaaacaccaacatttgccaat

SEQ ID NO: 1029427 - DNA, 120 bp, Artificial Sequence
  ENSG00000268364_4 (sequence is synthesized)
tttgatttattttttacatatatgatgtaaaaagtaatctttacaaagtatcatatgtctcattatttcatgcagaaattggtgaccaaatcaaggggaaaaataaagagatcccaaata

SEQ ID NO: 1029428 - DNA, 120 bp, Artificial Sequence
  ENSG00000268364_5 (sequence is synthesized)
cagtcatgtgtggtgggaggctgctgtgggtggcacctggggcgtccacggccgccaaggcgggaggacgtcaggccctgcttgctcccaccccttccaggtgagagctcccgggcacgc

SEQ ID NO: 1029429 - DNA, 120 bp, Artificial Sequence
  ENSG00000268364_6 (sequence is synthesized)
ccgtcgttggctcttcgtcctcttggtgttcttccctgttgcttcaaatcaggttcctgtctcaaaaatccgaaaaagaaatcctcccaaatgactctgtgcccgacgctccgttaaggc

SEQ ID NO: 1029430 - DNA, 120 bp, Artificial Sequence
  ENSG00000268364_7 (sequence is synthesized)
atcgtgctaggcgttctcaaactcgtgaaatgactacactgcacaggttaacctcattgctactcttccccttgcctcctaattctctggttaaacttccgcccccgaggtttctagaaa

SEQ ID NO: 1029431 - DNA, 120 bp, Artificial Sequence
  ENSG00000268364_8 (sequence is synthesized)
aagaatgtggcgatggggcctgagtcccatggcatacagctgcaatgtctgccttgttttttcctataatcaggaagaccaaacagagacagagttctggttaaatcacacaagtccctg

SEQ ID NO: 1029432 - DNA, 120 bp, Artificial Sequence
  ENSG00000268364_9 (sequence is synthesized)
gcatgagaccaagaagtcacagagcccaggtcttagccctcagagtgtgagagaagacatgaaggcatcagggacactgtgcgagtgggcactgctgctttccactgctctccctagact

SEQ ID NO: 1029433 - DNA, 120 bp, Artificial Sequence
  ENSG00000268364_10 (sequence is synthesized)
gcagccaggaggctgcctctgccctgccaggtcagattcccccaagaggccctcccatagcaccctgggcatatggccgttttgtacttagcactccgaactgtgttgactggtttctct

SEQ ID NO: 1029434 - DNA, 120 bp, Artificial Sequence
  ENSG00000268364_11 (sequence is synthesized)
ctctctccctcactaatctgtgagcatttttgtaacctccatgctccgtacaatgcctggagcatagatttctcaagaaatctttgttgaaccttttcttcctccatattaaaccagacc

SEQ ID NO: 1029435 - DNA, 120 bp, Artificial Sequence
  ENSG00000268364_12 (sequence is synthesized)
gtgcgaggcccagactgagggcgaaacagcaggcaggactgggtggagacgttcggggacgtggcaactggagtttcttctccgtatatttcggcattcagttcctttttttttttgttt

SEQ ID NO: 1029436 - DNA, 120 bp, Artificial Sequence
  ENSG00000268364_13 (sequence is synthesized)
ctccatacatgtggtagaaaaaggtcaagcagtgttttccagagactcctcgcagaggcctggacaagaggcgtgctttttgtccatacaccatatgggaggcctcaatgtacatgtagt

SEQ ID NO: 1029437 - DNA, 120 bp, Artificial Sequence
  ENSG00000268364_14 (sequence is synthesized)
caccttgatgttggactttccagcctccacaactgtgagagttttggaggctggtaagtccaagatcaaggtgccaacaagtttgcttgtctaacaagggctgcatcttcctgaggggag

SEQ ID NO: 1029438 - DNA, 120 bp, Artificial Sequence
  ENSG00000268364_15 (sequence is synthesized)
gaacgctatgtcttcacatggtggatggcataaaggcaagagagtcgaatgctgcgtgaaacctcttttacaaagacctcaatcccattcacaagggaggagccctcattgcctaatcat

SEQ ID NO: 1029439 - DNA, 120 bp, Artificial Sequence
  ENSG00000268364_16 (sequence is synthesized)
cacctgttaagggtcttgtctcttaattctgttacactggccattaagtttcaacacctgaaatttggaggagacacattcaaatcatagcagcaggtcactgattgttatctttatttt

SEQ ID NO: 1029440 - DNA, 120 bp, Artificial Sequence
  ENSG00000268364_17 (sequence is synthesized)
acatataaggaaactgaggctcagcgaagtcatgtaattattccccaggttatgcaggcagcaaatggcagaggcagctcattgtttggtctttccataccatgctgtactgtagaattt

SEQ ID NO: 1029441 - DNA, 120 bp, Artificial Sequence
  ENSG00000268364_18 (sequence is synthesized)
ggaaaggtttattgcatcaccagttagtaagtcaggaactatagctcccttggaattgctacatatgatgatgtattgattctgatagacacaaaataaactgacatatttatagtgtga

SEQ ID NO: 1029442 - DNA, 120 bp, Artificial Sequence
  ENSG00000268364_19 (sequence is synthesized)
gaagacatgaaggcatcagggacactgtgcgagtgggcactgctgctttccactgctctccctagactgcagccaggaggctgcctctgccctgccaggcgcacacaccaagaaaggcca

SEQ ID NO: 1029443 - DNA, 120 bp, Artificial Sequence
  ENSG00000268362_0 (sequence is synthesized)
ggagagacgcacagctaagatgtcaggacatcctggaagctgggaaagggtcttgccatctctaagctggacctggtgacctttttggagggaaagaaagagccctggactgtgaagagt

SEQ ID NO: 1029444 - DNA, 120 bp, Artificial Sequence
  ENSG00000268362_1 (sequence is synthesized)
gaggagaccatagctgcacagccagatgtataatctcatccctgaacatttctgatggtgtgattatgacatgtgactttatctggcaacagagtgagttgttgctcccgcctgagccca

SEQ ID NO: 1029445 - DNA, 120 bp, Artificial Sequence
  ENSG00000268362_2 (sequence is synthesized)
gcccccagaaaggattgtgacatatcgttggacccagaattgaggtgcagttttgacacacttctgtctagcagctgagtattgtgatcttcagaactggcccagcctacaaataggatt

SEQ ID NO: 1029446 - DNA, 120 bp, Artificial Sequence
  ENSG00000268362_3 (sequence is synthesized)
cagagccttgcacccagaaggcattgagacatggctgggctcagcactaagaagatgtgagtcctctgcctgaagcctgaccacagggagcattgtgacacatttcttgacccattacaa

SEQ ID NO: 1029447 - DNA, 120 bp, Artificial Sequence
  ENSG00000268362_4 (sequence is synthesized)
tctcttctacgggcaaagctgaggtggaattgtgacatataacttggccaagcacacagatgtaatggtgtggtgactctcatacctagaactgggacctgtgcaggattgttaattcat

SEQ ID NO: 1029448 - DNA, 120 bp, Artificial Sequence
  ENSG00000268362_5 (sequence is synthesized)
tactggacattcctgtgggtgtgattgttacatatgcctatgttcagcacccgagtgatttgattttgctgcctggtctcagtccaaatgtaagattgtgatttatcgctgaatccagca

SEQ ID NO: 1029449 - DNA, 120 bp, Artificial Sequence
  ENSG00000268362_6 (sequence is synthesized)
ctgcaaattttgggtattgtcaattattgctgaatcctgtacccatgttatgactctcccaaatgtgccttacctgttgtggcacaatatatcacattagacattgttaaatattgttgg

SEQ ID NO: 1029450 - DNA, 120 bp, Artificial Sequence
  ENSG00000268362_7 (sequence is synthesized)
tctgggcctgcctacaggggaccttgtgacataactcaatgcccatcatcatggtaatgttactctcttctcctgcctgatctctgctcacagagaaattgtgacacatcactggcctag

SEQ ID NO: 1029451 - DNA, 120 bp, Artificial Sequence
  ENSG00000268362_8 (sequence is synthesized)
catctaggtgatgtgactctcctctttttttcaggctctgcatatttgggtattgtgacatattgctgaactcaacacctaagggatgggagtctcctacctaggcccttcctacagggg

SEQ ID NO: 1029452 - DNA, 120 bp, Artificial Sequence
  ENSG00000268362_9 (sequence is synthesized)
acattgtgacatgtctctgcattcctcatccaggagatgtgactctccttttctgcctacaccctgcctacacagaaagttgtggcatattgctgtggtcagcaaccagatgatatattt

SEQ ID NO: 1029453 - DNA, 120 bp, Artificial Sequence
  ENSG00000268362_10 (sequence is synthesized)
ctcctgcctgggtctttattacaggaaagatgattgacatattactgggcccagcatccagatgatgtgactctcttcttctgttggtccttgcttacagggaaactgtagcatattgct

SEQ ID NO: 1029454 - DNA, 120 bp, Artificial Sequence
  ENSG00000268362_11 (sequence is synthesized)
acacccaacacctagcttatgtgattcttcttttaggtttgccttcagggaacattgtgacatattgctgggccctgcactgataatttgtgactcttctgcctgtgatttgcccacttg

SEQ ID NO: 1029455 - DNA, 120 bp, Artificial Sequence
  ENSG00000268362_12 (sequence is synthesized)
gggcattgtgacatattgctgggtttaacactcaggtgatgtaacttttatgcctaggccttgcttacaggaggcattttgaaatgtctttgtggctgggcatggtggctcatgtctgta

SEQ ID NO: 1029456 - DNA, 120 bp, Artificial Sequence
  ENSG00000268362_13 (sequence is synthesized)
ttggggtccctgacttcctgcaacatatctctgcatccatgacctaaatatgtgactcctctattctggctgcacccagcttacaggaagattatgacattttgctaagtaaagtgtatc

SEQ ID NO: 1029457 - DNA, 120 bp, Artificial Sequence
  ENSG00000268362_14 (sequence is synthesized)
agtgtatcttgtgctgatctcctatgttattctgtgactaagaatgcctaacctggggttgcagcccagtaggtctcagcctcgtttcacctcaacactattcaagatggagtcgctctg

SEQ ID NO: 1029458 - DNA, 120 bp, Artificial Sequence
  ENSG00000268362_15 (sequence is synthesized)
gtgaataagaaatggaagacctaggatgggctattctgaaagatttagcaatatttgtatttgtcaaaatttaagttttccgttaatacttctgaatagatacattgttttattctgtca

SEQ ID NO: 1029459 - DNA, 120 bp, Artificial Sequence
  ENSG00000268362_16 (sequence is synthesized)
agtttaaatagatacgcttgataatacaaggagttcccactgtgaaagaaaaataaatctcctgatgccaaaattactaatccaatagaaaagtcaagctggagactacatcaggcaaac

SEQ ID NO: 1029460 - DNA, 120 bp, Artificial Sequence
  ENSG00000268362_17 (sequence is synthesized)
ctgtttcctattttattcttaaataagatagctacacagataaaaagctacatacctacctcacaatttgctcagaaggaaattcctagtgaatagatgacagacagaactcaaagttat

SEQ ID NO: 1029461 - DNA, 120 bp, Artificial Sequence
  ENSG00000268362_18 (sequence is synthesized)
ctctctgaggctcacctgagacaaatgcagatctgtttgtttcctctgccctattgttaattttaaaatgcagattcactgagccaggctaaattgtgtattcagtgggagacttatcaa

SEQ ID NO: 1029462 - DNA, 120 bp, Artificial Sequence
  ENSG00000268362_19 (sequence is synthesized)
ggactcaaataaatttattattttttctcttatctacttatgacttggaagccccaacctcaagttttcctgtcttacctgaccacaccaatgtacatcttaaacatgttattgatgtct

SEQ ID NO: 1029463 - DNA, 120 bp, Artificial Sequence
  ENSG00000268362_20 (sequence is synthesized)
gaccacaccaatgtacatcttaaacatgttattgatgtctcttgactttctaaaatgtattagaagactgtaccccaaccaccttgggcacctgtcatcaggacctcctgaggctgtgtc

SEQ ID NO: 1029464 - DNA, 120 bp, Artificial Sequence
  ENSG00000268362_21 (sequence is synthesized)
ggtttccggcatttggctgggcctttgtctctcgctcccaccagagcttggaatccgtctctgctcttctgcattctccacctcgggagcccctggggactctgtgacggcctctgttgc

SEQ ID NO: 1029465 - DNA, 120 bp, Artificial Sequence
  ENSG00000268362_22 (sequence is synthesized)
gtccggagagacgcacagctaagatgtcaggacatcctggaagctgggaaaggtaaatcttgctactgctcactctttgggtgcacgctgcttttaagagctgtaacactcaccgtgaag

SEQ ID NO: 1029466 - DNA, 120 bp, Artificial Sequence
  ENSG00000268362_23 (sequence is synthesized)
agaccaagaacccaccaattccggacaaaccagtacctgtgtcttccctacaggtcttgccatctctaagctggacctggtgacctttttggagggaaagaaagagccctggactgtgaa

SEQ ID NO: 1029467 - DNA, 75 bp, Artificial Sequence
  ENSG00000268362_24 (sequence is synthesized)
aaaacaaaacaaaacaaaacaaaacaaataaaaccacaaaaatcagccaggtgtggtgattggtgaagtccagga

SEQ ID NO: 1029468 - DNA, 120 bp, Artificial Sequence
  ENSG00000268362_25 (sequence is synthesized)
aaaataaaataaaataaaataaaaatacaaatgtctttgcaccaatcctacaggtgatgtgactctcttgtgttacctggtctctgcccccaggaagaattgtgacctttcacagcgtat

SEQ ID NO: 1029469 - DNA, 120 bp, Artificial Sequence
  ENSG00000268362_26 (sequence is synthesized)
tgcccccaggaagaattgtgacctttcacagcgtatagctaatttttttcttttatttcttagtttttctcctgcaggaaagattgtgaaatattactgaactaagcaccaaagggatat

SEQ ID NO: 1029470 - DNA, 120 bp, Artificial Sequence
  ENSG00000268362_27 (sequence is synthesized)
attttttttcttggacctgcccatgtaagaccttgtgacatattgctgggccctacacctagatgatgtgagttttctgcccgtcaactattttatgtgactctcctctcttatcttcac

SEQ ID NO: 1029471 - DNA, 120 bp, Artificial Sequence
  ENSG00000268362_28 (sequence is synthesized)
tttgtccataggttagcttttaatatacctttgggcctgggtcatgctaatagaagcaagagtgacttattgttgggcccagcacacaggggatgtgattcttctgcttggttcctgccg

SEQ ID NO: 1029472 - DNA, 120 bp, Artificial Sequence
  ENSG00000268362_29 (sequence is synthesized)
aaatggtcattgtgacatatctatgggtcagttggctaaatgacaggactctttttatctttctggagcagtccacagtaggaaatttgacatatcgctgggcccagcacatatctgatg

SEQ ID NO: 1029473 - DNA, 120 bp, Artificial Sequence
  ENSG00000268362_30 (sequence is synthesized)
tgactctcctctcatgccaaggccttgcctactgtagtgattgtgccatatagctgggcccagctcctacgttatctgactcctgttttcttcctgagccctatgaaaagattgcattat

SEQ ID NO: 1029474 - DNA, 120 bp, Artificial Sequence
  ENSG00000268362_31 (sequence is synthesized)
aaaaaagacattaacatatctcagagccttgcacccaggtaatgtgagtctcctctcctgccttgctgctgcacacagaagcgggttatgtacaggattgttaatctcatttggaccttc

SEQ ID NO: 1029475 - DNA, 120 bp, Artificial Sequence
  ENSG00000268362_32 (sequence is synthesized)
ctgcacctatgattgtgacacatgcctctgtgtagaacccaagtgagttttctctcctgtttggatttaacccacagatggaatcgtgacatatcgctgcaccagaaactaggtggaatt

SEQ ID NO: 1029476 - DNA, 120 bp, Artificial Sequence
  ENSG00000268362_33 (sequence is synthesized)
ggagagacgcacagctaagatgtcaggacatcctggaagctgggaaaggatctcttcccagggtgaaaggggactgagggcttggaagaaagaagttctgaaaacagactccctgccctc

SEQ ID NO: 1029477 - DNA, 120 bp, Artificial Sequence
  ENSG00000268362_34 (sequence is synthesized)
aacctgctaccaccaatgatttccgcctactaatgaacatacccactaggaatgggtgtggccagaatcttcacaaaacaagaagacttgatctgaggaattactctatagtggctttac

SEQ ID NO: 1029478 - DNA, 120 bp, Artificial Sequence
  ENSG00000268362_35 (sequence is synthesized)
atcaccctgggcttgtggactaccaatcataatctcatccacctgcatggacacaggaatatgtcagaacataaccctgcctgaatcagtatctgtagcataaaccagtctttccagcta

SEQ ID NO: 1029479 - DNA, 120 bp, Artificial Sequence
  ENSG00000268362_36 (sequence is synthesized)
ccatgcactgtcccccactcacgggtccttgatagcacctttccctcttctgtcttttgcttttctacaaaccctttctgatgtgcacagtgtgcctcaggtgcctgaatccagcaccta

SEQ ID NO: 1029480 - DNA, 120 bp, Artificial Sequence
  ENSG00000268362_37 (sequence is synthesized)
ctgggagtcagatgtccatgagttcaagattatagccctagacctggctgtcataagaacagacaaaaattagaaatacagtcttcatccttgaaaataaaagatttttctctttccttt

SEQ ID NO: 1029481 - DNA, 75 bp, Artificial Sequence
  ENSG00000268362_38 (sequence is synthesized)
gccacgcccagagatggggttccatcatgttttccaggctgatctcaaactcccacggtcaagcgatctgctggc

SEQ ID NO: 1029482 - DNA, 120 bp, Artificial Sequence
  ENSG00000268362_39 (sequence is synthesized)
attgagcacctgagtgatctgactctcttgcctaagaccagcccacagatggaatagtgacacatagctgaacccagaactgaggggatgtgattctatttttctgcattggtgctgctc

SEQ ID NO: 1029483 - DNA, 120 bp, Artificial Sequence
  ENSG00000268362_40 (sequence is synthesized)
acaggggacattgtgacatatcgctggaccttacacttaaatgatttgagtctcctcccctgccttggcactgcctacggaaggcgttgggacatgtctctgagccctatgcccaggtta

SEQ ID NO: 1029484 - DNA, 120 bp, Artificial Sequence
  ENSG00000268362_41 (sequence is synthesized)
tgtgactctcctgcctgttccccgaccacataagcaattgtgacatattgctgggtttgacaccctggtaatgtaactctactgccaaaaaggagcattatgacatatatttccattcat

SEQ ID NO: 1029485 - DNA, 120 bp, Artificial Sequence
  ENSG00000268362_42 (sequence is synthesized)
agacttagaggccggccactgaggtgggccaccttggggggaataagtttccaacggggacagcttcaggccgcaagcgccacacatggcccagggtggaactggtgggcttctgcctcc

SEQ ID NO: 1029486 - DNA, 120 bp, Artificial Sequence
  ENSG00000268362_43 (sequence is synthesized)
gccatgagctggcttctccttctggctgccaggtctacaggatgtcggccacaagcgtaggacttggtcgccagcttaaaatgtttaagggggaccagatggttctcgccagtgcagtac

SEQ ID NO: 1029487 - DNA, 90 bp, Artificial Sequence
  ENSG00000268362_44 (sequence is synthesized)
agttgttgctcccgcctgagcccagcccccagaaaggattgtgacatatcgttggacccagaattgagaatctcactctgtcacctagga

SEQ ID NO: 1029488 - DNA, 120 bp, Artificial Sequence
  ENSG00000268362_45 (sequence is synthesized)
gtgtcatatcgctgggccccacacataggttatgtgactcttctgcctgtgccctgcccatgtggcccattgtgacatactgttgggtcccaaacctaggtgatgtaactctactgctta

SEQ ID NO: 1029489 - DNA, 120 bp, Artificial Sequence
  ENSG00000268362_46 (sequence is synthesized)
ggccctgcctacagaggacattgtgacatatccctgcatccatcacacaggtttttgcccacaggggatattgtgacatgtcactgggcctaatactagggtgacagtactcttgtgtca

SEQ ID NO: 1029490 - DNA, 120 bp, Artificial Sequence
  ENSG00000268362_47 (sequence is synthesized)
tggcactgccctcagcaggtgtggtgatatattactgggcccagaacaaatgtgatatgagtctcctgcctggaccctgcctacaaggtgcattgtaacatatctggggccctttgacta

SEQ ID NO: 1029491 - DNA, 120 bp, Artificial Sequence
  ENSG00000268362_48 (sequence is synthesized)
aggccgatatcaaactcctgacctcagccagtccacccgccttgacctcccaatgtgctgagattacaggtgtgaaccattgctcttggcaccctttgactattttatgtgactcttctc

SEQ ID NO: 1029492 - DNA, 120 bp, Artificial Sequence
  ENSG00000268362_49 (sequence is synthesized)
tcttacctggacattgaccaaatgggcccagcaccaaggtgatatgactctcctctcctgcctgggccttgcccttagaagagagagtgacttactgctgaatttagcatacaggtgata

SEQ ID NO: 1029493 - DNA, 120 bp, Artificial Sequence
  ENSG00000268362_50 (sequence is synthesized)
tgattcttctgctgactcgcagaagtcactgtaacatatatgtgggcccattgctgaggttgtgtgactctcttctccctgggacctgtccacagtagggattgtgacatattgcttggc

SEQ ID NO: 1029494 - DNA, 74 bp, Artificial Sequence
  ENSG00000268362_51 (sequence is synthesized)
gggacctgtccacagtagggattgtgacatattgcttggccaagcacctacattgtgtgactttttatttattt

SEQ ID NO: 1029495 - DNA, 120 bp, Artificial Sequence
  ENSG00000268362_52 (sequence is synthesized)
gccttggcctcccaaagtactgggattccaggcatgagccactgcacctagcttcgatatgactgtcttcttatgccagggccctgccgactggagtgattttgacacatagctggggcc

SEQ ID NO: 1029496 - DNA, 120 bp, Artificial Sequence
  ENSG00000268362_53 (sequence is synthesized)
gccctgccgactggagtgattttgacacatagctggggccagctcaaatgttatgtgactccacacttcttcctgagccctatctgtgaggggcactgtgtcttatctctgagaccgtta

SEQ ID NO: 1029497 - DNA, 120 bp, Artificial Sequence
  ENSG00000268362_54 (sequence is synthesized)
tatctgtgaggggcactgtgtcttatctctgagaccgttaattaggtaatataacttttatttttttgagacagagtctggctttgttgccccggctggagtgcagtggtgtgatcttgg

SEQ ID NO: 1029498 - DNA, 89 bp, Artificial Sequence
  ENSG00000268362_55 (sequence is synthesized)
aatgtaactcttttgtttggactgtcttcttggggtattgtgatatattgctgggcccagaatccgggtgatgtgactctgctgtttca

SEQ ID NO: 1029499 - DNA, 120 bp, Artificial Sequence
  ENSG00000268362_56 (sequence is synthesized)
gctgggcccagaatccgggtgatgtgactctgctgtttcatctctgcacaaaaagggattgtgacataccactgggtcaagaacctagatgaggtgactctcctctccagcctgggacct

SEQ ID NO: 1029500 - DNA, 120 bp, Artificial Sequence
  ENSG00000268362_57 (sequence is synthesized)
gcacacattgtgtactaagacatatcactgagtctaacacctaggtaatgcaactctcctgcatgggccctgcccataggggtattatgaaatatctttctgttaatcacctaggtgatg

SEQ ID NO: 1029501 - DNA, 120 bp, Artificial Sequence
  ENSG00000268362_58 (sequence is synthesized)
cgacactcctcttctacctgggaactgccaaaacaagtattggtacatatcactgggcccagcacataggtgatgtgactcttttctcatgcatgggctctgcgaactggggtgtttttt

SEQ ID NO: 1029502 - DNA, 120 bp, Artificial Sequence
  ENSG00000268362_59 (sequence is synthesized)
acatatagttgggcctaaaccctaggtcgtgtgattcttttattttcctgagctgtactcacagagagcattttgacatgtttttgggcccgtaatttagatgatgtgactctcttggat

SEQ ID NO: 1029503 - DNA, 120 bp, Artificial Sequence
  ENSG00000268362_60 (sequence is synthesized)
gggccttccccggaatgggtattgtgacatattgctgagcccattatataggtgatgtgactctcttgcatgggccctccacataaggggtagtgtgacatattgctgagcccagtaggt

SEQ ID NO: 1029504 - DNA, 120 bp, Artificial Sequence
  ENSG00000268362_61 (sequence is synthesized)
gatgtgactcttctctatggtttgggctttgcccaagcagggattgtgatgtgttgctggactcaccacctatgtgttgtgactctcctcttctgcctaagccctgcatgcattgtgtgt

SEQ ID NO: 1029505 - DNA, 120 bp, Artificial Sequence
  ENSG00000268362_62 (sequence is synthesized)
tgtgacatgcctggattcaacacctaggtgatacaactttatggcaggggaaccacccacagaagtattgtatcatctttccatcacttaggtgatgtgattcttttatttttcctgttt

SEQ ID NO: 1029506 - DNA, 120 bp, Artificial Sequence
  ENSG00000268362_63 (sequence is synthesized)
ctggcatattttgggtatagtgacataccattgagttcaacacccatgaaatcggaggcttctgcctgagcccagcacataagtgaccttgtgacatatctttgcattcattatctagga

SEQ ID NO: 1029507 - DNA, 120 bp, Artificial Sequence
  ENSG00000268362_64 (sequence is synthesized)
gatttaactcccctttttgcctgcaccctgaccactgggaagattgtggcaaatcaccggtctcagcaatcaagtgatgtgtttttcctgcctggtccttgcccacagatcattgtaaca

SEQ ID NO: 1029508 - DNA, 69 bp, Artificial Sequence
  ENSG00000268362_65 (sequence is synthesized)
tgcaactataatgttttgctaagttctgtcttgccatctctaagctggacctggtgacctttttggagg

SEQ ID NO: 1029509 - DNA, 120 bp, Artificial Sequence
  ENSG00000268362_66 (sequence is synthesized)
attctccacctcgggagcccctggggactctgtgacggcctctgttgccctgtgatctgcaggtccggagagacgcacagctaagatgtcaggacatcctggaagctgggaaaggagtct

SEQ ID NO: 1029510 - DNA, 87 bp, Artificial Sequence
  ENSG00000268362_67 (sequence is synthesized)
gcacctccaggctccctagtacctgggactacaagcaggcgacccgacgcccagctaatttttgcggggtttcaccattttggccag

SEQ ID NO: 1029511 - DNA, 120 bp, Artificial Sequence
  ENSG00000268362_68 (sequence is synthesized)
aactaggtgatgtgactccatttccttgcctctgtgctttccacattaggcattgggacatatcactgggccttgcatccaggtgatgggagttttctttttctttctttctttctttct

SEQ ID NO: 1029512 - DNA, 85 bp, Artificial Sequence
  ENSG00000268362_69 (sequence is synthesized)
aggcaacctccgcctcctgggtttaaacaattctgtctcagcctcccaagtagcttagattacaggcatgcgccaccacgcctgg

SEQ ID NO: 1029513 - DNA, 120 bp, Artificial Sequence
  ENSG00000268362_70 (sequence is synthesized)
tgggattacagttgtgagccaccgtgcccggccagtgatgggagttttctctcctgctttggtgctgaccacagtgagcattgtaaaatattgctgccatcacccctagattatgttaac

SEQ ID NO: 1029514 - DNA, 120 bp, Artificial Sequence
  ENSG00000268362_71 (sequence is synthesized)
cctagattatgttaactctcctctgctttgcccacgtggttcactgtgacatattactgggtctaaaacccagaaaatgtaactcccttatttaggttctgcctgcaggagccattgtca

SEQ ID NO: 1029515 - DNA, 120 bp, Artificial Sequence
  ENSG00000268362_72 (sequence is synthesized)
cacatctctgtgctcaccacccaggtgatgtgactgccttttactgcctagttccttctcacaaaacatcttgtggcatactgctaggcccagtacctggctggtgtgactcctctcttc

SEQ ID NO: 1029516 - DNA, 120 bp, Artificial Sequence
  ENSG00000268362_73 (sequence is synthesized)
tttctaggttccacctgcagcaaagattgtaacataccgctgggcccaacagcataatgacgttattcttttgccttgggcctgccctcagaaggcactataaaatattcatggccccag

SEQ ID NO: 1029517 - DNA, 120 bp, Artificial Sequence
  ENSG00000268362_74 (sequence is synthesized)
cgccaaggtgatgtgtgtctccagcctggatcctgcccacagagggcattatgacatatctcttggcccatcagatgtttaatattatctcctcccatttcctaccctgtgtttgcctgt

SEQ ID NO: 1029518 - DNA, 120 bp, Artificial Sequence
  ENSG00000268362_75 (sequence is synthesized)
aagagacattgtcacatgttcctgggcccagcacctaggtgatgtcttcctgagacctgtccatatggggattgtgatatattgtgtggcccagaacttacttgatgcgactctcctctc

SEQ ID NO: 1029519 - DNA, 120 bp, Artificial Sequence
  ENSG00000268362_76 (sequence is synthesized)
gattgtgacacacagcttggcctagcccctaagttatgttactctgctcttattcttcagtcattttcacagggggcattgtgacatattgctagactgagaacttaggtgatgtgactc

SEQ ID NO: 1029520 - DNA, 120 bp, Artificial Sequence
  ENSG00000268362_77 (sequence is synthesized)
tcctctactgcttggaatattcccaaaaagagagtttgatatattgcttagccaggatcctaggtgatgttactcttttctcctgcctaaaccctgcatacattatgtattttggcactg

SEQ ID NO: 1029521 - DNA, 120 bp, Artificial Sequence
  ENSG00000268362_78 (sequence is synthesized)
gggccacaacctaggtgatgtaactctcctgcatgggctttgcctacaggggtatgatgatgtttcttttctttcatcacccaagtggtgtgactctccacttatgcctgggtcttgatg

SEQ ID NO: 1029522 - DNA, 120 bp, Artificial Sequence
  ENSG00000268362_79 (sequence is synthesized)
aaagaggaattgtgacatatccctggccctagcacttaggtgatgtaacttgcctttattgccagggcatggcatattatgaatattggacgtatctctgggactgacacctaggggatg

SEQ ID NO: 1029523 - DNA, 120 bp, Artificial Sequence
  ENSG00000268362_80 (sequence is synthesized)
agaggttcctgccttggccctgcccacaggaggctttgtggcatgtctctggcctcattacctagaaagatgtgactcttctcttctacctgcattcttcccacagagaagattgtgaca

SEQ ID NO: 1029524 - DNA, 120 bp, Artificial Sequence
  ENSG00000268362_81 (sequence is synthesized)
tcactggatccagcaattagaaaatgtttctctcctgcctgagccttgcccacaggaatattgtgacatatccttgggctcagcacccaggtgatggaactctgccacctgtgccctgtc

SEQ ID NO: 1029525 - DNA, 120 bp, Artificial Sequence
  ENSG00000268362_82 (sequence is synthesized)
tacttaggctattgtgaagctggtttcaatacccaggtgatgtaacattcctgccaggccactgccttccagggatattgttacgtacctttgtgccaatcaccaaggtgatgtgaatct

SEQ ID NO: 1029526 - DNA, 120 bp, Artificial Sequence
  ENSG00000268362_83 (sequence is synthesized)
tttcacctgcctagtccttgttcactaggggataatgatatctattgctggtttcagcaccaagctgatgttacttgcctcttcttcacagattctgctcacagaaaaactaacacatca

SEQ ID NO: 1029527 - DNA, 120 bp, Artificial Sequence
  ENSG00000268362_84 (sequence is synthesized)
ctaggcccatcagcgaaattattttgcctggccctgcccttaaaagacattgtgacatactacagtgcccagcatcaatgtaatttgtctcctgcctaaaccctgcctactgggggcatt

SEQ ID NO: 1029528 - DNA, 120 bp, Artificial Sequence
  ENSG00000268362_85 (sequence is synthesized)
gtgacatatctcttggcccatcaactatttgatgtgactctactttcttacctgggctttgccaatagtagagcttgtgacctatctctgggcccagcacctagatgttatgactctccc

SEQ ID NO: 1029529 - DNA, 120 bp, Artificial Sequence
  ENSG00000268362_86 (sequence is synthesized)
gcctggtccatgcacacaaaaaagagagtgacttatactaggatcaacacacaaatgattctattcttctgcattatcccagcccacatggcttattgtgacatctctaggttcatcatc

SEQ ID NO: 1029530 - DNA, 120 bp, Artificial Sequence
  ENSG00000268362_87 (sequence is synthesized)
tagatgatatgactctccttcctgggaactgtccataatgaagattgtgacacatcacttggcccagcacctatgtgatatgactcctttcttttgcctgggcctatcagtttgggtgat

SEQ ID NO: 1029531 - DNA, 120 bp, Artificial Sequence
  ENSG00000268362_88 (sequence is synthesized)
tgtgtcatatagctttactcagcaccttgattatgtgactctcctgtttctcctgagtcctacccacagaggtcattgcaacatatccctgagcccctaatttaggtaatttgactcctg

SEQ ID NO: 1029532 - DNA, 120 bp, Artificial Sequence
  ENSG00000268362_89 (sequence is synthesized)
cctgggccctaccctcattgatttttgtgacatagtttttgactcagcacctaggtaatgtgattcttctccactgcttggactctgtcacagaaggtattgtgatgtatcactggggct

SEQ ID NO: 1029533 - DNA, 120 bp, Artificial Sequence
  ENSG00000268362_90 (sequence is synthesized)
gacacctaggtgaaggtactgtcttctcctgcctgggccctgcataaattgtatattttgacatttcactaggttcaacacatgggtgattcaactctctcacatggaccgtgagcatgg

SEQ ID NO: 1029534 - DNA, 89 bp, Artificial Sequence
  ENSG00000268362_91 (sequence is synthesized)
ggagcattgtgacacatttcttgacccattacaatctcttctacgggcaaagctgagatggagttttgctccttttgcccaggctggat

SEQ ID NO: 1029535 - DNA, 120 bp, Artificial Sequence
  ENSG00000287180_0 (sequence is synthesized)
atacgggacgcttaatgaaggaccgcattcaaaagggattacgccttgaagtgtcctggcgggcgacatttttacagattttaaggggcaaatttagaacagctaaaaaaaaggtttcaa

SEQ ID NO: 1029536 - DNA, 120 bp, Artificial Sequence
  ENSG00000287180_1 (sequence is synthesized)
agccgtgactactaaaagagcatctaggcctcccattttatcaggaggaattcaacttagaaaatgcaggtagtgtcatacaaactgaaatggagatacaatcctgatagaagattacac

SEQ ID NO: 1029537 - DNA, 120 bp, Artificial Sequence
  ENSG00000287180_2 (sequence is synthesized)
acttcttggaggaaggaaagaaaagtacaacagcttcttcagagaaaagaacaaattggcataggaaagaagaaagacacttcgtttaaagaatgtattttgcagtaaatgcccacaaac

SEQ ID NO: 1029538 - DNA, 120 bp, Artificial Sequence
  ENSG00000287180_3 (sequence is synthesized)
agcccatagagagttcacttatttatgcatcaccatatgattattctgactgcctttagtctcaaacagggaaagcctccgcaaaaagcattctccaggtgttagtttaggtttgtcatt

SEQ ID NO: 1029539 - DNA, 120 bp, Artificial Sequence
  ENSG00000287180_4 (sequence is synthesized)
ggggtaaatgtgattaaacgagtcctctgaagataagaagttacatggacaagggtcattaacacaaatgacctctttttgccagaacatatttttttaatttagtggatttgaaaaaaa

SEQ ID NO: 1029540 - DNA, 120 bp, Artificial Sequence
  ENSG00000287180_5 (sequence is synthesized)
ctgcaaagcaagaataatctctactgcacatactcacagagaaacatatcccttttattctaataaatattttcatgactcttcagtattttaataacatactgataatgccaaaatact

SEQ ID NO: 1029541 - DNA, 120 bp, Artificial Sequence
  ENSG00000287180_6 (sequence is synthesized)
ctcagaatacaccaagaacaatattggagggatcatttatcttaaggagtctaatcggaaacacttaagcaacatagttataatcagacaagacatataacaccaagaatgtaagttagt

SEQ ID NO: 1029542 - DNA, 120 bp, Artificial Sequence
  ENSG00000287180_7 (sequence is synthesized)
agatcatgggaatcaaatggaaagctgaaatttgtaaagtttcaattaaaacatctacactctttctttcacctgatcgtagccccatatggcaaggtcagccctttcagtgaacaaaca

SEQ ID NO: 1029543 - DNA, 120 bp, Artificial Sequence
  ENSG00000287180_8 (sequence is synthesized)
gctcagtcgcctccagtgtagctgttatcttcctcaacaaggggagacatttggcacagcctaaagctggggcatgaaccctggctaagcttaagacatttatctgacagcatcagctga

SEQ ID NO: 1029544 - DNA, 120 bp, Artificial Sequence
  ENSG00000287180_9 (sequence is synthesized)
cactccacaaacacatttgctctccatgacctcagagcattcgtgattaatcaaaaatgtatcttggatcttgagaacaagctacaaccaggcacacacaaaaaagaatatgctctcgat

SEQ ID NO: 1029545 - DNA, 120 bp, Artificial Sequence
  ENSG00000287180_10 (sequence is synthesized)
ctcacttatcgactcaagaggtatattgaatttagaaatagcaaatagaataaaatgatcaatatgttctcacttgtccatggaagagcaaactttatccctcaagccaaagacattgat

SEQ ID NO: 1029546 - DNA, 120 bp, Artificial Sequence
  ENSG00000287180_11 (sequence is synthesized)
catgtaaatgtttcagaactgctttcagactcaataatgcaaaatgcacatggtttattgggggtagagaaggaggcctgccaaagaggagcttttgctttaacttaaaaaaatatatag

SEQ ID NO: 1029547 - DNA, 120 bp, Artificial Sequence
  ENSG00000287180_12 (sequence is synthesized)
cttgaagacataaagcattatgcttgtagtgtgctatatttttttacaaactgtgtgttcagcctaaaaccttttttggtaacatgttgctgaatgttctcaataaagcattataaagga

SEQ ID NO: 1029548 - DNA, 120 bp, Artificial Sequence
  ENSG00000287180_13 (sequence is synthesized)
gactttaaaacttaatgaaggaacattatttgtgcagagaaaactccctgtcttaatttaaatgagacacagttataacatatcccctatgcactgtttacaatttataatttataattt

SEQ ID NO: 1029549 - DNA, 120 bp, Artificial Sequence
  ENSG00000287180_14 (sequence is synthesized)
atgtctcttggttcaaactcactattttctaagtaatgattaacatgtgaatactgtaatattctgcttctcaaccagtacagtttagtatattttcattttcatttgtacttttcactt

SEQ ID NO: 1029550 - DNA, 120 bp, Artificial Sequence
  ENSG00000287181_0 (sequence is synthesized)
atcacaagaccatctttgctagccaggcctcctcttctctccttctcataacctgttttgccgtgatccaagcccccgttctttctgtaacaagatggtatataagcttttgcaccccac

SEQ ID NO: 1029551 - DNA, 120 bp, Artificial Sequence
  ENSG00000287181_1 (sequence is synthesized)
tggggcaggggtgggtgatcactctgtgatgctccccatgtacacattcataaaatgtgtatgccttttctcccattaatttgccttttgtgagttgacttttttgtaaactgtctgagg

SEQ ID NO: 1029552 - DNA, 120 bp, Artificial Sequence
  ENSG00000287181_2 (sequence is synthesized)
gtaaaggggaagtgttctctccctttgccctacagttttggcactgtgagcaggatcaccaaagccgctctgtttttttggaagcagcagtgaggggaatctaagccctgattggccagc

SEQ ID NO: 1029553 - DNA, 87 bp, Artificial Sequence
  ENSG00000287181_3 (sequence is synthesized)
cctgagtagctgggattacagatgcctgctactatgcctggctaatttttgctatcaggacacagttagaggcactgattttcagac

SEQ ID NO: 1029554 - DNA, 120 bp, Artificial Sequence
  ENSG00000287181_4 (sequence is synthesized)
aaggctttgactggaatggcatattttcagacatgaacagactgctttaaggaattcacattgactttattgagctgctaagacatcccttggacagactggcctggtaatttttctatg

SEQ ID NO: 1029555 - DNA, 120 bp, Artificial Sequence
  ENSG00000287181_5 (sequence is synthesized)
cagttcctttacaaggttcctgagctgtggtgagaatgcaacattctgacaggcccatgcacctcaagttattttgagacctcaagaaaagagaaattcatccaatttgtacaggtattg

SEQ ID NO: 1029556 - DNA, 120 bp, Artificial Sequence
  ENSG00000287181_6 (sequence is synthesized)
gtcagattgccactgcagtccaaagatgctccagagactccagaaagactattctatagactactccagtcattaaccttaatttttcttctgtatccatagaaatgcctcttattaaag

SEQ ID NO: 1029557 - DNA, 120 bp, Artificial Sequence
  ENSG00000287181_7 (sequence is synthesized)
atctgttttcctgcatcatacatagaggcctagcccatccgttatgccacctcctggaatgggacacagctgtttaattgagctgatctatcctcagaactaagagactgactaaagaag

SEQ ID NO: 1029558 - DNA, 120 bp, Artificial Sequence
  ENSG00000287181_8 (sequence is synthesized)
atatggaattctatatttaactttgctcttttctgcttatcccaattgttttttccacttttcttctatatctaacaacctctaaccaaagtctctccaaagcaatcagcttggccttta

SEQ ID NO: 1029559 - DNA, 120 bp, Artificial Sequence
  ENSG00000287181_9 (sequence is synthesized)
aaatgtgaaattttaaagtttcaaagtggggactaaaggatatcaaaatattttatcccccaaaatatatttctttgacatattttgagatggctgtcagagagctagcatacagaagta

SEQ ID NO: 1029560 - DNA, 120 bp, Artificial Sequence
  ENSG00000287181_10 (sequence is synthesized)
gccctgcaaagttatatcttgtgggggaaatttgcatctgtagaaaatctgcattgatgaagccaggccttcccttgtctagatctgggaaagattaactgagagtctgaaacaccttta

SEQ ID NO: 1029561 - DNA, 120 bp, Artificial Sequence
  ENSG00000287181_11 (sequence is synthesized)
aaggtctgaaagaaacatttgccatctattctctaacaggactgctacctgtgaagtttcaactatgtaatgagaacacctttgctagccaagcctcctcttttctccctttggtaatct

SEQ ID NO: 1029562 - DNA, 120 bp, Artificial Sequence
  ENSG00000287181_12 (sequence is synthesized)
gttttgccacagccgaagccctcattctttttgtaacctcaagatggcatttaagcttctgcattccattgcggggttgggtaatcactcagtaatgttccccatgtgtatgctaataaa

SEQ ID NO: 1029563 - DNA, 120 bp, Artificial Sequence
  ENSG00000287182_0 (sequence is synthesized)
gaataccctgaaaaatgttggctgccatgacataaacggagtccggatagcccgttttttcgggcacaccagctgagcttttcccaccggacagaggcagggaagtgagttgggagatga

SEQ ID NO: 1029564 - DNA, 120 bp, Artificial Sequence
  ENSG00000287182_1 (sequence is synthesized)
tctcgggatcttcttcgttcgaaaactccagttcgcccgtggaattcagcatgtctgcccctcgcctgtcgtgagtccttcaccctggggttagaattccgatgttccaggaaacggctt

SEQ ID NO: 1029565 - DNA, 120 bp, Artificial Sequence
  ENSG00000287183_0 (sequence is synthesized)
gcggccggtcagaggcctcgtcctccggggcttctccctgcctaggcgctacacccaggcgcctccaactgggtcctggtcgcagcctccgcaagagtgctgcttccagaagccccaccg

SEQ ID NO: 1029566 - DNA, 120 bp, Artificial Sequence
  ENSG00000287183_1 (sequence is synthesized)
tgcaggcctcagtgtgaattggttcagttcagcaaacttttcttttaaaaaatcaccaggtactcagccataaaaaggaacaaaatcttgaccttagccgcaacatggatgcagctagag

SEQ ID NO: 1029567 - DNA, 120 bp, Artificial Sequence
  ENSG00000287183_2 (sequence is synthesized)
ttctatgcagcagtttggggacaggaacccgttccctcggaattcttgctgggtttgacccttttaacagaaggcggggacactgatggcagcctcgcagatccatataaacctcaacgg

SEQ ID NO: 1029568 - DNA, 120 bp, Artificial Sequence
  ENSG00000287183_3 (sequence is synthesized)
agaagcccaaacaagggagacacctttctgcttttgacctaacgagtaaatcactgcatgtctttttcaaaaaaaggaattgcaggctgattctgaatgtccagcagcttctgttggaac

SEQ ID NO: 1029569 - DNA, 120 bp, Artificial Sequence
  ENSG00000287183_4 (sequence is synthesized)
tcatagggctaaatgtctttcacagacggcttttatctcagacacggctataggcgtgacttattggttatttcccctctgccttcacactgataaataataaaattctaacaatcaaaa

SEQ ID NO: 1029570 - DNA, 120 bp, Artificial Sequence
  ENSG00000287184_0 (sequence is synthesized)
ggggttaggacctggagaaggagctgcccactgcttctggacagggcccagggtcccgcctggcacagagacacagggcgccagtgtgctggtcactgtgatgatgcacagtgccggaca

SEQ ID NO: 1029571 - DNA, 120 bp, Artificial Sequence
  ENSG00000287184_1 (sequence is synthesized)
cacgtgatgatgcccagaggccacctgcctagcataggacagacagcccccaaacctcccacctgctggaaggatgagaaatcaaaagagaacacaatgtttcattagaatggtgactta

SEQ ID NO: 1029572 - DNA, 120 bp, Artificial Sequence
  ENSG00000287184_2 (sequence is synthesized)
tttctggaacacctgggtttgtgggcagaaatgattccacgtgtgttctatgacccagctctccttacaggtcatgggaggagcagccatcacatgtgtagagtgttctgtagaccacag

SEQ ID NO: 1029573 - DNA, 120 bp, Artificial Sequence
  ENSG00000287184_3 (sequence is synthesized)
agcaccatgcagacgcaagcctgactttcatttctttctaagactctacagttatcccaccaaatttagtctctgaagcctcagcttctgtggtacgatgccaggtggcttcaccccagc

SEQ ID NO: 1029574 - DNA, 120 bp, Artificial Sequence
  ENSG00000287184_4 (sequence is synthesized)
cctgctcggcccccagtcgcatccacatctctctaagtatttgcaaaggatgcccatttaatgccccaaagatgaattccatgcggacattccatggggaccatctgtccacagtttgtg

SEQ ID NO: 1029575 - DNA, 120 bp, Artificial Sequence
  ENSG00000287184_5 (sequence is synthesized)
catgtcctcgcatagctcacgtttttgtgatcagttgaaaaagcagaagcatatttcccctgcatttcagatcatctagctgcgactactcaagtgcccagacttggggaaacaccacaa

SEQ ID NO: 1029576 - DNA, 120 bp, Artificial Sequence
  ENSG00000287184_6 (sequence is synthesized)
aaggtggtgtcatgctccctgcttgggaaaaaggtggaataagcatttaacccaaagccaactgggagttttcattctcacaggcagcagcaggatgcttccaggcagggccagagcctc

SEQ ID NO: 1029577 - DNA, 120 bp, Artificial Sequence
  ENSG00000287184_7 (sequence is synthesized)
actgacctgggcgcctggtgcccagatggcttctgtctggcagaggctggactggattctggtgcttgctaatgtgcaaactaccaggctgctgggtgctttctggaagcctcagaacca

SEQ ID NO: 1029578 - DNA, 120 bp, Artificial Sequence
  ENSG00000287184_8 (sequence is synthesized)
tgccatcgactaggaaaagccagagtccatgccaattccctccagatctccaggagaatggatgcagcccaagctgctcagtagaaatgctactgattggagggaacagttcttaaagtt

SEQ ID NO: 1029579 - DNA, 120 bp, Artificial Sequence
  ENSG00000287184_9 (sequence is synthesized)
caggttctctaaagtgacttaggttctaactcaggggtgggcagtgatggtaatgcaagcatggtccctaccttcaggctgctttgctggcaactcggggtgagaaagtcaaaatcttcc

SEQ ID NO: 1029580 - DNA, 120 bp, Artificial Sequence
  ENSG00000287184_10 (sequence is synthesized)
tttcggaatctccttctcctctgtcccaatctcttttccaaaactctgctttaaaacactacagcattattacttcccaaagtctttaccctttaacctctgtccaagataaaagtaaat

SEQ ID NO: 1029581 - DNA, 120 bp, Artificial Sequence
  ENSG00000287184_11 (sequence is synthesized)
tctccatagtgctccaaagtattatgctttctgtttccagatgtttcctatgttttctatttttctgaatagatttcttcacactatgaaaatctgaatcactcacaaaaacaaacaaaa

SEQ ID NO: 1029582 - DNA, 120 bp, Artificial Sequence
  ENSG00000287185_0 (sequence is synthesized)
gttgaatgaatgagcagttgacttctgccttcaccccctggagcttgaacccgcgccgcgagcgggagaagccggactcagggcagactgaatctcccggggccaccgcttagagcctgg

SEQ ID NO: 1029583 - DNA, 120 bp, Artificial Sequence
  ENSG00000287185_1 (sequence is synthesized)
aaagcagaacttttatcaccggagagctggtgcaagggaggtgggctcctcagaagtatcagaccgtttgctaggggatcctctgcagggaaattgtttagaaagccctaatttggaagt

SEQ ID NO: 1029584 - DNA, 120 bp, Artificial Sequence
  ENSG00000287185_2 (sequence is synthesized)
cctgtatccccaaactccggggaccccccaaccttaagctgaagaaacttagaccctcatgcccagacctccctttcccaaccagccagcagcccagagagcattcccgtggagaaaggg

SEQ ID NO: 1029585 - DNA, 120 bp, Artificial Sequence
  ENSG00000287185_3 (sequence is synthesized)
ccaaggcgcatccccgtcttttctccgtcaacgactgccttttcttgacgaagatcccaaaggggctgcgcatttgaaccgccttgggctccaggtggcgccctctctggagctcccctc

SEQ ID NO: 1029586 - DNA, 120 bp, Artificial Sequence
  ENSG00000287185_4 (sequence is synthesized)
ttggaattcatttcttcctggagagacttggagaatgaagatccaggggtttctccctaccttgtaccgagaagtaacattgcaagtagagtaaatgaccagcttaattacgttcacctt

SEQ ID NO: 1029587 - DNA, 120 bp, Artificial Sequence
  ENSG00000287185_5 (sequence is synthesized)
cgaagaagattcctctagagagaaattatatcctccttgcagcctgtgaaggttttcatgcgttttaggaatataaaagaaaggaagacaaacatgtagtaaagatagtaaagacagata

SEQ ID NO: 1029588 - DNA, 120 bp, Artificial Sequence
  ENSG00000287185_6 (sequence is synthesized)
aagcagtgctttgcaggctcctaaggatggttctaagtaagccaggagtaggtgatacattgtaattctgggacccatgagcttagcaggacaaaggaaaccatgaatcaccctagtccc

SEQ ID NO: 1029589 - DNA, 120 bp, Artificial Sequence
  ENSG00000287185_7 (sequence is synthesized)
agaagtaccttttcataggccccagggattccaacatcattattcactctccactctgcaagtgacttaggtcgtgagcatctctgagtctgcacaggctctgccatgtggctgtggggg

SEQ ID NO: 1029590 - DNA, 120 bp, Artificial Sequence
  ENSG00000287185_8 (sequence is synthesized)
tccggcttctctgatggatgggaagataatgctcggggctccaatgctattatctcctcatctctgtcacaaggagatttatacttatgatttacccttttcatgaacatgggaaaattc

SEQ ID NO: 1029591 - DNA, 120 bp, Artificial Sequence
  ENSG00000287185_9 (sequence is synthesized)
ttttttctagtgttgtttctggaatgttctttgctgtgtctaaatgagctgattccactgttgggagaggtggatgatgtgagcagtaagaaggcattagtttcttgaaaactagatcca

SEQ ID NO: 1029592 - DNA, 120 bp, Artificial Sequence
  ENSG00000287185_10 (sequence is synthesized)
tatttaggtgagatgaaatcaaactacctgattttaaaaaaaacaaactatgtttatttaccgtatgtcttgattcctatatacattgaaaaattatattcataaaactgtttaaaataa

SEQ ID NO: 1029593 - DNA, 84 bp, Artificial Sequence
  ENSG00000287185_11 (sequence is synthesized)
ggcccaggagttcgagaccaggctgggcaacacggcaaaaccctgtttctacaaaaaatgcaaaaattaccagggtgtggtggt

SEQ ID NO: 1029594 - DNA, 120 bp, Artificial Sequence
  ENSG00000287185_12 (sequence is synthesized)
gtttctacaaaaaatgcaaaaattaccagggtgtggtggtgtgtgtctgtagtatcagctactcaggaagctgaggtaggaggattccttgagcccaggaggtggaggttacagtgagct

SEQ ID NO: 1029595 - DNA, 120 bp, Artificial Sequence
  ENSG00000287185_13 (sequence is synthesized)
tgtacaccaaacgagagtaaacattagagaaaaatccaaagcagggaggatagggcgtgtagggtgctgctgtttttatggagtggtctgggaatgcagctctgctaagctgaggttgag

SEQ ID NO: 1029596 - DNA, 120 bp, Artificial Sequence
  ENSG00000287185_14 (sequence is synthesized)
gtgtagacctgaaggaagtgaagattccgggagaaagtattctggaaaagaggaacagcaaaggcaaaggacaccaagcgtgtttggcaggttcccaggtcacccagagatcctaggtaa

SEQ ID NO: 1029597 - DNA, 120 bp, Artificial Sequence
  ENSG00000287185_15 (sequence is synthesized)
tgagagctgagtaacaggtgagaggaaacttggtctaagaggcagaggaatgccagatagagcagaaccctggcaggcatatggactttatatattactactacaagcgaggtttggagg

SEQ ID NO: 1029598 - DNA, 120 bp, Artificial Sequence
  ENSG00000287185_16 (sequence is synthesized)
gctttgagccaacctggaacatattgaacttgcctgctgtggtatgaatccattgtaaaggggcaagggaggcccacatggatggatgttgggggctatttcagtcattcaggcaagaca

SEQ ID NO: 1029599 - DNA, 120 bp, Artificial Sequence
  ENSG00000287185_17 (sequence is synthesized)
tcaggcaagacatgaaggtagttgggtccaggaggataaggatggaggtgaaaaagatgttgggttcttgacatacgtgaaaatagagcctggccagatgtggtggctcacacctgtaat

SEQ ID NO: 1029600 - DNA, 120 bp, Artificial Sequence
  ENSG00000287185_18 (sequence is synthesized)
ggaggctgaggtgggaggattgcttaaggtcaggagttcaaaatcagcctggacaacatagtgagaccctcctctactatatatatatcctgggcatggtggctgtgcctgtggccctat

SEQ ID NO: 1029601 - DNA, 120 bp, Artificial Sequence
  ENSG00000287185_19 (sequence is synthesized)
gattgcttgagcccaggaggtcgaggctagcagtgagctatgattgcatcacagcatgaaaaagaaccaagaggagggccacatgaacggcagggggatctactactgtgaggcttcaat

SEQ ID NO: 1029602 - DNA, 120 bp, Artificial Sequence
  ENSG00000287185_20 (sequence is synthesized)
gatctactactgtgaggcttcaatcttttttggaaagttttcccccagaaagagatatgcttgtatttttctttttttttttaaagagccctacccgtatcgtacacccttcaggcccca

SEQ ID NO: 1029603 - DNA, 120 bp, Artificial Sequence
  ENSG00000287185_21 (sequence is synthesized)
cacaccttggttcttgtccctgcatgtgagatacaagctgggtcaagaatgactctaaagccagctaggtcgcacatgcctgtagtcccagctgctagggaggctgaggcaagaggattg

SEQ ID NO: 1029604 - DNA, 120 bp, Artificial Sequence
  ENSG00000287185_22 (sequence is synthesized)
caggagttccaggctgcagtgagctatgctgatcaggtgtctgcactaagttccgcatcaatatagtgacatcctgggagcaggcgaccaccaggttgcctaaggaggggtgaactggtc

SEQ ID NO: 1029605 - DNA, 120 bp, Artificial Sequence
  ENSG00000287185_23 (sequence is synthesized)
aactggtccaggtcagaaatggagcgggtcaattatttggaaagccctaatttggaagtcctatatcccaaaacttcggtactcctccttagctgaagaaattcaggcccacatatccag

SEQ ID NO: 1029606 - DNA, 120 bp, Artificial Sequence
  ENSG00000287185_24 (sequence is synthesized)
tctctgtcactgactgcattattgacaaagatcccgtagccgggacttcacatttgaactgcctcaggctccaggtggcaccctctcttgagctccccttctgatcaataatgggatggc

SEQ ID NO: 1029607 - DNA, 120 bp, Artificial Sequence
  ENSG00000287185_25 (sequence is synthesized)
acctgtgaattggcactgcatttcagcttggacaacatagcaagaccctgtctctaaacaaatattaattcaaaacaaaaagagtgactctaaggtttggggcttgaatagcaagggagt

SEQ ID NO: 1029608 - DNA, 120 bp, Artificial Sequence
  ENSG00000287185_26 (sequence is synthesized)
agagttgccattgtcttggtcaccatttatatctatcttgtcttcaccctttcctgtcccagttgctctgtatcaaagttttcctttcaatatttctttaggacccacttcttcacgcct

SEQ ID NO: 1029609 - DNA, 120 bp, Artificial Sequence
  ENSG00000287185_27 (sequence is synthesized)
tcctcagcaacttctccatgtggccccttaggagctaaagcgctctgcactggattatatgacttgcctgttgtggactcagggcttctcaaagttacatgaattctccgtgcttaggga

SEQ ID NO: 1029610 - DNA, 120 bp, Artificial Sequence
  ENSG00000287185_28 (sequence is synthesized)
aattggatgacctctgttctctgaccaaagataaaagaagattattctgtgatcctatacgagtcagtggctaatggaactaccaaaaaaatgataacaatgcaaataatgtaattggtt

SEQ ID NO: 1029611 - DNA, 120 bp, Artificial Sequence
  ENSG00000287186_0 (sequence is synthesized)
accaccacaggtccttagtgactgaaccagtactagcaatggtctcctaacttgcagggttgaattctcccttccattcgaccacagctatctcagagatcttgaggcaggagaataagt

SEQ ID NO: 1029612 - DNA, 120 bp, Artificial Sequence
  ENSG00000287186_1 (sequence is synthesized)
gcttttttaatgccatatgtaggcaaattacaaataaacaaaaccaagaagaaaaatgtaagctgtgggctgatgacattgcttagcaaaaaatgagtctcacacacaggcggctgcact

SEQ ID NO: 1029613 - DNA, 120 bp, Artificial Sequence
  ENSG00000287186_2 (sequence is synthesized)
ccagatttcaatttaattcactttccacaagcaacaagagcaagaataatatgcttcaatgtagggagatcagagaagagaagcttcactgcattttgagaccgagaatgactgaatgag

SEQ ID NO: 1029614 - DNA, 120 bp, Artificial Sequence
  ENSG00000287186_3 (sequence is synthesized)
gtggcagtggtggcagccgctgctcatcacaagatggagaaaggctggaaaatgaaatggaagttgaaagtggttgttgtgagtcaggctccgactatggtgacctgtcttgctgtgaga

SEQ ID NO: 1029615 - DNA, 120 bp, Artificial Sequence
  ENSG00000287186_4 (sequence is synthesized)
gagtggggatgcagggactagaaaacaaaagcaaagcccatctttcactggagcatgtctgcacaaacattctgctgactgacgatagacatacaagttgtgaatacacttaaaatgtat

SEQ ID NO: 1029616 - DNA, 120 bp, Artificial Sequence
  ENSG00000287186_5 (sequence is synthesized)
gagtgtgaaaagtgtctacatacaattattatctattatttacttgttatttatttattatttactgaaatcctactttgtcaggcatcaggctaagtgccttattacattatgtgattc

SEQ ID NO: 1029617 - DNA, 120 bp, Artificial Sequence
  ENSG00000287186_6 (sequence is synthesized)
attctccataataaccatttgatgtagaagctatcattttcacaatttttcatatggggaaaccaaggcctagaaaagaaaagttcttccttggcaagtaaccatttttaaagagaaaag

SEQ ID NO: 1029618 - DNA, 120 bp, Artificial Sequence
  ENSG00000287186_7 (sequence is synthesized)
aattttatcccagaagaaaacattttatctctgttcatgtgaatgaaatatacacatatatttatatttacatcaaaggtgagtaaaactttatgaaaaataaagttaggctttacaagc

SEQ ID NO: 1029619 - DNA, 120 bp, Artificial Sequence
  ENSG00000287187_0 (sequence is synthesized)
attagcctgactaattaggctgacatcactcacaaactgctctcatcacaatgcagatggacccagccccagaaggtcctgcccgtcagaggtgactgcgggtggcattgcgttgtgtgt

SEQ ID NO: 1029620 - DNA, 120 bp, Artificial Sequence
  ENSG00000287187_1 (sequence is synthesized)
tgtgttttgttttttactacttacttttatgtgttccttgaagcccagtccttctcccagagtcagactctcatcaaaaagaaggggctctgggacaaacgggtctcctttattgcggga

SEQ ID NO: 1029621 - DNA, 120 bp, Artificial Sequence
  ENSG00000287187_2 (sequence is synthesized)
gaaggaggaagctggaaaaaagaaataagaaaggaaagcagcggagatgaaaaagtcaagatagaccgggcacagtggctcctgtgtgtaattccagagctctgggaggtcaaggcaggc

SEQ ID NO: 1029622 - DNA, 78 bp, Artificial Sequence
  ENSG00000287187_3 (sequence is synthesized)
accagcctgggcaacatggcgaaatcccacctctataaaaaatacaaaaattaactactcgggaggctaaggtgacga

SEQ ID NO: 1029623 - DNA, 120 bp, Artificial Sequence
  ENSG00000287187_4 (sequence is synthesized)
ttgtgccactacactccagcctgggtgatacagtgagactttgtctgaaaaaaaaaaaagagagtcaagacattctgtgaggaaactcaaagcactcaaagcagccaacagcatttgttg

SEQ ID NO: 1029624 - DNA, 120 bp, Artificial Sequence
  ENSG00000287187_5 (sequence is synthesized)
cagcatttgttgctgaaccagccgtgaaaagacggaaaagcttactcaactctaccttgtatggcagtttgagaatcccagaggcaagttcccagaaatgtacagaaaaagccaagagca

SEQ ID NO: 1029625 - DNA, 120 bp, Artificial Sequence
  ENSG00000287187_6 (sequence is synthesized)
atgcttcctatgcattcttgttcaatggtgtcttagagggatgaataactataaaatggtgattccaacactttgaaggaccatcttaaaggcaaactacctaataaaattcatgttgca

SEQ ID NO: 1029626 - DNA, 120 bp, Artificial Sequence
  ENSG00000287188_0 (sequence is synthesized)
gtaaggtatacaacatgatgttttaagatatagctatagatagtaaaattattaccatagtgatgcaaattaatttgttcatgttacctagttacccattatttttctttccttgatata

SEQ ID NO: 1029627 - DNA, 120 bp, Artificial Sequence
  ENSG00000287188_1 (sequence is synthesized)
taatattttacatatttatggggtatatgtgagtgtttgttgcagggatagaatatgtaatggtcccattgttactgcaataccaagggtttggtctaggccctactgctcactgcacag

SEQ ID NO: 1029628 - DNA, 120 bp, Artificial Sequence
  ENSG00000287188_2 (sequence is synthesized)
aaagccaatcactgagatgatgagtactgccaaggaagaaggctttaacttggtgctgcagccaaggagatgggagctcagtctccaattcatctccctgactgactaactatgggttta

SEQ ID NO: 1029629 - DNA, 120 bp, Artificial Sequence
  ENSG00000287188_3 (sequence is synthesized)
tatagcagggaagaaatgtaaccatgcataagaaaacaggaactaaggaggggcaaggaagccatcatcatgaatgagaagtctgacaactggtgctgtgatctgctaattaccaagagc

SEQ ID NO: 1029630 - DNA, 120 bp, Artificial Sequence
  ENSG00000287188_4 (sequence is synthesized)
actttaagcacactggtggatttaaacaatgtgaataagtaagattgtgatttggctttgacaaaggcagagtcaagctggctttgtcatgtaaagggcctgagacggccacatggtatg

SEQ ID NO: 1029631 - DNA, 120 bp, Artificial Sequence
  ENSG00000287188_5 (sequence is synthesized)
tttaattgatgtaagtaccagaaaatggcataaatgagtacagaatttagtttaagggcatgataaacatgggaaggaaagaaatgaaaagaactaagatgtgggtgaaaatatttggag

SEQ ID NO: 1029632 - DNA, 120 bp, Artificial Sequence
  ENSG00000287188_6 (sequence is synthesized)
gcgatgaattgattacagatgattattgaaagctgttggccataacactcccagaggcctcattgtacgggttcaagaaactgtcataagagaattctgaaagccaaggtaagcagtaag

SEQ ID NO: 1029633 - DNA, 120 bp, Artificial Sequence
  ENSG00000287188_7 (sequence is synthesized)
tatccattaggtagtttccattctttctcttcctgaaaacgtttatcatctccagtgtgatttgcacatattgattaattaatctctaagtgactaatttttcattatttgacagataat

SEQ ID NO: 1029634 - DNA, 120 bp, Artificial Sequence
  ENSG00000287188_8 (sequence is synthesized)
tagatctttcataaatctgtgtaataaaagcatgcaggaagcattgtgagccagtttaataattggcattagttttcaagaagaatgtgttccagctcagttgtttccttattagaaatc

SEQ ID NO: 1029635 - DNA, 120 bp, Artificial Sequence
  ENSG00000287188_9 (sequence is synthesized)
atcctgtcaggaaacactttatagataaagtaaatgatcttgtcttctggaaaatatgacaatgatttttaacacttgccatttcacaagaacctaaggctcctatgctccaattacccc

SEQ ID NO: 1029636 - DNA, 120 bp, Artificial Sequence
  ENSG00000287188_10 (sequence is synthesized)
agtctctattaattcaaaaaaaatgggtgtgtctgaattttagtgatgttaaaaatatgaaaaccatgggtcatctttcctttgattctaaaagtgaagatgcatagggaggtagaggac

SEQ ID NO: 1029637 - DNA, 120 bp, Artificial Sequence
  ENSG00000287188_11 (sequence is synthesized)
taacaaccaaagaattggagaatatttgttttggaaaggaattgaaagaaggatgagctcatatcctttaatttacagagtaaaaacctgaatctcataaaggttaaatgataaatccaa

SEQ ID NO: 1029638 - DNA, 120 bp, Artificial Sequence
  ENSG00000287188_12 (sequence is synthesized)
agatacaaaactgatgggagagatttgattacactatggtgccccacagttacccactaggaactcaccagctccaaatttcacctccctttagaagaaaactccatttctttttgtaaa

SEQ ID NO: 1029639 - DNA, 120 bp, Artificial Sequence
  ENSG00000287188_13 (sequence is synthesized)
atatcttgacagattctctctgaaattgtgtacaccacagacaatgatcaagagaagtgatggacttttacaatcccattattcactttatatcttttccaattttctgaatttactgat

SEQ ID NO: 1029640 - DNA, 120 bp, Artificial Sequence
  ENSG00000287188_14 (sequence is synthesized)
ccaaatcctaagtcagtggttccaaactgagaagccattaatgtagaagtgagaagccaatagaaaatctttgaactatttaacaatctaagagaactcatacattttactaacagtata

SEQ ID NO: 1029641 - DNA, 120 bp, Artificial Sequence
  ENSG00000287188_15 (sequence is synthesized)
aattatcacggaacttctgattttcgaagagactattattaaaggagattatattaagtttttaatagtttggtacctccattttctattatgagttaaataatctttatgaaatatgta

SEQ ID NO: 1029642 - DNA, 120 bp, Artificial Sequence
  ENSG00000287188_16 (sequence is synthesized)
ttattgtatttttgtgtattttatattttaaggaaaatgtactgtgaaactttgtaagtatataatgttaaagtaaactttattaattttccttggcttcttataaaatgtaagccttga

SEQ ID NO: 1029643 - DNA, 120 bp, Artificial Sequence
  ENSG00000287188_17 (sequence is synthesized)
ttcacccacactttttggtattctatgttgaaaggaaaattttactatacttaagtgctgttccaaggttaaatactcatacatatatttaatgttccaattctagaaatcaaacttaag

SEQ ID NO: 1029644 - DNA, 120 bp, Artificial Sequence
  ENSG00000287188_18 (sequence is synthesized)
aagtaacacttttggtggaaccacaaacggaaaagagtcttgggtcctgaatcatggtttggagaagacctttatgcctattaggagccaaaagcctaaaactctaaacttaaaacacaa

SEQ ID NO: 1029645 - DNA, 120 bp, Artificial Sequence
  ENSG00000287188_19 (sequence is synthesized)
gcaatagaatgttgattctgtcctgtctgcagtatacaggattagctttttctgttaagataaaactaggaaataaagttgtgtgtggaagcaataaaaatctgaactattcctacatgt

SEQ ID NO: 1029646 - DNA, 120 bp, Artificial Sequence
  ENSG00000287188_20 (sequence is synthesized)
ctagaaatttataggtgctacattttttgaaaattttaatgacatatataagaaggaaaatcaaattaaaaattcaagttgatgttatctttaaaaaaaagtaatagttcatcctgttca

SEQ ID NO: 1029647 - DNA, 120 bp, Artificial Sequence
  ENSG00000287188_21 (sequence is synthesized)
ttcattcataatctaaattaggtaaaaaccagtgataaaatattgtgtgttattttaaaatatatgtatatctacacaaacgatattatatatacaaatactcgtactcatgtacacacc

SEQ ID NO: 1029648 - DNA, 120 bp, Artificial Sequence
  ENSG00000287189_0 (sequence is synthesized)
aatacagctctgaaacaagcctcccagctcacaggcactttccctccatccctgccagcctgtctctgccggtgggctcaggctgttaatcggcttgacaggtgaggtcctaagatactg

SEQ ID NO: 1029649 - DNA, 120 bp, Artificial Sequence
  ENSG00000287189_1 (sequence is synthesized)
aaacctcctcctcaatatgttttattccaggttttagaatctctggatgggtgtgggaagaggcacgtcagtggcggcaggaggcccacagttctgtgcctggaaagtggagaactggaa

SEQ ID NO: 1029650 - DNA, 120 bp, Artificial Sequence
  ENSG00000287189_2 (sequence is synthesized)
gagaagatgagaaacattcccctcaaggcaaaaatgtccccaagatgtattctggagaattcagcccagtcagagtgtatgtacctttttccctctcagacttgaaacaaattaaaatag

SEQ ID NO: 1029651 - DNA, 120 bp, Artificial Sequence
  ENSG00000287189_3 (sequence is synthesized)
atagacctaggtacattctcagataaccctgatgactatattgatgttttacaagaattaggacaatcctttgatctgacatggagagatgcaatgttactgctaaatcagacactaacc

SEQ ID NO: 1029652 - DNA, 63 bp, Artificial Sequence
  ENSG00000287189_4 (sequence is synthesized)
attccctacaggccagcaggcagttcccagtgcagaccctcattgagacacagaatcagaaca

SEQ ID NO: 1029653 - DNA, 120 bp, Artificial Sequence
  ENSG00000287189_5 (sequence is synthesized)
ttcccagtgcagaccctcattgagacacagaatcagaacatggagattggtgctgcagacatttactaacttgcgtgctggaaggactaaggaaaaccaggaagaagcctgtgaattttt

SEQ ID NO: 1029654 - DNA, 62 bp, Artificial Sequence
  ENSG00000287189_6 (sequence is synthesized)
gaaggactaaggaaaaccaggaagaagcctgtgaatttttcagtgatgtccacttgaggaag

SEQ ID NO: 1029655 - DNA, 120 bp, Artificial Sequence
  ENSG00000287189_7 (sequence is synthesized)
ctaatcttaaagattaagtttatcactcggtcagctgcagacattagaaaacaaacttcaaaagtccaccttaggcctggagcaaaacttaagacaccctattgaacttggcaacctcgg

SEQ ID NO: 1029656 - DNA, 79 bp, Artificial Sequence
  ENSG00000287189_8 (sequence is synthesized)
ttataatagagatcaggaggagcagtcggaatgggacaaacgagattaaaaaaaaaaaaggccaccgtttaaaggaaaa

SEQ ID NO: 1029657 - DNA, 120 bp, Artificial Sequence
  ENSG00000287189_9 (sequence is synthesized)
aaaacctgaacaaatcgaatgcctaatagggctttcttccggtgcggtctacaaggacacgttaaaaaagattgtcccaatagaaacaagccgccccctcatccatgccccttatgtcaa

SEQ ID NO: 1029658 - DNA, 120 bp, Artificial Sequence
  ENSG00000287189_10 (sequence is synthesized)
atcactggaaggcccactgccctgggggacgaaggtcctctgagtcagaagccattcaccagatgatccagcagcaggactgagggtactggggcaagcaccagcccatgccattaccct

SEQ ID NO: 1029659 - DNA, 76 bp, Artificial Sequence
  ENSG00000287189_11 (sequence is synthesized)
tcccagacaactgtcctccagatctgtcgctatccgaggggtcctaggacaggcagtcactcttttcacatgcctt

SEQ ID NO: 1029660 - DNA, 120 bp, Artificial Sequence
  ENSG00000287189_12 (sequence is synthesized)
ttacgcttttcacatgcctttctaattatgcccaaaagccccactcctttgttagggagagacatcctagcaaaagcaggggccattatacactagaattagaaggaaaaaggttaaata

SEQ ID NO: 1029661 - DNA, 120 bp, Artificial Sequence
  ENSG00000287189_13 (sequence is synthesized)
ggccattatacactagaattagaaggaaaaaggttaaatatacagactctaagcatgcttacctagtcctccaagcccacgcagcaatatggggagaaagggaattcctaacttccgagg

SEQ ID NO: 1029662 - DNA, 120 bp, Artificial Sequence
  ENSG00000287189_14 (sequence is synthesized)
attctcttcacctctgaatctacatcctccgatccctgcctaaagataattttatggggaagaggatttgcttgtgtctccccaggtgacaatcaggtgtctgtgtgggtgcccaccaac

SEQ ID NO: 1029663 - DNA, 120 bp, Artificial Sequence
  ENSG00000287189_15 (sequence is synthesized)
catctgaagatctatcacgagccatggcatctagtggacccacctgcagagtacagtgcgaattgaaggtttgaaaagcctcgatttgctttctctatgccttctgttaatcagaaaagg

SEQ ID NO: 1029664 - DNA, 87 bp, Artificial Sequence
  ENSG00000287189_16 (sequence is synthesized)
tgggggtgagggtatgcttgtgtttttgcaggagatgaacgaaccgtgtggatgccctcaagatgtgcacgaccatggaatgggaga

SEQ ID NO: 1029665 - DNA, 120 bp, Artificial Sequence
  ENSG00000287189_17 (sequence is synthesized)
gtggatgccctcaagatgtgcacgaccatggaatgggagactggagggacccatggatcccaaccttggaccgggttcccccagtatgagccatgagccagttgaatctgaatgcgaaga

SEQ ID NO: 1029666 - DNA, 120 bp, Artificial Sequence
  ENSG00000287189_18 (sequence is synthesized)
aggaatgaggaccgaccggagtcacgatgcctaacagaccaatgctttctgactcagctcctctctaccctgaatatgagagaccctaatagttaggcaggaatatcatcgcccctattc

SEQ ID NO: 1029667 - DNA, 120 bp, Artificial Sequence
  ENSG00000287189_19 (sequence is synthesized)
agcatgaagaagttacagaaaatggaccttcatccttctgcagcccctaggattaagggtcctcttgtagaagggaaaggggagatatgtgggaagcattcaaaccagagtgactccagt

SEQ ID NO: 1029668 - DNA, 120 bp, Artificial Sequence
  ENSG00000287189_20 (sequence is synthesized)
ttgaataagggctaagaaaagagaagctgggtcacctaccggcaattaagggctgcacagcctgcaatcgcctagctaatgatagctaagtaataatgatagtaataatgataccttctc

SEQ ID NO: 1029669 - DNA, 120 bp, Artificial Sequence
  ENSG00000287189_21 (sequence is synthesized)
ataatgatagtaataatgataccttctcttttataaaaaagaggggacatgttgggaaaaaagctgagtgttgggggggaaaccgaggcagggcttgcataatgtcctctggaatgtgtc

SEQ ID NO: 1029670 - DNA, 120 bp, Artificial Sequence
  ENSG00000287189_22 (sequence is synthesized)
ttcctaggctcctaggtccctattcccagtatctcaagtagcagaacatgttccatgtaaatgctaaaccatcacagttgtagatcatgcgcctgcccttttgacctccacgttatcacc

SEQ ID NO: 1029671 - DNA, 120 bp, Artificial Sequence
  ENSG00000235351_0 (sequence is synthesized)
aagctaatgaagagccgtttactccggaggaaacatccagcgcttcaactggccacggagttactaagtatcaaccgaacaaggtagttttaaaaggaagggaaatattgcgacacgaat

SEQ ID NO: 1029672 - DNA, 120 bp, Artificial Sequence
  ENSG00000235351_1 (sequence is synthesized)
gaagggacagattaacttgctcctcggatccgggcacacagctcctcctacttcttcttcctcttttcctggacacaccgtggacagaacctgtgacaagaaaggcgcagtgaggccctg

SEQ ID NO: 1029673 - DNA, 120 bp, Artificial Sequence
  ENSG00000235351_2 (sequence is synthesized)
gggccgcggccctcccgcagggaaaatgcgccgatgcacgtgcggctctatgcaggacgccggttctgaagctgacagatacaccatcaatgagcaaaaccgatttgacacccaggcgtt

SEQ ID NO: 1029674 - DNA, 120 bp, Artificial Sequence
  ENSG00000235351_3 (sequence is synthesized)
cctccttaacaggtgggtccttcttccccggccgatggcagggtcgctggtgccctctgtctgcagtctgtgggggctgcaggtaccaagcacgcgttgagagcatggcagcccctcagg

SEQ ID NO: 1029675 - DNA, 120 bp, Artificial Sequence
  ENSG00000235356_0 (sequence is synthesized)
ccatgacaatgactgagagagactaaaaaaaggacggaaaagaggccatcaaataaagcccacgctgctcagtgcccacttagtgtttcccgtatttgctttgtgacaccaaacaggaaa

SEQ ID NO: 1029676 - DNA, 120 bp, Artificial Sequence
  ENSG00000235356_1 (sequence is synthesized)
gaaagctccaggatctgaagtctaaggaatcactaagaaatgtactgatgaaagaaaggaagtaaattattctctgattgtcacaactgttagcattccaaatatatcaaataatttcta

SEQ ID NO: 1029677 - DNA, 72 bp, Artificial Sequence
  ENSG00000235356_2 (sequence is synthesized)
agcgaccctgtggcttgtgcaggccatggtttggaagtctccatgaaaacaccattgcacatttgaaaaata

SEQ ID NO: 1029678 - DNA, 120 bp, Artificial Sequence
  ENSG00000235356_3 (sequence is synthesized)
ggaagtctccatgaaaacaccattgcacatttgaaaaataattactgtttcatgaaactgctgaaaattgcattaaccctggacacagtttatcagtgctgtataaatacaattccaagc

SEQ ID NO: 1029679 - DNA, 120 bp, Artificial Sequence
  ENSG00000235356_4 (sequence is synthesized)
actgctccacaagggtttgcagcaatacagcttctgatatgtagaaattaaggagatcccagtgcttcaacttatttaatgtccctgtttctacatctgtaaaagaaaaaatgtggaaaa

SEQ ID NO: 1029680 - DNA, 120 bp, Artificial Sequence
  ENSG00000235357_0 (sequence is synthesized)
aatgcagatgacaggagcagagacggaggccactgggcacaggagagatttgggatggagagctggtgagcctttctctgttctccacatctgaaagtctggctttaggcacaatattta

SEQ ID NO: 1029681 - DNA, 120 bp, Artificial Sequence
  ENSG00000235357_1 (sequence is synthesized)
tgaactttagcaatatgcacaaatcaaatgagctgaaaaatcagaccaggcagataaaagtaaaatcatcttactgaaattcctggaaacaacagtttcagccatttgacatataaacta

SEQ ID NO: 1029682 - DNA, 120 bp, Artificial Sequence
  ENSG00000235357_2 (sequence is synthesized)
acaacagtttcagccatttgacatataaactagaagatttggtgcccagcatgaagaatagttcctttcaagtacctgtatgtcctgaatgtattccttccagtgggttcttggtctcgc

SEQ ID NO: 1029683 - DNA, 120 bp, Artificial Sequence
  ENSG00000235357_3 (sequence is synthesized)
atatgtgctcacccttctctgctcagctctgtgcctgggaggctgacctctacaaactgcatcaccaggcttccgccctctggcttccagatggatttggccaatgggcagcaccagtgg

SEQ ID NO: 1029684 - DNA, 120 bp, Artificial Sequence
  ENSG00000235357_4 (sequence is synthesized)
gaaaggagaggacaggaggagagacaggctgaggtcatgtatttatccccctcttccctaccccatgacagttctgacaggcagcccctccgtttctccagctctcagctgagctccagt

SEQ ID NO: 1029685 - DNA, 120 bp, Artificial Sequence
  ENSG00000235357_5 (sequence is synthesized)
aacaagcttccttctctttcccctttagggttggggtggcaagagccaccacctgggtgtctcactatatcttgttggcttccctaatcctgcctacattaatcattttttttaaatttc

SEQ ID NO: 1029686 - DNA, 120 bp, Artificial Sequence
  ENSG00000235357_6 (sequence is synthesized)
gaatcctggctaatggagcaagcttggacacattccttcatttcacaggtcctcagtttatttagctgtaaaatgaagggcctgagcagcctttcccaaagtggattctgcacatcagtc

SEQ ID NO: 1029687 - DNA, 120 bp, Artificial Sequence
  ENSG00000235357_7 (sequence is synthesized)
tcaccatattccattttgtattctgtggtcaaatatgtttggggaacactgaatataatgtccccttttggagagccacaatttgtggcaccgtgtcaacaactctgagaggtcctgaag

SEQ ID NO: 1029688 - DNA, 120 bp, Artificial Sequence
  ENSG00000235357_8 (sequence is synthesized)
tagatacacctgttttaccctgtttagttcagcatttcccaaatatagttaacaatggaaccactgttttttgcttgtttgcttttgcagaaaaccctaataacatagagaaaacaccag

SEQ ID NO: 1029689 - DNA, 120 bp, Artificial Sequence
  ENSG00000235357_9 (sequence is synthesized)
atcaagttgggccatgtatggcattgtcttattctgtggaaaggcctccctcctcctgtgtccctgacatacagtgacagtgctgccctgcagctcaggatggatgcagtcaaggacgac

SEQ ID NO: 1029690 - DNA, 120 bp, Artificial Sequence
  ENSG00000235357_10 (sequence is synthesized)
agcgcatgtccaaaaaagctgtctgctgaacatttgcccagcagattttagaaagaaaggaaacatcttagtgattttcttgcctccagaagattccctgatccaatctttccttggcac

SEQ ID NO: 1029691 - DNA, 120 bp, Artificial Sequence
  ENSG00000235357_11 (sequence is synthesized)
aaacttttagttattgtgtttacatatacattttatatatgtgtggtcattattgtatctgttttatttggggactttatcttgatgtgtgttatacctaatacactgcaatataaatta

SEQ ID NO: 1029692 - DNA, 120 bp, Artificial Sequence
  ENSG00000275773_0 (sequence is synthesized)
gatggtgctagcatatataagactgaaacaccaaaggcctccgtggaagttaatgaacttctggttatgagttggattcttcagcggagtatttgagccatgccttgaggcacatacttc

SEQ ID NO: 1029693 - DNA, 120 bp, Artificial Sequence
  ENSG00000275773_1 (sequence is synthesized)
agctttgccagtggcaccctctctaattaatcatcccgcaggcttagaaaacttctgcccaatcctttctgatttgttaaaagaaagagagaaggttttagtctgaaaaaggccttatct

SEQ ID NO: 1029694 - DNA, 76 bp, Artificial Sequence
  ENSG00000287238_0 (sequence is synthesized)
tggaggcttttctctagggtgaaggtactctctctacagtcagccttacgtctgcaggtgtacccaacagctccga

SEQ ID NO: 1029695 - DNA, 60 bp, Artificial Sequence
  ENSG00000287238_1 (sequence is synthesized)
agggtctgttctgtctcctgcccgtccctggacaatggaatgtctcggtataaaacccga

SEQ ID NO: 1029696 - DNA, 120 bp, Artificial Sequence
  ENSG00000287239_0 (sequence is synthesized)
acacacaacacagaagaccagatctccttagcctacaccagagattctcatgtgagaattgcccgaatatctgctttaatgaatccaaaaagcttatctgatttaaaaatgaagttaaga

SEQ ID NO: 1029697 - DNA, 120 bp, Artificial Sequence
  ENSG00000287239_1 (sequence is synthesized)
tgtcaaagccactgttggaatagcatgaggagtgcgatttgattctgtgcatcgatagactctgcaaccacggagtagtcttttaacctttttgaaattcgcatgcactatgtcaaaaag

SEQ ID NO: 1029698 - DNA, 120 bp, Artificial Sequence
  ENSG00000287239_2 (sequence is synthesized)
ggctttattaccaggctgacatctggtggtccaggggaacaacaagcaatgcctccgaatgtaaaccgattcacaaatgcggctttttttcccagttttccctttgtctttttgaagtgc

SEQ ID NO: 1029699 - DNA, 120 bp, Artificial Sequence
  ENSG00000287239_3 (sequence is synthesized)
gatgaattatatacataagcagacacttccagcagttagcagcagtccagatggcaaacacagtgggcagaagcaggaacaattcaactctccccatgcttgggatttaaaaaaacaaca

SEQ ID NO: 1029700 - DNA, 120 bp, Artificial Sequence
  ENSG00000287239_4 (sequence is synthesized)
acaaaaaaacctctcaaacacctccaattaatttactatggtatatgccactaattaccaaatcacagaggaacagagtgatacactgtcagccttatgatgttcatgttatttgtacaa

SEQ ID NO: 1029701 - DNA, 120 bp, Artificial Sequence
  ENSG00000287239_5 (sequence is synthesized)
tttatccgtacagaaaaaggaaaaagcacctctgatttttctcacattcatcacttagctacaccattctataatattttgaccaatgaagagtcttaataaatgggcattttgtgttca

SEQ ID NO: 1029702 - DNA, 120 bp, Artificial Sequence
  ENSG00000287232_0 (sequence is synthesized)
ggcgctttgagagtcgaggtctcccgcccgcgcgcctccctggcgcagacctcttttaactttttggcgtggagtgcgcgtcctgacgtgccccctgagctacagcttactgagctttac

SEQ ID NO: 1029703 - DNA, 120 bp, Artificial Sequence
  ENSG00000287232_1 (sequence is synthesized)
ttactggcttcgccggacagccgtccccaggtggagagacagcgcgtcgcgcgctgcccgggccccgcagggcctggcgcctggggcccttgcgccgctttggggcgaggggatcacacc

SEQ ID NO: 1029704 - DNA, 120 bp, Artificial Sequence
  ENSG00000287232_2 (sequence is synthesized)
gctcccggagcttagcgtcttccacgcggcgctgtgtgtcatccacgcagtgtgctctcgctgccgtgttcaggtcactgcgagggtgagccccgctttatctaccccttctgctgttga

SEQ ID NO: 1029705 - DNA, 120 bp, Artificial Sequence
  ENSG00000287232_3 (sequence is synthesized)
tgggcactcgtctggggctagaagggataaggttgctgtgagcgttctcgtgtgtttttggtgcacgcgcacacacatttctctggggtgcagacctgtctagtagtggaactgccgttt

SEQ ID NO: 1029706 - DNA, 120 bp, Artificial Sequence
  ENSG00000287232_4 (sequence is synthesized)
cccagcactttggagcaaagccctgttgcagtctgaagcggaaaaggcagacgggccttccatgttcgtgattccagccaggcacagaagggaaggacagggacagcagccgcgcggagg

SEQ ID NO: 1029707 - DNA, 120 bp, Artificial Sequence
  ENSG00000287232_5 (sequence is synthesized)
cgaggagggacactgggcgctgctgtcccctctcaggggcagccactcctcttgtggacgcaggtgtggtcaccagaagggaaggacagcagaggactcttcagggaccttcctggatcc

SEQ ID NO: 1029708 - DNA, 120 bp, Artificial Sequence
  ENSG00000287232_6 (sequence is synthesized)
ccctgcaatgggagtggcctacttgcttgacttgagggtgagacttggtcagcccttgactgtagggggcaggaccatgggcttcagtggggcagcacccatgacccacgcctctgcttc

SEQ ID NO: 1029709 - DNA, 120 bp, Artificial Sequence
  ENSG00000287232_7 (sequence is synthesized)
cattccctgcttactgcccgggcctctgggcaggggagtctagtctcccttcccaggcttccaatgcctcgccccctgctgtggtaaggattcgcgctggtccctatttattaatcaggg

SEQ ID NO: 1029710 - DNA, 120 bp, Artificial Sequence
  ENSG00000287232_8 (sequence is synthesized)
aacttggggttccagttttctccccttctctgcatctcatccccttgagagccccctggagcagaggataacgcacgaggggactggctgtgtatattttgataacaatatcaaaatact

SEQ ID NO: 1029711 - DNA, 120 bp, Artificial Sequence
  ENSG00000287232_9 (sequence is synthesized)
gtcaaatactaaacggaaaagaaataggaaaacattgaactttattaaaatgaacttcaaaagacaccattaagagtaaaaagatgactcacaaaaaagttgccttttgttcagtaaacg

SEQ ID NO: 1029712 - DNA, 120 bp, Artificial Sequence
  ENSG00000287232_10 (sequence is synthesized)
actcaggaccagaaaatatgaagacccctacaacaagaaaaatatagatagctcagttaaaaattgacaaaagacttgaaaagatatttcacaaaaggagagatccagacagtcaatcca

SEQ ID NO: 1029713 - DNA, 120 bp, Artificial Sequence
  ENSG00000287232_11 (sequence is synthesized)
cacacgaaagggtacttagcatcagggaactgcaaatagtgacattcgattccatatcacagccactggatggctaaaatagcaacgccaagtgctgatgagactgtggaacaaccagct

SEQ ID NO: 1029714 - DNA, 120 bp, Artificial Sequence
  ENSG00000287232_12 (sequence is synthesized)
gggctctcataccctgctgatgggagagtggattggagcaaccacgtggaaacatctaatggaggtaagcaaacgcctgccataggaaccagcgtgtatatccaagggaaccgagtgcta

SEQ ID NO: 1029715 - DNA, 120 bp, Artificial Sequence
  ENSG00000287232_13 (sequence is synthesized)
aatgcaatggtatactgcacagcaacaaaaaaataacaaactgctaatacttgcagcaacatggataaatctcaaagtattgaatgcaaagctacaatagagtgcataactaaggattcc

SEQ ID NO: 1029716 - DNA, 120 bp, Artificial Sequence
  ENSG00000287232_14 (sequence is synthesized)
attatataaaatacaaaatccaggcaagactgatctacagtgttagaggtcaggagagaattttggaggtagttgcttgggcaccgggatactgcgtggggagctgtgagtgctgcatat

SEQ ID NO: 1029717 - DNA, 120 bp, Artificial Sequence
  ENSG00000287232_15 (sequence is synthesized)
ctttagctgcgtcctgcttggagtgcatactctgtgaaaattcatcaacctgtgcacttaagacttgtgtacttacattatctttcaggaaaaagaaaagaaaagtatgccaaactttac

SEQ ID NO: 1029718 - DNA, 120 bp, Artificial Sequence
  ENSG00000287232_16 (sequence is synthesized)
ccttcacctttcttctcaaaatggtcaggtttcagagctgtggtagaaacttctagtactgacaacagccagtacctccccgcttggcagctgagactatgggaccagttctggccaatg

SEQ ID NO: 1029719 - DNA, 120 bp, Artificial Sequence
  ENSG00000287232_17 (sequence is synthesized)
gaatgtgaggggaaatgacggatgtcaattccaggctgaagcttttagttgccagagccaggtcctccagtcctacctttccactgtggcagtccctctgaagtcccaagatcaagagct

SEQ ID NO: 1029720 - DNA, 120 bp, Artificial Sequence
  ENSG00000287232_18 (sequence is synthesized)
gacagctgaatccttgcatggagagtcgcctggacctgcagtggactctggatgagggagtatacacccctctcctgagatggcaaacaggaggtctggatcaatcctacagtgtcggca

SEQ ID NO: 1029721 - DNA, 120 bp, Artificial Sequence
  ENSG00000287232_19 (sequence is synthesized)
aatgtctggattaccctgcaagttcagaccagtgaggatccttcagccactgggggaaaggctctgctgacacagcaacagcgagcagggggcgccagccagccagctggccgtgcagtg

SEQ ID NO: 1029722 - DNA, 120 bp, Artificial Sequence
  ENSG00000287232_20 (sequence is synthesized)
ttccagcggcaggcgtagttttctcccacctctcatggacattgagtgcaccttgtgaaagggaggcatgacagctccacatctgtgttcacccttgtggatcccaggtgagactccaga

SEQ ID NO: 1029723 - DNA, 120 bp, Artificial Sequence
  ENSG00000287232_21 (sequence is synthesized)
tgaaatgggagagttctctgaccccctcacaggacatgtgacaggagtgtggctagtctgttcagcctccaccactgctgaaacaccttatgggagggggagcatgcagatgggcaagcg

SEQ ID NO: 1029724 - DNA, 120 bp, Artificial Sequence
  ENSG00000287232_22 (sequence is synthesized)
caggtgccagggccagcgcttttgggcttcaaccccatggtggcatctaggggtgtgtgtctgtgactcctgaagccccagtgtgtgtgctccagtgctcttttagctctgctgtctgtc

SEQ ID NO: 1029725 - DNA, 120 bp, Artificial Sequence
  ENSG00000287232_23 (sequence is synthesized)
gttcctgccccaccctaactgatcaattggccttgtgacattccttctcctgggcaacgagtctcatgatctccccaccctgcaccttgtgagccccgtccctgcccacaagagataacc

SEQ ID NO: 1029726 - DNA, 75 bp, Artificial Sequence
  ENSG00000287232_24 (sequence is synthesized)
cgtccctgcccacaagtataaaactgtcccacccctatctccctttgctgacttctttttcagactcagtctgcc

SEQ ID NO: 1029727 - DNA, 120 bp, Artificial Sequence
  ENSG00000287232_25 (sequence is synthesized)
ccagccgctggagatgggaggggagggggtaagaagggaagccactgtgccgtgaccctgaggccattgaggtggggtttggtgtctcaccaaacggaagccacattgttctgaattgca

SEQ ID NO: 1029728 - DNA, 120 bp, Artificial Sequence
  ENSG00000287232_26 (sequence is synthesized)
cctctgatggctaggccaaatgctcattctgtttaacatcattgctgcagtctgtagcaaaacccttaacgttacaaaggaagagatagagccacttcaaaccgtgaaaggagaagagat

SEQ ID NO: 1029729 - DNA, 120 bp, Artificial Sequence
  ENSG00000287232_27 (sequence is synthesized)
accacagttaagtccgcctgtcttggccaacggagttcagtctttgggctttccagcaacaaaagatgccttcagttgccccagggttttactccagtccccggcaacagctagatctcc

SEQ ID NO: 1029730 - DNA, 120 bp, Artificial Sequence
  ENSG00000287232_28 (sequence is synthesized)
cttcgccgcagccagagtgctttgtccgagctcaaaaaagccgtctccatggaagcggcccttccgctcggagcccggcggcctggagggagacccggcggggatgcgaggattccgccc

SEQ ID NO: 1029731 - DNA, 120 bp, Artificial Sequence
  ENSG00000287233_0 (sequence is synthesized)
cagagtacgattaggaggatatgaagaaagcaagccttggccagtcgcggttgctcgtgcctgtaatctcagcgctttgggaggccgaggcagggggatcatttgaggttaggagttcga

SEQ ID NO: 1029732 - DNA, 120 bp, Artificial Sequence
  ENSG00000287233_1 (sequence is synthesized)
gaccagcctggtcaacacggtggaaccccgtctctattaaaaatacaaaaactagccaggcgagatggtgcacgcccgtaatcccagctgctccagaggctgaagcaagagaatagcttg

SEQ ID NO: 1029733 - DNA, 120 bp, Artificial Sequence
  ENSG00000287233_2 (sequence is synthesized)
gcgacaaagtgagactccatctcaaaagaaaaaacaaaggaaaaaagaaagcaagtcttggtttgagaagagcacgttgacgagagatggtgtttgccatgttacccaggccagtctcaa

SEQ ID NO: 1029734 - DNA, 120 bp, Artificial Sequence
  ENSG00000287233_3 (sequence is synthesized)
cgagagatggtgtttgccatgttacccaggccagtctcaagctcctgagctcaagtgattagcctgcctcgacctcccaaagtgccaggattacaggtgtgtgccactacacctggccta

SEQ ID NO: 1029735 - DNA, 120 bp, Artificial Sequence
  ENSG00000287233_4 (sequence is synthesized)
tgaggctcagtaaggaaagcaacacgtactgggccactgaggtgtcaaatttgatgtcaaagtcgaagactgcagtcctggttcagtttcaaataagggactgtgatgccacgaagcaga

SEQ ID NO: 1029736 - DNA, 120 bp, Artificial Sequence
  ENSG00000287233_5 (sequence is synthesized)
acgaagactgagcctggatcacaatgcaatggcctggctggagagaaagttgcatgggtcatttatagctcacagaggcaaaggtaacctacctaagaatggatccagaaggcaaaaggg

SEQ ID NO: 1029737 - DNA, 120 bp, Artificial Sequence
  ENSG00000287233_6 (sequence is synthesized)
actgccctgccctcaagagatgtcggtatctccagtgtgctgggaatggggctctaggtagggcaagatgcctcggcatggtggctctgagatctgaatccagagatccacagctgtgga

SEQ ID NO: 1029738 - DNA, 120 bp, Artificial Sequence
  ENSG00000287233_7 (sequence is synthesized)
ttagcaagctactctgtttctctatatgttggtttcgccttctacaatatggagctagtaatcatatttgcctcctagagctgacatcaatattaaataaaatatgtttgaaataattga

SEQ ID NO: 1029739 - DNA, 120 bp, Artificial Sequence
  ENSG00000287230_0 (sequence is synthesized)
tgagcaagggaacagcaattagcggagaagggactctggggggtggtcgcccacccccttagtcggatggttttttcctcccctcgtggctgggtcacgagctttttataggcttagaat

SEQ ID NO: 1029740 - DNA, 120 bp, Artificial Sequence
  ENSG00000287230_1 (sequence is synthesized)
aggggaggggcaggtcataggtagtattggaaaaggcaacgcttgatcggttaaaacgcattatttagaaataattaatcaggaaagagcgggggcaaaaaggaacagaaatactcagcc

SEQ ID NO: 1029741 - DNA, 120 bp, Artificial Sequence
  ENSG00000287230_2 (sequence is synthesized)
tgtgtcgcgggtttcatctgggaccagcagttcagtgtttttggctggaaggtggggtttcaccccatcctcctgggcatttagcagcctccagccgctctcactttcgtgtgccatgga

SEQ ID NO: 1029742 - DNA, 120 bp, Artificial Sequence
  ENSG00000287230_3 (sequence is synthesized)
cgagatgataaactgagattgtagaggagttgcagttcttggcagtgaccaggtctagagaacgaccactgaggggttgcttgctctgatggaaacgttattcctaggcttcatttctga

SEQ ID NO: 1029743 - DNA, 120 bp, Artificial Sequence
  ENSG00000287230_4 (sequence is synthesized)
cactgccagctttgggaagccttcaccatctctgcctatacagatggacacactccctgcctgtgctgctgctagactgtgcttacacttccatcacagaatttatttgattgggttatc

SEQ ID NO: 1029744 - DNA, 120 bp, Artificial Sequence
  ENSG00000287230_5 (sequence is synthesized)
atggcttctctgctggaatggaagctacttgggagcctggggaaatgcttggctcaaagcacttctgcacttctgatggttggatgactccactgagacccaagacttaagactcacctg

SEQ ID NO: 1029745 - DNA, 120 bp, Artificial Sequence
  ENSG00000287230_6 (sequence is synthesized)
gtcctatagcccccacccagaagtggactcagcacataagaaccattttctacatctctatgattgcacccctgaccaatcagcagcacccattccctagcccccagcccacctaactat

SEQ ID NO: 1029746 - DNA, 120 bp, Artificial Sequence
  ENSG00000287230_7 (sequence is synthesized)
cttgaaaaaactctagcctccaaattttcagggaatctgatttgagtaataaaatcaacccatctgttattattagtctggccatttagctggttctatgtatattaaactgtttctcta

SEQ ID NO: 1029747 - DNA, 120 bp, Artificial Sequence
  ENSG00000287231_0 (sequence is synthesized)
gagagcttctgctggaggaccaatccatcctcgtgggcatgggagagtcctgctcattggatgatgtggcaagaaaactcttgccagatgctggcaccttgatgttggcaccagcctcca

SEQ ID NO: 1029748 - DNA, 120 bp, Artificial Sequence
  ENSG00000287231_1 (sequence is synthesized)
agactctgataagaactgggaactgcctctctgctctgctggagagcacacgagtgctttgaggagagttgaccatcttcagtgcttgctgcagagttggaataaatgcatccagaattc

SEQ ID NO: 1029749 - DNA, 120 bp, Artificial Sequence
  ENSG00000287231_2 (sequence is synthesized)
caacatctttgtcctgaaagagtaacttcccaattttaatctgaaacgtagtctcctgtaaggtgcagaatcatgcaattacagtagcacccccaatgtgccaatatttaacattccttc

SEQ ID NO: 1029750 - DNA, 120 bp, Artificial Sequence
  ENSG00000287231_3 (sequence is synthesized)
ctcaatctataacatacttgtaccatttttgttcctcgatataatgttcagcatattgaggctacaaatgtgagcatgcaggtgttcttgttctgagcaaacggtacatggggattaggt

SEQ ID NO: 1029751 - DNA, 120 bp, Artificial Sequence
  ENSG00000287231_4 (sequence is synthesized)
ttgttctctgctgccctcattcagtcttctagtgtcttccattatatttagggatctcttttataactaataacagaatcccagtacccaattctcaccctagattacatatttaatttt

SEQ ID NO: 1029752 - DNA, 120 bp, Artificial Sequence
  ENSG00000287231_5 (sequence is synthesized)
atgtctctctcttgcattaatttatacattgcaactatttacgaaaaagggagggtctataaacgatgaggtagctttagcaaactcaatgaaggagtgacagttgtaatttaacagaat

SEQ ID NO: 1029753 - DNA, 120 bp, Artificial Sequence
  ENSG00000287231_6 (sequence is synthesized)
cctgagtacattttctttctaaacccttcctttccttcactttctctttcttgctttccttttctttcactctttgtctctccttcccttttggatgtgttaaaaaggaatgctaccctg

SEQ ID NO: 1029754 - DNA, 120 bp, Artificial Sequence
  ENSG00000287231_7 (sequence is synthesized)
aataaaagcatttttgagatgcaatttttaatatatttttaagagctggccatttcaagattcctcttctcactatgatggagatttaggtacagctaatccttgggtatgtgcttgctt

SEQ ID NO: 1029755 - DNA, 120 bp, Artificial Sequence
  ENSG00000287231_8 (sequence is synthesized)
cagattctatctagggcatctttatcccaaattgaggattaacatcaatttgtaggatgccaaagatgaaagataatccaggcttgaatgatgccctgatgactagggagagcaacatcg

SEQ ID NO: 1029756 - DNA, 120 bp, Artificial Sequence
  ENSG00000287231_9 (sequence is synthesized)
tgttcgcatttatggaagtacagaaagtctgtttactcaatttaatagccattgccattatcttgacatgaattgtgttccatgctcatagaagactttgatagcaatgcttcagcaaag

SEQ ID NO: 1029757 - DNA, 120 bp, Artificial Sequence
  ENSG00000287231_10 (sequence is synthesized)
aggaaagtccgtttcctctgcattggcgatgctgagtccgtgcgcatagtggacaggaccctttctctcaattcttgcttgaggctcccaggctcagtcagattctaaaaacattttttg

SEQ ID NO: 1029758 - DNA, 120 bp, Artificial Sequence
  ENSG00000287231_11 (sequence is synthesized)
aaggtcttattttctattgactagttactttataatcagaaaggaacaacaaacatagagccccagtgaacacagatttttttcaagtgtattcctcctccagacttttattgttgaaca

SEQ ID NO: 1029759 - DNA, 120 bp, Artificial Sequence
  ENSG00000287231_12 (sequence is synthesized)
gatagctttttttaacaaaaattacaatcattatacactattgtgtgcatactgcctttgttttttctcttttaaaatgaaaattcattcttattgtaaaaatgttgcatgctactgtaa

SEQ ID NO: 1029760 - DNA, 120 bp, Artificial Sequence
  ENSG00000287231_13 (sequence is synthesized)
tgttaaagagtacactatgtaataaagtacaaagaaaaaagtaaaaataatcacctaagattgcaccacttagagaaaagtattttcaatgttttcatgaacatttaaaaagccatctta

SEQ ID NO: 1029761 - DNA, 120 bp, Artificial Sequence
  ENSG00000287231_14 (sequence is synthesized)
gactagatgtggttgggttatgggatgtgagggttttgaaatgcggtaagaatgggcaagaactactattaagattttctccagttaggaagcagcaagtaaaccacatgttcagaaaag

SEQ ID NO: 1029762 - DNA, 120 bp, Artificial Sequence
  ENSG00000287231_15 (sequence is synthesized)
aggagaaactatttggtagcacagcagagtgactatagtcaatgataacttaattgtacattttaaaataacttaaagagtaaaattggattgtttgtaactcaaagaataaatgcctga

SEQ ID NO: 1029763 - DNA, 120 bp, Artificial Sequence
  ENSG00000287236_0 (sequence is synthesized)
agagatcaaagcccccatccacacagtgggctgaatatggatccatgcagcgatctggtcctggtgctgtggaatcagctttgcacaaggccccagaaggtctgcgttccagagccttcc

SEQ ID NO: 1029764 - DNA, 120 bp, Artificial Sequence
  ENSG00000287236_1 (sequence is synthesized)
cgttccagagccttcctgttggggcctcagtcttctcatctgaaaaatgggagcaaactcagttctgccatgcccagtgtgggtgtgatgtcacatcagatggagtctcgctctgtcacc

SEQ ID NO: 1029765 - DNA, 64 bp, Artificial Sequence
  ENSG00000287236_2 (sequence is synthesized)
tcaaactcctgacctcaagtgtgaccaccatgttgtattgttactgttactgctctcctgtcct

SEQ ID NO: 1029766 - DNA, 120 bp, Artificial Sequence
  ENSG00000287236_3 (sequence is synthesized)
accttgaggggtaacgtatcttattcatgtttcttgtcctggtaccagcacagcaactgacatggatggggggttaggggctcagaaagcattgccctaaaatatggcgctctgacatga

SEQ ID NO: 1029767 - DNA, 120 bp, Artificial Sequence
  ENSG00000287236_4 (sequence is synthesized)
agcagcctcaaggtctatctgacctccctgcctccttctctgaatcctctgtctctctcaaagtgcaggatgacgctgttctctgaagtttctttatctgcctagaaacgggacctgcca

SEQ ID NO: 1029768 - DNA, 120 bp, Artificial Sequence
  ENSG00000287236_5 (sequence is synthesized)
aaggggaacacaattaccttccctggaatatcattagctagaggttaaaactcatatcctagaggatatgagactgaacattaaacaccacacctacagcccagataaacttcatcccaa

SEQ ID NO: 1029769 - DNA, 120 bp, Artificial Sequence
  ENSG00000287236_6 (sequence is synthesized)
accattatctgctctctttccctttcaatgtccaaagaaattattaattatcatctggacgctggactcattcatttcccccctaaaaaccattgactgtccttcaaattgccacgtgtc

SEQ ID NO: 1029770 - DNA, 120 bp, Artificial Sequence
  ENSG00000287236_7 (sequence is synthesized)
ccccatctctccttcccccgtgaagaagggcgcatgcacctgtaccccactgggttattgggtaacttctgtgattccctcatgctctgcacgttgaaataaattttgtcttttctccaa

SEQ ID NO: 1029771 - DNA, 120 bp, Artificial Sequence
  ENSG00000287237_0 (sequence is synthesized)
tgcccagggacacacagctgaccggggctgagatggttccagagcccagacctgctgcttctaaccaagacccctagtgtggtgctctctctactatcccagggacttgtgaaaatcatg

SEQ ID NO: 1029772 - DNA, 120 bp, Artificial Sequence
  ENSG00000287237_1 (sequence is synthesized)
gattactgggctccacttccggagcttctgatccagtgagactgtggtggggcaggagttggcctttgaagaccaagaccagggaactgggaccaagacgaaacatggttaagtgctgac

SEQ ID NO: 1029773 - DNA, 120 bp, Artificial Sequence
  ENSG00000287237_2 (sequence is synthesized)
tcagagtccgctaaaaataactgcctattgtcttacctctgacattgctgagggatgtgacacttacccggagaaatccagaaaggcagacggacatccagtttgtgaggagtttttcga

SEQ ID NO: 1029774 - DNA, 120 bp, Artificial Sequence
  ENSG00000287237_3 (sequence is synthesized)
cgacggactccgtgcgtctcagcatgagtttcggctgcatgttactacactgttccatcaagtccctggtcagcacctctaggatgctggtcaggtagaccagcttggtttgcagtgcaa

SEQ ID NO: 1029775 - DNA, 120 bp, Artificial Sequence
  ENSG00000287237_4 (sequence is synthesized)
tggttaggaaggaggcaaacagacacctgttgaaaaagagagctgggtgaaccattggctgcaggcctagctggacacccatgggagtttccatggaagctcactggcagggcagggagc

SEQ ID NO: 1029776 - DNA, 120 bp, Artificial Sequence
  ENSG00000287234_0 (sequence is synthesized)
actttggtgggagctttggttcggctgggacctgcgccctgaatgaaggcttccctggtaccccctgccgatccgcggtcttggggacctgcgcgtccgatagcgcgtgctcgaagagga

SEQ ID NO: 1029777 - DNA, 120 bp, Artificial Sequence
  ENSG00000287234_1 (sequence is synthesized)
taaactgagaccagagagcagagggggcttatttccctctgccccatactggccggcgaaagggcaagtcacacagagcaggcgacctttttgtcaaaagtgtgtggggcggggcgcgca

SEQ ID NO: 1029778 - DNA, 120 bp, Artificial Sequence
  ENSG00000287234_2 (sequence is synthesized)
gtaggcgccctaaacgctggactgaacagagaagcttaattgatacttaagagtggaagcttagctacagttaaggactccttcctcctttcattcatttaataaagatttattgattca

SEQ ID NO: 1029779 - DNA, 120 bp, Artificial Sequence
  ENSG00000287235_0 (sequence is synthesized)
gcactcagtactcatggctgatcaagggaagtgagctcatctcaccttgactcacagcgatgacaggttcaagcccctgcatgtgggcccgttcctcagaggatgtttgcaatgggggtg

SEQ ID NO: 1029780 - DNA, 120 bp, Artificial Sequence
  ENSG00000287235_1 (sequence is synthesized)
ggggttgccatggtgatgcccagtcaacagaatggagaaaagagaaatttggtttgaaatgaaatttgagtcttgagagagggctgatatgaaggagaatcaaacaagccacatgggagc

SEQ ID NO: 1029781 - DNA, 120 bp, Artificial Sequence
  ENSG00000287235_2 (sequence is synthesized)
atctgaaggcctggagataagggcctgttgcatggctgtgaaaatttggcctttaaaataactaggcatgggccagaaatcacagccggcggctgcgaccacccaaggcaggagatccag

SEQ ID NO: 1029782 - DNA, 120 bp, Artificial Sequence
  ENSG00000287235_3 (sequence is synthesized)
cgggggactatggagctcagtggagctgcggcctgggagaagcccacccaagagaaccatgtaactagaaaccatcacattcggcttcgtgtgagggagaagcaggtgtttcattgcacg

SEQ ID NO: 1029783 - DNA, 120 bp, Artificial Sequence
  ENSG00000287235_4 (sequence is synthesized)
cagttactgagatctggggttgtttgttattgcagcaaggacccaccctaacacacgaggtgttatatgcattttacagattgccaagatggtacagacagcagaagtggcaaaacaaca

SEQ ID NO: 1029784 - DNA, 120 bp, Artificial Sequence
  ENSG00000287235_5 (sequence is synthesized)
cttaaactcaaacctgcccaacttcaaagtccacgcccttccctgggcttcagactgccgtctttgatgctatctttcattgagatgttgtttgcattaaatgggggatcttgcggcaca

SEQ ID NO: 1029785 - DNA, 120 bp, Artificial Sequence
  ENSG00000287235_6 (sequence is synthesized)
cggtggaccttgcccagcacccactcttcctagggccagccttactctgtggggtcagcctttgaccgtctgggccatgaaggtggctgatgaggccccttcgacagccaagttggggca

SEQ ID NO: 1029786 - DNA, 120 bp, Artificial Sequence
  ENSG00000287235_7 (sequence is synthesized)
caatctcctccggatgttgttattccttcacagtctcatcgcaggcggggaggaagtcagagggctgatttagaggacagagatacaaacagagtgagcagaggatgtttggctgcagtt

SEQ ID NO: 1029787 - DNA, 120 bp, Artificial Sequence
  ENSG00000287235_8 (sequence is synthesized)
gctccagagtttcaagggagaaaacacaagcattgctgagcggccattaggggcttgcacgctcagctgggcacatgtccacaccgaggcatcacgtgcggtctgagctgagctctcatc

SEQ ID NO: 1029788 - DNA, 120 bp, Artificial Sequence
  ENSG00000287235_9 (sequence is synthesized)
gcaaggtggtgaagcaccaccgtggaagggcaccagccgggccctggggtcacagaagtgccccaggaagtgtggccgttaagcctggtgagaggagagcgagccgggaggacggtgaga

SEQ ID NO: 1029789 - DNA, 120 bp, Artificial Sequence
  ENSG00000287235_10 (sequence is synthesized)
gacaggcatgacggggcggtgagtgtgactgctgctgagcatgtctgagacggcaggcagtcaccaaaggcttgtaagcagaggcaacaccctgacttgtggtttggagagatcatggtg

SEQ ID NO: 1029790 - DNA, 120 bp, Artificial Sequence
  ENSG00000287235_11 (sequence is synthesized)
actgccgtgcagggacggaatggaggctgctccagtgactctggccgtgggcagtggtgggcgggtgaggggacagaggaaagtggatggagttgctgcccccacaaccctgctgagaaa

SEQ ID NO: 1029791 - DNA, 120 bp, Artificial Sequence
  ENSG00000287235_12 (sequence is synthesized)
gtgcccacgggacctggcggggtgtgagtcacacttgggctgctctgcctggctctgcacctatttcgtgagctggaagggacagcctgagccccgtcccttggatggacatcaatgcag

SEQ ID NO: 1029792 - DNA, 120 bp, Artificial Sequence
  ENSG00000287235_13 (sequence is synthesized)
gagtaagggtctgtctctgaagctctctgagcaacggaagggaaggtgcccactgggctcaatgcagagatattggggctgatgtggcaggaggggtgggtgtgcaggcccggcggggaa

SEQ ID NO: 1029793 - DNA, 120 bp, Artificial Sequence
  ENSG00000287235_14 (sequence is synthesized)
ggagacttccaaacagacgggctgccccacggggaatctggctggggccagtcattctcagagtcaaaccatcttcattcaactccgaggctgccccaggccagtagcgtccttcctgag

SEQ ID NO: 1029794 - DNA, 120 bp, Artificial Sequence
  ENSG00000287235_15 (sequence is synthesized)
agcgcttcctgcgagatttatgaggcaggggccaggcctggatcgtagaaagctagagaatgccttggctgcccagggaagtctggaatttcttccaaaccaagcttccagacgtccctc

SEQ ID NO: 1029795 - DNA, 120 bp, Artificial Sequence
  ENSG00000287235_16 (sequence is synthesized)
tggactcctctgtctgagaatgggcactttaaaggcccaggagagaactcccatgacaccgttttccaacctcccatctcccctccccggcagctccccatttccggcatctcggcttgg

SEQ ID NO: 1029796 - DNA, 120 bp, Artificial Sequence
  ENSG00000287235_17 (sequence is synthesized)
caggacccctccaggacctcactcctctgagacgcactgcagacctcacaggtgacagcagcgttttgctgactcagaggcaactaccacgatgaccctccagcccgtgtccagacctgg

SEQ ID NO: 1029797 - DNA, 120 bp, Artificial Sequence
  ENSG00000287235_18 (sequence is synthesized)
ggcagcgacttggacagggggctgcagaagtgggtctgtgagggggacctgacggggggctgcagaagtgggtctgtgaggcggacctgggggggcagccctggggtgggctcactgggg

SEQ ID NO: 1029798 - DNA, 120 bp, Artificial Sequence
  ENSG00000269707_0 (sequence is synthesized)
ctattgcgaacgcccagagccgccgagggaacgccaacgtctgggccggacactaagattctggagatttggaagtccaagatcaaggtgctgccggatttggttcttgtctgggttcat

SEQ ID NO: 1029799 - DNA, 120 bp, Artificial Sequence
  ENSG00000269707_1 (sequence is synthesized)
gatcaaggtgctgccggatttggttcttgtctgggttcatagaagattgtcctcaccataggcatgggcaaagacttcatgacaaaaacacaaaaagcaattgcaacaaaagccaaaatt

SEQ ID NO: 1029800 - DNA, 74 bp, Artificial Sequence
  ENSG00000269707_2 (sequence is synthesized)
tgatgattaaaaagtcaagaaacaacagctgctttagaggatgtggataaacaggaacacttttacactgttgg

SEQ ID NO: 1029801 - DNA, 72 bp, Artificial Sequence
  ENSG00000269707_3 (sequence is synthesized)
agaacacatggacataggggctaggggagggatagcattagaagaaacacctaatgtagatgatgggtggat

SEQ ID NO: 1029802 - DNA, 120 bp, Artificial Sequence
  ENSG00000269707_4 (sequence is synthesized)
gcctgtcagggggtgaggggctaggggagggatagcattagaagaaacacctaatgtagatgatgggtggatgggcgcaacaaaccaccatggtgtgtgtatacctatgtaacaaacctg

SEQ ID NO: 1029803 - DNA, 120 bp, Artificial Sequence
  ENSG00000269707_5 (sequence is synthesized)
tatatgtatatgtatatatagtcctcactgtgccctaacatggtgggaaaggcaagggatctctctggcatctcttttataagggcactaatcccactcatgagggctctgccttcaaac

SEQ ID NO: 1029804 - DNA, 120 bp, Artificial Sequence
  ENSG00000269707_6 (sequence is synthesized)
cctaaccacctcttaataccatcattttgggcattacaatttcaacacatggcttttggggcacacagacatccagttcataacaacgaggtcaggaatgcttccttttggtggcttttt

SEQ ID NO: 1029805 - DNA, 120 bp, Artificial Sequence
  ENSG00000269707_7 (sequence is synthesized)
aaagacacacaaaaacaaagatgagaaggcagggagaaagaaaagggaaagggggtagaaagggggtagagagagaaaaggatggggatttaactctctgataaatactaacatgtttac

SEQ ID NO: 1029806 - DNA, 87 bp, Artificial Sequence
  ENSG00000269707_8 (sequence is synthesized)
aatttttaaaaaatgggtcaggtagaggtcaaggcattagaattgcttgagccaaagagttcgagatcacgctgggcaacacagtga

SEQ ID NO: 1029807 - DNA, 120 bp, Artificial Sequence
  ENSG00000269707_9 (sequence is synthesized)
ggttgagcgtccatgtgtggctactgggtttgctggggacacctcttgcctgccagggtgagcacacgcagcagtgagcagccccgtgtgaccccacgggatgaggatgccatgatgtca

SEQ ID NO: 1029808 - DNA, 120 bp, Artificial Sequence
  ENSG00000269707_10 (sequence is synthesized)
gggagcggcggcagcgagcggtccgtctcgcacgcgcgggcaccgcgctggtcctgggctgcaggtttcccagatgatggcatccgagaacttaaacaaagggggctgccgccggcgcgc

SEQ ID NO: 1029809 - DNA, 120 bp, Artificial Sequence
  ENSG00000269707_11 (sequence is synthesized)
ggaaagttgcggtggcggatttccaaggagcgtggccacgaccagagctcttggcgatgcgagcccccgcttcccacccccgccgatcagagaagggggccggctggtgaagggaagagg

SEQ ID NO: 1029810 - DNA, 120 bp, Artificial Sequence
  ENSG00000269707_12 (sequence is synthesized)
aaactttgaaaccactggggacacatctgtctataggtgtccgcgagcctgatctttctcggttgtgtgacaagaacctgacttttcctgcagcacaagtgaatgccagtgagatgaaac

SEQ ID NO: 1029811 - DNA, 120 bp, Artificial Sequence
  ENSG00000269707_13 (sequence is synthesized)
caataaactttgaccaaaggaagaaatctgaattctaatccaaggagcatggagagaggcactttgaggttttccaagctctcgtcctatctatgctttgggcgctgaacagggagggga

SEQ ID NO: 1029812 - DNA, 120 bp, Artificial Sequence
  ENSG00000269707_14 (sequence is synthesized)
ccgtgatgccatgcatggccaacagcaacggatgccaagcaaggctcatggcataagacagactcgaggtgagggcactcccaaccacgcaggtgaaatacacacattcgaagactgccc

SEQ ID NO: 1029813 - DNA, 120 bp, Artificial Sequence
  ENSG00000269707_15 (sequence is synthesized)
ttgtgggtgtgtgtccaagtgcagaagcacatagcagggagcccacttaaatcctgccctccaggatcacaagaatcacaagatgccatagttccaaattgaaatggagatgatgtcaga

SEQ ID NO: 1029814 - DNA, 120 bp, Artificial Sequence
  ENSG00000269707_16 (sequence is synthesized)
actgggtgacctccaattcttttcaccaatggagggctggataaaataaaaatgctatggtttgagtgtatctcagacaagggccataaacgatgtacactgcgcatggttagatgacac

SEQ ID NO: 1029815 - DNA, 120 bp, Artificial Sequence
  ENSG00000269707_17 (sequence is synthesized)
tttaacaactgacacttacacatcaagtgagggcgtccttccactgcacagctacatagaaaaatatggaatggtaaagaagaaagaagaaccgtgagcaggagaaccattccattttat

SEQ ID NO: 1029816 - DNA, 120 bp, Artificial Sequence
  ENSG00000269707_18 (sequence is synthesized)
tccttatatgtacaaacatgaataatttgacatgatgtttagacagtttccccctaacttaagtcttttaattaaaatgaaaggaagaaaatacgctttaaatatgaatgcgagaaggtg

SEQ ID NO: 1029817 - DNA, 120 bp, Artificial Sequence
  ENSG00000269707_19 (sequence is synthesized)
tgagttgacagcccccagccttcctactcttctctcgctgttgttagcaagcacaataaaatctcatcttcccctgtcgtcttttcataatgtttatggttgttttaggtaacacgtaaa

SEQ ID NO: 1029818 - DNA, 120 bp, Artificial Sequence
  ENSG00000269707_20 (sequence is synthesized)
ccatactgaatgtgatattccccttatgacatgtcaggggcacatattaaactagagcctgtcccttattcggctatttacttttgtggcaaatcaatgtattttccttgactcaccagg

SEQ ID NO: 1029819 - DNA, 120 bp, Artificial Sequence
  ENSG00000269707_21 (sequence is synthesized)
caatattgcaaggctgcccgtggccaggaaggtaaatgctaacttttcagcctgcgccaagtggcacaccctcggctcactaccgagtgaatgagagcagtatattctggactgaaaaat

SEQ ID NO: 1029820 - DNA, 120 bp, Artificial Sequence
  ENSG00000269707_22 (sequence is synthesized)
gggctcggatgttggccctaataaattacatgattattaaaatgctgtgcagttcctgcccatatcactttattttacctcttgctgtctccccctggttgcctgctccactttacctct

SEQ ID NO: 1029821 - DNA, 120 bp, Artificial Sequence
  ENSG00000269707_23 (sequence is synthesized)
cccagagccgccgagggaacgccaacgtctgggccggacactaagagtgtccgcgagcctgatctttctcggttgtgtgacaagaacctgacttttcctgcagcacaagttctggagatt

SEQ ID NO: 1029822 - DNA, 120 bp, Artificial Sequence
  ENSG00000269707_24 (sequence is synthesized)
agaaaatttttttaaaattagtcaggtgctgcggcatgcacctgtaagtctgaaagctggggcgggggattgttcaagcccaagagtttaaggctgcagtgaattataattgtgccactc

SEQ ID NO: 1029823 - DNA, 120 bp, Artificial Sequence
  ENSG00000269707_25 (sequence is synthesized)
cccccgccgatcagagaagggggccggctggtgaagggaagaggaaactttgaaaccactggggacacatctgtctataggagagaggcactttgaggttttccaagctctcgtcctatc

SEQ ID NO: 1029824 - DNA, 120 bp, Artificial Sequence
  ENSG00000269707_26 (sequence is synthesized)
gagggagttagcagtggagctgactgcattggaaagccttgggaaaacagcacggaaaataacaggcggccggagccacggccagttctggagatttggaagtccaagatcaaggtgctg

SEQ ID NO: 1029825 - DNA, 120 bp, Artificial Sequence
  ENSG00000277959_0 (sequence is synthesized)
ggggagccccactcagggcgtaaatacatttggttcactgtgagattctgggggtactgacagcggcaaacactgtcctagggaagtcacgtgacatgagggcaaagatggtgacggcag

SEQ ID NO: 1029826 - DNA, 120 bp, Artificial Sequence
  ENSG00000277959_1 (sequence is synthesized)
acaagatgcttccgggataagcaggagggaaaaggcagaaatgtccacataaccacagctgcggccaaatcctcagaattatataacagcacgaaacattaaagaggattttaaatctga

SEQ ID NO: 1029827 - DNA, 120 bp, Artificial Sequence
  ENSG00000265678_0 (sequence is synthesized)
acaccaggccctgcggctggtgccaggcttgaggggcactgaggggccttcttgctgttgaccccacaggcaaaggaaggagggcatggatcacagggcccatgtcctagtcacgtgatt

SEQ ID NO: 1029828 - DNA, 120 bp, Artificial Sequence
  ENSG00000265678_1 (sequence is synthesized)
ctgcacacagtgacctggggggcagggagtgaacgattctacttctctcggattcagtttctggtaaaatgttatttggtaaaagtttattttgatgattctctaaaatctttccacaaa

SEQ ID NO: 1029829 - DNA, 120 bp, Artificial Sequence
  ENSG00000265678_2 (sequence is synthesized)
cagggcagcagcagctgtccacccatctgcccccacgcctaggactgccccagcaccccacaggtgaggaggagatgtctccaagtatctggacgattcgaagaaaattcgaaggaaact

SEQ ID NO: 1029830 - DNA, 120 bp, Artificial Sequence
  ENSG00000265678_3 (sequence is synthesized)
ttggtctgctgaaatgtcttcacgtcctgaggacatgtatgaggtccagggtcccacgtggcgtttctacggatgatgacttgatgcccgtctctcctgtacagagcccagggtcccacg

SEQ ID NO: 1029831 - DNA, 120 bp, Artificial Sequence
  ENSG00000277954_0 (sequence is synthesized)
attcaatttggaataagtgctaaccaacgaacacaccaacttccaccaaaatgatgggaagcagcagacgagaacagagatgtctactccaaagtcctcagccctgcaaactgcccggct

SEQ ID NO: 1029832 - DNA, 120 bp, Artificial Sequence
  ENSG00000277954_1 (sequence is synthesized)
ttttcagtgagttgtagccaacgagtactattcaagtgacatcaatgactagcatttattgagaggttacgatttgccaggctctgcatggagagctttgtaagcattgttgcctaaccc

SEQ ID NO: 1029833 - DNA, 120 bp, Artificial Sequence
  ENSG00000277954_2 (sequence is synthesized)
tcacagagctctatgagccagggacagttagtatttccatttatttagagagaagcctacctgatatcagagatcaaaagcaactcgtccaaagccatacagataattacgtagagtgag

SEQ ID NO: 1029834 - DNA, 120 bp, Artificial Sequence
  ENSG00000277954_3 (sequence is synthesized)
tgacttcagactccgtgtccgttggtacatgaaacctgctccccaaatatgtgacacaaatatttgcacgtggcccatttcctcatctatgtcttccacggggctccggcttcctatgcc

SEQ ID NO: 1029835 - DNA, 120 bp, Artificial Sequence
  ENSG00000277954_4 (sequence is synthesized)
tctctgcctgctctgccgccttctcagccaggccatgtctggccatgaggtgatgccctaacatggcctaaaatgaaatgtgggggctgtcgtgtgttcacccgagaaatgttaaaagga

SEQ ID NO: 1029836 - DNA, 120 bp, Artificial Sequence
  ENSG00000277954_5 (sequence is synthesized)
gatttttttttccattgatttactcatggagctaaattgaaatgatatccatttggatgaacaaaaatgaagactcagcacccccttcgatgatccaacagcaagtgacccttactaaaa

SEQ ID NO: 1029837 - DNA, 120 bp, Artificial Sequence
  ENSG00000277954_6 (sequence is synthesized)
aggtcgtccgattcaaaatgccatctccaggtgccagatttgcagaactaagaaacctactctttgatgatagaattttttcaaagcaccgacatcccatacaagtgaagtggacacaac

SEQ ID NO: 1029838 - DNA, 120 bp, Artificial Sequence
  ENSG00000277954_7 (sequence is synthesized)
ccccatcttatcagttcccacgcatgtaggtgcgggctctggagtgtttcatcaggtttgcagagaaaatactgatccatccctctgactccctctcctccaatgattcctaacacagtc

SEQ ID NO: 1029839 - DNA, 120 bp, Artificial Sequence
  ENSG00000277954_8 (sequence is synthesized)
attcctacaaattcctgacaactgactcccacaaaggccttcaacaatccagccttagacacatgcaaatacttcctgtaggtattgaaatgtaactttcttcataaacctttgggagtt

SEQ ID NO: 1029840 - DNA, 120 bp, Artificial Sequence
  ENSG00000277954_9 (sequence is synthesized)
ttgctaactcacaggctattcttaacctttattatagaagaggaatgcactcaatttcccaaaaagaaacaatgaagatgatcaggaaagcaaatatttgttttcaggctttagaagtgt

SEQ ID NO: 1029841 - DNA, 120 bp, Artificial Sequence
  ENSG00000277954_10 (sequence is synthesized)
gagaaagtgttctggagaatccatttagatcccatgccaactcttagccctccagaagagaacatgccctccctaacaaattagacgtggacaatgtgtttagatgttgatcttttgcca

SEQ ID NO: 1029842 - DNA, 120 bp, Artificial Sequence
  ENSG00000277954_11 (sequence is synthesized)
caaggaaaaatatttctttgctagcaacaggttcacaaaggtagaaaaacctcaggctccttttcagttgcctctcccatgacaggtgaagagtgtcattccccaggtgacactagggac

SEQ ID NO: 1029843 - DNA, 120 bp, Artificial Sequence
  ENSG00000277954_12 (sequence is synthesized)
agtgtctatgacaggggcttgatggccgtggctcagagagagtaaagtgccagtccatcaccataaatgcaacaggttcaagcacagaccacaaccacaaattacaagggacaccttgag

SEQ ID NO: 1029844 - DNA, 120 bp, Artificial Sequence
  ENSG00000277954_13 (sequence is synthesized)
agaaacgcatgcagggggaagagtgccatgcagcttttaaatgacaggcacgtgctcacaggcttctgttcagagagaacctgtgagctgtcctgtggcctttcctgtttacggtgcagc

SEQ ID NO: 1029845 - DNA, 120 bp, Artificial Sequence
  ENSG00000277954_14 (sequence is synthesized)
catcccaaatatgatgcccccaaatccgagtctggctagaaggaagtgtcatacaaaggccatgccattctccctgacaaaagacatgagtttcttgcaagagcactaagaagttttaag

SEQ ID NO: 1029846 - DNA, 120 bp, Artificial Sequence
  ENSG00000277954_15 (sequence is synthesized)
aggtggactcgaagagaggagaatgaattggaaagccagcaagaatgtggctcttactcctctgtgaaatatttgcaggaacgagcctggagaccagcaggttcaggatggaaagctgga

SEQ ID NO: 1029847 - DNA, 120 bp, Artificial Sequence
  ENSG00000277954_16 (sequence is synthesized)
aagaattctttcctaaaacttaagttttagagaaaaataggcagccagtcccaaccacccaaaggcgtccaaagccatgtttgttctgggaaggccaaggcatgggaggatgttaacttg

SEQ ID NO: 1029848 - DNA, 120 bp, Artificial Sequence
  ENSG00000277954_17 (sequence is synthesized)
tacgctctcagggcctgtgtttccaagtcgacaaactgttctgagcttttccatgaaacgagtgaagcccttttcatacctccttcgtgttccagaattcttgccatcgatgttccaaag

SEQ ID NO: 1029849 - DNA, 120 bp, Artificial Sequence
  ENSG00000277954_18 (sequence is synthesized)
gatctgtgatagatttatgtctagccttaaatgggacgagttgtaacattcagaattattttatctttctgagacctgctattattgtgagaccctagacatgctttgctggggttaggg

SEQ ID NO: 1029850 - DNA, 120 bp, Artificial Sequence
  ENSG00000277954_19 (sequence is synthesized)
tgagggtactcctaacgagggaaggaaaaagaaacggcttcaaggcaatccatgtgggtcattacatgcacacttgttccatcttccatttgtgcctgcccaaagcgttctagaactgac

SEQ ID NO: 1029851 - DNA, 120 bp, Artificial Sequence
  ENSG00000277954_20 (sequence is synthesized)
cggacctgagaggctgtctcattagaactaagagaaggtattgttgatgatgtcttatatccatggaagaattccctgggcattccctctgatgctgcctgggatacctacattgctcaa

SEQ ID NO: 1029852 - DNA, 120 bp, Artificial Sequence
  ENSG00000277954_21 (sequence is synthesized)
agtacagtttctttatgaatagggatgaaacatcgcattggggtatctattcttccatggttggtttgaaatagccaagcagaagtgccatagaaatttgccaacaaaataagcatctaa

SEQ ID NO: 1029853 - DNA, 120 bp, Artificial Sequence
  ENSG00000277954_22 (sequence is synthesized)
ctgatagtgtcgtccttctacatggaacaaatctgatggcatgtcactgaaattttccaactgggccaccttgatgcccgtgctaaaggactgctgggtgtttataagatataaaagaag

SEQ ID NO: 1029854 - DNA, 120 bp, Artificial Sequence
  ENSG00000277954_23 (sequence is synthesized)
atatttagtgtgtgtttatttgaaacattttacatttttactctacttctttaacctctgttatggttatagctagctcgtgtactgcgtataaatgtatgcatctgtattcgccatcta

SEQ ID NO: 1029855 - DNA, 120 bp, Artificial Sequence
  ENSG00000277954_24 (sequence is synthesized)
caccaaaataaacctttgaaattattgccaggcagaattaatgagctcagttctaacagcgcaaagaatatcttcatactacaggtaaaacaaacagcttctcccttcccttcttctgca

SEQ ID NO: 1029856 - DNA, 120 bp, Artificial Sequence
  ENSG00000277954_25 (sequence is synthesized)
cagaatggctctacgaagtctgcctgcaaaattacgtcttttagaaaaccaagtagctggctgttttgtgagcagggaggatttcaggacgaaccacaaacaagctgtttgtttagattt

SEQ ID NO: 1029857 - DNA, 120 bp, Artificial Sequence
  ENSG00000277954_26 (sequence is synthesized)
taaggttgacagttcatttacacgtatgccccataagtattctataacatagtcctgaaaaagcactgaagaaaaaaaaaaaaaaaaacacaaggtctccgctggggccacatcatggga

SEQ ID NO: 1029858 - DNA, 120 bp, Artificial Sequence
  ENSG00000277954_27 (sequence is synthesized)
aggaattaactcttaactctgccttccagaaacaaattaagaggatgtactttgcaataattcagatctcacaggtaggcccccaatgtccagccccgctatttcaaatcgggcatgtct

SEQ ID NO: 1029859 - DNA, 120 bp, Artificial Sequence
  ENSG00000277954_28 (sequence is synthesized)
gagttaggtgtgtggatttccatacagagctcactggaacagaccatttctcaggttccaagacgctggccttgttaatatttcatttagaacatactgtggagagtgtctcatttatat

SEQ ID NO: 1029860 - DNA, 120 bp, Artificial Sequence
  ENSG00000277954_29 (sequence is synthesized)
tacttccataattaatggtgatagcttaggcactgcctttacacagagagatctcttcacagtggtcgatgggtaatgagaaacaatagatatttcattcaccagcagcgtgttgctagt

SEQ ID NO: 1029861 - DNA, 120 bp, Artificial Sequence
  ENSG00000277954_30 (sequence is synthesized)
tagtaggaaatgatcgtgtgtgctgttgctttaattgcccgggtaaataattctgcctcggtgttagtgagcattttaaagcacttgatgccaatagactagaaacaaacaaaaattaac

SEQ ID NO: 1029862 - DNA, 120 bp, Artificial Sequence
  ENSG00000277954_31 (sequence is synthesized)
cttgattatgcaacaccttagcatagaaagttacaaaggtatgtcttttttaaagtttgcattctatcatgcaaatattatctaaatatgcatgtgctgactactcatctactgtatttt

SEQ ID NO: 1029863 - DNA, 120 bp, Artificial Sequence
  ENSG00000277954_32 (sequence is synthesized)
aggaaatacaattaggctgcctttctcttcccctatgtagactgtaaataactgtagatctttctcttgtttccctatgtaaatatatgtaaatactaacaagctatgcatgctgctatt

SEQ ID NO: 1029864 - DNA, 120 bp, Artificial Sequence
  ENSG00000277954_33 (sequence is synthesized)
ctaggcaatttcaggtacttttataatatgaaggcatgtacttgaactcgtttgttaacagaggggaaaaaactctctcaaactctttaaagctgaatagaaattaaagatttcttccta

SEQ ID NO: 1029865 - DNA, 120 bp, Artificial Sequence
  ENSG00000265670_0 (sequence is synthesized)
caggttagaacagatatgcccagtaatttgcaaataagaaatgacactctttttctgagaaactataatgtgtggacataggaactgtctttgtgaagttaagatgaggcccctaatccg

SEQ ID NO: 1029866 - DNA, 120 bp, Artificial Sequence
  ENSG00000265670_1 (sequence is synthesized)
ggccgcataaaggcagagaaacacagggaaaataccatgtgacggtctctgaggacgatgttaaagtgccgcatctacaagacaagaaatgccaaagactgccagcaactaccagggtct

SEQ ID NO: 1029867 - DNA, 120 bp, Artificial Sequence
  ENSG00000265670_2 (sequence is synthesized)
aggaagaggcaagaaggactctttctctacaagtttcagagggagtgcagtgctgccaataccttgatttcaagcttgtagctgcccaaactgtaaaacaatacatttctgttgttttaa

SEQ ID NO: 1029868 - DNA, 120 bp, Artificial Sequence
  ENSG00000265671_0 (sequence is synthesized)
gccgtacgcctcttcctctggcctgcggggtggccggggacagaaggtgtggtcagtgcaagttcctccccagctcggcgaggatccaaaagctaagcacctatggattcttctcatcat

SEQ ID NO: 1029869 - DNA, 120 bp, Artificial Sequence
  ENSG00000265671_1 (sequence is synthesized)
gagaaggaacagcagaagggagaggcgagcaacccggctatcagcagtggccatttccagtgtagataatgaatcatctcatgtgtaatatttgctgataagattaattgaatgtgttaa

SEQ ID NO: 1029870 - DNA, 120 bp, Artificial Sequence
  ENSG00000248801_0 (sequence is synthesized)
gagtgtgtgcatccgtatgcgtcgcctgcctcagcctgcccgggtcctgaacatgtagctgagaggtgcaggacagtcagagggccaaaacttcccctgccaggctgaggctgggccctc

SEQ ID NO: 1029871 - DNA, 120 bp, Artificial Sequence
  ENSG00000248801_1 (sequence is synthesized)
ccgagctcacctgtccgcgttcaggttggacacctaatttgcacatcaggactgccatggaccatggtgcaatgaaggtgaagactggagcactcatcacccacgggtctcactttgttg

SEQ ID NO: 1029872 - DNA, 120 bp, Artificial Sequence
  ENSG00000248801_2 (sequence is synthesized)
cccaggctggagtatagtgccctgatcacagcttgctgcaacctcaagctcccatgctcaagcaagcttcctgcctcaacttcccaagtagctgagaccacaggcatgctccatgacacc

SEQ ID NO: 1029873 - DNA, 88 bp, Artificial Sequence
  ENSG00000248801_3 (sequence is synthesized)
aaccctgcctaccctctgtttctatgtggtgtttgtctttctaagcctggcctatttcgtgtaacataatttcctccagatttatcca

SEQ ID NO: 1029874 - DNA, 120 bp, Artificial Sequence
  ENSG00000248801_4 (sequence is synthesized)
ggcctatttcgtgtaacataatttcctccagatttatccatattgtctcaaatgaccagatttctttcttttttaaggctgaatagtattccattgtacatatatactacattttattta

SEQ ID NO: 1029875 - DNA, 120 bp, Artificial Sequence
  ENSG00000248801_5 (sequence is synthesized)
tcatttcattttctttggatatgtatccagaagtggaattgggctggaatataggcagttctatttttaatattttgaggaaactccatattactttccataatagctgtgctaatttac

SEQ ID NO: 1029876 - DNA, 120 bp, Artificial Sequence
  ENSG00000248801_6 (sequence is synthesized)
attcccaccgccaatgtataagggcttccttttctccacatcctctccaacactggttatctcttgtctttttgatatgttttctcttctctgtaaagctattggttgtagcattttact

SEQ ID NO: 1029877 - DNA, 120 bp, Artificial Sequence
  ENSG00000248801_7 (sequence is synthesized)
ttttccaaatttttttaatcaaacttttgaaatgtatagctgaaatgaaagaattttagcatgaatgctaatatacactcagcacctatattcttgctttttcatgtatttactcctgaa

SEQ ID NO: 1029878 - DNA, 120 bp, Artificial Sequence
  ENSG00000248801_8 (sequence is synthesized)
ttaatatattacttgttatatgcttttgaaagtaaactgcaaacaagtgcatgcttctcctagatctttccacatgctctgccattaattagagttcaatgttcaattttttccttttga

SEQ ID NO: 1029879 - DNA, 120 bp, Artificial Sequence
  ENSG00000248801_9 (sequence is synthesized)
tgtacaattaatacacaattaatttacacacacattttacttagttctgaaaaatgtatatacttttataactcaaagcccatcattatacaacattactatcaccctagcaaaatcttt

SEQ ID NO: 1029880 - DNA, 120 bp, Artificial Sequence
  ENSG00000248801_10 (sequence is synthesized)
tgtgtcccttctcaatcaccaatcctgaccacaccccaagaaaactactgttcaaatttttctccatcattgattggctttgtctgttttagaacttcataaaactaaaatactgtagta

SEQ ID NO: 1029881 - DNA, 120 bp, Artificial Sequence
  ENSG00000248801_11 (sequence is synthesized)
aatcccagggcgccctctcccgcgcgttggttctctagccctccttccctgggaggggtgggattgggagtgttctgttttcattactgcaccccttcccctaaagacaacgggactgcc

SEQ ID NO: 1029882 - DNA, 120 bp, Artificial Sequence
  ENSG00000248801_12 (sequence is synthesized)
ctcctccacagcgccttacctcaaacaggggaccgatcttgttcttctccagaagatagtgcctcttatgcttatgctgcaattaagcaacttgtggaagaggcttatgtggtgacatta

SEQ ID NO: 1029883 - DNA, 120 bp, Artificial Sequence
  ENSG00000248801_13 (sequence is synthesized)
ggaaaaaagttaaacagctttataagacatgatgaaagcagccatcccctagttccttcttcaccctgatctgtgatctccagaggaaatgatgttcaactcatttttttctggttggac

SEQ ID NO: 1029884 - DNA, 120 bp, Artificial Sequence
  ENSG00000248801_14 (sequence is synthesized)
tcaatataatgttttcgagatttattcatattgctgcatgtcagtagttggttctttttattgctgcatatttcattgaataaaaatgccaaagcttgtttattcattcttgtctcacat

SEQ ID NO: 1029885 - DNA, 120 bp, Artificial Sequence
  ENSG00000248801_15 (sequence is synthesized)
caaagtatctgggggatgttttccacttttggctattagaaatgaaacagatttgaatattgtcgtacaggctttttatgcatatatatgccttctttgagtaaatacccagaaattatg

SEQ ID NO: 1029886 - DNA, 120 bp, Artificial Sequence
  ENSG00000248801_16 (sequence is synthesized)
ttactggatcataggttaatatatgtttagttttagaagaaaatgctacctcttttttccaaaatattgtcccattttacactcccagcagtaatgtatgagatttccagttgctgcaca

SEQ ID NO: 1029887 - DNA, 120 bp, Artificial Sequence
  ENSG00000248801_17 (sequence is synthesized)
tccttaccaaaaattagcttttctaattttagtcattgtaaggggtgtgtagtggtggctctatgtagttctaatttgcatttctctaatgactaacgatgttaaacatatttttatgta

SEQ ID NO: 1029888 - DNA, 120 bp, Artificial Sequence
  ENSG00000248801_18 (sequence is synthesized)
cttgtttcatgtacttgttgatatgtctattcaattcctttcaccatttttatggagctgtttttttattattgagttgtaggatttctttatatatgctgcataccaggcctttgttat

SEQ ID NO: 1029889 - DNA, 120 bp, Artificial Sequence
  ENSG00000248801_19 (sequence is synthesized)
atacatgctttgcaatgtacattgtcttaaaatctgtggcttgcctgttcaattcattagtggtgttttgttaagcagtttttaattttgatgaagtgtaacttattcattttttattat

SEQ ID NO: 1029890 - DNA, 120 bp, Artificial Sequence
  ENSG00000248801_20 (sequence is synthesized)
ggttattgctttatgtttcaggtcccaaattttgccttctcacaaatcacaaacattatcctatgttttccttcaaaaattatatggttttatgtattttcaatctcaaaatattctcta

SEQ ID NO: 1029891 - DNA, 120 bp, Artificial Sequence
  ENSG00000248801_21 (sequence is synthesized)
atttttttgctgatttatttactaaagaaatttgagggatttgctataatgttagggatttttctagatgccacattgttattgatttctaatttaattatattatgctcagaaaacata

SEQ ID NO: 1029892 - DNA, 120 bp, Artificial Sequence
  ENSG00000248801_22 (sequence is synthesized)
ttctgtatgctttcaacacttttaaatttattgagacttgttggagggtccagcatataatctatctcagtgaacacactgtatttacttgaaaagatgtatattctgcagttattcagt

SEQ ID NO: 1029893 - DNA, 120 bp, Artificial Sequence
  ENSG00000248801_23 (sequence is synthesized)
gtagtgttctataaaatcatttaggtcaaggtggttgatagtttgttcaaatccatctacgtcttcattaattttatttatctggctctatcaattgctaaaagaatgttgttaaaaatt

SEQ ID NO: 1029894 - DNA, 120 bp, Artificial Sequence
  ENSG00000248801_24 (sequence is synthesized)
gtcaactatgattttagaatcatttatttctccctttgattaatgaatgttgtttcatgaattttgaagctattcagagacaaaaaaaaactatttatgaatattgtcttcctaaatgaa

SEQ ID NO: 1029895 - DNA, 120 bp, Artificial Sequence
  ENSG00000248801_25 (sequence is synthesized)
caacgggactgccctcctccacagcgccttacctcaaacaggggaccgatcttgttcttctccaggagctggccataaaggaattctctgacctacccttgtctgataataggtcataag

SEQ ID NO: 1029896 - DNA, 120 bp, Artificial Sequence
  ENSG00000248801_26 (sequence is synthesized)
actcctactgtagagggttcttgcttcatacccaggtggagggaatgccactgagaggccaagaagaatctggacatgccttactgggttttctcatctcagtctgctggatcacaccct

SEQ ID NO: 1029897 - DNA, 120 bp, Artificial Sequence
  ENSG00000248801_27 (sequence is synthesized)
tttttccaatgaagtttttatacagctattcattcttcattcaacctaagcataaaaatggatattttttcttgtacctttggatcttcattccaaaggcttccatgtcacataaaactt

SEQ ID NO: 1029898 - DNA, 120 bp, Artificial Sequence
  ENSG00000248801_28 (sequence is synthesized)
agacaaaaaacacctgaagctggtgatcagcagcttcccattaagatcttaggagttgggtgattgggctcaagcatgcgcactaagaggcacagtagtagagtttaactggtatatgac

SEQ ID NO: 1029899 - DNA, 120 bp, Artificial Sequence
  ENSG00000248801_29 (sequence is synthesized)
cttcctctaggaacacttgactggtaagggaaaaacacctcaagtgagcatgcgcacaacttcagtaaacacactgcatatgtggtgcctcccaagtgctggcaggccactgcacatgca

SEQ ID NO: 1029900 - DNA, 120 bp, Artificial Sequence
  ENSG00000248801_30 (sequence is synthesized)
gacagcccatcccaagggaagaatcagagagaagagacataaaaccctggaagcatgccaacatataaaaccccacgtcaaggactaaatggcacacttggatctctcaagtcacctcca

SEQ ID NO: 1029901 - DNA, 120 bp, Artificial Sequence
  ENSG00000248801_31 (sequence is synthesized)
tggtcctcttccaagtatacttaactctctttcattcctgctctaaaactttttaataaatattcactcctgctctaaaacttgccttggtctctcactttgctttatggttctcatatg

SEQ ID NO: 1029902 - DNA, 120 bp, Artificial Sequence
  ENSG00000248801_32 (sequence is synthesized)
aattctttcctctgaaaaggcaaaaatcaagttactgcagacaaatatggattcatccctgcttacatactttggtgctgttgttaccaaaacaccaggggttcggtctaggtcctgcta

SEQ ID NO: 1029903 - DNA, 120 bp, Artificial Sequence
  ENSG00000248801_33 (sequence is synthesized)
cttgccacacagaaagccaagccctaagatgacaactattgacaaggaagaaggctttaatcaggtgctgcagctgaggagatgggagctcagtctaaatccatctccctgacccactaa

SEQ ID NO: 1029904 - DNA, 120 bp, Artificial Sequence
  ENSG00000248801_34 (sequence is synthesized)
aactaggggtttatatagaagggaagaaatgtaacaatgtaagagaacaggaactagggaggggcaaggaagcaataatgttgaatgataggtcctggcatctgattgtctggatgtggt

SEQ ID NO: 1029905 - DNA, 120 bp, Artificial Sequence
  ENSG00000248801_35 (sequence is synthesized)
aatctggtgaattttagttccttgatattttttttttgagaggcctgaaagttgtttcctgaggaaggaactcagataaaacaaatataagttttaagttttaagaccaaaagtgtcaat

SEQ ID NO: 1029906 - DNA, 120 bp, Artificial Sequence
  ENSG00000248801_36 (sequence is synthesized)
gggtgggattgggagtgttctgttttcattactgcaccccttcccctaaagacaacgggactgccctcctccacagcgccttacctcaaacaggggaccgatcttgttcttctccagatc

SEQ ID NO: 1029907 - DNA, 120 bp, Artificial Sequence
  ENSG00000234006_0 (sequence is synthesized)
ggtcttctctgtaggcacccctccatggatgcgcgaggaacgagtgtggcgaaggctgcgagttcccacggggtccttggcccggtagtgaagacagagtctcgccctgtcgcccaggcg

SEQ ID NO: 1029908 - DNA, 76 bp, Artificial Sequence
  ENSG00000234006_1 (sequence is synthesized)
cccggtagtgaagacagagtctcgccctgtcgcccaggcgggagtgcaatgtcctgatctcggctcactgcaaccg

SEQ ID NO: 1029909 - DNA, 80 bp, Artificial Sequence
  ENSG00000234006_2 (sequence is synthesized)
atactgttaattcgagcagaatgttcttggccccgccccaacagccccattgttcaacctggatttttttcctgaatgaa

SEQ ID NO: 1029910 - DNA, 120 bp, Artificial Sequence
  ENSG00000234006_3 (sequence is synthesized)
acagccccattgttcaacctggatttttttcctgaatgaaacatttgctatccccgtctttgagatggggagctacaaaagtaagacctgatgtcctgctgtgtaataaaacaacaaacg

SEQ ID NO: 1029911 - DNA, 120 bp, Artificial Sequence
  ENSG00000231073_0 (sequence is synthesized)
aggtcatgtactagaagtctacaagccatggatggagccaatgagagtcaacccacttgccacgggcctctagtgattaacaagctacggcccagaaagccagttccaccaggagctccc

SEQ ID NO: 1029912 - DNA, 120 bp, Artificial Sequence
  ENSG00000231073_1 (sequence is synthesized)
catccacacctcataacgggcagaccgaagcagccgaccctcgagacccagtcggagcctgcgatcactcgggcgaccctcgcctaccccgccgtaaaagccgcggcctttccacctagg

SEQ ID NO: 1029913 - DNA, 120 bp, Artificial Sequence
  ENSG00000231073_2 (sequence is synthesized)
tgctacgggacctacccccgtggcaaggaagagcaaacccgaacttgcgcacacccggcggccctgtctgaaagagccaccccaacttttgttttgtaaaatgtatgagttttcaaatga

SEQ ID NO: 1029914 - DNA, 120 bp, Artificial Sequence
  ENSG00000231074_0 (sequence is synthesized)
gcctgcggaagaaggaggaggagggctggcgatgagaagcagcagggggaatcaagggcaagaagggacccagaggggcaggtggctgagatgctggcgtccaggtgacccgaggaatcc

SEQ ID NO: 1029915 - DNA, 120 bp, Artificial Sequence
  ENSG00000231074_1 (sequence is synthesized)
tctggagatacaggcccgcgcatgcgcgtgctcgagcgctgaagcccattgcccgcagggcgctggactggcgccccggccggcgaggctgtctagtccaggctccaggccccggctctg

SEQ ID NO: 1029916 - DNA, 120 bp, Artificial Sequence
  ENSG00000231074_2 (sequence is synthesized)
gccaggcgccgccgcctcccggtgcagctgaaagtcgacgaagagggcggggcgggggcggcttgtggacttccacacttttcctctcttcgggccagtctggggagagggtggctagct

SEQ ID NO: 1029917 - DNA, 120 bp, Artificial Sequence
  ENSG00000231074_3 (sequence is synthesized)
gtggcggcggccaattacgtggcggacctgcggggctaagctggcacgtcacttccgactagtggagtttttagccttttaacattcaaggattaggtaagttctccccgcggtagactt

SEQ ID NO: 1029918 - DNA, 120 bp, Artificial Sequence
  ENSG00000231074_4 (sequence is synthesized)
caaatactctttgtcctgcccctgcttggcgaaatttaccgaaattatctacctatcccgctggagtgggagccgggggagagctggaaccgcgtctctgctgctcacctttgtgtcctt

SEQ ID NO: 1029919 - DNA, 120 bp, Artificial Sequence
  ENSG00000231074_5 (sequence is synthesized)
agctccttcgcatggggtccgaccgcaacacgtgcgctggataaacgcttgttaactgggtaaaagtcttgcagtgaaaaacccgaggacccttaccgcaagtgtcttttgctcccagct

SEQ ID NO: 1029920 - DNA, 120 bp, Artificial Sequence
  ENSG00000231074_6 (sequence is synthesized)
actgatactggattccactcgtgattctccctttcttagcgcattcatgatatagacatcagtctctgagctggaggaggacaaaggcagcggtcctgtgaattctatgctctagcttgg

SEQ ID NO: 1029921 - DNA, 120 bp, Artificial Sequence
  ENSG00000231074_7 (sequence is synthesized)
gttaagggatttggaattgcacttgtttcagagagctccctctttgcccactagcagggcattagctggtgctgaagacagtggctgcttggcgagcctggatctccaagtgaccccctc

SEQ ID NO: 1029922 - DNA, 120 bp, Artificial Sequence
  ENSG00000231074_8 (sequence is synthesized)
agcaactcctgatgaacaggactgaagccaatattaaagcaagtcaaccaaaggttctctggtgtagacaagacagcaaaaggacagactaccttgtggaacctagcattgttctccttc

SEQ ID NO: 1029923 - DNA, 120 bp, Artificial Sequence
  ENSG00000231074_9 (sequence is synthesized)
tgcagcactaagtaacatttgttctccgttaagatctttgcaaaccacacacaagaattgctggtcatcctgccaatagatgctgctcacagaaccaaatttcctgtgctgaattgtcac

SEQ ID NO: 1029924 - DNA, 120 bp, Artificial Sequence
  ENSG00000231074_10 (sequence is synthesized)
tcatgggcttgagagtaggagactggagaccaaggtggctagaatccagttgggcctgatgtctccctgttgaaagggctccttgtggaatgaatagcacatggctcctgtggtggatct

SEQ ID NO: 1029925 - DNA, 120 bp, Artificial Sequence
  ENSG00000231074_11 (sequence is synthesized)
gatagtggcatagcaccaagtgatgcaggcctgccaggggccacagacacagaagatgctcccggggtcccccatgtactccagacacactgcaggccacctctcccagcaggttgccag

SEQ ID NO: 1029926 - DNA, 120 bp, Artificial Sequence
  ENSG00000231074_12 (sequence is synthesized)
tcatgggccccatcatcatgacttctgtccaaggtactgtgtgcagaaatgtgattgagattcaagtcagggcctctctgcccttttccctccagaaacaaaaccaagataatttatcct

SEQ ID NO: 1029927 - DNA, 120 bp, Artificial Sequence
  ENSG00000231074_13 (sequence is synthesized)
gaacacggtgaaaaaaggaagggagggaggagaaaaagtccgggtctcacctgggattctctgtctcctgcaacatgaaggatttagcctgggaggaggtggtgagaactctgggagaga

SEQ ID NO: 1029928 - DNA, 120 bp, Artificial Sequence
  ENSG00000231074_14 (sequence is synthesized)
aaaaagaaggaaagaatagttttacccatgctgaagttaatttaaaccttcacctagagaagcaaaaaaaaaaaacccacactttcccattttgtgcctcccttcctagagttttagcca

SEQ ID NO: 1029929 - DNA, 120 bp, Artificial Sequence
  ENSG00000231074_15 (sequence is synthesized)
aaggtttagctaagtaattggttttaccagcgcactcactcctcctatcccaagtctgtttgactccctccccatcatcctcctcacctcttttcaggcagggtggggatagcagcagga

SEQ ID NO: 1029930 - DNA, 120 bp, Artificial Sequence
  ENSG00000231074_16 (sequence is synthesized)
ggagattttgggagcctggcaactcctgcaaggaccgcaggacagcccctctgtggggatgcgtggtgccccatctgccgcccttctgaagaatgcactgccttcactttttactgtgtt

SEQ ID NO: 1029931 - DNA, 120 bp, Artificial Sequence
  ENSG00000231074_17 (sequence is synthesized)
agagtccatccagactgttctatccaaaaaagtttctttttcccccacaggcaatcaggaaatgattcctttcccgactgcttctgtctagtgcctgggaatcttgagtcaatccctcag

SEQ ID NO: 1029932 - DNA, 120 bp, Artificial Sequence
  ENSG00000231074_18 (sequence is synthesized)
taagtcagtgactagggaaatccctctctgagcctcccagttcatgttgcttagggaacctgatattttcgtgaaacctgcctacacatgggcagcccaacagcagaacaaatggtggtg

SEQ ID NO: 1029933 - DNA, 120 bp, Artificial Sequence
  ENSG00000231074_19 (sequence is synthesized)
accaaagtgaacaaagaagtatagttgtgccagcttcgtagttgcccatgtggacaagtcagcaggatcaggacacgaggaagagtaaatgtgagacagtcaatgtgacttctgcgataa

SEQ ID NO: 1029934 - DNA, 120 bp, Artificial Sequence
  ENSG00000231074_20 (sequence is synthesized)
acagatttttaaaccccgaaattttgcaaaattttggtgaaacctgaactttcttcgttgcatatactggcactatctgtaccatcatacaactgtctcacattaaagctatttttcttg

SEQ ID NO: 1029935 - DNA, 120 bp, Artificial Sequence
  ENSG00000231074_21 (sequence is synthesized)
ggcactgatgagtaaggttggtataagttcctcagatcaacaaaaacccattttcctgtaagtcttacatttagtatttaaggaactaaaacttaaatacattttgtgaaatggttgaca

SEQ ID NO: 1029936 - DNA, 120 bp, Artificial Sequence
  ENSG00000231074_22 (sequence is synthesized)
cttcactgataatgatttattgcttggattaataaattttccaaaagttgtcttatgtagaatatggtttgcaaccagcagaaccattaatctatactgcaatgatatgcactatgtata

SEQ ID NO: 1029937 - DNA, 120 bp, Artificial Sequence
  ENSG00000231074_23 (sequence is synthesized)
attgtttaaaagcctctacttaatgatgtaaaatgctctatttaattacacatttgggtaaactgtatactaacatctgatggcatttttccactgtttgttgcttttttcaaatacttt

SEQ ID NO: 1029938 - DNA, 120 bp, Artificial Sequence
  ENSG00000231074_24 (sequence is synthesized)
attgtacaaagctgttcttaatatttttcaagtttttttctttgaattttgctaatgttttccttgaattatgagcactgacagaatgtgcttagcacttttggctattcacacagcttt

SEQ ID NO: 1029939 - DNA, 120 bp, Artificial Sequence
  ENSG00000231074_25 (sequence is synthesized)
tgagcatgatttgcatccaatatttacattgctagcaataataagccatctgtgagttttgtcaaaagttattggggattttttaaattttagaaatgcaaattattgtttctttgaact

SEQ ID NO: 1029940 - DNA, 120 bp, Artificial Sequence
  ENSG00000231074_26 (sequence is synthesized)
aactcttatgcagttgcaaaggcatttccagttgttatagtttgtgtacaatatcaggtgttccagattatgattcattattaatatcattgcttccttgttccctctgaggtccagaag

SEQ ID NO: 1029941 - DNA, 120 bp, Artificial Sequence
  ENSG00000231074_27 (sequence is synthesized)
attcatgtttacaatatttagaaacaatgttaaaaaggtatccaaagtttgtcactttattattagtttgttcttaatattctgtttaagtttttgaattcatagatatcaaaacgctgc

SEQ ID NO: 1029942 - DNA, 120 bp, Artificial Sequence
  ENSG00000231074_28 (sequence is synthesized)
acaattatgatttccacaggaataacaacacactaacaataagaaccaaaaacagcaaataggctgcctacaagttttgacaatattaggataatgataatgacagtttttctaaatctc

SEQ ID NO: 1029943 - DNA, 120 bp, Artificial Sequence
  ENSG00000231074_29 (sequence is synthesized)
acagtaaagaatgcagcaacccagcaacactgctacctgtggcctcaggctgcagtgtcagctcttccctgggtctccagcctgccagtctaacctgaaaattatgtacttgccagcccc

SEQ ID NO: 1029944 - DNA, 120 bp, Artificial Sequence
  ENSG00000231074_30 (sequence is synthesized)
attcagtcttcagcagtctctttggagctgagatgtacctaccatctgccttttgggtgcttagggtggagaaccagaaaagtataacctagtgtgtatcctcaaagagctaacaatatg

SEQ ID NO: 1029945 - DNA, 120 bp, Artificial Sequence
  ENSG00000231074_31 (sequence is synthesized)
gggtggtacctataggtctggaaacactttactgactctgtgaggcataccaggagacgtcagagaacagtccctcctcaaatgccaaatgagatgcagaagaaatagtttgctcaagtt

SEQ ID NO: 1029946 - DNA, 120 bp, Artificial Sequence
  ENSG00000231074_32 (sequence is synthesized)
catgggccagatatcccagtggtcagggagtttcatgaatgagatggaactttgcatggaacccgagggatgtgtatgatttgagtagatgaagaaaatgagactttccaagcagctaga

SEQ ID NO: 1029947 - DNA, 120 bp, Artificial Sequence
  ENSG00000231074_33 (sequence is synthesized)
agttagggagcagcaagatgtgtggtgggattgagcacagttggttcagaggatagactgcagttttaataatttgtagtaaatatctcccaactgtttggcactattggagcaagttct

SEQ ID NO: 1029948 - DNA, 120 bp, Artificial Sequence
  ENSG00000231074_34 (sequence is synthesized)
tgaatgccaaatgaaggcataaatcagtaagaggcataataaaaggctgagcagtgcttggctttttacgaactgatcctgataggagcagctgttcaacaaagttgccaggtcaccgtt

SEQ ID NO: 1029949 - DNA, 120 bp, Artificial Sequence
  ENSG00000231074_35 (sequence is synthesized)
acatagtccctgccttctaggggctcactgcctactgggagagacagtctgaaagttggtggagcatgtaactgttggatgaggagtttgagcctgtggactgtgggacccccgaggagg

SEQ ID NO: 1029950 - DNA, 120 bp, Artificial Sequence
  ENSG00000231074_36 (sequence is synthesized)
gtgtggctactctaggcagaacaatcccacagtttatttatatttaaccttgaaattcattagaggatttttcagcagaggtttggtacttgttaatgttaaggtttgcattctctagaa

SEQ ID NO: 1029951 - DNA, 120 bp, Artificial Sequence
  ENSG00000231074_37 (sequence is synthesized)
cctcaaggaaagctgtaccgtgcataatgtaccctcttatgttaatgttgtgtactgtgatcctgtttcagggacttgcacttaggaatctgttacagtgagcacagaagcagacctgtg

SEQ ID NO: 1029952 - DNA, 120 bp, Artificial Sequence
  ENSG00000231074_38 (sequence is synthesized)
ggctcatagtcttcaccccccacccatatatacaagatgaacagagtggaggttaaacaacttgactaaacaacacagttcatggtaaagcccaagactgtacctgcccatccactgcct

SEQ ID NO: 1029953 - DNA, 120 bp, Artificial Sequence
  ENSG00000231074_39 (sequence is synthesized)
tttccatgtatcctggaactgagcatagacctcttcccaggcagagctgacagcaagtaaaggagatcataatcaggggaccaaacaactttgtctaaagtgtgaatgtcacctaaggag

SEQ ID NO: 1029954 - DNA, 120 bp, Artificial Sequence
  ENSG00000231074_40 (sequence is synthesized)
aagctgtgagatcagaagggtggggcagaggagcagacaccatgagggagagtccttgggggtacatctgccagactgacactgtctggcctgggcagtggaggggctagcaggaaccac

SEQ ID NO: 1029955 - DNA, 120 bp, Artificial Sequence
  ENSG00000231074_41 (sequence is synthesized)
aggtactggtggtgtggctactaccgttacaactgcctgtgcttggacatggaccctctgcaatatgcggcagtttcattcattgccccctacattctacaccaagtagaaatggaaggc

SEQ ID NO: 1029956 - DNA, 120 bp, Artificial Sequence
  ENSG00000231074_42 (sequence is synthesized)
aattggatacttcacagacaagatctaagtggagaaggaatgcgtcctgtggctgcagagatccttggagcttggaggggagagcttgagccccactgatgatgacctcccacagctcgc

SEQ ID NO: 1029957 - DNA, 120 bp, Artificial Sequence
  ENSG00000231074_43 (sequence is synthesized)
caactcagccctccctaagtccccatcgggggccaattctcactctggggttggggggactccaccatagctcatccatcatagggatgttggtatctactgtgggttgggtagggccga

SEQ ID NO: 1029958 - DNA, 120 bp, Artificial Sequence
  ENSG00000231074_44 (sequence is synthesized)
tgtgctgaggatggctcccccacaagcaagagatgtggatttggggagcttcccatcttgtgttgaaggaacataactcagaataataagagccaactataacaaacccacagccaacat

SEQ ID NO: 1029959 - DNA, 120 bp, Artificial Sequence
  ENSG00000231074_45 (sequence is synthesized)
catactgaatgggcaaaagctgcaggcattccccttgaaaagtggcacaggataaggaagccctttctcaccactcctattcaatatagtgttgaaagtcctgatcacagcagtcaggca

SEQ ID NO: 1029960 - DNA, 120 bp, Artificial Sequence
  ENSG00000231074_46 (sequence is synthesized)
ataggaagagaggaagtcaaactatccttgtttgcagacagtatgattctatatctagaaaaccccatagcctcagcccaaaaggtccttcatctgataatttcagcaaagtttcaggag

SEQ ID NO: 1029961 - DNA, 120 bp, Artificial Sequence
  ENSG00000231074_47 (sequence is synthesized)
ataatttcagcaaagtttcaggagacaaaatcagtgtacaaaaatcactaacattcctatacacagtcgccaagccaagagccaaatcaggagcacaatcccattcataattgccacaaa

SEQ ID NO: 1029962 - DNA, 120 bp, Artificial Sequence
  ENSG00000231074_48 (sequence is synthesized)
aatcccattcataattgccacaaaaaagaataaaatacccaggaatgcagctaaccaaggaagtaaaggatctctacaatgagaatcacaaacgctgctcaaagaaatcagagatgacac

SEQ ID NO: 1029963 - DNA, 78 bp, Artificial Sequence
  ENSG00000231074_49 (sequence is synthesized)
cagagatgacacaaacaaatggaaaaactttccatgctcatggctaggaagaatcaatatcattaaagtggccatact

SEQ ID NO: 1029964 - DNA, 120 bp, Artificial Sequence
  ENSG00000231074_50 (sequence is synthesized)
aaattcatatggaaccaaaaagcctgagtagtcaaggcaatcctaaacaaaaagaacaaaggtggaggcatcacattacctaacttcaaactacagggctaccatgaccaaaacagcatg

SEQ ID NO: 1029965 - DNA, 120 bp, Artificial Sequence
  ENSG00000231074_51 (sequence is synthesized)
accatgaccaaaacagcatggtactggtacaaaagcagacacacagaccagtgggacagaatagagagcccaaaaataaggccacaaacctacagccatctgatcttcaacaaagttgac

SEQ ID NO: 1029966 - DNA, 120 bp, Artificial Sequence
  ENSG00000231074_52 (sequence is synthesized)
caataaatggtgctgggataactggctggccatatgcagaagatcgtaactggaccccttttactatgtacaaaaattaagatggtttaaagagttaaaacccaaaattataaaaatcct

SEQ ID NO: 1029967 - DNA, 120 bp, Artificial Sequence
  ENSG00000231074_53 (sequence is synthesized)
aaaattaagatggtttaaagagttaaaacccaaaattataaaaatcctgaagataacttaggcaataccattctggacataggaactggcaaatatttcatgatgaagacaccaaaagca

SEQ ID NO: 1029968 - DNA, 120 bp, Artificial Sequence
  ENSG00000231074_54 (sequence is synthesized)
agcaattgtaacaaaagcaaaaatggacaaattggatttaagagctttttcatagcaaaataaacaacagggcagacaatctaccaaatgacagaaaatttttgcaaactatgcatctga

SEQ ID NO: 1029969 - DNA, 120 bp, Artificial Sequence
  ENSG00000231074_55 (sequence is synthesized)
caaaggacatgaacagacacttttcaaaaaagacatacatacagccaactagcgtgttaaagaaaacctcaattatcactgatcattagagaaatgcaaaatcaaaaccatgatgagata

SEQ ID NO: 1029970 - DNA, 120 bp, Artificial Sequence
  ENSG00000231074_56 (sequence is synthesized)
gatcattagagaaatgcaaaatcaaaaccatgatgagatatcatctgccagtcaggatggctacaaaaaagtaaaaaaataatagatgttggtgaggttatggagaaaaggaacttatac

SEQ ID NO: 1029971 - DNA, 120 bp, Artificial Sequence
  ENSG00000231074_57 (sequence is synthesized)
acttgttaggagtgtaaattagttcaatcactgtggacagcagtgtggtgattcctcagagagctaaaaacaactaccatttgactcaccaatcccattactggatatttacctaaagga

SEQ ID NO: 1029972 - DNA, 120 bp, Artificial Sequence
  ENSG00000231074_58 (sequence is synthesized)
aggaatataaatcattccaccataaagacacatgcaagtgtatgttcattgcagcactattaacagtaacaaagctgggcacagtggctcacctcacgactgtaatcccagcactttggg

SEQ ID NO: 1029973 - DNA, 120 bp, Artificial Sequence
  ENSG00000231074_59 (sequence is synthesized)
cctgttctttccacttctggggctgtgacttgagtttctccgcaggagcagatagtgtttgtgtagggactgcggacttttgcattacagcctccctgctttgcccgcctgctgctggaa

SEQ ID NO: 1029974 - DNA, 120 bp, Artificial Sequence
  ENSG00000231074_60 (sequence is synthesized)
cactgctgactgatgtggatacctcaatctttggtttacaaaaagcctaggtgtcttttggcctctctccaggttgatagccatggctcctgaaagaaataaaagatgatcatctttcta

SEQ ID NO: 1029975 - DNA, 80 bp, Artificial Sequence
  ENSG00000231074_61 (sequence is synthesized)
gccggcgagcgcaggccccaggctcgggcgcggcggcgggacagcacctaccttcccggcttcgggtccgggagtgcggg

SEQ ID NO: 1029976 - DNA, 120 bp, Artificial Sequence
  ENSG00000231074_62 (sequence is synthesized)
gcgcggagccgccggagcgctgcctccctccttcctcctcccctcgcccccgccccgcggcgcgacacacaatactcgccggaagcggaagccgcgccgaggctcgtgtcagtggaagct

SEQ ID NO: 1029977 - DNA, 60 bp, Artificial Sequence
  ENSG00000231074_63 (sequence is synthesized)
tgccctgcctcctgtggctgtcttgttgagtcatttgtctctgcttttcttgttgctctg

SEQ ID NO: 1029978 - DNA, 120 bp, Artificial Sequence
  ENSG00000231074_64 (sequence is synthesized)
tcttgttgagtcatttgtctctgcttttcttgttgctctggtctcagtcttgtgatttactcctagaggtgctggcaagcctgagctcagatttaggaataatggggttgggacaggaga

SEQ ID NO: 1029979 - DNA, 120 bp, Artificial Sequence
  ENSG00000231074_65 (sequence is synthesized)
aggatgagatagggactagcagctgatgaaaaggaagggtggacatattcatcgtaggggtttcaggaactccattatctcacactcagcccctttgtcatctctgggatcaacacagtg

SEQ ID NO: 1029980 - DNA, 120 bp, Artificial Sequence
  ENSG00000231074_66 (sequence is synthesized)
ttatcatcgatcagcccccagattcacttcagtgaatctgtaaagaacaagcatgtcctcctcatcccacgaattctgctgcttagaaagccacctgaaagtgatagcccttaaagtcct

SEQ ID NO: 1029981 - DNA, 120 bp, Artificial Sequence
  ENSG00000231074_67 (sequence is synthesized)
cagtctgcccctttagagcaccacagaaagatccctgaatggagatcctgacccttaagtatggaactgctgggaagagctatttggagattatcattacatggaggagctccctctttg

SEQ ID NO: 1029982 - DNA, 120 bp, Artificial Sequence
  ENSG00000231074_68 (sequence is synthesized)
atctgtgccacagatgctggccctgcagttagctcccacctagtccgtgcacacacattctaatcccctcccattcctttacatgctgcggccagagaggcctttctcaaagtggaagtc

SEQ ID NO: 1029983 - DNA, 120 bp, Artificial Sequence
  ENSG00000231074_69 (sequence is synthesized)
tcatcctcacttctctggttacagtgctgggccatggtaacttacaaggcttagcaggaactgtctgcgcactcccccttcctgcccactaccttgtttccctccagttgcgagagaaaa

SEQ ID NO: 1029984 - DNA, 120 bp, Artificial Sequence
  ENSG00000231074_70 (sequence is synthesized)
cattgattgagcattaactatgtgccaggcttgtcctaagtcctttgcatgtattcactcaaacaatcctcacaacattcctatcacatctcccatttcacagtgagggttctaaagcac

SEQ ID NO: 1029985 - DNA, 120 bp, Artificial Sequence
  ENSG00000231074_71 (sequence is synthesized)
gtagtgggtgaggaacttgtccagggtcacacaactaagtgggggtggagaaacatcaaatctaggtggtccaggtggtggccagaacccatcagcacctcactacagctgcctccagtt

SEQ ID NO: 1029986 - DNA, 120 bp, Artificial Sequence
  ENSG00000231074_72 (sequence is synthesized)
tctcgctctaggaaatactcttccctgtcaactcctgttgtcctctgggctcagttgacatgtcatctccttgaggaggacatcctgagatgctccccgactagggtgggcacccacttc

SEQ ID NO: 1029987 - DNA, 120 bp, Artificial Sequence
  ENSG00000231074_73 (sequence is synthesized)
cacactccaaatgcctatttgacctgtgtatcgctgcatccccactgcctggcagatagcaggcccctaataaatatgatttgagcaaataaatatagttcttcaaaaaatagggaggac

SEQ ID NO: 1029988 - DNA, 120 bp, Artificial Sequence
  ENSG00000231074_74 (sequence is synthesized)
ttcttgcttcaggtaatggtaggctaggacatttggaccaaccctcctgcagaaaatagccatttattttgatgcaatatatctggctatgactagagatttcaaatatttggagggcta

SEQ ID NO: 1029989 - DNA, 120 bp, Artificial Sequence
  ENSG00000231074_75 (sequence is synthesized)
ttatgtgaagaactaaacttactctttgtgacatagaggtcagaaattggtcgtttccatagagtatgagagagacagaattgtgctcatcataagtatcttttttaaaagttagactta

SEQ ID NO: 1029990 - DNA, 120 bp, Artificial Sequence
  ENSG00000231074_76 (sequence is synthesized)
ataaaatgggctgccttggtaggtggtgagttctctgtcacgaaagagattcagccacttgctctgagaaagcatggagaatatcaacattgtaagggtcgaccacctcatctctgaggc

SEQ ID NO: 1029991 - DNA, 120 bp, Artificial Sequence
  ENSG00000231074_77 (sequence is synthesized)
cccctcctcacttaggttgccattgcaggtggaacactgggctgagtgtcaaagaacctgggttccacaagctgtgcgaccatggctggttgttttggatctcattcctaatatctgtta

SEQ ID NO: 1029992 - DNA, 120 bp, Artificial Sequence
  ENSG00000231074_78 (sequence is synthesized)
gttaagctgacccgtcaatactgacccacttcacagagttatgaagggattaaattaggtattacatgtaaatctgttttgtttgctttttgttgttcttttttgttttgcttttttctt

SEQ ID NO: 1029993 - DNA, 120 bp, Artificial Sequence
  ENSG00000231074_79 (sequence is synthesized)
tgcattatgaaatcccaagtcaactttttccattcttttatttttttaaaaattgacatcatcattataaccacaaaataatttttaaaatggaaaaaaaaaactcacctgcaaccccac

SEQ ID NO: 1029994 - DNA, 120 bp, Artificial Sequence
  ENSG00000231074_80 (sequence is synthesized)
ggtagactcagagttcactgatggatgctgtcgttgttagatcactttaaaaactgtacagtgtggtccagcacagagcacagtctttcaaatgaaagaaagctggatttaaattctgac

SEQ ID NO: 1029995 - DNA, 120 bp, Artificial Sequence
  ENSG00000231074_81 (sequence is synthesized)
tgtgtctcctagggtgtagccttgaaccaaggacattccttcaactcttgctttgatcataagtaaaatgaaggataatcagtaatgtgagtatactgaaaaaaatgaaagcactgagca

SEQ ID NO: 1029996 - DNA, 120 bp, Artificial Sequence
  ENSG00000231074_82 (sequence is synthesized)
tggtgctggcatccaagagaggctcaataattttctttatttttatttcatagaattcctgacctcaaagaacatatctatgagtgatttctgatagggaaacatgttgaccttgtccca

SEQ ID NO: 1029997 - DNA, 120 bp, Artificial Sequence
  ENSG00000231074_83 (sequence is synthesized)
aatacctagtgctttcaaaaaatagtaacatgtctaacagtctatacaaattcttctctcttgtcaggtagaagtgagagcaagagtcgtaacagcaaacacccttctgacctctgaaat

SEQ ID NO: 1029998 - DNA, 120 bp, Artificial Sequence
  ENSG00000231074_84 (sequence is synthesized)
gcttcaaactttagattacaaagattttgttgtcacggaccgggacacagctgggggtgttggaaaccacacccacttctgcctgagggaaagacaggatagtagctaggtgaccactag

SEQ ID NO: 1029999 - DNA, 120 bp, Artificial Sequence
  ENSG00000231074_85 (sequence is synthesized)
ataccctctctcagagttgaagggtccttaagcctgagaggtcattattgtcatcatctgtgccctgtaatgaggtgttagtaggggtgatatgtatttcttctggactgggaatttaac

SEQ ID NO: 1030000 - DNA, 120 bp, Artificial Sequence
  ENSG00000231074_86 (sequence is synthesized)
acatgatgcgtactcagcctttcaccaccccccaagtagctacacatgatgtgataatagtattggtggtggttttagagagttggagagaaaactgaagttggatttgggtaaaagaaa

SEQ ID NO: 1030001 - DNA, 120 bp, Artificial Sequence
  ENSG00000231074_87 (sequence is synthesized)
ggggaaagaggaaacgtcgtggctggcagggtaggaagggatgcgtgtccaggtgagaaagaggtgtgacgtgcagatgggatgcccgccgctatgacgctgccgagacccgcggtgact

SEQ ID NO: 1030002 - DNA, 120 bp, Artificial Sequence
  ENSG00000231074_88 (sequence is synthesized)
ctgtccaaggtgtgctcggaaatctcttccttaactgtgactttctgacaggtggaggatgtggtcaggagtgggaaaaggattcgagacgggaagagggaggggttcaggatgaagaga

SEQ ID NO: 1030003 - DNA, 120 bp, Artificial Sequence
  ENSG00000231074_89 (sequence is synthesized)
aaactgggtgacatcaagactctgtctcaaaaaaggaaatataatgcaagccgcttatatgatttgtggttttctaattatagctgcattaaaaaagagctccctctttgcccactagca

SEQ ID NO: 1030004 - DNA, 120 bp, Artificial Sequence
  ENSG00000231074_90 (sequence is synthesized)
ttagaggatcctgtttggtagttaaaaccgtattaaaatagagagggaagaaattaagcctccttgatggtgaagagattgggaaccaccactccagtgttagaaaatgtcaaatgacag

SEQ ID NO: 1030005 - DNA, 120 bp, Artificial Sequence
  ENSG00000231074_91 (sequence is synthesized)
aaggtgggctatattaagtgggaatttccaaaccccaccccctggaaggaaggaatgcttggtgacaagccttagaggagagagatgcttgtctagcccattgcctgtgtgcccaggaag

SEQ ID NO: 1030006 - DNA, 120 bp, Artificial Sequence
  ENSG00000231074_92 (sequence is synthesized)
agatgtgcataccttgagatatagagaagactctagtggggagaagccccaggccagcttgtcagcacagggcatcggaggcccccaaccagctccaagttctgaacagcacacagcctt

SEQ ID NO: 1030007 - DNA, 120 bp, Artificial Sequence
  ENSG00000231074_93 (sequence is synthesized)
caaaggcttgtactgctgctcatacccagcagaggccttgcaccaggcctccccatgcaaatcagtgtccccgcagcgtaggtaaaggagctctagctgtgctccctatgggggaacaga

SEQ ID NO: 1030008 - DNA, 120 bp, Artificial Sequence
  ENSG00000231074_94 (sequence is synthesized)
tataccgtgggacactgagagactggaagattgcccaacatttatttactgatctgtgttcaccacagaacctaaggtatttattggtattgtttcaaccagtacgagtgattctttcat

SEQ ID NO: 1030009 - DNA, 120 bp, Artificial Sequence
  ENSG00000231074_95 (sequence is synthesized)
ttagtggtcatctctgcactccaccacagacttttgggaattacaagatgaaaagggccacatcctcaccctggcatagctcagaaaatttggttggggaagtagggacatagacgtgat

SEQ ID NO: 1030010 - DNA, 120 bp, Artificial Sequence
  ENSG00000231074_96 (sequence is synthesized)
cactacaccataatttactaagctgtgagaactggaggtgcatcagtgaccagagtgcatttgagccagaggtagaaggtactgtagacaaaaggaacaacatgcgctctaggctgtatc

SEQ ID NO: 1030011 - DNA, 120 bp, Artificial Sequence
  ENSG00000231074_97 (sequence is synthesized)
attaggtacaattttctgtccttgggggagtctttttaaccctaagacaaaaattatgaatatagaaagaggccacggttcatctttgcaattctttcaggagaaaatttgctgcaactc

SEQ ID NO: 1030012 - DNA, 120 bp, Artificial Sequence
  ENSG00000231074_98 (sequence is synthesized)
actttctaagtttaaaaaaaaaaagagtaaatgatatgaatatcacctgaaagaatttgaggtctcaaacttgggaggatctttgaacaacaatcttggggaatgcctaacagttcatac

SEQ ID NO: 1030013 - DNA, 120 bp, Artificial Sequence
  ENSG00000231074_99 (sequence is synthesized)
tcatttcttgatatctacagatggaaactctacagccttacatatatttcttttttcttttaactactttatactcacagaaaatcagtgttcagcacttctaatagcaggtctagtgga

SEQ ID NO: 1030014 - DNA, 120 bp, Artificial Sequence
  ENSG00000231074_100 (sequence is synthesized)
agcttgagatcagaacagagttccataaagggaaactgagggcacacaaggcagagcagtacccccttatccatggggacctgtctgactggaagtaagggagaagattctactccacag

SEQ ID NO: 1030015 - DNA, 120 bp, Artificial Sequence
  ENSG00000231074_101 (sequence is synthesized)
agaatcagggaaggttaaaactgtgtgtgtttgtgacacttttgctctcttgggcccagatacaggccggaaatcctttgggttctggtgactcaaagtgtggccaaaaggaccagcagc

SEQ ID NO: 1030016 - DNA, 120 bp, Artificial Sequence
  ENSG00000231074_102 (sequence is synthesized)
ctgggagaacatatgagtgcagaatttcaggcctgcaccaagtttttaaacgtctgcattttaacaagctgctcttaatttgcttacgtattaaaatttccagaagcactgttctaggac

SEQ ID NO: 1030017 - DNA, 120 bp, Artificial Sequence
  ENSG00000231074_103 (sequence is synthesized)
catctttaagtgttatccaaaaacatgtaagatcttttttcaaagcaaattctcaagctctaccctagagggattgcttctggttctctggggttggtgcaggaatctacattttcggca

SEQ ID NO: 1030018 - DNA, 120 bp, Artificial Sequence
  ENSG00000231074_104 (sequence is synthesized)
agtgccttagatccttgtgcacactagcatttgaggattgctgccttagatggtgggaaatctgagcaggggagggctgtgggctgaaaatgaaatgatgatgtttaggaactggcacaa

SEQ ID NO: 1030019 - DNA, 120 bp, Artificial Sequence
  ENSG00000231074_105 (sequence is synthesized)
gcatgcttctgctcctggtgggaagcagtgggacagatccagttgattgtagagaatgcagacctcgtgtcatgctcaagtgtcaccttaatgtaatggctggagacagccacatatgac

SEQ ID NO: 1030020 - DNA, 120 bp, Artificial Sequence
  ENSG00000231074_106 (sequence is synthesized)
gacagccacatatgaccctctcattgtccagtcagtaagctcaatcaatgacaggaaccactgactctggtaattaaaaacttattgtggccgggcacagtggctcacgcctgaaatccc

SEQ ID NO: 1030021 - DNA, 60 bp, Artificial Sequence
  ENSG00000231074_107 (sequence is synthesized)
aggtggaggttgcagtcaaacaacaacaacaacaacaaaaacacttattggtgggcaggt

SEQ ID NO: 1030022 - DNA, 120 bp, Artificial Sequence
  ENSG00000231074_108 (sequence is synthesized)
caacaacaacaacaacaaaaacacttattggtgggcaggttctcataagaggccatgggaaagccatgtcctatctcagggacacagggtcatctgggcctctggctaatagaggccaaa

SEQ ID NO: 1030023 - DNA, 120 bp, Artificial Sequence
  ENSG00000231074_109 (sequence is synthesized)
taatgggactattttccctgtgaaatcctgaaaaccaaaaatggtggcgtctttatctgcattagcagaggtaatttgctccttcttgaaatccaaggtcacgtctactgtctggggatt

SEQ ID NO: 1030024 - DNA, 120 bp, Artificial Sequence
  ENSG00000231074_110 (sequence is synthesized)
ttgatccagggtcagtgtggtttctcctttacaggagagccgagtctcagaaaggtgaggtggtttgtgttggtcattggctacctcagattttagagcagctctaccttgattgtgggg

SEQ ID NO: 1030025 - DNA, 120 bp, Artificial Sequence
  ENSG00000231074_111 (sequence is synthesized)
gccatggctcctgaaagaaataaaagatgatcatctttctaaaaagtcttaagtctgaattattagtaacttaactggagaatctcacttttcctactctcgtattttaaccacagttgc

SEQ ID NO: 1030026 - DNA, 120 bp, Artificial Sequence
  ENSG00000231074_112 (sequence is synthesized)
tctaacacagacctttgaggatcttttcatgacttcattcacaaatacctatttatgctgtacagatgctactaggaaggaaatagggatgtctgttttgactgtggaacttaacttggt

SEQ ID NO: 1030027 - DNA, 120 bp, Artificial Sequence
  ENSG00000231074_113 (sequence is synthesized)
ctcgtctcttcgtgcatgcaaccctgtccttgggatagctttcttgagcatatctacttatgttcaagaggtaaattgtcctgaaacccccattgctataagtatttattttattactca

SEQ ID NO: 1030028 - DNA, 120 bp, Artificial Sequence
  ENSG00000231074_114 (sequence is synthesized)
taatacttaatgctcctaaagttggggtatttttttttttggatacctaaacttcattgagatactttgaactatttatagagaaaacggaaccttctaatacctggcttctatttctta

SEQ ID NO: 1030029 - DNA, 120 bp, Artificial Sequence
  ENSG00000231074_115 (sequence is synthesized)
aaatgttatgatcatacatggcttagggctttatggccaaataacttcactgaacccaggaaaaagaatagatccatctgaaacagacctgtagcttccagaggcctaaattttcggctc

SEQ ID NO: 1030030 - DNA, 120 bp, Artificial Sequence
  ENSG00000231074_116 (sequence is synthesized)
catttgtatccttcattttctgtgaggtaaagaagtggaaggagacaagcctcagcccttcccctggcacctttactcttcgcccttcctcctggcatggtggaaagtgcactggaggag

SEQ ID NO: 1030031 - DNA, 120 bp, Artificial Sequence
  ENSG00000231074_117 (sequence is synthesized)
gagtgaagggccctaggtttgcatccatattctgccacttgccaaccttaatggcccttacaattgatttaccctcatgaaatttggaatgatttctaaagtctttcctcgccctgaatg

SEQ ID NO: 1030032 - DNA, 120 bp, Artificial Sequence
  ENSG00000231074_118 (sequence is synthesized)
ttaacattttttgatagtcaggactttctgtagcttcaccttccttatttagtgttatttttttctcaagactgaacagagagggaagctgtcaaagtgtgctgggcacacaccctgcag

SEQ ID NO: 1030033 - DNA, 120 bp, Artificial Sequence
  ENSG00000231074_119 (sequence is synthesized)
tggggcaatggccaattctaatctcaagtcattaggctgcagtagcatgaccactgcttcctgtctaccctcagagggtagagacagctgagctcctgtagttggggtcaggcccagcca

SEQ ID NO: 1030034 - DNA, 120 bp, Artificial Sequence
  ENSG00000231074_120 (sequence is synthesized)
ctctgtggggacagtgattagtgttgtgtcaccaattcagggaaggagccaccttgtcttattttccctcttgaattatcttgatatgaccccattataaatttccttttgtaaacctct

SEQ ID NO: 1030035 - DNA, 120 bp, Artificial Sequence
  ENSG00000231074_121 (sequence is synthesized)
gtctcccaatttctccttttagcttactttctattgaagtagaggaacagagtacaacttccatcctctttcatcagccctgagagcagaacgcaagcgccgttactgggaactatatcc

SEQ ID NO: 1030036 - DNA, 120 bp, Artificial Sequence
  ENSG00000231074_122 (sequence is synthesized)
ttggctccctggatgtggctattaacttctggcctgccactctatcacatacacatatggagatggtgtcatccatgtaccttaccccgtatttacaacttctatcacccaacagtgcca

SEQ ID NO: 1030037 - DNA, 120 bp, Artificial Sequence
  ENSG00000231074_123 (sequence is synthesized)
atggccctgatggtccctctgggagggagagaagagtaagctggagtcaccccttccctgtacttcccacctcgccaggcctgttggtgttagtgtcccttctgatcttggcctgacccc

SEQ ID NO: 1030038 - DNA, 120 bp, Artificial Sequence
  ENSG00000231074_124 (sequence is synthesized)
gcgaaacagtctagaggcttggtgaccttaacctcctaattaatcttcctaagcataagtttccttatcataagttatgtatgataaaattttccttggatgcattcattttagcatgac

SEQ ID NO: 1030039 - DNA, 120 bp, Artificial Sequence
  ENSG00000231074_125 (sequence is synthesized)
ttgaaattatgtgtgaaggaacctggcccacggaagttgccctgtaaattcagattcactttcccttggacatatggatgacattagctcattacagttatgacctccctaaaactccca

SEQ ID NO: 1030040 - DNA, 120 bp, Artificial Sequence
  ENSG00000231074_126 (sequence is synthesized)
aatattctttaagttcttctcttattttccctttagtttgtagtcatatttcttagttcttatatcagttgggattcccacatcttctagttggacaatattggagaagacaccacattt

SEQ ID NO: 1030041 - DNA, 120 bp, Artificial Sequence
  ENSG00000231074_127 (sequence is synthesized)
taactgagttccagtgatatgacaggctttcaattctctaatctcacagaagttagaaaaaaagtagataatcaaaatccacagaaaatatagaagattccattaactctgagaatgatt

SEQ ID NO: 1030042 - DNA, 120 bp, Artificial Sequence
  ENSG00000231074_128 (sequence is synthesized)
ctcaggtatccttaggacctcaagaaagctgttctctcctgggcctgtagagagttcaagtgccaggaatctaccacaaagtagccgggaggtgcagggcagcagggggcacagtgaagt

SEQ ID NO: 1030043 - DNA, 120 bp, Artificial Sequence
  ENSG00000231074_129 (sequence is synthesized)
gctgaagggcttctcagtcttctttaattagagtgagaagaaaagagcacctcctcattttagagtacatggtgtgaactcactctcagctgccaagtgagcttcaccttgggctgtttt

SEQ ID NO: 1030044 - DNA, 120 bp, Artificial Sequence
  ENSG00000231074_130 (sequence is synthesized)
gcatgctttctcctagtgctttaagccaccctgagatgtacagaccaatactggccatcacaaaaatatactcgagtacatagaccattgacactataaagcaagtaaacaatgaagtct

SEQ ID NO: 1030045 - DNA, 120 bp, Artificial Sequence
  ENSG00000231074_131 (sequence is synthesized)
acataacagccaaataacaacatgatgataggatcaaatctgcacatatcaatattaaccttgaatgtaaatgagctaaatgcctcaattaataggcagagagtggcaagttggacagag

SEQ ID NO: 1030046 - DNA, 120 bp, Artificial Sequence
  ENSG00000231074_132 (sequence is synthesized)
aagcaagacccaactgtatgtcttcaagagacccatctcatatgcagggacaccaatagcctcaaagtaagggatggagaaagatctatcaagcaaatggaaaacaaaaaacagcactct

SEQ ID NO: 1030047 - DNA, 120 bp, Artificial Sequence
  ENSG00000231074_133 (sequence is synthesized)
ctgtccaacaaaaacagaatatacattcttttcagctgcacatggtacatactcttaaaatcgaccacaattgctttattggccagaaagcaattctcaacaaattcaagaaacctgaaa

SEQ ID NO: 1030048 - DNA, 66 bp, Artificial Sequence
  ENSG00000231074_134 (sequence is synthesized)
ggccagaaagcaattctcaacaaattcaagaaacctgaaataccggcaaatcacttgaggtcaaga

SEQ ID NO: 1030049 - DNA, 86 bp, Artificial Sequence
  ENSG00000231074_135 (sequence is synthesized)
cctggccaacatggcaaaaacccatctcttctaaaaaatataaaaattagccgtcggaggttgagtcacgagaattgcttgaacct

SEQ ID NO: 1030050 - DNA, 120 bp, Artificial Sequence
  ENSG00000231074_136 (sequence is synthesized)
tcacgccattgcactccagtctggttgacagagtgagactcatctcaaaaaaacaaaaaaaccctgaaataccaaccacactcttggaccacagtgccataaaaataaataccaagaaga

SEQ ID NO: 1030051 - DNA, 120 bp, Artificial Sequence
  ENSG00000231074_137 (sequence is synthesized)
tctctcaaaaccatataattaagtggaaattaatctactcctgaatgacttgggtaaacaaagagaaattaaggcagaaatcaagaaattgtttacaactaatgaaaacaaagataaaaa

SEQ ID NO: 1030052 - DNA, 120 bp, Artificial Sequence
  ENSG00000274421_0 (sequence is synthesized)
gatgaaccaacctctgctagcttcaagcttttcttctctcacctctttcagccatcaaataattgaaaagagttagggcttgctctggattaggatttggcttaaagggatgttgtggct

SEQ ID NO: 1030053 - DNA, 120 bp, Artificial Sequence
  ENSG00000274421_1 (sequence is synthesized)
gctttgatcatctattcagaccactaaaactttcttcagatcagcaataaggtaattttgctttcttatttgtgtgtacactggagtagcacttctaatttccttcaagaactcttcctt

SEQ ID NO: 1030054 - DNA, 120 bp, Artificial Sequence
  ENSG00000274421_2 (sequence is synthesized)
tgcattcacatcttggctagctttcagcctagctcaacttttgtcatgccttcctcactaagctttatttttagcttttgatttaaagtgaaaaacctgtgactcttcttttcacctgaa

SEQ ID NO: 1030055 - DNA, 120 bp, Artificial Sequence
  ENSG00000274421_3 (sequence is synthesized)
cacttagaggctattgtagggttattaattgttctgatttcattattgtcgtgtgtcagggaatagggacacccaaggagagggagagtgactggagaacagatggtcagtggagcagtc

SEQ ID NO: 1030056 - DNA, 120 bp, Artificial Sequence
  ENSG00000274421_4 (sequence is synthesized)
agaacatatgcagcatgtatcgattaagttcactatcttacctaggtgtggtatgtggcactccaatgacaatggtagtatcaaagatcatagatcactaacatatacaacaataataaa

SEQ ID NO: 1030057 - DNA, 120 bp, Artificial Sequence
  ENSG00000274421_5 (sequence is synthesized)
gagcacaagctattggaaaaatggcattttagactttttttgacatagggttgctgcaaaccttgaatgtgttttaaaaaattgtttttaaaccagtcaaatttagcagtggggggttgt

SEQ ID NO: 1030058 - DNA, 120 bp, Artificial Sequence
  ENSG00000274421_6 (sequence is synthesized)
ataccaactttaatgacactatgttagtaacttctgattacccactaccatttgaccagccaaaaaaaaaaaaaaatgttttttaatgcagtatctttgaaggtcagtaaagcaaagcac

SEQ ID NO: 1030059 - DNA, 120 bp, Artificial Sequence
  ENSG00000274421_7 (sequence is synthesized)
aataaaatgaggtatgcctatagttactttgtagagtccataggactttctatgtagaaagtcctgtcttttgcagataggccgttttactttcttttttttcccaatcttttctttctt

SEQ ID NO: 1030060 - DNA, 90 bp, Artificial Sequence
  ENSG00000274421_8 (sequence is synthesized)
gccgttttactttcttttttttcccaatcttttctttcttgtgcattattacatttactcatacctccaggacaatgttgaagagaaatg

SEQ ID NO: 1030061 - DNA, 120 bp, Artificial Sequence
  ENSG00000253445_0 (sequence is synthesized)
gtctttgccacttctcaccgtggccactagagagcgacagtgctccatcttctagaaagaaaccgtccaatccccgcgccttctgccgaggagcctggcgagccacctccctgaacttca

SEQ ID NO: 1030062 - DNA, 120 bp, Artificial Sequence
  ENSG00000253445_1 (sequence is synthesized)
ggactttcagtttcactcccttatggacctgagggtgatcaccaaccggcggggcctctgggggttctacttaacgccgttttggcagcagctcactgactgcaatgtgcccagcatttc

SEQ ID NO: 1030063 - DNA, 120 bp, Artificial Sequence
  ENSG00000253445_2 (sequence is synthesized)
ggcagcctttgggcacccacctcaacagacccaaggcagcggatggccaagagagcccagtggattctgccccaaatatctcatttccctcttagtgtcacctctgccagcatcacagct

SEQ ID NO: 1030064 - DNA, 120 bp, Artificial Sequence
  ENSG00000253445_3 (sequence is synthesized)
ggggcacagtcctctctgctctatcctcacagcacctcacacgtactaggtactcagcaaatgtttctggagtatctttgtgtgcgttatgtggtgctgttttatcaaacccctgaacac

SEQ ID NO: 1030065 - DNA, 72 bp, Artificial Sequence
  ENSG00000274422_0 (sequence is synthesized)
gcgataacgggatgaaatgatgagatgaaatgtaatgagatgaaatgacaaatgaaataatgaaatgagatg

SEQ ID NO: 1030066 - DNA, 78 bp, Artificial Sequence
  ENSG00000274422_1 (sequence is synthesized)
tgatgaaatgaaatgatggatgaaatgatgagatgaaatgtaatgagatgaaatgactgagatgagaagaaatgatga

SEQ ID NO: 1030067 - DNA, 80 bp, Artificial Sequence
  ENSG00000274422_2 (sequence is synthesized)
aatgagatgtaatgatgataaaatgatgatatgaaatgagatgagtgatgagatgaaatgatgagatgagatgatgagat

SEQ ID NO: 1030068 - DNA, 72 bp, Artificial Sequence
  ENSG00000274422_3 (sequence is synthesized)
gatgagaagatatgagatagataaaatgatgagatgaaagatgagatgaaatgatgagatgaaagatgagat

SEQ ID NO: 1030069 - DNA, 120 bp, Artificial Sequence
  ENSG00000274422_4 (sequence is synthesized)
agagttgatgagatgatgagataaaatgatgagatgaaagatgagatgaaatgatgagatgaaagatgagatgaaatgatgagatgaaatgggatgaaatgaaattagacgaaatgtaat

SEQ ID NO: 1030070 - DNA, 120 bp, Artificial Sequence
  ENSG00000274422_5 (sequence is synthesized)
atgatgaaattaaatgatgaaatgaaatgatgaaatggaaatgatgagatgaaatgccgagatgaatgatggatttgaaatgatgagatgcaatgatgagatgaaatcatgaaatcatga

SEQ ID NO: 1030071 - DNA, 74 bp, Artificial Sequence
  ENSG00000274422_6 (sequence is synthesized)
ccccgcactgcatccgatgaaatgaaataatgcaaggaaattgaattgaccctatcacccggaatgagctaaaa

SEQ ID NO: 1030072 - DNA, 120 bp, Artificial Sequence
  ENSG00000274422_7 (sequence is synthesized)
aggaaattgaattgaccctatcacccggaatgagctaaaatgagatgaaataagaaatgatgttttgttttgttgacatgctgaggtgagatgagatgagatgagacgaaagatgagatg

SEQ ID NO: 1030073 - DNA, 120 bp, Artificial Sequence
  ENSG00000274422_8 (sequence is synthesized)
agatgagacgaaacgatgagatgaaatgaaaggaagagatgaaaggccgagatgaaatgatgagatgaggtgagatgaaatgagatgaaacaagatgaaatgatgaaatgatgagatgag

SEQ ID NO: 1030074 - DNA, 120 bp, Artificial Sequence
  ENSG00000274422_9 (sequence is synthesized)
tgagatgaaacaagatgaaatgatgaaatgatgagatgagaagaaatgagatgaaatgagatgagataaaatgatgagatgaaatgaagtgaaatgaaatgaaataatgaaatgaaattg

SEQ ID NO: 1030075 - DNA, 120 bp, Artificial Sequence
  ENSG00000274422_10 (sequence is synthesized)
aaataatgaaatgagatgaaatgaaaagaaatgatgatattgaaatgaaattgaaagatgagatgaaatgaaatgttgaaatgaaatgatgaaatgagatgtgacatgaaatgatgagct

SEQ ID NO: 1030076 - DNA, 120 bp, Artificial Sequence
  ENSG00000274422_11 (sequence is synthesized)
agatgaaatgaaatgttgaaatgaaatgatgaaatgagatgtgacatgaaatgatgagctgaaatgatgagatgaaatgaagtgaaatgagattagatgatgagatgaaaaatgatgaga

SEQ ID NO: 1030077 - DNA, 88 bp, Artificial Sequence
  ENSG00000274422_12 (sequence is synthesized)
atgagatgagatgagatttgatgaaatgagatgatatgaaatgatgggatgagatgagatgagatgaaatgtaaaatgatgagatgaa

SEQ ID NO: 1030078 - DNA, 120 bp, Artificial Sequence
  ENSG00000274425_0 (sequence is synthesized)
gccggcttcgacttcggccccagacttagggctcagcgggggccggtgagtaacggacacgtccgccgccatcttgggaaacccggcgccttctgggaccagcgagccggggcggagcgg

SEQ ID NO: 1030079 - DNA, 120 bp, Artificial Sequence
  ENSG00000274425_1 (sequence is synthesized)
catagagcggcaacgagggcgcgcccgtcgattggctgggagaaaccccacctccttcccgccccccttgccccgttggctaagccccagcccacctctcaagagttcaagctgcgtctg

SEQ ID NO: 1030080 - DNA, 120 bp, Artificial Sequence
  ENSG00000274425_2 (sequence is synthesized)
cgcgccacaggccccgcccccttccgtcgcagcgacgctactcagtggatgtgcacctgggtgggagagacttgcagcgcgggtggaatcaaaccacagattagggagtttgaaggcttt

SEQ ID NO: 1030081 - DNA, 120 bp, Artificial Sequence
  ENSG00000274425_3 (sequence is synthesized)
attggtgcggaatctgagggcacagccaagcccccgccaactttgatcccggatcccagcgtcactcagctctggacggttcttcccccattgcttctgtcggctgcatagacgtgaggg

SEQ ID NO: 1030082 - DNA, 120 bp, Artificial Sequence
  ENSG00000274425_4 (sequence is synthesized)
gcagataggtgctctcctccctaacatggtaactgccgctccgttggtgctccctgaagacgtacattaaggccagtacgatagtcaccacgcccagggtcagtaacaccgccacgaaga

SEQ ID NO: 1030083 - DNA, 120 bp, Artificial Sequence
  ENSG00000274425_5 (sequence is synthesized)
cggggacaaagtgggagctcccagctgtgcagagaaagcgctaagtcaatatgcgtcccttctgtctccaacccccccgccccccggcttaccggtccagacccgcagccccgtgttagc

SEQ ID NO: 1030084 - DNA, 120 bp, Artificial Sequence
  ENSG00000274425_6 (sequence is synthesized)
tcaccctcaatgtccatcaccacgaccagggtgtatttgcctcgtgagctggacgcttggcactgataagtaccattatgtgttacgttgacgaagaacgggatccccaccggcacctcc

SEQ ID NO: 1030085 - DNA, 120 bp, Artificial Sequence
  ENSG00000274425_7 (sequence is synthesized)
cggctggagccttccttcaaacaccgcagctcggggtacgggttgcccctggcttggcactgcaggacgtgtctcgttttatctttccatttcaagtgctgggggcatgtggctcggtca

SEQ ID NO: 1030086 - DNA, 120 bp, Artificial Sequence
  ENSG00000274425_8 (sequence is synthesized)
attttgggaccatctgtggaaccaccatgtgtgatcagacacccaacacacccgaggcacagtggtgcagaggagcgtctaatctttccagggcaggggtggagggattaaaggtcaggg

SEQ ID NO: 1030087 - DNA, 120 bp, Artificial Sequence
  ENSG00000274425_9 (sequence is synthesized)
tgaccgactcacacaggactcgcagctggacgctactgttcctgtgcaagaactcgccgtccacctcgagagtggcactgcagaagaagctgcgtccgtcgtcactctcggtagcattta

SEQ ID NO: 1030088 - DNA, 120 bp, Artificial Sequence
  ENSG00000274425_10 (sequence is synthesized)
gctgaagttgagctggctgccccggggccgcggccggaactccgtccagcgtgacctggactcgagccccagccatgcaactcacggtcactgtggacccctcatgggcggtgggctcgc

SEQ ID NO: 1030089 - DNA, 120 bp, Artificial Sequence
  ENSG00000274425_11 (sequence is synthesized)
ttaatgaacaggaccttcctgtgggtcaagccgctccctccgccctcccctttcctctcgggatatccgggccacgctttcggccgttcaagcctcgccctctttccgcgctgtgtccag

SEQ ID NO: 1030090 - DNA, 120 bp, Artificial Sequence
  ENSG00000274425_12 (sequence is synthesized)
cttcgggcactcaggcccaacccacgttgcaactgctattggggcaagccaggccccaccttttcggctagtctccgccccctctgccacgcccccagactgctgaggccgcgccccctt

SEQ ID NO: 1030091 - DNA, 120 bp, Artificial Sequence
  ENSG00000274425_13 (sequence is synthesized)
cccacgcctcctcttactaaagaccgtcaagttctcccgggcctcccgtctctcgccccctagggtcacgttgcagacgatctcccgggcaccctcctgatccgcgcgcgccgtggctgt

SEQ ID NO: 1030092 - DNA, 120 bp, Artificial Sequence
  ENSG00000274425_14 (sequence is synthesized)
ggctgtggccgttagcgtgtccccgtggttcatgactgtcgcattcagcatctggtcccccagcgccaggtagacctgggcctctgaggctggaaaaagcccgtctagggtgcagtccac

SEQ ID NO: 1030093 - DNA, 120 bp, Artificial Sequence
  ENSG00000274425_15 (sequence is synthesized)
cggccacgacgtttccacctccaagaaccggggggccacgaggcgcgggggggtcacgggcaggactggggagaaaggtgggcatagtacaacccccaggactgtgccttccccaggaca

SEQ ID NO: 1030094 - DNA, 120 bp, Artificial Sequence
  ENSG00000274425_16 (sequence is synthesized)
ccctcatcccccccagtcaggatatcttgctgactgggtcacccttcttcacaggacacacacacagggccatgaaaacggccttcttcaaagatcccacggctcgggcctcccttccgg

SEQ ID NO: 1030095 - DNA, 120 bp, Artificial Sequence
  ENSG00000274425_17 (sequence is synthesized)
ggccaccttgcccagtggccgggggctttccttcccagaagcctgtgaggtccggggtaccccactctcaggaaccccaaggtcagggcaccgtctaccctggctcagctcgtcacccac

SEQ ID NO: 1030096 - DNA, 120 bp, Artificial Sequence
  ENSG00000274425_18 (sequence is synthesized)
cgtctgaagccccttctctcaccaaaggttcggagctggcggggggctgaggtgttcacgaacagtcccagcccctggggctgcatgtccagttctgtgcggcatgagaaaggggctccg

SEQ ID NO: 1030097 - DNA, 120 bp, Artificial Sequence
  ENSG00000274425_19 (sequence is synthesized)
tggtcgtctctgctggccagcacagtggcagtgacctccgctggctcctccactgcgggctgccggctcagctcctcctcccagcgaagcagcaccaccgtgaggctggtccggggcgac

SEQ ID NO: 1030098 - DNA, 120 bp, Artificial Sequence
  ENSG00000274425_20 (sequence is synthesized)
ccatcctccacttggcagcgcagggtgaagttctggcccaccggctgccaaggaggcaggggtgccagctccacacgctccgggagccctgagagaggaggggaggatggcacttagcgg

SEQ ID NO: 1030099 - DNA, 120 bp, Artificial Sequence
  ENSG00000274425_21 (sequence is synthesized)
gtcctgcaaacccacccactcaccccagggactggggaggagacagggtggtcctgccgagaactgtgagctttgagttaataaacttagagggcttagagctgggccagtcgaagcgtt

SEQ ID NO: 1030100 - DNA, 120 bp, Artificial Sequence
  ENSG00000274425_22 (sequence is synthesized)
tgctattatcattagcgcagtgattatcatttcctgtgttgtcagataccttgcaaggcgctaaacaaaactttctgttctcaaagatggcacaataaaaaaaaatgaggatggaaggga

SEQ ID NO: 1030101 - DNA, 120 bp, Artificial Sequence
  ENSG00000274427_0 (sequence is synthesized)
gcacaaaacgtgacactcccctttgcttcacccccactgcactgccagagggaaaaccttccctttctatctacacacaaatttgtttattttgttttcaaaataaaagaaattgtgcta

SEQ ID NO: 1030102 - DNA, 120 bp, Artificial Sequence
  ENSG00000224899_0 (sequence is synthesized)
gaacaagaatacttggacacaattcaaagaacaccatcagatacctgaggtctagcttctggtcccaaatctgtcattcagaagtgtgtaacttgacaatttgttgaatctcactggatt

SEQ ID NO: 1030103 - DNA, 120 bp, Artificial Sequence
  ENSG00000224899_1 (sequence is synthesized)
ttatttctgtcaagagtaaaattaaccagataagaattatgctgagacatagcagtacctcaaaaagtggtggaggtaataagctgcaaagttggaacttgaatcccggacctcaagctc

SEQ ID NO: 1030104 - DNA, 120 bp, Artificial Sequence
  ENSG00000224899_2 (sequence is synthesized)
caaatccagaattcctcactttccccccgctacctgatacagaactggagaaaaataaatttgatttaattaagtgtagcagatcccaggaactattttatgtttaatgattactttcaa

SEQ ID NO: 1030105 - DNA, 120 bp, Artificial Sequence
  ENSG00000224899_3 (sequence is synthesized)
gcttaatttgcctctatttaagtgtaactaacacataatctttaggataaacatctcggaattctttctgaattatccccaaattttaagtttaggtgtgcatttgacaatctgcattgc

SEQ ID NO: 1030106 - DNA, 120 bp, Artificial Sequence
  ENSG00000224899_4 (sequence is synthesized)
tgccaacagtagttggaagattactacctgaaagctgaggaagtttgcttcagctactacatgcccttccttgtggtaaatgtgcaagtcacggcacaataattgaggaaataaatgttg

SEQ ID NO: 1030107 - DNA, 120 bp, Artificial Sequence
  ENSG00000288460_0 (sequence is synthesized)
catctgtgtttgtattggaagcagttgtttggccttgctgagcaaacgtctatgccttctccattacatccaaaggagaatagccccatgtgaagaatggaatcagtagatgtttggtcg

SEQ ID NO: 1030108 - DNA, 120 bp, Artificial Sequence
  ENSG00000288460_1 (sequence is synthesized)
ctgtaccatatccactcctaggatacaacaagagcaagcccaattctcttggtggtgtgggcagtcggcttgcaccacgtacctatctcagctctttttggaagcttatgtcctccccac

SEQ ID NO: 1030109 - DNA, 120 bp, Artificial Sequence
  ENSG00000288460_2 (sequence is synthesized)
aacttccagctttcttatgggacaagggtacactcaccactgccatatctaatcctgcttgcctggtaaatgttctcttcttctttacacccctgatgactctggtcactctactcatcc

SEQ ID NO: 1030110 - DNA, 120 bp, Artificial Sequence
  ENSG00000288460_3 (sequence is synthesized)
tggtctggaaagtaaccaaagacaaaagcaacaagaacagagagacacacccaagaaaggaggcaacatggctgccataaagatctggatctcttggtggggactccactgaggtgaaga

SEQ ID NO: 1030111 - DNA, 120 bp, Artificial Sequence
  ENSG00000288460_4 (sequence is synthesized)
gggagccagagctgctttagccaccctgttcctccattgccagatgtccccccaggcctcatttccttcctctgccaccatccctcttataatgcactcctcctgcggttctttggcttg

SEQ ID NO: 1030112 - DNA, 120 bp, Artificial Sequence
  ENSG00000288460_5 (sequence is synthesized)
tttttttttttttttttgtggatcttcaagactgaaatagtaaatggctcttgatttctgcactaacagaggaaagaaacaagtacatggaaaagtaaaaattgattacaaagcctaaat

SEQ ID NO: 1030113 - DNA, 120 bp, Artificial Sequence
  ENSG00000288460_6 (sequence is synthesized)
aagtaaaaattgattacaaagcctaaattttcctctataaattgggcatgtgctgactgtgggatattgaaattattgggagctcacagcatctcaagttatataatgaagctattctgg

SEQ ID NO: 1030114 - DNA, 120 bp, Artificial Sequence
  ENSG00000288460_7 (sequence is synthesized)
aagctcatttccagaagatccttaaaatgaaatggctcactctctgctgaattgtaggtacactctttcctcctcttcacttaatgctgggagtaaaatgtattttttttattaagaaat

SEQ ID NO: 1030115 - DNA, 120 bp, Artificial Sequence
  ENSG00000226548_0 (sequence is synthesized)
tttacctttgatcctaccccaaggcctgccagaatgaaaataaagaacaaagacaacaaagaaaacagccgacaggaacaggatcttgggagccaaatatcagggtctcactctgtcacc

SEQ ID NO: 1030116 - DNA, 89 bp, Artificial Sequence
  ENSG00000226548_1 (sequence is synthesized)
ggatcttgggagccaaatatcagggtctcactctgtcaccctggctagtgtcaaccttctgggctcgagtgatcctcccacctcagcct

SEQ ID NO: 1030117 - DNA, 74 bp, Artificial Sequence
  ENSG00000226548_2 (sequence is synthesized)
tgggctcccaagtttttactttgctttcacgttccctggagtcttcagagggagcatggctctgttgacaccgt

SEQ ID NO: 1030118 - DNA, 120 bp, Artificial Sequence
  ENSG00000226548_3 (sequence is synthesized)
cctggagtcttcagagggagcatggctctgttgacaccgtgatttctgacttttggcctccagaactgcgggacaatacatgtctgttgtttaaagccacccagtttgtgataattacag

SEQ ID NO: 1030119 - DNA, 120 bp, Artificial Sequence
  ENSG00000226548_4 (sequence is synthesized)
cagccctaggaagcaatatacttagtatggaaaaacaatgtgaaatttctcattagtaattttttatgtgaattaaatgattgatttgataatattcatttgggttaatacaaatatatt

SEQ ID NO: 1030120 - DNA, 120 bp, Artificial Sequence
  ENSG00000180712_0 (sequence is synthesized)
tttccttatatgtctaaccctggcctggagcactggaggatgaggtccgctgactgcagcgtccatcctggtcctccccaggcactgtggcctccctcacagcatggctgccttgggtac

SEQ ID NO: 1030121 - DNA, 120 bp, Artificial Sequence
  ENSG00000180712_1 (sequence is synthesized)
tcggacttcacgtggaaggccagggctccgagagcaaatgccccagcaagacagaagctcagccgcctttgatgacctagaagctaggcagcatccattgtactgccttctatgggttgt

SEQ ID NO: 1030122 - DNA, 120 bp, Artificial Sequence
  ENSG00000180712_2 (sequence is synthesized)
gagtgagtcccaaacctgccttgactcaaggaaacggaattaggctctacgtcttgactaggtagtggcgaagttctggaagcacatgagtaggagatactgtgacggtttcatctttgg

SEQ ID NO: 1030123 - DNA, 120 bp, Artificial Sequence
  ENSG00000180712_3 (sequence is synthesized)
atttccatggcaaaatttgaagccacatgtggtcactgctttgtactgaggaaacaaagtgctctgggcatccagaaagggggtacgttttttcttactgggataaatctggctgcattt

SEQ ID NO: 1030124 - DNA, 120 bp, Artificial Sequence
  ENSG00000180712_4 (sequence is synthesized)
tagctaatcctggaaaattgatcgacaaaagcaaaggaccaagaaagctgcttatatcagtgtctcctccaccctcagcctccagtagcatccctacgttttacaattttatttatgtca

SEQ ID NO: 1030125 - DNA, 120 bp, Artificial Sequence
  ENSG00000180712_5 (sequence is synthesized)
ctttaaataaggccctgaaagcagcagatctcacctgcattggaggatgagacgccacatgaagaagaaagaagacgccacagacagcagcgcagtaccaccttccagagatttggaaat

SEQ ID NO: 1030126 - DNA, 73 bp, Artificial Sequence
  ENSG00000180712_6 (sequence is synthesized)
gcagaaatcacctgtcttctgcgtcgatcatggacccccatgtcttattctcaaataaaacattttggtcaaa

SEQ ID NO: 1030127 - DNA, 120 bp, Artificial Sequence
  ENSG00000180712_7 (sequence is synthesized)
ggatctggcagcatcagtgtccgtgacaggcagcccttggtgggagtttaatttctcggcttcctgaaagatttccaataacggccgtggagcagcaagtatcacagcagcttcagccac

SEQ ID NO: 1030128 - DNA, 120 bp, Artificial Sequence
  ENSG00000180712_8 (sequence is synthesized)
cgagcaatcaccgactctttgtggatcacaccatatttccttttgttcagccagccttaggacgggtagtttccgttctgctgactggacactgtccagtatacacgtttataaggccct

SEQ ID NO: 1030129 - DNA, 120 bp, Artificial Sequence
  ENSG00000180712_9 (sequence is synthesized)
acgccacatgaagaagaaagaagacgccacagacagcagcgcagtaccaccttccagagatgtgagtgtgaccgtctttgaccttctagcccagctgctttccctgaatgcaatgcatga

SEQ ID NO: 1030130 - DNA, 120 bp, Artificial Sequence
  ENSG00000180712_10 (sequence is synthesized)
gcaggccaggcaaaactagagagggaagctgcccagctaacccacagaattatgagagataaaaaatcattgtcttaagccactaagtctgttatgcagcaatatatagcattcattcaa

SEQ ID NO: 1030131 - DNA, 120 bp, Artificial Sequence
  ENSG00000180712_11 (sequence is synthesized)
atggacacagcagcagcacataagagcacacgcgtggggctccagcccggccacggggagaccttttctcagcaaagggcagcactgctcgctttgctggggcagccctcccaggaagat

SEQ ID NO: 1030132 - DNA, 120 bp, Artificial Sequence
  ENSG00000180712_12 (sequence is synthesized)
cccagaagagatggtctgaggtgtgtgaacactgtgaatgtcatggacaaagctcagcgtgggaccccatgggacttcaggccctgaaagcagcagatctcacctgcattggaggatgag

SEQ ID NO: 1030133 - DNA, 120 bp, Artificial Sequence
  ENSG00000180712_13 (sequence is synthesized)
tcggtgcacacacaccccagcgcccacagagatccaggcctcctgtgtatgaatgtgtgccatgaatttagacctatttctcgccttccgggctctctattcctcatcctccatccaagt

SEQ ID NO: 1030134 - DNA, 120 bp, Artificial Sequence
  ENSG00000180712_14 (sequence is synthesized)
tcaaatcagtttctgatgcttatgaccaaatgcccctatgtgatagattttgaggggttaagaagcttgctcggatcacacagcggtaagtagcagcacttcatctttaacccacctctg

SEQ ID NO: 1030135 - DNA, 120 bp, Artificial Sequence
  ENSG00000180712_15 (sequence is synthesized)
gcccactccctttccataggtccttgttgcctccctccctaatcccttccagtctagtttcctcactcattttagcatcttgaagatgcctgaccttttgtaacaggcacttagaagagg

SEQ ID NO: 1030136 - DNA, 120 bp, Artificial Sequence
  ENSG00000180712_16 (sequence is synthesized)
caataatcaagctgtgagctggaatactgggtttctcatccaataaccaggttggcaggttggtaaccatacaagggacttttcaaactggagaattagtgtgctgagcacaaagtggtg

SEQ ID NO: 1030137 - DNA, 120 bp, Artificial Sequence
  ENSG00000180712_17 (sequence is synthesized)
agtattttgagagttactgaaatataattgacataacaataaaaatacaatatttaagtgcatgtatttcaagtgtacgatttgacaagtttggttatattatatacacctacgaaacca

SEQ ID NO: 1030138 - DNA, 120 bp, Artificial Sequence
  ENSG00000180712_18 (sequence is synthesized)
tcaccacaattaagaaaatgagcatagctatcacacacaaaagtttccttgtgccccttggtaattcctccctctctcctgcccacatctctccttttcccaggcaatccctgatctgat

SEQ ID NO: 1030139 - DNA, 120 bp, Artificial Sequence
  ENSG00000180712_19 (sequence is synthesized)
gatctgatttctgccgctatcaattcgtttgcatttcctagaattttaaataactgaaaacatacattaagaactctttttctctggccgagtatggtggctcacgcctgtaatcccagc

SEQ ID NO: 1030140 - DNA, 120 bp, Artificial Sequence
  ENSG00000188525_0 (sequence is synthesized)
ggtggagccaaataagggaatgaaagcaggccaccggagcctcggagaggcaaccgtttggggtactcttccacactgtggcagctttgttcttttgctctttgcagtaagttttgctgt

SEQ ID NO: 1030141 - DNA, 120 bp, Artificial Sequence
  ENSG00000188525_1 (sequence is synthesized)
tgcttactctttgggtctgcactgcctttatgaactgtaacactgaccatggaggtctgcagcttcactcctcaagccagcaagaccaggagcccactgggaggaggaatgaacaactct

SEQ ID NO: 1030142 - DNA, 78 bp, Artificial Sequence
  ENSG00000188525_2 (sequence is synthesized)
caagaccaggagcccactgggaggaggaatgaacaactctggacacgccacccttaagagctgtaacactcaccgcga

SEQ ID NO: 1030143 - DNA, 63 bp, Artificial Sequence
  ENSG00000188525_3 (sequence is synthesized)
accacgagggcaggacacacacatgggagggggaggccagagggaaacctagctggcttgggg

SEQ ID NO: 1030144 - DNA, 120 bp, Artificial Sequence
  ENSG00000188525_4 (sequence is synthesized)
tgggagggggaggccagagggaaacctagctggcttggggtgggaatttgaatccctgagcccatcttcttctttcaccactttgtccggtgacattaggaccaaccaaccaatgccatt

SEQ ID NO: 1030145 - DNA, 120 bp, Artificial Sequence
  ENSG00000188525_5 (sequence is synthesized)
atatttcttagtttacaagaaaatgtttgaagttctcatgcacagaatcacttagcttcttgctttttacaagtggttgattaggagtattcaatacagattttgtgtatcactataaac

SEQ ID NO: 1030146 - DNA, 120 bp, Artificial Sequence
  ENSG00000188525_6 (sequence is synthesized)
agttcacagcatggactactggtgttctctttactaactgaaatggtgtcattagcacctttaaatctaatccatttagagagccagttccggaaacctcagaaccagtttggaaaactt

SEQ ID NO: 1030147 - DNA, 120 bp, Artificial Sequence
  ENSG00000188525_7 (sequence is synthesized)
ccgttcttctgaagccatttttggaaccacatctgtgctaggttctccagggaaacagaaccaatatgttttatttactatggggactggctcatatgattctggaggcctagaagtccc

SEQ ID NO: 1030148 - DNA, 120 bp, Artificial Sequence
  ENSG00000188525_8 (sequence is synthesized)
tccctctcaagatgtgctgtcagcaagctgcagaaccaggaaagctggtggtgtcagagtctgaaggcctgagaactgggtggggagtgggacagactaaggggcctttagtctctgggt

SEQ ID NO: 1030149 - DNA, 120 bp, Artificial Sequence
  ENSG00000188525_9 (sequence is synthesized)
tggtgtggtccccacaggtgagcctttcgtggagaagggtggagaggggatctggaagggccaatagaagatactcagcactaagagacctttggactcagaccagaacttacaccattc

SEQ ID NO: 1030150 - DNA, 120 bp, Artificial Sequence
  ENSG00000188525_10 (sequence is synthesized)
ggtgaaaatgtattgaccactgtatcaaccaggattgtgacacaaaaacagatggcacactcaaaagaggataattcaagaagggcttctttaagggactatttcccaagatgggaatgg

SEQ ID NO: 1030151 - DNA, 120 bp, Artificial Sequence
  ENSG00000188525_11 (sequence is synthesized)
aggggaacctgcagggctagtgtcctaccctccagcaggcagcagctaattcctgaggggataaggacgtggttgcgaggacatggagggaaagttctacagaggaggcacagtgggctt

SEQ ID NO: 1030152 - DNA, 120 bp, Artificial Sequence
  ENSG00000188525_12 (sequence is synthesized)
caggaacaccctgcttgagaggcctgtgagagggattgttttctactgtttgacattcacgtaacctcctaacgctgtctggggaagatgctaccccctgctctccccgtctttcctgca

SEQ ID NO: 1030153 - DNA, 120 bp, Artificial Sequence
  ENSG00000188525_13 (sequence is synthesized)
ctctcagcaatgggatgggctgactgatgccctgtgggctggaaagctgaccacagttgctgcagaccagaccccctcacatagtgagtgctgggctgaggaatccaggagagcccgagg

SEQ ID NO: 1030154 - DNA, 120 bp, Artificial Sequence
  ENSG00000188525_14 (sequence is synthesized)
ggggacactgaaggtgtatcgttggccctgccagctgcaagtgaactgcttctgatgaattttaatagggagaaagaagtatttgctaagaatggcaatcctgatgctcagccttcaact

SEQ ID NO: 1030155 - DNA, 120 bp, Artificial Sequence
  ENSG00000188525_15 (sequence is synthesized)
catcttgttattaataccatcaatatcccatgaggctcataaaacgagtctttcttcttggaaacatgaccaagattgggcaaacgtctccaacatgactttcagcaacggaaaactaag

SEQ ID NO: 1030156 - DNA, 120 bp, Artificial Sequence
  ENSG00000188525_16 (sequence is synthesized)
agtcaaaggcatttattaccggaatgccgacatttgctctcgacatcgcgtaacctcagcaggcctaactctgcaggaccttcagctatggtgtaatttgaggtcagtggccagaggaca

SEQ ID NO: 1030157 - DNA, 120 bp, Artificial Sequence
  ENSG00000188525_17 (sequence is synthesized)
gatcccgtctacattatgagtgaagcggagagctactgcagggttctgagcagagtcctaatttatattttagaagaatcatcatggctcctagattaggaataaaacgaaggggcccag

SEQ ID NO: 1030158 - DNA, 120 bp, Artificial Sequence
  ENSG00000188525_18 (sequence is synthesized)
ggatggaaacgatgagtccagttgggttactgcaaagatccaggccagaaatccaggcacagtggcacacacctgagtcccagataattccacctactggtcctgctctgtggcctactg

SEQ ID NO: 1030159 - DNA, 120 bp, Artificial Sequence
  ENSG00000188525_19 (sequence is synthesized)
gtccgagtccagccccgactgatttctgggcctgtaatgtctaaaaacgctccctgctgatgttttgcaagtgactgtgttacttgaaggcagttcctaggataaactagtcgctttatc

SEQ ID NO: 1030160 - DNA, 120 bp, Artificial Sequence
  ENSG00000188525_20 (sequence is synthesized)
gagcagggagtgggtgctgggctgaggaaccagaggtaatggccctggggacgcccgggaagagatgagttttgaggcaaagaattgttaacatacaagataatcaaagcacgaaggctc

SEQ ID NO: 1030161 - DNA, 120 bp, Artificial Sequence
  ENSG00000188525_21 (sequence is synthesized)
tgatgcgtgataaaataatcatttctcaaaacaggaagatgagaactgcatttcgagttgtatcacttggtacgcaatacttgcaatctgtgtgctgtaattacagtgtttcttcactct

SEQ ID NO: 1030162 - DNA, 120 bp, Artificial Sequence
  ENSG00000263531_0 (sequence is synthesized)
tcaaaaaaaaaaaaagcaaaaatggaatcaacctaagtgcccaaaaatggtggattggataaagaatttgtaggacatatatacaccatgggatagtatgcagccataaaaaagaaaaaa

SEQ ID NO: 1030163 - DNA, 120 bp, Artificial Sequence
  ENSG00000263531_1 (sequence is synthesized)
atcatatcctttgcagcaacatggttgcagctggaggctattatcctaagtgaataaatgcagaaacagaaaaccaaataatgcatgttctcctttataagctgaacctaaacactgggt

SEQ ID NO: 1030164 - DNA, 88 bp, Artificial Sequence
  ENSG00000263531_2 (sequence is synthesized)
atgcatgttctcctttataagctgaacctaaacactgggtacacatggacataaagatgggaacaaaagacactggaggccacatgta

SEQ ID NO: 1030165 - DNA, 120 bp, Artificial Sequence
  ENSG00000263531_3 (sequence is synthesized)
attgggcagtatgttcactatttgggtgacaggttcaattgaagtccaaatctcagcatcatggaatgtatccatgtaacaaacctgcatatgtgccccttgagttgaaaattaaaaata

SEQ ID NO: 1030166 - DNA, 120 bp, Artificial Sequence
  ENSG00000263531_4 (sequence is synthesized)
atatgtgccccttgagttgaaaattaaaaataaatagtttttttctttttttaagagatgagaaataatttgtggcataaaaccaataatcgggatgggtgcagtggctcatgcctgtaa

SEQ ID NO: 1030167 - DNA, 120 bp, Artificial Sequence
  ENSG00000251599_0 (sequence is synthesized)
gccccagataccagccaaggaggctggaaggccaaccaagctccaaccactgggcgtcccatcgcagcgtggctttactgctaacgttggcattgctgtttgtgccaggggttctgttca

SEQ ID NO: 1030168 - DNA, 120 bp, Artificial Sequence
  ENSG00000251599_1 (sequence is synthesized)
aacattaaccattgctgctggtaggcctctgacagcacaaggtggtgagcctgtctttcagaaaccagctagctgggttcaaaaccaagcccatcatgtagaagctatgtgaccttgaag

SEQ ID NO: 1030169 - DNA, 120 bp, Artificial Sequence
  ENSG00000251599_2 (sequence is synthesized)
aagttaattagactctctgaacctttggttctttatccaccaataaaaataatctcacctaccacccagggttgtaggtccaagtgtataatgtacaaatgaataaattaagacagtctc

SEQ ID NO: 1030170 - DNA, 120 bp, Artificial Sequence
  ENSG00000213904_0 (sequence is synthesized)
gaaacagaggaggctcgaggcttgctcacacgcacacagccaactgcttctggaccgccttgctcacacgcacacagccaactgcttctggaccgcctgaaaggcaacctcgcccgccgc

SEQ ID NO: 1030171 - DNA, 120 bp, Artificial Sequence
  ENSG00000213904_1 (sequence is synthesized)
ggtggtgtggggcgggcatcccttgagactgtgctctggaggcctggagaaacagctttctatcctcagcactggggagagcaggcctcaatccctgcctttgcctgccgcccctcttcc

SEQ ID NO: 1030172 - DNA, 120 bp, Artificial Sequence
  ENSG00000213904_2 (sequence is synthesized)
ttccctctcaaagcatacccagcagccccggcgctgagaaacgcgttactctcttatcagctgtgggagagacaagacagactggcctctgggcggaggggccgccattgcctgccctct

SEQ ID NO: 1030173 - DNA, 120 bp, Artificial Sequence
  ENSG00000213904_3 (sequence is synthesized)
taacctccagttccatagataaaacttgtattccccccttctccatggcaggggttttgagcctagagaaggaagatcggagcttcctggggctcctgtgaagcaggcagggggcagcac

SEQ ID NO: 1030174 - DNA, 120 bp, Artificial Sequence
  ENSG00000213904_4 (sequence is synthesized)
tgggccccgggaagaggcggagaaggcgagggagtgcctgcggtgagcccagagccttgggcccgttatcctctgatgctgctcccccaactttcctgccgtcagtccctgaccttgcct

SEQ ID NO: 1030175 - DNA, 120 bp, Artificial Sequence
  ENSG00000213904_5 (sequence is synthesized)
gagaccttggcggctcccgcacctctctcccggctcctccttgctgagaacacaacccgcaaggcccttccgcctggctggactgagtcccctatggaggcagcctggcagggagcaggt

SEQ ID NO: 1030176 - DNA, 120 bp, Artificial Sequence
  ENSG00000213904_6 (sequence is synthesized)
atcttcctggcagaagaggacagacctgcttctgctttgtaatcatacggacagttgtgcttgtcagagttaacggtgaagtccacaaaacaaatttccacatcggcagtcaaacctgta

SEQ ID NO: 1030177 - DNA, 120 bp, Artificial Sequence
  ENSG00000213904_7 (sequence is synthesized)
attaaagggctcgcggccaacaaaaaggcaaccccgggggtggcgaaaagcgtccttcgggcaggactagtgcggagccccgcggggagcaccccagcagggaagtcccgatcttcccac

SEQ ID NO: 1030178 - DNA, 120 bp, Artificial Sequence
  ENSG00000213904_8 (sequence is synthesized)
gtgctgggaagcctcccatgtgctggctcagtctcgccatcccactcaccttcccagggagggatgccctagcacgcggcccggcccgccttttgaagggggaaagtggggcgcctctga

SEQ ID NO: 1030179 - DNA, 120 bp, Artificial Sequence
  ENSG00000213904_9 (sequence is synthesized)
gcctctgcctggggtgggggcgggccaggtcctctgccaactcaaagacgaggcggggcgccagcgctggaggcgtggctgtgcctgagagccgttggaggagggagccccgctttccct

SEQ ID NO: 1030180 - DNA, 120 bp, Artificial Sequence
  ENSG00000213904_10 (sequence is synthesized)
ctcctgtctcctagttctcctattgcgcttttcctgggggatctttctccctctgtctccgccccctaatccatgctcccgataatgagggtgggggatggtggtaggagaacgctcggc

SEQ ID NO: 1030181 - DNA, 120 bp, Artificial Sequence
  ENSG00000213904_11 (sequence is synthesized)
cctagcctgcctggaaactccagaaggatacagcaagaaagcagcatctgcaagaaagccctcaccaggaccaaatcagctgacacctcaaccttggactacccagcttcccgaactgtg

SEQ ID NO: 1030182 - DNA, 120 bp, Artificial Sequence
  ENSG00000213904_12 (sequence is synthesized)
aggtatagatttttattgtttaagtcaccaaggctacggtgtttttaatagcagcccaagcccaggaatacatcatctgactcactattttgaatcaaactcttcagtttctccatcaac

SEQ ID NO: 1030183 - DNA, 120 bp, Artificial Sequence
  ENSG00000213904_13 (sequence is synthesized)
ttagctggcagctcctgtccccagcagcatcagaggccccatgaaaagagctccagcaggggctcagcctgcatgggtcccatgcggcagcctcagtgtcagagcctggatggcaggtga

SEQ ID NO: 1030184 - DNA, 120 bp, Artificial Sequence
  ENSG00000213904_14 (sequence is synthesized)
ggctccagtgacacaaccacaatgtgaaagtgtaagagtttttaactacttatagatactggaaagcacagggcacacctggagaccacagacactggggtcagagagcccaggcaggga

SEQ ID NO: 1030185 - DNA, 120 bp, Artificial Sequence
  ENSG00000213904_15 (sequence is synthesized)
ggagagaagggaactgtaggccaatggctttattgggtctagggtgttattgacaggtttccagaagggagctttaatgggtgtgtttaaagcaggcaaacactggggcaagaagatcac

SEQ ID NO: 1030186 - DNA, 120 bp, Artificial Sequence
  ENSG00000213904_16 (sequence is synthesized)
actgtgactgagaggtggtcactttaaattggagggcgaatgtcacaactgtttcagtttaaaggaagcagctggcgagaggggagcccagcacactatgcaagagagatgcctctaaga

SEQ ID NO: 1030187 - DNA, 120 bp, Artificial Sequence
  ENSG00000213904_17 (sequence is synthesized)
ttttatctgtggccaccgactggagccatttggaccgggtacagcagtggaaactctgtgatggtgacaaacatgggaatcactctgatgtgacgcagttaaatttacaccttaaaaaat

SEQ ID NO: 1030188 - DNA, 120 bp, Artificial Sequence
  ENSG00000213904_18 (sequence is synthesized)
ggatgccaagacaacataaacaagacccagggacaccaacagggtatggtgctgtgccccagagtcagggtcctgggttcttacccagggaagtgagaaataaagataacttttccctgc

SEQ ID NO: 1030189 - DNA, 120 bp, Artificial Sequence
  ENSG00000213904_19 (sequence is synthesized)
cactccgcagaggcccgagcgggctcgcgagggaacgggttctccgagtctggccggccacaacaactggattctcttttctgatttttgctgcagcttctgctttgtaatcatacggac

SEQ ID NO: 1030190 - DNA, 120 bp, Artificial Sequence
  ENSG00000213904_20 (sequence is synthesized)
agttgtgcttgtcagagttaacggtgaagtccacaaaacaaatttccacatcggcagtcaaacctgtaagaccaactttctttctgcacatgaaacatctgtttttctttggtttgggca

SEQ ID NO: 1030191 - DNA, 120 bp, Artificial Sequence
  ENSG00000213904_21 (sequence is synthesized)
tcacacctctgttttcggggtagttattttgtcctctgttgaaatgctcatttctgtcatttgctgagttacaggcaaggcagccgcaggcacatttcttgatttttcagatgtgctgcc

SEQ ID NO: 1030192 - DNA, 120 bp, Artificial Sequence
  ENSG00000213904_22 (sequence is synthesized)
agcagcaccttcacagttgtttaagctagtgtctgctctctgtacagatgcagaatctgaggtaggactgttggaaccactagctgtccccattgggctcattctgccactattctgctg

SEQ ID NO: 1030193 - DNA, 120 bp, Artificial Sequence
  ENSG00000213904_23 (sequence is synthesized)
ggccaatagacccggaacctgagggatcggaatcctggtccactccgcagaggcccgagcgggctcgcgagggaacgggttctccgagtctggccggtgctccccgaaggacaccagccc

SEQ ID NO: 1030194 - DNA, 120 bp, Artificial Sequence
  ENSG00000213904_24 (sequence is synthesized)
acgcggctgcgtcacccaccgctcaagagagggatggggacagggcaggagcgaggcacagggatgtgcggggaagacacattcattcagtaaacgtttcatgagctcctactgtgtgct

SEQ ID NO: 1030195 - DNA, 120 bp, Artificial Sequence
  ENSG00000213904_25 (sequence is synthesized)
gcggtcgccgcagcagcagcagcaaaaggcagcggtggcgtgcaggtccagccgtctcggtgaccgtgctccccgaaggacaccagcccaatggagatggtctgcaggaatggccggatg

SEQ ID NO: 1030196 - DNA, 120 bp, Artificial Sequence
  ENSG00000213904_26 (sequence is synthesized)
tgcagggcatgcacagtgcagcccattgcacacaaactacaaactcacagaaggtgatgacaatttgtgtttgggacgtctgattgtgaaagagggaggacagcgtacttgcagccacag

SEQ ID NO: 1030197 - DNA, 120 bp, Artificial Sequence
  ENSG00000213904_27 (sequence is synthesized)
agactgaaactggaacgtgatggaacggggctggaacgtgatggagctctgacataacagacgtgtgactttgtgtgaaatgtgcagatccatgtggaataaaacacagcctagcctgtg

SEQ ID NO: 1030198 - DNA, 120 bp, Artificial Sequence
  ENSG00000213904_28 (sequence is synthesized)
gtttttctttactagcaattagggaaacatagagtggctgctttctctactaacagcctcataatggagccatctaaatctcttactgattcctctaacctccagggagccacaccttta

SEQ ID NO: 1030199 - DNA, 120 bp, Artificial Sequence
  ENSG00000213904_29 (sequence is synthesized)
cccagtcctcctagatcctgggggaatcagaggaccttgtgtaagcactatgtgaggaaacaagaaaacctagggccacaacaactggattctcttttctgatttttgctgcagcttctg

SEQ ID NO: 1030200 - DNA, 120 bp, Artificial Sequence
  ENSG00000213904_30 (sequence is synthesized)
aaggtttaagtgcatttactgatgatggtcacaaggtggcagcactgcctcactggtgtttcctaagacctctgcttggacgtgggccagtctaaggtgctgttaggattaagggcatga

SEQ ID NO: 1030201 - DNA, 120 bp, Artificial Sequence
  ENSG00000213904_31 (sequence is synthesized)
ggtgaagtccacaaaacaaatttccacatcggcagtcaaacctgtgggtcattggagtggtcctgagctggagaagcaaaagaagagttagcgatccatggaaatgcaaagctgacttca

SEQ ID NO: 1030202 - DNA, 120 bp, Artificial Sequence
  ENSG00000213904_32 (sequence is synthesized)
gggtcctgtgtcattccttgtgacactgagtagagtgagggtcctgttgccattggacagctgcagcctgggactgaccgggaggctctgattgtttatccaccacagaccaggatctcc

SEQ ID NO: 1030203 - DNA, 120 bp, Artificial Sequence
  ENSG00000213904_33 (sequence is synthesized)
cctctgggctgcagatgcctaagaagaaaggaactgaaccaactctggtattggggtccacagatgccaaataaggcccctggagtagaggagaggttaagactgtggctgaagacaaat

SEQ ID NO: 1030204 - DNA, 120 bp, Artificial Sequence
  ENSG00000213904_34 (sequence is synthesized)
ctcctgtaactgatcttccagttacggtctgtgtgaccttgatatagtgactgtatttattgccatgtggctcagtttcccctcagtgaaatagtataaatggttaatggttttggctta

SEQ ID NO: 1030205 - DNA, 69 bp, Artificial Sequence
  ENSG00000238207_0 (sequence is synthesized)
atcagcgagactccgtgggtgtaggaccgtcggagccagggtcttgttttgacacttaggctggagtat

SEQ ID NO: 1030206 - DNA, 120 bp, Artificial Sequence
  ENSG00000238207_1 (sequence is synthesized)
tgattctcccgtctcagcctgctgagtctctaggaccacaggtgattctgacatgcaaacaagcctctgggccaaagttcctgtgtccaaggattaaaaaaaaaatggagcataagtctg

SEQ ID NO: 1030207 - DNA, 120 bp, Artificial Sequence
  ENSG00000238207_2 (sequence is synthesized)
caaatgatgatagaggaaaaactttcaggctgataacatcacatcatagcccatgccagtgaaaatctttcaacaggaagagtgaagaagagagaaaaggtcaaaagactgttttacttc

SEQ ID NO: 1030208 - DNA, 120 bp, Artificial Sequence
  ENSG00000238207_3 (sequence is synthesized)
acgaatttctgtaggtctagcttaattcaggagtgaactttagagtatctaaatgggaggatgaaaaggatagatttcatgcacctttgaaaataatttttttccgctaaattgtgtttt

SEQ ID NO: 1030209 - DNA, 67 bp, Artificial Sequence
  ENSG00000238207_4 (sequence is synthesized)
gagatgaacccggtacctcagatggagatgcagaaatcagatggaaatgcagaaatgcagaaatgag

SEQ ID NO: 1030210 - DNA, 120 bp, Artificial Sequence
  ENSG00000238207_5 (sequence is synthesized)
gaagtattacaaggcagcagcatgcttaatgttatgcttctaggcaaatgcttacagtgtgtgtatcacatatgcccaattacacgtggaaccacaggctctaacagacactggcttggg

SEQ ID NO: 1030211 - DNA, 120 bp, Artificial Sequence
  ENSG00000238207_6 (sequence is synthesized)
gtagggctgacacagcctgtgcaaactaaggtgctgggaggatgctttcctgatccaatgcctattccatttctgcttggaggtgaggagaaagaatatttgtgtgcaaaggcagaggac

SEQ ID NO: 1030212 - DNA, 120 bp, Artificial Sequence
  ENSG00000238207_7 (sequence is synthesized)
tgaattgtgttttactacctttgagcagttttgcaattactgttgcagaacatgagaatcaaagaagatgggtggatggaccatcatagtcaaagtgagtcattgccacaggcagaggga

SEQ ID NO: 1030213 - DNA, 120 bp, Artificial Sequence
  ENSG00000238207_8 (sequence is synthesized)
gggaggaagcaggatggttggtctgtgcagattccaagatacatctatgtgggcctttctaataaagcattaattcattcttccattattcatgcaatacataaattttgagcactgaca

SEQ ID NO: 1030214 - DNA, 120 bp, Artificial Sequence
  ENSG00000238207_9 (sequence is synthesized)
tgtggtaagcactgtgccagttagtggacatgccaagagaaaaaacacatggtttgggcctcttcatatatttttgtacttatcttccacaggtagaacaatgttccttttgcattcgac

SEQ ID NO: 1030215 - DNA, 120 bp, Artificial Sequence
  ENSG00000238207_10 (sequence is synthesized)
agatattttggagctcacaatttgtttttcagcttctcacagcaacgacctctgaagaacagggcctaagcttactaatatgaacacatgatatcaattttgtgttccagtaatgacaga

SEQ ID NO: 1030216 - DNA, 120 bp, Artificial Sequence
  ENSG00000238207_11 (sequence is synthesized)
agtcctgatgccaaaggcagcattgttttcattctcttgctttaaaactgagtaataatataatgattaggaattactgttagcaacacagataagagttagtcattcacacttccacag

SEQ ID NO: 1030217 - DNA, 120 bp, Artificial Sequence
  ENSG00000238207_12 (sequence is synthesized)
tggaacaactgttgggaagctatagctttatgctgaatgattttgagttctaattactgaatctgaatagctgtctttaaatgtcagtaatggtagaaaaaggttctttactcttaagaa

SEQ ID NO: 1030218 - DNA, 120 bp, Artificial Sequence
  ENSG00000238207_13 (sequence is synthesized)
ccagtggggaatgagcagtacaaaatgttcttgttaaaatttctcttctctttttaaaatagatgatcaaagacatcctagagttcccatcattttaggagatgtttacatacatgagga

SEQ ID NO: 1030219 - DNA, 120 bp, Artificial Sequence
  ENSG00000238207_14 (sequence is synthesized)
atggcacataggaagactcagacctttacaacaccacatggaagtcacagaataagagaacattcaagctggaaggcaatgtctagcccaacctcctcattttgcagatgaaggaactgt

SEQ ID NO: 1030220 - DNA, 120 bp, Artificial Sequence
  ENSG00000238207_15 (sequence is synthesized)
tttagtgcaggggtattacatataaacatcacaagggcagagcaggtatggagtttggggctcctcttactcaatctagtggcctgtcaatggtgtctagtagggtgctggttgtcccat

SEQ ID NO: 1030221 - DNA, 120 bp, Artificial Sequence
  ENSG00000238207_16 (sequence is synthesized)
gaatggtgaccatcaagacaatcacactctcctttgccagggagtatgttctggcttgtgatatgtaatgggagctttgctggtgctctttggaaaagttttgccttgctgacaacacgc

SEQ ID NO: 1030222 - DNA, 120 bp, Artificial Sequence
  ENSG00000238207_17 (sequence is synthesized)
aggcacttgagaacagagtccttttgctaataccttcctttcttctttgaacagtcatgggaggatatcaggcttagagctgtgatagctcttttgtgatcctaagaggagattgttgcc

SEQ ID NO: 1030223 - DNA, 120 bp, Artificial Sequence
  ENSG00000238207_18 (sequence is synthesized)
atggcaccgaagttgcagactaggaggagaaaatcagccctatccttgttgaaatcattgatctgagctagcctgggactgactacctcttcctgctaggttaataggactctcctttgg

SEQ ID NO: 1030224 - DNA, 120 bp, Artificial Sequence
  ENSG00000238207_19 (sequence is synthesized)
cttaagccagacaagagggtgcttggtatattcaaggatagacaagggtccaatgtgattggagagcagtgaatcatagggagaaaagaagatgaggtgagtaggtaacagtaggccaga

SEQ ID NO: 1030225 - DNA, 120 bp, Artificial Sequence
  ENSG00000238207_20 (sequence is synthesized)
tcaggtagggttttataacatggtgaaggtttttagcatttactctgtcgtgtgagcagaagagtgattttattctgagttatgtgtaactggatcaccctggctgatatgttaagaaaa

SEQ ID NO: 1030226 - DNA, 120 bp, Artificial Sequence
  ENSG00000238207_21 (sequence is synthesized)
gactgtgagaggttgaaggtagaaccagggaaacctgttgaaactcttttgacacgatccagggaaaagatggcaatagcttagaccagtgtagtagtgaaaaaagtggcaagacatcac

SEQ ID NO: 1030227 - DNA, 120 bp, Artificial Sequence
  ENSG00000238207_22 (sequence is synthesized)
agattctggatacattttaaaggtaatgataaaaattttcttgacataataaggggaaagagagatagatatatagatattgaaagagagagagagaatgagagagagagagagtcaaag

SEQ ID NO: 1030228 - DNA, 120 bp, Artificial Sequence
  ENSG00000238207_23 (sequence is synthesized)
atgacctagtctgaacaatgggaaggataaagttgtcctgaactgagatgagggtgactttaggaggaataattttagggggagaagatcagaagttctgatatgatcaagttaagtttg

SEQ ID NO: 1030229 - DNA, 120 bp, Artificial Sequence
  ENSG00000238207_24 (sequence is synthesized)
aggtgtgtattagacttataaatagagatgttgagtggactgtcagatcttaaagctgcaatttaggggagaaatccatgctggagatatacattcagaaattaaaaaaatcatattgat

SEQ ID NO: 1030230 - DNA, 120 bp, Artificial Sequence
  ENSG00000238207_25 (sequence is synthesized)
tgtgtttaaaggcatgaaactcaatgtaatctgcaaggagattagtatggatagacaagagaagagacccagagactgaactctagggcactccaactattagaggtgggagggatgaag

SEQ ID NO: 1030231 - DNA, 120 bp, Artificial Sequence
  ENSG00000238207_26 (sequence is synthesized)
ataaactcaagaatgagggtgaccaaccaggaaggcagaaggggaatcaggagagagggtggttctggaggccaaatgaagaaggtttagaaggaggaaggaataatgaactctgtcaat

SEQ ID NO: 1030232 - DNA, 120 bp, Artificial Sequence
  ENSG00000238207_27 (sequence is synthesized)
aaaggcaagtcaatagactcaaaccctcattccagcatacagggggatgactatgttgtctctttttaatattttctggtagttttggtaaaagtgaggggattgtgcttgcatttatcc

SEQ ID NO: 1030233 - DNA, 120 bp, Artificial Sequence
  ENSG00000238207_28 (sequence is synthesized)
aaattgcctttgcctccaaggtcaccttatttagcgttcttaatctctactctacattttgactcctctgtttactgtctcattttgttaccacatcactatattggaaacctccctgac

SEQ ID NO: 1030234 - DNA, 120 bp, Artificial Sequence
  ENSG00000238207_29 (sequence is synthesized)
catcctcttaccacagcccaccaactccagcatgtgtgtgttagattgaatagtagatttaagggcaacttgcggatgacatcacagggcagcccaacacgaagttgaatgaatcagtca

SEQ ID NO: 1030235 - DNA, 120 bp, Artificial Sequence
  ENSG00000238207_30 (sequence is synthesized)
gggtaggcttggttatgttgtagtaacaaacagccccaaatctccatggctaaaaccaacaaatgtaactcatcaaatgggcaaataaaatttgtgcatttcactatatgtatattttgt

SEQ ID NO: 1030236 - DNA, 120 bp, Artificial Sequence
  ENSG00000238207_31 (sequence is synthesized)
caaaaaaatcacctgcaaacaaatattgggctctactaagtgatatgcatactgaagtggttaggctgagatgtactaatgtctgcaacttattgaaatgtatccaataggtaaaattaa

SEQ ID NO: 1030237 - DNA, 120 bp, Artificial Sequence
  ENSG00000238207_32 (sequence is synthesized)
ttgatgggtggatagaggaatgtacagatgtgtgataaaacaaatataggaaaatgttaattgtaggatctagatggtgggtacagaaaaattcactgtaaaattctgttaatttctgaa

SEQ ID NO: 1030238 - DNA, 120 bp, Artificial Sequence
  ENSG00000225559_0 (sequence is synthesized)
aggaggaggaggaggagaaaaggatttgaagaaattgaatcagttctggaacagcagacacaggaattcaggacatgctaccccaaaatgtgaaaacttggcatttgagaagacagcaga

SEQ ID NO: 1030239 - DNA, 120 bp, Artificial Sequence
  ENSG00000225559_1 (sequence is synthesized)
aggtcttatgaccctcatgtgagaggtgccctccctatacccagaagatagcaacatcctcatttctgaagatacaaggacaaagagaagagtttgaacaaacggcttcctaagttctcc

SEQ ID NO: 1030240 - DNA, 120 bp, Artificial Sequence
  ENSG00000225559_2 (sequence is synthesized)
ccagtttattaacattatgttacagtctcaccaacgcaccgcaatgtagcagtctctcgtttgaggtatcaccctgagttctcggtctcacaaccatgacaattaaggaacatgatcacc

SEQ ID NO: 1030241 - DNA, 120 bp, Artificial Sequence
  ENSG00000263280_0 (sequence is synthesized)
ggaagttggctcggccggtgttcggggcatccctcgggcagttaaccgcacttccgctggctgggtatccgcggcaagttcagatcattagttggctggagttaattaaccaccagacaa

SEQ ID NO: 1030242 - DNA, 120 bp, Artificial Sequence
  ENSG00000263280_1 (sequence is synthesized)
ttagcttatctttttcccgatcctaagaccagctggattgcatacaatgagtacatccagatagttaagacccttggaatcaagattaagagaaccatcaattaaggaggcagtgcgcac

SEQ ID NO: 1030243 - DNA, 120 bp, Artificial Sequence
  ENSG00000263280_2 (sequence is synthesized)
ctctccagggaaatttactccagtgcttcatcctacctcattggacacagccgaccgtgttggtcctggttccctcttcaaatgctggctcctggaaatagcatcaaagcaagcagctga

SEQ ID NO: 1030244 - DNA, 120 bp, Artificial Sequence
  ENSG00000263280_3 (sequence is synthesized)
caccttgaaagagtcattgtagagtggaggtcgggagggcaaagttgagatactgaggttttggggtttggtttaaggcaggtcctttgatgtcggacttaatcagggctgggtaaggat

SEQ ID NO: 1030245 - DNA, 120 bp, Artificial Sequence
  ENSG00000263280_4 (sequence is synthesized)
catgttataatagtttaggattgttggtcacagttttgtattggtggtcacagtgaagtgagggcttcaaagactcttggagctttctttgatgctccctgttgaagagctgtgtggttt

SEQ ID NO: 1030246 - DNA, 120 bp, Artificial Sequence
  ENSG00000263280_5 (sequence is synthesized)
tattaatggattttcctgaactcaaggagtaaggttatttgcaacttttgtgtttctgggcaagcatttcctggaataataaagtcacaataatagagtcatgttattttgcttcagcaa

SEQ ID NO: 1030247 - DNA, 120 bp, Artificial Sequence
  ENSG00000263280_6 (sequence is synthesized)
aaaacaaatgcaaaacctgcagcatttttcgggaattgattctctgtacataaaaatgagattagtcaatccttttggtgtctgtttagcatacaatgagtacatccagatagttaagac

SEQ ID NO: 1030248 - DNA, 120 bp, Artificial Sequence
  ENSG00000254299_0 (sequence is synthesized)
agaaggaaaacagccccgtgcggctgagttcaaccagggctgcctttctccaccgtgtccgccattctggtctcgtgccgcagcaggcattgctagatgattgccgtcatggctcatact

SEQ ID NO: 1030249 - DNA, 120 bp, Artificial Sequence
  ENSG00000254299_1 (sequence is synthesized)
aacaataaataggtcctcccggggacccaccacccaaactccttgtgccgggaacagctactaaaggggaggccctttccatattccgcttcattctcccctcctggcgtgcctcaagga

SEQ ID NO: 1030250 - DNA, 120 bp, Artificial Sequence
  ENSG00000254299_2 (sequence is synthesized)
acgaccactgtccccaggttacaggtgcttcttcaccccaacaaggctcaatcaagtgtgttcttctctgggaagctgcagacatctgaccccaggccacagagtcatacccagtctggc

SEQ ID NO: 1030251 - DNA, 120 bp, Artificial Sequence
  ENSG00000254299_3 (sequence is synthesized)
tcccacagccctcccaggctgtctggtgtcagtgcagtgctgtggatgggaacacacctctaccatgttgagctgctctgaggtttaaatgcgttactgctaattgggatcttggaacaa

SEQ ID NO: 1030252 - DNA, 120 bp, Artificial Sequence
  ENSG00000254299_4 (sequence is synthesized)
ctcctggtgcatagacacacacaggacagactggaataaatactggtggtttatcacaggaaggctggcctcagcttgggagagtaagcgtgcatgcatacacagccagctgatttattg

SEQ ID NO: 1030253 - DNA, 120 bp, Artificial Sequence
  ENSG00000254299_5 (sequence is synthesized)
cagagattaagctaaatagttcagtgcctttgttaactcccggggcgtctcctctgcgcggcttgtgttcccagggaatactgtcatgagctccacagggaagactggactccttcttgg

SEQ ID NO: 1030254 - DNA, 120 bp, Artificial Sequence
  ENSG00000254299_6 (sequence is synthesized)
ggagacagccctggccccagggagcagcgtggccaaggacattctcagcctcttggggttgccaaaagggagcagaagcaggaggagggagggggggagctgggaggaacaccccatcgt

SEQ ID NO: 1030255 - DNA, 120 bp, Artificial Sequence
  ENSG00000254299_7 (sequence is synthesized)
ggaagacctgctgccaatgcggggctgcagtcccagtctctgccgccaccagaccctggtcaggagacatcacagacaggctcccttctcccgccttcattcagggctctgctcaaacag

SEQ ID NO: 1030256 - DNA, 120 bp, Artificial Sequence
  ENSG00000254299_8 (sequence is synthesized)
cccatttgcaataggacttcctgcagtgtcctagttaaataccccaacccatgcccccatcgtacgctatcccttcccctgctttatgtttcttcatggtgctcagcaccctgacatatc

SEQ ID NO: 1030257 - DNA, 120 bp, Artificial Sequence
  ENSG00000254299_9 (sequence is synthesized)
tatgtctgtatttgtttacttattgttgggtctgtttttgaatgaagtgctatgtctgtggtgtaaagtccaacatgtggcagattctaggtgctcaataaatatctattcagtgaatga

SEQ ID NO: 1030258 - DNA, 120 bp, Artificial Sequence
  ENSG00000254299_10 (sequence is synthesized)
ttgaagtaacagacccaggagatgaatgaacctggtccttccagctcaagacgttgcactattcaccactctgctcaggcactgcaaaccagaggcctggccacagcttgcccatgaact

SEQ ID NO: 1030259 - DNA, 120 bp, Artificial Sequence
  ENSG00000254299_11 (sequence is synthesized)
acacccctcaggagcataagctccatgctaatgagcacttcgcatgtcttgttgccggcacgtgactcaaatacgtgcttcttactgactgaatgcctatgcccctcccccaaactcatg

SEQ ID NO: 1030260 - DNA, 120 bp, Artificial Sequence
  ENSG00000254299_12 (sequence is synthesized)
ctgaagccttaacacctgtggtgagtgtatttggagacagggcctttagtaagtaggtaaggttgaatgaggtcacgagggtggggtcctgatccaataggattagtgtcttcaacagca

SEQ ID NO: 1030261 - DNA, 120 bp, Artificial Sequence
  ENSG00000254299_13 (sequence is synthesized)
gagacaccagagaactcactgccctccctccatgcatgcacagagaagagtccaagtgaggacattgccagaaggtggccgtctgcaagccaggaagggagccctcaccagaacccagcc

SEQ ID NO: 1030262 - DNA, 120 bp, Artificial Sequence
  ENSG00000254299_14 (sequence is synthesized)
cagaccttgacctgagacttccagccttcagaactgtgcaaaaatacatttctgttgtttgagccacccagtccgtggtaattggtggtgacagccggagctgactaatacagtgctcaa

SEQ ID NO: 1030263 - DNA, 120 bp, Artificial Sequence
  ENSG00000254299_15 (sequence is synthesized)
tacatttttgttgtgctgcacagatctagtttggtgcacactatttttaaaaagagaatttttttagctagaaaagaagagttataatgttccaacacaaagaaaagatcaatgttggag

SEQ ID NO: 1030264 - DNA, 120 bp, Artificial Sequence
  ENSG00000254299_16 (sequence is synthesized)
atgatggctatccttaataccctgatgtgatcattacatatggtatgagtgtatcaaaatatcacatgaacccccaaaatatgcacaactattatacaccaataaagaaatttttaagag

SEQ ID NO: 1030265 - DNA, 120 bp, Artificial Sequence
  ENSG00000262869_0 (sequence is synthesized)
aagcgaagccctaagatgggcggagagaagcagatgtggaggtgatggcgaagacccagatataagcagctcctctaggtgtttggagagtcttcaagtgtccagatgtgggcaggctac

SEQ ID NO: 1030266 - DNA, 120 bp, Artificial Sequence
  ENSG00000262869_1 (sequence is synthesized)
atctctgcctctctctgggggcaaccaagacttggagctatagtaatgtagctgcccttaaccccagtggcgagagtgagagaagagcgttccctgcacggccaagatactcttttctgc

SEQ ID NO: 1030267 - DNA, 120 bp, Artificial Sequence
  ENSG00000262869_2 (sequence is synthesized)
tgcagaagtcaaatttcggccttcccagcccatttctgtcccagtcaaggcatgtagcctggtggaaccaatctcaccaaaacagcttctctccttaggagcttctgggctgctgcgctc

SEQ ID NO: 1030268 - DNA, 120 bp, Artificial Sequence
  ENSG00000262869_3 (sequence is synthesized)
ctcaaagctccgggtccttatgccagaaaaaagacgtcaagaggagagattttaggggagcgccctgacagagaggagaggcagagcgagttgctaagtaaagcccatgcatgcattttc

SEQ ID NO: 1030269 - DNA, 120 bp, Artificial Sequence
  ENSG00000244650_0 (sequence is synthesized)
aaattgccacagccaccccaaccttcagcaaccaacaacctaatcagctagcagacatcaacatcaaggcaggaccctccaacctccagcaggaaaaagattaccacttgctcaaggccc

SEQ ID NO: 1030270 - DNA, 120 bp, Artificial Sequence
  ENSG00000244650_1 (sequence is synthesized)
agatgatcattagcacgttttagcaataaagtattttttaattaaggaatgaaagtgtgtgaaccgtctagtggaacggtgtgaatactatttcaatagtgctgttcctgcagagctgtc

SEQ ID NO: 1030271 - DNA, 120 bp, Artificial Sequence
  ENSG00000244650_2 (sequence is synthesized)
tgatctgagaaatgatggaggaagacagagacatgcacagggagaacatcatgtgacaacaaaggcaaagactggaagttatgcagctgcaagccaaggaacaccaaaaattgctggcaa

SEQ ID NO: 1030272 - DNA, 120 bp, Artificial Sequence
  ENSG00000244650_3 (sequence is synthesized)
actgccagaagctaggaggatgcaaggttagaattccccaagtctcagagggagcgtggacctgcccacaccttgattttggacatgtaacttccggaaatgttagacaataaaatgcag

SEQ ID NO: 1030273 - DNA, 120 bp, Artificial Sequence
  ENSG00000244650_4 (sequence is synthesized)
tgcagagctgtctttctctaactgatctgagaaatgatggagggcaagtatctaaaaaacgatgagacttggtgctgaaaaccagacttcagcctccaggagaactggcagaagcaagct

SEQ ID NO: 1030274 - DNA, 120 bp, Artificial Sequence
  ENSG00000248479_0 (sequence is synthesized)
gccaacatcacaatgaggaaacaatcacacatattcaaaatgttggacattctccaagataaccagggtggaataatcaatgtcatttgaaaaaatgagcagactatttcatatcagaaa

SEQ ID NO: 1030275 - DNA, 120 bp, Artificial Sequence
  ENSG00000248479_1 (sequence is synthesized)
tcatagctgtggtgctgagaacataacctactcccattggtttccaacaactgagaccttgaacagtgacttcttagctgtaaatcccagaatcttctgtttcaaatcaattcttcagga

SEQ ID NO: 1030276 - DNA, 120 bp, Artificial Sequence
  ENSG00000248479_2 (sequence is synthesized)
aaaagaggacaaaatataaacccaagtggagagagtactaaaagacacaagatttttttttagagaatttatcaatctaatatgagcaattaattatttatgatggttcctatgtttcac

SEQ ID NO: 1030277 - DNA, 120 bp, Artificial Sequence
  ENSG00000286745_0 (sequence is synthesized)
atataccattgcagcagctgaacatttgaggtcacctttgatatctgtagttgtgaggatttagaaaacagaagtaccttgactttgtgtagcaggtttattttcattccttcattgttt

SEQ ID NO: 1030278 - DNA, 120 bp, Artificial Sequence
  ENSG00000286745_1 (sequence is synthesized)
tttagatgtcccaggtcctttcaactcaggtatgccatggttctttctgcctctttctttgtctctcttgaaattctttgagcactaaataattcaggtattacaataattgtagttatt

SEQ ID NO: 1030279 - DNA, 120 bp, Artificial Sequence
  ENSG00000286745_2 (sequence is synthesized)
tttgagtccgtttatacacagaattcttccacatggcagaagatatgatgtcagagtacctgctaagcatcgccacacccacaatggttctatcaaagaggagaaaaatgaaaacagatc

SEQ ID NO: 1030280 - DNA, 120 bp, Artificial Sequence
  ENSG00000286745_3 (sequence is synthesized)
acactggcattagcgatggctgaggaagaaaggaacattaaatagccttgtttaaatatacatttctgggattactagtgagcatgtacaagcagcagaaaaatgagccaaagcatcctt

SEQ ID NO: 1030281 - DNA, 120 bp, Artificial Sequence
  ENSG00000286745_4 (sequence is synthesized)
tgaagcaaaacattacatagaatgcaattcgttctcactgtgtctctcttctcctggaaactattactgaagataaatcaggtgaggctgcagtgcatcttgctcctccatgggcaggtc

SEQ ID NO: 1030282 - DNA, 120 bp, Artificial Sequence
  ENSG00000286745_5 (sequence is synthesized)
ctattagtagcatctttattttcttacctgaagcactcttgcccttccaagcgacacgagtcagataaagtgagtgtgtgctgagttagctccctgtgataaaaaaaaaaaaaaaacaaa

SEQ ID NO: 1030283 - DNA, 120 bp, Artificial Sequence
  ENSG00000243715_0 (sequence is synthesized)
attctggccagaccatgtcactgacagctgctgcatgtggcctcagctcccgggagacaacatgccttcagaattagctcgctggaccagcctggagcattcaggcagctccccaacacc

SEQ ID NO: 1030284 - DNA, 120 bp, Artificial Sequence
  ENSG00000243715_1 (sequence is synthesized)
ctgcacacaatgcccagacccactggaccagacagacagagcccgcctccaacaagggcacccaccagtgctgaatgggatcgagtagacgaagctccctggaatctgctcagcggctct

SEQ ID NO: 1030285 - DNA, 120 bp, Artificial Sequence
  ENSG00000243715_2 (sequence is synthesized)
tcggtaccagagagggaaatggtctgcgttaaaaatgttctccttgtcgccagctttcaggaagtcccttgaagtggaaaagaatcagaagaacatgcatcactcagcagagtaaaggtg

SEQ ID NO: 1030286 - DNA, 120 bp, Artificial Sequence
  ENSG00000243715_3 (sequence is synthesized)
ggcctggagcaccccgacagccttcatcagacatgaaattcttcataaacctgacctggacggtgtgaggaggagcctctgttgcctggcccatggcaggatgcattgctactctctacc

SEQ ID NO: 1030287 - DNA, 120 bp, Artificial Sequence
  ENSG00000243715_4 (sequence is synthesized)
ctgggtcacaggtgcagccacgactgagcagaaggtgttcgcactcccagcagcgtgcagtggagcctccatattgaacttacacctcgaaaacagagcttctgaagaataaaacaccca

SEQ ID NO: 1030288 - DNA, 120 bp, Artificial Sequence
  ENSG00000243715_5 (sequence is synthesized)
actgctcatgtacaatgggagacaggctaacaacaataaataaatgaccttcatctttaatttggggagctcgtgtaaacttcaggacaataacaaaagagccttggcgatactgatgaa

SEQ ID NO: 1030289 - DNA, 120 bp, Artificial Sequence
  ENSG00000243715_6 (sequence is synthesized)
tcccgggggtcagagcgtgaactcctggagacccgctgaaatgccgagcaagaacgtctctggggacaagtagatttcgttgctatgttgctcatgaaccactaaatggattttgtgacc

SEQ ID NO: 1030290 - DNA, 120 bp, Artificial Sequence
  ENSG00000243715_7 (sequence is synthesized)
tctcctccaactccccacattgaaaactgctgctcttaactgcctgtaggtttacatagaccgaaaaggagacagccccaggtaaagaggaagctgcggcttgagaagaggagcaacttg

SEQ ID NO: 1030291 - DNA, 120 bp, Artificial Sequence
  ENSG00000243715_8 (sequence is synthesized)
ccactcaaagcacccactttcctgccaacctcgttacaggtggaagccacgtttcctgtttcattgttagtctgctactctgaccagccatgttacagttcattaaggaagctttcccca

SEQ ID NO: 1030292 - DNA, 120 bp, Artificial Sequence
  ENSG00000243715_9 (sequence is synthesized)
gagattcactggccaccttaagttgtgtgtatgattatggaatgatagctcgtgctcctaatggtggctcattgtccacattagaacgtgagcctcaccttttctggtgcacaggcagcc

SEQ ID NO: 1030293 - DNA, 120 bp, Artificial Sequence
  ENSG00000243715_10 (sequence is synthesized)
tgcatttctaagcccctaatgacatgcaaccacagacaagctggcagtttaaagaggaagggagacacagtggataaacaggtctgtcattcccaagcaagcattcaaccagcgtaggaa

SEQ ID NO: 1030294 - DNA, 120 bp, Artificial Sequence
  ENSG00000243715_11 (sequence is synthesized)
aacagacttgagcatggagaacctgcaaaacattctctctctcttcctcctcccctatgtgtcagtttgggtttggagggggtgggggagtgctgtgcttagtttgggtgtccagagctc

SEQ ID NO: 1030295 - DNA, 120 bp, Artificial Sequence
  ENSG00000243715_12 (sequence is synthesized)
aagcatgagctggagagacactctgggaagggtataaaaaagaatcaaataaatggactaaggtctcagaaatatgtcccatgaaaaaggcttttttgccttatagggcttcgggcaaaa

SEQ ID NO: 1030296 - DNA, 120 bp, Artificial Sequence
  ENSG00000243715_13 (sequence is synthesized)
aagactccggagaaattttccatcagagtcatcatgggtatgaagcaatgtagttgcctagagggtagtaggggaaaaaaggcttttaccacaacagaagggattgtagttagattcaaa

SEQ ID NO: 1030297 - DNA, 120 bp, Artificial Sequence
  ENSG00000243715_14 (sequence is synthesized)
gcagcatctatggggcagtactcacaacaataccatgcagacaaacatctgtttagcagctactatgtgcaaggcactccctatcttttctgcaccccccgaggaggataacccatatac

SEQ ID NO: 1030298 - DNA, 120 bp, Artificial Sequence
  ENSG00000243715_15 (sequence is synthesized)
tatgcgtcactgaaatagagtcttcaaggactcctggactcaaggacttaagggctctctccatggaatatccaagtgtcaagaccacggctctgtgggccaggctgcctgagttggaat

SEQ ID NO: 1030299 - DNA, 120 bp, Artificial Sequence
  ENSG00000243715_16 (sequence is synthesized)
ccacactctatgtccttaggccattacatccattctctgcctcagtttcctcacctgtacaatggagataaaacacccatttcataggttcactgtgataaataaataagttcactcatg

SEQ ID NO: 1030300 - DNA, 120 bp, Artificial Sequence
  ENSG00000248473_0 (sequence is synthesized)
agccacagaactcggccgagggttcagcggactgcggctgcgcggcgccggcgacagcgtcaactgcttttgtgtcaaaaggaaaccaacagccggctccatagctcagggggggagacg

SEQ ID NO: 1030301 - DNA, 120 bp, Artificial Sequence
  ENSG00000248473_1 (sequence is synthesized)
acgcgcgcgctgaggctctggtctgcggctctgcgcttggcggctgcgcgccctcggccttcgggtccccgccgcctccgtgctgcaaggtctgatttcttcctgtggagttaacacgga

SEQ ID NO: 1030302 - DNA, 120 bp, Artificial Sequence
  ENSG00000248473_2 (sequence is synthesized)
aaagcgcagacggccacattcatgacccgggagtaacggctctacctgtcacattcgctttcagcctaaaacaaaattttagtttattttagacaaaatatataactaaggtatgctggc

SEQ ID NO: 1030303 - DNA, 120 bp, Artificial Sequence
  ENSG00000248473_3 (sequence is synthesized)
acactttcctacatttcctgaagattttgcaaatgggtatgcactgtttattatcttttcataaaacggtaagagcggcttctgggggctcctcacccagccggtccggcgttccttccc

SEQ ID NO: 1030304 - DNA, 120 bp, Artificial Sequence
  ENSG00000248473_4 (sequence is synthesized)
tctcagcactgcgctctctcccgagccctccggctctaccaacctctgtgtcctgcccctgggcctcaagatttgcgcctttcttggactcgcttgggaaggggcgcccaggctgcagaa

SEQ ID NO: 1030305 - DNA, 120 bp, Artificial Sequence
  ENSG00000248473_5 (sequence is synthesized)
cggatggacgctcctgcctgctactcgagtggatcgagcagggaggcgctcattcggattccaggagaccagaggacacaggacatagggagcgtttaccctgtgtggagctacctgcgg

SEQ ID NO: 1030306 - DNA, 120 bp, Artificial Sequence
  ENSG00000248473_6 (sequence is synthesized)
ctgagaattagtggcagacgcggagatgggcagcggggacaagttgggcttgggagactataagaccttgagaatgggttcaagctgccagacggaaatccgccttttcggtgaatcgag

SEQ ID NO: 1030307 - DNA, 120 bp, Artificial Sequence
  ENSG00000248473_7 (sequence is synthesized)
ccatgaagaacacaatcatgaaaagattcagcgagcaactagacagccggctcgttggtctagggttttgatcccgaaagatgtccagcggaggcatcaccaagatttccgggagtgctg

SEQ ID NO: 1030308 - DNA, 120 bp, Artificial Sequence
  ENSG00000248473_8 (sequence is synthesized)
gggattggaaagaatcgtggataggagactaagcgagccgtcccggaagcaacagttgctgtgaagactttgggcacagacctgcacgtgagagtatgctcttgagggttgtgggggctc

SEQ ID NO: 1030309 - DNA, 120 bp, Artificial Sequence
  ENSG00000248473_9 (sequence is synthesized)
tccttttacagctagggatcacttgtcgaacgtacccggagagtagctgctagcagacaatattatggcgacagaggtaggtgtgggtttccgtagtgtagtggtcatcacgttcgccta

SEQ ID NO: 1030310 - DNA, 62 bp, Artificial Sequence
  ENSG00000248473_10 (sequence is synthesized)
tccccggttcgaaaccgggcggaaacatgccacagtgttttttttttttttccccccccttt

SEQ ID NO: 1030311 - DNA, 83 bp, Artificial Sequence
  ENSG00000248473_11 (sequence is synthesized)
ggccccgaagcggttattatctcattacacgctcttattacactggagactaacctagaagatcccactagtatgtccacctg

SEQ ID NO: 1030312 - DNA, 120 bp, Artificial Sequence
  ENSG00000248473_12 (sequence is synthesized)
tggagactaacctagaagatcccactagtatgtccacctggtggtcacagcggcacaaagagaagagggcatctacgcttttgctttccattcccaaccacccgcacctgtgaactcaat

SEQ ID NO: 1030313 - DNA, 120 bp, Artificial Sequence
  ENSG00000248473_13 (sequence is synthesized)
ccagttttacttgctgtggacaagctcggcacagagctcatccactggacagcggcacgctgccaaatggaaccccgcatctcgagtatgtgtggggcccattactccttttgtaaccca

SEQ ID NO: 1030314 - DNA, 120 bp, Artificial Sequence
  ENSG00000248473_14 (sequence is synthesized)
taggggacaaaagtgacaaaactaccacaaactggcagcggtgggattcgaacccacgcccccgaagagactggagccttaatccagcgccttagaccgctcggccacgctacctctttg

SEQ ID NO: 1030315 - DNA, 120 bp, Artificial Sequence
  ENSG00000248473_15 (sequence is synthesized)
ccgctgggtatttacatattttccttcagttatgaagcgtgcgaaggggctctgggccaacagggagttggggcgaatccacagggcaggaccatggcaggatccgctccgccaaagcca

SEQ ID NO: 1030316 - DNA, 120 bp, Artificial Sequence
  ENSG00000248473_16 (sequence is synthesized)
ctggctgggaaacggctccaccagtgccctgacacaggattctcaatgcccaggcctcaggatctgctttaggaaggccagtcataaagccaccctctttggggaatgcactccagagca

SEQ ID NO: 1030317 - DNA, 120 bp, Artificial Sequence
  ENSG00000248473_17 (sequence is synthesized)
ttcttgctgttaacggaagtgtagaaagtgagcccaagtcctcagtgaacagtgggggcgctgcccaggtgcaggactggccccctgggggtctcgggacggctcccgcctccgtcttcc

SEQ ID NO: 1030318 - DNA, 120 bp, Artificial Sequence
  ENSG00000248473_18 (sequence is synthesized)
ccgcaccgcgcactttggaggcctgggcacaggtggaggcggcgctgggtcccgccgtacactcccctgtcgcaggcgccctctctccagccggagggaacctcaaaaaagctctgagcg

SEQ ID NO: 1030319 - DNA, 120 bp, Artificial Sequence
  ENSG00000248473_19 (sequence is synthesized)
agtccccgtcccaggtggggccgcggcttataccgggaccactccagggtagctcaaggttcgaaaacggaatccctgtccggtgaaccagagaagagaaaatcgctcggggccacctgg

SEQ ID NO: 1030320 - DNA, 120 bp, Artificial Sequence
  ENSG00000248473_20 (sequence is synthesized)
gtagagaccggaggggtgactgccttgactgggaggcgtggaggagcgagcggggtctgcggctccggccgggaggtatgcgcttccctctctcacccatgcctgctccggtccaaagag

SEQ ID NO: 1030321 - DNA, 120 bp, Artificial Sequence
  ENSG00000248473_21 (sequence is synthesized)
ccgagaccgtgggtcaagaccgggatggattcgctcgggagaggccaggagcctgccagcacgttcgggcactagcgctcccggggctcctcggactcgtggaccccgaaacgcctgccc

SEQ ID NO: 1030322 - DNA, 120 bp, Artificial Sequence
  ENSG00000248473_22 (sequence is synthesized)
cacaggaagatcaccccactgtagaagtcgggtcacggggaccagtggcgagctacctgacggcttaactacagataccctcccgacgaaagccgtggactcccaggttttgatcccgaa

SEQ ID NO: 1030323 - DNA, 120 bp, Artificial Sequence
  ENSG00000248473_23 (sequence is synthesized)
gctaaggggacaaaggttcctggcctcagcacactctcagattcacagggagacagaactgagactgagagctggttcctctccctctctcgtggggatacagtgagaaggcagctgggc

SEQ ID NO: 1030324 - DNA, 120 bp, Artificial Sequence
  ENSG00000248473_24 (sequence is synthesized)
tccagcctgcgaaactgtgagaaatcaatgtcattgtttgagcagcctggcatatggtattgtgttacagcaacccgaaccaagacaaaggttctcagctggggagacagaaactcatct

SEQ ID NO: 1030325 - DNA, 120 bp, Artificial Sequence
  ENSG00000248473_25 (sequence is synthesized)
ggagcctgcactccccctggggaggggaagatgcctgtcgacctggacagagggcctggacagaggcagccctgggctgagttggcccttgcttgccgcttctccttgggagcactggga

SEQ ID NO: 1030326 - DNA, 120 bp, Artificial Sequence
  ENSG00000248473_26 (sequence is synthesized)
caggatcccagaaggttccagaatgcatgtcaagcaagcagcagtccctgtggagtttggggtaacatgcacagaggaagaaatggcggaaaagcagcatcaggatggctttagggcagg

SEQ ID NO: 1030327 - DNA, 120 bp, Artificial Sequence
  ENSG00000248473_27 (sequence is synthesized)
gagctgctggaaggtggcagacagagtgagcaggggcaggagatgggccagcgaggcacccgctgacatggaagtgccgtcatgcgctgcacagcaaccttccaggcaaggagggacacg

SEQ ID NO: 1030328 - DNA, 120 bp, Artificial Sequence
  ENSG00000248473_28 (sequence is synthesized)
tgcatgacagtggtcccatgactatgatggagctgaagaattcctatggcctagggatgtcatagccgtggtactgtcgtagcacagacgtcactcgtgggagcgatgggctatgccacc

SEQ ID NO: 1030329 - DNA, 120 bp, Artificial Sequence
  ENSG00000248473_29 (sequence is synthesized)
cagcctaggggtaaatgaggtgcaccttccaagagccacctaatcaccatttcccagaatgcatccttgttgttaaggggcccgtgactgtatgtcttgggaagcaacacgtgactgttg

SEQ ID NO: 1030330 - DNA, 120 bp, Artificial Sequence
  ENSG00000248473_30 (sequence is synthesized)
tcccgccctgcactgactgcccagcgagcgctcagaatgcattagatatggggtggacagaggaggaggacagcaccagcacccagacagcaacttcccttggaatcaccatttcctgaa

SEQ ID NO: 1030331 - DNA, 120 bp, Artificial Sequence
  ENSG00000248473_31 (sequence is synthesized)
ccaggggatctccccagccacccacaccaaagcctaaactctcatacctcctctctctaaagcaggggtctgcaagctttctctgcaagggccacgtacagaatcttttcagttttgtcg

SEQ ID NO: 1030332 - DNA, 120 bp, Artificial Sequence
  ENSG00000248473_32 (sequence is synthesized)
gaagtacccacgtctgcccttttggtgccaaagccagtaaaggtgacacataatgagagggaggcgccgtgtgccaatgggacatgtgtgccaatgggacttgactcacagacaccaaca

SEQ ID NO: 1030333 - DNA, 120 bp, Artificial Sequence
  ENSG00000248473_33 (sequence is synthesized)
tttgaatttcatctaatttttacatgtcatgaaatattattctttttatttttttaaccagtaaaaaatgttcttagctcgctgggctggagagaaataggttgcaggctggatttggcc

SEQ ID NO: 1030334 - DNA, 120 bp, Artificial Sequence
  ENSG00000248473_34 (sequence is synthesized)
tgagggtagtttgctgaccaagggaaagggaaaaaaccaaacttgctctaacccacctctctccctccagtcccatgcagtcccactttccttatttttttattttttatttttatttta

SEQ ID NO: 1030335 - DNA, 120 bp, Artificial Sequence
  ENSG00000248475_0 (sequence is synthesized)
tggaatataaggagatttgacctgtgctgctgtgattaacagacatcagaggcatggtaccatgaggacagagacctcaactgtgtgttcatcattaagtctccagaattcagcaaaata

SEQ ID NO: 1030336 - DNA, 120 bp, Artificial Sequence
  ENSG00000248475_1 (sequence is synthesized)
tatggcacatagaaggaagaaaaacaacagtaactagatgaagcaaggaccacccttctggacaacaaagggagaggaatgaaagtctgacctaggaaaagacggagtctcgctgtgttg

SEQ ID NO: 1030337 - DNA, 76 bp, Artificial Sequence
  ENSG00000248475_2 (sequence is synthesized)
cacctgcctcggcctctttatcctttttttaacatctagttttctgtgagtgttttctaatgtgcactgtagacgg

SEQ ID NO: 1030338 - DNA, 120 bp, Artificial Sequence
  ENSG00000248475_3 (sequence is synthesized)
tagttttctgtgagtgttttctaatgtgcactgtagacggacatagtggtatgtgattactattcatagataaataataatttgtttattattgtgtaataaacattgtgtgataaagaa

SEQ ID NO: 1030339 - DNA, 120 bp, Artificial Sequence
  ENSG00000248475_4 (sequence is synthesized)
aaagctcattgactcttttcaagcatggtgatgaggtcgtgggaagaagagcaaagacggagtctcgctgtgttgtccaggatggagtgcagtggtgctttctcagctcactgcaacctc

SEQ ID NO: 1030340 - DNA, 120 bp, Artificial Sequence
  ENSG00000248474_0 (sequence is synthesized)
tctgcgatgcagaaaggggtgcgggttgcaaagggagtagcctctgtttttttgttacttaagcatgggaagttggagttttccttttgattcatttctaggaagtcggtgcaaactggc

SEQ ID NO: 1030341 - DNA, 120 bp, Artificial Sequence
  ENSG00000248474_1 (sequence is synthesized)
cctgcctccagaccctattctccagcatgaattgcatctcatcaatgtcattttcacttttgatgatgaaggctgattaccttgtagagagagaagtcatagggatgttatgtccatgga

SEQ ID NO: 1030342 - DNA, 120 bp, Artificial Sequence
  ENSG00000248474_2 (sequence is synthesized)
agttttacctaatggtatcttgagtagaaatgtaacctagaagagtttattgaaaatcctcctggctgatgcttatttcttggaatcctgagtcttacacttgctacctaataaaaagaa

SEQ ID NO: 1030343 - DNA, 120 bp, Artificial Sequence
  ENSG00000248474_3 (sequence is synthesized)
ggaagattcttctcagcaaggtgagaaaacaggctgagagaagttggaagaaacacaggagcagggatcccacattagacagtctgattccagagatcaggaccttggctgcaacactat

SEQ ID NO: 1030344 - DNA, 120 bp, Artificial Sequence
  ENSG00000248476_0 (sequence is synthesized)
ggttctgtggaaaatctgatgtgccaagaagtgttccataccattctgagaactctggatacctgctcagacagctctgtttcagctaaacagtaacatctgggagggaagcttaatgtg

SEQ ID NO: 1030345 - DNA, 120 bp, Artificial Sequence
  ENSG00000248476_1 (sequence is synthesized)
tgtggaatcaaggatgaagtttaacacaggaatgagaagtagagcacatagctgctaagataaggctggagtctcagctcattgcaacctttgcctgccaggttcaagtgattctcctgc

SEQ ID NO: 1030346 - DNA, 120 bp, Artificial Sequence
  ENSG00000248476_2 (sequence is synthesized)
gcttcccaagtaactgggactacagaatgtaatcatcgcaaggccaggagatgcgtttggtctgtgctgcatctcaagcaggacaatggctggaacatagtagggtctccaaaaatgttt

SEQ ID NO: 1030347 - DNA, 120 bp, Artificial Sequence
  ENSG00000248476_3 (sequence is synthesized)
cttggaaaatgattacactatagatggcagcacaccactacctacgatccgatcaccagcctgggtttgtaagtcagagctgttggtcaggagatggcagctaatgagtaatcagtccaa

SEQ ID NO: 1030348 - DNA, 120 bp, Artificial Sequence
  ENSG00000248476_4 (sequence is synthesized)
actgaatggcaaattaatgtcttcattaagtgaacaaaccagcttcctccataaacaaggtcagagtatttataacccagtgtatttcataaaagcaaaaacgcatctccatttacataa

SEQ ID NO: 1030349 - DNA, 120 bp, Artificial Sequence
  ENSG00000248476_5 (sequence is synthesized)
ctttactatggagctcatgatttatctgcacaaagcatatgcaaaatctcacttgtataccgtctttaataaggacccatgccattctgatgtaattattaataaagtcacacttgataa

SEQ ID NO: 1030350 - DNA, 120 bp, Artificial Sequence
  ENSG00000232884_0 (sequence is synthesized)
agatatcagtttctcagaagctggtgttccaagaagctagaatgacagactcatttctcgctcctttctccttccctcttgaaggagaagccttgagttgtgcatcttctcttgatttta

SEQ ID NO: 1030351 - DNA, 120 bp, Artificial Sequence
  ENSG00000232884_1 (sequence is synthesized)
ctgaggtatggtagctatagcaaactgcctactgcctttttttttaacttttgctctcagtggctccaaggcatcgaaactatgctagttccatgagtgctccaagtgaggcaagacaga

SEQ ID NO: 1030352 - DNA, 120 bp, Artificial Sequence
  ENSG00000232884_2 (sequence is synthesized)
gactagtcccttgggcagccctctgaagagccagaatgccaacacatgctccactcttctccctccttgccaaggaagaagtcttaacttgtgcacttcctcccccaattgtgccatgct

SEQ ID NO: 1030353 - DNA, 120 bp, Artificial Sequence
  ENSG00000232884_3 (sequence is synthesized)
gtgccaaccatatcaagccacctgctgctttccattgtcctcagtgacccccagacattcaaattatgctagttctgtgggcacaccaatcaaggaagtaagagacctgtttcttgggca

SEQ ID NO: 1030354 - DNA, 120 bp, Artificial Sequence
  ENSG00000232884_4 (sequence is synthesized)
gctctctgaaaagctggaatgttggaggcatgctctattcttttctcccagaggaaaaagatgtgaagaggcattctgtcttggcactgagctgtgctaacttgggggagaggctgatgc

SEQ ID NO: 1030355 - DNA, 120 bp, Artificial Sequence
  ENSG00000232884_5 (sequence is synthesized)
agatagtatttgttttactctgatgatcccatggagtctctgctataagctacaaggaagattttgtgagttcagccaagaacgagagcttcggagccttcaggaaaaggcttgtactgc

SEQ ID NO: 1030356 - DNA, 120 bp, Artificial Sequence
  ENSG00000232884_6 (sequence is synthesized)
ttattgaagcacaacatgtccacttacatttgtattgtcttttgtgacttttcttttgctaaaatggcagagctcagtagttgtgacagagagaatctggcctgcaaattattatttttt

SEQ ID NO: 1030357 - DNA, 120 bp, Artificial Sequence
  ENSG00000232884_7 (sequence is synthesized)
cagctcactgcagccttgaactcctggtctcaagagatcctcctgcctcagccttctgagtagccaggattgtaggcacatgccatcatgctcagctaattttttaattttttgtagaga

SEQ ID NO: 1030358 - DNA, 120 bp, Artificial Sequence
  ENSG00000232884_8 (sequence is synthesized)
cagccttctgagtagccaggattgtaggcacatgccatcatgctcagctaattttttaattttttgtagagactaaatcttgctttgttgtccaggctagtcttgaactcctgggctcaa

SEQ ID NO: 1030359 - DNA, 120 bp, Artificial Sequence
  ENSG00000232884_9 (sequence is synthesized)
agatgtgagccattgctcctggcctggcctgcaaattctaaaatagttactctctgagattttacagagataatttgctctcagattctaccagtggatggggctgggtttctcgtatta

SEQ ID NO: 1030360 - DNA, 120 bp, Artificial Sequence
  ENSG00000232884_10 (sequence is synthesized)
ttttaggttgaaaactagacagctttgtgaaactggtaacacaagattcagcagcacaagaattaattaaatatatctaaatgagctaatgaggaaatttttattgtaataatttgtttg

SEQ ID NO: 1030361 - DNA, 120 bp, Artificial Sequence
  ENSG00000232884_11 (sequence is synthesized)
tttgaaatagtgttgttttgtttttctattttttgaatatatgaggaagtcctatcttttcttaagccattaacaacccacagaagtttaataaactgctttcgtaaactgaaaaaaaaa

SEQ ID NO: 1030362 - DNA, 120 bp, Artificial Sequence
  ENSG00000232884_12 (sequence is synthesized)
ggttatagaggcatgttctatcgtctttattaaggaccaatgaccttctaagaagaggaagacacaccaggcatgcacacgcacagaaaagaagaccatgtgagggcacagcaagaagat

SEQ ID NO: 1030363 - DNA, 120 bp, Artificial Sequence
  ENSG00000232884_13 (sequence is synthesized)
ttatgccaccaaatctgtggtattcgcttatgaaaaccatagaaaattatacaatacccaacaagcaaatagcagaatggaattaaacccataaaggatggcttcaaaggcaatgcttaa

SEQ ID NO: 1030364 - DNA, 120 bp, Artificial Sequence
  ENSG00000232884_14 (sequence is synthesized)
ccactatactgcctttaaaaattgtcctaacagttcaacttcaattacagaaagtttataataattagatgttaatacttttatgcttaactttatatttctatttcaaatgcttatttc

SEQ ID NO: 1030365 - DNA, 120 bp, Artificial Sequence
  ENSG00000232884_15 (sequence is synthesized)
cttttcaatagttaatattttctggacagcaattctggactattttctaaattctctgttttctaaattcttatgtcatgccctctgtcataagaatgtttataccctatgatcttctaa

SEQ ID NO: 1030366 - DNA, 120 bp, Artificial Sequence
  ENSG00000232884_16 (sequence is synthesized)
aaataaatccttaaaagatgatatggtttggctatgtgtcctcacccaaatctcatgttaaattgtaatccccattgttggaggatggacccagtggaaggtaattggatcggggggtgg

SEQ ID NO: 1030367 - DNA, 90 bp, Artificial Sequence
  ENSG00000232884_17 (sequence is synthesized)
agttccctgtttgcccactgtctctctgtctcctgctctgacatggtaagacatgtttgcttccccttcaccttccaccctgattgtaag

SEQ ID NO: 1030368 - DNA, 87 bp, Artificial Sequence
  ENSG00000232884_18 (sequence is synthesized)
ttgcccactgtctctctgtctcctgctctgacatggtaagacatgtttgcttccccttcaccttccaccctgattgtaagtttctat

SEQ ID NO: 1030369 - DNA, 90 bp, Artificial Sequence
  ENSG00000232884_19 (sequence is synthesized)
gcactgagctgtgctaacttgggggagaggctgatgcagattgaccttgctaggttatagaggcatgttctatcgtctttattaagaagg

SEQ ID NO: 1030370 - DNA, 120 bp, Artificial Sequence
  ENSG00000232884_20 (sequence is synthesized)
ctcaggtgatccacctgccttggtctcctaaagtgctgggatagcaagcatgaaccgctgcgtctggcccatttttcttattcttaaacatcctactaaacattttggagctagttgtat

SEQ ID NO: 1030371 - DNA, 120 bp, Artificial Sequence
  ENSG00000232884_21 (sequence is synthesized)
ttggagctagttgtattaggaggtttattttctatgtggatggagcagtttaaaaaagctgaaataagtgaaatcttccaagtgatttaaaaaatttttaagcccatgtttctacctact

SEQ ID NO: 1030372 - DNA, 120 bp, Artificial Sequence
  ENSG00000232884_22 (sequence is synthesized)
aaaattcaaaaatatttactatagaagatgactagtcttctttatgacagttattttaatttaaaaggaattaaaaggatataacttttcttgaaacatttgcacttaatcatgctgtca

SEQ ID NO: 1030373 - DNA, 120 bp, Artificial Sequence
  ENSG00000232884_23 (sequence is synthesized)
attcattatatgattttggattacttgcttaatgtttctatttcttctctgttaatactaattactcctaataattataagaattgttattgtatccaatttagaaatcctgttatggaa

SEQ ID NO: 1030374 - DNA, 120 bp, Artificial Sequence
  ENSG00000232884_24 (sequence is synthesized)
taggcactgttcttgaatgctttatgcataaaagcacatttaatcccatcatagccaataaagtattattaccttgattttacaaatgagataactcagatatgcagacatcgagtaact

SEQ ID NO: 1030375 - DNA, 120 bp, Artificial Sequence
  ENSG00000232884_25 (sequence is synthesized)
tggccaagtatacgtgttatggattgaattgtgtcctcccaatattcatgtgttgaatcactaacccctaatgtgactatatttggagacagagtttttaaggaggttaataagttaaat

SEQ ID NO: 1030376 - DNA, 120 bp, Artificial Sequence
  ENSG00000232884_26 (sequence is synthesized)
tttctccttccctcttgaaggagaagccttgagttgtgcatcttctcttgattttactgagatcgtgtagacttcaattggcagagttactcagtattatttacttggaaaatcctctgt

SEQ ID NO: 1030377 - DNA, 120 bp, Artificial Sequence
  ENSG00000232884_27 (sequence is synthesized)
aacctaaaagtcctagctctcctgacactaaggatgacaatggaacacttaaatggcctgttatttgatgaagatgatataaatagaagcagagcagcacatagtgtgaccacgaaaggc

SEQ ID NO: 1030378 - DNA, 120 bp, Artificial Sequence
  ENSG00000232884_28 (sequence is synthesized)
gacactaaggatgacaatggaacacttaaatggtagctgcctatgaagggctgtccctctacccccttgttccctctgaatctgaagctattagccacttacaatcttaataaactaaaa

SEQ ID NO: 1030379 - DNA, 120 bp, Artificial Sequence
  ENSG00000232884_29 (sequence is synthesized)
gaagctggtgttccaagaagctagaatgacagactcatttctcgctcctttctccttccctcttgaaggagaagccttgagttgtgcatcttctcttgattttactgagaggaaaaagat

SEQ ID NO: 1030380 - DNA, 120 bp, Artificial Sequence
  ENSG00000232884_30 (sequence is synthesized)
gaaggagaagccttgagttgtgcatcttctcttgattttactgaggaaaaagatgtgaagaggcattctgtcttggcactgagctgtgctaacttgggggagaggctgatgcaggaccaa

SEQ ID NO: 1030381 - DNA, 120 bp, Artificial Sequence
  ENSG00000232886_0 (sequence is synthesized)
aagaaggctttcgcaagaaatgaggctttcacaagaagacccttgtcaagtatctgagagatttcacttctatagcaattacatcgtgagagcactggccctataaagccaagaaggaat

SEQ ID NO: 1030382 - DNA, 120 bp, Artificial Sequence
  ENSG00000232886_1 (sequence is synthesized)
aaaaataaacttcagattttgtaacatgatagtctgaaagacaggccaacacaggcagctctttggaaacaagagacctggtacttccaacagccaaaaagctggccaaacatcaggaac

SEQ ID NO: 1030383 - DNA, 120 bp, Artificial Sequence
  ENSG00000232886_2 (sequence is synthesized)
aagggaaagacacatcaggtctgagcaagcaggaaatcaactctacaaactttgaaacttggtaaatatgaaaacattctcaataccatttgtcatttaataaatacaaattatactatt

SEQ ID NO: 1030384 - DNA, 120 bp, Artificial Sequence
  ENSG00000250674_0 (sequence is synthesized)
aagcagatgctgtggtcacgggttgagctctttcctgctgccttgagcctgaggcaggctattcttcctgtgcggctccacagcttcaggccagccccctccccgctcaaatccctgagg

SEQ ID NO: 1030385 - DNA, 120 bp, Artificial Sequence
  ENSG00000250674_1 (sequence is synthesized)
cagagctcctctgaagaagacttccgatattaggttgcctgggcccagcttgaatcaggcacccccagccgagtcgccctccaggggatggaatacgggactcccagccccggaaaacgg

SEQ ID NO: 1030386 - DNA, 120 bp, Artificial Sequence
  ENSG00000250674_2 (sequence is synthesized)
aggattttccttagtttagctaaagacgggatcttgtccatcccatggccatgaaaatttaggctcacagacgctttaaagggttccacacaggaagaggcggttcccaggttccacaca

SEQ ID NO: 1030387 - DNA, 120 bp, Artificial Sequence
  ENSG00000250674_3 (sequence is synthesized)
ggaagaggcggttcccaggttccacacaggaagaggcggttcccaggttccacacaggaagaggcggttcccaggttccacacaggaagagacgcccaggttccacacaggaagaggcgg

SEQ ID NO: 1030388 - DNA, 120 bp, Artificial Sequence
  ENSG00000215533_0 (sequence is synthesized)
ttacaagtgaactttctttcctgttttaaagccttttaaataaacttccactcctgtgctgaaacttgccttagtctttttttctgctttatgcccctcagtcgaattctttcatctgag

SEQ ID NO: 1030389 - DNA, 120 bp, Artificial Sequence
  ENSG00000215533_1 (sequence is synthesized)
gaggcaagaattgaagttgctgcagacgcctgtggattcaccacaagtacattggagtaaccactgggaacaacaggttgccttagaagctttgcaggttgttttgtttttttgtttgtt

SEQ ID NO: 1030390 - DNA, 76 bp, Artificial Sequence
  ENSG00000215533_2 (sequence is synthesized)
gttttgtttttttgtttgtttgtttttttgagacggggtctcactttgtcgcccagcgcaacctctgcctcccggg

SEQ ID NO: 1030391 - DNA, 82 bp, Artificial Sequence
  ENSG00000215533_3 (sequence is synthesized)
accacacccggctaattttaatttttcccagctggtcttgaactcttgaggtgaagcaatccgcccacctcagcctcccaaa

SEQ ID NO: 1030392 - DNA, 120 bp, Artificial Sequence
  ENSG00000215533_4 (sequence is synthesized)
aaagtgctgagattacagacgtgagccatcgcgcctagccttgcaagttgttttttgttgaacagaagaagctattcaaaaatgtccaggactctgttatttattcagcaagcttacaaa

SEQ ID NO: 1030393 - DNA, 120 bp, Artificial Sequence
  ENSG00000215533_5 (sequence is synthesized)
caaagccatctttgattgactgattctttgacaatgactatctggatgacacaggaaggatgcaattctggccttggagagaaaacttgcaaggaaaggaacatgtttgaatttcagatg

SEQ ID NO: 1030394 - DNA, 120 bp, Artificial Sequence
  ENSG00000215533_6 (sequence is synthesized)
tgttcctcaatgaatcacgatcttcagggaatgtttcaggtggaggaaggggctcttggtcaatgagcctgaagactgcatggcaacctttgccagcttttggcctgaaaactcaacttc

SEQ ID NO: 1030395 - DNA, 120 bp, Artificial Sequence
  ENSG00000215533_7 (sequence is synthesized)
ttcatttgagataattcctgttttatatactttcatttgagatattcctggtgtatcaactgaaacaaaatctatgaaatatcagattcacaaaaatacattttgaatattgaacgtgga

SEQ ID NO: 1030396 - DNA, 120 bp, Artificial Sequence
  ENSG00000248517_0 (sequence is synthesized)
gtttgcctgtctggctgccttgggtctttggtttgctgagggctgcttggaggctatgccctcctctccagcccctgcgttgggaagtcacaggagaccggagctgcgcacgacatcaca

SEQ ID NO: 1030397 - DNA, 120 bp, Artificial Sequence
  ENSG00000248517_1 (sequence is synthesized)
gcgccgaattctgacccaatctgaatcaaatgtcacccataccctgtcttcaaccaacaaaagagcaacgaagccagagacatcatcttcagctgccttggcctgtgtgccgggggtccc

SEQ ID NO: 1030398 - DNA, 120 bp, Artificial Sequence
  ENSG00000248517_2 (sequence is synthesized)
gtcagctgcaggacacgggagggatggagtgaagcagaaaggccccgccgtgaccacactcatcccagaagagcctctctgttggcatgaaaggaaatcacaaggaaagggacttttcaa

SEQ ID NO: 1030399 - DNA, 120 bp, Artificial Sequence
  ENSG00000248517_3 (sequence is synthesized)
ctgtgccaactctcaccaggggaaggctgaccaggaacaaaggcccttagaggagagcagaactcctgcagcctgcacttccgagagatcctgctccacggagcccggctctactcctgc

SEQ ID NO: 1030400 - DNA, 120 bp, Artificial Sequence
  ENSG00000248517_4 (sequence is synthesized)
aggcagaacctgccagcccgcagatgctgggggctgaaggatcccggcgacaccaagcgtcaggtcaggcgtcagaatccagcgcgtttgctcctcgagaacagcgcgccacctgctccc

SEQ ID NO: 1030401 - DNA, 120 bp, Artificial Sequence
  ENSG00000248517_5 (sequence is synthesized)
aagtgtgtgaggggctgcagtgccgagctccacttcacaagactcactcctgccccgccacctcctgagcagacgcagtcaagcccgacctacctttcaacaaacatgtattagcactcc

SEQ ID NO: 1030402 - DNA, 120 bp, Artificial Sequence
  ENSG00000248517_6 (sequence is synthesized)
ctccatgccaggcactgtgccaggtgcgagggtaccatgaccaagccaaggccccaggctcagagcactcacacgccagtggagggggcagccctgtgcgacccagcagggcacacccca

SEQ ID NO: 1030403 - DNA, 120 bp, Artificial Sequence
  ENSG00000248514_0 (sequence is synthesized)
cacgcaaggggaacagccagcgcagaggccacggggttcaggaacagcaagaagatcggggacactgggtcctggaaggccctgagaagggaagtcgggaaggagggagcatccgggggc

SEQ ID NO: 1030404 - DNA, 120 bp, Artificial Sequence
  ENSG00000248514_1 (sequence is synthesized)
tccagtctctaaatttaactcagcacagggccggggcgaacctgcgctggcggaacctgacaccgtggcccgagcgccaggcccttgccccggcgatgctgggtcggcctcggtcggaaa

SEQ ID NO: 1030405 - DNA, 120 bp, Artificial Sequence
  ENSG00000248514_2 (sequence is synthesized)
ccgggagtggcgctggcagcatttgtgcgcccacctgtcgcggcccgtttcccgcggctgactgggtcaggctggggcggcctggagagtctgagggacgggggcgagggggagaggccg

SEQ ID NO: 1030406 - DNA, 120 bp, Artificial Sequence
  ENSG00000259561_0 (sequence is synthesized)
aagaattccatttgaacatgtgcagacttgaggcatctagggatatctctgtgggaatgttgatactcagaaggagtttagtgtaaagataggatcatatgtatcacactacattatact

SEQ ID NO: 1030407 - DNA, 120 bp, Artificial Sequence
  ENSG00000259561_1 (sequence is synthesized)
gatatcccatgaatctgtactgggttgagttagacgtttacccacagtgggccagatgcctttacaaggttatattatagtatagagaggcaagtcataagtatgtgggaggcacctcaa

SEQ ID NO: 1030408 - DNA, 120 bp, Artificial Sequence
  ENSG00000259561_2 (sequence is synthesized)
gaaagaggagacgtctgggagatgccggtggagccagggtaggtggagaggacccaggaaggaaaacaacccgaacattcaagaggggtggaggaaggcagggagaccaagagcagcata

SEQ ID NO: 1030409 - DNA, 120 bp, Artificial Sequence
  ENSG00000259560_0 (sequence is synthesized)
ggagagagagagagagattcctgtagaatacaagacaagactatcacaatgagctgaaatgttgggtctgtgaaagtaatgagaagcacagtggaaataagtttctgaaggatggaagag

SEQ ID NO: 1030410 - DNA, 120 bp, Artificial Sequence
  ENSG00000259560_1 (sequence is synthesized)
gctggaggctggctagtgggagaaggttcccagacacgtgagagacccagcaacagagtgccacatcattgttattcccccaagatcctggattccagacagcccagtggagcaccatag

SEQ ID NO: 1030411 - DNA, 120 bp, Artificial Sequence
  ENSG00000259560_2 (sequence is synthesized)
acacgtccagaatgttaaaaatccagtagggattttaaatgttcactattacagcacatacatttatacacaaggaggtctgaaggctttctggtttcaattaagattattatctccttt

SEQ ID NO: 1030412 - DNA, 120 bp, Artificial Sequence
  ENSG00000259560_3 (sequence is synthesized)
gagtgatggtttctccttttttcccccagaattccctttggctgatctattttaaaagagtatgagctagggataactaggcttatttgtattgagtctactttcccctccaggtctctt

SEQ ID NO: 1030413 - DNA, 120 bp, Artificial Sequence
  ENSG00000259560_4 (sequence is synthesized)
tgtcttaaattctgaagtcccttttcctatcctgctaaaggttagcagcttgaaatcaaggacatgagtcattgttacttttcatgtggaagataagctctgtggcttttatagcaaaaa

SEQ ID NO: 1030414 - DNA, 87 bp, Artificial Sequence
  ENSG00000259560_5 (sequence is synthesized)
tcgcgccagcaaggattgtgatgacgtttttgctattccagtgcagaaagcatttcatgtaaaacctggggttgatgacatgagcaa

SEQ ID NO: 1030415 - DNA, 120 bp, Artificial Sequence
  ENSG00000259560_6 (sequence is synthesized)
tcacaatgttacatgacgatgaccttaaggaatgaaggatgctctatcctgctgagtgatttatcctcaaagctgaaatgttgggtctgtgaaagtaatgagaagcacagtggaaataag

SEQ ID NO: 1030416 - DNA, 120 bp, Artificial Sequence
  ENSG00000259560_7 (sequence is synthesized)
gcagcaggaagatgttgtctatgacgtcagagccctcaccagacacttaatttgatggcaacttgatcttggacttctcagtctccagaactagtgccacatcattgttattcccccaag

SEQ ID NO: 1030417 - DNA, 120 bp, Artificial Sequence
  ENSG00000259560_8 (sequence is synthesized)
gggtttcattggttaagttaccaaacctctgagcctcagtttccttatcagtcaaatgagtgcaataattcccgccctatcatctgacaaattattgagaaattctaattacatgcctat

SEQ ID NO: 1030418 - DNA, 120 bp, Artificial Sequence
  ENSG00000259560_9 (sequence is synthesized)
aattttcaggtctttgtttttcaggtctttgttaagcatcatgcacataaacgtttgtattacactttctttagcagtatttgaacatggtaccttattcaatgttctgaaacaaatcat

SEQ ID NO: 1030419 - DNA, 120 bp, Artificial Sequence
  ENSG00000259560_10 (sequence is synthesized)
gaatacttcctggtgtggtgataatatcttcataaacttgtgacacccgatggaatgtgagtcggttttgtaatagcctttaaaaacttccctcaatacataataaagaatggtaaaaaa

SEQ ID NO: 1030420 - DNA, 120 bp, Artificial Sequence
  ENSG00000181171_0 (sequence is synthesized)
agaagaagaggaagagaggcctgagcgagcatattagcatgctccacccccttgccacgtgatgccctgtgctgcctcggaacctgcagggtcccaccagcaagaaggccctcatcagat

SEQ ID NO: 1030421 - DNA, 120 bp, Artificial Sequence
  ENSG00000181171_1 (sequence is synthesized)
acggctcctcaactttggacctccagcctccataactacccaacctgtctgctggctatggacatcctcccttaccttcacatgtcacatggcaagtgccctctcctggtgaggggcaag

SEQ ID NO: 1030422 - DNA, 120 bp, Artificial Sequence
  ENSG00000181171_2 (sequence is synthesized)
ggtgagatggagggagaagccctgttgagctgcttggccatgaacagtttgggggaacaggaagcttgccttgacctcgggtccaagactccctccctagagatctcatcaaataaccag

SEQ ID NO: 1030423 - DNA, 120 bp, Artificial Sequence
  ENSG00000181171_3 (sequence is synthesized)
gaaagaccaaccaacagagaagagactggaatcatctgcccagaaagacttttcatctattcttctaaggacagctccaagagattacctgggggactttgtataaaaaataagacaacc

SEQ ID NO: 1030424 - DNA, 120 bp, Artificial Sequence
  ENSG00000181171_4 (sequence is synthesized)
tgtgttcctgtgcagcttcatccctcatctttccctaagtgtcaagaagcaatagttagtccacaagcacgagtgaaattactgaacaaaattaagatggatacagcactctaaaacacc

SEQ ID NO: 1030425 - DNA, 120 bp, Artificial Sequence
  ENSG00000181171_5 (sequence is synthesized)
catttgaatgcatgtgaaatcgacgactttctcaaggttgaaactttgaatggattaaaggagatcagtgagagtacatgatgctgctggtgaaacacgggtttggaattaccttctgga

SEQ ID NO: 1030426 - DNA, 120 bp, Artificial Sequence
  ENSG00000181171_6 (sequence is synthesized)
gattggggtttcagaaaacagaaaatcaaagacaagaaacagaattacagtataaaatccttagatttgagcacaactttatggcttacacagggtagtcagatacgttatttgttcctc

SEQ ID NO: 1030427 - DNA, 120 bp, Artificial Sequence
  ENSG00000181171_7 (sequence is synthesized)
cttgcaaccttaagaggtcaaaatttggatcattcccatttaacagataaggaaactgagggaactaaagcttgaggttgtcaagtaacttcgccaagtatactcaccacagacccagtg

SEQ ID NO: 1030428 - DNA, 120 bp, Artificial Sequence
  ENSG00000181171_8 (sequence is synthesized)
ctctttgaacttgaacatgtattcacccaatgcattaacactgaccagaatcaaactttacttccccaaataagcaagcccagataaaaacaaatagcagattagtcacatgtacaagca

SEQ ID NO: 1030429 - DNA, 120 bp, Artificial Sequence
  ENSG00000181171_9 (sequence is synthesized)
caatgtggttgctgctgtgaagggtacacaggtcccagaatcacaggtgccttcatattaaaaaggaccttcgagttcatctactccaacctccacattttacctgaataaactaatgct

SEQ ID NO: 1030430 - DNA, 120 bp, Artificial Sequence
  ENSG00000181171_10 (sequence is synthesized)
cagagatactaagcagcttcccaaggtcaaacacagcaaattaaagtcagccaagactcaaggcctggtttccaacaaggctgccttctcaaggagtccacagtctggaggactagacta

SEQ ID NO: 1030431 - DNA, 120 bp, Artificial Sequence
  ENSG00000181171_11 (sequence is synthesized)
taacaagtcataagacaggagtcatcacaagggaatacacaattatttgcaaatgtctcttattgacaaggaaaaggctgatgcttcagggaacagatgttgctggacccactgacacag

SEQ ID NO: 1030432 - DNA, 120 bp, Artificial Sequence
  ENSG00000181171_12 (sequence is synthesized)
cattacatttctgagctaagaggctgagtcaactggacccatacattctgtgcttcctggttttgcaattggattgattgaactctgcagaagcagccataaggacaatctaaggaaata

SEQ ID NO: 1030433 - DNA, 120 bp, Artificial Sequence
  ENSG00000181171_13 (sequence is synthesized)
aagcaattgtggccccggggatcaagagctccattgagttgagagtcctagacagctgcctcagagaaccaaagggtttccatatcattaggtgaaggatactcccttctttcatacaga

SEQ ID NO: 1030434 - DNA, 120 bp, Artificial Sequence
  ENSG00000181171_14 (sequence is synthesized)
agctgctgtggtgccagtcttcctaggaaatgttcctagtgaccagaaaatgtcgaacagggtgaggctcagtgctggatcttagtcactgagcataccctcctcctaccactctatcca

SEQ ID NO: 1030435 - DNA, 120 bp, Artificial Sequence
  ENSG00000181171_15 (sequence is synthesized)
ctgactattaactagcctcctatctcaccttcctgaggctgagtttactctctaggaggaggttaaaaaccacagagagaagttgggtgtggtggcctgtagtgtcagctactcggaagg

SEQ ID NO: 1030436 - DNA, 120 bp, Artificial Sequence
  ENSG00000181171_16 (sequence is synthesized)
gaccagcctgggtaacatagcaagactctgtcgctaaaaataaaaaccacaaaacaaggaattactaagagacctggagggaatgtaggccatgtagcccagagaagaatttcaggatcc

SEQ ID NO: 1030437 - DNA, 120 bp, Artificial Sequence
  ENSG00000181171_17 (sequence is synthesized)
gtaggccatgtagcccagagaagaatttcaggatccagagtcagacaaacaaacccttcctcaaatctcaacccttccattccgaggctgattgactttaagcaaatcatgtctattctc

SEQ ID NO: 1030438 - DNA, 120 bp, Artificial Sequence
  ENSG00000181171_18 (sequence is synthesized)
tgagtgtcacgttcctcacctgtgaaataaccaccatcattgggctttcagggaggagaaggggcagaaatgatatcattcatgtcgagcacctagtaaaaagcctatacatatcaccat

SEQ ID NO: 1030439 - DNA, 120 bp, Artificial Sequence
  ENSG00000258214_0 (sequence is synthesized)
aagtataaatcagaacgaaagaaattgcttccctagaacaaatccattgactgagatatgcagtgaaaggaatccaagctggctgggaagaaaatcacttggccccccgagataaatgtg

SEQ ID NO: 1030440 - DNA, 120 bp, Artificial Sequence
  ENSG00000258214_1 (sequence is synthesized)
ttttcaggaagagtttgtgaaggtttgatatatcttctgcaaatatctgacagaattcaccaacaaagattgtattgtattcaagcatctaatctggagattaaaatataataacctgca

SEQ ID NO: 1030441 - DNA, 120 bp, Artificial Sequence
  ENSG00000258216_0 (sequence is synthesized)
agacccggtgagaggtactgggcgatgaggaagtacagctccaactccatgagaggcaccgggcctcagaaccaggaagatccggataaagacactgtctgcactctactcagatgccct

SEQ ID NO: 1030442 - DNA, 120 bp, Artificial Sequence
  ENSG00000258216_1 (sequence is synthesized)
ttgagtctatgcgctgtttctgggctcatcctccagcctcaacgtgtttgctgagaagaaaaagagacattatgtcattcttctgattgtgaatttaattaaaatcctgattcctggatg

SEQ ID NO: 1030443 - DNA, 120 bp, Artificial Sequence
  ENSG00000258216_2 (sequence is synthesized)
gtatcgtgggcctattgaatgagaatctctggagctagaactggaaatctgcattttaacaaataagtctggtgatttttagcattctaacattggagaactactggtgctggagagttc

SEQ ID NO: 1030444 - DNA, 120 bp, Artificial Sequence
  ENSG00000258216_3 (sequence is synthesized)
agatgaccaatggtgaattttatctcacattactagcttcttcagttttcttcccctcagtgctcaggtactcaatttgcataatattagattgtactctttatatattggttcagaaag

SEQ ID NO: 1030445 - DNA, 120 bp, Artificial Sequence
  ENSG00000258216_4 (sequence is synthesized)
aactcactcaaagcaggaattgtaatacccggtttttgtttttttaatctccttagacaactttgcatagtgcaacaaagttattgactcatagagattcaaagtaccaaagaaaatgag

SEQ ID NO: 1030446 - DNA, 120 bp, Artificial Sequence
  ENSG00000258216_5 (sequence is synthesized)
atacttaatattttaaaaatataagcctattttctgtatgagaaaatggaggtagagttttaaagtctttcaaagtttgtcaggtttcatggtttttgatttattattttttgaggtttt

SEQ ID NO: 1030447 - DNA, 120 bp, Artificial Sequence
  ENSG00000258216_6 (sequence is synthesized)
ggatgatgaaccttgactgatactactccagtgatatttttaaaagtatttttataagatgttttagaggtgtctcttttgtaggaaagagacatgagatagtaaattagaatttttatt

SEQ ID NO: 1030448 - DNA, 120 bp, Artificial Sequence
  ENSG00000258216_7 (sequence is synthesized)
taatttaatccaagaatttgagacagtacctcttcacagagaatcaaaaaatagcttgatttaatctgcagtgtacctatctctgtgcttaaaactgtggatctatttcaatggaatgga

SEQ ID NO: 1030449 - DNA, 120 bp, Artificial Sequence
  ENSG00000258216_8 (sequence is synthesized)
acacgatccttatccttgaagaacttaactgtattttacttgcacttaatttttggcattgttttacatgttacttcatataattttacactctataattatatttctggaacatttgca

SEQ ID NO: 1030450 - DNA, 69 bp, Artificial Sequence
  ENSG00000258216_9 (sequence is synthesized)
atcgcttgaaccagggagtccataggaaaaatggaatgaagccaattcaccaatcatcaaaagaaagtc

SEQ ID NO: 1030451 - DNA, 120 bp, Artificial Sequence
  ENSG00000258216_10 (sequence is synthesized)
tgtcagaggaaaaggggtcaagggaggaaagctgaaaagtgctggtgaatgaaacaactcatttactttgaacttcttgaaagactaaccaggaagatccggataaagacactgtctgca

SEQ ID NO: 1030452 - DNA, 120 bp, Artificial Sequence
  ENSG00000258216_11 (sequence is synthesized)
ttgcttcctactgaaacattcgaacagggaattactcctcccaagaatattcttccaaggaaatccctgaaaaaccagatggcagaagttactcagaagaaatgaaaggattttccatta

SEQ ID NO: 1030453 - DNA, 120 bp, Artificial Sequence
  ENSG00000258216_12 (sequence is synthesized)
aaaatatcttaagctattactctataaccactgactatgaaccaatttctattgaattttgttagaaaactccagaaaatatatacctatttgaaaatttttagtagttttcaacttatt

SEQ ID NO: 1030454 - DNA, 120 bp, Artificial Sequence
  ENSG00000258216_13 (sequence is synthesized)
gaaaatttatgagtagactccaaatatatttcattgaatcacaggattcttcattagtttctcaaattggtactaaatcatcagcatcacaacactggaaggaactgaaccaggaagatc

SEQ ID NO: 1030455 - DNA, 120 bp, Artificial Sequence
  ENSG00000258216_14 (sequence is synthesized)
cctccagcctcaacgtgtttgctgtcaattagatcaaactgtggatataggatgcctgcagccaaaccaccaatcttgacccatcgtgagtctcggctcactggcagggtgacttaggag

SEQ ID NO: 1030456 - DNA, 120 bp, Artificial Sequence
  ENSG00000258216_15 (sequence is synthesized)
agtgagaagaaagctgcccaagcttttacgcatgtggaacacattcacttctgacatcctttacgaatgaggaacactgcaaggcagtatcttagaaaggcattcctggcacaatttctt

SEQ ID NO: 1030457 - DNA, 120 bp, Artificial Sequence
  ENSG00000218109_0 (sequence is synthesized)
ggagggaggaggagggaggcggcgaggagccgacggctccacctgatggagaagcgcggagagtccctagacctcggagtgcgctgcaagaggggagaggagagagaccgccgcccctgc

SEQ ID NO: 1030458 - DNA, 120 bp, Artificial Sequence
  ENSG00000218109_1 (sequence is synthesized)
tggaagccttcgcgtccgggggcggcgcgcgggggaaggggtctctggacagtcggtggaggcggcagccctacagagacagccgaaagccagcaacttggaaaaccgcccgaattctgg

SEQ ID NO: 1030459 - DNA, 120 bp, Artificial Sequence
  ENSG00000218109_2 (sequence is synthesized)
gtttctgcacatccaggctggctccaggtctcttgtgcccaccgtgcaagccggcgggatgccagcaggtggcatcctctccagcgtttcttcgccaggcgtggagtccggaggccgaat

SEQ ID NO: 1030460 - DNA, 120 bp, Artificial Sequence
  ENSG00000218109_3 (sequence is synthesized)
accctcgcggaggcgggagcctacagaggatgccggccggccccaggttctgctgctggctggccaagaagtgacaggagggcaaggctcccccggaaagcgtccaagccctgctctcct

SEQ ID NO: 1030461 - DNA, 120 bp, Artificial Sequence
  ENSG00000218109_4 (sequence is synthesized)
gctcttccaagccttgctgcgtgttgcccccagggttttctgagatctgggacgaagagagtgatgtgcaaggttctgggtcccggtgcaggagtgaggggtacggctgtcgagtgctcg

SEQ ID NO: 1030462 - DNA, 120 bp, Artificial Sequence
  ENSG00000218109_5 (sequence is synthesized)
gagcaggctggcgtttgggcacactgcagacctcagctcaccgccactttctcctgaccttcctcgtggctgtcagcccaatgtctatcatgtgttattccctcggtttgttcaaaggcc

SEQ ID NO: 1030463 - DNA, 120 bp, Artificial Sequence
  ENSG00000218109_6 (sequence is synthesized)
actgactcttggaaagaagaggggggcctgggagatccaggttggaaggatcttgtttcgctctcccattggcccccaacactggcctcatggcccccttactggctccaggcatccccc

SEQ ID NO: 1030464 - DNA, 120 bp, Artificial Sequence
  ENSG00000218109_7 (sequence is synthesized)
tcacccccaccaacgagccagctgggcctgttcccctctccactcccctctactccctccctgtaacctccggtctcccgcagaaagaaagaaaaaaaaaaaagcttggattaagtgatg

SEQ ID NO: 1030465 - DNA, 120 bp, Artificial Sequence
  ENSG00000218109_8 (sequence is synthesized)
agctgcccgcctctaaaaggaccaggaggcgtatcaagcctgagtgccggaaaacccacggcaatcttcagcagccaccacgtggggcagagaacgcgagcagtacctgcaggacccaca

SEQ ID NO: 1030466 - DNA, 120 bp, Artificial Sequence
  ENSG00000218109_9 (sequence is synthesized)
cacagccggtcgggctctggcgccagcctcgacggcggccccgccatctccgcccggctgcccgcggcctcacctcctccgggggctcggttagcctcctggcgctgcaaggctgcctgc

SEQ ID NO: 1030467 - DNA, 120 bp, Artificial Sequence
  ENSG00000218109_10 (sequence is synthesized)
tatacaggtggattacgagaccttaaccctgctccctgcagttggtctttccattgcagagggaaagggctcagagaaccagatattcaactttcagaagcatcccctgaagggcaggtt

SEQ ID NO: 1030468 - DNA, 120 bp, Artificial Sequence
  ENSG00000218109_11 (sequence is synthesized)
gtctgctcccctgattcattgaggatcaggcctcatggagggagtctgccctatgaaggtggggacagcgcccctctagttcacagccgtctccacagctcttacccaggtaggcagtag

SEQ ID NO: 1030469 - DNA, 120 bp, Artificial Sequence
  ENSG00000218109_12 (sequence is synthesized)
gctctcactacgtactgctgaatgaatggtaaagttttacctagtgccccacattctatttcctgttttctgaatccaatttaacttattcttccctctgttattaaaccattgtcaaac

SEQ ID NO: 1030470 - DNA, 120 bp, Artificial Sequence
  ENSG00000247416_0 (sequence is synthesized)
aggcccggattccgcggcgcgagagtgagcgctggcgggggcggtgggatgctccaagtcggcgtgaaagaggcgagagtgggcgagcacgggcggccggaccaggagcactcccggtga

SEQ ID NO: 1030471 - DNA, 120 bp, Artificial Sequence
  ENSG00000247416_1 (sequence is synthesized)
ccacctagtctccattttatttcctcggaaactgccgggcaggcgggggaccggccgcagggcggggtttctcttggcgaattgtttcctgccagcggcagccgagctgcgttcacgcgc

SEQ ID NO: 1030472 - DNA, 120 bp, Artificial Sequence
  ENSG00000247416_2 (sequence is synthesized)
tgatcggagaatgagtgacagtcccagcctcagcacactcgcaactcggagatccttgcgctggcccgggttcgttttgatggaactgggatgggagcgaggagcggggggcgggggtga

SEQ ID NO: 1030473 - DNA, 120 bp, Artificial Sequence
  ENSG00000247416_3 (sequence is synthesized)
gaacctcactgtgtccttccaccacgccggccacaaatagtgccgaacatcaaggagagagacatacaacacccttcagcagatcccctgggaaggaggtgggaagagacttaagttaga

SEQ ID NO: 1030474 - DNA, 120 bp, Artificial Sequence
  ENSG00000247416_4 (sequence is synthesized)
agaaaactccgatgtttggaagagatttccagaaataacccgaagaaaatgttttcctgtttataaattctgaaatctgtggtctctttattaaaatagccaggcttttatataggtatt

SEQ ID NO: 1030475 - DNA, 120 bp, Artificial Sequence
  ENSG00000247416_5 (sequence is synthesized)
atgatatagaagcgtcattaaataatattttcttacatggggacgtgaccttaattcttaaagatattaatgtataatattactgaggtaccaacacaataggctttaattaaaattcca

SEQ ID NO: 1030476 - DNA, 120 bp, Artificial Sequence
  ENSG00000247416_6 (sequence is synthesized)
cccgtgttttcaaaagtagggggtggagaaagcggggtgaaaagaatcatgtctcagcacctgaaggcttgggtatgtaaggaactaatgtgagaaaggtgttctagatgtcaggttaac

SEQ ID NO: 1030477 - DNA, 120 bp, Artificial Sequence
  ENSG00000247416_7 (sequence is synthesized)
ccattagcctagaacactgaaaccctctaacagaggaagtctgcataagttcaaaggcattaaagcactaatgttaccgggtactccgtttttcttcaaaggtcggcctccccactcctg

SEQ ID NO: 1030478 - DNA, 68 bp, Artificial Sequence
  ENSG00000247416_8 (sequence is synthesized)
gtttctgttttgcatctctgctcactgcaacctctgctcccggttcaagcgattctgctgcctcagcc

SEQ ID NO: 1030479 - DNA, 120 bp, Artificial Sequence
  ENSG00000247416_9 (sequence is synthesized)
caaagtgctaggattacagccgtgagctaccgcacccagccgctgtagcagtttttaaaagtccatcctctactgtcaggacatccatccttattggacaggccccatctcttccccact

SEQ ID NO: 1030480 - DNA, 120 bp, Artificial Sequence
  ENSG00000247416_10 (sequence is synthesized)
ttcctcctctataatagaccaagtgggccacaccagtacagtgtaattagcttggacccctgaaaagtatttcttcccccaagtaaatcttccacaacgtttactttgggctatttctct

SEQ ID NO: 1030481 - DNA, 120 bp, Artificial Sequence
  ENSG00000247416_11 (sequence is synthesized)
cattccaagtataaacaattcaaaagtacagaaaagtagaaagaactaaaaataaccccaaatcccacagattccagagatactcatagattttgtcttctgtatgtgcatatgattttt

SEQ ID NO: 1030482 - DNA, 120 bp, Artificial Sequence
  ENSG00000247416_12 (sequence is synthesized)
ataattgacatattatagtagcaatttgaatcctgctgattttgcctaacatcagtataagcatttattcctctggatcattaaaaagcttttctagatatttttatagctatgtaatat

SEQ ID NO: 1030483 - DNA, 120 bp, Artificial Sequence
  ENSG00000247416_13 (sequence is synthesized)
ttcttcatatggatgattttgcaatggtttccccatttttgcatatttatattgtttgtggagtttgataatataaataaggcttttttgaacatctttcaacaaatatttgcggagcaa

SEQ ID NO: 1030484 - DNA, 120 bp, Artificial Sequence
  ENSG00000247416_14 (sequence is synthesized)
ccactgggtttagccctgtgctagatgcagtgaattatatacgtctttttttaatggttgctgtatttaagtgtctttgatttcagacttctgcttctaacatctaaaatcaccacatta

SEQ ID NO: 1030485 - DNA, 120 bp, Artificial Sequence
  ENSG00000247416_15 (sequence is synthesized)
cactttgccaggatcgggaacctcgcccaaagaaaggagacagggcgaggtgtttcgggcggctacctgccattcttctcccgccccgtgcaacactgggcacgcggcgcgtgtaaagac

SEQ ID NO: 1030486 - DNA, 120 bp, Artificial Sequence
  ENSG00000247416_16 (sequence is synthesized)
acacgcgcgcacacgcgcgcgcacacaccaggcagccccaatcacgccctcctcgccctccgcccctccgcacttcctcctgtcaaaacgcggcgctcgaccctcccatccttcagtgct

SEQ ID NO: 1030487 - DNA, 120 bp, Artificial Sequence
  ENSG00000247416_17 (sequence is synthesized)
aggggaggcagatgcggaagcctgcaaaacgcggcctggagcttttgggggagccgggctctttcacacgcagtctccctgggagagctgggatttcttttcacacttctaccctacgcc

SEQ ID NO: 1030488 - DNA, 120 bp, Artificial Sequence
  ENSG00000247416_18 (sequence is synthesized)
ttcgcaggcgctcctgctacccagccttccttaatcagcagtttgcatattttgataactagtaaataataaaagcaaaattttagatttggttaggtaaagttgtcaaatccctccatt

SEQ ID NO: 1030489 - DNA, 120 bp, Artificial Sequence
  ENSG00000247416_19 (sequence is synthesized)
tcgattctaagatccttgcaacacaaggatagcccaggactttaagtgcgggaaattagaactttggagagggatgggggttgccgttgctgggtgttgtttggatattgtttgtttgtt

SEQ ID NO: 1030490 - DNA, 80 bp, Artificial Sequence
  ENSG00000247416_20 (sequence is synthesized)
ccccaggagccggccggctctgctcccaccgccgcgggcgcacaaagtgggaagggcggacgcgccggaggggcgccggg

SEQ ID NO: 1030491 - DNA, 120 bp, Artificial Sequence
  ENSG00000247416_21 (sequence is synthesized)
tggagggagcggggttcggctgggcagcaagggcgacgcgctcctttcacagctaaacgaaaatgaccagccttagcagtccacgtaaaaccacccaaaataatagcgttcctcctagga

SEQ ID NO: 1030492 - DNA, 120 bp, Artificial Sequence
  ENSG00000248518_0 (sequence is synthesized)
aaggtacactctactatgtatgcacagccacagaaaaatcatagtgtgtacattgcttgaatgatccttttgggtttggctgttactcacagatgaaggagacatttccaaggttgtaac

SEQ ID NO: 1030493 - DNA, 120 bp, Artificial Sequence
  ENSG00000248518_1 (sequence is synthesized)
cagagtcattctaagcacagtccttgcagcagtagagacaatcccaatgactacaggaaatcctcaactctcatccagaacctgtaagctcaggacatgcatcataggaaggatgtgaat

SEQ ID NO: 1030494 - DNA, 120 bp, Artificial Sequence
  ENSG00000248518_2 (sequence is synthesized)
ctctgggataatttggacgatcccagcacgggtatactccactctgcttcatggcacttaccaaggctggagagagaccacacccatcccttctgttttccattgcattcccttccccaa

SEQ ID NO: 1030495 - DNA, 120 bp, Artificial Sequence
  ENSG00000248518_3 (sequence is synthesized)
actttccatccagaaattcttctttggttgaccctgccacattgtatattcttgttctccccccatgatgcattttatttcagtatccttagattcctaataaatcaattatttaaacat

SEQ ID NO: 1030496 - DNA, 120 bp, Artificial Sequence
  ENSG00000236094_0 (sequence is synthesized)
tccccacagaggagtttgaaattcttgcttcaggccatatggagtggatattccttccagaaggaaattacagaccactctctgtttctactcaactgcttttcactccaggatgcttca

SEQ ID NO: 1030497 - DNA, 120 bp, Artificial Sequence
  ENSG00000236094_1 (sequence is synthesized)
cccaagggtggggccagaagcagggctgcagatatgtgtcctgaacctcccatggaccctgctggctcccttcaaaggcttcgggcatagcgacttgcctttccgtcttgttcagtcgtc

SEQ ID NO: 1030498 - DNA, 120 bp, Artificial Sequence
  ENSG00000236094_2 (sequence is synthesized)
accagtcagccgtctgcagacttctctccctcacgttgtggcagaggagttgtacattctctagattttaaaaatatataagttactttttctttaaaataaaaattgtctctgaaataa

SEQ ID NO: 1030499 - DNA, 120 bp, Artificial Sequence
  ENSG00000236094_3 (sequence is synthesized)
acacagtccagttctgcaatagccttgtttctggagttctaacctccttcccagcagggaatgactaatgcttaaagccacgcattacacgaaggtttaccaggcagagcaaataaatgg

SEQ ID NO: 1030500 - DNA, 120 bp, Artificial Sequence
  ENSG00000236095_0 (sequence is synthesized)
gccggcgattattcagcccttcgggagctttgagttctggatagatctgcgattctgggaactgactttaaacaaaatcacgaagctttgcagtgaagacacatctgactcacaatgtcc

SEQ ID NO: 1030501 - DNA, 120 bp, Artificial Sequence
  ENSG00000236095_1 (sequence is synthesized)
tttgctgcatctgcatttgagctgcccaagagcccaactaaattaatccctccagaagtaaaggagatgaaatcaaccaatctgaggaaagcctgaccaaggcattcatgtatcaaaaag

SEQ ID NO: 1030502 - DNA, 120 bp, Artificial Sequence
  ENSG00000236095_2 (sequence is synthesized)
atatggaatacctacccactgcatacatgatactagaaatcctacagcttccctgcacagtggctgtggttttcatttatatgaaactgaggccagagaggtaaagaacttggcctgaag

SEQ ID NO: 1030503 - DNA, 120 bp, Artificial Sequence
  ENSG00000236095_3 (sequence is synthesized)
attactcagagcctctccctcacaccctgcagatagagctctgaatctcggcatctgtgagttgtttcttttgggctttttaaaaagtcttccagaattgtggaatgggatagtttcagt

SEQ ID NO: 1030504 - DNA, 120 bp, Artificial Sequence
  ENSG00000236095_4 (sequence is synthesized)
taaaatatctgtttttgaaaatcatgaccaataataaaaatcaagaatgtcctattacatatttcatacctttaagaattttgttttgctctaattggtcttattggattaaatgatttc

SEQ ID NO: 1030505 - DNA, 120 bp, Artificial Sequence
  ENSG00000236095_5 (sequence is synthesized)
taaagtcttctctgggacttcacttttgtgtttcaagtttcttatccatctgaaagccatatatttgggttaaaccaaattattagcaataggtatctttgtagaatttctagtagtttg

SEQ ID NO: 1030506 - DNA, 82 bp, Artificial Sequence
  ENSG00000260160_0 (sequence is synthesized)
ttttaaaaatcaaattctctgtacaaattttttgccacacaaatctgaaaataccaccttgatttatggatcctccaagttt

SEQ ID NO: 1030507 - DNA, 120 bp, Artificial Sequence
  ENSG00000260160_1 (sequence is synthesized)
atctgaaaataccaccttgatttatggatcctccaagtttttcactgaagtacaagggaacaaatgtaaatctataaattgggttaaatgatttctaggaaagtgtataataataataac

SEQ ID NO: 1030508 - DNA, 120 bp, Artificial Sequence
  ENSG00000260160_2 (sequence is synthesized)
taaataaataaataatagaaatgaagttttgctatagttgagaaattatagaatgccatgcttattatgataacctcatacagaaatttttacagctttttgaaaaatggcttttttgtt

SEQ ID NO: 1030509 - DNA, 120 bp, Artificial Sequence
  ENSG00000260160_3 (sequence is synthesized)
attcaatttttatagtcttataaacattaattttcacaagactagtgtaaaaatattgtagacaatttgtctaagcagtatttcggaagcactttcaacagttatgtaaagggtcctatt

SEQ ID NO: 1030510 - DNA, 120 bp, Artificial Sequence
  ENSG00000260160_4 (sequence is synthesized)
tatgcttgaagaaaggacatgtataaggtttttagcatgaggaaattaagtctttctcaacctagaagtcaggagtttcaagagtaaacattcagtgttgaattaaagaatctgaatcta

SEQ ID NO: 1030511 - DNA, 120 bp, Artificial Sequence
  ENSG00000260163_0 (sequence is synthesized)
ttgggaatcttcgcagcagcagaacccgctgcctccaggtccgaccagacctgcataggtagagagtccccgcacagggcggccagcagagctacccagctgccccagggcctcgggacc

SEQ ID NO: 1030512 - DNA, 120 bp, Artificial Sequence
  ENSG00000260163_1 (sequence is synthesized)
cctgggcctgggacccaggccagaccctgactcattcggtgatctcacaggactcctcccaccccaagaccctttcagggaccctgcctcgaactccacgacatgggaggcaggggcggg

SEQ ID NO: 1030513 - DNA, 120 bp, Artificial Sequence
  ENSG00000260163_2 (sequence is synthesized)
ccttttgcaggggaaggactcccccagcaggacgtttactgaatctggagggagtcgccctgcagatatcccgcggaagccggaggagacccaggtgcgccccaccggctagctgcgcct

SEQ ID NO: 1030514 - DNA, 120 bp, Artificial Sequence
  ENSG00000260163_3 (sequence is synthesized)
gcgggtgcccaaattggtgtccgggccatcctcaccgcagtgactcctccgcagcgccaacgcactccattttccttccaccctgccggtggggggcgtttgcttgttctcactctgcag

SEQ ID NO: 1030515 - DNA, 120 bp, Artificial Sequence
  ENSG00000260163_4 (sequence is synthesized)
ccgcagccagtggcgccgctaccaaggtccccgcctcgccatccgggtcctgcctgagcatccttattggtgctcagggctaggcgtgcattgctgctaggggcgcggaaaggtttatcg

SEQ ID NO: 1030516 - DNA, 120 bp, Artificial Sequence
  ENSG00000260163_5 (sequence is synthesized)
tgggtggatgctgcccggggcttgagtggtttttagaggtcttgagtggctcactctccaatcagcgctttctagagacagcgtggtcagcgtacttgcttactttcaggattgcgagac

SEQ ID NO: 1030517 - DNA, 120 bp, Artificial Sequence
  ENSG00000260163_6 (sequence is synthesized)
gtctttaacccttgctgatcggctgacgctgcagcttcctgtggcttcctgctcatttcccgcaagatagcactgatagggtattggaaatccttatgtaaagtatctgttcactgtttt

SEQ ID NO: 1030518 - DNA, 120 bp, Artificial Sequence
  ENSG00000260163_7 (sequence is synthesized)
tgcccattttcttgatttatttgaactgattcttctattcttttgaagttaatgtgttgcaattttcacatctatgttgttttttcattagtggcatttctcaactccttgatttcttga

SEQ ID NO: 1030519 - DNA, 120 bp, Artificial Sequence
  ENSG00000260163_8 (sequence is synthesized)
atttcatgttgtctatttcagtatgtattaaattatctgtgacggtggaccagttttggtttgtctgtttgttttatttcaatcaatggcacactgaaatgctcaaacattaaactgttg

SEQ ID NO: 1030520 - DNA, 120 bp, Artificial Sequence
  ENSG00000260163_9 (sequence is synthesized)
attaaactgttgaaaaaatttaatggcattcgcaacctaagcccactctctcccgcttttttttttttttttttttcagagtcactctgtcgtccaggctggagagcagtggcacaatct

SEQ ID NO: 1030521 - DNA, 76 bp, Artificial Sequence
  ENSG00000260163_10 (sequence is synthesized)
cgccactgcccccaggctaagccccacttttttaatcagtagagtaagcagacatcaaatacattgaggcagggag

SEQ ID NO: 1030522 - DNA, 120 bp, Artificial Sequence
  ENSG00000260163_11 (sequence is synthesized)
cagtagagtaagcagacatcaaatacattgaggcagggaggcaggcaggcaggcaggcaggaagggaaggaaaatacactgtcaaattgacataaaagtttctgaaagttgagttttcaa

SEQ ID NO: 1030523 - DNA, 120 bp, Artificial Sequence
  ENSG00000260163_12 (sequence is synthesized)
tgcatttacttgcccagtcacgaactgaaaacagagtgtgcagatggcactggtctcaggtctctcaatacaactttaaaaatacctcagtttatcttattttcccgttctagagttaat

SEQ ID NO: 1030524 - DNA, 120 bp, Artificial Sequence
  ENSG00000260163_13 (sequence is synthesized)
ctttcttgtttaagaaatttttcactattaaaagatagtaaaaaaaaacaaaatatcaaagatactaaaagatatcaaagatattcagcttttttccctaaaatctttagctttaccttc

SEQ ID NO: 1030525 - DNA, 120 bp, Artificial Sequence
  ENSG00000260163_14 (sequence is synthesized)
agctttaccttccatattaaagcctttaatacatctagaatagattatggcgtgagttgggattccagtttttttcccatggatttctattgtcaatttattgagaagcttgtaatttac

SEQ ID NO: 1030526 - DNA, 120 bp, Artificial Sequence
  ENSG00000260163_15 (sequence is synthesized)
aagatcataaaccaaaggtctattaatgtatgggtctgtatcagaagcctatattttgagtcaatcatctgtatgtctatgatcaaaaacatgctgcttaattaccatagctttgaaata

SEQ ID NO: 1030527 - DNA, 120 bp, Artificial Sequence
  ENSG00000260163_16 (sequence is synthesized)
ggtcttgatgtgtggtgattcaattctcccaccttattcttttaaaatgtggcttggcttggccttttgcatttccgtatacatttttgaatgcatatatgtatacacacacacacacac

SEQ ID NO: 1030528 - DNA, 120 bp, Artificial Sequence
  ENSG00000260163_17 (sequence is synthesized)
attcaatttgaaagggctcccactgccctaagatgggatcattgagcaccaaaaagtcaagtgattgaaatggaatgaagcataacaaatatataaaactccgtgagttataataacatt

SEQ ID NO: 1030529 - DNA, 120 bp, Artificial Sequence
  ENSG00000260163_18 (sequence is synthesized)
tctaaaactctttggtcatcactggaatttgttaggacattaacacattactctaaaattggtgaagggacaaaaatcaagcattcattctgtcctcctcttcaaaattatattttagag

SEQ ID NO: 1030530 - DNA, 120 bp, Artificial Sequence
  ENSG00000260163_19 (sequence is synthesized)
gggccaaagagttgataaggtaaaaatttttttaagagacagggtcccactgtgttgcccaggctggcccaggactcctgggctcaagggatcctcctatctcaacctcccaagtagctg

SEQ ID NO: 1030531 - DNA, 120 bp, Artificial Sequence
  ENSG00000260163_20 (sequence is synthesized)
ggactacaggcgtgcaccaccacaccagccaattaggtaaacttgatgaagaagcttgcagtggggggacaggtggacccccacttgaacctactaatcaatcttatcatcactaaaagt

SEQ ID NO: 1030532 - DNA, 120 bp, Artificial Sequence
  ENSG00000260163_21 (sequence is synthesized)
agaacaaatatgatgagtctcactgatgggacccattagaaagtgacagcgccacctaggaagtgttcttgccttaaaaagtgaacctaaatctaatcaagtctctggatctaaccacca

SEQ ID NO: 1030533 - DNA, 120 bp, Artificial Sequence
  ENSG00000260163_22 (sequence is synthesized)
atttataggaaatatgaggcacagcagaataagtattaaaagccctctaggctgcaatcagcaaaatccaggataagggccattctacagatccaatgaaccagtttctccagggaacca

SEQ ID NO: 1030534 - DNA, 120 bp, Artificial Sequence
  ENSG00000260163_23 (sequence is synthesized)
gtggcatctacaaataataaagaataaagcaaaaagaacaaaggatatttaagatataccaaacaatgtatgggtcttgtttggatcttgattgagacaaaataactctgaaagaccttt

SEQ ID NO: 1030535 - DNA, 120 bp, Artificial Sequence
  ENSG00000260163_24 (sequence is synthesized)
ttgagaatttgaacgttaattgtgtactagatgatattaagaaacgaatttaatgttgataggtgtgataatgtgtggtggtcttgttttttaaatgctctagttaattaaagatacata

SEQ ID NO: 1030536 - DNA, 120 bp, Artificial Sequence
  ENSG00000260163_25 (sequence is synthesized)
ctgtggtatttacaagcaaagtggcatactgtctgggatttacttgaaaagactccagtttaaaaaaaataatgtgagagaagaggtaggtcaagtaaagatgacaaaatgttcataatt

SEQ ID NO: 1030537 - DNA, 120 bp, Artificial Sequence
  ENSG00000260163_26 (sequence is synthesized)
attgaaattggggaatatgtacatgaggttcttcattacattatcctcttttgtatatgttttaaatgtcccatattaaaagtcttttattgtttttaaattttaaaatctataatttct

SEQ ID NO: 1030538 - DNA, 75 bp, Artificial Sequence
  ENSG00000260163_27 (sequence is synthesized)
attgtttttaaattttaaaatctataatttcttttttttattttactttaacttcctgccatagtggtttgcggc

SEQ ID NO: 1030539 - DNA, 86 bp, Artificial Sequence
  ENSG00000260163_28 (sequence is synthesized)
ggtgtatatgtgccatattttctttatctagtctatcactgatgagcatttggattggttccaaggctttgctactgtgaatagtt

SEQ ID NO: 1030540 - DNA, 120 bp, Artificial Sequence
  ENSG00000260163_29 (sequence is synthesized)
tgtgtctttatagtagaatgaaagtctgtaatttcaaaaggcaaataagatactaggacaaatatttgtattttatgtgataatcacaggttaatgtacattctagatatagagttctta

SEQ ID NO: 1030541 - DNA, 120 bp, Artificial Sequence
  ENSG00000260163_30 (sequence is synthesized)
tgaaaatgttaagatacaagtgaacactctgagagaaagatgggttaagaacctgaaaagacaatttaccaaatcacaaatcactaataaactttaaaaaattaaagagagtcactaatt

SEQ ID NO: 1030542 - DNA, 120 bp, Artificial Sequence
  ENSG00000260163_31 (sequence is synthesized)
attaaaggaatcaaatcaaaggagtgacaaaatattatttttagatcattgcagtgtaatgagaaataagcactcacacattgctggctggcttgttcactttctgtaagctttttggtg

SEQ ID NO: 1030543 - DNA, 120 bp, Artificial Sequence
  ENSG00000260163_32 (sequence is synthesized)
gataatttggcaatgtgtatcaaaaacctttaaaaagatgtactctgggctccttggagaaatggctggatctagaactgaggcaagaaatatgtttcctggagcatcttatagtgccag

SEQ ID NO: 1030544 - DNA, 120 bp, Artificial Sequence
  ENSG00000260163_33 (sequence is synthesized)
aaagtaagaaaatatatatatatcccacaatgatgggggcctggcaagggacgaaagagtcaattgaaagagctcccattgtgaaagctggaacaatttaagccaaaaaaaaaaaaaaaa

SEQ ID NO: 1030545 - DNA, 120 bp, Artificial Sequence
  ENSG00000236091_0 (sequence is synthesized)
agggaatgaaggctggcatctaaactcaatcagcaaaataaattcaataaggaagatttgaagatcaaagaccttcctctctctggcttcacatttctcatcactagttgaaagcctgaa

SEQ ID NO: 1030546 - DNA, 120 bp, Artificial Sequence
  ENSG00000236091_1 (sequence is synthesized)
agaacaaaaaagctgacccttccctgagtaagagagaattcttcctgcgtgatgatcttcaatctgggacattgactttttttctgcctttggcctgaaacattggctctccctgggtct

SEQ ID NO: 1030547 - DNA, 120 bp, Artificial Sequence
  ENSG00000236091_2 (sequence is synthesized)
cgagcctgcgggcctttggactggaactaaattatcagctctcctgggcctccaggttgtctattcaccctgcagatctttcaacttgccagaccccataattatgtgaaccaattcatt

SEQ ID NO: 1030548 - DNA, 120 bp, Artificial Sequence
  ENSG00000236091_3 (sequence is synthesized)
ataaaaataaatctcgattgctggcaagatggccgaacaggaacagctccggcctgtagctcccagcgagatcgacatagaaggcctaggtcatcaagatgcacagcacaggacagaagc

SEQ ID NO: 1030549 - DNA, 120 bp, Artificial Sequence
  ENSG00000236091_4 (sequence is synthesized)
cctctagtcctgcacctggtgacatggaactgctgtgctggtccacacagacacagcctccaaccaagcctggctcctacccatcacagttctgtaggctgcccatttgcagaaggcctt

SEQ ID NO: 1030550 - DNA, 120 bp, Artificial Sequence
  ENSG00000236091_5 (sequence is synthesized)
ccatctgacactcctcctcgcctgcttgttctccagccatgttgtggccaatttgccatgaggaggttgcagtggccaagactgttggaaactgtgcggtgtagctgggagagaaaggac

SEQ ID NO: 1030551 - DNA, 120 bp, Artificial Sequence
  ENSG00000236091_6 (sequence is synthesized)
acactctaaatgttcttactgcctgtgacgatgcagctacagcgatgtactagctgctcacaagcctgttccttcttccattgtagggcatgaagaattcccttatcactgggtaagaag

SEQ ID NO: 1030552 - DNA, 120 bp, Artificial Sequence
  ENSG00000236091_7 (sequence is synthesized)
ggggaacagaagtttttctcatgcctaattttgcgttttcagtaaggtctttttcagcttgtccaggagaaactggaaaaaaaaagatacttgaaataaactgaaggacatttaaacaaa

SEQ ID NO: 1030553 - DNA, 120 bp, Artificial Sequence
  ENSG00000236098_0 (sequence is synthesized)
aacgtctttcaggtcttaaggctcctgagaccgtggtatgtatgttataaaacactgtgaatcctataacttgtctgttttcttcattgctcagagccaaatgtgtgatccccctccaga

SEQ ID NO: 1030554 - DNA, 120 bp, Artificial Sequence
  ENSG00000236098_1 (sequence is synthesized)
aaagacttgagtctttacagttggaatttccgtgtcgtgagtgacaggatcttggtccatcacccaggctggaatacagtggtgcaattatagttcactgcggcctcaaattcctgcact

SEQ ID NO: 1030555 - DNA, 69 bp, Artificial Sequence
  ENSG00000236098_2 (sequence is synthesized)
catgcctaatttaacatgagctagagttaggtttggccatccctagtgttcagtggagttgtagagtta

SEQ ID NO: 1030556 - DNA, 120 bp, Artificial Sequence
  ENSG00000236098_3 (sequence is synthesized)
ggtttggccatccctagtgttcagtggagttgtagagttagtctcaaatgccagagtgaaagtccttgcctatcactccctcatggggtaaccatggtggagctgcccaatttcctcatc

SEQ ID NO: 1030557 - DNA, 120 bp, Artificial Sequence
  ENSG00000234832_0 (sequence is synthesized)
cgtcagtcccgctgtctgtgtcaaatcagaaaaagaacctgaccgtgaggactagagtaagaggctgtgaagactgccgcctcctcgcacgacccacaccgtcgagtgtccggagatgga

SEQ ID NO: 1030558 - DNA, 120 bp, Artificial Sequence
  ENSG00000234832_1 (sequence is synthesized)
cgggaaaagctaccacagtggcatggccttatttcctgatcttaacagcatttgtttgccatgagaggctgcatgacttggagccagtcaatctacggtgacagcaaagcagttgtgact

SEQ ID NO: 1030559 - DNA, 120 bp, Artificial Sequence
  ENSG00000234832_2 (sequence is synthesized)
ctaatgtactgccaccaaaaacactttcttttccgtctctcagccttagcaggatcatctgagccactgccagttcagagtgagctggggctgcttttccaggagggcagttggggacct

SEQ ID NO: 1030560 - DNA, 120 bp, Artificial Sequence
  ENSG00000234832_3 (sequence is synthesized)
cagttactgcctctgtaaaatgggggtgtggacactgtagacattaaatggcagtgtataaaggaggcaccatctggagcatttgtccagcctgcaatgatgccgtttgtctgagaaggt

SEQ ID NO: 1030561 - DNA, 120 bp, Artificial Sequence
  ENSG00000234832_4 (sequence is synthesized)
tgtagggatcatttctggtttgaatctcagccctcttcccagctcagccaccagccatctggaattgtgggagaggtcagacggctgcaaagcctctatgtggaattggaactaaataca

SEQ ID NO: 1030562 - DNA, 120 bp, Artificial Sequence
  ENSG00000234832_5 (sequence is synthesized)
catatttatcagtatttaatggaagactgcaggatgcttgcagagtctacagaaggcactggtaaggtggctcttttagtctgggaacaagaactgggcaatggatgcctcagaggctga

SEQ ID NO: 1030563 - DNA, 120 bp, Artificial Sequence
  ENSG00000226862_0 (sequence is synthesized)
aaggcccccccctcccaggggcctccaggtagacggtgttatactagagatgtaactgagagagccaaataggcaggccaagctccttgaggctagacctagactgctgctgggctttgc

SEQ ID NO: 1030564 - DNA, 120 bp, Artificial Sequence
  ENSG00000226862_1 (sequence is synthesized)
cccccttaatctgcatctctggtgtctcctatacagcctctgccagaaattcaaaagcagagagggcttttattttctatcttccaaaataaatttcaaagtattattggcaaacttgaa

SEQ ID NO: 1030565 - DNA, 120 bp, Artificial Sequence
  ENSG00000236544_0 (sequence is synthesized)
cttgctgatggagaggaatagtgtcactcccatttgactcggtaacccggcagcttcctgtcttaaacgcagagctggcgcgcaggacactcctcctgcagacacttattacacaagttc

SEQ ID NO: 1030566 - DNA, 120 bp, Artificial Sequence
  ENSG00000236544_1 (sequence is synthesized)
atctgcacctcgtgcaaagcagccctgaaagctcaggcttgaagacaaaatgtggagcccaggctccttcgattgaaaacctctctacgaggacactctccgcagtgggcggccagaaag

SEQ ID NO: 1030567 - DNA, 120 bp, Artificial Sequence
  ENSG00000236544_2 (sequence is synthesized)
cagtgacctgcaactccactggatgtggcaggcaggatctgtttccctggccatttttcggagaaggtccagctgagaggctcagacagccataatggatgggatctttttagaggtacc

SEQ ID NO: 1030568 - DNA, 120 bp, Artificial Sequence
  ENSG00000236544_3 (sequence is synthesized)
gagaatgccatggtttcaacccaagaagacagcagggccattagcagaagtgagacaaggagctggctggaaagtgaacatcacaggcagaaggaagaggcgtggcaggtgccccaagtg

SEQ ID NO: 1030569 - DNA, 120 bp, Artificial Sequence
  ENSG00000236545_0 (sequence is synthesized)
cacacacaggcacggcagaggccccgaaaagtccttcaacaaaaatctctgctgagatgtgttctgtccagcaggtgcccgaatttatttgggcaaagagcaccttttgcacacgctgat

SEQ ID NO: 1030570 - DNA, 120 bp, Artificial Sequence
  ENSG00000236545_1 (sequence is synthesized)
gaacgtgctcaagaaggatggtccacactgcagactcccggggtcagcaaaggggcagggcctggctttgctacaagatagaggactagacaccaggcccagggtgtgagtctgcctctg

SEQ ID NO: 1030571 - DNA, 120 bp, Artificial Sequence
  ENSG00000236545_2 (sequence is synthesized)
aggacgtgcagacacaggggtgctctgaccggccctgccgagtacagtctctcctgtagcatgccggcctccacctgcgcacacctacgtgacatgaccagaaccctccttggcccagcc

SEQ ID NO: 1030572 - DNA, 120 bp, Artificial Sequence
  ENSG00000236545_3 (sequence is synthesized)
ccgcccatctgcaaggaaggccccaggatacaatggaacatcgggcccttttatttccaagtctttctttttgtcttctctaaaataaagcaaatagctattatatagctagaaatagta

SEQ ID NO: 1030573 - DNA, 120 bp, Artificial Sequence
  ENSG00000236546_0 (sequence is synthesized)
tctctctccagaacctcttcttggggacccctctctgaagcctcttcttgggagcagctttctggaggaaaacgggcagcatagttgtgctgttgctgatggatggagatgtggaaatgc

SEQ ID NO: 1030574 - DNA, 120 bp, Artificial Sequence
  ENSG00000236546_1 (sequence is synthesized)
ttcatgcagggatccagggggtctgctcgcaccgtgatggtgaccggcttccgaatacccagagactgcctcttctctactgtcacaacatcaatttcttcattctctgtccgagaaaag

SEQ ID NO: 1030575 - DNA, 120 bp, Artificial Sequence
  ENSG00000236546_2 (sequence is synthesized)
agatcaagagaagaaacacatcccatgagaaacacaaacatagaccctacagctttagctgtctacgctggtgcttgggaaggtcgcctgccccacctccttccctggactagaaggtta

SEQ ID NO: 1030576 - DNA, 120 bp, Artificial Sequence
  ENSG00000236546_3 (sequence is synthesized)
ctacctgcaccagaggcagagactgggcagcagaatgtcccagatatggggctcataacaccagagacctggagacacctggacacgcccttctcattcactggcttgaaggtctcttag

SEQ ID NO: 1030577 - DNA, 120 bp, Artificial Sequence
  ENSG00000236546_4 (sequence is synthesized)
gttaacctaaccaggagaggggcaattgggagaaaagtctcctcctgctccacacattttgcagcctccacacagaagtccaccttaatggatctcggcctcgcaaaggaagagctccgt

SEQ ID NO: 1030578 - DNA, 120 bp, Artificial Sequence
  ENSG00000236546_5 (sequence is synthesized)
tctcagcttctttgcatatcaggaagcttgagcccctttgtcaggaaggcttccattgtgtggacaatcgcattatttctccattaataaacctgaccattcagccctcctggccccaaa

SEQ ID NO: 1030579 - DNA, 84 bp, Artificial Sequence
  ENSG00000236548_0 (sequence is synthesized)
tgcatcatatgtgtgagcaatcacagaagactccttcctgttgccttgtgaagaaggctcctgcttccccttcaccttctgcgc

SEQ ID NO: 1030580 - DNA, 120 bp, Artificial Sequence
  ENSG00000236548_1 (sequence is synthesized)
ttgttcactctgcggaactgtcctgagctgaaaagaatatgagaaatcggattttacgacataccaaattatgattgtatgtcccagaaattcacttagaagctaatagaaaaaatgaaa

SEQ ID NO: 1030581 - DNA, 120 bp, Artificial Sequence
  ENSG00000236548_2 (sequence is synthesized)
ccaaagccttttgagagttgaaaatttatcatgacatatgctggctgcacagtcaaaacttatcactgcccacgacttcggaagcatgacaggagagctgtgggagccacttcctcgtca

SEQ ID NO: 1030582 - DNA, 120 bp, Artificial Sequence
  ENSG00000236548_3 (sequence is synthesized)
gacgtggtttgatatgtcaagtgagaacctgagtaaagcaaagaggtgaactatgacttggaatcctccaggctttggcttccatcacactccatgaacttgatgcacataatttaatgt

SEQ ID NO: 1030583 - DNA, 120 bp, Artificial Sequence
  ENSG00000236548_4 (sequence is synthesized)
aggcctccacccaatatcatcagttctcttgcatgttgaacccccagtttcctggatctgaccaacatgaccttaatgttcctatcagctcgactaaactttaaagagatttcttcctca

SEQ ID NO: 1030584 - DNA, 120 bp, Artificial Sequence
  ENSG00000236548_5 (sequence is synthesized)
atatgggcctctaacttcccttttcttagagcatttactttagaaattttgcaattatcaattttttctccctatttttgagatgtaaattttctacaactcaggaatgtctttctcaag

SEQ ID NO: 1030585 - DNA, 120 bp, Artificial Sequence
  ENSG00000236548_6 (sequence is synthesized)
cagaaactgctgatgctgacctgtgcctcaagaggcttgcctgtttgggggagaagcctgatgtggagaccattggaagaggctaaggcaagctacctgttccttaaacagattgttcaa

SEQ ID NO: 1030586 - DNA, 120 bp, Artificial Sequence
  ENSG00000236548_7 (sequence is synthesized)
cctattccagtttttggtcctctacctcacacattccttccacttccaaatcctgttgttagaggatgttacctgccaaatttgtactttggaatcctcctctgcatgttcataagtttt

SEQ ID NO: 1030587 - DNA, 120 bp, Artificial Sequence
  ENSG00000236548_8 (sequence is synthesized)
tgggttttcctttctgctcacttgccaatcctctatctactttcaatcttctaaaaattgctgaaacttcttgtctcactgttaattctttaacatcaatttgttggtattttaggataa

SEQ ID NO: 1030588 - DNA, 120 bp, Artificial Sequence
  ENSG00000236548_9 (sequence is synthesized)
aatataagtaagtgtatatcttcaaccagctatcattaaatggaaaatttctggtattattttatactttcatctattttcctgtagacatttaaacaagaagtctctgtgtgtatgtgc

SEQ ID NO: 1030589 - DNA, 120 bp, Artificial Sequence
  ENSG00000236548_10 (sequence is synthesized)
acatattcaatgttttaactacaaaatataaatttcttcttgtaaaacagacaacataagggttttcttgaagtccccttttaaatataacaggaattcctcagtgtgatctgtgccatg

SEQ ID NO: 1030590 - DNA, 120 bp, Artificial Sequence
  ENSG00000236548_11 (sequence is synthesized)
tatatcagcaggttatttaattcctgtatgctttgtaattttcagctcaaaattatgacttttgacacaaaccacaagtctcaatgtcacaaaataaggtagaaaaccacaaacaagctg

SEQ ID NO: 1030591 - DNA, 80 bp, Artificial Sequence
  ENSG00000236548_12 (sequence is synthesized)
tcaatgtcacaaaataaggtagaaaaccacaaacaagctgggcatggtggctcatgccatataatcccagcactttgggg

SEQ ID NO: 1030592 - DNA, 120 bp, Artificial Sequence
  ENSG00000236548_13 (sequence is synthesized)
gcagaagacttgtctcttggcgagggacgggcgccgctgacccagcacgtccaggaccagtccgtcggcggcccccacgcgggtcctgggctccagctcttcgccggggggcgcctcctg

SEQ ID NO: 1030593 - DNA, 120 bp, Artificial Sequence
  ENSG00000236548_14 (sequence is synthesized)
ctgttcatcccctccctcttttcgatccccagcttcctcctcttcctcctccagctccaactgcagtggcaaggtctggggattgagaggcccggcatgactaagagatatcgtgaaatt

SEQ ID NO: 1030594 - DNA, 120 bp, Artificial Sequence
  ENSG00000236548_15 (sequence is synthesized)
acaactcaacaatgaattacagcacaggcttttcacaactaagagactgtccatcatggtgccagtttttctcaaaatggcatgtgtgcatgaaattctacaggcatatggggtcgtgat

SEQ ID NO: 1030595 - DNA, 120 bp, Artificial Sequence
  ENSG00000236548_16 (sequence is synthesized)
ctgctaatctccagttattataactactttgaaaagggactttccagctatcagtacactatctcacaattacccttgaaccagaagacaatgaatgatttgctaaacagatggcatagt

SEQ ID NO: 1030596 - DNA, 120 bp, Artificial Sequence
  ENSG00000236548_17 (sequence is synthesized)
ggacttttgaggaaaggccgcatttcagagtctaagatgctgcagtgactctcaggaggtggactacattcagatcaaaggaaaggaaggagtatggataaacattaacatctattgagc

SEQ ID NO: 1030597 - DNA, 120 bp, Artificial Sequence
  ENSG00000236548_18 (sequence is synthesized)
attccctttactgcatcgaggggagaacttgaaaaaatgttttctacttccttctggcctgcatggtttctgatgaaaagccttttttatttaaattgtttttcctaatagataaggtgt

SEQ ID NO: 1030598 - DNA, 120 bp, Artificial Sequence
  ENSG00000236548_19 (sequence is synthesized)
catttctgtctctctgctttcaagatttttttctttgtctttagtttttacaagtttgacgattataggtcttggtatgaatttctttgggcttctcctttttggggtccacttaacttt

SEQ ID NO: 1030599 - DNA, 120 bp, Artificial Sequence
  ENSG00000236548_20 (sequence is synthesized)
ttgaatctgtacatttatatcttatgccaaatttggaatgtttttagctattgtttgttagagtatttaccagctctgctgtctttctcctctcccttcaagactctaattacagtaatg

SEQ ID NO: 1030600 - DNA, 120 bp, Artificial Sequence
  ENSG00000236548_21 (sequence is synthesized)
tttaatcttttgttatgatctcaaaggtccctgaggctctgttcactttttgtttagtctaccttctctctgttatccatattgtatcatttctattgatgtatcttcaagttcactgat

SEQ ID NO: 1030601 - DNA, 120 bp, Artificial Sequence
  ENSG00000236548_22 (sequence is synthesized)
tggttcttctgttgttttagttctaaaattcacattggtttttatttatatctcctacttctttactttcttttatttgctttttattgctatttattattccatttgaagcaataattt

SEQ ID NO: 1030602 - DNA, 120 bp, Artificial Sequence
  ENSG00000236548_23 (sequence is synthesized)
ttataatggctgctttaaaaccttttttcagataattctaacatttctattagctcagtgttgacatctgttgattgtctggtgtattagaccattctcccactgctatgaagaaatatg

SEQ ID NO: 1030603 - DNA, 86 bp, Artificial Sequence
  ENSG00000236548_24 (sequence is synthesized)
cattctcccactgctatgaagaaatatgcttcactcacagttccacatggctggggaaccctcaggaaacttacaatcatggcaga

SEQ ID NO: 1030604 - DNA, 120 bp, Artificial Sequence
  ENSG00000236548_25 (sequence is synthesized)
tgcaagcaggggaaatgccagatgcttatgaaagggaagaggcttactacttcctggtgagggtgaaagtaccagttccctactgtcatccctttgacaccaccctagtggggaatgtga

SEQ ID NO: 1030605 - DNA, 120 bp, Artificial Sequence
  ENSG00000236548_26 (sequence is synthesized)
acaccaccctagtggggaatgtgaggtggtggtttgggcatctagcctgaggctcacaagagtggaagtctaagctcccactgggcctttgctggcttgtgtgggaatggaccatagttt

SEQ ID NO: 1030606 - DNA, 120 bp, Artificial Sequence
  ENSG00000236548_27 (sequence is synthesized)
ttttctgtggtgtctggcttgaacagagaggttattgtccaagaatttttggtttttctagctctttgactagagagaacagctttttgttgggggttttcatctgcacctattggcatt

SEQ ID NO: 1030607 - DNA, 120 bp, Artificial Sequence
  ENSG00000236548_28 (sequence is synthesized)
gctatgtagtcaggttcttcagctctaagtctgagatctataaggcaaaagcaaatacaaaaaaaaaaaaatgcaggggactcacaacatttttcttcacttccaatgtccctagccagt

SEQ ID NO: 1030608 - DNA, 120 bp, Artificial Sequence
  ENSG00000236548_29 (sequence is synthesized)
ctgccatcttctctcccactttcagagtctttttgtgtttgttttatatataatgttcagaaattttagttgtacttcaggggagaaatagataaaagtatgtctattcgattttcccca

SEQ ID NO: 1030609 - DNA, 120 bp, Artificial Sequence
  ENSG00000236548_30 (sequence is synthesized)
aagcggaagttccctttttgtgttcattgaaaagagatatatttaggatacagaattagcttgacttgatttgttaaatgtggatcttagaaagtgttgtctaatggccttagagcaata

SEQ ID NO: 1030610 - DNA, 120 bp, Artificial Sequence
  ENSG00000236548_31 (sequence is synthesized)
atgccacaattttgggcatccctttatcccaggcccaatatctctgtttctacgaaatcagatttacttttagttataattctgtgttataattttagttatattgcctgtgttgattaa

SEQ ID NO: 1030611 - DNA, 120 bp, Artificial Sequence
  ENSG00000236548_32 (sequence is synthesized)
ttggactgtggacttttgaggcttacattttttattttcctagctgcctaaaagaagatttgataagaaaaaatttttctcttaatgaccttaaaattttctcttaatgaacaaggtcgt

SEQ ID NO: 1030612 - DNA, 120 bp, Artificial Sequence
  ENSG00000236548_33 (sequence is synthesized)
tctggaccttgttctggaacaaaaatgatctagtgagatttaatcaattatactctggaagcatttgtgacgtctataatttttcccagaacggaaaatcagcaacagaatccttgagct

SEQ ID NO: 1030613 - DNA, 120 bp, Artificial Sequence
  ENSG00000236548_34 (sequence is synthesized)
caaagataatcaaatctaactcctgagtttcacagacaaagatgcggagacctgggggaatatcgtgacttgagaagataacacagctgttctctgaggcagtaagtcccttggcattac

SEQ ID NO: 1030614 - DNA, 120 bp, Artificial Sequence
  ENSG00000236548_35 (sequence is synthesized)
tgctttaacagaagctgggaggtttacagtctgtttactacttgggcaaatcatattagccaagaaagcaaagtactgatgaattcagtaaacaagatagccattagaaaaacaggatta

SEQ ID NO: 1030615 - DNA, 120 bp, Artificial Sequence
  ENSG00000236548_36 (sequence is synthesized)
agaaagggcttgaaagaagcttcaaggtggttatgttttaagattatgaagcctttgattcctagccacagcactcagtagttgtaagaccaactaaacaattcacttctgtcttctgca

SEQ ID NO: 1030616 - DNA, 120 bp, Artificial Sequence
  ENSG00000236548_37 (sequence is synthesized)
ggaattgcaggacataccatataccatggagctcctaggagattcagtgaaatagcaaatatagagtgtctggcatgggatatgcagtctatcaatgttagcctttgctatgtaatccaa

SEQ ID NO: 1030617 - DNA, 120 bp, Artificial Sequence
  ENSG00000236548_38 (sequence is synthesized)
agtgatttattccataaggaaaaaatgagtttgttttttgtttgcttttcttgaattcatcagaacacaaggcaggggtttatggaaatacagtcttgaagaaaaaaataagtattttcc

SEQ ID NO: 1030618 - DNA, 120 bp, Artificial Sequence
  ENSG00000236548_39 (sequence is synthesized)
cctgagagatggaaacacttgtgaaaagaaataagtaggagcacaggagctggagtaatcctctagagcaggggtccccaaccccagtctgtggcctattaggagcccagccgcacagca

SEQ ID NO: 1030619 - DNA, 120 bp, Artificial Sequence
  ENSG00000236548_40 (sequence is synthesized)
ggaggtgagtggtaggcaaattaacattaccacctgagctccacctcctgtgagatcagcagtggcattagattcttatagaagcacgaacactattgggaactatgcatgcgagggatc

SEQ ID NO: 1030620 - DNA, 120 bp, Artificial Sequence
  ENSG00000236548_41 (sequence is synthesized)
tgatctgaggtgaaacagtttcatccgaaaacattccacccaccaccctgtccatggaaaaattgtcttccatgaaggcagtccctggtgtcaaaaaggtcatcgaccactgccctagag

SEQ ID NO: 1030621 - DNA, 86 bp, Artificial Sequence
  ENSG00000236548_42 (sequence is synthesized)
accctgtccatggaaaaattgtcttccatgaaggcagtccctggtgtcaaaaaggtcatcgaccactgccctagagacaccaggct

SEQ ID NO: 1030622 - DNA, 80 bp, Artificial Sequence
  ENSG00000236548_43 (sequence is synthesized)
ggagtgcagtggaggcatctctgcccactacaacctccacctcctgggtttgaggtgcatgccacgacacccagctaatt

SEQ ID NO: 1030623 - DNA, 120 bp, Artificial Sequence
  ENSG00000236548_44 (sequence is synthesized)
cggtctcccaaagtgctgggattacagggataagccaccacacccagcctagagacctcttttaaagggactcctcaacaggctcctcagtccagggtctttgccctctcccttgtggct

SEQ ID NO: 1030624 - DNA, 120 bp, Artificial Sequence
  ENSG00000236548_45 (sequence is synthesized)
ggctcctcagtccagggtctttgccctctcccttgtggctcctgtctctccagggccagccatgcaaaagcacgtatctctcagatctcccttccctggtgattctttccattttaaggg

SEQ ID NO: 1030625 - DNA, 120 bp, Artificial Sequence
  ENSG00000236548_46 (sequence is synthesized)
ttttattgatattcatatagaaaaacaaacagaaataatatgttgggcaggagcaaaggttcaggaaatttcaaaaggatcttttagtggtcacttcctgggttatgctaaactgcaaat

SEQ ID NO: 1030626 - DNA, 120 bp, Artificial Sequence
  ENSG00000236548_47 (sequence is synthesized)
gatattagatttacctttttcagaagctatttctacttttagaccgccctgtggaatgatcctcttattatttctgattcttttattctaaaaaatggagcagtcgaaatttgccgaatg

SEQ ID NO: 1030627 - DNA, 120 bp, Artificial Sequence
  ENSG00000236548_48 (sequence is synthesized)
gccatgctatcacaaccccaaaactataaaattgtgctatatactttttaaacttttttcttatatatagattttgttcaccaaatcactgcctcaaatgtctgggaaattgtgctgaga

SEQ ID NO: 1030628 - DNA, 120 bp, Artificial Sequence
  ENSG00000236548_49 (sequence is synthesized)
gatattattcttaggtattctgtatagtatttgaaagattaagaagtattaaatagcaagcttattaataattatttatgcttattagaaacttattagctacagtaatttggggtttcc

SEQ ID NO: 1030629 - DNA, 120 bp, Artificial Sequence
  ENSG00000236548_50 (sequence is synthesized)
aatgatagcacctctatttcaatctgtgtaggagagtaggagcctaactcaggtaagtgacatttagcaaactcagatggcctaaacacattcaccaacttccccactaatgtactccct

SEQ ID NO: 1030630 - DNA, 120 bp, Artificial Sequence
  ENSG00000236548_51 (sequence is synthesized)
actggttcatgtcagcatttaataatccttctgctttcttttcagtggagctgagttcagtctgtctctcttctgcagtggtcttctctcccattgcaatggtcttgagtaaagtgttct

SEQ ID NO: 1030631 - DNA, 120 bp, Artificial Sequence
  ENSG00000236548_52 (sequence is synthesized)
ttgtttgttttacttggagatgatgtcagttcaatattgaagtctctcttccctactacagtagttcaaataaaatccatcttgccattcttaacaagtattggtataatttctctttaa

SEQ ID NO: 1030632 - DNA, 120 bp, Artificial Sequence
  ENSG00000236548_53 (sequence is synthesized)
catttctcgtgtctttctcttaattggtttcttctcttgttttacagagcatgttagtcactagtttcttaagtctgatgaatgtgctttcattacatttttatattaattgactgatat

SEQ ID NO: 1030633 - DNA, 120 bp, Artificial Sequence
  ENSG00000236548_54 (sequence is synthesized)
tttggatggacacatttatactgcttggttaaatacgattttctctcagaatcatgtggaaatttctccgttattttctagtttctgtttttgcagttgagaagtccaatatcattttgc

SEQ ID NO: 1030634 - DNA, 120 bp, Artificial Sequence
  ENSG00000236548_55 (sequence is synthesized)
ttccctacatttttaaaaaatgtaacctgtttccattctttctttcttttggtattttgcatctgtttttaaaaaagcaatgatatagttccaaaaccattgaagagtataaaggatatt

SEQ ID NO: 1030635 - DNA, 120 bp, Artificial Sequence
  ENSG00000236548_56 (sequence is synthesized)
atgacttttctcatgaaatattttcagacaaatattttaagttaatctaacattcactaaatctacctactgattttaggtagattttctttctccaaatatacatttttaaataaaaat

SEQ ID NO: 1030636 - DNA, 120 bp, Artificial Sequence
  ENSG00000236548_57 (sequence is synthesized)
tttcattgtattgcattgtattttattggttatcaacagcaccatgttcttagtttttttaaaaaaaatgtttaatgagttgtaatatttgtgtctttaagcaaggggttccctcatttt

SEQ ID NO: 1030637 - DNA, 120 bp, Artificial Sequence
  ENSG00000236548_58 (sequence is synthesized)
tgatttgaagttattcctgggtatcaatattctacacacattgtctactgcttacctccaacacagcagttttcactgtcatgtaattatttgtttgctcatcgctcttccccatgacca

SEQ ID NO: 1030638 - DNA, 120 bp, Artificial Sequence
  ENSG00000236548_59 (sequence is synthesized)
tcaactccttgaaggtagggccattatttatacatcttataactgaagcttacagcatcagatcagttatatgatcagaacacaatgtttgttgtagaataaatgaataaactttgttaa

SEQ ID NO: 1030639 - DNA, 120 bp, Artificial Sequence
  ENSG00000236548_60 (sequence is synthesized)
ttcactcaggtctaactagtctcctacatgatgaaatatagctaagaaaattcaaagtagagttccacaaaagaaaaacaaagtaaatatcaatttattaatttataatttgatccaaag

SEQ ID NO: 1030640 - DNA, 120 bp, Artificial Sequence
  ENSG00000236548_61 (sequence is synthesized)
accaatttccaagaggctctctcaggtaccaaattgctgaagtccttttctaggacatctcccttcctggtgtcaaagtacgtggaaaactgaagctttaagcaaaagatggcttgggta

SEQ ID NO: 1030641 - DNA, 120 bp, Artificial Sequence
  ENSG00000236548_62 (sequence is synthesized)
tatatttaacctagcttctgttgaagcatcactagtctgcaaataccacatttctctagtgaccatcttcatgtctctgagccttaaagaatactggttaaaacactaacagatattatg

SEQ ID NO: 1030642 - DNA, 120 bp, Artificial Sequence
  ENSG00000236548_63 (sequence is synthesized)
tttctgaatatgtgctttatttgctagttatcctatttctaatgacatattcagtagatttgtttatgttgtaaaatgaagtgctatcaatttattgttatcatgaacagtcagaataaa

SEQ ID NO: 1030643 - DNA, 120 bp, Artificial Sequence
  ENSG00000236548_64 (sequence is synthesized)
ttctctaactagagttgtaggcacataatagattatcattgaatggtcaaataagtaaaagaactaatagagaaataacaataagctggctgttcattgttcagtgaaaccaaatggtct

SEQ ID NO: 1030644 - DNA, 120 bp, Artificial Sequence
  ENSG00000236548_65 (sequence is synthesized)
gtcttaattattttctaaatgtatgtttgatctaattgtactatcattttgatcaagttctttccttaacaagtacttaaggattaatgaaatcctttacataaaaagtactttttttag

SEQ ID NO: 1030645 - DNA, 120 bp, Artificial Sequence
  ENSG00000236548_66 (sequence is synthesized)
aaaaatagtttgcattttaaaactctgtaaaatgcacactaatgtccaaactgatgcccaatatgcagcctatatctacagcagcttttcaaatatttggatgcagattttcaagtccta

SEQ ID NO: 1030646 - DNA, 120 bp, Artificial Sequence
  ENSG00000236548_67 (sequence is synthesized)
acatatgctgctccaatttcataacaaattttacttagcaaatgaaaccaaccatgtattttagttccaaaagaaaaataaaattatttccatagggttacacaaagaataaaaactgtt

SEQ ID NO: 1030647 - DNA, 120 bp, Artificial Sequence
  ENSG00000236548_68 (sequence is synthesized)
gcattgagataccaaaaacatgtagaactaataagttcagtgaagtataagataactaaacaaaatacaaaaatcaatatacgatatacaaaaatcagtggtattttcatacgatggtaa

SEQ ID NO: 1030648 - DNA, 120 bp, Artificial Sequence
  ENSG00000236548_69 (sequence is synthesized)
tgaacaatctgaaaataaaattaagaaaacaattctatttacaatagcatccaaaataataaaacaggaataaattttacaaaagaagtgcaaaacttatattctcatttataatgctga

SEQ ID NO: 1030649 - DNA, 120 bp, Artificial Sequence
  ENSG00000236548_70 (sequence is synthesized)
aagaaatgttaacagacctaaataactgggaagatatatcacgttcatggactgaaggactcaatattttaagaagacaatactttccaaattgatctacagattcattactatccctat

SEQ ID NO: 1030650 - DNA, 120 bp, Artificial Sequence
  ENSG00000236548_71 (sequence is synthesized)
caaaatcttagctcacatttttgcagaaattgatgaaccaactctaaaatttgtatgggaattgaaagaatccataatagtcaaaacagtcttgaaagacaaaaaagttggagtactcac

SEQ ID NO: 1030651 - DNA, 120 bp, Artificial Sequence
  ENSG00000236548_72 (sequence is synthesized)
actttgcaatttcaaacgtgctacaaagctacaatcatcaagacattatgaaactggcataaaatttgacatatagatgaatggaataaaagtgagagccaaaaatatagcctcccattt

SEQ ID NO: 1030652 - DNA, 120 bp, Artificial Sequence
  ENSG00000236548_73 (sequence is synthesized)
atgacttactgactttcaacatggacgtcaaaagcaatttaatggaggaagaatattcttttcaacaaatgatgctgggacaactgagtatcaacctgcaaaagaatgaagttggacttc

SEQ ID NO: 1030653 - DNA, 120 bp, Artificial Sequence
  ENSG00000236548_74 (sequence is synthesized)
tagctcacaccatataaaaaaatcaacttaaaattgatcaaagactctaatgtcacagctaaaactagaaaacccttagaagaaaatataggcataaatctttgtgacctgttgttaggc

SEQ ID NO: 1030654 - DNA, 120 bp, Artificial Sequence
  ENSG00000236548_75 (sequence is synthesized)
aatgatttcttagatatgacaccaaacacacaaggaataaaacaaacaaatagataaattagatttattcaaataaaaaacctttgtgcttcaaaggacaataccaagaaagtgaagaga

SEQ ID NO: 1030655 - DNA, 120 bp, Artificial Sequence
  ENSG00000236548_76 (sequence is synthesized)
aacagaaagaaagaaaatatttgcaaatcatgatatctgataagggatttgaatttagaatatgaaagaacactgagaactcaacagtaaaaagacaacccaattaaaaaataggcaaat

SEQ ID NO: 1030656 - DNA, 120 bp, Artificial Sequence
  ENSG00000236548_77 (sequence is synthesized)
attttacgacattgtgaagaaacatcctgaagttattcacagtgacttcaatgaacaacacatcagtatactttttacacaggggacaaaagtaaaagccggcttgatcatttacaaggc

SEQ ID NO: 1030657 - DNA, 120 bp, Artificial Sequence
  ENSG00000236548_78 (sequence is synthesized)
tttcaccatgccgctgagatgtcaaggactacaagttgatcttcagcctcttaaaatatggcctcgaagcctttcatgtcttcagtcaactccagcattttgactgatgggagctggtgt

SEQ ID NO: 1030658 - DNA, 120 bp, Artificial Sequence
  ENSG00000236548_79 (sequence is synthesized)
gtgtttgtgtgcagtgggagagaggacacaatcccgaacctgacacagcctgtgcttggagcagcctgcgcctgctgccctcaatcatttagaccaaattatgattgtatgtcccagaaa

SEQ ID NO: 1030659 - DNA, 120 bp, Artificial Sequence
  ENSG00000236548_80 (sequence is synthesized)
ttcacttagaagctaatagaaaaaatgaaaccaaagccttttggtaagtattttaaaagatttaattgtaataattgaaaatatagcaaccttagcgtttaatctattacattctggatt

SEQ ID NO: 1030660 - DNA, 120 bp, Artificial Sequence
  ENSG00000236548_81 (sequence is synthesized)
tcggtttctgggaagttggagcaatgggaaggatacctttccctatctttcctattaagtataactaaaaactctgaacattatatatataacaattacaagaagactttgaggcagacc

SEQ ID NO: 1030661 - DNA, 120 bp, Artificial Sequence
  ENSG00000236548_82 (sequence is synthesized)
ctgtcatctgttgaggtgaatatcaatattcaaacaacaataacaaaagatcctgtcatcaaagtggaaataaatgagtattttagattattttaaataatttggcctataaaaataaaa

SEQ ID NO: 1030662 - DNA, 120 bp, Artificial Sequence
  ENSG00000236548_83 (sequence is synthesized)
tagtgacctaaccctctgccaactattaattagcttgatgctaactctaaatcccagatagaaggtgggggtggaggaaggttccccaaatgaaaagtctattgcaggcagtcttctaaa

SEQ ID NO: 1030663 - DNA, 120 bp, Artificial Sequence
  ENSG00000236548_84 (sequence is synthesized)
agaaccctcagtgttagcagataatgaaagtacgtgttacctatgactgagtagaaatgatgccatgacccggcaatttcttttcactgctgacacatccctgcactgcacaaaatatca

SEQ ID NO: 1030664 - DNA, 120 bp, Artificial Sequence
  ENSG00000236548_85 (sequence is synthesized)
gtgttgccttcatgtaaatttaatagggtgtctctgtcaatgacataagcaaatacaccatgagaagcagcaggggttttcagggatggctcagaaacttaagtatttttccatttattt

SEQ ID NO: 1030665 - DNA, 120 bp, Artificial Sequence
  ENSG00000236548_86 (sequence is synthesized)
ttaaaatgcaaattacactagtaagtcaaaaaaatcattctgttaaaaatacattcagaattaacaaatgcaaaaaaaaaggacacatcaggatcataacccttgccttctgaatattaa

SEQ ID NO: 1030666 - DNA, 120 bp, Artificial Sequence
  ENSG00000236548_87 (sequence is synthesized)
gtttataacaaaagctcagcctagaaaaatagcattcttcaccggattttgaggaggatacagctgtacaactgtagatgttttcccagatataatcacactactgtgcttactgatccc

SEQ ID NO: 1030667 - DNA, 120 bp, Artificial Sequence
  ENSG00000236548_88 (sequence is synthesized)
ataaatgacctgtccactgattactttttagtagtcaactactgttttttaaaattttggtggtgatgatagttgtgatttggtgaaaacttggctgtaacttaaagcaggaatatgagg

SEQ ID NO: 1030668 - DNA, 120 bp, Artificial Sequence
  ENSG00000236548_89 (sequence is synthesized)
gtttattttctgtacccatatacatgtactataaggtgaaatcgcatcacagcatgaatgtacagtgaaacctcatttttaatagtcacattaaaagtcacattagaatagtttctggca

SEQ ID NO: 1030669 - DNA, 120 bp, Artificial Sequence
  ENSG00000236548_90 (sequence is synthesized)
ccttccatatgtagggtgattgaagtgattccattaatctctactcacaaaataaaaaaaagacgttgttttatagagtttataattctctgatgagtttttttaagttccaatatatca

SEQ ID NO: 1030670 - DNA, 120 bp, Artificial Sequence
  ENSG00000236548_91 (sequence is synthesized)
ggggctggggaaggaagagcgggtgctgggagggttcaacactggcggagccccaggtggcgacgcgggcggcgagagctgctccgaggcgggggcctcgggcaggtcgctctccacgca

SEQ ID NO: 1030671 - DNA, 120 bp, Artificial Sequence
  ENSG00000236548_92 (sequence is synthesized)
ttaggactcaaaggacaatacattggtaaatatttttctcatacattaaacatgcatgtcactataaaagcgtcatatgaggtttcactgacatgtttgcaattgtttattttatacatg

SEQ ID NO: 1030672 - DNA, 120 bp, Artificial Sequence
  ENSG00000226868_0 (sequence is synthesized)
cacaagaatgaccaacagacactccagtttagacagtgccctagaagctggatctttccttagaatgaggaccctgctcagttgccccctcccagtcatgtggtgagtactgggaggagg

SEQ ID NO: 1030673 - DNA, 120 bp, Artificial Sequence
  ENSG00000226869_0 (sequence is synthesized)
aggaactggagctgctgcctctgtctgctaagatgtgaagtccaagactgaaagtaacatagcagaaggagaaccaaaagatatgttgagtcttgatgctatttgttgaaccagtcctga

SEQ ID NO: 1030674 - DNA, 120 bp, Artificial Sequence
  ENSG00000226869_1 (sequence is synthesized)
atccagctgtgtcggagtcagcgcagcttttgaagctggagagcatcatattttagaaagatcaagcaatgtggatgaggacacattaaaaagagaagaccgagaggaggggacaccact

SEQ ID NO: 1030675 - DNA, 120 bp, Artificial Sequence
  ENSG00000226869_2 (sequence is synthesized)
caggcttataacctccagctcacatttcagcaccaaaggaccaaagcctagacctgagatctggcacttgcaaaaagaaagatcacctggaagaacaaaatagaagactcctgctcccaa

SEQ ID NO: 1030676 - DNA, 120 bp, Artificial Sequence
  ENSG00000226869_3 (sequence is synthesized)
taggcttgggtcaggaagaaggctgttggcataattgtggagtaggaagatggaaaacaactcctagagatcccaacagctgaacgcgtgcttgggcagtggctgcgggtgaagtcatgg

SEQ ID NO: 1030677 - DNA, 85 bp, Artificial Sequence
  ENSG00000226869_4 (sequence is synthesized)
taagtgcccagaaaaccttggtgcttttcctcttcccttccctgaagctgaacttctgcggaaaaatccaagagggtgaaggtac

SEQ ID NO: 1030678 - DNA, 120 bp, Artificial Sequence
  ENSG00000226869_5 (sequence is synthesized)
atcaagttgaaagcaacagaacaagcatctataagaattgattatatgtcccagcactttggaaggctgaggcaagtggatcccttgggcctaggacttcgcgagaccagttgggcaaca

SEQ ID NO: 1030679 - DNA, 120 bp, Artificial Sequence
  ENSG00000226869_6 (sequence is synthesized)
tgaacaagatggaagaaactacggtcacatatgcaaatggagaagatgatgaacacagaaaaattatgcaaagataatccctaaaccttctttctcatcaaaagttatagcaaggtggtt

SEQ ID NO: 1030680 - DNA, 120 bp, Artificial Sequence
  ENSG00000226869_7 (sequence is synthesized)
taatatatcactgacggaacacgatgctttgtttaatgaagactcagacggaaaggatcagacatcaacctataaatgcatcaaccagaaggaaagaccaattttgaaaactgttgagca

SEQ ID NO: 1030681 - DNA, 120 bp, Artificial Sequence
  ENSG00000226869_8 (sequence is synthesized)
ttattctatacctctaagctgttcttttctgaaccatgaatcgggagaattattgtcactcatacatgagtatgagttgtaattctcaattcccaagtaaaaatcttcctgcttttgtta

SEQ ID NO: 1030682 - DNA, 120 bp, Artificial Sequence
  ENSG00000226869_9 (sequence is synthesized)
tcattaggagagatgcccatgactcctgcgcccagcaggagttgtttctgcaggggtccctgcttccatctcctaagttgcaggcagagagggcagaagccaggatcatcaatacccaag

SEQ ID NO: 1030683 - DNA, 120 bp, Artificial Sequence
  ENSG00000226869_10 (sequence is synthesized)
agggagcatcgaagagtgcatgcttcctctactatgtcgtgatatagatggaggccaggatttgggagctttggaacacatctctcccaggcctgattgttaggagaggacttaggcaag

SEQ ID NO: 1030684 - DNA, 120 bp, Artificial Sequence
  ENSG00000226869_11 (sequence is synthesized)
gtgtgggcaatgctggtgcttcacctttccttgttgaccagacagacccagaagggtcatttgtcaaaacaaagaaaatctcttccaggggtgaggcaggtgtggctgcctgtatgtgaa

SEQ ID NO: 1030685 - DNA, 120 bp, Artificial Sequence
  ENSG00000226869_12 (sequence is synthesized)
aaagtgtataagtgttcctttttctccacagccttgccagcttctgttgttttttgtctttttattaatggccatttggactggtgtgagatgatatctcattatggtttagatttgcat

SEQ ID NO: 1030686 - DNA, 120 bp, Artificial Sequence
  ENSG00000226869_13 (sequence is synthesized)
agtcatgaagggcattaatcaaggttattttttccacagatgaatttctaatcctaaataatcatttacatgaattcagatttttttgatccagggaattataccggtggcactagagat

SEQ ID NO: 1030687 - DNA, 120 bp, Artificial Sequence
  ENSG00000226869_14 (sequence is synthesized)
gtaaatgagatctgttagtgagcagtgagaatgcatggaaagaaaaatctgacactagtgtggagaatgaacttcttggacgagcaaacagagaccggaagtagagcagtgaacgacagt

SEQ ID NO: 1030688 - DNA, 120 bp, Artificial Sequence
  ENSG00000226869_15 (sequence is synthesized)
caactgcacctatggagatggctggcaaagctggagaagtggctgaagtccttgggagtgtgaagaggggatggccaaggatggagccctgaggaatctcaacaaccaaagggtaggtga

SEQ ID NO: 1030689 - DNA, 120 bp, Artificial Sequence
  ENSG00000226869_16 (sequence is synthesized)
gcattaatcaagagggaaatctggtttctggattaactactgaatagcaactgcagtcaacagctgatggaatcttgcaggaagactaagctggtgttcagagaagttttgttcaggcat

SEQ ID NO: 1030690 - DNA, 120 bp, Artificial Sequence
  ENSG00000226869_17 (sequence is synthesized)
cccattttatttcactcatactatccaatggctgtgtttgcatgtggatatgaaagtatctgaatattctgattaacatttgtatgaaggatttctgtctactaaagagtgcaacagaat

SEQ ID NO: 1030691 - DNA, 120 bp, Artificial Sequence
  ENSG00000226869_18 (sequence is synthesized)
agaccatctggagagagggctgtttcattccgatggaaggtggcaacaaagttgtcatctaaaaggaggatgctgggagtggtattctgttcctggaaataaaagtcaacctaatccttt

SEQ ID NO: 1030692 - DNA, 120 bp, Artificial Sequence
  ENSG00000226869_19 (sequence is synthesized)
acaggagacccagtctcaggatggagcagacaccatgcatggtagagcagagagacagatacaacctaggtccttgatgaaatgattggccactggatcagccacagttaaagactgcct

SEQ ID NO: 1030693 - DNA, 120 bp, Artificial Sequence
  ENSG00000226869_20 (sequence is synthesized)
acctttggacttctggttatcttaggccaaaaatgtcctttttgtttaaggcactttgagccgggttttctaagacctagcagtctcaaccatccaaactaataagctgaattaactaga

SEQ ID NO: 1030694 - DNA, 120 bp, Artificial Sequence
  ENSG00000226869_21 (sequence is synthesized)
tttcctgtcatgtccttcctgcctgattggtagcccttgactccaatttggcctcattttccgtaccttactggctgccttttcctctactcataggtcacttggaaataaaatatagat

SEQ ID NO: 1030695 - DNA, 120 bp, Artificial Sequence
  ENSG00000275409_0 (sequence is synthesized)
tcatgtgacaactgctggacaatcaggaaactgccaagtcatcacctgatggtcgtctgacattcctggtgggtggggggagccctctcttgccctgctcatacctgaccagctacctat

SEQ ID NO: 1030696 - DNA, 120 bp, Artificial Sequence
  ENSG00000275409_1 (sequence is synthesized)
tgtaacagttgtatatatgtgtggtacagtgcattatctcagatattcctttaaaaatggccaggttaggtattgttcctgttttatagatgaagaaactgaggccgagagaatgtcata

SEQ ID NO: 1030697 - DNA, 120 bp, Artificial Sequence
  ENSG00000275409_2 (sequence is synthesized)
taaagaaccatgatatgtggctgaactgacattcattcagcagtttttacagtatacatttatagagtacctaccctataccaagtcctgtgctcaatccatgctgtatttttttctgta

SEQ ID NO: 1030698 - DNA, 120 bp, Artificial Sequence
  ENSG00000275409_3 (sequence is synthesized)
gtaatcccccctcatctgcagttttgccttctatggtttcagttatccagtattagccatggtccaaaaatattacatggaaaattccagaaataaaccattcataagttttaaattgtg

SEQ ID NO: 1030699 - DNA, 120 bp, Artificial Sequence
  ENSG00000224649_0 (sequence is synthesized)
ggacctttgaagaatcctctcaacttatggatactaatccatcagctgcaaatagccacacaaatgttcaccacatgcatatacaggactatgaagctttgtacgatatggagttgtatt

SEQ ID NO: 1030700 - DNA, 120 bp, Artificial Sequence
  ENSG00000224649_1 (sequence is synthesized)
cctcttctgctgtagaaaaacttggtttcttcttcatacacactgagtccttctgctcataatgctggtcctaaacaccttaatccaaaagcagccaataaaaagtttttaaaagtccaa

SEQ ID NO: 1030701 - DNA, 120 bp, Artificial Sequence
  ENSG00000224644_0 (sequence is synthesized)
acagttttgcattaaatgataggtaaaaactaaaacttttaataactgtttcttttatatttgtagatcttgctgtttctctacataaaaatctaatataagctgatttagcacaaaata

SEQ ID NO: 1030702 - DNA, 120 bp, Artificial Sequence
  ENSG00000224644_1 (sequence is synthesized)
ggctgtcactttgtcacccaggctttttcatttgattctaagaccataccttttataacttatacattttcctttattatatattgaggttctctgatcagtccaataacctcattgtct

SEQ ID NO: 1030703 - DNA, 120 bp, Artificial Sequence
  ENSG00000224645_0 (sequence is synthesized)
ttaatgtatatgtgttatgggtcataggtactcattagtatgcttcataatttattcacgttagatatactctttatagatatcaaatattacatattataatttcttaaaatctgctgt

SEQ ID NO: 1030704 - DNA, 120 bp, Artificial Sequence
  ENSG00000224645_1 (sequence is synthesized)
tcaataaatattagttggttttctgtgatttaaaaccaaaagatccctaacctatatattcatcatacttagcccattcctaccttcccacaggatagcacagggaatacaggtaaggtc

SEQ ID NO: 1030705 - DNA, 120 bp, Artificial Sequence
  ENSG00000224643_0 (sequence is synthesized)
tcataaaactgcattagcaataattacaactacagttgacccttgaacaacatgggattaaactgtgtgggtccacttacatgcagattttcttccacttctgccaccctgaggcagcaa

SEQ ID NO: 1030706 - DNA, 120 bp, Artificial Sequence
  ENSG00000224643_1 (sequence is synthesized)
tctcctcagcctactctccacaaagatgataaagaagacctttatatgatccacttccacttaattaatactgctccatgaagccagaatttggacatatggaaggtcttgcatttttca

SEQ ID NO: 1030707 - DNA, 120 bp, Artificial Sequence
  ENSG00000224643_2 (sequence is synthesized)
ccaaagaaaaagcactggtaaatgaggtttgttcagaattcatcaggaaacctattacaattgcagcagccctggaaacgcctgcattacaatgaacaagaaccactccatcctacaaaa

SEQ ID NO: 1030708 - DNA, 120 bp, Artificial Sequence
  ENSG00000224643_3 (sequence is synthesized)
agcagcatcttgtgaccctagaagaaataaatgataccaccttgaacacaaatataatcatcttgaacttttatataaatttctacagcaattctgttattaaaaaaaaaagaccaacaa

SEQ ID NO: 1030709 - DNA, 120 bp, Artificial Sequence
  ENSG00000263485_0 (sequence is synthesized)
agcattcagagagagtgcctgaaggagcagaggggacagaagagtctgttggcctggactttgagaaggcttcctgaagcagcaggaagaacttgagaaagacctttaagcatgctggga

SEQ ID NO: 1030710 - DNA, 120 bp, Artificial Sequence
  ENSG00000263485_1 (sequence is synthesized)
ggaccaggagcagacatgaatgagaagaagggagtcttcactctgggaatgggaggatcttcaatgagcagggactaatttttccagctgactctgaataaagatctacaaaagctgtca

SEQ ID NO: 1030711 - DNA, 120 bp, Artificial Sequence
  ENSG00000263489_0 (sequence is synthesized)
tgaggtgggcacggcgctctgggcttgtcagcaaccgctctgctcccgtccaatagccagggatggcaaacacaggcagaggcaccacggtcttcctccttgcgcccctggcagacatca

SEQ ID NO: 1030712 - DNA, 120 bp, Artificial Sequence
  ENSG00000263489_1 (sequence is synthesized)
ctaatcaatcacagcaacctttttgcacagagcctggctgccaccttcatggtctccacctacatctccaggctgaagccacacagttcccggagcttgggcccaggaggcagtcgaagg

SEQ ID NO: 1030713 - DNA, 120 bp, Artificial Sequence
  ENSG00000263489_2 (sequence is synthesized)
cccaaggccacaaagaatctggttggtttgccgtcggtcctgagggcagccgctgccacttctggggaaagtgtggtgggggggccaggggtgatgctctgtgcccagcacctgtgcagc

SEQ ID NO: 1030714 - DNA, 120 bp, Artificial Sequence
  ENSG00000263489_3 (sequence is synthesized)
agcagcaccttgcaggcacatctcccagtcctgatagagtctgcacgcccacctccccggctcggccactgggcaagcaggaggtgaggagtggacggcccgcccagggaggggcggccg

SEQ ID NO: 1030715 - DNA, 120 bp, Artificial Sequence
  ENSG00000246863_0 (sequence is synthesized)
gcggagcgtgactgtctcggctggaagcgtgggaggccggaggatcagtgactggctgtcgtggacatgctcgctacacctcccggggcttcgcttcgtttactattaactgtcgttact

SEQ ID NO: 1030716 - DNA, 120 bp, Artificial Sequence
  ENSG00000246863_1 (sequence is synthesized)
cctctgtatctcgtcagcaggggctgcctgcggtgttagaattacacgcccctgccacctgggcacggagcccagtctcccggcccctcagtcagtccttgggtgtagctggagcattta

SEQ ID NO: 1030717 - DNA, 120 bp, Artificial Sequence
  ENSG00000246863_2 (sequence is synthesized)
agaaaaatgaaatataggaactcagtgcatggtttcctgggcctttttattgaatatcatttctaacatgtacacagtataacccaggcttagtggattccgggacagaaaatgttggga

SEQ ID NO: 1030718 - DNA, 120 bp, Artificial Sequence
  ENSG00000246863_3 (sequence is synthesized)
gctgggatagtcaagtaaacaagaagaaatggtaaagagatgccaagtgggagaggaaactacggatgcagagagaggatctgggataaagagaacaaagatgcgtggtcgactttatgg

SEQ ID NO: 1030719 - DNA, 120 bp, Artificial Sequence
  ENSG00000246863_4 (sequence is synthesized)
aaactcgtttctttttaataagtgaggtacatggtagaagactttgacatgttgattatgtgactgggaccaaggacaacaactcgagaattgattaaaactacagttattccttggttg

SEQ ID NO: 1030720 - DNA, 120 bp, Artificial Sequence
  ENSG00000246863_5 (sequence is synthesized)
gtggagaaggaacaaagaaatctgtaaagtagttgtgatcaattagttgtaaacaccactgcactcagactcagaccagcttgcattgatttttatgacctaatctcagaggttgtacag

SEQ ID NO: 1030721 - DNA, 120 bp, Artificial Sequence
  ENSG00000246863_6 (sequence is synthesized)
ttgcattgatttttatgacctaatctcagaggttgtacagcgtcacttccactgtactctacttgttgaagcagctacaaaaacaccacatttaagtaaaggggacactaattgggagga

SEQ ID NO: 1030722 - DNA, 120 bp, Artificial Sequence
  ENSG00000246863_7 (sequence is synthesized)
gtgttagtcacattataagaagagcatgtggaatgagagattaagtagagatattattgcagtcatttaaggaaaatataatctcccataatattaatatctgttttccttttgtaaaaa

SEQ ID NO: 1030723 - DNA, 120 bp, Artificial Sequence
  ENSG00000246863_8 (sequence is synthesized)
atctcccataatattaatatctgttttccttttgtaaaaaaaaaatgtaccatttcaggctgagcatgttggctcatgcctgtaatcataacattttgggaggctgaggccagtggatca

SEQ ID NO: 1030724 - DNA, 61 bp, Artificial Sequence
  ENSG00000246863_9 (sequence is synthesized)
gtggtggcagtggaggttgcagggagctggtaccaccactgcactccagcctggatgacag

SEQ ID NO: 1030725 - DNA, 82 bp, Artificial Sequence
  ENSG00000246863_10 (sequence is synthesized)
actaaaatgtaccatttcagattttttttctgaaattaaacctgaaaaggtcaaaaaacacataaattacagtccctttcaa

SEQ ID NO: 1030726 - DNA, 120 bp, Artificial Sequence
  ENSG00000246863_11 (sequence is synthesized)
gtagttcaaaataccttatacagggcagcttataaaaagcagaagtttatttctcatagttctgaagactgggaagtccgggttcaaggttctggcagattcagtgcctgtcgagggact

SEQ ID NO: 1030727 - DNA, 120 bp, Artificial Sequence
  ENSG00000246863_12 (sequence is synthesized)
gctttttggttcacagatagtgtcttctagctgtctcctcatgtggtagaagggtgccttttttattagtacccctagttttatttattttattttattttttagagacaggggttttac

SEQ ID NO: 1030728 - DNA, 76 bp, Artificial Sequence
  ENSG00000246863_13 (sequence is synthesized)
ttatttattttattttattttttagagacaggggttttactatgttgcccaggctagcctcaaactcctgggcttg

SEQ ID NO: 1030729 - DNA, 120 bp, Artificial Sequence
  ENSG00000246863_14 (sequence is synthesized)
taaaggcactaatctcatctgtggcaccagagccctcatgacctaattacctcccaaagatcccatcccctaataccatcatattggtgatgaggtttcaatacatgaatttggggggct

SEQ ID NO: 1030730 - DNA, 120 bp, Artificial Sequence
  ENSG00000246863_15 (sequence is synthesized)
ggggacacaaacattcagaccacagtagttgttacattgatatgagctggtaagtgttaacacctggcagcaatcagatacccagccataggtgaaggcaggtgattagaattaccagcc

SEQ ID NO: 1030731 - DNA, 120 bp, Artificial Sequence
  ENSG00000246863_16 (sequence is synthesized)
aacacatttatgtgctagctaatttttattcaaaactttctgaagctacattcaaagcagttaatgggaaatggagtaaaaaaataggcaacctctcactctagataatgctgttaaaag

SEQ ID NO: 1030732 - DNA, 120 bp, Artificial Sequence
  ENSG00000246863_17 (sequence is synthesized)
taatttttcctcccagtcctctcctgtaatgaatagtataagaaggtatcctcccaacgtagaggcaccttgtgtttccaaagttttaattagttgtcatgataattttatgtgtcaact

SEQ ID NO: 1030733 - DNA, 120 bp, Artificial Sequence
  ENSG00000246863_18 (sequence is synthesized)
tgactgggttaagggatgcccaaataggtagtaaaacattatttctgggtgtatctgtgaaggtgtttctggataaaattaacatttgaatgggtagactgagtagagcagactgtcctc

SEQ ID NO: 1030734 - DNA, 120 bp, Artificial Sequence
  ENSG00000246863_19 (sequence is synthesized)
ccccatgtgggtggcccttatccaaatggttgaaggctaaaatagaacaaaaaagctgagtagaggggattccctctgcctgactaccttcgaactggggcggtggctgtttcctgcctt

SEQ ID NO: 1030735 - DNA, 120 bp, Artificial Sequence
  ENSG00000246863_20 (sequence is synthesized)
tggacttgaactgaaacatcagctcttcctgagtcttgagcctcctggcttttgaactgaaacaacagtaatggctctcctggttctcaggcatttggactttgactagaactacaccat

SEQ ID NO: 1030736 - DNA, 120 bp, Artificial Sequence
  ENSG00000246863_21 (sequence is synthesized)
cagttctcctgggtctccagcttgccaatctccagtttgccaactgcggatcttgggacttgtcagcctccataactccatgaaccaattttttgtaataaatctctttctatatgtcta

SEQ ID NO: 1030737 - DNA, 120 bp, Artificial Sequence
  ENSG00000246863_22 (sequence is synthesized)
ctatttccttttcactggtaatccttatttactcttgaaagggtaaaaatccgtgtcttgtacatatttggagtttcacaataccttcacatagtaatctatgtgagaattattttaaac

SEQ ID NO: 1030738 - DNA, 120 bp, Artificial Sequence
  ENSG00000246863_23 (sequence is synthesized)
attttggagaccaaaaaggggaaagagaaagagacggaaaattactaattacactaattgtattttacccccaagaacgccattaccagcggttaacattagttccaggagtccaaacat

SEQ ID NO: 1030739 - DNA, 120 bp, Artificial Sequence
  ENSG00000246863_24 (sequence is synthesized)
agttttcaagataaaaccccttacactataatcattagaaaccaaaaattataataattcaccaacatccagcatactcatttaggaagggttgaagaatctgtgtaaatagagttgttt

SEQ ID NO: 1030740 - DNA, 120 bp, Artificial Sequence
  ENSG00000246863_25 (sequence is synthesized)
gataacagttataaaaatatccctttacccatcttcaccctccatcccgaattcaaaactagtaacagttgggataaaggtatagaaaagaatcagttttgcaagtgtagagaatggaga

SEQ ID NO: 1030741 - DNA, 120 bp, Artificial Sequence
  ENSG00000246863_26 (sequence is synthesized)
aagcaagaaaccgctctcatgttttcattctgaaaagatatcactaaattctctacaacccctcaattggtgttagggtatatggtcagtagaatcaagaaataacccaatcagctgaga

SEQ ID NO: 1030742 - DNA, 120 bp, Artificial Sequence
  ENSG00000246863_27 (sequence is synthesized)
tcaccatgattctcagacttgaggaaggattgcctctcaaaaatgaagggctaaagacaggaatagagtggcacaattcttaatagttgtgtgctgtatgagttttttttaaggatgagt

SEQ ID NO: 1030743 - DNA, 120 bp, Artificial Sequence
  ENSG00000246863_28 (sequence is synthesized)
caaaagatcttaagatttgtgatgtaaaagattggacacgatttaaatatgtattaaatgtctgtagtagtgttttttataattgtctggtcatctaccagtgcacaacaaaccataaca

SEQ ID NO: 1030744 - DNA, 120 bp, Artificial Sequence
  ENSG00000246863_29 (sequence is synthesized)
aatttcgtggcttagagcataactccagaagtgtagctcagcgttgctgcctgggtctgggatctgaaggcttgttcactctatgtctggcagttgatgttggctgttgactgggaactc

SEQ ID NO: 1030745 - DNA, 120 bp, Artificial Sequence
  ENSG00000246863_30 (sequence is synthesized)
agctggaacatctatatgtggcctctccatgtggctgtttggcttccccacagcctggcagctatgctccaaaagtgagcatcccaagagagacaagagtcccaagaggacaaggcagaa

SEQ ID NO: 1030746 - DNA, 120 bp, Artificial Sequence
  ENSG00000246863_31 (sequence is synthesized)
ctctggagaaccctaatgccatacataatttttaaaaaaaaaaaaactctttccttctctgtttttctcttatacttttgtgagtgtagtgataggccaaatcacataagtgctaataaa

SEQ ID NO: 1030747 - DNA, 120 bp, Artificial Sequence
  ENSG00000246863_32 (sequence is synthesized)
tacttttccaacaagtacttaaccttgtttaggtgataatcacttgtcttacctttgtgttcagaagaattcccaattccaactttcttaggtatttattgaaaagcaggaggagggttc

SEQ ID NO: 1030748 - DNA, 120 bp, Artificial Sequence
  ENSG00000246863_33 (sequence is synthesized)
ggtggagggaagaagagatggaataggatttaggatcattgcaaagaccgaggtagttggggaacataaaggttttatgttgcctttcttcttcctccttatcattgaaggtctcctcct

SEQ ID NO: 1030749 - DNA, 120 bp, Artificial Sequence
  ENSG00000246863_34 (sequence is synthesized)
ccctcctgctccccatcacacaccctcacatgcccccatgtggcctcttactaaacagggagagaagagaagagctggagaaatggaagtattttgtattggtaagcccaagcagcagca

SEQ ID NO: 1030750 - DNA, 120 bp, Artificial Sequence
  ENSG00000246863_35 (sequence is synthesized)
tgctgagaaaagaggagtttttatggcccctggctacccatctggaataaacagttctatttccaaatggctatttctatgccaatgtaaaaagacatagataatgcagattattgtgta

SEQ ID NO: 1030751 - DNA, 120 bp, Artificial Sequence
  ENSG00000246863_36 (sequence is synthesized)
gacattactaatattcaacaatatctcgttttcctcttcttccaggcatactgaagactatatttctcagctgcctttgcaggtgggcagggtcatgtgactattatgactaataaaatg

SEQ ID NO: 1030752 - DNA, 120 bp, Artificial Sequence
  ENSG00000246863_37 (sequence is synthesized)
tgagcaaaagtgacgagtcacttgtgggctgaggcagtgaaaagttgtttgtgattctcaaatctctcttctgttctgccattgcaattgtggaaggagctttatgttgaaacggaagag

SEQ ID NO: 1030753 - DNA, 120 bp, Artificial Sequence
  ENSG00000246863_38 (sequence is synthesized)
ccaaaagattgaagtagtctatgtctcagtcaccatatgggagggcaaatgccctggagaaccacccagacacacaacaagtttgtatgaataagaaataaaactttgttgtataagtaa

SEQ ID NO: 1030754 - DNA, 120 bp, Artificial Sequence
  ENSG00000235016_0 (sequence is synthesized)
aatgcctcaggactggaggtcctcccactctgctgatgtgggagaccccccacgtggggactgccagtataccgcttcccttcgggctggccagtcctcaagtagagacactgaggtagg

SEQ ID NO: 1030755 - DNA, 120 bp, Artificial Sequence
  ENSG00000235016_1 (sequence is synthesized)
gcaagcgcatctacggggaagagcgctgcctcgggcgttaatgggagagagagctgaggcagaagggggatcggaactcccgctccagaagcgtgaaggtgggggtgtatgagagcaccc

SEQ ID NO: 1030756 - DNA, 120 bp, Artificial Sequence
  ENSG00000235016_2 (sequence is synthesized)
acccagaaccttgcaggaaaaagttgctttgcacatgggtgaccccgcaggccacatcatccacacatccatacgccgccccgtaggtaaggggtccgggcctccaggacaggagactca

SEQ ID NO: 1030757 - DNA, 120 bp, Artificial Sequence
  ENSG00000235016_3 (sequence is synthesized)
gctctgggaggacggccaccatctctggctcagtcacatttggtccccagattctggcaaccctgggtaaaagctcagtcacctgacctagtgacgaccacaagggcactgggaggcatc

SEQ ID NO: 1030758 - DNA, 120 bp, Artificial Sequence
  ENSG00000235016_4 (sequence is synthesized)
ccaagacccagctcactccagggctggacctcaaccttgtacctgcaggaccacccaccaggagacagaagagagaaaactgtatatgaagacaaggatttctccagaagagaccaggag

SEQ ID NO: 1030759 - DNA, 120 bp, Artificial Sequence
  ENSG00000235016_5 (sequence is synthesized)
caagtataaggactggaggaataaaatgggctacggaacacaggcagatgaagcaaatcacccacccctcaatgcctgctcagcaagcatccacgcctaggaaagggccccaaagtattc

SEQ ID NO: 1030760 - DNA, 120 bp, Artificial Sequence
  ENSG00000235016_6 (sequence is synthesized)
ctctgaaggtctgggaaaggtatggtaattacaggcacacattatacaggatagctcaatgtcagcagaactcacataaacaggatgaacatggtctacaagagtctgacctaagctgtg

SEQ ID NO: 1030761 - DNA, 120 bp, Artificial Sequence
  ENSG00000235016_7 (sequence is synthesized)
ctcccaggacagagcaggggcaattacgggtggagctcctgcctagaaggccagtgggtaggggcctccgatcctgggatatgatgcctcaatgtgggctctgatcaatttaaagatttc

SEQ ID NO: 1030762 - DNA, 89 bp, Artificial Sequence
  ENSG00000235016_8 (sequence is synthesized)
atgatgcctcaatgtgggctctgatcaatttaaagatttcttatcatgggtgaaaaccctactaaattttttttttttttgagacagag

SEQ ID NO: 1030763 - DNA, 120 bp, Artificial Sequence
  ENSG00000235016_9 (sequence is synthesized)
actgcaacctcctcctgccaggttctagcaattctcctgcctcagcttcctgactagctgggattacaggcacacgctgccacgtccagttaatattttgtattttagtagagacggggt

SEQ ID NO: 1030764 - DNA, 120 bp, Artificial Sequence
  ENSG00000235016_10 (sequence is synthesized)
ccaaagtgctgggattacaggtgtgagctcatgcctgtaatctgccccttcatgctaaggtaaagctgctcctggctcccaggctctatgagtgctctgatctcatctctggaaccggcc

SEQ ID NO: 1030765 - DNA, 120 bp, Artificial Sequence
  ENSG00000235016_11 (sequence is synthesized)
agccagagccttcccgccagcccatggcctgcagcatcttgttgccaatgttactgtggtcaatgccatctttggtgggttgctcgtaattcctgccagtggcaaacacacagttactta

SEQ ID NO: 1030766 - DNA, 120 bp, Artificial Sequence
  ENSG00000235016_12 (sequence is synthesized)
aaacagccagggccccagcttacgaactggaaaatgtgcacatcacatacacagtgccggcatcaaactgcttcttgcgcttgggctctggaggttctggaatgccgtacttctcccgtc

SEQ ID NO: 1030767 - DNA, 120 bp, Artificial Sequence
  ENSG00000235016_13 (sequence is synthesized)
tttctgcagctcggtctcggtatttcatctacatgggagaaaaaacactgctggaaatgttcacagacttcaacctgtaaccgtctaatgcacctattcaaaactatcccctcaagtatt

SEQ ID NO: 1030768 - DNA, 120 bp, Artificial Sequence
  ENSG00000235016_14 (sequence is synthesized)
tttaaatctgaagaatgctttttttagactgctctgaaataccaaattcccttgttcccatcatcatacctagtcatatctgaaatgttaaatttgtaaatatgaattgtgtggaaccag

SEQ ID NO: 1030769 - DNA, 120 bp, Artificial Sequence
  ENSG00000235016_15 (sequence is synthesized)
gggcagaactatgtctccaacaagcagttttatttaattagccaccctctgtcaagctactcaaccagcccactgggcagtgggtacagcttgcgaagaggaaggcagagttgcccgttc

SEQ ID NO: 1030770 - DNA, 120 bp, Artificial Sequence
  ENSG00000235016_16 (sequence is synthesized)
tcctcagcatttggacaggcatacctccaacatttggaaaggcatacctccaacatcaaggaggcttccagagacctgttcagcagtcgctggggaggtggaaccatagatagtagggca

SEQ ID NO: 1030771 - DNA, 120 bp, Artificial Sequence
  ENSG00000235016_17 (sequence is synthesized)
ggaagggtgtggggagaagaaaagcaaaagccttaactacaaacacttcagaaatatctcaggtgggagatttcaaacccacttgctcatttctaaaccacaggcctctatttgcattta

SEQ ID NO: 1030772 - DNA, 120 bp, Artificial Sequence
  ENSG00000235016_18 (sequence is synthesized)
aatccctgcccacctggccgccaacctgccccaaccaccagcactaactgcttgcccattattgtgtcacaggcttctctcttgcctttgttcccagatctgcttgccatgccctgccca

SEQ ID NO: 1030773 - DNA, 120 bp, Artificial Sequence
  ENSG00000235016_19 (sequence is synthesized)
cccttcctttcatatcacctgcaataacctcacgtcctgctgtcccttgggattaatttgaagcgcacttctttgcccatgaaggcttccctggccaggccaaactagaccactctctcc

SEQ ID NO: 1030774 - DNA, 120 bp, Artificial Sequence
  ENSG00000235016_20 (sequence is synthesized)
ataacaaaatccagcgtatttaagcagcaagctctggcattgctgtgagagagtctcggcagtgtgcttctgccttgtgcacccttatgatgaagggacaatgtgaggctcacaaggcac

SEQ ID NO: 1030775 - DNA, 120 bp, Artificial Sequence
  ENSG00000235016_21 (sequence is synthesized)
acagaggctgggtctaggctacatgaactacaatggtcagatgacaagggtatgacaaatcctcctaccctgcccctgggatctggaactaaatgctacaaataaaagctaaaggcaatt

SEQ ID NO: 1030776 - DNA, 120 bp, Artificial Sequence
  ENSG00000235016_22 (sequence is synthesized)
taggaatcggcgcccgacaaaccatatgcgctgcctttggctcctaggccagctccctttagccgaacttgagcctgggaaagcacagagactgtcagctgggaggtagggtatgggctg

SEQ ID NO: 1030777 - DNA, 120 bp, Artificial Sequence
  ENSG00000235016_23 (sequence is synthesized)
ctccacctctcaccatgcccactccttacccagcaggaccacccaccaggagacagaagagagaaaactgtatatgaagacaaggatttctccagaagagaccaggagcaagtataagga

SEQ ID NO: 1030778 - DNA, 120 bp, Artificial Sequence
  ENSG00000238020_0 (sequence is synthesized)
aatatttttgagtgcctcccacatgccaggaaacttgccaggagcttgggatgccatctaaagaccacttacagtggccccaatggtaaactgtgatctctgtggctaccaggagatggg

SEQ ID NO: 1030779 - DNA, 120 bp, Artificial Sequence
  ENSG00000238020_1 (sequence is synthesized)
acttccctctgaccagcccttgatacgcacagttcaatgatgaaaatgtctgggagccacaggttcttggctgccatactcatcttcgtgatgccctcacattcctctgggttccagctg

SEQ ID NO: 1030780 - DNA, 79 bp, Artificial Sequence
  ENSG00000238020_2 (sequence is synthesized)
agctgataaatgggttatcccaaacctagagcccaggtggaggagagagacagggccttgctatgctgcccaggctggt

SEQ ID NO: 1030781 - DNA, 120 bp, Artificial Sequence
  ENSG00000238020_3 (sequence is synthesized)
accttttacccatttttaaatcaagttgttttttgttgttgagtttcaggaattctatgtatagtttggatattaatcccttatcagctatataatttgcaaatgttttctcccattttg

SEQ ID NO: 1030782 - DNA, 90 bp, Artificial Sequence
  ENSG00000235011_0 (sequence is synthesized)
acacaatggctcattcctctgaaaggattgcttgggttcaggagtttgaggtcagccagggcaacacagtgagaccccatctttacaaaa

SEQ ID NO: 1030783 - DNA, 120 bp, Artificial Sequence
  ENSG00000235011_1 (sequence is synthesized)
gtaactgcctaaggggttcttcctgacttgtaataaggagagtttagtagatacgaggcctgcaacaccacatgggagatggagtttactcaaatcatctcctctgaagctcataggtta

SEQ ID NO: 1030784 - DNA, 120 bp, Artificial Sequence
  ENSG00000235010_0 (sequence is synthesized)
cgactgcagagcttgccctccaggtgatctcgcagtatcggtgttcacaagccctgtaaggcactcggggtatcctgaaggctacagattctgcaagggcagagactttaaggaacagcc

SEQ ID NO: 1030785 - DNA, 120 bp, Artificial Sequence
  ENSG00000235010_1 (sequence is synthesized)
atagtccttctccagctcaaaatctggaccatgggcacaaggttgtcccggaaccatcgatctctagaaggtacaggaggaaggggacctgccagtccagccctcatattttacagaggg

SEQ ID NO: 1030786 - DNA, 120 bp, Artificial Sequence
  ENSG00000235010_2 (sequence is synthesized)
aaaggtgaagccccatgtaaaacagggatttccctcggtgacacttccaggctgagaagggccggggatctggacacctacccagaaacactcccaccctgtcaatgcctctctgaatta

SEQ ID NO: 1030787 - DNA, 120 bp, Artificial Sequence
  ENSG00000235010_3 (sequence is synthesized)
tgtgatcaactgcctggagtatgaactaggcacatgcaaatagagaacagaggtcttgttgaaaatatgatgctgaattttaaaaactcactccccaaattaaaggaacaagaccagagc

SEQ ID NO: 1030788 - DNA, 120 bp, Artificial Sequence
  ENSG00000235010_4 (sequence is synthesized)
gctctcgaaggcgtcctccacgcagcggaacacgcagccaagcttgggccgggccagaggcctcgcgggctcctgaggctgccgcgcggtcacggcaggagcgggcgacagaatccggtc

SEQ ID NO: 1030789 - DNA, 120 bp, Artificial Sequence
  ENSG00000235010_5 (sequence is synthesized)
aacaacacactggtgtcaacaaaggaatctgctatttatgtggatttttactttagacaaactaaagtatctatgttgttctgtgtgttgaacacagagtgtgatgatgttaatataatg

SEQ ID NO: 1030790 - DNA, 120 bp, Artificial Sequence
  ENSG00000280455_0 (sequence is synthesized)
ctgggattacaggtgtgaaccaccgtgctcagccactaatcttgatgtcaatccttagagggatcaggaagcaggagcaatggacaggcaagagacactgctgaggtgccctgtaccttc

SEQ ID NO: 1030791 - DNA, 120 bp, Artificial Sequence
  ENSG00000280455_1 (sequence is synthesized)
tccagatggcctccctcttctcctctgagacacagtgcaataataccgtatggatagaaagtctgaggcagcatcatggaagctgagtccccagaacctgggaaggctgggaagaatgat

SEQ ID NO: 1030792 - DNA, 120 bp, Artificial Sequence
  ENSG00000280455_2 (sequence is synthesized)
ggagagagaagagcaaggaaagagagaggggaagagtctccatgctgcagacacaacctgcttattaggtcaatagtaggccaccctgcgtcatgatgcctttctcattcaccttacttc

SEQ ID NO: 1030793 - DNA, 120 bp, Artificial Sequence
  ENSG00000280455_3 (sequence is synthesized)
tcaaaaaaggatcacgatgcctcctgagctgacttcattctgttcttatcactaatcacccagcatcacgtaaatctcaaatcgagatgggttcaggagattagatatgatgaagtcgaa

SEQ ID NO: 1030794 - DNA, 120 bp, Artificial Sequence
  ENSG00000280455_4 (sequence is synthesized)
taaacatacccttgagtccaaaaggaaaagatatttaaatttaaggaacactgcagaaagcatctttcttccaaagacatagcaaatgtaagatatagaagacagcctctccccgacttc

SEQ ID NO: 1030795 - DNA, 120 bp, Artificial Sequence
  ENSG00000280455_5 (sequence is synthesized)
cagccccagctttccaaccgatattgctttaccacagcagccaacccaggcaactgctgacggagtgggcatactggttgtatgccttggctctctgttcacaatcctgaagggatagaa

SEQ ID NO: 1030796 - DNA, 120 bp, Artificial Sequence
  ENSG00000286855_0 (sequence is synthesized)
gcatttaacttccttagcaattcattaaaagactgagggcttgcttgactttattttttgtatctaaaattaaaaataaagcagggcagccttaagagaggacattaaagtgatggtact

SEQ ID NO: 1030797 - DNA, 120 bp, Artificial Sequence
  ENSG00000286855_1 (sequence is synthesized)
tacttttgtttgcttatttttattttctgatggaacaaatagtttccttggtaggcaaacaactttctgagggtcagcataattgcagtcagcatttatgccctttctgagttggcagct

SEQ ID NO: 1030798 - DNA, 120 bp, Artificial Sequence
  ENSG00000286855_2 (sequence is synthesized)
tactctgctgtgagccctgcataagatgcctggttcagtgagcaaaactcacatggtgtcactttgaagataaagtcatgtctcccaggatgcattgtcaacaagcctgatgagtaggtt

SEQ ID NO: 1030799 - DNA, 120 bp, Artificial Sequence
  ENSG00000286855_3 (sequence is synthesized)
ctaacttccaaggatgaccctgtgccagagttcccatattcaacaaaatggctaagagcttctccaggatccaggactcgtgctggctcctttcctgaaacctcagcctttaaaaaggag

SEQ ID NO: 1030800 - DNA, 120 bp, Artificial Sequence
  ENSG00000286855_4 (sequence is synthesized)
atcctgccatttgccaaaacatggatggacctggaggacatcatactaagtaaaatgagccagacatggaaagaaaaatagtatataatctcacttacaggcggaagcttaaaagaagtc

SEQ ID NO: 1030801 - DNA, 120 bp, Artificial Sequence
  ENSG00000286855_5 (sequence is synthesized)
aaataatcatatttaattattaaaagccactgttagcattaaaatccaaatatatcatttactcagtcatcttcacacacactatttgaatttcctctatcctgattttatcaatacgta

SEQ ID NO: 1030802 - DNA, 120 bp, Artificial Sequence
  ENSG00000286855_6 (sequence is synthesized)
gcataagcgccttcttttttcttatacataatttgtttttattttcatattggtcattatttaaattgtataaattataagagtatttaattccatattgttagatagatcatcctagtt

SEQ ID NO: 1030803 - DNA, 120 bp, Artificial Sequence
  ENSG00000286855_7 (sequence is synthesized)
atcataaacagtttatagtactatccaacgtactgatgtttaagagcttgggctttgaagttgggcagaataagcctcaaatcctgtcagagcctcttaatagtagtgtgacgttagaca

SEQ ID NO: 1030804 - DNA, 120 bp, Artificial Sequence
  ENSG00000286855_8 (sequence is synthesized)
tgctatttaacctccctgaacctcagttcacctgtgtcctaaatggatacagaatagtagcttcatgataaatctatcctgagaattaaataagatgacctatgtaaaccaatatattgt

SEQ ID NO: 1030805 - DNA, 120 bp, Artificial Sequence
  ENSG00000286855_9 (sequence is synthesized)
aaatgctcaatagttgttagctattgctataacaatttttgtccttctgaattatcaatttgagttgatttcccaagaatgagaatattggttaaatgatttggagactcattaatttag

SEQ ID NO: 1030806 - DNA, 120 bp, Artificial Sequence
  ENSG00000286855_10 (sequence is synthesized)
tcataatataattgaatgtctactctatgttaagtgctgaaagaaagtggtgaacagtcaggtgaggcccccaaataagaggtgtttgcagtttggaagagaagatagacattacattaa

SEQ ID NO: 1030807 - DNA, 120 bp, Artificial Sequence
  ENSG00000286855_11 (sequence is synthesized)
gtcattatatttaaatatagtgttgcagaagagaaagtaaaagtgttaaaaaatgtagaccaaggagatatatattgcctaattaacttccaaactattgaacatttaaaataatatgtg

SEQ ID NO: 1030808 - DNA, 120 bp, Artificial Sequence
  ENSG00000286854_0 (sequence is synthesized)
gaaattctacaggtctttgaaatgctttacatttgagaatgaagctcagctgaagtttgaacagcatactgacatataccaacaagaatgaaaataacttaacagcaattttataaattc

SEQ ID NO: 1030809 - DNA, 120 bp, Artificial Sequence
  ENSG00000286854_1 (sequence is synthesized)
acatcccccagagcaccacagagtaaagaaatactgcatatgggtaacaactggttcttagttactaaatctgaaagatcaaatacagttaattacataagcttctcttgagtttttctg

SEQ ID NO: 1030810 - DNA, 120 bp, Artificial Sequence
  ENSG00000286854_2 (sequence is synthesized)
ggggaatataccaggagaccataatcaagcgctttcagcatcaccagtggcatttcatactggtcccatggtgttaatccaggtttctggtattgcactaaacacgatgaaaaacaggag

SEQ ID NO: 1030811 - DNA, 120 bp, Artificial Sequence
  ENSG00000286854_3 (sequence is synthesized)
agaacggagagggatcatgttttaccacaatatgcaatttatgggagagatgaagcgctcaggtggagatgactagtgtcacgtggtgttttaagtggatactcacaacgctggaactca

SEQ ID NO: 1030812 - DNA, 120 bp, Artificial Sequence
  ENSG00000286854_4 (sequence is synthesized)
catctataaaaggtgagattaatatttactcagtgaactttgagtaaagcattgggtgcttcattatgtggaggagtctcatccaatcagttgaaggtgactgaatggaactatagatcg

SEQ ID NO: 1030813 - DNA, 120 bp, Artificial Sequence
  ENSG00000286854_5 (sequence is synthesized)
acctcacataaatgagagggaattctgcaacagatcatctttgcctttgaactgcagcatggactcccctctgggtctcctgcctgccagcccaccctgcagagtgcatttgccagcctc

SEQ ID NO: 1030814 - DNA, 120 bp, Artificial Sequence
  ENSG00000286854_6 (sequence is synthesized)
cacaatcaggtaatttatcctgtgcattaacaagaggaagtctagagccatggaaaccaagtcaggaaacttctctcttattattaggtccactgcaaatctagttgagactgcaaatcg

SEQ ID NO: 1030815 - DNA, 120 bp, Artificial Sequence
  ENSG00000286854_7 (sequence is synthesized)
agctaatgatatcttaagttagaacatcatgccaagagaagtatgttttcaaccaagaaagcaaaatcaacatgatcctaaatgaactgcttctgcatgtcaacagtcttgatatacctg

SEQ ID NO: 1030816 - DNA, 120 bp, Artificial Sequence
  ENSG00000286854_8 (sequence is synthesized)
agagagtgagatacagagtatgttgttaaactttttataattacaaatattgcttgtatttcttttgaaatttgccacacgctgatattaaaaataatagatagaaaatcaagagagaaa

SEQ ID NO: 1030817 - DNA, 120 bp, Artificial Sequence
  ENSG00000286857_0 (sequence is synthesized)
gaatggaacatcctggcagactgcatcaggagaatgataacatgagaagcaatgtttaaaacattcccctaaaaaccaactctcaaaaaaatttcttttaaaaacaatcccagaaatgct

SEQ ID NO: 1030818 - DNA, 120 bp, Artificial Sequence
  ENSG00000286857_1 (sequence is synthesized)
gaaatatttggaagatatgagcaggaatgaacaactaccttcatcttatttaaatctttcatttcctaattgttcctggtctggctcataaagatctctagataaagttaattgacttta

SEQ ID NO: 1030819 - DNA, 120 bp, Artificial Sequence
  ENSG00000286857_2 (sequence is synthesized)
aataggagtggtaagctcttttacaacttttaaaaaatatatcttttacgttcctggataacctgtaattttacaatactgatctagaaaccagaagctgccacaaatgatggtgctaaa

SEQ ID NO: 1030820 - DNA, 120 bp, Artificial Sequence
  ENSG00000286857_3 (sequence is synthesized)
atttgactgtgcaaaagaagtccttactacttctccacccaccaattctggtgacagttagggggtttgtggccctagcctacatcattctcccctgctggatgcttcctgctcttgaac

SEQ ID NO: 1030821 - DNA, 120 bp, Artificial Sequence
  ENSG00000286857_4 (sequence is synthesized)
tgggactcggactggctctccttgctcttcagcttgcagatggcctattgtgggatcttgagctatgagccaacagcagggagagggggctttcagcagctgccaaacacgacatttctg

SEQ ID NO: 1030822 - DNA, 120 bp, Artificial Sequence
  ENSG00000286857_5 (sequence is synthesized)
cagctgccaaacacgacatttctggacaggccacctcaccctcggcaggggacatctggagagcagccttttatctgtcagcctctgcacgtctggctacctgcaaggggcctggagccc

SEQ ID NO: 1030823 - DNA, 120 bp, Artificial Sequence
  ENSG00000251359_0 (sequence is synthesized)
ctggccgccgagggtcgcggcgcccaggctgccggagccgccgccgtctgggctcggatccgggaagctgcggcgctgccgcggcagcggcgggcccctcatttgcatgcgattagcatg

SEQ ID NO: 1030824 - DNA, 120 bp, Artificial Sequence
  ENSG00000251359_1 (sequence is synthesized)
cgcccgcccgcctcatctgcatgcgcattcctcgcgccgcattcctgagcttaaccccgccgctgccggcgtcgccgcaccagctcggacgcactgccccgcggggccgcggctccaggt

SEQ ID NO: 1030825 - DNA, 120 bp, Artificial Sequence
  ENSG00000251359_2 (sequence is synthesized)
gggaggaaggcgggcgaaggaatgtgcggccagctccctccccttgaccccagatagctcccctgggccaaacgccgagaggttttagagtttctggacggggaagattgcaaaagtctc

SEQ ID NO: 1030826 - DNA, 120 bp, Artificial Sequence
  ENSG00000251359_3 (sequence is synthesized)
cgcaaccttctcaacctctttcgtcttctagggaaaccacaaaactttcgagaggaaaggggtggcgggcggggagctctcctccggagaaaaaacctcaacaagcggagagggcacaaa

SEQ ID NO: 1030827 - DNA, 120 bp, Artificial Sequence
  ENSG00000251359_4 (sequence is synthesized)
gcggagagggcacaaaggctccccacgccgcgccccgagcccctccggcaccccaagggcggtccggggtggtgggaaagcgccaagccctgggagtgcgtcggtgggtccgggacggcg

SEQ ID NO: 1030828 - DNA, 120 bp, Artificial Sequence
  ENSG00000251359_5 (sequence is synthesized)
tcctggccctcgatgacctcggctgagaccgcgagccgcgcggcggaaagcggaggaactcccgtccggccctgtagccgcccgcaccgcgccccgtcacccgccgccccttcgcgtccg

SEQ ID NO: 1030829 - DNA, 120 bp, Artificial Sequence
  ENSG00000251359_6 (sequence is synthesized)
ggcgctccagccgcggggccccggaagctcctggtccctggcctcccctgcttggttcggggcggttggccgtggacgcgccccgactctagtcccttccgtccagccgcccgccccagg

SEQ ID NO: 1030830 - DNA, 120 bp, Artificial Sequence
  ENSG00000251359_7 (sequence is synthesized)
gtggccaggaggtgtgggcggccacgccggagggacccacggcggcgccggacgcccgcccttcctaggccctggcccggccggggtgggccgggacgttccctgttgcataggcattta

SEQ ID NO: 1030831 - DNA, 120 bp, Artificial Sequence
  ENSG00000251359_8 (sequence is synthesized)
cgttccctgttgcataggcatttatttattcagcagctactacgtacgtgctggcccgcactgccgagggaccggacgcctgccccaggcgggacaatgccgggtgcagcgctggcgggg

SEQ ID NO: 1030832 - DNA, 120 bp, Artificial Sequence
  ENSG00000251359_9 (sequence is synthesized)
cccagcccctcagtcagagggggcgcctcccaggccctggactcctctccagccgggtctacaccaccgtcccccgtcatcttcttctgggttactgagcagcttcttttaaaatagcaa

SEQ ID NO: 1030833 - DNA, 120 bp, Artificial Sequence
  ENSG00000251359_10 (sequence is synthesized)
caccgaggaaggccccgaagcccagtcttgcacctcgtggtgtgaagtcgtttaatcctgcccgctaatgcgtaaggactttccaccgtgtgcaggactccgcgctgggcaggggctctc

SEQ ID NO: 1030834 - DNA, 120 bp, Artificial Sequence
  ENSG00000251359_11 (sequence is synthesized)
gcagggtttgaaccgacctccgcctcccctgcgggttcacaggcctgcgaggaagtcgcgtgaaggagattcgctactgtgtgaggctggcctgcgcggcgtgggcagtagctgtccggg

SEQ ID NO: 1030835 - DNA, 120 bp, Artificial Sequence
  ENSG00000251359_12 (sequence is synthesized)
gctggggacagctttcggctccccaggccatcccgtcggggcatctgcggccaatctcgaaggtggagaggctcagggttggaacagacttcacggaaggggtcctagaagaggaaaggg

SEQ ID NO: 1030836 - DNA, 120 bp, Artificial Sequence
  ENSG00000251359_13 (sequence is synthesized)
gtcgtgtttgcccttagagcagtctgggcgtgaagcggaaactttaaaccaccagaaactctggagagcttggagcacctgggaaggagcaaccagagtgggccggaggtagggaaggaa

SEQ ID NO: 1030837 - DNA, 120 bp, Artificial Sequence
  ENSG00000251359_14 (sequence is synthesized)
ggcacccacggcgaatttgcccgctttgaccgcatttagggcggccgcttgtgcagccagccttctggaaggtaggctttgcgcttggtgaagagaagcccccacctccggatctgtgtt

SEQ ID NO: 1030838 - DNA, 120 bp, Artificial Sequence
  ENSG00000251359_15 (sequence is synthesized)
ccgccccagtccattcatcaggaggtgatcacacaagtcaagcttctctagttcccggtggaatgagacgccctggtggggtcttaaggttgaacgtttgaatactgtaaaaaagatggg

SEQ ID NO: 1030839 - DNA, 120 bp, Artificial Sequence
  ENSG00000251359_16 (sequence is synthesized)
acctgcctacaattaatctctcacactactgagcgaatgtgcgttgttttggacttccctaaattggcccaaatgcatagccaacacttgaattgcggtgtactaacaacatcattcagc

SEQ ID NO: 1030840 - DNA, 120 bp, Artificial Sequence
  ENSG00000251359_17 (sequence is synthesized)
accaaaccaaaccattcttatttaaaccttgcttcctagcttatttatttcccaaacaacttgaaaacatttgttatactaaaatgtctacatcttactattaaaaaaaaaaaaccaaag

SEQ ID NO: 1030841 - DNA, 120 bp, Artificial Sequence
  ENSG00000286851_0 (sequence is synthesized)
agagagcaatgcctagtcttagagaacagaagaggcagggtccgcatctggtattagcattctttatttagttcaacaaagtcacatggagacaatatgttacatcctgactttaaacat

SEQ ID NO: 1030842 - DNA, 120 bp, Artificial Sequence
  ENSG00000286851_1 (sequence is synthesized)
tagttcagagaagaaaagttgctgagatccctgctgcagttatccacgactacataacaaaccactaccaaactttgcgtcctaacaacagtgatttattattttgcacagccttgtgga

SEQ ID NO: 1030843 - DNA, 120 bp, Artificial Sequence
  ENSG00000286851_2 (sequence is synthesized)
taatgagcttagggtgcaggttggggagactggtggttctcacatgataactcagagctcccaagaaagcaaatgtggaagcatctagacctcttaaggccctgtctagaattgtctggg

SEQ ID NO: 1030844 - DNA, 120 bp, Artificial Sequence
  ENSG00000286851_3 (sequence is synthesized)
cagcattttcatcacattccactggtaaaggtgttcttaccttgtatgtgcctgcagggatgagagaattttggccatctttgcagataatccaccacagtccctccatgctgccttcat

SEQ ID NO: 1030845 - DNA, 120 bp, Artificial Sequence
  ENSG00000286851_4 (sequence is synthesized)
catggtgaagaccaacgagatgatgaacatgtagcacatatctgtatcacgagaattccacgagaagagctcaaacttttatcatttcatttatgcctgttagcatgaaaaaagaggctg

SEQ ID NO: 1030846 - DNA, 120 bp, Artificial Sequence
  ENSG00000286851_5 (sequence is synthesized)
agaagggaagatggtgacaaggaattgctaagcagcaggtcacatgggtcacccagcgtggaccggcctgaacacagcttccatgtccccactcttgccaatgttctcatgtggacacag

SEQ ID NO: 1030847 - DNA, 120 bp, Artificial Sequence
  ENSG00000286851_6 (sequence is synthesized)
ctggctttgttacatcagaatgaaggcctcccttatgatggctcagtgtttccatagaaatgtccaaggaacatgattatagagtcagtccattcattaacacagagggttaggggttgg

SEQ ID NO: 1030848 - DNA, 120 bp, Artificial Sequence
  ENSG00000286851_7 (sequence is synthesized)
gaaaatcatctaatccaacagccttattttgaaaatgaagtttccaagccctagacgttcatggaagctcatgaaaggctcctaatcacagtgccctttccgcggtaacatgggctcctt

SEQ ID NO: 1030849 - DNA, 120 bp, Artificial Sequence
  ENSG00000286851_8 (sequence is synthesized)
atttagttccattcagaaaacctgaagagaggcctccctggccaacggtagtggggattagaagcagtccgtttctgttaatatttatattctattttaataaagcctggcttcttacaa

SEQ ID NO: 1030850 - DNA, 120 bp, Artificial Sequence
  ENSG00000286850_0 (sequence is synthesized)
agtacctaagaaaaaaagacctcctgatatgcctctaaacttgggacgactgcaaatcaacatgaatacctgttggtaagccacagtttggatttggactcccctgtgtgcagtctatgc

SEQ ID NO: 1030851 - DNA, 120 bp, Artificial Sequence
  ENSG00000286850_1 (sequence is synthesized)
agtttggatttggactcccctgtgtgcagtctatgcaatgttagaacagaaggtctgaccatggactcaagagctgacgttaggaatgtcagcaccatcctgctctccaaggactcctca

SEQ ID NO: 1030852 - DNA, 120 bp, Artificial Sequence
  ENSG00000286850_2 (sequence is synthesized)
gaaactgcaacttgtgccatgatccctgcgtgagaaaagtagtaagaaatcctacccgaccatagaatgttagaacagaaggtctcaccgtggactcaagagctgacatgaagaatgtca

SEQ ID NO: 1030853 - DNA, 85 bp, Artificial Sequence
  ENSG00000286850_3 (sequence is synthesized)
ctctccaaggactcctcatcttcaatggactcctcatcttcaacggactcctcatctacaacctgcgcaagaaaagtagtaagaa

SEQ ID NO: 1030854 - DNA, 120 bp, Artificial Sequence
  ENSG00000286850_4 (sequence is synthesized)
actcacatccagagctgtgagagtttttcacaggctggctaattcagagttttcttgcatcagaggaaaagtaagactcggaaacttggtattcgatttgcccaaaactctcattagata

SEQ ID NO: 1030855 - DNA, 120 bp, Artificial Sequence
  ENSG00000286850_5 (sequence is synthesized)
cttggtattcgatttgcccaaaactctcattagatagagaatccatccgctaactttctatctagtattatttccataaagttagatcaatatcactcccaaaataaatccacgtggcaa

SEQ ID NO: 1030856 - DNA, 120 bp, Artificial Sequence
  ENSG00000286853_0 (sequence is synthesized)
agaaccactgacttatgtggtcagaagtgatcgactccctgggctgggaagctccaattttctcctccagatttcctgtgtcgccctctcctccctgtcctctgccccattagggaggat

SEQ ID NO: 1030857 - DNA, 120 bp, Artificial Sequence
  ENSG00000286853_1 (sequence is synthesized)
gcatggattccttcagcaagctctttgtccttcggtttccagtgaaaaggctggcatagaagctgtctgaatctatgaaatcaaaaaaggatcaaagtagagacacaaattcctctgaac

SEQ ID NO: 1030858 - DNA, 120 bp, Artificial Sequence
  ENSG00000286853_2 (sequence is synthesized)
ttgaaattgaaatgagtgtgttgccagcatctattcatccgcctaaaaccaagtaaatcatttcagaagaagttttcagcagtctatcaaagtgacaagagtggtgaggtagtaaagtag

SEQ ID NO: 1030859 - DNA, 120 bp, Artificial Sequence
  ENSG00000286853_3 (sequence is synthesized)
tcagaaatagaagcaaaatgttcacgtttcagtccgtgagtagggcttgaatcccacaggaggaattaagaaaaagaagcgaacactcggaggataacatcgcaatattacttagccatt

SEQ ID NO: 1030860 - DNA, 120 bp, Artificial Sequence
  ENSG00000286853_4 (sequence is synthesized)
attctttacagtgttaggccccttccagagatgtttgactgatttgttgcttgtccacgtagatgcgtgaatacactaaatagtcatcaaatatgggtcaagtagtgtgctggttgtttt

SEQ ID NO: 1030861 - DNA, 120 bp, Artificial Sequence
  ENSG00000286853_5 (sequence is synthesized)
acgtatgttctcctttaatttacccaacaatattgtgacatatcatcattattttaagaatgagaaagcttaaagttaatagagattaaaaaataattttccaactctctataatgagca

SEQ ID NO: 1030862 - DNA, 120 bp, Artificial Sequence
  ENSG00000286852_0 (sequence is synthesized)
agagatgggcagttggtgagagctgctggtgtggggcaggagaagccataaggcactaaaaataacagcacacctcacatctatctggatggctgttatcaaaagaacagaaagtaatgc

SEQ ID NO: 1030863 - DNA, 120 bp, Artificial Sequence
  ENSG00000286852_1 (sequence is synthesized)
tgtgaatcctgactaatgcatcttccaaaagaatctacagaacagctggggagcatgagtctaaggtctgtaggctccagatgaaagatcctgtcgctgatgctgggccagcctacaagc

SEQ ID NO: 1030864 - DNA, 120 bp, Artificial Sequence
  ENSG00000286852_2 (sequence is synthesized)
accccccagacaggctgtcacagaacagtagggctgacgaaccacgttcagttgcttgaatcccatcatttagtacatcagttccaaacacacagcaagaaacaaagggagagatctgca

SEQ ID NO: 1030865 - DNA, 120 bp, Artificial Sequence
  ENSG00000286852_3 (sequence is synthesized)
atcagtctcccctgctaacagtgtggttaccaggaccagtcaaatagtcaaacaaggaggcttagcagatggaagctgcccagaaactgcacatccttgtcctaccaaagaaacacaaga

SEQ ID NO: 1030866 - DNA, 120 bp, Artificial Sequence
  ENSG00000286852_4 (sequence is synthesized)
gcacgatcacctggccagtatctggggctcgccagctgacctgcggagtggctgtgggctttgtttgcatttcttgagcagagcacatatggtcccatctatctttgtcattcatttctc

SEQ ID NO: 1030867 - DNA, 120 bp, Artificial Sequence
  ENSG00000286852_5 (sequence is synthesized)
ttattttctccagcagaattgaatggtcttaaaagagtgaacatgtattgcagatgccgtgagagctatgatggtgaaactgctgatcttcctagtactttaaaaaagactttctacaaa

SEQ ID NO: 1030868 - DNA, 120 bp, Artificial Sequence
  ENSG00000251350_0 (sequence is synthesized)
gcagaaaaacgaggggttgcaactgccacgcagcaactgccacacagaagaaggagggactgcaactgccatgcagcaactgccacacagaaaaaggaggggttgcaactgccacgcaga

SEQ ID NO: 1030869 - DNA, 120 bp, Artificial Sequence
  ENSG00000251350_1 (sequence is synthesized)
aaaaggaggggttgcaactgccacgcagcaactgccacgcagaaaaaggaggggttgaaaagggagtagcttctgatattcagaagctattggaagagatgctcaaagaagaaaaaatta

SEQ ID NO: 1030870 - DNA, 120 bp, Artificial Sequence
  ENSG00000251350_2 (sequence is synthesized)
attctgtacagcagtcttggacaacaaccaatctaaactggcacagtgcagaggcaatcaacagagaacataatattgatagaatgcctgacgcttttgattgtattcacaggaaacata

SEQ ID NO: 1030871 - DNA, 120 bp, Artificial Sequence
  ENSG00000251350_3 (sequence is synthesized)
aacaattggaagacagtttatgaatgaattagtgataagcattttttttcaacttttattttagattcaagggtacatgtgcaggtttggtgcctgggtatactgggtgatgctgaggtt

SEQ ID NO: 1030872 - DNA, 120 bp, Artificial Sequence
  ENSG00000251350_4 (sequence is synthesized)
tgtgttacaaatgatcccatcatccaggtactgagcatggtatccagtagttagtttttaacccttctcctgtctctctcctggtggtccccagtttctactgttgccatctttatgtcc

SEQ ID NO: 1030873 - DNA, 120 bp, Artificial Sequence
  ENSG00000251350_5 (sequence is synthesized)
gccacgcagaaaaaggaggggttgaaaagggagtagcttctgatattcagtaagtacgaatcggccttaggttccctgcctcaagaccctattctcctgcctcacttttagctaagggtt

SEQ ID NO: 1030874 - DNA, 120 bp, Artificial Sequence
  ENSG00000251350_6 (sequence is synthesized)
attacaaaagagtcagaaagttaagacaaaatatgaaagtttataaagtaaaaagagttacagtgagctaagtataacttattgaaaacatttttttaatttagtatagcctaactgtgt

SEQ ID NO: 1030875 - DNA, 120 bp, Artificial Sequence
  ENSG00000251350_7 (sequence is synthesized)
ttatacagtctacagtagtatacagtaatatcctagacctccacattccctcgccactcactcactcactcaccgactcactcagagcaacatccagtcctggaagctccattcacagaa

SEQ ID NO: 1030876 - DNA, 120 bp, Artificial Sequence
  ENSG00000251350_8 (sequence is synthesized)
tgtttatttgttgagacatagtttcactctctagcccgatcttggctcactgcaacctacgcttcctgtgttcaagcgattctcttgcctcggcctccccagtagctgagattacaggca

SEQ ID NO: 1030877 - DNA, 120 bp, Artificial Sequence
  ENSG00000251350_9 (sequence is synthesized)
tgtattttaatagagatagggttgcaccctgttggccaggctggtttcaaattcctgatctcaagcgatccactcaccttggcctcccaaacggctgggattacaggcttgagccaccac

SEQ ID NO: 1030878 - DNA, 120 bp, Artificial Sequence
  ENSG00000251350_10 (sequence is synthesized)
agccactatttgcttttctattcctgcattaatttgcttaggataatagccctcaacttcatccattttgctgcaaagaaaataattttgttcttttttagggctgcatagtattccatg

SEQ ID NO: 1030879 - DNA, 120 bp, Artificial Sequence
  ENSG00000251350_11 (sequence is synthesized)
cacatttgttttatttaatccactgttgatggacacctgggtttattctatgcctttgctactacaaatagggctgtgatgaacatgcaaaggcatgtgtctccttgagataaatatttt

SEQ ID NO: 1030880 - DNA, 120 bp, Artificial Sequence
  ENSG00000251350_12 (sequence is synthesized)
aaatcaaaaaaattaatgtcagggctaacatacagttattagaaaaaaaaatattttgttattatagatagacactagctttaacataataatagttatgtaagtagtcgaagttcatat

SEQ ID NO: 1030881 - DNA, 120 bp, Artificial Sequence
  ENSG00000251350_13 (sequence is synthesized)
cgaagttcatatgatcaaaattattatttagctgttttaaaagaatgcagatataagagatataccattaatggtgaatagttccagtaaaagcaagctaagctctctttcacattccat

SEQ ID NO: 1030882 - DNA, 120 bp, Artificial Sequence
  ENSG00000251350_14 (sequence is synthesized)
agagggaatttaataagccctgaaaccgaaagttcaagaaggaaaagtgcaagtcctacatgaattgatcaatgattgcctctggaaattattggtgtgaatggggaggcaaaattgcta

SEQ ID NO: 1030883 - DNA, 120 bp, Artificial Sequence
  ENSG00000251350_15 (sequence is synthesized)
gtttggttaataagctatgtaactgtttgataattcttcacttgcatgtaaacttcggtacaaataaaagctaatgaaaacagagacagaattattaaatcatcataacataaagttaac

SEQ ID NO: 1030884 - DNA, 120 bp, Artificial Sequence
  ENSG00000251350_16 (sequence is synthesized)
atttttcatcatttttcacttgttcaaagatcataagaaattttcatcttaattttcaagcatcaactaatgtttctactctccctgagtaccataaaaagccttctgtggacagtctaa

SEQ ID NO: 1030885 - DNA, 120 bp, Artificial Sequence
  ENSG00000251350_17 (sequence is synthesized)
gtgacaatgacacattagatttggcaaaaattactttcagatgtaaatcaatttgagaatgaactgatgctctgaaaccggaatttacttgttgctcaaatttgccccaaaataaaataa

SEQ ID NO: 1030886 - DNA, 120 bp, Artificial Sequence
  ENSG00000251350_18 (sequence is synthesized)
cacacagaaaaaggaggggttgcaactgccacatagcaactgacacgccgaaaaaggaggcgttgcaactgccacacagaaaaaggaggggttgcaactgccacgcagcaactgccacgc

SEQ ID NO: 1030887 - DNA, 120 bp, Artificial Sequence
  ENSG00000251350_19 (sequence is synthesized)
ggcccagctctccattggtgttccaatctattctctgacctctatgctgtacacaagaatcctcaatggtttttctggaacccaagacagaaataatatcccaaatgatgcttgctctaa

SEQ ID NO: 1030888 - DNA, 120 bp, Artificial Sequence
  ENSG00000251350_20 (sequence is synthesized)
gagtatcactcacccagggggtttaccccctgcaactttcccttttaccagttttgctacagatttttatgaacttagttccccagtcaccagggccacagatgtttgaaatacttttct

SEQ ID NO: 1030889 - DNA, 120 bp, Artificial Sequence
  ENSG00000251350_21 (sequence is synthesized)
gtctttttttttaagtgataaacaactgaattcctattcacttttactccacgagtgactttacaatacattaaaaaaagataaactgtcagtattcttttctttaaaaactgtaaaatg

SEQ ID NO: 1030890 - DNA, 120 bp, Artificial Sequence
  ENSG00000251350_22 (sequence is synthesized)
cctttccacttatttcttatactatgttgtctctcagataatacattgatgcaattttggataatgttttaatgaagaagttgacagtaatgcacattaattaaaatatgtaaaaatcta

SEQ ID NO: 1030891 - DNA, 120 bp, Artificial Sequence
  ENSG00000286859_0 (sequence is synthesized)
agagccacaccctgggcgcccccatcacactcttctccctttctggtaggttgcagtggagggggagtgggctgaatggtggccttcaaaaagatatgtccacatcccatcccctggagc

SEQ ID NO: 1030892 - DNA, 120 bp, Artificial Sequence
  ENSG00000286859_1 (sequence is synthesized)
ctgtgaatgtgaacacatttggaaaagggtccttgcagatgcaattaagcaaggaatctcaagatgcgatcatcctggattaaccagggctaacctttgaacaaagaagggactgagatg

SEQ ID NO: 1030893 - DNA, 120 bp, Artificial Sequence
  ENSG00000286859_2 (sequence is synthesized)
cacgggaatgcaagactaaggactcaacatagctgcttccagctcctcatcaggctgggagggcccaagccacagctaggcgggggctgcacggcactccatgctgcctatgtgagttca

SEQ ID NO: 1030894 - DNA, 120 bp, Artificial Sequence
  ENSG00000286859_3 (sequence is synthesized)
accaaccaaccagtcttggagtgcctctccccagtgcttccatctcttcttctcagggcagtcttctttccttctacccacatcagcttgccaggaagggcctgccgactcctaaggaag

SEQ ID NO: 1030895 - DNA, 120 bp, Artificial Sequence
  ENSG00000286859_4 (sequence is synthesized)
gtgttacccctccaaggaaaggaacttccacacatcgaaagaaagggtcagtgctggccaggacccttcccatcagtgctaagaggagcatccgcctggaagggaatgtgtgtcattaca

SEQ ID NO: 1030896 - DNA, 120 bp, Artificial Sequence
  ENSG00000286859_5 (sequence is synthesized)
gggcatgagtgacgaggagtgcttccctggtggggaattcccaaagaaaacgagcacacactcatgggagacacttcttttatttaggaaggaggtctttcctactggcgccggctcctg

SEQ ID NO: 1030897 - DNA, 120 bp, Artificial Sequence
  ENSG00000286859_6 (sequence is synthesized)
ccagaggtcggggtgacagcaggatcagaagcactgctctcacacacagtgggagtggaggatggcttcccgcagcctctttagaaagcccaggagttctctttatttcagagaagggca

SEQ ID NO: 1030898 - DNA, 120 bp, Artificial Sequence
  ENSG00000286859_7 (sequence is synthesized)
tttctatacaagacatcattccattacagtcgtcacttccaactacaggctcagggagacgactcttgatattcataggtatatatttactttaatcatattttagaaatcagctcttcc

SEQ ID NO: 1030899 - DNA, 120 bp, Artificial Sequence
  ENSG00000286859_8 (sequence is synthesized)
ctatcttccatacaatggaaaaaggcttttgtgttcttttgggcaaagaagacccaaatacgctgagagaagacgcatgggcgtgttgctggagtgatgctggaagcacttctttgctac

SEQ ID NO: 1030900 - DNA, 120 bp, Artificial Sequence
  ENSG00000286859_9 (sequence is synthesized)
agacggttgctaagagaacagagtcactttctccccttcagcctggaagtccaactcttctcttgcttaagaatctaacctcgggatcttccaagatgcttaaggctgctctgctgttgc

SEQ ID NO: 1030901 - DNA, 120 bp, Artificial Sequence
  ENSG00000286859_10 (sequence is synthesized)
ctggtccttggcagcagcaacaagctctgcgagagctgagaagctttttatgtcacttgcttgtagtcccaacttttgtatctgcaaaggccatgagaatgaattatgttactgcaattc

SEQ ID NO: 1030902 - DNA, 120 bp, Artificial Sequence
  ENSG00000286859_11 (sequence is synthesized)
aagctgaatatggggggggaaaaaaaagaaagaaaatcttcatcctctactaaaccagaagacagttccctgaagacttgtaggatattttttcctctagagcaaaggatttacttgttg

SEQ ID NO: 1030903 - DNA, 120 bp, Artificial Sequence
  ENSG00000286859_12 (sequence is synthesized)
taaaatgtgaggattttggggtcaaacacttagcattctaagaagccagtatgttaatttatctcagttcatcaaatcagacagaataaaagcctcttttgtgggcctaaaaacattcta

SEQ ID NO: 1030904 - DNA, 120 bp, Artificial Sequence
  ENSG00000286859_13 (sequence is synthesized)
gaaaagaaaatccacactagaggaaataaaaaagtgaacttttaagtagagaattttcaaaaaagtactggtctgtgctcttagtttcttaacatattgccaaaaaccttttagaatcag

SEQ ID NO: 1030905 - DNA, 120 bp, Artificial Sequence
  ENSG00000286859_14 (sequence is synthesized)
atgagttgaaaacactttgtttggcaaagcaactaccgtggattattttggtcaccgagacatggcacactacgttcccacttttgtttaaaaacgacaataacaacacacacacacgta

SEQ ID NO: 1030906 - DNA, 120 bp, Artificial Sequence
  ENSG00000286859_15 (sequence is synthesized)
tacatccatacacgcacacacacacacgcaccacacacacgcacagagaaagatccgggaagatacacaccaagtctctgtcagcattttgtggtttgttctggggaccgagactgcggg

SEQ ID NO: 1030907 - DNA, 120 bp, Artificial Sequence
  ENSG00000286859_16 (sequence is synthesized)
agcaccttttccttcccctctctttccttttagttccctatcccactctccttccttccttccctttcttttgctcattggctcttcacgtttctataacatactttcttgcttgtaaaa

SEQ ID NO: 1030908 - DNA, 120 bp, Artificial Sequence
  ENSG00000286858_0 (sequence is synthesized)
atgcaaattcaacctaatttgtcatatgattaaaacccaaggaaaaagaagtctcgttgtaagcgaatgcaacattttctactttagtgaagcgtcattgggaagagaactcccttggct

SEQ ID NO: 1030909 - DNA, 120 bp, Artificial Sequence
  ENSG00000286858_1 (sequence is synthesized)
cagggagctttgctgaaccaagttgttcctgttgggctttaatgtcaaagcaatgcagtctagccacttggagccaagggtcctagactcagactcttgaattctccaaatagtaagcat

SEQ ID NO: 1030910 - DNA, 120 bp, Artificial Sequence
  ENSG00000286858_2 (sequence is synthesized)
tcagaggaaactctccaattagatttctctgctacaaattactaacaacaattgctgccactatagcaaggctgacttcattctgcaccactttcagcaggtgacggttaatcacgacct

SEQ ID NO: 1030911 - DNA, 120 bp, Artificial Sequence
  ENSG00000286858_3 (sequence is synthesized)
tcctggattgtggaataaaaagagaagagctctcatatccatgaaaaagaacttgaatccatctcaacttacatccttcaaaattgtctgaaatctcttcttcgctcatgcatcctcata

SEQ ID NO: 1030912 - DNA, 120 bp, Artificial Sequence
  ENSG00000286858_4 (sequence is synthesized)
aagatggttagttgtgataatcatgctttctggaccccaaattaagatgctgatttgactagagcaggattttcgtgcttattttttgataaaagaaataatgtggaagaaaaatattaa

SEQ ID NO: 1030913 - DNA, 120 bp, Artificial Sequence
  ENSG00000286858_5 (sequence is synthesized)
gtacattaaatacagggtaattggtggttgtaaggaagtaatacagcatatgacttgaaatcaaagctgttttggaatataaggcatatataggacatatactttatatgaacataggag

SEQ ID NO: 1030914 - DNA, 120 bp, Artificial Sequence
  ENSG00000286858_6 (sequence is synthesized)
acacccacatatgccttctgtgaacatgaacatagaatataggtgcactctgcctctggggtaactgaggttactaatgatattctattctagttactctggtaatttccattgtcacac

SEQ ID NO: 1030915 - DNA, 120 bp, Artificial Sequence
  ENSG00000286858_7 (sequence is synthesized)
attccatacctccaggggaatccaaatggcatatacataaatgcaagtagatgataaagaaatctgaatcatgtgtctgctttgtgggcaatactcagcttttacatgcctttggaaatg

SEQ ID NO: 1030916 - DNA, 120 bp, Artificial Sequence
  ENSG00000286858_8 (sequence is synthesized)
cacagctgtctaattttcaactggggattatggggtttaatctgcctgcctggcaatttttagagcttccaaggtaatttttatgtgtagacaaagtccagagttgctcttctgtgtgaa

SEQ ID NO: 1030917 - DNA, 120 bp, Artificial Sequence
  ENSG00000286858_9 (sequence is synthesized)
ataaagatagagttctgtctcttgaaaacactcagtagtctcttcacaaacacagccccataaaaacctaatgaaaaagagaagaaaagatagggttgacttcactgaagttccgtacac

SEQ ID NO: 1030918 - DNA, 120 bp, Artificial Sequence
  ENSG00000286858_10 (sequence is synthesized)
ccacggcagagtttctgatgggactctgtgttttactttttgaggatataagcatttgctatgttttaaggatgattcatctgctatactctactctggagatgtatggtttcttcttac

SEQ ID NO: 1030919 - DNA, 86 bp, Artificial Sequence
  ENSG00000286858_11 (sequence is synthesized)
ctgctatactctactctggagatgtatggtttcttcttacactgttggtgggagtgtaaattatttccatctagaatcagagatac

SEQ ID NO: 1030920 - DNA, 69 bp, Artificial Sequence
  ENSG00000286858_12 (sequence is synthesized)
attctactataaagacacatgaacaaaatgtccatcagtgatagactggataaaaaaaatgtggcacat

SEQ ID NO: 1030921 - DNA, 63 bp, Artificial Sequence
  ENSG00000286858_13 (sequence is synthesized)
atgttctcactcataagttaattgggaggtgggcggtaaggggagggagagcattaggacaaa

SEQ ID NO: 1030922 - DNA, 85 bp, Artificial Sequence
  ENSG00000266237_0 (sequence is synthesized)
cctctttgaccagttctgctttaattttaatttttggtaaaatagtaatattcttttttgttttttgagacggagttttgctctt

SEQ ID NO: 1030923 - DNA, 120 bp, Artificial Sequence
  ENSG00000266237_1 (sequence is synthesized)
gcgagactctgtctcaaaacaaaacaaaaaaaacaaacaaaaattatatatgtatattttttaatgggtattttatttaaataaaaatactgaatgtagtttagcattttcttgatgaat

SEQ ID NO: 1030924 - DNA, 120 bp, Artificial Sequence
  ENSG00000266237_2 (sequence is synthesized)
ttgattctaggtcctgaaacagtcattttctctgttactgtatctgtcaataatagccactccttccctttctagtttggtttaactgctgtgggttgagaatgtagattagcaggtttt

SEQ ID NO: 1030925 - DNA, 120 bp, Artificial Sequence
  ENSG00000266237_3 (sequence is synthesized)
ttacataagaatctattttttctgtatgaaccaaagagtcaagattaagattttaatgttgaatactgtaatatttatttagtttgaaatttcagataaatgggttatttattgaatcag

SEQ ID NO: 1030926 - DNA, 120 bp, Artificial Sequence
  ENSG00000266237_4 (sequence is synthesized)
ttatttattgaatcagttgccaccttagaaatatgaaatgagtgtcatctgggcagctgaccagttaggtttatagtatagaatgtgcataaaacacattaggttataactccagtcata

SEQ ID NO: 1030927 - DNA, 120 bp, Artificial Sequence
  ENSG00000266236_0 (sequence is synthesized)
aagactttgttaaaattctggcggaactgttttaattggtctctgaaaacaggtccctgcaggtatttagatcagtggtagatgaggcagagaggtcagctctcagggacaatctttaag

SEQ ID NO: 1030928 - DNA, 120 bp, Artificial Sequence
  ENSG00000266236_1 (sequence is synthesized)
ggcgccaatgtccctcacaggcccctgacttgaaattctagcacgcagacgcctctggaaaggtccccaccccataggcacaggctccctgtggggtgatgtggcaggggtgttgaagga

SEQ ID NO: 1030929 - DNA, 120 bp, Artificial Sequence
  ENSG00000266236_2 (sequence is synthesized)
tgagggatagaagggtcctcagcacggccatccttcactctcagaggaagggcccaggggccatctgcttacgttgacaaaataaaacatgcgcggtgggctgtcagaagaaccatgtcc

SEQ ID NO: 1030930 - DNA, 120 bp, Artificial Sequence
  ENSG00000266236_3 (sequence is synthesized)
tacctgtgtttccagccatctcacagcatctaatgtgatgccacagccatagttttagaggctcagtttttctattaagggttttttcaggcatcctcatgtaaaaggaaatacagaaag

SEQ ID NO: 1030931 - DNA, 120 bp, Artificial Sequence
  ENSG00000266236_4 (sequence is synthesized)
tggttctcactttcagttgatctcattgcagaataaacaattgtcatataaatgtagctgggtacaatggctcagacctctaattccagccactcaggaggctatggctggaggatcact

SEQ ID NO: 1030932 - DNA, 79 bp, Artificial Sequence
  ENSG00000266236_5 (sequence is synthesized)
tgagcccaggagtttgagaccttggcaaccagtgtatatttcatcatcctatctctgtgagcttgttatacacaaaagt

SEQ ID NO: 1030933 - DNA, 120 bp, Artificial Sequence
  ENSG00000266013_0 (sequence is synthesized)
acacccctcccctccccttagcgaggaaagatttgggatcctgtttgaagggaattctaaaagttctgctctccaaacttcaaataaggggtcagagacatgggtcaagacttcaggaaa

SEQ ID NO: 1030934 - DNA, 120 bp, Artificial Sequence
  ENSG00000266013_1 (sequence is synthesized)
agaatgaaacaaattatcctccaaattctgctgcttgttttgaattatgtttacgctggttatgttaccagtgagtttttatctccacatacttgaattaaaccgtgtagttcttcttta

SEQ ID NO: 1030935 - DNA, 120 bp, Artificial Sequence
  ENSG00000270117_0 (sequence is synthesized)
ctgagccccgggggccgttggctgccagtggcccactctgatctgcggccccccagttgccgccagccccccacggcccgcacggaaatttttctaccgtttttcagcttccaggctctc

SEQ ID NO: 1030936 - DNA, 120 bp, Artificial Sequence
  ENSG00000270117_1 (sequence is synthesized)
gagttcaagtggccttttaaagtagaccaactaagcgaatggctttgtctccgaagacacagagaccttgggcagccagtcagggacacacccagaagtgtttacactgctctgggtctg

SEQ ID NO: 1030937 - DNA, 120 bp, Artificial Sequence
  ENSG00000270117_2 (sequence is synthesized)
cttttttaggggtttttgttttgcagattctgtgttatgcctggttaggtatgagcttcagaccttctgaaccggagcaggaagaaaaataaaagctttcctccaaaccccaagaccaaa

SEQ ID NO: 1030938 - DNA, 120 bp, Artificial Sequence
  ENSG00000261376_0 (sequence is synthesized)
ctgagaatataaagaaaaataagatatggaggaattctgccctcaagcatgctagtgtctatttgggaaaaacagacaaataaataatacatcaagaaaaagcagcaagccccatgcgat

SEQ ID NO: 1030939 - DNA, 120 bp, Artificial Sequence
  ENSG00000261376_1 (sequence is synthesized)
agtctcagctcaaatgtcagctcttcatagaggactcctcagatgactgttctaaagtatttccttttcccagtcattgtctctaaaacaaagctagattcaaaatggtcttcactatct

SEQ ID NO: 1030940 - DNA, 120 bp, Artificial Sequence
  ENSG00000261376_2 (sequence is synthesized)
agtgaaagctccactctagcagaaacctaccttctttgtctatagacaaatctccagggcctggaagtctacctggcactgttatgtagtaggcatataacaaatagttattgaatgacc

SEQ ID NO: 1030941 - DNA, 120 bp, Artificial Sequence
  ENSG00000261376_3 (sequence is synthesized)
caatcaatcattcagtccaagattataatatcaaccagatatgtgccttcatgttattttgtcatgaggaacaaaactttctctacatagtaaaataaactaatcaatcatgtggatgct

SEQ ID NO: 1030942 - DNA, 120 bp, Artificial Sequence
  ENSG00000272141_0 (sequence is synthesized)
cggagccccaccccacagccccagccccctcgccacctggggaggctgagacagaagcagctgggccccccaaagtgcctgagcccagggcacggaggagcacaaatgcccagcagggac

SEQ ID NO: 1030943 - DNA, 120 bp, Artificial Sequence
  ENSG00000272141_1 (sequence is synthesized)
aatgtcacagcgtctcagcggccaggcagcaggacgcagagacctctgggaggttcccggggccagccctggccctcctcctccaggggccagccgtgggatgcagaccacactctccct

SEQ ID NO: 1030944 - DNA, 120 bp, Artificial Sequence
  ENSG00000272141_2 (sequence is synthesized)
ccagggcccatctctggggctgaggcgggcggggccggtgcccagctgcaagaccatgggatagggaaggcaggtgcttggggccacgcagccctgcactgggggcccctccaccccagg

SEQ ID NO: 1030945 - DNA, 120 bp, Artificial Sequence
  ENSG00000272141_3 (sequence is synthesized)
cggctcacgaggtgtcatctggagctgtccccaagccgggatctgcaggttgacctcccccacccggggctatctccagaccctctttcctccctggggagatggggcagtcccccgcag

SEQ ID NO: 1030946 - DNA, 120 bp, Artificial Sequence
  ENSG00000272141_4 (sequence is synthesized)
tgccgcctgagcgacgtgtgtggggaagaacttggagtgccacccccagaatgtggcgtccacctcaccagaccgcacgggtgagccctggactgcaaggtgcatataacacaaggtttg

SEQ ID NO: 1030947 - DNA, 120 bp, Artificial Sequence
  ENSG00000272141_5 (sequence is synthesized)
gacacacctggagagctcgggccaggcagggccacacctgtgagcctgagctcatccaacaccgcccggagctcggggaccttccccatcccagcacctcctcaccgctgtgcccgtctg

SEQ ID NO: 1030948 - DNA, 120 bp, Artificial Sequence
  ENSG00000272141_6 (sequence is synthesized)
gccagtccctccaagcacccctcggatgaagttgcgccccacactgcagtggggctcactctccacagcgcctgctgcgttgcacggggtgtgacaggaaggaccctgctggggctggcg

SEQ ID NO: 1030949 - DNA, 120 bp, Artificial Sequence
  ENSG00000272141_7 (sequence is synthesized)
gggccgtacccagagcctccctgtgcggtttctcctcctcctcctcctctccataagcaccgggaacaaaacagaaaaaagtctttgtatagtaataaagtctgcagttcacgcacccat

SEQ ID NO: 1030950 - DNA, 120 bp, Artificial Sequence
  ENSG00000225063_0 (sequence is synthesized)
agacttttattaaagttcccagcatggcgtgccctctctctgcctctttgcatcctacccatccttcaccacctcgccactccataaagccctctctgatcacaccagtctgcagcgatc

SEQ ID NO: 1030951 - DNA, 120 bp, Artificial Sequence
  ENSG00000225063_1 (sequence is synthesized)
tcgccctgctctgaacacataagcgctcattatctgcaccactcattttgcaattaatcgtgtactgccttgtgacatcgcttctagtgctttgtctgactgttatccaacttctcacct

SEQ ID NO: 1030952 - DNA, 120 bp, Artificial Sequence
  ENSG00000225063_2 (sequence is synthesized)
tggcagaggcctcaacaccaacatggaagacagctaggtatacttcaattctacctcctctgataaaacttatcccaggcgtccggctcccacctgagattgcaggaatcttcaagcctt

SEQ ID NO: 1030953 - DNA, 120 bp, Artificial Sequence
  ENSG00000225063_3 (sequence is synthesized)
aacatatctactgggcctcaagatgcagcaggccctcagagagccatcgcaaccatcacaacactcctggagagccccagggaacgtacatatcttcattccacctacgttcttatgaag

SEQ ID NO: 1030954 - DNA, 120 bp, Artificial Sequence
  ENSG00000225063_4 (sequence is synthesized)
tagcttgtcttctccttcatttaaaaaatgaagaaactctccactctcactgcttcatttgactaccctttaaaaaaaaaaggagaaactgagacctataaattttatcaaaaccctgag

SEQ ID NO: 1030955 - DNA, 120 bp, Artificial Sequence
  ENSG00000225062_0 (sequence is synthesized)
ggtgaccacgtcctccggctggcgcagcagcaggaagagcaggaagtcggagatgagcgcgtgggcttcggggtgctgccgcagatagctggcgtggccgagccggagctcctcctggca

SEQ ID NO: 1030956 - DNA, 120 bp, Artificial Sequence
  ENSG00000225062_1 (sequence is synthesized)
ggggacagagcccgagcctcagccggacgggacccccgcgccccaggagcccccagccgctcgctccaaggagagctaaggggcgctggagccttctagcccctacgggtgtgcatttca

SEQ ID NO: 1030957 - DNA, 120 bp, Artificial Sequence
  ENSG00000225062_2 (sequence is synthesized)
atcaggtgcctggagtgcaacacaacatgtgagagtgagaatcttcccagaccgcctgctatggactgaattgtctctctaacccccagtgtggtggtatttggagaaaggccatgtgag

SEQ ID NO: 1030958 - DNA, 120 bp, Artificial Sequence
  ENSG00000225062_3 (sequence is synthesized)
gacacattgagaaggcacttgtctgcaagctaggaagacagccctcaccagaaaccaaccctgatggcaccatgatcttggacttcctgccttccagcaaatatatttctcttgaagcca

SEQ ID NO: 1030959 - DNA, 120 bp, Artificial Sequence
  ENSG00000225062_4 (sequence is synthesized)
attctgcccacatgggcagagttgcaggaagggacttccagtaggaaagatcctcctcttattgcttggggtcaggggctggagggcagatgttctccagctgattccaggctcctgtcc

SEQ ID NO: 1030960 - DNA, 120 bp, Artificial Sequence
  ENSG00000225062_5 (sequence is synthesized)
cgtttacagcacactgggtccagccccctgcatcctggaaggcccaggtttccccactccccttaactctccctgcctgcacaaggcctgggcttcactcaccctcttccctcaagatgg

SEQ ID NO: 1030961 - DNA, 120 bp, Artificial Sequence
  ENSG00000225064_0 (sequence is synthesized)
cccagatcccatgaggtggcagtgtcaccattgccccagcccagagtcatttcaaggaggagcaggtcacttcctgattcccaaagcatctgcctgtaccattgaaaacttattcctgct

SEQ ID NO: 1030962 - DNA, 120 bp, Artificial Sequence
  ENSG00000225064_1 (sequence is synthesized)
cagtggtctaaaaagcgatgctgtccattctcagaaatggagcagaaaggcaagagaaaggaagctgatattttgaatgtccactacctggcaagtactggaccagccacttgcatatac

SEQ ID NO: 1030963 - DNA, 120 bp, Artificial Sequence
  ENSG00000225064_2 (sequence is synthesized)
tagcatctccattttgctgatgaaggaacggagcccacacactgaggaaaggccatatgagcacacaggaagaagactgccatctgcaaatcaggaagacaatcatcatcaagaacttac

SEQ ID NO: 1030964 - DNA, 120 bp, Artificial Sequence
  ENSG00000225064_3 (sequence is synthesized)
catgctggcaccccgaacttgggcttctgttgtttaagccacccagtctgatattttcttatagcagcccaagctgactaagacaggcagtcaagaattaaaatctgcttggaggagcac

SEQ ID NO: 1030965 - DNA, 120 bp, Artificial Sequence
  ENSG00000283436_0 (sequence is synthesized)
ctcacatttctctgtccctcctctatttttcacttacaatctatttattatgattcaaactttaaactagaggagatcattaatcatggatataatttagtgacagcagggtcatgtccc

SEQ ID NO: 1030966 - DNA, 120 bp, Artificial Sequence
  ENSG00000283436_1 (sequence is synthesized)
actaaggctcatgtggttacgctggagctaccccagataatcctagggctccttctgccttgtggctgaccctagtgttgctcatgcagccctgcatgccatggcatgccatatgtctgc

SEQ ID NO: 1030967 - DNA, 120 bp, Artificial Sequence
  ENSG00000283436_2 (sequence is synthesized)
tgtttctacagatctggcttaaaaaaatctaagcaaagatggtacttcatggacccaagatattaccttattctgcaaacaaggactttaagcacaaagaaggaaatcatagtagaagtt

SEQ ID NO: 1030968 - DNA, 120 bp, Artificial Sequence
  ENSG00000283436_3 (sequence is synthesized)
tcaactgtcaacttctgcttaggatatccttaataaaaccttcatgtcgagatttgtgaaacaactgacgaaatcactggcctgaagttgcaaacaaagtattaatcaaggcagccccac

SEQ ID NO: 1030969 - DNA, 120 bp, Artificial Sequence
  ENSG00000283436_4 (sequence is synthesized)
tgtggcttaataatatcaatgacagacacttcttggcaatcaaggatcctctgatgatcatctaatcaaacagcactgattctatcacactatggctttggttgagcttaacagagaaga

SEQ ID NO: 1030970 - DNA, 120 bp, Artificial Sequence
  ENSG00000283436_5 (sequence is synthesized)
ggattcatccataaccaaacaggttcaacagaaccttgaaaatcaaaggaaagtgcaaaagaaagtggttctaactttgaattgtggcatcaaggaacagtaaataaaataaattgaata

SEQ ID NO: 1030971 - DNA, 120 bp, Artificial Sequence
  ENSG00000283436_6 (sequence is synthesized)
acaacttctgcagagctgagaagtctcaaagtttccttcatctaagaatatgttaaaatgacattgatggggtccagcatattggagcctgaaatctgacttcttcacgtgaaggtgtgg

SEQ ID NO: 1030972 - DNA, 120 bp, Artificial Sequence
  ENSG00000283436_7 (sequence is synthesized)
gtattaatttggttaatttctaatgatcatccataataacttacaaaagagtttgaataatgaaacaatgtaaaaagaaatttggttccaaaaataagcctttctaagacagaaaatgtc

SEQ ID NO: 1030973 - DNA, 120 bp, Artificial Sequence
  ENSG00000283436_8 (sequence is synthesized)
aggcttaattagtatactgggtgattatgacatctagctcgtttcattaccttcctaatgtattattagttggcagttaaatactgtctgctgggacctaagagtttttcctcttgtctt

SEQ ID NO: 1030974 - DNA, 120 bp, Artificial Sequence
  ENSG00000283436_9 (sequence is synthesized)
tctggtcatacttattgcctaggccgacagcttacctgtagtgaggaagaaatggaacaccaattagaaagctttcagcccagcacccatggaaaagccaaaagctgataaaggtcagcg

SEQ ID NO: 1030975 - DNA, 120 bp, Artificial Sequence
  ENSG00000283436_10 (sequence is synthesized)
tgaaatttgaatgacagggctaaagtcttttactcataattttgtgtttgcaatagaattcagagcaattcacagccttaaaggccttaagtgagaacagcaattaattgtaatgaataa

SEQ ID NO: 1030976 - DNA, 120 bp, Artificial Sequence
  ENSG00000283436_11 (sequence is synthesized)
tctgacaaatctggttgacatatggctgctaatgccctcctttctagtgggagcagtggagggattagattaactcaaatgaaatctgggaccgccatgccatctgcatgttcagtagga

SEQ ID NO: 1030977 - DNA, 120 bp, Artificial Sequence
  ENSG00000283436_12 (sequence is synthesized)
aacggtacacgttaaatggtgagtgggtagatatctgtcttgtactcatctctctctgagcccttggcagatctgggaatagcagttttattactgcaccagctgcctgtcaatagagta

SEQ ID NO: 1030978 - DNA, 120 bp, Artificial Sequence
  ENSG00000283436_13 (sequence is synthesized)
atacaggaacggcatgaagtgcaacctagaaagctaatataccaggaagctgttaaaaattaactagatacaattaacatggacttctaaatttctctgtttatacaatgcatatttata

SEQ ID NO: 1030979 - DNA, 120 bp, Artificial Sequence
  ENSG00000283436_14 (sequence is synthesized)
ttttgattttgggtttgcctcattgaatgttcggtaattaaacaatgtcatttccatctgccctatttatatgttctacctgaagatacaagtggcaggtagagattgaatttcatatat

SEQ ID NO: 1030980 - DNA, 120 bp, Artificial Sequence
  ENSG00000283436_15 (sequence is synthesized)
tctcatgagttaataaaactttcacttttccattattttgagggtcaggtagagaattattaaatgaaatctacaaataatccctgaactcatttagaaagccccacctccttccctcaa

SEQ ID NO: 1030981 - DNA, 120 bp, Artificial Sequence
  ENSG00000247809_0 (sequence is synthesized)
agtgtcatgggacagtgggccctggtgccacaatgcccggcatctccaccagatacagctttgagatcttcatgatgaagcttgctccaatccaagggctgtcaggtggggtttgcggtt

SEQ ID NO: 1030982 - DNA, 120 bp, Artificial Sequence
  ENSG00000247809_1 (sequence is synthesized)
cagctgctaacctttctttgatccaaatcctgtcttcactggcttcaagaatcctgtcttcactggcttcaaaactgggatgaaggaggctccttagtggagagcaaagcaaagagaaac

SEQ ID NO: 1030983 - DNA, 120 bp, Artificial Sequence
  ENSG00000247809_2 (sequence is synthesized)
ttggaatgtagaattgaagcagtaattaacatcttggtttcatctgggtgtttggcatcatgttcagaaatgtgaaaaataaaattcagcaccgttattactgaattagataaaatgatt

SEQ ID NO: 1030984 - DNA, 120 bp, Artificial Sequence
  ENSG00000247809_3 (sequence is synthesized)
gtatttaattaatccgtaaatattaactaattattctgtttaccataacatgtaatgaatataattctccaccaggcaaataaagaaagaaagatgtaattaggtgatttaagcataaaa

SEQ ID NO: 1030985 - DNA, 120 bp, Artificial Sequence
  ENSG00000247809_4 (sequence is synthesized)
agggaaacgactttggactcacgtaggcataggagaacgaaacttctgtacattttaatctgaataattcttcaggatttaaaattaattggctctggcttggttggaccgtactcggat

SEQ ID NO: 1030986 - DNA, 120 bp, Artificial Sequence
  ENSG00000247809_5 (sequence is synthesized)
ctcgccacctctgcgtttcccgagtcactggcgaagaggtcccagttcctctgggaatcgtcctgtatgcaacatcttcacaagagtggcaggcagttgaatctctggccttcgtgggac

SEQ ID NO: 1030987 - DNA, 120 bp, Artificial Sequence
  ENSG00000247809_6 (sequence is synthesized)
cactggacatctggcagagaaccaggaaaccacggttcccttctgtgagtccctcagccggaaaactacaaggtgtgtgactgtaggatgaggctttttgaaagatgaagtacgacactt

SEQ ID NO: 1030988 - DNA, 120 bp, Artificial Sequence
  ENSG00000247809_7 (sequence is synthesized)
tgagaaagtgtttggaaagaaactggctgatgtcgaatggaaatctgaacattcacagatttcttttcctagatatagaaacgcaaaagcttacatgtacacatttaaaaaaaattaaat

SEQ ID NO: 1030989 - DNA, 120 bp, Artificial Sequence
  ENSG00000247809_8 (sequence is synthesized)
gtaaaactgacactgtcatattgctgataggatatattagcaaaatccttttggaaattcatttgcagtgtgcatcaagggcccataaaaatgtatgagaactatgtgataataaggaaa

SEQ ID NO: 1030990 - DNA, 120 bp, Artificial Sequence
  ENSG00000247809_9 (sequence is synthesized)
caggatatgcactcttaatgcttataaatacataggcaaaatatacgtagtcatactaataggtaatatttattgtctacttaatatatgacaagcacaatgccacatgttttacaggca

SEQ ID NO: 1030991 - DNA, 120 bp, Artificial Sequence
  ENSG00000247809_10 (sequence is synthesized)
ttgtctcatttattttgtacacagactttgtgtggtggatattattatatctccattttatagattaaaaaagagaggcctggggagactaattggtttatttggagtctagtgtgagat

SEQ ID NO: 1030992 - DNA, 120 bp, Artificial Sequence
  ENSG00000247809_11 (sequence is synthesized)
ttcaacccatcctaattgattacagagcttacactattaatttataataccttatcattcctcataatatgtggttataagtaaaaaacaaacattaacaaccaaaaaaaaaaaaaaaaa

SEQ ID NO: 1030993 - DNA, 120 bp, Artificial Sequence
  ENSG00000247809_12 (sequence is synthesized)
taattgactatgtaataaagagagaagctttgctagctcctcatgcagctgctgtctacagaccccctggactgcctggggaagtgagtcggagctcctgcagcagaggggtggaacagc

SEQ ID NO: 1030994 - DNA, 120 bp, Artificial Sequence
  ENSG00000247809_13 (sequence is synthesized)
atggatgaacgggggcaattggaatgtagaattgaagcagtaattaacatcttggtaagttacccaccataaaacgctttagagcaagatagatttttgtttttcttttttttttcttct

SEQ ID NO: 1030995 - DNA, 120 bp, Artificial Sequence
  ENSG00000247809_14 (sequence is synthesized)
tttttctctaattttgagatcctcatggatgaaaacaaaacatatattgaaatattgcataggaagaacacaaatagctttgataatgcaccaactgcaagtggattcattggctctgtg

SEQ ID NO: 1030996 - DNA, 120 bp, Artificial Sequence
  ENSG00000247809_15 (sequence is synthesized)
tcagctggtgcatgtaggaagctgaagaatattttcttgccaacgttttggcaagacttattttttcccggggggtgggcgcaagggtgcaatccaataataattaaaaaaaagactgta

SEQ ID NO: 1030997 - DNA, 120 bp, Artificial Sequence
  ENSG00000247809_16 (sequence is synthesized)
taaccattgtgtaggaagagcttcagccaccctacagccgagagcgagttggtcttccacaagtcactgggggagatgaagggtacactgtagtcaggtggagtctctttgggcctaaaa

SEQ ID NO: 1030998 - DNA, 120 bp, Artificial Sequence
  ENSG00000247809_17 (sequence is synthesized)
tcactataggacacttttccaaagtaccctggtgtcttcagtgatcctgagtgctggcacttgcactttgtcactacatccatcccagagctgccccagtggctggaggcctcttgaata

SEQ ID NO: 1030999 - DNA, 120 bp, Artificial Sequence
  ENSG00000247809_18 (sequence is synthesized)
tcagcatcatgctctcccccaacctaggggattcgttttcctcccctgcagtagacatttgcgtgaaggttaatccacagttaggagttgcttaactcaagcctcagaaagcgtacactg

SEQ ID NO: 1031000 - DNA, 120 bp, Artificial Sequence
  ENSG00000247809_19 (sequence is synthesized)
catctttaagaaatagtttacttgtgaatcagtaaacgtactagacaaagcagccattacttatgcattcctgcatatccagcaaggtgaaaataatagaataaacatcatatacttcat

SEQ ID NO: 1031001 - DNA, 120 bp, Artificial Sequence
  ENSG00000247809_20 (sequence is synthesized)
tatgatatcggtttacacttccagggtacacaaaaagaggccatttcatcaagctaattgcctgaaagtaaaagagagagaactttagctattagtctattatggggcttttttcttaat

SEQ ID NO: 1031002 - DNA, 120 bp, Artificial Sequence
  ENSG00000247809_21 (sequence is synthesized)
cacaaataggggccgtgtgtccctggggggatgtgtattctaatttacaattgaactacagatcagagcaatcaatcttgggcagcacttttacagtgtaattgctgcaacataacaaat

SEQ ID NO: 1031003 - DNA, 76 bp, Artificial Sequence
  ENSG00000247809_22 (sequence is synthesized)
ggcttactgcaacctctgcctcccaggatcaagccattctccttcctcagcctccagagtatctgggactacaggc

SEQ ID NO: 1031004 - DNA, 120 bp, Artificial Sequence
  ENSG00000247809_23 (sequence is synthesized)
ctgcctgggcctcccaaagtgctaggattcccagcatgagccaccgcacctggcctgtatctctaataatttaaatactgatgcagtttcttcagagtgttgtctacacctggaaaactg

SEQ ID NO: 1031005 - DNA, 120 bp, Artificial Sequence
  ENSG00000247809_24 (sequence is synthesized)
tgtctacacctggaaaactgaggtcggtaaagtaagcaagtataatgcataatttagtttcaatgttttcattaatatgataccataccattgtgaacacttgtatttggttgcatggct

SEQ ID NO: 1031006 - DNA, 120 bp, Artificial Sequence
  ENSG00000247809_25 (sequence is synthesized)
aacaactaccttttggatttttcatgttagaatgaaaaaaatgcatggcatacatcaccaagaatcaaaggttgtgcctggcagtgtaattgactatgtaataaagagagaagctttgct

SEQ ID NO: 1031007 - DNA, 120 bp, Artificial Sequence
  ENSG00000247809_26 (sequence is synthesized)
aggtgagtggacagcataatgagaggctttgttcacatctgcagaaatgcattttcgttaaacacctgtgttaagcacaagcacataaggcacagtgatagatggatgtaaaacatgggt

SEQ ID NO: 1031008 - DNA, 120 bp, Artificial Sequence
  ENSG00000247809_27 (sequence is synthesized)
agatgatgtccttgtatgagattctacaaagactccgatgtgttgaggtttggaagcattcaggcagcctcctggcactattggctatgctgctaatgagattacaggcagggcatgatt

SEQ ID NO: 1031009 - DNA, 120 bp, Artificial Sequence
  ENSG00000247809_28 (sequence is synthesized)
tcattccatgtaatatttttgtcattaggaagaggcaagttatttttacctgtcaatttctgttttttgaaattgaaaaattctcaggtacgaatcccaaaagactttacatgcaacctc

SEQ ID NO: 1031010 - DNA, 120 bp, Artificial Sequence
  ENSG00000247809_29 (sequence is synthesized)
catgtcctattcaggactgttcaaggagaagacagaaacaccatgtttagaggtcattggtccatctactctagaaacttccccttggcagtggtccctgcctatgttacagaagacggc

SEQ ID NO: 1031011 - DNA, 120 bp, Artificial Sequence
  ENSG00000247809_30 (sequence is synthesized)
aaaaatacgagccatcgtgcatctggccagttctgcaatgctctatcccagggggaaattccttcctcactccagctggtgaacagctatgccctggagcccaggacggacatgccttgt

SEQ ID NO: 1031012 - DNA, 120 bp, Artificial Sequence
  ENSG00000247809_31 (sequence is synthesized)
aactttttaacttagttagtgtaactaccaatattattcctattcatataaatgtctaatcctttcttgaatcttgctagactatttgcctcaataatatcctgcggcactgaattccac

SEQ ID NO: 1031013 - DNA, 120 bp, Artificial Sequence
  ENSG00000247809_32 (sequence is synthesized)
aggtagattatacgctgctttaaaaagtatttccttttcttggttttaaatttgttgctttttaatgtcacaaaatagcccttgttcttgcattaagtggcacaggatagaagcattaca

SEQ ID NO: 1031014 - DNA, 120 bp, Artificial Sequence
  ENSG00000247809_33 (sequence is synthesized)
aatggacccttatttcttccaagcagtttcttcactaatattaaaaccctattttcttcatatattttctattttggcatatataatcttgatttaatgaaatgatttatgtaattagtc

SEQ ID NO: 1031015 - DNA, 120 bp, Artificial Sequence
  ENSG00000247809_34 (sequence is synthesized)
tcacactattttatgaacatagtaggcactggtaaaaagctttccttggcattcagtgtcatttattggacaaatatttattgagcatctattatgtgcaagaactgttctaattttgga

SEQ ID NO: 1031016 - DNA, 120 bp, Artificial Sequence
  ENSG00000247809_35 (sequence is synthesized)
gagtcagcttcacataagactgggtcatttttctgaaggacttacttttctagagaaggagataagcagtaatatagtgaataaatctatgaacctcatggtttcagatggtattaagta

SEQ ID NO: 1031017 - DNA, 120 bp, Artificial Sequence
  ENSG00000247809_36 (sequence is synthesized)
ttacgggaagattgaaaggtggctggagccgatttgcattgcacagtcagggagtggctctctgaaaagaggacagttgccatcagctgtcaaggagccccttatgtgaaatctccatga

SEQ ID NO: 1031018 - DNA, 120 bp, Artificial Sequence
  ENSG00000247809_37 (sequence is synthesized)
aggtgaactccagctccgaaacaatgcccagtagttgttgaggctcaatcattatttgttgagtgcataaatgaattaaggttgagaaggaaagccttagttactaaaatcaccaggaat

SEQ ID NO: 1031019 - DNA, 120 bp, Artificial Sequence
  ENSG00000247809_38 (sequence is synthesized)
atggtccccagcttaccagctgtgtgtccttgggcaagttacctaattgctctcatccacagaaccctcctttataaaaatgagagtaaactttcttccttcatgggagttggaggtttg

SEQ ID NO: 1031020 - DNA, 120 bp, Artificial Sequence
  ENSG00000247809_39 (sequence is synthesized)
aaggcaaagttaacgtggaagttctttttaaactgccaaatggtgtagaggtgtggttattcttgagggaaccagctgttcccagtgtcaggctctgctctttcatttttccctcgttcc

SEQ ID NO: 1031021 - DNA, 120 bp, Artificial Sequence
  ENSG00000247809_40 (sequence is synthesized)
cttcctcatgttctgcttccttccattccctagtttatccctgcccctgcctaaagcccaccagggcatccatgggacttagctttctgtcccggaggtggctcaagcagggtggacata

SEQ ID NO: 1031022 - DNA, 120 bp, Artificial Sequence
  ENSG00000247809_41 (sequence is synthesized)
cctttctgaaattcttatctatgtcttaggaacttttacagtggagctgttgtgtattgatgcagcggactggatgtggctttcgaatagtgattgtctgcttttattttgtttactgct

SEQ ID NO: 1031023 - DNA, 120 bp, Artificial Sequence
  ENSG00000247809_42 (sequence is synthesized)
taatctgctggggtcaagttaccgaaacttctacgtataaagacagtccttgcctgaatttccgagggaatcttgccccagaaatcaagcctttggttgcaacgggctgcctggctgcct

SEQ ID NO: 1031024 - DNA, 120 bp, Artificial Sequence
  ENSG00000247809_43 (sequence is synthesized)
tcggcttccctctgtgttccagcctgactggcatatgcatacactgtttcctcatgttgcctcttgttattctttttaattgtcccttaatgtacgttttttttttcgtttaggcaattt

SEQ ID NO: 1031025 - DNA, 120 bp, Artificial Sequence
  ENSG00000247809_44 (sequence is synthesized)
gaaatagagcatgtgcagctctgcataataatatatgataggaaacatttcaaggaataaattattagaattgtttacatgcatggttcaaatttactggcaaattgcttaggcctcagt

SEQ ID NO: 1031026 - DNA, 120 bp, Artificial Sequence
  ENSG00000247809_45 (sequence is synthesized)
tttatgatgtagctgccagctaggctccttcagggtgaaactctgaaataggagaagctgcccagcgctgtcccttcccagcacttcctctccttgttcctgccctttcaacacctccct

SEQ ID NO: 1031027 - DNA, 120 bp, Artificial Sequence
  ENSG00000247809_46 (sequence is synthesized)
cctttcccgcccccaaataactctgtggagctgccaggccttttgcaccttaatgtgaagacatttcgtgggtcctccccggacccgcccccagcaaaggtgaggtgcgcaaaggaataa

SEQ ID NO: 1031028 - DNA, 120 bp, Artificial Sequence
  ENSG00000247809_47 (sequence is synthesized)
atctccaatggtgtaattttagacactgtggcaactgggcagcgcggctatttttggccatggggctttctccttgacctgagatgatattgcctggctgctgccagtgcacccggccaa

SEQ ID NO: 1031029 - DNA, 120 bp, Artificial Sequence
  ENSG00000247809_48 (sequence is synthesized)
ccctgcacgcggtccttttcgcaacgtgtttgccattcctgggggctggcttcttcctctttctgtcaagcagctctgtgctcatgcacgatgctgtgtgtttgagcaagggtgtgaagc

SEQ ID NO: 1031030 - DNA, 120 bp, Artificial Sequence
  ENSG00000247809_49 (sequence is synthesized)
ggtcgacgcgtgcccacctaggcttgccccagggtgacactctcaggcagtggtcaggccacctctgaggggcaacgcagatggaacagacgtcctttcacattgggggtgggggaagat

SEQ ID NO: 1031031 - DNA, 120 bp, Artificial Sequence
  ENSG00000247809_50 (sequence is synthesized)
ttccggtccagtttctgggtctccctcagcctccatacttgatcagctgctcagcgaccattctatgagtcactccttctctgggtaaggcgagccaggcagcctccaggccacagggtt

SEQ ID NO: 1031032 - DNA, 120 bp, Artificial Sequence
  ENSG00000247809_51 (sequence is synthesized)
catgcattcccgcccacactgcttcatttgaagccgcatcctcacagagattcttctgaccacccggcttgctgtcttcccactcaagctcctcatgcagctgctgtctacagaccccct

SEQ ID NO: 1031033 - DNA, 120 bp, Artificial Sequence
  ENSG00000247809_52 (sequence is synthesized)
tcatcgctggggtagggtgtcttgttctttgttttacaacctaaaaagtacacagaagactcaaagatcattcaggaaggaggaatcaagtcagtacagaacagagaaatgggagcagtt

SEQ ID NO: 1031034 - DNA, 120 bp, Artificial Sequence
  ENSG00000247809_53 (sequence is synthesized)
aaaaacaaaggaattgagtttctttatgccaaaagagagaaaacagaggccttttatagatagagagagagccctggctatctggatggaagatctgttttctccagcttccatggccgc

SEQ ID NO: 1031035 - DNA, 120 bp, Artificial Sequence
  ENSG00000247809_54 (sequence is synthesized)
ggacacatctgaacatctgaaggaactcgggacacgccatctttaagaactgttaacactcactgcgggggtctgcggcttcattcctgacgtcagcgagaccaagaacccaccggaagg

SEQ ID NO: 1031036 - DNA, 120 bp, Artificial Sequence
  ENSG00000247809_55 (sequence is synthesized)
ccggaaggaaccagttccagacatactgggaccgtgtggatacgtcggttctgcataatggaattcataattttgttctatcaaacctgcaaaacagtaccagcacctatagatagcatg

SEQ ID NO: 1031037 - DNA, 120 bp, Artificial Sequence
  ENSG00000247809_56 (sequence is synthesized)
ttgtagaaaatggcaagaatatgtataaaaatggaaatggatcctaaccatctcaccttacttgctcctagagaagtccaacaggtgatggtcttgttttcccaagctgctacagagctt

SEQ ID NO: 1031038 - DNA, 120 bp, Artificial Sequence
  ENSG00000247809_57 (sequence is synthesized)
ctgcagctccaagcatgaccactatatttggctgcttaaaagcataacaagggcagaaatcataaaggctttgcccagagggccttgattgtccttgccttcttgtcctttggtgagaac

SEQ ID NO: 1031039 - DNA, 120 bp, Artificial Sequence
  ENSG00000247809_58 (sequence is synthesized)
ttcattggtggtggctccaaaaatcaggagactttctgtgatgaattcaccataagaacgtgggacccagcctcccttgaaggacgtcctatatgatgcctgtttccaagggaagaagta

SEQ ID NO: 1031040 - DNA, 120 bp, Artificial Sequence
  ENSG00000247809_59 (sequence is synthesized)
aagctactcttaggatcagtgtctgcatagatctggcacacagaaatgcaaggaaacaatttgtgcaaagcattaaaaaaaaaaggggggaccctgagagtataacaagtgctcctgaga

SEQ ID NO: 1031041 - DNA, 120 bp, Artificial Sequence
  ENSG00000247809_60 (sequence is synthesized)
gaggacagacggagaggacgcatgggcagggatggccgccctgagcagctgatgttcgagctaagatctgaaaggtgcatgatttcccacttacctcccgcaaccactaccacccacgtt

SEQ ID NO: 1031042 - DNA, 120 bp, Artificial Sequence
  ENSG00000247809_61 (sequence is synthesized)
gtccacagtattcagctgtctcagggaggatcacaattattctaatgggactgcaaagagtgaaggacacagcttttaacatcagattcgaatcctacaatttggaacccatgggcactt

SEQ ID NO: 1031043 - DNA, 120 bp, Artificial Sequence
  ENSG00000247809_62 (sequence is synthesized)
ctagattggatcttgcagagattttttacaacagaaataatggaaaggcaaaagaaaacattgagtaataaccaacccaagcaagtccagcctctttctgcagaagataatcaggatgac

SEQ ID NO: 1031044 - DNA, 120 bp, Artificial Sequence
  ENSG00000247809_63 (sequence is synthesized)
tctttctgcagaagataatcaggatgactccacctttgtacctgactgaggaacttagtgaaccctgaagaaatgatgattaaagagacaatgaagaggccaggcgcagtggctcatgcc

SEQ ID NO: 1031045 - DNA, 120 bp, Artificial Sequence
  ENSG00000247809_64 (sequence is synthesized)
tcctaaggccactaactaataaatgatgacatgagagtaaactgaagacttgcagtgccagggttggtgtggtcctccctgatgggggccttgacctgtgaggccaaggacaacaaagga

SEQ ID NO: 1031046 - DNA, 120 bp, Artificial Sequence
  ENSG00000247809_65 (sequence is synthesized)
acagctgtctccttgccatggaagtggcccagtaaccagaaggactcaactgtcagggctgcaagaacttcccaaggacccagctctctgctggagctgcaatcaagaaattgaaacacc

SEQ ID NO: 1031047 - DNA, 120 bp, Artificial Sequence
  ENSG00000247809_66 (sequence is synthesized)
agaaagtgcaatatggctagcactgaaggccagtcagtttaactctcagtgtaccccttaaggagaagctctcatttattttcttaattaatattttaagggaagtgagaatcacaaaac

SEQ ID NO: 1031048 - DNA, 120 bp, Artificial Sequence
  ENSG00000247809_67 (sequence is synthesized)
acattactcaatcacttaagaagttccttggcttagaattaaagatgctccaggaaagactttttatacctgaaaactgtgaatctctacctagaaaaaagtcttaaagccggtgaataa

SEQ ID NO: 1031049 - DNA, 120 bp, Artificial Sequence
  ENSG00000247809_68 (sequence is synthesized)
agtggcttaggaagatgagtgtaaggccattatcatggactttttccccagctgcagaggtcaaagtttggagtgcaactagagaggttagcagttcacttttcccagaccgcctggctt

SEQ ID NO: 1031050 - DNA, 120 bp, Artificial Sequence
  ENSG00000247809_69 (sequence is synthesized)
ctcatagcttaatctctgggcacagctgctgtgagcacacagtccctgggactcatatcttgccctgctcctggcctgatgacaagactgggaggaactgtgggcagggttatctacaac

SEQ ID NO: 1031051 - DNA, 120 bp, Artificial Sequence
  ENSG00000247809_70 (sequence is synthesized)
gaactgcattgcttggtggtcaggaggggttcttagtaagcaaactcagtttaatcccagagtcggaagtgggtgtcaacaagccaaagcaacatcctttcagctctgctgcttttttgt

SEQ ID NO: 1031052 - DNA, 120 bp, Artificial Sequence
  ENSG00000247809_71 (sequence is synthesized)
cttggtggaggaatagccaatggaagaagatggagagtccggaccaaaaaaaaaaaaaaaagatgagactaatcttatgctcaatatggaagataatcataactcatcactctggattat

SEQ ID NO: 1031053 - DNA, 120 bp, Artificial Sequence
  ENSG00000247809_72 (sequence is synthesized)
aactgcttacatatgtctttcttatgagataatgcaccttgaaggcgcagaaggaacacaaagacaaagacaaatggttcttgggtcctgccctcaaggcacttacagtccagtttcagt

SEQ ID NO: 1031054 - DNA, 120 bp, Artificial Sequence
  ENSG00000247809_73 (sequence is synthesized)
tttagaagttcaaccaagaacatggctaatggctggtagagattgtactgactattataccacttctcctaaaatattattttggttgaaataataaaatgtagattctaaacaaaataa

SEQ ID NO: 1031055 - DNA, 120 bp, Artificial Sequence
  ENSG00000247809_74 (sequence is synthesized)
gatccgaagcccagctaaggatgtcagcgcactaaatatttactgatcacacacaaatagccggggctcgaacgattttcctctgtgaggagagcgcggagagaagggtcccagttcctc

SEQ ID NO: 1031056 - DNA, 120 bp, Artificial Sequence
  ENSG00000247809_75 (sequence is synthesized)
gtctctctcgctggctttttaaaaatgaggaaccgctccttgaatgttctggacagagcacagaattgcttcttaagtcagcccggcgcggttgcaatagacagcaaaaaggtaaacgtt

SEQ ID NO: 1031057 - DNA, 120 bp, Artificial Sequence
  ENSG00000247809_76 (sequence is synthesized)
gattttctctggaatgaagctttatccttgccacacaaaagatcgtgtggaagaaatttctctgttcgatggaacgagaggcttctattgcaagaccttctatgctgaagcacttgttta

SEQ ID NO: 1031058 - DNA, 120 bp, Artificial Sequence
  ENSG00000247809_77 (sequence is synthesized)
cccaagatactcatttgctcttatgtgaactctcggtctctcagtttctagttgcctaaaggcacttctctaatttttcccaattctcattgcagacccagttttggtgacttggtcact

SEQ ID NO: 1031059 - DNA, 120 bp, Artificial Sequence
  ENSG00000247809_78 (sequence is synthesized)
gcagacctttcagaatgtgtggtgctcattcttgttaaaccagttgagaatttccccaatcctttggccctgcgcacaagtgtagctgctcttccaatcaatgggacctttgtatgcagc

SEQ ID NO: 1031060 - DNA, 120 bp, Artificial Sequence
  ENSG00000247809_79 (sequence is synthesized)
aaggaacactttgtagtaacccttgttaatttatgattttaaatatgaatgtgaatttattggaatgacacaataaagagtcaccatgggcaccgattataattatcaccaagtacaatg

SEQ ID NO: 1031061 - DNA, 120 bp, Artificial Sequence
  ENSG00000247809_80 (sequence is synthesized)
aagcagagaaagaaactatctcgctcctaaatggcatcatccatataagccttgccttgttcaaagctactctgtagtattttcttttaaataaaataaataaggcacaaataaacaaca

SEQ ID NO: 1031062 - DNA, 120 bp, Artificial Sequence
  ENSG00000250409_0 (sequence is synthesized)
agttgtagccctgcatgctttctggggagcacactctagccaccgagatgaaggcacggggaggcccgaccgtaggtcgaacacgtcagtcagtggctgatccttcccatggtctctgga

SEQ ID NO: 1031063 - DNA, 120 bp, Artificial Sequence
  ENSG00000250409_1 (sequence is synthesized)
tcacctgggaacagccatggacacttgtctggggctgcatgagacagtgtctgagactcacctttgacacaaatgtaactgaaggggagaagctgcccctgggcaagccggtcagctgaa

SEQ ID NO: 1031064 - DNA, 120 bp, Artificial Sequence
  ENSG00000228573_0 (sequence is synthesized)
gataagccgaggtatagatgagaatcccaaactgagacagcttaagaaatgtccagagtcttgtaacaagtgaaaatgtcatatgtcatgaggtcatgttggaaaaccttaaagaggata

SEQ ID NO: 1031065 - DNA, 82 bp, Artificial Sequence
  ENSG00000228573_1 (sequence is synthesized)
atatgtcatgaggtcatgttggaaaaccttaaagaggataaaagatcttccacaagcaacagtacttcccctatctgctgtg

SEQ ID NO: 1031066 - DNA, 120 bp, Artificial Sequence
  ENSG00000250402_0 (sequence is synthesized)
tgagctaggaagcttttaaaaattacaagtaatcattcagacttagttaatggaactattcctcagagacagccagaaactcagcagggaaggagacttggtaaagagcagacatcctgt

SEQ ID NO: 1031067 - DNA, 120 bp, Artificial Sequence
  ENSG00000250402_1 (sequence is synthesized)
attctgtggaatcggtgctgaaaacactatttgatcattatggggaaagatgactcctaaaagaacagttggggacatctgatttggaaagcatttaagtcccaaaaggaagaattacat

SEQ ID NO: 1031068 - DNA, 120 bp, Artificial Sequence
  ENSG00000250402_2 (sequence is synthesized)
ttcaccctgcaagacagaaggggtaactcaatcactattgtatagggagtgtcaagctgttcttgactaccatggacaatctcatagaaggaaatagaaacagttgcaagtggacacaag

SEQ ID NO: 1031069 - DNA, 120 bp, Artificial Sequence
  ENSG00000250402_3 (sequence is synthesized)
aaacaactaagtatcactatgatgttaactgtttaagaaaggttgaaaattactggttctgaatggtaaaattcatctgaagtacaaaggttgagatccttgtgtccttccaaagttatt

SEQ ID NO: 1031070 - DNA, 120 bp, Artificial Sequence
  ENSG00000250402_4 (sequence is synthesized)
tttctacagatcttaagcacaagttaaagttttatttacttcaggcaactacaagcatctattaagtttttttccctgtgccatgatcaaatattaaataaatccatacagtgaaacaca

SEQ ID NO: 1031071 - DNA, 120 bp, Artificial Sequence
  ENSG00000228577_0 (sequence is synthesized)
gtgtaaaagacggctaaacatttaaattgcctttatttacttagcttaattgcattttagatgctacgtatttctagcttcccctgtgctaaccagcttcacagtccatagagatgagat

SEQ ID NO: 1031072 - DNA, 120 bp, Artificial Sequence
  ENSG00000228577_1 (sequence is synthesized)
gcaatctcaggaagcaatgtgccctggagaactgacagctattctgaggatgtggatcaagtacagagcaccctaaatcaaagcatcaggagaactgtatttctgtgacagcttaatggg

SEQ ID NO: 1031073 - DNA, 120 bp, Artificial Sequence
  ENSG00000228577_2 (sequence is synthesized)
caagtggcacacaatatatttatttacaccctggctacttttaagacgaacccaccaggtgatttgcagctgttcacttatggttatacaggtttggattaaatattttttcattcttaa

SEQ ID NO: 1031074 - DNA, 120 bp, Artificial Sequence
  ENSG00000250407_0 (sequence is synthesized)
gtaaagtggcagaagctgggaccatccaactctaaagcccacattcttagacattaggggatattgaatgaagtgtgtgtatgtatgggggaatttaagagaatatcaaaccatttgtag

SEQ ID NO: 1031075 - DNA, 120 bp, Artificial Sequence
  ENSG00000250407_1 (sequence is synthesized)
agttctacccaatatagagaccttatctaatgtaagagaactctgaagacatctcattgattgaatgctctccccttcatagcaacttcttctgcggcttccttgcctggtgctccagtc

SEQ ID NO: 1031076 - DNA, 120 bp, Artificial Sequence
  ENSG00000250407_2 (sequence is synthesized)
gagtgaggcagatggcaattttccttcagagacatgcaggcaacagttttgcccctggagagaaaagcctcgccgattgagatgcagccagtaatttttactatacagaagacacatcca

SEQ ID NO: 1031077 - DNA, 120 bp, Artificial Sequence
  ENSG00000250407_3 (sequence is synthesized)
ataattttgcccagtgagagaaacggccaacaattttcccacagaggacaggaaaaacagaccaaaaattcatagtggggagaagtgaggagcaaatgggctggtatgaccaagaaagac

SEQ ID NO: 1031078 - DNA, 88 bp, Artificial Sequence
  ENSG00000250407_4 (sequence is synthesized)
agaagtgaggagcaaatgggctggtatgaccaagaaagacttaataagaagctgagccttaaatgatcaagaagcactggatagataa

SEQ ID NO: 1031079 - DNA, 120 bp, Artificial Sequence
  ENSG00000250406_0 (sequence is synthesized)
acggaatcatgaaaattattctttgaaatggcaaagatttctgtggctggatcatgggatttattgactggagcgatttctcctcagaagaccagacacatgcagcataaatactttttg

SEQ ID NO: 1031080 - DNA, 120 bp, Artificial Sequence
  ENSG00000250406_1 (sequence is synthesized)
gagaaaaacactatgaggagcattgagaaagtcctcatttggaatacttagctggacttacctaaactgaactttcccttccttgacccagggcaacctctgccaagcccaccaccctcc

SEQ ID NO: 1031081 - DNA, 120 bp, Artificial Sequence
  ENSG00000250406_2 (sequence is synthesized)
agctcctacgccatgaaagatcgaagaagataatcagaaaaaccacccaagaaaaggaaaagggagaatcagttacatatccagcaagccagaaaacaagaaaacccaaatctgttccag

SEQ ID NO: 1031082 - DNA, 120 bp, Artificial Sequence
  ENSG00000250406_3 (sequence is synthesized)
ttctctagtttcaccttaaaggcaaagaactgtagatgcttgtgaggagctcttcaaagcctaaattcatagcctctctacgcgggaggttaccagcatctgaagaaaaacaaccactac

SEQ ID NO: 1031083 - DNA, 120 bp, Artificial Sequence
  ENSG00000250406_4 (sequence is synthesized)
cagaaaagctcttctttgttttcattcttcgcagtccttcaggaaactcttgataatgtgaaatgttattactgcaaatgttggctcaagcacgtttactctagagtctgactatcagtg

SEQ ID NO: 1031084 - DNA, 120 bp, Artificial Sequence
  ENSG00000250406_5 (sequence is synthesized)
acttgttcgcaaaataaaatcatttttaaagcctacaaggaaagccaagagcaaaccacaaatcagaaaaccaccaaggcgggctggcctcattgccagaatttaatgtgatctaatgcg

SEQ ID NO: 1031085 - DNA, 120 bp, Artificial Sequence
  ENSG00000250406_6 (sequence is synthesized)
ttacactgtcattttatagcagttacaaagttggcccagtgaagaaatgtaaaacgcatagaatcaagtttcttaaagcaatagtttgctaagggaagtgtaataaatacagggtctagg

SEQ ID NO: 1031086 - DNA, 120 bp, Artificial Sequence
  ENSG00000250406_7 (sequence is synthesized)
aaaaaattactagaacttctatttctattgacttttaagctaaacactaagaaggaaagaaagcctcactaagagttaaaatctggatgacaccagttgtcctcatttggtgcagataca

SEQ ID NO: 1031087 - DNA, 120 bp, Artificial Sequence
  ENSG00000250406_8 (sequence is synthesized)
gacagtcacctctcacccaccacctgtggactgtgagtcttcctgaaagaaggttgagggctcaacagtgctgagggtatgataggggtagcatcagttcaggtaggctgggctgcagta

SEQ ID NO: 1031088 - DNA, 120 bp, Artificial Sequence
  ENSG00000250406_9 (sequence is synthesized)
acacatagaccaagcaggtaatggctcaacacaataggaagttagttcttgcttagggtgccattctggtgatgagatcagcaggacagctcaagccatgccatcacttagatgaggctc

SEQ ID NO: 1031089 - DNA, 120 bp, Artificial Sequence
  ENSG00000250406_10 (sequence is synthesized)
tgccaacttcggcttatggttagcatagccatctgcatcgcttcctgcaggaagaaggaagaaccttggagaatcacttctaggaggctttttatgggaccagactgaaagtggtacata

SEQ ID NO: 1031090 - DNA, 120 bp, Artificial Sequence
  ENSG00000250406_11 (sequence is synthesized)
ttatcgaagctcatcctccattggccatgacttagtctcagagccacaactaaccacaagggaagccaggaaatgtagcctgattatgtgctcaagaagaagaaacaaattatggcaaac

SEQ ID NO: 1031091 - DNA, 120 bp, Artificial Sequence
  ENSG00000250406_12 (sequence is synthesized)
agtcagcagtttctaccataggtgtgctcatccattcagtggattgcaatgtattgcaatcgacatgttccccttacacggatttaaccattttaataaaatttaacctcataaaatgaa

SEQ ID NO: 1031092 - DNA, 120 bp, Artificial Sequence
  ENSG00000250406_13 (sequence is synthesized)
cttgagcggccttttaatgacacaaaggctaaagggaaaaaaaaaaaagatttgcatagcaataactatcattgctttaaagctgcatagacttttcagagccctgaacaaccaccaaat

SEQ ID NO: 1031093 - DNA, 120 bp, Artificial Sequence
  ENSG00000250406_14 (sequence is synthesized)
gaggttaagcaaaagcacggaatcatgaaaattattctttgaaatggcaaagatttctgtggctggatcatgggatttattgactggagcgatttctcctcagaagaccagacacataag

SEQ ID NO: 1031094 - DNA, 120 bp, Artificial Sequence
  ENSG00000250406_15 (sequence is synthesized)
gtgaaagagaagtcaggaagggatgtcacaagttaccatatcatggaatgtgagaataacatgaaccaggaagctgcatgttctgcaggaactaagaagacaaggcagcataaatacttt

SEQ ID NO: 1031095 - DNA, 120 bp, Artificial Sequence
  ENSG00000250406_16 (sequence is synthesized)
tacggaggggttgggcccaacttccccatccttaagcaaacatttgaagtaatgtttcactttcttatcagtttgaattctgtcagcgagagggtagagattcagccgggcctgctcatt

SEQ ID NO: 1031096 - DNA, 120 bp, Artificial Sequence
  ENSG00000250406_17 (sequence is synthesized)
ttaaaagtgccatctgctttggatgctcatagatttgcttaatatccatttgtataagatgaagatgggcaggtggggaaggggccaggaaaataggatgaagctatttagtggcagtgt

SEQ ID NO: 1031097 - DNA, 120 bp, Artificial Sequence
  ENSG00000250406_18 (sequence is synthesized)
accaactggactgccactctcttctgcactggtgatttattccatgggtgggaaggcaggaatagggctaacttaagcaacattctttcacaagcaaaaactaaccccaatgagaaagag

SEQ ID NO: 1031098 - DNA, 120 bp, Artificial Sequence
  ENSG00000250406_19 (sequence is synthesized)
tcagatctgggctgaatcacgttgtccagtctcacaccaaatggaactggagctcaggtggagctctatttcccatcactcattctttagaaaagaaataaaatggtagcaacagagaaa

SEQ ID NO: 1031099 - DNA, 120 bp, Artificial Sequence
  ENSG00000250406_20 (sequence is synthesized)
aatacattaaagttacatatttcatgcagtttttatttctgttgccaggacaatggaacaagaatcagatctctttttttccttcttacagaaaaatgcaaccttaccaatgccaaactc

SEQ ID NO: 1031100 - DNA, 120 bp, Artificial Sequence
  ENSG00000250406_21 (sequence is synthesized)
ttgtcaacaataatgtgaggttttttttaaaaaaagactattaaattacttctggaaagaagtcaaaccaaatatttttaaaaattttaagtttatttgaaatacagatttatatccact

SEQ ID NO: 1031101 - DNA, 120 bp, Artificial Sequence
  ENSG00000250406_22 (sequence is synthesized)
tttataataatgaaccttatatacctgaaacatggctaataagaatgtgaacataccaaaattagcaaaaaatttaagtagccataaaataaacatggagaaaagcttctgtaattttat

SEQ ID NO: 1031102 - DNA, 120 bp, Artificial Sequence
  ENSG00000250406_23 (sequence is synthesized)
gtgcagtttaaagtcgtgttatacttaatctattctgaaaaattttactaaacttgatgagagatgtttagaggtctcctttgagatttctcattaaataataaagtacaaaaagccaca

SEQ ID NO: 1031103 - DNA, 120 bp, Artificial Sequence
  ENSG00000281491_0 (sequence is synthesized)
tattagtccaatctccgggttgagaaggtgggacgtactggccactgctcgaatcccaggagaaccttctggaacccttgcgacgtcaaaggcagccttaaaggaaaactgtacccacca

SEQ ID NO: 1031104 - DNA, 120 bp, Artificial Sequence
  ENSG00000281491_1 (sequence is synthesized)
gttggccgtgcggccgtgcattctttcctttcttcattggggggcaagagggagagaacagtgcactctgggaggtgtagtccctggaccggggccaaaaggaatgccacgttgacccat

SEQ ID NO: 1031105 - DNA, 120 bp, Artificial Sequence
  ENSG00000281491_2 (sequence is synthesized)
caccttggctgcagatggcctccctcctgtgatcagactctgagcatctcacctgatacatgcttcatgctgacactcaggcccagactttggtcccacactgagtcccaactttgacct

SEQ ID NO: 1031106 - DNA, 120 bp, Artificial Sequence
  ENSG00000281491_3 (sequence is synthesized)
tggtagagacagttccccgaatccagcctctgcccaaaccctcctcctagacatggctgagccctaattttgatacaaaatacttgaattcatcttcagattcagttctgatcctatact

SEQ ID NO: 1031107 - DNA, 120 bp, Artificial Sequence
  ENSG00000281491_4 (sequence is synthesized)
gaactaactgaacactaccagggatctgactccctgatattcgctggcgtctccctgcgtgttctgaacctatgctgaccagcaccagaagggttcagaggggtgatttcttgccttggg

SEQ ID NO: 1031108 - DNA, 120 bp, Artificial Sequence
  ENSG00000281491_5 (sequence is synthesized)
atgagagagcaatgttagggatgaccagcagagggcgtgcaacatcaggttctagaggcaagcgtccaagagcccacctgtgagctaaaaaaattaaagttctcgtttttgacaccaaaa

SEQ ID NO: 1031109 - DNA, 120 bp, Artificial Sequence
  ENSG00000286142_0 (sequence is synthesized)
agtacatagaacagagcctggcacagagagagaagccaatgagcagcaggaatgatgatcacaggcaatcttcccttccgccaccactcacctcagatgacctgagatgaaggtcttgct

SEQ ID NO: 1031110 - DNA, 82 bp, Artificial Sequence
  ENSG00000286142_1 (sequence is synthesized)
tgtccagatgagaagacacaggatggctctcgtcccaagaaggccttcgcttgtgctgtgggcacagaggtctttctcccct

SEQ ID NO: 1031111 - DNA, 120 bp, Artificial Sequence
  ENSG00000286142_2 (sequence is synthesized)
gccttcgcttgtgctgtgggcacagaggtctttctcccctctctgagcacaaagcagtcactgtgctctgccgagcagaggaaaaatgcaaatggtgctctgggtgtggccaagttcctt

SEQ ID NO: 1031112 - DNA, 120 bp, Artificial Sequence
  ENSG00000286142_3 (sequence is synthesized)
gggccccaagtgctggcctgcattctttatggggtagcctttgttttccctttctgcaggctgtgcctgaaatatgaagattacttaaaactcatactatgccaggacacggacaccaca

SEQ ID NO: 1031113 - DNA, 120 bp, Artificial Sequence
  ENSG00000286142_4 (sequence is synthesized)
acttgaaatgttctgaaagcttatgaaccataaatgaaagaaaagttcattcatcacaatgtcctcaagcttgaaaacaaccgtaagaatctacaaggctaacaacgagttgcaaagctg

SEQ ID NO: 1031114 - DNA, 120 bp, Artificial Sequence
  ENSG00000286142_5 (sequence is synthesized)
aaacaaactctcctgaaccttaataacaaaaacaaggtgtgatcaattgtgcaagaggaaagaagtatcttcctattccctctacggaaagatattattacagaattattctttctgttg

SEQ ID NO: 1031115 - DNA, 120 bp, Artificial Sequence
  ENSG00000286142_6 (sequence is synthesized)
tttattttttatttttatttttatttttagagacagggtctcatttgtttgcccaggctggagtgccgtggcatgattatagctcactatggcctcgaactcatgggctggagtgatcct

SEQ ID NO: 1031116 - DNA, 120 bp, Artificial Sequence
  ENSG00000286142_7 (sequence is synthesized)
tcccaagtagctaggactacaggtgtgcagaatcattcttatattaagaggggtatacagccaaaaaaaatgcagaggaacctcgggcaattactaagcaaaaacattgcattattcttc

SEQ ID NO: 1031117 - DNA, 120 bp, Artificial Sequence
  ENSG00000286142_8 (sequence is synthesized)
aaaacattgcattattcttctgagttttgtgatatgtgtagtattggtcagcgtctgaaactttgtaatttgttccaaataaatttcttgttctaaataaatatttactttagtattaaa

SEQ ID NO: 1031118 - DNA, 120 bp, Artificial Sequence
  ENSG00000286141_0 (sequence is synthesized)
tctctaaatttctgttttccctgatgcttccatgcatgtttaccatagctactgtcgactcttcttctcctgggatagcagcagagatgcttcagtataaaagtatgagaataactgcgt

SEQ ID NO: 1031119 - DNA, 120 bp, Artificial Sequence
  ENSG00000286141_1 (sequence is synthesized)
taaaagacgggaacttagctttgttgaaagatcctcatgatccatctgaatcaccagcgaggttcagcctgaaatggagaaagcagagcatctcatctaaaaacagcatctccaatttct

SEQ ID NO: 1031120 - DNA, 120 bp, Artificial Sequence
  ENSG00000286141_2 (sequence is synthesized)
tcctgtttcagaaattaaaatcataaggaaaaaatcttattgtcttggctcaggtcacttgacacttgaaccaaggaaagtctgcagtcataagctggcctcaacacactgaagtatatt

SEQ ID NO: 1031121 - DNA, 120 bp, Artificial Sequence
  ENSG00000286141_3 (sequence is synthesized)
cagcattataaacacactgaaacaccaaaaaggctgagatgcacataatttgaagagtgaaaatggctcgagagcatgaagtctcattatctgtaggccattttcaggctgctgataaag

SEQ ID NO: 1031122 - DNA, 120 bp, Artificial Sequence
  ENSG00000286141_4 (sequence is synthesized)
acatacctgagactgggaaggaaaagagatttaattggacttacaggtccacatggctggggaggcatcagaatcatggtgggaagagaaaggcactttttccaaggcagaggcaagaga

SEQ ID NO: 1031123 - DNA, 120 bp, Artificial Sequence
  ENSG00000286141_5 (sequence is synthesized)
ggaatgaggaggatgcaaaagcagaaaaccctgataaacccatgagatctagtgagatttattcactatcacaataatagcacaggaaagacctgccccatgattcaataactccctctg

SEQ ID NO: 1031124 - DNA, 87 bp, Artificial Sequence
  ENSG00000286141_6 (sequence is synthesized)
aattcagattgagatttgggtgaagacacatcagaaccatatcattcctcccctgggctctccaaatctcatgtcctcacatttcaa

SEQ ID NO: 1031125 - DNA, 86 bp, Artificial Sequence
  ENSG00000286141_7 (sequence is synthesized)
tttaactaatttcagcattaatccaaaagtccacagtacaaagtctcatctgagacgaggcaagtcccttctgcctatgagcctgt

SEQ ID NO: 1031126 - DNA, 120 bp, Artificial Sequence
  ENSG00000286141_8 (sequence is synthesized)
aaaatcaaaagcaagctagttacttcctggatacgatggggattcaggtatttggtaaatacagcagttccaaatgggtgaaattggccaaaataaaggggttacaaggcccatgcaagt

SEQ ID NO: 1031127 - DNA, 120 bp, Artificial Sequence
  ENSG00000286141_9 (sequence is synthesized)
ctccaaaatgatctcctttgactccagatttcacatccagatctcactaatgcaggaggtgcgttcccatggtcttgggcatctttgcccctatggctttgcagggtacagcctccttcc

SEQ ID NO: 1031128 - DNA, 120 bp, Artificial Sequence
  ENSG00000286141_10 (sequence is synthesized)
ttgcccctatggctttgcagggtacagcctccttcctggctcctttcacaggctggcattgaatgtctgtggcttttccaggtgcacagtacaagctgtcagttgatttcagttgatcca

SEQ ID NO: 1031129 - DNA, 120 bp, Artificial Sequence
  ENSG00000286141_11 (sequence is synthesized)
catgagggccccacccctgcagcaaacctttgcttgggcatccaggcatttccatacatcatctgaaatctaggcagaggttctctaacttcaattctagacttctgtgcacctgctggc

SEQ ID NO: 1031130 - DNA, 120 bp, Artificial Sequence
  ENSG00000286141_12 (sequence is synthesized)
ttctctaacttcaattctagacttctgtgcacctgctggctcaactccatgtggaacctgccaaggcttggggctttcaccctctgaagtcacagcctgagctctatgttggcccctttc

SEQ ID NO: 1031131 - DNA, 120 bp, Artificial Sequence
  ENSG00000286141_13 (sequence is synthesized)
agccatggctgtgacacagggcaacaagtccttaccctgcacacagcacggggatcctgggcctggcccaagaaaccactctgtcctcctgagcctctgggcctgtgatgggaggggctg

SEQ ID NO: 1031132 - DNA, 120 bp, Artificial Sequence
  ENSG00000286141_14 (sequence is synthesized)
ttaacattaggctccttgctacttatgtgaatttctgcaattggcttgaatttctccccctgaaaataggtttttcttttctatcacatagtcaggctgcaaatttcccaaacttttatg

SEQ ID NO: 1031133 - DNA, 120 bp, Artificial Sequence
  ENSG00000286141_15 (sequence is synthesized)
cccctgaaaataggtttttcttttctatcacatagtcaggctgcaaatttcccaaacttttatgctctgtttccatttaaaaatagaatgcctctaacagcacccaagtcacctcttgaa

SEQ ID NO: 1031134 - DNA, 66 bp, Artificial Sequence
  ENSG00000286141_16 (sequence is synthesized)
tctcaagttcaaagctccacaaatctctagggccaccagtatatcttcatctgagaccaccttagc

SEQ ID NO: 1031135 - DNA, 120 bp, Artificial Sequence
  ENSG00000286141_17 (sequence is synthesized)
atcttcatctgagaccaccttagcctggagcttactgttcatatcactatcagcatttttgtcagagccattcaacaagtctctaggaggttcagactttctcacattttcctgtctgct

SEQ ID NO: 1031136 - DNA, 120 bp, Artificial Sequence
  ENSG00000286141_18 (sequence is synthesized)
catttttgtgctgctgataaagacagatctgagaccgggaagaaaaagagctttagttggacttacagttccacatagctgcagaagcctcagaatcatggtgggagatgaaaggcactt

SEQ ID NO: 1031137 - DNA, 120 bp, Artificial Sequence
  ENSG00000286141_19 (sequence is synthesized)
gcagaagcctcagaatcatggtgggagatgaaaggcacttcttacatgatggtggcaagaaaagaatgaggaaaaagccaaagtggaaacgcctgataaacccatcagatctcatgagac

SEQ ID NO: 1031138 - DNA, 120 bp, Artificial Sequence
  ENSG00000286141_20 (sequence is synthesized)
cagcccccatgattcaattgcctcccctgggtccctcctgcagcacatgggaattctgggagatacaattcaaatcgagatttgcgtgggggcacagccaaaccatatcatcccctaaat

SEQ ID NO: 1031139 - DNA, 85 bp, Artificial Sequence
  ENSG00000286147_0 (sequence is synthesized)
tgggtgggaggtgcgcgggaaggcaggaggaccgtccctgagcactctcctgtgaggcctctggctgcactctctgcaatctatc

SEQ ID NO: 1031140 - DNA, 120 bp, Artificial Sequence
  ENSG00000286147_1 (sequence is synthesized)
tctcctgtgaggcctctggctgcactctctgcaatctatctaacagcctgtggatgaggtcaaaggaaagagggaagaaaggagaaaggggagaaggaaagaacttgaggctttgatgac

SEQ ID NO: 1031141 - DNA, 120 bp, Artificial Sequence
  ENSG00000286147_2 (sequence is synthesized)
cgttggaatgcagagaagctatgagaaaagagctacaagagaaaaatggcagcattgcaaagtgcaagaacactgaagggattaaacagcattctagaaaacaagacagaccatgaagag

SEQ ID NO: 1031142 - DNA, 120 bp, Artificial Sequence
  ENSG00000286147_3 (sequence is synthesized)
tatgggaagaaacaggaaggcctatttcccggtaccatacccagaagctgtataatagggacaacttgcaggctgaggtgctctctgtgtcctgacatgtcagatttgggaaatgagtga

SEQ ID NO: 1031143 - DNA, 120 bp, Artificial Sequence
  ENSG00000286147_4 (sequence is synthesized)
agcaggacggcaacatagagtcttccaggggctacatgattgtgaaagaggacaatgagaaaggaatggaatcctgaggttggagagttgcttaagcccaggaagtcaaggctgcagtga

SEQ ID NO: 1031144 - DNA, 120 bp, Artificial Sequence
  ENSG00000286147_5 (sequence is synthesized)
gccatgatagcaccattgcactccagcccaggcaaaagagccctggagactgactggccattaaacacaaaatgatgactggtgcagcaggtgcagtgaagtgggaaggtgtggagcaaa

SEQ ID NO: 1031145 - DNA, 120 bp, Artificial Sequence
  ENSG00000286147_6 (sequence is synthesized)
taaaaaagtccatggcatccgtaagaaatgctgacccccaggaaattttaaaaggttatgtgcactgtggtattcatgacgtatgtgtgagagctcctggggacaacagctaaatttccc

SEQ ID NO: 1031146 - DNA, 120 bp, Artificial Sequence
  ENSG00000286147_7 (sequence is synthesized)
accacaccacatcctgagaggatccataaagaagaaatggatgtcattaggaaaaaagacttcatcaggcacttcccctaggaggtagcaggaattaagccagatcaatagtcaaattct

SEQ ID NO: 1031147 - DNA, 120 bp, Artificial Sequence
  ENSG00000286147_8 (sequence is synthesized)
actctgcttttgaagaaacagctgaaggaagcagataaaatttgaaagactgttctttcatggttgggaagatagaaaaaagcaaagcaaaatataatcctcgatattcattctatggtg

SEQ ID NO: 1031148 - DNA, 120 bp, Artificial Sequence
  ENSG00000286147_9 (sequence is synthesized)
aaatgacttctaatttccattttaaaagagatactttaagggctacaaaatttttgcttaaaaattataaaatgttcccattttaatgtagaacctatacacaagaaggcaggaagcatt

SEQ ID NO: 1031149 - DNA, 120 bp, Artificial Sequence
  ENSG00000286147_10 (sequence is synthesized)
ttatccctcaggtgtgctggtgcagagagacaatgacttgagaaaaagctggccccaaatgattacctacagagtttgagcaagaggattgctcaacagtgatcaccacaaagtttaaat

SEQ ID NO: 1031150 - DNA, 74 bp, Artificial Sequence
  ENSG00000286147_11 (sequence is synthesized)
caagaggattgctcaacagtgatcaccacaaagtttaaatagactaataaaccttttggttaaaaaagcatgac

SEQ ID NO: 1031151 - DNA, 67 bp, Artificial Sequence
  ENSG00000286147_12 (sequence is synthesized)
tcaaactgcaaggcggcagcgaggctgggtgaggggcgcctgccattgcccaggcttgcttagataa

SEQ ID NO: 1031152 - DNA, 120 bp, Artificial Sequence
  ENSG00000286145_0 (sequence is synthesized)
gtgatgtgggtggctggaagagcggagagccagcgaccgccgatctgttagctcgtgcgacccagcggcgggggtcctccactgttcatttctctacaactgaaggaaaatactgtgtgt

SEQ ID NO: 1031153 - DNA, 120 bp, Artificial Sequence
  ENSG00000286145_1 (sequence is synthesized)
aatactgtgtgttgagcacctgtgtagtgcgcgaattaaaggcctcatccttctggaacttaaattttaatgaagccatgtgggcaataaatgtgtgtgtgagagagagagagagagaat

SEQ ID NO: 1031154 - DNA, 120 bp, Artificial Sequence
  ENSG00000286145_2 (sequence is synthesized)
catggctatgactcctccctcatctttctgaagctcaaccttgaatgcttacaggaccactgaaaaaagaatctctaggctcccccaagagctcatttccatcaacagctctggaagtgg

SEQ ID NO: 1031155 - DNA, 120 bp, Artificial Sequence
  ENSG00000286145_3 (sequence is synthesized)
gtcatgttacatacaaaaataaagacagcaagaagagctcagacggtggaaccagactgcttgggactgaaatcggcatttgccacttaccaggtgtgtgaccgcaggcaaatgacttaa

SEQ ID NO: 1031156 - DNA, 120 bp, Artificial Sequence
  ENSG00000286145_4 (sequence is synthesized)
gaggctggcatatagtagtaattatgcaaatgtttgttaaacaaaattaagttgatacacacttaggggtttcccccaccccacttagttctcaatactgagaatgcgggggaatttgtt

SEQ ID NO: 1031157 - DNA, 120 bp, Artificial Sequence
  ENSG00000286145_5 (sequence is synthesized)
ttaaatgtttacaaatgtttacaaatcttaattttttttctatatttgattattttaaagaggaaagaaggtagctcttagaacaaatttagactttaaaaaaaattctcaatctgtacc

SEQ ID NO: 1031158 - DNA, 120 bp, Artificial Sequence
  ENSG00000286145_6 (sequence is synthesized)
ctgactgttgtccctgatactgttatcaggcactagaaaaaaagcaacaacccataattggtttaccaaaaacatcactcaactgtttatggacgataattagcaataacggctgtcagt

SEQ ID NO: 1031159 - DNA, 120 bp, Artificial Sequence
  ENSG00000286145_7 (sequence is synthesized)
gccacggttcctctgtaaaaacggagacaactgtatctactttatatgattgttacaaacatttaatattatttgtaaagcacttagaacaataccagagcagagtgaacatttaaaaaa

SEQ ID NO: 1031160 - DNA, 120 bp, Artificial Sequence
  ENSG00000286145_8 (sequence is synthesized)
aggaatgctgcaacagatcacaacagaacccttgaaaatgaaggtgaaaaaactgcgaactttgagacggccttcattaagaccactctggagcccaccctgtgtgcactttttctccga

SEQ ID NO: 1031161 - DNA, 120 bp, Artificial Sequence
  ENSG00000286145_9 (sequence is synthesized)
ctgcctggcccactggcttatggcaatgatcaagcagacctacaggttatgacatcactgcctgaccaagccacccaattgcaacaatttttccaccaaaacttgagaaacttatctaaa

SEQ ID NO: 1031162 - DNA, 120 bp, Artificial Sequence
  ENSG00000286145_10 (sequence is synthesized)
acttgagaaacttatctaaacaatttcaacttacccagagactagctaaacaaattaccctacaatgcccagattgccagttcacaggcacatcccctccttcaacaggtgttaacccta

SEQ ID NO: 1031163 - DNA, 120 bp, Artificial Sequence
  ENSG00000286145_11 (sequence is synthesized)
ttttggcaaacagatgttacacgcatccctgaatttggaaaacgtagatatgtacatgtatccattgataccaattctcatttaattagtactcatgctcttcctggagagtccacccga

SEQ ID NO: 1031164 - DNA, 120 bp, Artificial Sequence
  ENSG00000286145_12 (sequence is synthesized)
ttcttttaacttttgcatttatgggacggcccacagaaattaaaactgataatggtctggcttatgccagctcacaatttcaacaattttgtcacacatggaacatccaacattccacag

SEQ ID NO: 1031165 - DNA, 120 bp, Artificial Sequence
  ENSG00000286145_13 (sequence is synthesized)
atccaacattccacaggcatcccgtataactcccaaggacaggccatagaacgtacccaatccagccttaaaaatatgctcagaaaacaaaaaagggggaatatgaataaggaccctgca

SEQ ID NO: 1031166 - DNA, 87 bp, Artificial Sequence
  ENSG00000286145_14 (sequence is synthesized)
cagaaaacaaaaaagggggaatatgaataaggaccctgcaacactactagcacaagccttatttacccttaatttttaaaatttaaa

SEQ ID NO: 1031167 - DNA, 120 bp, Artificial Sequence
  ENSG00000286144_0 (sequence is synthesized)
accgaagagcctgtgggggccgctcagcaagaaggaaattcagtggcgcatctgcccacattctggaaggacccctggtccccttctgtcagccctcccacctgcctccctcctcgtgcc

SEQ ID NO: 1031168 - DNA, 120 bp, Artificial Sequence
  ENSG00000286144_1 (sequence is synthesized)
gctcctctgatccctcactccactccggctcctgcggcgctgacggagcggggtggggggagttgctgcgtctgggggtgtaagaaccttagatgtcacggagcttggaattgtgccaac

SEQ ID NO: 1031169 - DNA, 120 bp, Artificial Sequence
  ENSG00000286144_2 (sequence is synthesized)
gggcaggctgaaggggccttaaagtgctgccaagccctcctcatgccacaccagcttccctgcagagccaggatggggaccccgatgtctgccctgtgggctggagcaggcggcgactct

SEQ ID NO: 1031170 - DNA, 120 bp, Artificial Sequence
  ENSG00000286144_3 (sequence is synthesized)
cctgtcaggcccacccccagtctcttatcaccgctggaggggaatctgagcaatcccctacggggtgacaacctgcaactacatggcatcgtgcacgtggatccactgcagcatggagcg

SEQ ID NO: 1031171 - DNA, 120 bp, Artificial Sequence
  ENSG00000286144_4 (sequence is synthesized)
gggtctgcatcaggaaagacactcctcctcttcccccggccgcaggtgggcctcactgagagacctggagaatgggtttgctggggaaggcaggcttcgaaagccccgggtcattgcagc

SEQ ID NO: 1031172 - DNA, 120 bp, Artificial Sequence
  ENSG00000286144_5 (sequence is synthesized)
cagctgcctcccagcccagctctctgccagcctccccgtgggacatgttataaacatcagagttggatgggccttggccaggcacggtggctcactcacgcctgtaatcccagcactttg

SEQ ID NO: 1031173 - DNA, 120 bp, Artificial Sequence
  ENSG00000226088_0 (sequence is synthesized)
gctggcagttatcttgtgttcttgaaggaagcaggcctgaggaggactcctcatacagagagaaacaccgagagattcactgaaaaactgacatgggatcctgaggggccactcttgaag

SEQ ID NO: 1031174 - DNA, 120 bp, Artificial Sequence
  ENSG00000226088_1 (sequence is synthesized)
acttatctctgcacctttctgggcactgtgcatacagcaatgatcagcatgattccagtgctcagagagctccaaggattagttgagaccagacaagaatatcaaggaggcatgcagaag

SEQ ID NO: 1031175 - DNA, 120 bp, Artificial Sequence
  ENSG00000226088_2 (sequence is synthesized)
tatcatcaaagattcctaagaagaagttcctaacttctgtttttgtgccattgactctttggcagtgtggagaaacccagggacccattttcagaacagtgtttttaaatgcataaaata

SEQ ID NO: 1031176 - DNA, 120 bp, Artificial Sequence
  ENSG00000226088_3 (sequence is synthesized)
ttttggattaaaaggaaactctgagtattgaaatacctaacaaaatattttaaaagcaaatttgtaatacagtaatgtatatgcttctttattaactaattaaagaacaagatatagcaa

SEQ ID NO: 1031177 - DNA, 120 bp, Artificial Sequence
  ENSG00000226089_0 (sequence is synthesized)
aaaggaaaacagcctgttcatttcatggaaggacgttttggaaaaatagatccagacctacatagaaagaaagatttgagtgcacactacatacattagaagagaaaaataaaggaaaat

SEQ ID NO: 1031178 - DNA, 120 bp, Artificial Sequence
  ENSG00000226089_1 (sequence is synthesized)
gagtctatgttgagttgtgtttggccccttgcaaggttgtcataaatgattcattgttttggcttaaggggctttcagctggatgacaaagcataaggacaaaaaatatgaaatttgtca

SEQ ID NO: 1031179 - DNA, 120 bp, Artificial Sequence
  ENSG00000226089_2 (sequence is synthesized)
aggaaaacagcctgttcatttcatggaaggacgttttggaaaaatagatccagacctacatagaaaggtatgacagctaccttaattcatccatcaagacctttcttcttaattgtgaat

SEQ ID NO: 1031180 - DNA, 120 bp, Artificial Sequence
  ENSG00000226089_3 (sequence is synthesized)
taccaactatagatcatcagagaatttaagaaaatcgacaaactaaatgcaaagaaacaagctaatgaaatagaacaaatgactaaaggaaacagaagtaattcaatgaacataagaaaa

SEQ ID NO: 1031181 - DNA, 120 bp, Artificial Sequence
  ENSG00000226089_4 (sequence is synthesized)
tttaattgtgctaagatcttttaagaaacaatgaatacagagatttccagattatacttccatgaaagcctaaatcttctcaggtattcacagtttaaaaaaattgaagtataccaaatg

SEQ ID NO: 1031182 - DNA, 120 bp, Artificial Sequence
  ENSG00000226089_5 (sequence is synthesized)
atatccaagtttactgtgaaagcaaatggcccataaaattttgcatttacatttgaattttaatctagagagaaggagaccacataagtaaaacacaatctatctcataggctgaagcgt

SEQ ID NO: 1031183 - DNA, 120 bp, Artificial Sequence
  ENSG00000225689_0 (sequence is synthesized)
aagagccaaggtctttacgagcagagagaacagattgagcttctagaagtaaggagagatgtgggatgtttacattttgctgaacgaagaaaagaatgggccaactgtcctttgtattaa

SEQ ID NO: 1031184 - DNA, 120 bp, Artificial Sequence
  ENSG00000225689_1 (sequence is synthesized)
aaaaatgacatactttggacccaatagctgtcttcttttagtttttcttcagtagtcagggtggatttgtactgagccatcctcataatcttacttaagccaaagtctcccttagtgtgg

SEQ ID NO: 1031185 - DNA, 120 bp, Artificial Sequence
  ENSG00000225689_2 (sequence is synthesized)
tgactcactgaactgaggttaggacttagtcagtggcctgagctagagcagcagctatagctgcttaaacagtttttctctgtatatgtcaaccttctacattagctttgttaatattgg

SEQ ID NO: 1031186 - DNA, 120 bp, Artificial Sequence
  ENSG00000225689_3 (sequence is synthesized)
tttctaaccaaacaaactgtctgtcccagctcaaatgacacagtgttgtttgcaaatttttattcgtagatacctaaacatatattaagaggcatattggtacaattattcaatgcacat

SEQ ID NO: 1031187 - DNA, 120 bp, Artificial Sequence
  ENSG00000225689_4 (sequence is synthesized)
gtgtgtgtgtgtgtgtgtatgtgtgtatggtttatgtgttcattggtacaatgcttagtgccactcatgatgttagtagaatcgttagctatggaagggaattagctaagtatatccatt

SEQ ID NO: 1031188 - DNA, 120 bp, Artificial Sequence
  ENSG00000225689_5 (sequence is synthesized)
ttagctatggaagggaattagctaagtatatccattctatcatgtggcttttccatccatctacaagggcctctgagtcttctaacagatcatctggcctctgctggcaattatgggaag

SEQ ID NO: 1031189 - DNA, 120 bp, Artificial Sequence
  ENSG00000225689_6 (sequence is synthesized)
aaagaatggaggatacatgggaggattttgtggttcagggctagaagtagttcatgttaattctacccacatttcaatgtccagactatcacactgcaagtaagtgtcttagaaatatag

SEQ ID NO: 1031190 - DNA, 120 bp, Artificial Sequence
  ENSG00000225689_7 (sequence is synthesized)
tggagcttgttttattaaaggaaaggaaacagattttggtgaacacattgcagtctctgccatgccagtttgtctgaaaatggagtttggaattttttttgtttcatttttattttatat

SEQ ID NO: 1031191 - DNA, 120 bp, Artificial Sequence
  ENSG00000225689_8 (sequence is synthesized)
gatttctaaaaggagaaatagcaagatattgaaataatgtttcctcgatgtacatattaaaagcctatagaataatggataacagaatgaactttgatgtcagaaagacttagattcaag

SEQ ID NO: 1031192 - DNA, 120 bp, Artificial Sequence
  ENSG00000225689_9 (sequence is synthesized)
ttccagtccttgtacctctagctgtgtgactttaagccagttgtgtaatgggggcctcaaaatgttgttgtgaagagtcaatgaaaacgttagtgtaaacttctttatcttggagctggc

SEQ ID NO: 1031193 - DNA, 120 bp, Artificial Sequence
  ENSG00000225689_10 (sequence is synthesized)
agtattatgattagtaataatagtagcagcatattggcaagcaaaacatagattggtccgtgaggagtcagaggcatgagaagtagatacagttaagacccatgtgggctgagatatgca

SEQ ID NO: 1031194 - DNA, 120 bp, Artificial Sequence
  ENSG00000225689_11 (sequence is synthesized)
agggcacgttcagattagcaattacagaggataatggctttcagtaaacctttaggatattggccagtatagtaggttttcttttagccttgggggtggtgtagttatctcatgcaatct

SEQ ID NO: 1031195 - DNA, 120 bp, Artificial Sequence
  ENSG00000225689_12 (sequence is synthesized)
tgtttaggccttactgttgagctttaagttctagaaaatctctagaattgctgctgtttgatgctgggccctgtctctacctatgccactccatgagatctctctgggcagtaatatttt

SEQ ID NO: 1031196 - DNA, 120 bp, Artificial Sequence
  ENSG00000225689_13 (sequence is synthesized)
caattcaacgtttttttcctacctgatcaatacgtatcaagtcacatactattaactatcataccatcataccgtatcccttcccttctcaacctctgtccatggagtcatatctccaag

SEQ ID NO: 1031197 - DNA, 120 bp, Artificial Sequence
  ENSG00000225689_14 (sequence is synthesized)
aaacctgtcttaattagttccatgcttattcttctttctcattggctcataaaatattgttcagttgactttgtaattatatatttttcagctctttgagagggtcagtaaacttttgtc

SEQ ID NO: 1031198 - DNA, 120 bp, Artificial Sequence
  ENSG00000225689_15 (sequence is synthesized)
ttgcatttatgtgtttggacaataattagatggtcagattctgagaagtatggacaaaaaagctttccatattttcttcatgtcccctctaaagtacctaaaattgacttttcacacagc

SEQ ID NO: 1031199 - DNA, 120 bp, Artificial Sequence
  ENSG00000225689_16 (sequence is synthesized)
agtcattcagggaaagttgaatgattaactgccatttcgttatatccctagtgtactgccagattcttcaagtaaagctgcaaaaacagtccttgtactttctgctgcctctctagagaa

SEQ ID NO: 1031200 - DNA, 120 bp, Artificial Sequence
  ENSG00000225689_17 (sequence is synthesized)
gggagaactgataacagctgagagtttgctggagaatttctcaggcccctagaaaatagtgcctgttttgaacacatggctgaatagtgctttggaagatggacagatttttggggggta

SEQ ID NO: 1031201 - DNA, 120 bp, Artificial Sequence
  ENSG00000225689_18 (sequence is synthesized)
ccagagggctttgcaaatgagcaacattgtatatgtgtgacgtcactgtctgggccaggatccacaaggggtcataggaaatattgagaattggcttccatagcagtaaaccaattctgt

SEQ ID NO: 1031202 - DNA, 120 bp, Artificial Sequence
  ENSG00000225689_19 (sequence is synthesized)
ccattagaggaatggtgtttaacacattgttaattgggtaatggggaagaaggtaactgggcagtccagagagacacaatgctttgaacagaaggaaggaatttggcctgcactaagttg

SEQ ID NO: 1031203 - DNA, 120 bp, Artificial Sequence
  ENSG00000225689_20 (sequence is synthesized)
tgtggtaaaaagctgtatatttctcttttgtgcaatgcatcatctctcactaaatagattgacaagtagtcatcttggatctattcaggccagcagagcagtagagaggttcttggagaa

SEQ ID NO: 1031204 - DNA, 120 bp, Artificial Sequence
  ENSG00000225689_21 (sequence is synthesized)
gtgtcactgtagataaaagagaaaccctatgtattgtcctttgcaaactaagttgccattctttaccactgtaactgccattcagcagacatttactgaggaaatgctgattctatacta

SEQ ID NO: 1031205 - DNA, 120 bp, Artificial Sequence
  ENSG00000225689_22 (sequence is synthesized)
tgctctgtttgaggtgatgagaattcagcagtgaaaaaaggcagtggcttctgacccctaaaaagaagacacataaatggctgaccaccacatatcacagtatgagatgtttctcttgaa

SEQ ID NO: 1031206 - DNA, 120 bp, Artificial Sequence
  ENSG00000225689_23 (sequence is synthesized)
gggaggagagtttgtggcactaagagggatctccgtaccatgctattatatgtagacccactctgacaggtggagcctcagagtatacacgttggacattgcattccacaatcctgccaa

SEQ ID NO: 1031207 - DNA, 120 bp, Artificial Sequence
  ENSG00000225689_24 (sequence is synthesized)
taagtcaaaagtggccgtcagcctaacacttgggccctgtagaagaaacttctgtccaaagctaccctatagttggctgcctggcttcagagctttttttgaacttggaagacttcaagc

SEQ ID NO: 1031208 - DNA, 120 bp, Artificial Sequence
  ENSG00000225689_25 (sequence is synthesized)
cccaactgaggaatccttgatgctctgttgttttgtcttgctaaaatgtacaagaaacttgcacagctctgtccttcaggcttaaaatcatcccagggaggtcactctaattccttttaa

SEQ ID NO: 1031209 - DNA, 120 bp, Artificial Sequence
  ENSG00000225689_26 (sequence is synthesized)
tgtgtgctgaagaaagggcagcacagctgaagcctgatttaaaatctgatcttctccctaatgtcacaaggacatcctgagacaatggctgaggagctatgcaccagtacccagctggat

SEQ ID NO: 1031210 - DNA, 120 bp, Artificial Sequence
  ENSG00000225689_27 (sequence is synthesized)
ccctgatacttacattggcagatgcattatcaacagagacatcgatttagagtgaattaaaggaattacaaagatcaagatgaattcagtgaagcttcccataggactgttcaaagatct

SEQ ID NO: 1031211 - DNA, 120 bp, Artificial Sequence
  ENSG00000225689_28 (sequence is synthesized)
ccaggcctgccattcatgcattcatgtgagagagacactttgggcctaagaaatgaaggccaattcatgtggagtcagtcctcttataaccacagtaggatagaacttgtttctgagacc

SEQ ID NO: 1031212 - DNA, 120 bp, Artificial Sequence
  ENSG00000225689_29 (sequence is synthesized)
ttcagaaggactaagccctaggcaaacagccccagtgaagtcagctctaaggacatattgaggtaagaactagggaaaattcatgttttatttccctattgcttttaaaatccaatttaa

SEQ ID NO: 1031213 - DNA, 120 bp, Artificial Sequence
  ENSG00000225689_30 (sequence is synthesized)
aatgtattacctatcaagagagaattctctataatttcgtgaaaatgatttatatggctccggatatgtatttttttgtcccccttttcccctcccatttactccttcagccacaggtaa

SEQ ID NO: 1031214 - DNA, 120 bp, Artificial Sequence
  ENSG00000225689_31 (sequence is synthesized)
atactttttgccatgacctctctctctgtgaaatcaaactaatatgctaacttttgtttgcttttcttgtgcaacactgctgatgagaaacattttgtcctccttcgtctatttctgtta

SEQ ID NO: 1031215 - DNA, 120 bp, Artificial Sequence
  ENSG00000225689_32 (sequence is synthesized)
tattattttaagacctgtcattataataaaaaatatcttaatgctgataatgacattgatgatggttatgatgacttcaagctctgccctagacaattaactccataaaggcaggaactg

SEQ ID NO: 1031216 - DNA, 120 bp, Artificial Sequence
  ENSG00000225689_33 (sequence is synthesized)
tatctatcttctttagcatttcataaggcaaacccaacagtgtccctgacttgcagcaagtactcaagaaaaatatttgttaaatgaatgaaaatgctagcagagaccattggctgaaag

SEQ ID NO: 1031217 - DNA, 120 bp, Artificial Sequence
  ENSG00000225689_34 (sequence is synthesized)
tttgctaatataatctttatattttataatctttgtattttatatttttacaaccatctttggaaacaggtatttattatgccgattttgcaaatgagaacactatcttcaatggaagga

SEQ ID NO: 1031218 - DNA, 120 bp, Artificial Sequence
  ENSG00000225689_35 (sequence is synthesized)
taaccacatctacatttgaagtgtagttagagggatgctcctcaagctttaatatatatttgaatcacctgaggaatcttaataaaatgcaaattcctattcagtagttctgagttgagg

SEQ ID NO: 1031219 - DNA, 120 bp, Artificial Sequence
  ENSG00000225689_36 (sequence is synthesized)
cccaagtttctgcatttcttacaagctcccaggtgatgcccacacggctgttctgagtgagccagcactctgagtagcaacattcccttagaattacctgcagatgagtatgtaaaattc

SEQ ID NO: 1031220 - DNA, 120 bp, Artificial Sequence
  ENSG00000225689_37 (sequence is synthesized)
aaattattggtctacacagatatactaaatcataatcatagttcgggaaatgagaatcagctacctacagtacaagcaatctggtaattattatgaaaattaaatgagtaaagtgtgtgt

SEQ ID NO: 1031221 - DNA, 120 bp, Artificial Sequence
  ENSG00000225689_38 (sequence is synthesized)
taagtgctttataaaccaaaagtagtatgtaaatattagaataacatttttattttataattgttactattattattgtttgatggtgacacaaatttgatttctgtaccactccaagca

SEQ ID NO: 1031222 - DNA, 120 bp, Artificial Sequence
  ENSG00000225689_39 (sequence is synthesized)
ggggctgcataaattctggcaagagaaactggctgtgttgaactagagtggaagattatagagagaaaaagctacatacagagtaaattgcttctcactgacaagagggcaagaatgtgt

SEQ ID NO: 1031223 - DNA, 120 bp, Artificial Sequence
  ENSG00000225689_40 (sequence is synthesized)
attgtctgtgaccaaatttgaaacacatgtgaaggtgattgcttggcgccattttgaattttgcccaagcataattgaatttacctgggttcatggtaggtcccagtggagagtctgtgg

SEQ ID NO: 1031224 - DNA, 120 bp, Artificial Sequence
  ENSG00000225689_41 (sequence is synthesized)
gctggaatagtccaatgcccaggaactgagggtagaaactgtaagttgacagccagagaaaatgcatcatgcaaaaacaagttgaaaggcctcagcagttatctctgaggaacctatgta

SEQ ID NO: 1031225 - DNA, 120 bp, Artificial Sequence
  ENSG00000225689_42 (sequence is synthesized)
tttgcctcataagatgaagaattcatcacatccataatgcaccaagatcagctagcgtcttttaccagttgtgatggttaattttatgtgtcaatttgactgggcccatacatttggtca

SEQ ID NO: 1031226 - DNA, 120 bp, Artificial Sequence
  ENSG00000225689_43 (sequence is synthesized)
tacatgattctaggtgtatctgtgagagtgttttggatgagattaatattggaatccctagatggaataaagaagatggccctccctaacgtgggtgagtcccatccaatcagttgaaca

SEQ ID NO: 1031227 - DNA, 120 bp, Artificial Sequence
  ENSG00000225689_44 (sequence is synthesized)
cctgaataaaataaaaatactaaccctcctgtgagtaagagggaattcgtcctgcctgattgccttcaaatggggacattaattttttcctgtcttcagacttgaactgaagcatcagct

SEQ ID NO: 1031228 - DNA, 120 bp, Artificial Sequence
  ENSG00000225689_45 (sequence is synthesized)
cttccttgtcttgggcctactggccttcagactggaaatacatcatcagctctcctgggtatcctgcagatcttgagacttgtcatactccataattagaaatcaatggccccaggaggt

SEQ ID NO: 1031229 - DNA, 120 bp, Artificial Sequence
  ENSG00000225689_46 (sequence is synthesized)
tatctataccagcctactgtctgcaacatcagtgggagcttatttggcatttgataccaatcccagaagaggatatgaatccctgagtgcatttcccaatggcacacgctcgcttcttgt

SEQ ID NO: 1031230 - DNA, 120 bp, Artificial Sequence
  ENSG00000225689_47 (sequence is synthesized)
atatgtctgaacatctaggcaacctgggtctccagctcatgagaaagatatcaagacctggatcccagtgatggatacatgagacaaagattagggaatgctgaagatgtgttcccatga

SEQ ID NO: 1031231 - DNA, 120 bp, Artificial Sequence
  ENSG00000225689_48 (sequence is synthesized)
gttcctgcctccttgtaccccactgagtggaatgttaaaaatacggagaaagcaatttctacagatgcagtcccacctctggccatggccaaaattagctggataattctttgaatctgg

SEQ ID NO: 1031232 - DNA, 120 bp, Artificial Sequence
  ENSG00000225689_49 (sequence is synthesized)
ctaatgtggaatcttgcaaggacaaagaggatttgctcacgaactgggaagaattatcataccaaatcaatgaggatatttgctgccaaaggcttaggcatggaggccaactggattctc

SEQ ID NO: 1031233 - DNA, 120 bp, Artificial Sequence
  ENSG00000225689_50 (sequence is synthesized)
atccatgaccctgataggacatcctgaaccccatttatgttgttttaagagtgattccataacctcaagagatcctagcctgatcttggcagccctatatccggagctgggatgagcttt

SEQ ID NO: 1031234 - DNA, 120 bp, Artificial Sequence
  ENSG00000225689_51 (sequence is synthesized)
acagctacctatagaatgagaaggaaaagactctgaaagacctttctgacaaaagctatcatcctccatgaaagtcctggtcaagaggctggctagttattgatcagaatgtggacaggc

SEQ ID NO: 1031235 - DNA, 120 bp, Artificial Sequence
  ENSG00000225689_52 (sequence is synthesized)
cctgaagagaaaggggctatgtgacttgatagcacacttttcccacatgtaagaatattgttttgtttatattccctcttcactctactccctgcacccacccccacttgccccaaaaat

SEQ ID NO: 1031236 - DNA, 120 bp, Artificial Sequence
  ENSG00000225689_53 (sequence is synthesized)
taatttttttttttctgcagacttgatttcttgtctccttacatcagcactgaaaatatcctgggcttctttgacagcaagatgtctaaatgcttcctgacaattcatggtttaataccc

SEQ ID NO: 1031237 - DNA, 120 bp, Artificial Sequence
  ENSG00000225689_54 (sequence is synthesized)
ttccctctttacctctgattgtgtcattatttcctctacatcttcaattacacctcctcataggactggcttattgtctccctcattatagagacatctctgtttccaggaccttttaga

SEQ ID NO: 1031238 - DNA, 120 bp, Artificial Sequence
  ENSG00000225689_55 (sequence is synthesized)
agctgtgacaggttggtggcggtgtatttttcacttcagaagctaagaacttttgctagaatatggaggccagagtaactgggctttaatgctagattctgcacagagaagacaaaggaa

SEQ ID NO: 1031239 - DNA, 120 bp, Artificial Sequence
  ENSG00000225689_56 (sequence is synthesized)
aaaacaagatgaaatatttggcagaatgctgaagatgtgttcccatgagttcctgcctccttgtaccccactgagtggaatgttaaaaatacggagaaagaatttaagacctgccagatt

SEQ ID NO: 1031240 - DNA, 120 bp, Artificial Sequence
  ENSG00000225689_57 (sequence is synthesized)
gccctaggcaaacagccccagtgaagtcagctctaaggacatattgagggaacaatcggagaaactggttgttttacggaggctttgactggaatggtgtcctttcctttaaggaatcaa

SEQ ID NO: 1031241 - DNA, 120 bp, Artificial Sequence
  ENSG00000225689_58 (sequence is synthesized)
acttaacttacggatccaacaaaagccccttgagaaaactggactcatacttgtctacgcagtctctgaacagagttcctgacctgtgagatctggaacaaaatctacaatatctccaag

SEQ ID NO: 1031242 - DNA, 120 bp, Artificial Sequence
  ENSG00000225683_0 (sequence is synthesized)
cagagaggctgtgacctcccccaagggtggtgcagaaagcggccatagcagtgaaggggaaaggcctcgtggcgttggggggccactcgccataaaggtgtgggggtcagagaaagggaa

SEQ ID NO: 1031243 - DNA, 120 bp, Artificial Sequence
  ENSG00000225683_1 (sequence is synthesized)
gatcagaggacactggaacttgacactgagctgaggaatgagactgggtgggatcattcatagaaatttcatctgaagcctgggaaggaagtaggtttggggggtggcgggaagggatga

SEQ ID NO: 1031244 - DNA, 120 bp, Artificial Sequence
  ENSG00000225683_2 (sequence is synthesized)
tggtgaagttagttttttaattattgcttttatttatgtatttattgtttgcaattttgaggtctagtgtccatttaagtggaatggcttaggaaaaggtgctcatattttaagctgttc

SEQ ID NO: 1031245 - DNA, 120 bp, Artificial Sequence
  ENSG00000225683_3 (sequence is synthesized)
tcctggactaagggtgaatacatagtccctcttttaacttgaatctaagtaacaggttttttgtttgtttgttttgtttttcaaatgataatatgtaatattttaaattcagtattctaa

SEQ ID NO: 1031246 - DNA, 120 bp, Artificial Sequence
  ENSG00000225683_4 (sequence is synthesized)
taaatgctaaataagggatttctgatttcagttgtttcaggaacacagtcatccctcagaaatggattgggtgacaagtggtctgcatgctgcacacgggcactggagtggacaatttat

SEQ ID NO: 1031247 - DNA, 120 bp, Artificial Sequence
  ENSG00000225683_5 (sequence is synthesized)
tagacccgaggaatataaaggggactgggagaaagcccggcctccctggagctcttcacgtgatgacaggcgcagatcagcggacaggcgcgtaacaggaggtgctaagtgcgcaggtgg

SEQ ID NO: 1031248 - DNA, 120 bp, Artificial Sequence
  ENSG00000225683_6 (sequence is synthesized)
ggtcacgtgccgcgtcacagcagtgctggaggagagtcctgactcatggcctgggatgctggggttcctccccagagaagctcttttggacctgggagaaggagtaggactttgatacac

SEQ ID NO: 1031249 - DNA, 120 bp, Artificial Sequence
  ENSG00000225683_7 (sequence is synthesized)
catggaggtctctgaatgtaaccaaattgttctcctcttatcattcccattcactggtgtacttgtttgtggagcctgcagaactgcctttttcaagaatgcttaaggctaatttaaaag

SEQ ID NO: 1031250 - DNA, 120 bp, Artificial Sequence
  ENSG00000225683_8 (sequence is synthesized)
gatggtgaggagattctattttcaactggctgaagttcaataagaataaaataaaacactgttgtagcaaactctttcacagtggaagtttggcaaagctaaatctcattcctttcgatg

SEQ ID NO: 1031251 - DNA, 120 bp, Artificial Sequence
  ENSG00000225683_9 (sequence is synthesized)
tgctccagtacagccaaaatactgttccagtgagtaagacacccattagagtgatgagcttcctacagaacaagaatctctccatattttattttaaaccaaaccagtgttgcattgctt

SEQ ID NO: 1031252 - DNA, 120 bp, Artificial Sequence
  ENSG00000225683_10 (sequence is synthesized)
catccctcagaaatggattgggtgacaagtggtctgcatgctgcacacgggcactggggcaaatggaacaaacaaaacagtcaaagaggagagcagggagagaagacagattcagtgttg

SEQ ID NO: 1031253 - DNA, 120 bp, Artificial Sequence
  ENSG00000225683_11 (sequence is synthesized)
ccctcggcagatgcagaggaaacgagcacaaaaccctttcacatgtgccgggcgcaagcgacgctgcccagaaaccccgcgccaagccctgcagccgaggaattggagcttctgtgttac

SEQ ID NO: 1031254 - DNA, 120 bp, Artificial Sequence
  ENSG00000225683_12 (sequence is synthesized)
tccaaacaatgcatctgtctttcattacactcggatttagatgaaatcggggcgcttgtgggcaaaccagtgaagatttcaaataagagaaattgtattatattagaatcataacgtttt

SEQ ID NO: 1031255 - DNA, 120 bp, Artificial Sequence
  ENSG00000225683_13 (sequence is synthesized)
aaaaataattctgtattgaaggaagtttttaaagaatggctaatggtgccttagatgcaatgaagccctttcattcgttctctccccctgtcgccccattctcatcttcactgtcctaaa

SEQ ID NO: 1031256 - DNA, 120 bp, Artificial Sequence
  ENSG00000225683_14 (sequence is synthesized)
tgaggcctccctggtcccctcgcctgggccgtcacagaggcctctgagtgatgtttctcctcccagctttcccctttctgccaggctccctccctccagttagcttcccgaagcctggac

SEQ ID NO: 1031257 - DNA, 120 bp, Artificial Sequence
  ENSG00000225683_15 (sequence is synthesized)
agggtgaaccgacttgaaggcttgaatttgagccccctccttgctcaccccacgctgggccagcgcctctcccctgggttaccctagtgcgctgtgcttacccggatctcaacacttatc

SEQ ID NO: 1031258 - DNA, 120 bp, Artificial Sequence
  ENSG00000225683_16 (sequence is synthesized)
acaaggatggaggtttgtggccatttcccctttttccccctgagacaggggtctccacaggggtggggctttgacccctttatgggtgtattcttggtactggttcctccaggcaaccaa

SEQ ID NO: 1031259 - DNA, 120 bp, Artificial Sequence
  ENSG00000225683_17 (sequence is synthesized)
taaatatccactggctgatgggatgagtgatgtcactccccatccgcggttcctcactgagatttggtgcgttctttgggttgtagtcagacctctctcccccagggccctttccgttct

SEQ ID NO: 1031260 - DNA, 120 bp, Artificial Sequence
  ENSG00000225683_18 (sequence is synthesized)
gccgtcctcagcgccccctaccagcccctgccccacgctggctccaccaaaccatttaccgtttcctgcgcaggcagcgcggcctccctgtttggtgcctctgctatgctgttcctggcc

SEQ ID NO: 1031261 - DNA, 120 bp, Artificial Sequence
  ENSG00000225683_19 (sequence is synthesized)
gcattctgtatgtgagaccatgtagcacttgccacatgcgtgtccttggtagagtgttggcacttggggatagggacctggtgttagtatttttttttaaacccccatagaccctaacat

SEQ ID NO: 1031262 - DNA, 120 bp, Artificial Sequence
  ENSG00000225683_20 (sequence is synthesized)
acgtgtaaggcacctaggagaggctcaacacatgcttttggctttttaacctctgttaaaaaaaagtcaccattgcaaacccttgtccagcatctttggttcatgtacatacatacatac

SEQ ID NO: 1031263 - DNA, 120 bp, Artificial Sequence
  ENSG00000225683_21 (sequence is synthesized)
cctgagcatgcatgactttaccaaatcaccacaggagctctgccaggaaataaagtcagaatcctgaacctcagaatggttcaggtacttgcctaaggccactcagctaacgctactaac

SEQ ID NO: 1031264 - DNA, 120 bp, Artificial Sequence
  ENSG00000225683_22 (sequence is synthesized)
tgggatttaaatctaggtttctgtctctaaaccatgtggcctatctagttcacaatgtttggaattcaagtgtgatgggggcccagcttgaactaaggccccaaaaacgggccagtggct

SEQ ID NO: 1031265 - DNA, 120 bp, Artificial Sequence
  ENSG00000225683_23 (sequence is synthesized)
gagaggtggaatgaatttgagaactgtattatctgttaatctgatagttttgcaatccagcccgcatcgttcctggaggagtgaaaggttcaaagagatcttaaggtagctctactctct

SEQ ID NO: 1031266 - DNA, 120 bp, Artificial Sequence
  ENSG00000225683_24 (sequence is synthesized)
ctcctatgcagcttcttaactcaagcgagggaagagcccgaggtcccttaataaccatccccagcgcccactgagtgtggactgacatagaggctggatgggaattgaggcagagtcttg

SEQ ID NO: 1031267 - DNA, 120 bp, Artificial Sequence
  ENSG00000225683_25 (sequence is synthesized)
tccagacctgggagaaaattcacactttggcagtgtgaactggggacttagtttagaggccaacgtagaggatattctcttgttagatggagcagaagaggaagagattggcagccacca

SEQ ID NO: 1031268 - DNA, 120 bp, Artificial Sequence
  ENSG00000225683_26 (sequence is synthesized)
aatggaagctgaaaaggctgtgccatgaacacatgtgactgagatatcgaaaggaatttgagggagattatggctattgcagagcaagtgaaaacagaaacaaatactattttgttactc

SEQ ID NO: 1031269 - DNA, 120 bp, Artificial Sequence
  ENSG00000225683_27 (sequence is synthesized)
attgtgacctaattttttcctcccaattacccttcctgatatggcctcagtgttttcaaaaacaaatattttacatcttattttttttaagccaaacatttttttttaaatgtggaactt

SEQ ID NO: 1031270 - DNA, 120 bp, Artificial Sequence
  ENSG00000225683_28 (sequence is synthesized)
tgtagaacttcatgattaggcatgagaacagaaaaataatataaataaaaatctgaaatcatgtctattttaatcaatttctgcttatctgagaaaggctgttctttgattcatgacagc

SEQ ID NO: 1031271 - DNA, 120 bp, Artificial Sequence
  ENSG00000225683_29 (sequence is synthesized)
cagcttaaaaacaaatcgcaatatctatttatctgtaaaatatattatttatagatttaaaataataattcaggcctacaaattctttttccctttgaaaatgtatcttcacaattattt

SEQ ID NO: 1031272 - DNA, 120 bp, Artificial Sequence
  ENSG00000225683_30 (sequence is synthesized)
acaagtggtctgcatgctgcacacgggcactgggtgagtgtgcttggagctgtttgtcaggacatcatcagcaatagacagaacacgagggaagtaatcagtgaaagaagacgaagttgt

SEQ ID NO: 1031273 - DNA, 120 bp, Artificial Sequence
  ENSG00000225683_31 (sequence is synthesized)
taagttgtttctgactttatctttggagcgggctcacagaacatttgagtgggctttttggtataagagaaagagccctacacttttgcccaattctagttctaggctccaaaacaaatt

SEQ ID NO: 1031274 - DNA, 120 bp, Artificial Sequence
  ENSG00000225683_32 (sequence is synthesized)
ttactagggttctgaactgacgggttagactgtttttgttaacttttattcttataaatatttttggccattgcagtccaatcagaagaaaagtagaaagcaggtcatttttaccttctc

SEQ ID NO: 1031275 - DNA, 120 bp, Artificial Sequence
  ENSG00000225683_33 (sequence is synthesized)
taagaaaagaaatccaaaatttacaggaaagcccattcttgaaagtcccttgtgctgctaggcagggcctttcgattattttcagacagatgttgaaccttcagaatttcctccgtgcat

SEQ ID NO: 1031276 - DNA, 120 bp, Artificial Sequence
  ENSG00000225683_34 (sequence is synthesized)
cggggtcactgactacttgtgtctaatgcaactctgcactaactagattgtgcgccgacctctattttcactttcaaacctcatattccaacgttgctcaaggttgactgtcactgactg

SEQ ID NO: 1031277 - DNA, 120 bp, Artificial Sequence
  ENSG00000225683_35 (sequence is synthesized)
ggcttttctttacgactgtacttatgaagaacaaatgtacttgtaaatgtttggggacttcaaatttagtttacaaatgtgtagtcctcattgaagattcgatttgtattatatttaggc

SEQ ID NO: 1031278 - DNA, 120 bp, Artificial Sequence
  ENSG00000225683_36 (sequence is synthesized)
aagttttctggctcttaatggggtcctaatgagtcaccgatggtaaggcttcagattcagaccttcctgttaggatggggatgagctgtttgtcctcatttgccaattatttggaagaga

SEQ ID NO: 1031279 - DNA, 120 bp, Artificial Sequence
  ENSG00000225683_37 (sequence is synthesized)
aaaccaatgtaatgcaatcggaatccagttgtattattaagacccgcatttgaaacctagtttcttctatcagaagtaatttttctgatttttggattatgtacttctccttcatataaa

SEQ ID NO: 1031280 - DNA, 120 bp, Artificial Sequence
  ENSG00000225683_38 (sequence is synthesized)
tgaatgttactgcttttgtggtgttaccagacctagcttatagaaataaatgacaggccacctgggggtctgcccgtgcaagcatgaactaagcagcaacaagcagtatgccctgcggtg

SEQ ID NO: 1031281 - DNA, 120 bp, Artificial Sequence
  ENSG00000225683_39 (sequence is synthesized)
accagtgtgtcagcattcacataagcccgggacagtgaatgcgggcccttgtcagtcacgggcatcaggcgcatggcactgggcacagctgactgcctgttgatgctgatggctggatgg

SEQ ID NO: 1031282 - DNA, 120 bp, Artificial Sequence
  ENSG00000225683_40 (sequence is synthesized)
ctgcatttaagtacactttcacaaaactcatttgtatctcttcccgaagaaacctaaatggaattaatttgttggagggctgcaatgtaaaatttttaaatagagaacaaaatggagtat

SEQ ID NO: 1031283 - DNA, 120 bp, Artificial Sequence
  ENSG00000225683_41 (sequence is synthesized)
gttgctgtttcatggaagagaacacgggagaaactagcaatctgtaagctaaaaattgatggcagcccctgccacaatgaataattggcaatgccattcagcctttaaaggtatcagata

SEQ ID NO: 1031284 - DNA, 120 bp, Artificial Sequence
  ENSG00000225683_42 (sequence is synthesized)
atgaataagctgggcataaggcatctagttcccttccattattctccaataggttatgtaataaacatccatccctgaaagataattctgtttttcattgttctgtaagagaagataatt

SEQ ID NO: 1031285 - DNA, 120 bp, Artificial Sequence
  ENSG00000225683_43 (sequence is synthesized)
ctctctttttttaaattgtcctggaagacattcttaaaacaccttgttaacaaactggctaaatgtccacctacagaattgcactaactaaaaccaaaattagtcattagagctgttatg

SEQ ID NO: 1031286 - DNA, 120 bp, Artificial Sequence
  ENSG00000225683_44 (sequence is synthesized)
catttgtcagcaaatcccttatgtccatctcatgcctgacttttctttaacaaaactatgttatacgtagaacttagcagtacagatgatgcctgctttgatcatacaaacgggctttat

SEQ ID NO: 1031287 - DNA, 120 bp, Artificial Sequence
  ENSG00000225683_45 (sequence is synthesized)
acatgaattgtaatttccactttaatttgtttttgcgaaatctttcctgcagtatcattccatctcagcattccccaaccacctttgacattttaatcaattatcctctcatgtcttgtt

SEQ ID NO: 1031288 - DNA, 120 bp, Artificial Sequence
  ENSG00000225683_46 (sequence is synthesized)
aggccacaaacgtatgggctctattttttcaaagaaaagtatgttggtcacttacaagatggatccaaatgtaaaagatgtttttcacgttctagcgtacattcctaattgttcttagtc

SEQ ID NO: 1031289 - DNA, 120 bp, Artificial Sequence
  ENSG00000225683_47 (sequence is synthesized)
aatgtctgcaaatgaatagtatgtggaaatatcctaagcccatgcttgctttgtacaaaggaatcctttcccctctactgaatgctatctggatgggcaatgacgacagtttttcagatc

SEQ ID NO: 1031290 - DNA, 120 bp, Artificial Sequence
  ENSG00000225683_48 (sequence is synthesized)
tcaaacacaacagaacgacacaccaagtcagacatgaactaaactgcaattgtaactactgagggaatttttatgcagattatgtaacaaaaatgaaactagacaaagtgtgagaaaggc

SEQ ID NO: 1031291 - DNA, 120 bp, Artificial Sequence
  ENSG00000225683_49 (sequence is synthesized)
cactaaaataaaacggtcaggccacgctttagaactgtagaatcaaagagtcttcacctttctaggctggagacgaccttctcactcacggaccaaacccttggtgtgacctctatttcc

SEQ ID NO: 1031292 - DNA, 120 bp, Artificial Sequence
  ENSG00000225683_50 (sequence is synthesized)
caagagatgagccttcaggcctgaggatcagtggcctgattcttataaaggagacggtggactcacaaaggcatcacgtcagtattttaacaagctcacctctaagagatgacgttagat

SEQ ID NO: 1031293 - DNA, 120 bp, Artificial Sequence
  ENSG00000225683_51 (sequence is synthesized)
agttagtaagctcaatcattttgatcaggtacaggtttttagcaacaactgtcatcaaaacaggttttccagtagcaaatgaatttgatactgactaaacatttggtaaaagatgactat

SEQ ID NO: 1031294 - DNA, 120 bp, Artificial Sequence
  ENSG00000225683_52 (sequence is synthesized)
gcacatgccaaagaaaagagtgacttgggagagctttttctatacaaagaatggttgacttggggctcctgcctccccgatgttctgatgcaaaccagtcctgtgtgtggggactctatt

SEQ ID NO: 1031295 - DNA, 120 bp, Artificial Sequence
  ENSG00000225683_53 (sequence is synthesized)
tgcacagatcacatagttccctgtaggaaaagatactcatataaacccacacaactccaacatagctcaacaagtagaattttaaaaactaatattgtaaggggtgtttcaaagagatat

SEQ ID NO: 1031296 - DNA, 120 bp, Artificial Sequence
  ENSG00000225683_54 (sequence is synthesized)
acagaagctttagagaggcacagggtgagttcctaaaaccagagtcaacacacactcttcatctgttttgtgcttcactccctgctcatcttcctaaaacactgagtttggtcatatcat

SEQ ID NO: 1031297 - DNA, 120 bp, Artificial Sequence
  ENSG00000225683_55 (sequence is synthesized)
gtcctacaagttgtcaatgatttcccatgatcttgtcttcaggataaagttccttagtcaaaagcaatgaagacctgacctaatctgtaaggcaaaatcaacactttttagcctggcctt

SEQ ID NO: 1031298 - DNA, 120 bp, Artificial Sequence
  ENSG00000225683_56 (sequence is synthesized)
ccatgcccttccatgcccttcgagcccccagagcacccatggcagtccatctctctctacttgtccagagggacactctcttagagccagtggctcctactcacggttccccgaacacgt

SEQ ID NO: 1031299 - DNA, 120 bp, Artificial Sequence
  ENSG00000225683_57 (sequence is synthesized)
cgtgggaatgtttgccttcataccttcccagatcattttcctgatctcagacaccctccgtcctcattcattcactcttcaattgtccaacaaatatttgttgctcatgcaacctggatc

SEQ ID NO: 1031300 - DNA, 120 bp, Artificial Sequence
  ENSG00000225683_58 (sequence is synthesized)
acccacatagtttcaagactgcatcttctaaactatttaaatcctatccattcttcaagaaatgtttcatgacgcttccttaactgctaaggacccgcagattctcttcctcttgggact

SEQ ID NO: 1031301 - DNA, 120 bp, Artificial Sequence
  ENSG00000225683_59 (sequence is synthesized)
cacacactgactcatctcccgatcttttggtgctcagcaaagtggaggcttctgttttggacttagagtcaagaccattaaataagactatgctctaaaaagtacacctccgtggcccgg

SEQ ID NO: 1031302 - DNA, 120 bp, Artificial Sequence
  ENSG00000225683_60 (sequence is synthesized)
aacgagtgaattaacatctatgagtttccatttccttgtctataaaattgtgaaattgcaacttaagattagttctgaagattaaatgaggtaacataggtgaaaatgctacatttatgt

SEQ ID NO: 1031303 - DNA, 120 bp, Artificial Sequence
  ENSG00000225683_61 (sequence is synthesized)
aagaaattactctttcataaggatgtcaatgtttaaatacgcattttctcaattttgttaatgaaatactttgaaattcttttttctaatgaaacctgctgaatgtaaaagagacccgta

SEQ ID NO: 1031304 - DNA, 120 bp, Artificial Sequence
  ENSG00000225683_62 (sequence is synthesized)
ctaaagaaagataccacatgaagcaccaagggtctctttctggatctatcatgactcttgtgactgtttcagcagcacagaaattaaaggcgattgttattctggaggaagacaatgagt

SEQ ID NO: 1031305 - DNA, 120 bp, Artificial Sequence
  ENSG00000225683_63 (sequence is synthesized)
ctcatctatatcttgtttgggttgattttgtaaacagaacattccaaagatcattcttgccttttgtttccactgagaactagaataaagtaaaacaaactatcaatttaaggaaagcct

SEQ ID NO: 1031306 - DNA, 120 bp, Artificial Sequence
  ENSG00000225683_64 (sequence is synthesized)
cgaaattgttagcaatttcttcagtaactttcatccatcaactgattttatgaacacaaatttgcagaaatgggcaagaaaaactacttaactcattggtgggaagcagtgggctctcta

SEQ ID NO: 1031307 - DNA, 120 bp, Artificial Sequence
  ENSG00000225683_65 (sequence is synthesized)
aggagggagagatagcagtgatttcaccaccggaccgtggaacacaaagagcctggaagagtctatcactttcaactgaaaccgcaagaagaactaagtaggttaagccctaagaatgtt

SEQ ID NO: 1031308 - DNA, 120 bp, Artificial Sequence
  ENSG00000225683_66 (sequence is synthesized)
cctaggtaacctacttgagttgaaatttgactaagaatccttacaccctacctaagagaggtaacgctattaggatcggaagtgattggaagctttgtttcagatctcgtccaaaaggga

SEQ ID NO: 1031309 - DNA, 120 bp, Artificial Sequence
  ENSG00000225683_67 (sequence is synthesized)
gaacggtcaatgacaaagctgctgtgaatagtattctgggggcgtggtggaaccccgattcactgctatctcccgaatcagcaacttgacagagcgcgcctcccgggccttggaagcctt

SEQ ID NO: 1031310 - DNA, 120 bp, Artificial Sequence
  ENSG00000225683_68 (sequence is synthesized)
ccattccgagctggctgggtgggactcaggttttacggtatgctggactttttccccgtgagttaaaacacatttatagtaactaagtggttaatgatgagaaaaaaccccaaactactg

SEQ ID NO: 1031311 - DNA, 120 bp, Artificial Sequence
  ENSG00000225683_69 (sequence is synthesized)
ggctggaaatggaagatgagaggatcctggacaacctgggggcagagggacgtcatggctctgagtgggagtggagaagatggcattttggtggatgggtggaggaagagcataggcaca

SEQ ID NO: 1031312 - DNA, 120 bp, Artificial Sequence
  ENSG00000225683_70 (sequence is synthesized)
acgtgatcattttagatacaggaaatgacttcttttaatttttcttgtagtgaaagttttacaattctttagtcaagcctactgattagcttaaaaaccctaataaaaggagtgaccaca

SEQ ID NO: 1031313 - DNA, 120 bp, Artificial Sequence
  ENSG00000225683_71 (sequence is synthesized)
catacatctctgtaggtataaatcaaggttgggaaattttaaaggtgcatttctttttcttccttttttttttctttaaccctatgtcttctaggcagcttggcctctaaatctgcttcc

SEQ ID NO: 1031314 - DNA, 120 bp, Artificial Sequence
  ENSG00000225683_72 (sequence is synthesized)
aacaacaactgccccggtgcttccccgtagatagcaccgctgttgtttcaggaacacagtcatccctcagaaatggattgggtgacaagtggtctgcatgctgcacacgggcactgggct

SEQ ID NO: 1031315 - DNA, 120 bp, Artificial Sequence
  ENSG00000225683_73 (sequence is synthesized)
actggtgtacttgtttgtggagcctgcagaactgcctttttcaagaatgttcatttgatgagctgacattaggagctacaaatgaagtaacacggactcgtactggtaagaagagactac

SEQ ID NO: 1031316 - DNA, 120 bp, Artificial Sequence
  ENSG00000225683_74 (sequence is synthesized)
agatgaaaaggagtgggagaatgaaggagggaataaaaagaaaggtctaagcgataaaagaagtaggaactggagcaaccctgtagaagatcagtgaatcggctgagagttggttttgga

SEQ ID NO: 1031317 - DNA, 120 bp, Artificial Sequence
  ENSG00000225683_75 (sequence is synthesized)
tgcaaggtgggggaagctggaccacttgagggctgtttctatcagatgccaggctactttccaagctaccataagatttagaataaaagcagggcgaaccctgtggcagcggcttgtgtg

SEQ ID NO: 1031318 - DNA, 120 bp, Artificial Sequence
  ENSG00000225683_76 (sequence is synthesized)
gcacaacagagtagggtgagtccttgagagagtaggggcggtcctgaccccagcgggagcaggggattctgggtagttttcaaaatggaggctcgccctctagtggtgcctggagagaat

SEQ ID NO: 1031319 - DNA, 120 bp, Artificial Sequence
  ENSG00000225683_77 (sequence is synthesized)
gccacgtggagtgtggtccacagataagtcacctggtggagtgcagccacagtgcctgagtcaggaggtctcagctcgtgagtgtatcttagctcaacgatacactcaagatccttgagc

SEQ ID NO: 1031320 - DNA, 120 bp, Artificial Sequence
  ENSG00000225683_78 (sequence is synthesized)
gaaatcaattcaacaacaactgccccggtgcttccccgtagatagcaccgctggtcagttcgggaggggatgggacattgaggagcaggacagtcttcaggaagcttacagtctgctttg

SEQ ID NO: 1031321 - DNA, 120 bp, Artificial Sequence
  ENSG00000225680_0 (sequence is synthesized)
attgagttactgatcaacagtgagcaatggaagctgttcaaacagaaaggaagcccagccgtgaggtggtgctgccaacacactcctttgaagctcggctggcccctgtggggagtgcag

SEQ ID NO: 1031322 - DNA, 120 bp, Artificial Sequence
  ENSG00000225680_1 (sequence is synthesized)
gaggctgggggtctactccctacggttcccagagaaatggtagcaagaagacggtgttatttctaattggatgatgaaagtcagcctaggggacagagaccaaagggccatacgtaagaa

SEQ ID NO: 1031323 - DNA, 120 bp, Artificial Sequence
  ENSG00000225680_2 (sequence is synthesized)
gaggaggaagtgaaaacatctgaatcaaaggttgaggtaaaactgagagacagtgtttgcagtgaaccatgcagtaaccttcatcttgccccctggtcttcaggaaacaagcaagtgggg

SEQ ID NO: 1031324 - DNA, 120 bp, Artificial Sequence
  ENSG00000225680_3 (sequence is synthesized)
cgaaagagggtactaaatttccaaatgatcagacgtgaagtttcatggcccataatggctacacatttgaagactcaagcaaataaattagaaataaagcctaccagcaaaccaaaagat

SEQ ID NO: 1031325 - DNA, 120 bp, Artificial Sequence
  ENSG00000225680_4 (sequence is synthesized)
aattacatgtaaaagcaagtctccttgatttctgatacttgcacttatgagaatgagaaaacaacgatagcacagagagatggtggacatggaggacaggtcctgtaggctcacttcatg

SEQ ID NO: 1031326 - DNA, 120 bp, Artificial Sequence
  ENSG00000225680_5 (sequence is synthesized)
ggctttttcataccctgaccactttccacgctggattcattttactgtagtgaaacaattggctgtagataatgttaaaagataggactttggtaacaggagaattcatggattcttgaa

SEQ ID NO: 1031327 - DNA, 120 bp, Artificial Sequence
  ENSG00000229196_0 (sequence is synthesized)
tcccccgcccactgctctccctctcctccagcgacgggctggtttttgccgcagtccctgaccaagaaaacccttccagggggcagctcagcctggggacaaccacagaagtgggacctg

SEQ ID NO: 1031328 - DNA, 120 bp, Artificial Sequence
  ENSG00000229196_1 (sequence is synthesized)
ggcccaaagacaggtgtcacctgaaacaggccactgttgtccgcctgcagtatgctgggaggaccagctcccgctccaccctgctccccctgggaggaaggctgacccctgcgtgggagt

SEQ ID NO: 1031329 - DNA, 120 bp, Artificial Sequence
  ENSG00000229196_2 (sequence is synthesized)
cagagtcactcctgcatgggattctagggctgggggtcccagaggggtggcctccgcccctcctgggggccgaggactgtcaccatgtcactacggcactctccagctgctgaccaaagc

SEQ ID NO: 1031330 - DNA, 120 bp, Artificial Sequence
  ENSG00000229196_3 (sequence is synthesized)
cctcgctaaccgcagccctgccatactctgggtctttcctctggagcaaggtgaagagactgcagcgaggcgtggaattgggaagctcttctggttttattaaaaactcgttccaccaca

SEQ ID NO: 1031331 - DNA, 120 bp, Artificial Sequence
  ENSG00000229195_0 (sequence is synthesized)
tgtgcatctagatgatctggtggagtttacacttcagaggcactgggaatgccaaagatttatttgcctctcattcattaagaagaaaaaagaaagaaaatgtaactaattgaagagtct

SEQ ID NO: 1031332 - DNA, 120 bp, Artificial Sequence
  ENSG00000229195_1 (sequence is synthesized)
tctgtttcaaaacccaccatcttcctggagtctgcgttgttctcttccagaatagatgttgagcttttaaacaaacctgcagtagaagcaagccctctccaggaaatcccaatctctttc

SEQ ID NO: 1031333 - DNA, 120 bp, Artificial Sequence
  ENSG00000229195_2 (sequence is synthesized)
caaacagggacagcaaaggttctctctgttgtggctgtttttccctctcttctgggaattggtttgccttctgagagcatcccaggaaggggaggtgcgccccaaattggcgaggctctg

SEQ ID NO: 1031334 - DNA, 120 bp, Artificial Sequence
  ENSG00000229192_0 (sequence is synthesized)
cagaagcaaggaagtaactgttgacaaagtgagacggaatagaagaaaaagatggaaagagtcagaaagaacagaaacattgatattcaaccatttgaaacaagaaagaaactctaagca

SEQ ID NO: 1031335 - DNA, 120 bp, Artificial Sequence
  ENSG00000229192_1 (sequence is synthesized)
agcagctgccacgcccatatctcagagccctagtgagttgtagagaagtttcaagagttagagtatttcctctgtacagtaactaaaataataaaagaccacaatttttattcataaaaa

SEQ ID NO: 1031336 - DNA, 120 bp, Artificial Sequence
  ENSG00000229192_2 (sequence is synthesized)
cttgaggggatgcaccagaagcaaggaagtaactgttgacaaagtgagacgggccacaaagtagagcttttcttgacatctgatggcagcacaatagtaagctgcaccgcttctgtggac

SEQ ID NO: 1031337 - DNA, 120 bp, Artificial Sequence
  ENSG00000229192_3 (sequence is synthesized)
gtgctgaaaaatagattagcaaaaaaaagaagtttgacataacccaagacaacatgttcgttaaatttcatagatgcaaaagagagaatgcttctgttgcaaaacatagaagtcttctgc

SEQ ID NO: 1031338 - DNA, 120 bp, Artificial Sequence
  ENSG00000229191_0 (sequence is synthesized)
gcagaccacgttagaacctcggctcctggagtagcagaacctcggcttcaatgggaccctcatttcataaatgaagaaactgagattcaaagaggggaactaccgaaggttacagagcga

SEQ ID NO: 1031339 - DNA, 120 bp, Artificial Sequence
  ENSG00000229191_1 (sequence is synthesized)
gttcgtggatggggaaactgagcctcacatgtatgaattccagcatataagcaacagactccagatttggacatgtatatcttattccaggcttcccagatgaccaccaaggtggaaggg

SEQ ID NO: 1031340 - DNA, 120 bp, Artificial Sequence
  ENSG00000229191_2 (sequence is synthesized)
atgatgatgtccaggcagaagggagctaggccggcccaggcttttcctctaggcacagcggactccaggttcagccttcccggatggtaatgttgcattctgaagagctactttcccgcc

SEQ ID NO: 1031341 - DNA, 120 bp, Artificial Sequence
  ENSG00000229191_3 (sequence is synthesized)
aactcatctctggacttctctggggcccaactctggtttcctgcctgcaggaggtcccctctgacttccgacagtagatgacccttctgactcacagttctactgctgggaaatgcctcc

SEQ ID NO: 1031342 - DNA, 120 bp, Artificial Sequence
  ENSG00000229191_4 (sequence is synthesized)
agagctgctgcccaccctctctgcatccctccaggtcactgggtgttgagtcaggggaagcagggatacacacgggcgggaaactcaggtctcctaaatgtcagagcctcaggacttcgg

SEQ ID NO: 1031343 - DNA, 120 bp, Artificial Sequence
  ENSG00000229191_5 (sequence is synthesized)
ctactcagaagtagctccctcctgggccaccagggagcagcagggcagccagcatccagacatcccccctgggttctgctgctcagaggctagatggagaaccaaggtgggaaaaaggct

SEQ ID NO: 1031344 - DNA, 120 bp, Artificial Sequence
  ENSG00000229191_6 (sequence is synthesized)
taaaccacagcgtggggagatttaggttagatgggtcagaggaagtttaggacaagccttgcccttttcagtttctgtccagcttcagcacagccactgcttcctctctttggtttttac

SEQ ID NO: 1031345 - DNA, 120 bp, Artificial Sequence
  ENSG00000229191_7 (sequence is synthesized)
ccatccccctctctcccatcacctctatccccttccagctttcctttccttccctccttcccaaaccccagagtttctcaggattagctgcccgtgtgcctatctcccccacccccatgc

SEQ ID NO: 1031346 - DNA, 120 bp, Artificial Sequence
  ENSG00000229191_8 (sequence is synthesized)
tttcctcactgtctcacagaaacaggcaaacacacacacatgcatacaaccatgagctggccctgagagttctctgactggactggggttggagccccagctcttgtcctgagctgaggc

SEQ ID NO: 1031347 - DNA, 120 bp, Artificial Sequence
  ENSG00000229191_9 (sequence is synthesized)
ccttcccccaggtatcttggggcttccatcatttctcttgacaggagctgtgggcgtctgggcagatgggaacctgggggaggtgtggggagccctctctgaggcaggaagctcccacgc

SEQ ID NO: 1031348 - DNA, 120 bp, Artificial Sequence
  ENSG00000229191_10 (sequence is synthesized)
caaatcaaaaacctaagagatacttataggccctggaaatgtctcccaaaagtggcctgaacttgagccctgtttccttttatcttcttcaggttagcactgggcattggcatttgcaaa

SEQ ID NO: 1031349 - DNA, 120 bp, Artificial Sequence
  ENSG00000229191_11 (sequence is synthesized)
aaaactctaagcattaagcaaaacttgtaggagtggaagatacagcgttctggacctccagtcctaatacccagccacaccccagcagctatgcatggttccatgggagagcaggcatag

SEQ ID NO: 1031350 - DNA, 120 bp, Artificial Sequence
  ENSG00000229191_12 (sequence is synthesized)
cccatcctgctggcatatagtccagccatatcttccaatgcccacctggagactaagccgagttctgcccagcaacaggagctcagagctccagagagcctctcctggggtgcagactca

SEQ ID NO: 1031351 - DNA, 120 bp, Artificial Sequence
  ENSG00000229191_13 (sequence is synthesized)
ggagatcttagctcaggagcagacttagcctgacttcctcttttataggaggagacagacttagttacagaggaaaccagagttgttataaatagcaaggaagggagaaacctgctatgg

SEQ ID NO: 1031352 - DNA, 120 bp, Artificial Sequence
  ENSG00000229191_14 (sequence is synthesized)
attacaaacacgccatcaatcttaaaacaaactatttttagtttcaaataataacgagagtctaattaatgctctgtataacttcaaatgtgggatctttatctgcctttctactttgtg

SEQ ID NO: 1031353 - DNA, 120 bp, Artificial Sequence
  ENSG00000229191_15 (sequence is synthesized)
atgctttctaatacagtattagggccaaaggcaggaagagatgtgggcaattctcaatgttaccaaatcctagatatggaaagaacctgagaaatttagtccagccctttcattttcagt

SEQ ID NO: 1031354 - DNA, 120 bp, Artificial Sequence
  ENSG00000229191_16 (sequence is synthesized)
gaagaaactcaggcccagagaggtaaaaggacttgtccaaagttgcatagtaaggtagggactgagcagtgactaaaagcctagtccctgtactccagaagcaggacagtttccacagca

SEQ ID NO: 1031355 - DNA, 120 bp, Artificial Sequence
  ENSG00000229191_17 (sequence is synthesized)
gtttccacagcagcacaatagaacccaaaggctaaacatctgtggttgggcagttggtgagtttatagcctggataaaagtcaggtctaagccaggtgtggaggctcacgcctgtaatcc

SEQ ID NO: 1031356 - DNA, 84 bp, Artificial Sequence
  ENSG00000229191_18 (sequence is synthesized)
gttgaacccgggaggtggagatttcagtgagccgagatcgcactactgcacttcaacctgggggacaaagcaagactctgtctc

SEQ ID NO: 1031357 - DNA, 120 bp, Artificial Sequence
  ENSG00000229191_19 (sequence is synthesized)
agaacctcggctcctggagtagcagaacctcggcttcaatgggaccctcatttcataaatgaagaaactgagattcaaagaggggaactaccgaaggttacagagcgagttcgtgggtaa

SEQ ID NO: 1031358 - DNA, 120 bp, Artificial Sequence
  ENSG00000229191_20 (sequence is synthesized)
aaagacagcccagaagctgaagtgtggtcttctgagtcaccgagttttgggttcacatcccagctctgcaactgactagctttgtaaccctgggcctgtgtgtaactactccaagcatca

SEQ ID NO: 1031359 - DNA, 120 bp, Artificial Sequence
  ENSG00000229191_21 (sequence is synthesized)
gctcccacatctcaaaatgagaataatcacactcacttcattacaggactattatgaggtttaaatgaggtaacgtgggtcaagcatccagcacagtgctcagcaaaaaatagatgttaa

SEQ ID NO: 1031360 - DNA, 120 bp, Artificial Sequence
  ENSG00000229191_22 (sequence is synthesized)
tttccttcccatttccctcggattctctaccccttcttcaatggattcttatcctctaactggacagaagggcagatttgtcataaagcagtcacgtgagggataagaagtctcacatga

SEQ ID NO: 1031361 - DNA, 120 bp, Artificial Sequence
  ENSG00000229191_23 (sequence is synthesized)
gtgtgaatgaggctgggggtgggggcgtagtttatggcaatgaagtttgcatggcacaagtggtcagtgtcagatccagagggcgggagaagacagatttgcagaaaattatccatcctc

SEQ ID NO: 1031362 - DNA, 120 bp, Artificial Sequence
  ENSG00000229191_24 (sequence is synthesized)
tgctaaccactcagtgacgggcctcggggttcagggtcagtgtttacaggggaggagggaggctgggcatgctgggtcctcattgtacacaaataccccgggcctcaacctcacccatgt

SEQ ID NO: 1031363 - DNA, 120 bp, Artificial Sequence
  ENSG00000229191_25 (sequence is synthesized)
gccacactgtgccaagggtgttacataacatttctcttttaatcctcacaacaatctatgaggcaaatactgttctcgtccccattttgcagaagaggaaatgagctcaaaggtcacttg

SEQ ID NO: 1031364 - DNA, 120 bp, Artificial Sequence
  ENSG00000229191_26 (sequence is synthesized)
gctagtgtatagtcattagtgctgtctccaaatatttccggctctctgccttctggcacaaggtaggactgcatgttctcactctttgatgctagctgtggacatgtgaccaactttaac

SEQ ID NO: 1031365 - DNA, 120 bp, Artificial Sequence
  ENSG00000229191_27 (sequence is synthesized)
caataaaacgtggcggaactgatgtgcgtcagctctagtggaagcattaagactctggcaccctcacacctatgttgttcatagagtgtaaatgagaaataaacttttattgttaaacca

SEQ ID NO: 1031366 - DNA, 120 bp, Artificial Sequence
  ENSG00000229190_0 (sequence is synthesized)
gaacatcatcactaaattgtaccgtcttcttctctgttttaacttattcaacttacactattacaaaatttgaatctcacaataacccactgaaaaagccaatgaatcttcctttattac

SEQ ID NO: 1031367 - DNA, 120 bp, Artificial Sequence
  ENSG00000229190_1 (sequence is synthesized)
aaaagaagaagaagcctcagaaaaggttgaaatcctaacccccaaagcaatggtatcagaaggtggggactttggaaagcgattaagtcatgaatgagattagcgaccttataaaagaga

SEQ ID NO: 1031368 - DNA, 120 bp, Artificial Sequence
  ENSG00000229190_2 (sequence is synthesized)
ccttcaacacacagtcaatctgtctgtgagaaataaattcctgttgtttataaaccagttagtctacggtagtttgttacggcagcccaaatggactaaggcagtaagtaagagagacac

SEQ ID NO: 1031369 - DNA, 120 bp, Artificial Sequence
  ENSG00000229190_3 (sequence is synthesized)
tacaggaagaactttaaatcaatttgaactgatttttaaaaaacacctgcaaattttaatacttcattatcagtaacaagcatcagtaacaattcattttcaagtaaaacatcacaaagc

SEQ ID NO: 1031370 - DNA, 120 bp, Artificial Sequence
  ENSG00000259604_0 (sequence is synthesized)
acagtcattgtttccagaccagccgagccaactggggaggagaggccaagcccagggagagcagtaagaggcccagcttgcaacacaggcccccggcggctggagtcggctcatgggttg

SEQ ID NO: 1031371 - DNA, 120 bp, Artificial Sequence
  ENSG00000259604_1 (sequence is synthesized)
ctggggggcagctggtgccagccctgctagacatgtccagggtcggggcagaggccagggtggctctcatccacaacgaggctccaggaagaggctccagagggcccaggtccctggagg

SEQ ID NO: 1031372 - DNA, 120 bp, Artificial Sequence
  ENSG00000259604_2 (sequence is synthesized)
gtgagtcctcagattgctccagggagactctacccctaggccctcatcctacctaggactgaggcagccatctgggtctctgcttccctaaccacttcctcctccacccgaccatcacct

SEQ ID NO: 1031373 - DNA, 120 bp, Artificial Sequence
  ENSG00000259604_3 (sequence is synthesized)
agtctcaaggacttgggcagcttctggaagtggctgagactggaagaatgttgtcacacctaccagatatccctacgtgtatctctaccacccccactacatattctgaagaaccaaggt

SEQ ID NO: 1031374 - DNA, 120 bp, Artificial Sequence
  ENSG00000259604_4 (sequence is synthesized)
gcaacaggaacctggagcctcaagagccgaggtgctcaggaggggcagcatgactccagggctcggaaggagcccctcaggggaacctcaagagtgctgcctgagtaactctcattacac

SEQ ID NO: 1031375 - DNA, 120 bp, Artificial Sequence
  ENSG00000259604_5 (sequence is synthesized)
ggcattcccatgagaacacagattctgacaacccctccatcccccaccttggtctccaccccaggactcacagcatggcaaaaatccaagggaagattcttgggtaactaatgctccttt

SEQ ID NO: 1031376 - DNA, 120 bp, Artificial Sequence
  ENSG00000259604_6 (sequence is synthesized)
acagggggtcccggatgaagggcagggggaaagtcttgtcactgtggggctaggatagatgaacccaagagtgatttgccaaacgtgcacatactcaaatcatttttcaaacattttggg

SEQ ID NO: 1031377 - DNA, 120 bp, Artificial Sequence
  ENSG00000259604_7 (sequence is synthesized)
tttggcaaaatgcatgttgctaagccccctttcccgacagtggtatacccatgtgaatttcaagggaaattcaatgtgtgtgtttctgattctcttaggcttatctcaggacaattattt

SEQ ID NO: 1031378 - DNA, 120 bp, Artificial Sequence
  ENSG00000259604_8 (sequence is synthesized)
agcaagaaccactttgtgtccaagaatcttcctgaaccctttcttttgtaagaccccttaaacaattttccttttaaccaggaagtatgttttgtctggagtaaattgaactgaaacccc

SEQ ID NO: 1031379 - DNA, 120 bp, Artificial Sequence
  ENSG00000259605_0 (sequence is synthesized)
gggaaggggcggctctcgagtagccggtagagctcggcgtactcgccccgctggaaggccaccagggcccgcgcgcgcaacaccgggtcgctgccacgtaggcgctcggccgggggcagt

SEQ ID NO: 1031380 - DNA, 120 bp, Artificial Sequence
  ENSG00000259605_1 (sequence is synthesized)
gcgcccaggaagcggctcaagcggccggcgtggcccgcctggagcagcgcctcgcagacgcacgccacctgctcgggcgagaagcggaggcccgtgggcggttcggaagcggcctcgggg

SEQ ID NO: 1031381 - DNA, 120 bp, Artificial Sequence
  ENSG00000259605_2 (sequence is synthesized)
ggccctcagctcccgcagccgctgcgcccgccccggccccggccgccgccgccgcctcaccctcggccgcctgcaaagtctgcaagagctggcgcgcttcctcctcctcctcttcggtcg

SEQ ID NO: 1031382 - DNA, 120 bp, Artificial Sequence
  ENSG00000259605_3 (sequence is synthesized)
cgcgcttcctcctcctcctcttcggtcgccgccgccgccgccaccgcctcccccccagccgccggccccgcgctcggctccgcaggcaaggtagccatgttttgcaactttgggaagttc

SEQ ID NO: 1031383 - DNA, 120 bp, Artificial Sequence
  ENSG00000259605_4 (sequence is synthesized)
ctccctccctctcttcctccctcgggctttccccagcctcctcccccacctgtccccccttttcgcccccactccccgctcttctcgatcttctttctggccgaccctgcgccccacgcc

SEQ ID NO: 1031384 - DNA, 120 bp, Artificial Sequence
  ENSG00000259605_5 (sequence is synthesized)
tctggccgcgctttctgcctccccccagcgtgtgcttctggctcagggcctcagtttccccatcgggacaacgcagaaggtaacgggccgtccaggaggactaagggcgcgaagcctccg

SEQ ID NO: 1031385 - DNA, 120 bp, Artificial Sequence
  ENSG00000259605_6 (sequence is synthesized)
ccccgagactgagcttctgcacgcctccgtctccagggtcctctgcaggcccccacattccccatctcggcctgcgctccgcccctcggaattcccggctccgcagggggggcgggtctg

SEQ ID NO: 1031386 - DNA, 120 bp, Artificial Sequence
  ENSG00000259605_7 (sequence is synthesized)
gccgggaggaggggcggggaacgggctagaaagtttgcagcaacttttctcgagcttgcgtcccaggagcggatgcgcgtggcgtgcgcaggcgcagtggaaggaggatggccgcgcgcg

SEQ ID NO: 1031387 - DNA, 120 bp, Artificial Sequence
  ENSG00000259605_8 (sequence is synthesized)
ctgccagcccagccccctcttctcgacgctcggtggcacagctgggccacagctgggcgggggcggtgcctccgggtggcccgctcgccctcctattggccggacgccaaagccccgccc

SEQ ID NO: 1031388 - DNA, 120 bp, Artificial Sequence
  ENSG00000259605_9 (sequence is synthesized)
cgtggcttttcctcccccaaccctgattcggccgcttcgcatcccgctagctcctcccagaccttcggccgcctccacacgcctccggattggcccgctgcggagcctccggcccacaac

SEQ ID NO: 1031389 - DNA, 120 bp, Artificial Sequence
  ENSG00000259605_10 (sequence is synthesized)
gcaaaccgcggacactgtggagtccagagctttgggcagatggagggccttttattcgcgagggtcgggggtgggggtcctaggtggggacagacaataaataccgaggaatgtcggggt

SEQ ID NO: 1031390 - DNA, 120 bp, Artificial Sequence
  ENSG00000259605_11 (sequence is synthesized)
tggtggtgtaatccgataactttattttaattgaaaatggaggcataacatgtcctagaaaaataaagatttaggatacaaaggagacacagcggcagggctgcccccagggatgaggga

SEQ ID NO: 1031391 - DNA, 120 bp, Artificial Sequence
  ENSG00000259605_12 (sequence is synthesized)
atctttggtctgggccggataatgaggacaagggcttgagtcgaggggagctggtgaaggaagacccccgtctccccacagctgccccaccccccgcccctggcaggaaatgccacactg

SEQ ID NO: 1031392 - DNA, 120 bp, Artificial Sequence
  ENSG00000259605_13 (sequence is synthesized)
gggagggtctccagtctcaggggcgcggggctgcctgtcctccaccttcggattccaggcagttgtgacaacaccagctatcggcagagctattaatagtgtttcagggagtgacaggga

SEQ ID NO: 1031393 - DNA, 120 bp, Artificial Sequence
  ENSG00000259605_14 (sequence is synthesized)
gagggctctgggggctggaagtccggccctggggcagggtgttccgcttacagctagtaccaagtggagggggcagggcccctgagtcaggaccctgagtcccccacgtatatggcaggg

SEQ ID NO: 1031394 - DNA, 120 bp, Artificial Sequence
  ENSG00000259605_15 (sequence is synthesized)
cacagcatggggagggctgtaacagagaggcctcccatccaaagggggatggagacctggacaggaggtggccggggatacaacccccagcaccaccagggcttggagaggccacccagg

SEQ ID NO: 1031395 - DNA, 120 bp, Artificial Sequence
  ENSG00000259605_16 (sequence is synthesized)
ccaatgtcgggagaggccacggggccacactgggtcacagttccaagggctcctccacaggcaccgactggagctgggtcagaaccttggcctcagcttccaacccctcgtcaacctcac

SEQ ID NO: 1031396 - DNA, 120 bp, Artificial Sequence
  ENSG00000259605_17 (sequence is synthesized)
cccctgcggtggcccccaggagcagcccctcagggtcggggtctggcagcctcagcacggtgtggggggcctgtgtccccagccccttttccgcttccagcagcccctctgttcctgcgc

SEQ ID NO: 1031397 - DNA, 120 bp, Artificial Sequence
  ENSG00000259605_18 (sequence is synthesized)
ttagttccagccctgctgaccagacaggcacggccgcgggtgacaacatcagcccctctggtgggggcgccgggaagttgggcaggaggccaggggagtcaggggagaagggcaggctgg

SEQ ID NO: 1031398 - DNA, 120 bp, Artificial Sequence
  ENSG00000259605_19 (sequence is synthesized)
tgctggaggtggtggcagcggcggggggtggctgctgtgcagaaagggtgcctagggcgtgagcctctgggagagcagggctgggggccaccgggaggcctccctcaggcacggagatgg

SEQ ID NO: 1031399 - DNA, 120 bp, Artificial Sequence
  ENSG00000259602_0 (sequence is synthesized)
atccagcaaaatcccaggttgtgtcaaagtattaatacattcagaagagaagaagccttaacaatgcaacttacaggaagaacaactgaataattgatcccagcagccgtttaactggag

SEQ ID NO: 1031400 - DNA, 120 bp, Artificial Sequence
  ENSG00000259602_1 (sequence is synthesized)
acctatggtttaaaaagtatcatctgtctatgaagagaaggaagcatataatcttcattatacagaggtttccatgtaaaatactgcatttttagaagactgacatctaaagggagaagc

SEQ ID NO: 1031401 - DNA, 120 bp, Artificial Sequence
  ENSG00000259602_2 (sequence is synthesized)
attcttactgaagccaaaagaaaatcagcatgaaaacagatcagcctctggccagggtcatccagcacctctgggtcttgtctttcaataaaggaatggctagaagtgtgaccccttccc

SEQ ID NO: 1031402 - DNA, 120 bp, Artificial Sequence
  ENSG00000259602_3 (sequence is synthesized)
caagacactctcctgccactgatggatcaacagaatgctatggagatgcaaagggccctctagaagattgatgttgttatcaataaaaacaaaaatcaaggcatcttcactcagtcttca

SEQ ID NO: 1031403 - DNA, 120 bp, Artificial Sequence
  ENSG00000259602_4 (sequence is synthesized)
gctgataaaaatgttgacaacagtgggagaaactcaaaactcacatgttttggctttctttataaagggaaaggccatagatgaatttctaaatttaaacctccatctccagagacaccc

SEQ ID NO: 1031404 - DNA, 120 bp, Artificial Sequence
  ENSG00000259603_0 (sequence is synthesized)
gctgcggtggtggaggtgcaggaaggtgagggccatggggcgcggcgtggggagcgccaacgcccaggaaggagcgcatgttgagcagggagccctgtgcgaggaatgcgctgttggtcc

SEQ ID NO: 1031405 - DNA, 120 bp, Artificial Sequence
  ENSG00000259603_1 (sequence is synthesized)
caggtgtacagtccgtggctaggcaggaaggcggggtgttgcagcggcgccccggcggagggcccgtgcgcgccggggtggcccgcgggtggtggtggcgaagccttgggcgcaccgtcg

SEQ ID NO: 1031406 - DNA, 120 bp, Artificial Sequence
  ENSG00000259603_2 (sequence is synthesized)
tggtggcgaagccttgggcgcaccgtcggggctcgtggctgtctccgccagcgaccagatcttgggcttgccgtgcggcgcaccctgcagccgcgcctgccccgccgcccagctccgcgg

SEQ ID NO: 1031407 - DNA, 120 bp, Artificial Sequence
  ENSG00000227681_0 (sequence is synthesized)
ctctcttttcctcctgctctggccgcgttaagatgtggctacttcccttcgcgttctacctcgattgaaaattttctgaggcctccgtagccatgcttcccgtacagctgtggaaccgta

SEQ ID NO: 1031408 - DNA, 120 bp, Artificial Sequence
  ENSG00000227681_1 (sequence is synthesized)
agtggtgttttatcttcattgcttcagggagtgttgatttgtctgccattcgactctcagaaattctgtcaggaaaaataaatggatatgaaatctgaagataaaggtttgtggggaaag

SEQ ID NO: 1031409 - DNA, 120 bp, Artificial Sequence
  ENSG00000227681_2 (sequence is synthesized)
aataaaaggatcatgaaatgtcagggctgaaaaatatcttagcatccagcctagtgttctatttacaccatccctgttttggctcccaatctgattctcttcctattgcatcaaactgag

SEQ ID NO: 1031410 - DNA, 120 bp, Artificial Sequence
  ENSG00000227681_3 (sequence is synthesized)
tctccaattctgcctatttttgattatgttaaaatcagccaaaatatagaacatagagttatgcttatgcccaacatcataatatgccttcagttattaacatatgttgtaggtaagctt

SEQ ID NO: 1031411 - DNA, 120 bp, Artificial Sequence
  ENSG00000227681_4 (sequence is synthesized)
gttattatttgaaatgtaaatatttatatgtgtaatgtgtaaaagttttcaaatatgggtcataacatatccaatggtttatttgtctatgccactaatacatctttgggcacccaagtt

SEQ ID NO: 1031412 - DNA, 120 bp, Artificial Sequence
  ENSG00000227681_5 (sequence is synthesized)
taagtgcagtacattttgctggttgatgtaccaaggaatgacttataattgtgatgaaatttgaacttcatattgcaaaagataatcatcatttgctagaaaaaattaaaaccgtttaaa

SEQ ID NO: 1031413 - DNA, 120 bp, Artificial Sequence
  ENSG00000227681_6 (sequence is synthesized)
agggcctcattttcttctgtcactggagccatcatttatttagcagctttgttaaacagaaaggggtctgtcctgcgtgtgcagtctttggatttaaaattatggaaattcttcaggcag

SEQ ID NO: 1031414 - DNA, 120 bp, Artificial Sequence
  ENSG00000227681_7 (sequence is synthesized)
gtattattatgccgctaccttcaagaagtaatttgcgtgctgtttattggagctgtgaatttaatcatctcaatcccacgctattacaggatgactataagaagatgtattgacatttct

SEQ ID NO: 1031415 - DNA, 120 bp, Artificial Sequence
  ENSG00000227681_8 (sequence is synthesized)
ttggacacataattttgcctccattgtgtgttgttttgccagaatactgaaggcagtgtttgtatgatggcacatccaaataaaaagcaggtcctccttttgggacagtgatccatttaa

SEQ ID NO: 1031416 - DNA, 120 bp, Artificial Sequence
  ENSG00000227681_9 (sequence is synthesized)
gtggctacttcccttcgcgttctacctcgattgaaaattttctgaggcctccgtagccatgcttcccgtacagctgtggaaccgatttaaaattatggaaattcttcaggcagaaaatgg

SEQ ID NO: 1031417 - DNA, 120 bp, Artificial Sequence
  ENSG00000227681_10 (sequence is synthesized)
ttgcctgcttgtaatgttacccctgagaaaagtcatctgaaaatgggaaatggacctggacaggaataagcagagcatgctgatttaaaattatggaaattcttcaggcagaaaatgggc

SEQ ID NO: 1031418 - DNA, 120 bp, Artificial Sequence
  ENSG00000227680_0 (sequence is synthesized)
cgctcaggcagttctcttaagaaatgatgaactgctctattggcagccgccacaggagttcacaaagaagaggcattaggctggcaagcagagctggtgggatttacctttgacgtagtg

SEQ ID NO: 1031419 - DNA, 120 bp, Artificial Sequence
  ENSG00000227680_1 (sequence is synthesized)
agctccttgaagctacaacaatgccatatgcatcctgtcacagtgtctggtagaagctgcaaagccttctgggagcctcatatcatctcccgtgggcagctgtcttgtgtccctgggcag

SEQ ID NO: 1031420 - DNA, 120 bp, Artificial Sequence
  ENSG00000227680_2 (sequence is synthesized)
agaaatagtgtcaagatgaattgttgtgtcctcaagggtagcaagctctccctcattccttctcagatatcttgcattaccctattttactaacgaaaaaatattctctaatttaagcac

SEQ ID NO: 1031421 - DNA, 120 bp, Artificial Sequence
  ENSG00000227680_3 (sequence is synthesized)
aatggcatattttattttcctaatgaactactttctgtgattttggactatcccattgctgaaatgttttatctgatttttgatgctctaatgatcccaataaattataaacattttgca

SEQ ID NO: 1031422 - DNA, 120 bp, Artificial Sequence
  ENSG00000227683_0 (sequence is synthesized)
gccatccagcaagcctcttgcacagccagacaatctgccactctgccagtttcctcgccagcctcttggttagcctcccatgcagccagcttctaggccagcctcctaacaagccagact

SEQ ID NO: 1031423 - DNA, 120 bp, Artificial Sequence
  ENSG00000227683_1 (sequence is synthesized)
tgcattccgactcttagccagattcagcctgccaggatctcagcaggccttttagcaagcgtttatggcagcctctcagacagaaagcctctcccacaggctctaggccagcctcccagt

SEQ ID NO: 1031424 - DNA, 120 bp, Artificial Sequence
  ENSG00000227683_2 (sequence is synthesized)
ccagcctcccatgcagcccgcgccttggccagccttccagccagcctctagcataaaaaccacttaagaaggccctgttgcttcccttcaccctaaaacactgcagagagtgccctgaaa

SEQ ID NO: 1031425 - DNA, 120 bp, Artificial Sequence
  ENSG00000227683_3 (sequence is synthesized)
tatttgaaatgttgaaaagctgaacctacaaatgtcaaaacacaaatgtatatttgttattgggaatgtttttctcaacaaaaattgaaacattaaaaataataaaatctaattacttat

SEQ ID NO: 1031426 - DNA, 120 bp, Artificial Sequence
  ENSG00000227685_0 (sequence is synthesized)
aagatctgcacctgccatggcggttgggctcatgtgctcctctgcattggagttagccaaggagcgtgtgcagaacacttgcctcgtaggccagccgtaaggaaggatgtcccaggtgca

SEQ ID NO: 1031427 - DNA, 120 bp, Artificial Sequence
  ENSG00000227685_1 (sequence is synthesized)
ggcgaagttttgttcatgtgttcctggaggatttttcccgtggcaagcgcttctccatcctccagcatctcaggcctgtgcaccagccttcctgtgcccgttgatggactgagaggaaga

SEQ ID NO: 1031428 - DNA, 120 bp, Artificial Sequence
  ENSG00000227685_2 (sequence is synthesized)
catgctcactgttaaggaacaacaggtgaccccactggactgaccacccaatgaggcctttgaacctcaggccagggagaggcaggtctacaggtgacaactgtgaacagccccagctgg

SEQ ID NO: 1031429 - DNA, 120 bp, Artificial Sequence
  ENSG00000227685_3 (sequence is synthesized)
ggacaaccagaaatccccaaggcgacgagtggctgaaagtgatggagcccccaggcagagccgaaaccccactgcagaagccgtgttcaaggagcactcagatgtttggctcatcctcat

SEQ ID NO: 1031430 - DNA, 120 bp, Artificial Sequence
  ENSG00000227685_4 (sequence is synthesized)
tggggtccttcagctcctggagcttcagccagaggtggatgagtcacaccacggcatccttctgcttctccgactgctcgggcagctccagaatcacctgcttgcactcctcgatcacct

SEQ ID NO: 1031431 - DNA, 120 bp, Artificial Sequence
  ENSG00000227687_0 (sequence is synthesized)
ttggtagggagcagaggaggcagaagtctgggctctggaccagttacctgaaggcattgcgaagtttctctcccactgggtatgtccggtccttcttctcaaactcatcgtcgaagaggg

SEQ ID NO: 1031432 - DNA, 120 bp, Artificial Sequence
  ENSG00000244578_0 (sequence is synthesized)
aacgtcagcagaaagactttttctgccgtggttcgttcacaaggcgcgactgtaggcagaggctccctgttctgaagctggctgtcagcactcccccaactgccgtctcaagcagagaaa

SEQ ID NO: 1031433 - DNA, 120 bp, Artificial Sequence
  ENSG00000244578_1 (sequence is synthesized)
gcaagggagggaagcttccaggaccaagccctggtgggcaggtagcagcccacctccagtgagacggagaagttggccggggccagcaatgaaggaccagcctgtctcctccccgagaac

SEQ ID NO: 1031434 - DNA, 120 bp, Artificial Sequence
  ENSG00000244578_2 (sequence is synthesized)
tgaaaggcaaaaggcacccaaggctgggaagagagcagcagcctcaccaaacacttctgggtgatgcgagtgctgcgcagctcagaacccttggaagcatgagaggaggacgagcccggc

SEQ ID NO: 1031435 - DNA, 120 bp, Artificial Sequence
  ENSG00000244578_3 (sequence is synthesized)
ggcctgccggtgcggtgatggagggctcttcggtagccacactgcgcgcctcccacacacaccttaacagtcttggggccccgggccagcgctgcagcccaaagagaccctgcagccgca

SEQ ID NO: 1031436 - DNA, 120 bp, Artificial Sequence
  ENSG00000244578_4 (sequence is synthesized)
ttttctcccaggccgtggcaaaccctggcttcgcctcccttcaccatggcttgtgagggcaggaggctcccgggggccgacttccctgacctgaatgagtcaggcacccttctttatttt

SEQ ID NO: 1031437 - DNA, 120 bp, Artificial Sequence
  ENSG00000244578_5 (sequence is synthesized)
aagtgggggtgtgacctgaggagataaaggaaggacgacagacctggggagtggggccctgcagcctcttgggcccggagcgcactccttctcgctccctcccctcaccggcaggatcgg

SEQ ID NO: 1031438 - DNA, 120 bp, Artificial Sequence
  ENSG00000244578_6 (sequence is synthesized)
gggtcttgaaactggagccgctcaccggccggcggatgagagataaaggagcccggcggcgccgaagcgctgaccagcagacccggatccggactttcccgcgctccagagcagcacccg

SEQ ID NO: 1031439 - DNA, 120 bp, Artificial Sequence
  ENSG00000244578_7 (sequence is synthesized)
aaaccctacttcccaggtggcaccgacggctgagcagctcctccggtgccatacggtgtctccaggcacagacagtcgtgctcgcgtgtgtactgtgcacgcacaagactgcaggatgat

SEQ ID NO: 1031440 - DNA, 120 bp, Artificial Sequence
  ENSG00000244578_8 (sequence is synthesized)
gtcctgtatgagccctgtattagcccctttgctctcagccagaggtacacgcatacgtgtgtgcatttgtcaagtgtctagggacaggtgtgcaccttcacacatacgtgatgtgtatgt

SEQ ID NO: 1031441 - DNA, 120 bp, Artificial Sequence
  ENSG00000244578_9 (sequence is synthesized)
gcacacatttgtagaacgttctagcatctatcctacaggcacgtacagggctggctgcttctaataagtcatcattacacctcgcatttacacaggccttttcagttctggcatgatttt

SEQ ID NO: 1031442 - DNA, 120 bp, Artificial Sequence
  ENSG00000244578_10 (sequence is synthesized)
cagaatcaccccgggaaatactctcctttcaaagtttacagatgaggaaacaagcaaaaagaatctaatgggtacccgtttgcacacactgtgagagagatcgaggccagccaaagatcc

SEQ ID NO: 1031443 - DNA, 120 bp, Artificial Sequence
  ENSG00000244578_11 (sequence is synthesized)
cgcccactgttgaacttgggtgtgttggccgaatgtgctcatagatgggtctgtttagcgccccaggcgacctcaggtccggcgggccttggctcttcgccaggcttcctgggagaccca

SEQ ID NO: 1031444 - DNA, 120 bp, Artificial Sequence
  ENSG00000244578_12 (sequence is synthesized)
ctgcgccgggtgtggggtctcaattcctgtgctgataagcactatcttctggagctgggtgaccctagtgcccagggcgggaagtcgggagctggccggagtgccgctgaggcgatcccg

SEQ ID NO: 1031445 - DNA, 120 bp, Artificial Sequence
  ENSG00000244578_13 (sequence is synthesized)
gcggttccaaggccatggctgaccacgcgcaactgggttgcaaagcctggcgggcctcggtctctaaagcagccacgccaggcaaacgtgcgatgaaaggatcctttcagcccacctaca

SEQ ID NO: 1031446 - DNA, 120 bp, Artificial Sequence
  ENSG00000244578_14 (sequence is synthesized)
agcgcccttacgagactcggagcccacaatgcccattttacagaagtgattagtcggaggctagagcggtatagtgagttgctcaagttcaacgccagttgagtggccacagtcgggact

SEQ ID NO: 1031447 - DNA, 120 bp, Artificial Sequence
  ENSG00000244578_15 (sequence is synthesized)
ggaatccccaattaagtgtgtctggatccttggtccacagtccctctgcccccagcaaggatcgctggtccctctgtctcccgcgcgcccaggagccatcccgctactagcctccgactt

SEQ ID NO: 1031448 - DNA, 120 bp, Artificial Sequence
  ENSG00000244578_16 (sequence is synthesized)
ccctcgccaagaatgcgaaaactatcatagctctcaccagcatcatttaaaaggtttccacatgcttggaatctgttgcttgaaaacaaattccctgtgtgcgttggctttctaacccct

SEQ ID NO: 1031449 - DNA, 120 bp, Artificial Sequence
  ENSG00000244578_17 (sequence is synthesized)
cctaaggcatctggtccccctccaccctctaagcccttgccgtcgcagagtgaggctgcctaagggctgtagcttgaccacatcccgggggtgcccttgggcctctgcgccgggctcctg

SEQ ID NO: 1031450 - DNA, 120 bp, Artificial Sequence
  ENSG00000244578_18 (sequence is synthesized)
cagactgaggtcgctggtctctgggctccaaggccgcctctaccccgcagaatccgggagctggaagggagcccgcggtttggcgaggtcgccgttcgggctcacggcctcgaggctgcc

SEQ ID NO: 1031451 - DNA, 120 bp, Artificial Sequence
  ENSG00000244578_19 (sequence is synthesized)
ctctgctggcactgggcgacattaccaccgcctccctcggcggctcaggagctgcacccacgtgaggggttcgcgcagagccaggcgaccccattctcactgggtccccagagtggctgc

SEQ ID NO: 1031452 - DNA, 120 bp, Artificial Sequence
  ENSG00000244578_20 (sequence is synthesized)
cgcacctgcagccactgacgagaccctcccgtatttctcaatccgagacttctccccgcagacaccagaggctccggtgctcggacccagggacaaggcagagagccggagctctgcgct

SEQ ID NO: 1031453 - DNA, 120 bp, Artificial Sequence
  ENSG00000244578_21 (sequence is synthesized)
ggcaatcccgccgctttgcggcgcccgccgggatccgcggccaaccaggcacggccacaggcggacgctgggggactccggggatggccccaggctgtgttcgtcccctttactctccgc

SEQ ID NO: 1031454 - DNA, 120 bp, Artificial Sequence
  ENSG00000244578_22 (sequence is synthesized)
caccatagcattgattggcgcccacgggtcccgatctacctgccctccccttttcaaccttacttgatggtggcccaggcgcttggctgcctctgtttcttgtagtgcacttgtctctcc

SEQ ID NO: 1031455 - DNA, 120 bp, Artificial Sequence
  ENSG00000244578_23 (sequence is synthesized)
aaccaaattaagagcgcctcgacgaccggaaggggctgctccctacccgcacggcacaggcctagctcaggttctgccgagacagaactgattccagaggcccccattcttgcccttgaa

SEQ ID NO: 1031456 - DNA, 120 bp, Artificial Sequence
  ENSG00000244578_24 (sequence is synthesized)
ataaactttaggcagtgaggcgaagagacacttctgcctgctgcatccattctagacagggtggggtaaaaattactcagtcatcatatctatgcatttccagtgctatgtattaggact

SEQ ID NO: 1031457 - DNA, 120 bp, Artificial Sequence
  ENSG00000244578_25 (sequence is synthesized)
ttaacattttcacttttcccctcacaaagataattgaaactgaagaaaattgggaaaataaaacattaaaatgcacaaaaaacaccaacgcgacaataatcccatccctcctcccacaag

SEQ ID NO: 1031458 - DNA, 120 bp, Artificial Sequence
  ENSG00000244578_26 (sequence is synthesized)
gtaaccatggttaacatttcgatggcatctttccagtcttttatttatatatttcaattaaaataagcctaatttccataattaacaaatatacataaaatttgcagttttgtatcctgc

SEQ ID NO: 1031459 - DNA, 120 bp, Artificial Sequence
  ENSG00000244578_27 (sequence is synthesized)
ttgtttaaacctttcgccatagggtttttctccatatcttattctttgaaaaatgattttcaattattgcttaataatccatcctttggatgaaccataattttgttatacaccagcacc

SEQ ID NO: 1031460 - DNA, 120 bp, Artificial Sequence
  ENSG00000244578_28 (sequence is synthesized)
aattatctgttttaggcccaggaaagtctccttaagccacactctctggatccgtctggatcagttaatatataatcatataatcagtagttgatcaataaatgttgagcctttcttttt

SEQ ID NO: 1031461 - DNA, 120 bp, Artificial Sequence
  ENSG00000244578_29 (sequence is synthesized)
gtgaaaagcatgttctgggatcttgtcacttcgcggaggtggcctgtgcagcatgaggcaaagacctggcctgtttagtcaggaagaactgggttggagcctggtgtcctctttaacagc

SEQ ID NO: 1031462 - DNA, 120 bp, Artificial Sequence
  ENSG00000244578_30 (sequence is synthesized)
tatgtaaccttgggcaaaatacccattcaaatttcagtgttctcctctataaaacagaaatacgtgcgtgtatcagaattattaaaataattaaattttctaatttttaagtgcccagtt

SEQ ID NO: 1031463 - DNA, 120 bp, Artificial Sequence
  ENSG00000244578_31 (sequence is synthesized)
ccaaggctgggaagagagcagcagcctcaccaagtaaggaagacaaaatgaagcaatcagtgagggtttcctgggtctacacagggattgaaggagacacttctgggtgatgcgagtgct

SEQ ID NO: 1031464 - DNA, 120 bp, Artificial Sequence
  ENSG00000229229_0 (sequence is synthesized)
agagatactcaagattatggcagacaggaggcaggactagattgcagctctgacttggatggacagaacactgtgtggagggtcgcatcatgaattttagctccagaatgactgcaggaa

SEQ ID NO: 1031465 - DNA, 120 bp, Artificial Sequence
  ENSG00000229229_1 (sequence is synthesized)
tctgaaggaagtggattgctcctgcaggacccgggagacaccccaaataccgctctgatctaacacaagccttgtccagcctcatcttgagttttcagctgaggaaacggaggctcaaat

SEQ ID NO: 1031466 - DNA, 120 bp, Artificial Sequence
  ENSG00000229229_2 (sequence is synthesized)
agaagaggcatccagaatggcagaaagatgcatggcaatgtcctcattgtgtcaggcgtggcttgggtccctgtaccctactgaagaaatttgaaggtgccacagaagagaacccaaaac

SEQ ID NO: 1031467 - DNA, 120 bp, Artificial Sequence
  ENSG00000229229_3 (sequence is synthesized)
aagccacagaaatgagccaaagtaattaaaggtgagggtatagaaaagtgaaatgaataaagattgtttaggccagagaatagaagactaagggggaggggaaagaaggtaaaccttaca

SEQ ID NO: 1031468 - DNA, 120 bp, Artificial Sequence
  ENSG00000229228_0 (sequence is synthesized)
ctgagcttcacaccttgggtcagatgtgtgttgtcagctgagaaactgagctgcattcttgagcatgagccagacgccttgacagatggttattcttttctgcttgacctcgagttacag

SEQ ID NO: 1031469 - DNA, 120 bp, Artificial Sequence
  ENSG00000229228_1 (sequence is synthesized)
agatgcagatgaagtcaaagaggataccagatgcagccagtctgctggggaggcacgtacgtctgagtgggcccagcacagctgttctccagggcaaggcttggccatggcagctgcccc

SEQ ID NO: 1031470 - DNA, 120 bp, Artificial Sequence
  ENSG00000229228_2 (sequence is synthesized)
gggcacatgctctgaaggaagggaaaccgaagaacgtcaaggggcagcgttcagaggaggggaaagaatgcagagtctgggtgtgatccctacctggactctcttagaagctccactatc

SEQ ID NO: 1031471 - DNA, 120 bp, Artificial Sequence
  ENSG00000229228_3 (sequence is synthesized)
ctcttctctaatgatctgtcttcccattccagaatttcttaccttaacctacttagcctgagttaaataagcatctgcatgcagaaataaataagtgagggaatttgtacttttctgcaa

SEQ ID NO: 1031472 - DNA, 120 bp, Artificial Sequence
  ENSG00000229225_0 (sequence is synthesized)
tcgcccttaagaagctctgtgtggctggaggatcgaaaactttgggcacaagctggaaggtcatttactgcaaaccactatctcccagctaatctggcttctgctcctgattttctcact

SEQ ID NO: 1031473 - DNA, 120 bp, Artificial Sequence
  ENSG00000229224_0 (sequence is synthesized)
gtttgaggagactcagagtcactgtcaagtcgtcaaggacctgggtcaccctgcatccccatctggggctccttctatatcagttttcctgaagcttagtccaacttcttgaagtgggcc

SEQ ID NO: 1031474 - DNA, 120 bp, Artificial Sequence
  ENSG00000229224_1 (sequence is synthesized)
cacaagcttcactgatgtcgtggagtctatgagacacaaactttatctcatatggtagaatccggaatgatcagccatcgcttcacacccaaggaaagaactgctgtccagtgccaggcc

SEQ ID NO: 1031475 - DNA, 120 bp, Artificial Sequence
  ENSG00000229224_2 (sequence is synthesized)
cagagcttcatggtttgtggcaagtctttggaaagataacgtctaacttcattcattttagctgaaaataccccatggtggcatttttctggtctccctactaaaaaagtgagcatgaca

SEQ ID NO: 1031476 - DNA, 120 bp, Artificial Sequence
  ENSG00000229224_3 (sequence is synthesized)
ctgaaaaatgtaccttttccacctcacaaggcttggttccactttctgacagcaagagaacattgcgaagagaaatgtgaatgggtttcatcatgatttctgataagacattgtgttgac

SEQ ID NO: 1031477 - DNA, 120 bp, Artificial Sequence
  ENSG00000229224_4 (sequence is synthesized)
cttttgaggtacagccacagatcagcagaggtactaagaacatacatgtggaaaagacaatttcttcgatagatgatattgagaaagctggatgtccacatgcagaaggatgaaattgga

SEQ ID NO: 1031478 - DNA, 120 bp, Artificial Sequence
  ENSG00000229224_5 (sequence is synthesized)
cctttatctcacatcatagataaaaatcaactcagaatggattaaagacttaaacataaggtctgaagctgtaaaactagtagaaggaaataggagaaagcttcataacattggcctggg

SEQ ID NO: 1031479 - DNA, 120 bp, Artificial Sequence
  ENSG00000229224_6 (sequence is synthesized)
caatgatttttaaaatatgactcaaaaaccacaagtgaccaaagtaaaaatagacgaatgggttgcatcaaactaagcttttgtccagcaaagggaaaaattaacagagtaaagagacaa

SEQ ID NO: 1031480 - DNA, 120 bp, Artificial Sequence
  ENSG00000229227_0 (sequence is synthesized)
agtgcaattctctttgtaaaatatatttcataaaaaatccaaagcaaaagccctgtcattcatttatttcaaaagacaaatcatttcagtacttcttccttgaaatgcctgcaatttctt

SEQ ID NO: 1031481 - DNA, 120 bp, Artificial Sequence
  ENSG00000229227_1 (sequence is synthesized)
cctctggcctcagagacgggcattggctccatgctttaccatgtcaggataaaaatccaggagggagaaatcttgttgtaatggatagctgttttcatctaacacaaaaaggctctgaat

SEQ ID NO: 1031482 - DNA, 120 bp, Artificial Sequence
  ENSG00000229227_2 (sequence is synthesized)
cttcaatacacaaggttctgcgctgactgccaacaaggagtggaacaggtctgccacaaccatcccataggtgatctctgaggaaggaactgcagaagacgaaaacacagagctctcaag

SEQ ID NO: 1031483 - DNA, 120 bp, Artificial Sequence
  ENSG00000229227_3 (sequence is synthesized)
agcttgacaggagcacacacattgaatggtttcattgtttcttttggttcctcaagtctcaaacccattttaaatttctcctcccggccagtagcggtggctcacacctgtaatcccagc

SEQ ID NO: 1031484 - DNA, 73 bp, Artificial Sequence
  ENSG00000229227_4 (sequence is synthesized)
taaataaataaacaggtaagtaaactactctttctataccttctctttctagttacaagctattgaggcactc

SEQ ID NO: 1031485 - DNA, 120 bp, Artificial Sequence
  ENSG00000229227_5 (sequence is synthesized)
ctataccttctctttctagttacaagctattgaggcactccagagtgacggcatgtgatccccctgacacaagaaacaggcccagataacacaccgttcagaccgacagcagttctggtt

SEQ ID NO: 1031486 - DNA, 120 bp, Artificial Sequence
  ENSG00000229227_6 (sequence is synthesized)
gggattacgggagtgagccaccacaccagaactgatctttctaacacagggaaattgtattctttagaagtggaggaatatttcctagtaatttgatcaagtaaaaataattataataaa

SEQ ID NO: 1031487 - DNA, 120 bp, Artificial Sequence
  ENSG00000229227_7 (sequence is synthesized)
gaaggtaaaatcaagccctaattccccatgtaggggaataatatcattttggtaagattcttccagacagtatgattaggatgttacataaatcaaactgtgctatatacagtatgcaga

SEQ ID NO: 1031488 - DNA, 120 bp, Artificial Sequence
  ENSG00000229227_8 (sequence is synthesized)
gaaggaaattccttagcttgtctaaagtctgatagtgtgaagaatttgctgacctgctctccatgcctgtctgagcacgagtgaagtgaatcagagagagattgcaagatggagaaagga

SEQ ID NO: 1031489 - DNA, 120 bp, Artificial Sequence
  ENSG00000229227_9 (sequence is synthesized)
agaccagacagagctgcatctcccatgaaaacaactgtgtacataagatagagtgagtacatagagtacatagaagagtgagctctgaaagaactctcacatggaccccagaaagaggag

SEQ ID NO: 1031490 - DNA, 120 bp, Artificial Sequence
  ENSG00000229227_10 (sequence is synthesized)
tactcaacgcctgctgcacagaaggcatcagcagttaagtactggctagaaaagcggagtccatcaaaggagaggaccacagtggtagctgcctggagagctgtccctgcaagctgaact

SEQ ID NO: 1031491 - DNA, 120 bp, Artificial Sequence
  ENSG00000229227_11 (sequence is synthesized)
aacagaagatgaagaatgaggtctccctgaaatgcccaccataagactgccagatatgggactgctggatgacactctggctaccccactgagttttatgaaaacataacagaataaaga

SEQ ID NO: 1031492 - DNA, 120 bp, Artificial Sequence
  ENSG00000229227_12 (sequence is synthesized)
cacttacttgtcaactcagttacaagctattgaggcactccagagtgacggcatgtgatccccctgacacaagaaacaggcccagataacacaccgttcagaccgacagcagttctggtt

SEQ ID NO: 1031493 - DNA, 120 bp, Artificial Sequence
  ENSG00000229227_13 (sequence is synthesized)
gagtgaaatccaggctatcttcctgaagctactgttcctggcaagtgtagctgtggggactgagttttgggcagcagcaaataactcccagcttccatgtgcttgagagtcagttgccgg

SEQ ID NO: 1031494 - DNA, 120 bp, Artificial Sequence
  ENSG00000229227_14 (sequence is synthesized)
gatgccagcagctgcatcctcagtctaagattgcagccaatgatgatgttttcatgaatccaccgttcacgtggcagcctcctggagctcagactgatgcctgctcctccagccttccaa

SEQ ID NO: 1031495 - DNA, 120 bp, Artificial Sequence
  ENSG00000229227_15 (sequence is synthesized)
tacctttgcaaacacctgaattccacattaatctctctctgtttagaatacccagagtggcttgtgtttcctgggctgaaccctgcctggagagctgtccctgcaagctgaactaacaga

SEQ ID NO: 1031496 - DNA, 120 bp, Artificial Sequence
  ENSG00000229227_16 (sequence is synthesized)
tctgataggaatatatttcaggataacctttctgagaacattttaaaagtaggattcaagagcacacacaaatgatggaatcctgtgtagttgatatgatttaatctatgttgattgatt

SEQ ID NO: 1031497 - DNA, 120 bp, Artificial Sequence
  ENSG00000229227_17 (sequence is synthesized)
tggaaagacgtatatggcaaattgtggagtaaaaaaagtacacactagatactggcctatatggaatggtcccatttatgtaaaattgtgtatgtgcatgcacagatctgtcttctatca

SEQ ID NO: 1031498 - DNA, 120 bp, Artificial Sequence
  ENSG00000229227_18 (sequence is synthesized)
ccacagtggtagctgcctgttacaagctattgaggcactccagagtgacggcatgtgatccccctgacacaagaaacaggcccagataacacaccgttcagaccgacagcagttctggtt

SEQ ID NO: 1031499 - DNA, 120 bp, Artificial Sequence
  ENSG00000229227_19 (sequence is synthesized)
tcttatccatccacagttcttatcacagttacttatgcatatattcattttttatataaaagaatcttgaatcggtcacttaaatattgaatctcaataataaaaaatactaaaagtata

SEQ ID NO: 1031500 - DNA, 120 bp, Artificial Sequence
  ENSG00000229227_20 (sequence is synthesized)
ttttgagaatcggctggcatcagggtgctgactgacaaacttcccggggtctgggcactgtggggacggagcctgcagacggcggtgtccccgctaggagagccgtggggacgtgattaa

SEQ ID NO: 1031501 - DNA, 120 bp, Artificial Sequence
  ENSG00000227352_0 (sequence is synthesized)
tggggtcttcatagggcagatctccaccatgtcatgcagagatgcagtgctgtcttctgatcaggaattatgctcttccacggcactctggctcattccacagtcaataatgttaaatgg

SEQ ID NO: 1031502 - DNA, 120 bp, Artificial Sequence
  ENSG00000227352_1 (sequence is synthesized)
acaggcagaaatgccaaggatttgactgctaaataccagataagtaagctgctcccccaaaaagtcttcagcatactaagcaagtcgtttactggaagaaatttaaaccttttttaaagc

SEQ ID NO: 1031503 - DNA, 120 bp, Artificial Sequence
  ENSG00000270361_0 (sequence is synthesized)
atgtggccctttaagcccggcgagaaacctttgattgcttttctagccgcagcctccggcccaaaggttttcggaagcaaacggcgtgggtgacatcaatagtaagggagcgttgaatcc

SEQ ID NO: 1031504 - DNA, 120 bp, Artificial Sequence
  ENSG00000270361_1 (sequence is synthesized)
ctagatgagattgcctggtttcatccgaagtctggctcccagccagaagtttgagaggcaggataagaataatctgtcctttccctgcatccccggttctgcctcttcccgcagtaggtg

SEQ ID NO: 1031505 - DNA, 120 bp, Artificial Sequence
  ENSG00000270361_2 (sequence is synthesized)
ctcattactgcctccactagagaaaaagtgtagtgtggagacttagggagaaaccattaatttcctgaatgttgaaaagaggcacaggagagtggtcagatgcaaaaagaacagacttaa

SEQ ID NO: 1031506 - DNA, 120 bp, Artificial Sequence
  ENSG00000270361_3 (sequence is synthesized)
ggaggtggttttttgttttttggggttttttttgttttttttcagcaacccagaaaacactgcactcatcaacgccctagaaggcagcacagagtggattttcagtcccagcttggacac

SEQ ID NO: 1031507 - DNA, 120 bp, Artificial Sequence
  ENSG00000270361_4 (sequence is synthesized)
ttagcaagtcactctgagtttaccactgataaggcccacttcccagggttataataagaaaggaatgaagaaaatatatgacaaggtacaataaaatactttgtaagttctcaagtatca

SEQ ID NO: 1031508 - DNA, 120 bp, Artificial Sequence
  ENSG00000227355_0 (sequence is synthesized)
agtattgattgatggtaatagtgataacattaagacttggagatcaggttaaagacagatatgcaccatgaatccgtaattgaataagacagaaggaaatttaattagcctttttcctgt

SEQ ID NO: 1031509 - DNA, 120 bp, Artificial Sequence
  ENSG00000227355_1 (sequence is synthesized)
gtccatagcagtgctttaataagaacaatagaaaagtcttttttttttcctttaaattgctaatccaggatgttttcgatgcttttatggaagtcagctaactaaataccttgagagaac

SEQ ID NO: 1031510 - DNA, 120 bp, Artificial Sequence
  ENSG00000227355_2 (sequence is synthesized)
tatgtattaattcacacttattgcattacaacaaggtttttgtcttcttagctcttctctttttcaggaaattactccaggatttgaatcatcacaagagattcaccagaggattttata

SEQ ID NO: 1031511 - DNA, 120 bp, Artificial Sequence
  ENSG00000227355_3 (sequence is synthesized)
cacttgggctgtggcagcagactaattacatcacagcactaggctaaagaagaaaaatcacatgatcatatcaatagatgcagaaaaagcatctgacaaaaaccagctctcattcatgat

SEQ ID NO: 1031512 - DNA, 120 bp, Artificial Sequence
  ENSG00000227355_4 (sequence is synthesized)
tgggaaacgtgccgttggcagcccgccacccctccatcgtgacctcagtctgccaaacagggaaattactccaggatttgaatcatcacaagagattcaccagaggattttatacacttg

SEQ ID NO: 1031513 - DNA, 120 bp, Artificial Sequence
  ENSG00000227355_5 (sequence is synthesized)
cacaccaggggataaagtatatcagaaatgaaggctgggacaggaatgttccccaaatgacactgcttaagagaactttgaggagaactgagggcaagatacaagccatggttctataca

SEQ ID NO: 1031514 - DNA, 120 bp, Artificial Sequence
  ENSG00000227355_6 (sequence is synthesized)
gataagtctacggaagctgcagaaataacattccagatccccaggaatccacccacccacccctccgactttggccgaacaccatggctggctgccgtgtgaagaatggactgtaggggg

SEQ ID NO: 1031515 - DNA, 120 bp, Artificial Sequence
  ENSG00000227355_7 (sequence is synthesized)
aaattcctgccctctcgtgtccagtatagagaactacttttgtgttctctaaggctgtgaatgttagcggacaaccaggagcattttagggcctcagcagaaaggagactgaaccagttc

SEQ ID NO: 1031516 - DNA, 120 bp, Artificial Sequence
  ENSG00000227355_8 (sequence is synthesized)
catgaaaacattctcctatctaataaatcaaaaaatcatgactggcttccatcagttcaggagtctccacacaaatgttttgacagtggaacaagagacagtcaaggacagttttatcag

SEQ ID NO: 1031517 - DNA, 120 bp, Artificial Sequence
  ENSG00000227355_9 (sequence is synthesized)
tccaatagcaaaaaccatcaaccgcacgagctgagatactggctgggtggatttcagcaaatttccaagggcacatgacatgtgggcacaaaagccgggatttcacaccaggggataaag

SEQ ID NO: 1031518 - DNA, 120 bp, Artificial Sequence
  ENSG00000227355_10 (sequence is synthesized)
gtgggaaacatcccctagaaatctagaattcaaagcacttactttgagtgatatatccacaagaaagagccttctgtgctaaaagcaaaaaagaaataaaaacatatcatgttactttta

SEQ ID NO: 1031519 - DNA, 120 bp, Artificial Sequence
  ENSG00000227355_11 (sequence is synthesized)
ggccggggccctgcaccggaagggagggcggaagccacgggacgtggagcagatggtgaggatagtggggaggtagcagcagaggatgacccgaggcaaaagtgcaagtgaagaaaagtc

SEQ ID NO: 1031520 - DNA, 120 bp, Artificial Sequence
  ENSG00000227355_12 (sequence is synthesized)
gccttgccgggcagaggtacgggaccaaggcgcctcctctgggctgaggagttagagggaagaaaatggcgccctgtcatgagggcgcgaggtccgagttgaggggagaagactgaggga

SEQ ID NO: 1031521 - DNA, 120 bp, Artificial Sequence
  ENSG00000227354_0 (sequence is synthesized)
gtgtgtgcgttgcttgcggcctttgtgcctttttattctttgcttacctttatgatataaagaccttatttcttacaaggaggaaaagaccgctgacttcagaaacagcgggaaccccag

SEQ ID NO: 1031522 - DNA, 120 bp, Artificial Sequence
  ENSG00000227354_1 (sequence is synthesized)
ccagctcgtccccggtaattcaagaggaaacgcttgagcaattactgatgttgtaaactgggatcagaagacatacatggtatcgtatcccaggcaaggcacagtggctcacacctgtaa

SEQ ID NO: 1031523 - DNA, 120 bp, Artificial Sequence
  ENSG00000227354_2 (sequence is synthesized)
ggtcaggagttcgagaccagcctggcttacatggtgaaacccatctctactgaacatacaaaaattagctggacatgatgaagtggacaacatcacttctttccacatttcattgaccag

SEQ ID NO: 1031524 - DNA, 120 bp, Artificial Sequence
  ENSG00000227354_3 (sequence is synthesized)
ggacaacatcacttctttccacatttcattgaccagagcaagtcatgtgaccaagcctgattcaaaataggctggagcaaggaggagcagcaaacataacattcccagtttacagctgag

SEQ ID NO: 1031525 - DNA, 120 bp, Artificial Sequence
  ENSG00000227354_4 (sequence is synthesized)
gaaattaagcttcaagttgcccaagtttatagaatgagtcaatggcagaggttgaactcagatgacaaaattggggtctggacgtgtgcaaggacttttccaaagtcagctggaaaggag

SEQ ID NO: 1031526 - DNA, 120 bp, Artificial Sequence
  ENSG00000227354_5 (sequence is synthesized)
ctgcttagctgagaggttctggctccagagtctcctgtgaagttgcagtcaagatgtctgctgggaccccagtcatttgaagccctgtctggggcaggagaatctaggtccaaaatggcc

SEQ ID NO: 1031527 - DNA, 120 bp, Artificial Sequence
  ENSG00000227354_6 (sequence is synthesized)
gttgcaggagtccttatccacaccatgtgggacctcttcatagatgttcgagtgtcctcatggcatggccactggctttccccaaagtaagcagtccaaaagaggacaatcaacaaaact

SEQ ID NO: 1031528 - DNA, 120 bp, Artificial Sequence
  ENSG00000227354_7 (sequence is synthesized)
gaaaaagcccagccttgtagcatttgccagttattgtgtaaatgtccccactatggtggatttcaggttaccactatgatatcacagaatgcagaattggaaggagattcacagcagcac

SEQ ID NO: 1031529 - DNA, 120 bp, Artificial Sequence
  ENSG00000227354_8 (sequence is synthesized)
cccattatactatattttcaccatacagatgcagtcgatgtaaattacctgaggagcataaataataataaaatgaagttaaataattcggaaatgattttgaaaattgtgttggttttt

SEQ ID NO: 1031530 - DNA, 120 bp, Artificial Sequence
  ENSG00000227354_9 (sequence is synthesized)
aatgtaagtttatatgtcagctttaataaaatctgtctttaacaactagcttgaagaattcttgaaaaattaataatcagctctcataggctagtgacaactggcttcagtgcacccctg

SEQ ID NO: 1031531 - DNA, 120 bp, Artificial Sequence
  ENSG00000227354_10 (sequence is synthesized)
atgtggaattcccagtatttcaacaatcagaattgagcttatgagccaaccaagaaaaataacatcttatataagagacagcaatttgagagaggaatatcagtcagaagaaacaagggg

SEQ ID NO: 1031532 - DNA, 120 bp, Artificial Sequence
  ENSG00000227354_11 (sequence is synthesized)
aaagtcgaacttgtaaaagagagatgaaaatttgaatttttttaaaggcatccttaagcatatttaagtacaacacaaaaagttaaagaatttagtagataaatagaaagatgagatgat

SEQ ID NO: 1031533 - DNA, 120 bp, Artificial Sequence
  ENSG00000227354_12 (sequence is synthesized)
taccactgagacacagatcaatgatctggaagataaaaacaaatcataaaaataaaagtatcttgaaattttgcaaagtacatcataaatcaatgcatcagagattatgtgtcatgacaa

SEQ ID NO: 1031534 - DNA, 120 bp, Artificial Sequence
  ENSG00000227354_13 (sequence is synthesized)
gtgtcatgacaaaaaaatttatactcagaatgatatgtcactgcttactatgcaaatattttctatttctcctagcttcaaactatgcatatgggccaggcgcggtagctcatgcctgta

SEQ ID NO: 1031535 - DNA, 120 bp, Artificial Sequence
  ENSG00000227354_14 (sequence is synthesized)
taatcccagctgctccggaggctgaggcacgagaatcgtctgaacccaggtgattctgcactctacttgggctctgtctcaaaacaacaacaacagcaacaacaaaaactgtggtatttt

SEQ ID NO: 1031536 - DNA, 120 bp, Artificial Sequence
  ENSG00000227354_15 (sequence is synthesized)
tttttaatgaactaaatattaatctgctaacacagcataggttttatgattactgcaattcaaaagtcataataaattttaaaacaaatcctcctgtacctgttgtggtgcatgcagaaa

SEQ ID NO: 1031537 - DNA, 120 bp, Artificial Sequence
  ENSG00000227354_16 (sequence is synthesized)
cttttcctgttcaacacacttatatggcactatatagggatataccaaatagctcaggtacatagtgaatacaactttaacacttatattgaaatgctaatcttacttgccaatattagt

SEQ ID NO: 1031538 - DNA, 120 bp, Artificial Sequence
  ENSG00000227354_17 (sequence is synthesized)
ggcacattagcataatttaacttttataaaattatggaaaacagtttaaaattattctccctaatattagcaaattgcattaatggcatgtaccgtgtgccagtttgtttccaaataaac

SEQ ID NO: 1031539 - DNA, 120 bp, Artificial Sequence
  ENSG00000227354_18 (sequence is synthesized)
aaaatgtaccttgatatgccacttcagagccagcagagggagctcatacttttttattgttttcaacttactgaagaaaatttgcttttaaaagctactgtgttataaccaatgagaacc

SEQ ID NO: 1031540 - DNA, 120 bp, Artificial Sequence
  ENSG00000227354_19 (sequence is synthesized)
cactgtcttttatgaattagccttagaagtctaacacggttacttccaccacattcattagtcgttaggtacagctcacattcatggggaggaaaatcagggcctgtctttagataggag

SEQ ID NO: 1031541 - DNA, 120 bp, Artificial Sequence
  ENSG00000227354_20 (sequence is synthesized)
atgtatcaaagaatttgtggacatattttaaaatcacagcactactcttgatgtactaagtcagtgactcccccaggagtctcacagagaattgactccttgcccacctatactaccttt

SEQ ID NO: 1031542 - DNA, 120 bp, Artificial Sequence
  ENSG00000227354_21 (sequence is synthesized)
gtgggtagagactccagtagtgtgctggttaatgttcaaccagtggctttctagaaaacaaaatgtatggatacatatatatgttctaagttttactgatatgaagaatgtgtagcacag

SEQ ID NO: 1031543 - DNA, 120 bp, Artificial Sequence
  ENSG00000227354_22 (sequence is synthesized)
aatttataaataataaaatatacagtattatttattgtaaattccataaaacctgttgtttttcacaaaaggttttagtttatttttcccaaatgcttgtattggtaacattttctgtat

SEQ ID NO: 1031544 - DNA, 120 bp, Artificial Sequence
  ENSG00000227354_23 (sequence is synthesized)
cggcctttgtgcctttttattctttgcttacctttatgatataaagaccttatttcttacaaggaggaaaagaccgctgacttcagaaacagcgggaaccccagctcgtccccggtaaga

SEQ ID NO: 1031545 - DNA, 120 bp, Artificial Sequence
  ENSG00000227354_24 (sequence is synthesized)
cggccgtggcctgtcagctggaacggtcctgccggatggatcgctctttgagagcgtacactcccgcgtgcgcgacaccaggcggcccgtaggttccaggtgccgagcacactacctcct

SEQ ID NO: 1031546 - DNA, 120 bp, Artificial Sequence
  ENSG00000227354_25 (sequence is synthesized)
cagtttacctaagtgccctaccagtatcatattctgtgtatgctgtgatgtgaacgaggtttgtaaacacaggctggtctaatggagcccaatgagaccgccagaggattagtgtcttgt

SEQ ID NO: 1031547 - DNA, 120 bp, Artificial Sequence
  ENSG00000227354_26 (sequence is synthesized)
tgcccacaagggaaaggtgagagaaccttcacgtctctcaggtagtttccagcctgcactttcccccagctaaagataagttttgttatttttaaaattctctttatttagagcaaattc

SEQ ID NO: 1031548 - DNA, 120 bp, Artificial Sequence
  ENSG00000227354_27 (sequence is synthesized)
agccctatctcagatcgggaaattatatagtatcaaaagagagagtcttcatattagcaacccaaataaataaactattttcctgggtgatcaaataagtttgattcctgcttgagttct

SEQ ID NO: 1031549 - DNA, 120 bp, Artificial Sequence
  ENSG00000227354_28 (sequence is synthesized)
atttagatactaggtggaattttacaaagggtctacgttccatgaactgtaatggaatgaaaatattcacaatctaaagacattttcacattcccagtttacagctgaggaaattaagct

SEQ ID NO: 1031550 - DNA, 120 bp, Artificial Sequence
  ENSG00000227354_29 (sequence is synthesized)
aaaaagatattaatgatattttatgtaaaaatgtcaattaaaactacataatttcaaggttttttttttctttttcttttattataatttttttagagacaagagtgtcgctctgtcacc

SEQ ID NO: 1031551 - DNA, 87 bp, Artificial Sequence
  ENSG00000227354_30 (sequence is synthesized)
gatgtgtaaagcaatcctcctgccttagctttctaagcagctaggactacagatgcattccactatgcctggctaattttaaaattt

SEQ ID NO: 1031552 - DNA, 83 bp, Artificial Sequence
  ENSG00000227354_31 (sequence is synthesized)
agtctcaaactcctggcttcaaacaatcctcccacctcagtctcctgagttggggttacatgtgtgagccactgcactcatct

SEQ ID NO: 1031553 - DNA, 120 bp, Artificial Sequence
  ENSG00000227354_32 (sequence is synthesized)
cctgagttggggttacatgtgtgagccactgcactcatctgcactcagctattcaatttatttttctaatagcctttactaaaaaaaagaaatgtttgtaacagagatttctggggtaaa

SEQ ID NO: 1031554 - DNA, 120 bp, Artificial Sequence
  ENSG00000227354_33 (sequence is synthesized)
ctaaaatggaaaccttccagctacaagcataaaacgtaacagataaaaaatgacaaatatgacacacttcaaatttaattcttacacatgaaattaaacacataatttaaatacattccc

SEQ ID NO: 1031555 - DNA, 90 bp, Artificial Sequence
  ENSG00000227354_34 (sequence is synthesized)
cttacacatgaaattaaacacataatttaaatacattcccattcactcaattctcagcccttccaaagacacagataaatgccattatta

SEQ ID NO: 1031556 - DNA, 69 bp, Artificial Sequence
  ENSG00000227354_35 (sequence is synthesized)
agacagagttttgctcttgttgctcaagctggagtgtaatggtgcaatttaggcttactgcagcctcca

SEQ ID NO: 1031557 - DNA, 120 bp, Artificial Sequence
  ENSG00000227354_36 (sequence is synthesized)
acatccggcccattattggtttcttatgtatcctttcagaatttctttatgaatatacagacatatatgaacataaaatcttattctaatcgaatttttcttatgcaaaaacagcatatc

SEQ ID NO: 1031558 - DNA, 120 bp, Artificial Sequence
  ENSG00000227354_37 (sequence is synthesized)
atatacactattctgtatcctgctctttttactaatatatattggaaacattcgcgtaagtctatagtagagaccttactccttttttttaggcatgtgtagtgtatagcagacagattg

SEQ ID NO: 1031559 - DNA, 120 bp, Artificial Sequence
  ENSG00000227354_38 (sequence is synthesized)
taagaatatataataattgatctattcccacttaataaatttttttagttgtttccattttcaattacagaaaattctccaataatgaacttgtatatatttgccattttctacatgtga

SEQ ID NO: 1031560 - DNA, 120 bp, Artificial Sequence
  ENSG00000227354_39 (sequence is synthesized)
tatgtgtctgaaggataaagtcccaaaagtgggattgctaggtaaaaggacataagcatttgtaataatgatggatattgccaaattacttactatgaaaattatagctacttatactcc

SEQ ID NO: 1031561 - DNA, 120 bp, Artificial Sequence
  ENSG00000227354_40 (sequence is synthesized)
ctcaggagcaatatgtctatttcctcacgatattgccaactgagtcttatctaacttttgatgtttgccagtctgatagatgaaaaatgtgtcctctaagtataatgtactattcttatt

SEQ ID NO: 1031562 - DNA, 120 bp, Artificial Sequence
  ENSG00000227354_41 (sequence is synthesized)
atgagtgagttgaacatcttttgaatatgtcaaagccatttgtatttcctttctgttaactttctgctcatagtttctgctcacttttgggatcctttccttgttaatttgtagaaggcc

SEQ ID NO: 1031563 - DNA, 120 bp, Artificial Sequence
  ENSG00000227354_42 (sequence is synthesized)
tttattgagtagggagattagccctttgtgatatgtgttgccactttgttaagtcatttgtcttatgttttttatttgacatgcagaagttttcatatatacgtagccaaatttatcaat

SEQ ID NO: 1031564 - DNA, 120 bp, Artificial Sequence
  ENSG00000227354_43 (sequence is synthesized)
tttgtttaatgccttttagatttggggtcatagaaaagccatccccacccccatattataaagaactctcccatgttttcttctagtattttcttgttttattaaattttcattgaaata

SEQ ID NO: 1031565 - DNA, 120 bp, Artificial Sequence
  ENSG00000227354_44 (sequence is synthesized)
tttagatttggactttattcacaaataaagtacagtgtgagttaaggatccaattctgtttttccaaatggttaccaaaatgttccagtaccacctatgtcaaatagtaagttttcttat

SEQ ID NO: 1031566 - DNA, 120 bp, Artificial Sequence
  ENSG00000227354_45 (sequence is synthesized)
gcttctgattctatttctgtagtttttactgtaatcattggtgcttatataatttgttttattgctctgtaattctgggccttcttcattgctcttccttttcagagctttcctggctat

SEQ ID NO: 1031567 - DNA, 120 bp, Artificial Sequence
  ENSG00000227354_46 (sequence is synthesized)
ttggctgtttatttttccatataagttttaggatcacactgtgtactgaaaacaaagttgatatttgttacttgctttttattagtattttaaataaaatttgtaaaagtgtatatatat

SEQ ID NO: 1031568 - DNA, 120 bp, Artificial Sequence
  ENSG00000227354_47 (sequence is synthesized)
ataaaatactaattcttttcgatttttaaatgtctttcagaggcaatttacagttgtttatatacatatattgcattctttttagttttatcttttttgttgctattataaattggattt

SEQ ID NO: 1031569 - DNA, 120 bp, Artificial Sequence
  ENSG00000227354_48 (sequence is synthesized)
ttggatttttaaaattacatattatattgtaatatgtatataagaaagctctttattttctacctcactaccctactgaatttttctattcttatcttggattttctatgtactaatagt

SEQ ID NO: 1031570 - DNA, 120 bp, Artificial Sequence
  ENSG00000227354_49 (sequence is synthesized)
tagtcatagttttaaattctttccaattttgtacctcaaatttatttctcttgtattatttattttttcagtagctagagtacaataataattatagcgatgagagttggcagacttgtc

SEQ ID NO: 1031571 - DNA, 120 bp, Artificial Sequence
  ENSG00000227354_50 (sequence is synthesized)
ttgtccctggctttaatgagaaatgattgtaaagtttgatcataattatgatgctaacttttggtcagggataagtataattttcattttaaggaaatatcaatggatttatatttcatt

SEQ ID NO: 1031572 - DNA, 120 bp, Artificial Sequence
  ENSG00000227354_51 (sequence is synthesized)
aaaattttttaaataataagtagttgttgaattttgtcaaatgcctgttcaccatctgtggaagtcattatatgattcaggattatatgatttttcattgtatatgtattaatattatat

SEQ ID NO: 1031573 - DNA, 70 bp, Artificial Sequence
  ENSG00000227359_0 (sequence is synthesized)
gcctttatgagctgtaacactcacggtgaaggtccgcagcttcactcctgagccgccaactccggacatg

SEQ ID NO: 1031574 - DNA, 120 bp, Artificial Sequence
  ENSG00000227359_1 (sequence is synthesized)
ctttaagaactgtaacactcaccgcgaggagccacggcttcattctggaagtcagtgagaccgagaacccactgagtccggacacattaggatgttagagtcccaccttcaaagcatttt

SEQ ID NO: 1031575 - DNA, 120 bp, Artificial Sequence
  ENSG00000227359_2 (sequence is synthesized)
cagtgaagaaccaggctaatccagcttgttttattggccccagtttttcttctcagggccgtaaaccagttattaccaggaaacaaaagcaaaactggagtgcagtggctcagtctcagc

SEQ ID NO: 1031576 - DNA, 120 bp, Artificial Sequence
  ENSG00000227359_3 (sequence is synthesized)
ttctcctgcctcaggttcctgagtagctgcgactacagaggaccaagaacttcgctttattcctggcagtgtgcattgctcatggcagcatgaaaaaaacagagtcctgagtatgaagta

SEQ ID NO: 1031577 - DNA, 120 bp, Artificial Sequence
  ENSG00000260597_0 (sequence is synthesized)
caagacagaggcaagcagagaaggcatagcagcagcgaccggcgctctgttttcattttccactctggccaggggataaactggaccccagtggactccaacaccaactctctgcttccc

SEQ ID NO: 1031578 - DNA, 120 bp, Artificial Sequence
  ENSG00000260597_1 (sequence is synthesized)
agttactttcgattttctttcccttctccttctttctctccctctctggcattcaaacagaagcacaagaggacccaccagtggcaactctaagcctccttgcaggccacattccctgct

SEQ ID NO: 1031579 - DNA, 120 bp, Artificial Sequence
  ENSG00000260597_2 (sequence is synthesized)
gacgtggtccttcctgcaggagagcccttctgtgattatctaataatagccagggtggctgagaatagaatctggctcaaggactctgcacacccggggcagagacactgaatctgtggg

SEQ ID NO: 1031580 - DNA, 120 bp, Artificial Sequence
  ENSG00000260597_3 (sequence is synthesized)
tcagggcctggcaacattccttggagcctccccctctgagcccactctttgggcacccttaggcttgcctgccccccttataaggggctttgtcagccctgccatccgctgtatttcatg

SEQ ID NO: 1031581 - DNA, 120 bp, Artificial Sequence
  ENSG00000260597_4 (sequence is synthesized)
tgctggttcctagctaaggagaattgggcagagcaaaccctttctcaccctggtctgacagttgtgatcccgacagaatgcgaccttgtttggagaaggcgaccttgttgggttggctgt

SEQ ID NO: 1031582 - DNA, 120 bp, Artificial Sequence
  ENSG00000260597_5 (sequence is synthesized)
gttctgaaaccaggcttgggagtgttatatatttattatatacaggcttaaatatacagactcaggcttatgcatgaatatatacagactcatatttccttggtggttaattgtatatta

SEQ ID NO: 1031583 - DNA, 120 bp, Artificial Sequence
  ENSG00000260597_6 (sequence is synthesized)
ccatgcctatattcgctcaaacaccattttatgttcatgcaaaattttgttagtcctcactagatgagagtgggctcatggaggcaccgggtgcactgagcaggccctctgtgcatgctc

SEQ ID NO: 1031584 - DNA, 120 bp, Artificial Sequence
  ENSG00000260597_7 (sequence is synthesized)
tgctggaaatatgtgctcactggaatcggagtatgcgggttccagtaaccaatggatgccataaaggctttctcagaccttattgcttttgttgcccaagcagctggactggggaaatac

SEQ ID NO: 1031585 - DNA, 120 bp, Artificial Sequence
  ENSG00000260597_8 (sequence is synthesized)
taaatcccttctgctttctctccacacctcctggcaaactctcccaacttagaaattattttacaagggagaccagttgtcttgaaattgagttctgcgggattcttttcacgggcatgg

SEQ ID NO: 1031586 - DNA, 120 bp, Artificial Sequence
  ENSG00000260597_9 (sequence is synthesized)
tggggctgcaagcagttcggagtagtcagggccctggcgctggaagcctcactggagcgatgaagggatcagagtggttaataaggtggcctctggacagtgatctggggcagctgctgg

SEQ ID NO: 1031587 - DNA, 120 bp, Artificial Sequence
  ENSG00000260597_10 (sequence is synthesized)
ccagggtgcttggagaagcttgtggaaaaggcaagccaaaaggggtagggatgcagtgaatatctgtttctccccctgcttgccccagccggccgctcaccccgccccagcccgatttgc

SEQ ID NO: 1031588 - DNA, 120 bp, Artificial Sequence
  ENSG00000260597_11 (sequence is synthesized)
ccaaatacccagatctggttactggatgaactgcgttttaatcctcgtcgctatctgagccaggacaagacctggtcagggagacggctggtccgggcagcacgggagaggacgctggac

SEQ ID NO: 1031589 - DNA, 120 bp, Artificial Sequence
  ENSG00000260597_12 (sequence is synthesized)
ccgctgcctgtggcctggagcactgagtatgggctaccaaggctgagaattgatgggcctcctttcccagcctttttcccttccagagacacaaaaagacagagcagaggggaaatatca

SEQ ID NO: 1031590 - DNA, 120 bp, Artificial Sequence
  ENSG00000260597_13 (sequence is synthesized)
atgtcagtggaaaaccccataaaagaaagcagggaccagagcggggctggaggggttttccgctactctctctaggtgatcgggttcctcccaagactcttgtccagacaggctgcacca

SEQ ID NO: 1031591 - DNA, 120 bp, Artificial Sequence
  ENSG00000260597_14 (sequence is synthesized)
agaggtgtgcagctttcttccaccttcctcccgcccttcaaggagggcagccttaggctttctgggccttggtcaccccaggcactggggtgacattactccaggattgtgcccctcgcc

SEQ ID NO: 1031592 - DNA, 120 bp, Artificial Sequence
  ENSG00000260597_15 (sequence is synthesized)
cagcccacggcctctgccacggcgccgcagccgctcctgtttattgtgtctgtgagttgtttacttgttttgtctgctgccaccctgcgtcagaaacccgccaaaccagcgaactcgccc

SEQ ID NO: 1031593 - DNA, 120 bp, Artificial Sequence
  ENSG00000260597_16 (sequence is synthesized)
aggagaacaaagtgctgtgctatccccggactccctcccctttccagcaaccccctcctgccctcacaagctcctgcattctccctttcggaggggaggaagcagaaatagtcttaaaac

SEQ ID NO: 1031594 - DNA, 120 bp, Artificial Sequence
  ENSG00000260597_17 (sequence is synthesized)
agggcagctgtttatagggtcaggggaattatggggacaccataaacctctgggtgtccctgtggtggacagacttctgagcagcccttcccttgcctaggcttttcttccttcccctgg

SEQ ID NO: 1031595 - DNA, 120 bp, Artificial Sequence
  ENSG00000260597_18 (sequence is synthesized)
tgaccacttggttaagggggccacactcattgagaaagttgagcccacccccatcaacccagtcccccactaccccactcctttctgcaggagtttccctgagacacaggttgttgggtt

SEQ ID NO: 1031596 - DNA, 120 bp, Artificial Sequence
  ENSG00000260597_19 (sequence is synthesized)
ttaaatcagggtaatgttggtggattcataaagctagatatagcatgtcattcttctcccacactccctctcctcagccccccaaaattgcagtgaatttaagcaaatcctacaaaatta

SEQ ID NO: 1031597 - DNA, 120 bp, Artificial Sequence
  ENSG00000260597_20 (sequence is synthesized)
aattgcccctttgctaaagatcctatatgtctccaatcctgccaggtgtagagtcagatagttggcttttggcctttaattttgctgctagctattaaatttaaaagagtatcattgaag

SEQ ID NO: 1031598 - DNA, 120 bp, Artificial Sequence
  ENSG00000260597_21 (sequence is synthesized)
taagtaatattctcatttctgaaattaattttcccctcccagtctctctctctctctttttgccagcacagattaaatggttctttcagatctgcaaacaataaaggataaaattattta

SEQ ID NO: 1031599 - DNA, 120 bp, Artificial Sequence
  ENSG00000287438_0 (sequence is synthesized)
tcctcagcctgcagatggcctattgacggaccttgtgattgtggctctctggttttgcatcttcctcatttttctcttgccgctgccatgtaagaaatgcctttcaccttccaccatgat

SEQ ID NO: 1031600 - DNA, 120 bp, Artificial Sequence
  ENSG00000287438_1 (sequence is synthesized)
tctgatgcctccccagccatgtggaatttaaatgtccaaggagaagttgaatgtctgcaacacagaagaaggcccttaccagaatccagccacactggcaccttgatctgagactttaaa

SEQ ID NO: 1031601 - DNA, 120 bp, Artificial Sequence
  ENSG00000287438_2 (sequence is synthesized)
actccagaactgtttttgataaaccacccaatctaaattttctcatgtaataatgcatagagatgatagaattgggcattaccatcttgtttgaaattttaagaagaaagctttaacact

SEQ ID NO: 1031602 - DNA, 120 bp, Artificial Sequence
  ENSG00000287438_3 (sequence is synthesized)
ttcaaccttgggtatgatgtttgcttctggtttttcatagagtcaacttatttataatgaggaggttttcttatattcctagtttatttttttaaataatgaattttgtcgaattttgcc

SEQ ID NO: 1031603 - DNA, 120 bp, Artificial Sequence
  ENSG00000287438_4 (sequence is synthesized)
aagtattttctctgcatcagttgagatgatcatgattggttttgttttgtgttccttttattctgttaatgtggtgtgtaacatcgattgatttttatatgttaagctattctcacattc

SEQ ID NO: 1031604 - DNA, 120 bp, Artificial Sequence
  ENSG00000287438_5 (sequence is synthesized)
atttgatcatccctttaatatgttgtaattgaatattttataatccctttaatatgttgttggattctgttttctagtatattgaagatgatttttgcatctatagtcataagggatatt

SEQ ID NO: 1031605 - DNA, 120 bp, Artificial Sequence
  ENSG00000287438_6 (sequence is synthesized)
gtcttgtaatttccatttcttttcttctgatgcctttgtctggctttggtagcagagtgagtcatgccttacaaaataaattagtattcctcatttattttttggaaaagtttgaggatt

SEQ ID NO: 1031606 - DNA, 120 bp, Artificial Sequence
  ENSG00000287438_7 (sequence is synthesized)
gcttttaattatttttaaaatgtttagctgcattcaccagtgaagccatctggtcatgagcttttattactttagagctctttgattactgattcgatatatttactttttgtaattctg

SEQ ID NO: 1031607 - DNA, 120 bp, Artificial Sequence
  ENSG00000287438_8 (sequence is synthesized)
ttcagattttctctgttgagtaagctaaagtaatttgtgttcctagaattttgtttccattttatttaggccaactaatttattggagtaacattttacattgtattcacctaaaatccc

SEQ ID NO: 1031608 - DNA, 120 bp, Artificial Sequence
  ENSG00000287438_9 (sequence is synthesized)
ttttatttctttaaatatttttaaattgtaagatggtaccaatggaatgccagtcagaaattcatgcacccaaacctgaagaggcacagacatattcaaataaagtaagcctaacaccaa

SEQ ID NO: 1031609 - DNA, 120 bp, Artificial Sequence
  ENSG00000287439_0 (sequence is synthesized)
aatgcatacagtgttagatgctgggccatctactccttgcccaagaaagcccctccagggacagctgaatcagataactggagtttgcattctgagaactattgttctgaattaacatgt

SEQ ID NO: 1031610 - DNA, 120 bp, Artificial Sequence
  ENSG00000287439_1 (sequence is synthesized)
gaggttttaaaattttttcttattttcttgtttaacttattacatttttatcctctgcatggggttttagacttaacatctctggaaagccagaaatcagagatacagagaagtattgaa

SEQ ID NO: 1031611 - DNA, 120 bp, Artificial Sequence
  ENSG00000287439_2 (sequence is synthesized)
atgctgaaatgctatgaatttactataagagaacattcttcactgaagagatctctagctgccaaaacaccctttcatgcgtgaaataccggggcaaagaggaaggaaaagagaagagta

SEQ ID NO: 1031612 - DNA, 120 bp, Artificial Sequence
  ENSG00000287439_3 (sequence is synthesized)
tgactctaggaaccatgttgcagaaatgccaaagggtgggacaaacaaagttactaatgtggagaaagaagattatcatgtgtggaacgaaggacaatatgaacattaaataatgccctg

SEQ ID NO: 1031613 - DNA, 120 bp, Artificial Sequence
  ENSG00000287439_4 (sequence is synthesized)
actcattccaaaaagaatctgagatgaccaataaagccatttttaattgtttattagtgaacaatagattatgagtgctaaagggattcaggaagaagaaagatcagtgcagagtagaga

SEQ ID NO: 1031614 - DNA, 120 bp, Artificial Sequence
  ENSG00000287439_5 (sequence is synthesized)
agtctgatggatgcattgaagaagctatgcttgagctgaaatgacaagagagctgtttttcgctttcagaattattatgtggcaatggtaattgacaacagagaagctgaagggaggaag

SEQ ID NO: 1031615 - DNA, 120 bp, Artificial Sequence
  ENSG00000287439_6 (sequence is synthesized)
tcactttatgggagcagagtcactctcaagtaatagctggccatacagattgctctggaccaagggtgaatgtgaagaagaaaagaccggccagcaacacaatggaatatctagagtcat

SEQ ID NO: 1031616 - DNA, 120 bp, Artificial Sequence
  ENSG00000287439_7 (sequence is synthesized)
attgagggaaatacttagattgctgatttcttagtggatttcacaagcagagctgcttgtgagcagaatggtgaagtaggggcatgtgtttctggggtcttattccatggcttccttcca

SEQ ID NO: 1031617 - DNA, 120 bp, Artificial Sequence
  ENSG00000287439_8 (sequence is synthesized)
cctacaagagtcatcctcacggagtacttgcatttcagtagaagaaaaaaatcttatagatggaagggaaggatggggttcctgctttaggaagattggcatggtcataagtctgagcaa

SEQ ID NO: 1031618 - DNA, 120 bp, Artificial Sequence
  ENSG00000287439_9 (sequence is synthesized)
ggaagggcccagggcagctcagagctctgagcaggaagctctaattagttactgaatatggtgcaagcacaaagagagcgtagtgttttccctttccatctgtggaagtcttggccatgc

SEQ ID NO: 1031619 - DNA, 120 bp, Artificial Sequence
  ENSG00000287439_10 (sequence is synthesized)
ttacttgggcgttccttccaggaaacatttatttttcctctttaatgccctcctcatatctatgctctcagtagaggatgccactgcttctggcacctggataatagaatgaagctgatt

SEQ ID NO: 1031620 - DNA, 120 bp, Artificial Sequence
  ENSG00000287439_11 (sequence is synthesized)
gggatggaaacagaaaagtcatctctcagaacaatgagcagagactgaaactcccttgtacccagtccctgtgcactgctgttcatagccaaatgggcaaggccttgccaaatgtcatgt

SEQ ID NO: 1031621 - DNA, 120 bp, Artificial Sequence
  ENSG00000287439_12 (sequence is synthesized)
tgaggtgaggccctaagtgatagaaaaataaaaaatgactatggccacttgcatgttcagagaattcagtttagaaaatgctatgctgggaggatctctcttaatatcttgtttgcatca

SEQ ID NO: 1031622 - DNA, 120 bp, Artificial Sequence
  ENSG00000287439_13 (sequence is synthesized)
gaatgttcaagttgcaatatatgtttttgttttgtgtatttatttattttcctctactctattctgttaagtcttttagggcaaaggtagggtagtctatactccctgcgttatccataa

SEQ ID NO: 1031623 - DNA, 120 bp, Artificial Sequence
  ENSG00000287439_14 (sequence is synthesized)
tgcctagcactgtgtcttgtacataaaaggtcataataaatacctgttggctagatagatgaatggatagagtgcctcatttagaagcattatacttctatggaaaaaaatttttaaatg

SEQ ID NO: 1031624 - DNA, 120 bp, Artificial Sequence
  ENSG00000287439_15 (sequence is synthesized)
tatttttttctatgagataacacagttcctgaataggtcatgggcaggtgctattcaagtttgcgaaggaaaggttttcctagagttagggtaattttttcctcaaataagaaaaaccta

SEQ ID NO: 1031625 - DNA, 120 bp, Artificial Sequence
  ENSG00000287439_16 (sequence is synthesized)
tgtaagtgatgatattgtctgtgagaacattacagtaggttagtatcctgggttaagctaagtgttgttgaaaataatcctggacatccaaacaggaagagaggaagtcaaactattcct

SEQ ID NO: 1031626 - DNA, 120 bp, Artificial Sequence
  ENSG00000287439_17 (sequence is synthesized)
gtttgcaaataacatgattctatatctagaaaaccctgtaatgtcagccccaaggctctgtgagatcagagataaataacctcagcaaagtcaacatacaaacatcagtagcattcctta

SEQ ID NO: 1031627 - DNA, 120 bp, Artificial Sequence
  ENSG00000287439_18 (sequence is synthesized)
tacaaacaacatccaagctgatggccaaatcaggatgcaatcccattcacaattgcccccccaaaaatataaaatacttaggaatacagctaaccagggatgtgaaagatctctataata

SEQ ID NO: 1031628 - DNA, 120 bp, Artificial Sequence
  ENSG00000287439_19 (sequence is synthesized)
aaagatctctataataagaattacaaaacactgctcaaaaaatcatagatgacaccaaaaattggaaaaataatccatgctcatggattggatgaatcaatatcattaaaatggccatac

SEQ ID NO: 1031629 - DNA, 120 bp, Artificial Sequence
  ENSG00000287439_20 (sequence is synthesized)
cagatttcacagattcagtgctattcctatcaaaatatcaatgacatttttcgtggaattagaaaaaactattttaaaattgacatggaacccaaaagggaccccgaatagtcgaggcaa

SEQ ID NO: 1031630 - DNA, 120 bp, Artificial Sequence
  ENSG00000287439_21 (sequence is synthesized)
cgaatagtcgaggcaatcctaaacaaaaagaacaaagctggaggtattatattacccaatgtcaacatatactacagggctatagtaaccaaaagagcatggtactggtacaaaaacaga

SEQ ID NO: 1031631 - DNA, 120 bp, Artificial Sequence
  ENSG00000287439_22 (sequence is synthesized)
acgtaataaagagcccagaaataatgtcacaccacttacaaccatctgatcttcaataaagctgacaaaaacaaacaatagggaaaagattcctcattcaataaatggtgctgggataac

SEQ ID NO: 1031632 - DNA, 89 bp, Artificial Sequence
  ENSG00000287439_23 (sequence is synthesized)
catatgcagaagattgaaactggacaccccaccttacactacatacaaaaatcagtgtaagatgaattaaaggctgaaagataacctag

SEQ ID NO: 1031633 - DNA, 90 bp, Artificial Sequence
  ENSG00000287439_24 (sequence is synthesized)
gtaaaacctaaaactataaaaaccctgaaagataacctaggaaataccattctggacatagaacttggcaaagatttcatgatgaagaca

SEQ ID NO: 1031634 - DNA, 120 bp, Artificial Sequence
  ENSG00000287439_25 (sequence is synthesized)
acagacaacctacagaatgggagaagatatctgcaaactatgcatccaacaaaggtctaatatccagatgctgtaaggaacttaaatttataagcataaacaaacaaccccattaaaaag

SEQ ID NO: 1031635 - DNA, 79 bp, Artificial Sequence
  ENSG00000287439_26 (sequence is synthesized)
tataagcagagatacttttcaaaagaagacatatatgtggccaacaagcatataaaaaatgctcaacatcactaatcat

SEQ ID NO: 1031636 - DNA, 120 bp, Artificial Sequence
  ENSG00000287439_27 (sequence is synthesized)
tagagaaatgcaaattaaaaccacagtgaaataccatcccacaccagtcagaatggctattattaaaagttgaaaaataataggtgctagcaatgttgtggagaaaagggaacacttata

SEQ ID NO: 1031637 - DNA, 120 bp, Artificial Sequence
  ENSG00000287439_28 (sequence is synthesized)
attagttcagccactgtagaaagcagttgggtgattcctcaaagaacttaaaaaaacagagttaccatccaacctagcaaccccattattgggtataatccaaaggaatataaattgttc

SEQ ID NO: 1031638 - DNA, 79 bp, Artificial Sequence
  ENSG00000287439_29 (sequence is synthesized)
aacatgtatattcattgcagcactattcgcaataagaaagatatggcatcaccctaaatgcccatcagtggtagactgg

SEQ ID NO: 1031639 - DNA, 88 bp, Artificial Sequence
  ENSG00000287439_30 (sequence is synthesized)
atactatgcagccataaaaaacaatgagatcatgtcctgtgaagcaacatggatggatctggaagccattatcctatggcatgttctt

SEQ ID NO: 1031640 - DNA, 120 bp, Artificial Sequence
  ENSG00000287439_31 (sequence is synthesized)
aacagaaaaccaaatatggcatgttcttacaagtggaagctaaacaataggaacacatggatattagaagggtaacagaagatattggggcctacttgagggtggaaagtgggaggaagg

SEQ ID NO: 1031641 - DNA, 120 bp, Artificial Sequence
  ENSG00000287439_32 (sequence is synthesized)
agaggatcggaaaaatacctattgggtactatgtttattacctggatgataaaattatctgtcaccaaacccctgtgacatgcagtttacctatataacaaacctgcacatgtacccctg

SEQ ID NO: 1031642 - DNA, 120 bp, Artificial Sequence
  ENSG00000287430_0 (sequence is synthesized)
ggccggcatggcggggagggggcgcgctgggaggagactgggctggggagggatccctgtgtgcagtccttcaacccttctgtgccaggggaagagggacggcgcagggggccccctctc

SEQ ID NO: 1031643 - DNA, 120 bp, Artificial Sequence
  ENSG00000287430_1 (sequence is synthesized)
gggaagcacacacgctgcctcccagaggccgatcttcaccaagaaggattcgctggaaactttcggaaaaccgaggggctcttcagcctcctctctacgtgctacctggagtcggggcgc

SEQ ID NO: 1031644 - DNA, 120 bp, Artificial Sequence
  ENSG00000287430_2 (sequence is synthesized)
cgcgagtgcgcttggctgcccgcgcccagcctctggcctcgcctcttctcgcgggcctcccgggtttccctctgcccccttgcggggatccccctgtgcgcccgactcgggatctggaac

SEQ ID NO: 1031645 - DNA, 120 bp, Artificial Sequence
  ENSG00000287430_3 (sequence is synthesized)
aggcctccccagaggctgttagttccataagggtgtccggctcccccctctgtcttgggctcacacttcgctttctgttcgtgctggaccaagtccaatactgtggctgatcgaagtggg

SEQ ID NO: 1031646 - DNA, 120 bp, Artificial Sequence
  ENSG00000287430_4 (sequence is synthesized)
gacagctggcacggtccctggagaggcggcctgaagaggcttctggccttgtgcaggtccctgcagagactttggacctgatgtggtgaataaagttggttagtctttctcacagttcta

SEQ ID NO: 1031647 - DNA, 120 bp, Artificial Sequence
  ENSG00000287430_5 (sequence is synthesized)
cctttaggacaaagaatagaaagcctcccgtgactatattcactaactctcagcccaggccagatcatccaccagccagtgaaagggacctcgtctgtggccaaactaggtgcagctcgg

SEQ ID NO: 1031648 - DNA, 120 bp, Artificial Sequence
  ENSG00000287430_6 (sequence is synthesized)
tgccctcctgtgatatttccagctctccagcctcctgctgaccacagctcacagacctcatggagtagtttccaggacaaagcaaggttatgtctccacaacaccaaacattcccaggtg

SEQ ID NO: 1031649 - DNA, 120 bp, Artificial Sequence
  ENSG00000287430_7 (sequence is synthesized)
aaaaggcactttcttggtaaagagacatcagctttctcaccatggctgtttcataacacaaggagacctggcccaagctcagaggggaaagacccctgggtgttcatggaaaacctttaa

SEQ ID NO: 1031650 - DNA, 120 bp, Artificial Sequence
  ENSG00000287430_8 (sequence is synthesized)
gcacagtgagaccaaatgttagtagatgggggataaaagggagaaattcatggagtatgcctagaacaggccttgtatgcagcatccccttcttgcctaggacttgaagggccaggcttc

SEQ ID NO: 1031651 - DNA, 120 bp, Artificial Sequence
  ENSG00000287430_9 (sequence is synthesized)
ctgtcattgcctcactcaaatgtagcccaggaagacattagactgatagcactgatcacctccagacaaaacccctgcacctgcacagtcacatagacttggacaaaagcccatccttac

SEQ ID NO: 1031652 - DNA, 120 bp, Artificial Sequence
  ENSG00000287430_10 (sequence is synthesized)
taaggaagacctaacaactatttcttctcacgcccattcttgtccaccgtctttatcaaaaagccaggaaaactgcttcttcagacactttctgagccggctgtattttgaaggacaaaa

SEQ ID NO: 1031653 - DNA, 120 bp, Artificial Sequence
  ENSG00000287430_11 (sequence is synthesized)
aaaaaaaaattactcttttgagagcattgtgtctgcaaggtgggctcacgttatttttggtgatcagtttatgactggagttcaaatagactgcttattttataagagtttttaattttg

SEQ ID NO: 1031654 - DNA, 120 bp, Artificial Sequence
  ENSG00000287430_12 (sequence is synthesized)
aatattctttttgctgaactgtgtgcatttgtttggtttttaactcaccacatgaatatgactatagatttttttttcctagttgaccatggtcagattcacaattgcctttaaaaaaaa

SEQ ID NO: 1031655 - DNA, 66 bp, Artificial Sequence
  ENSG00000287430_13 (sequence is synthesized)
aaaattagcaggtggatcatctgaggtcagaagttcgaggccaacctggccaacatggtgaaactc

SEQ ID NO: 1031656 - DNA, 120 bp, Artificial Sequence
  ENSG00000287431_0 (sequence is synthesized)
cggccgccgccgcctcgtcttccccgagggctccgcgtccgtctccgcagctcggccgggaacctgggaactcggacgcagaaggacgcgcccgagccaggacccgccgcggggtccctc

SEQ ID NO: 1031657 - DNA, 120 bp, Artificial Sequence
  ENSG00000287431_1 (sequence is synthesized)
tggtgggccgtggccggggagaggacgcgggccctggcggtcgaagacggacgcagcgcccggaaaggcgagccaggtctccggctcctggcgcttcctgtgagctggctcggcggggtg

SEQ ID NO: 1031658 - DNA, 120 bp, Artificial Sequence
  ENSG00000287431_2 (sequence is synthesized)
gggagggagggactggccgtggggcgagcagccgggcggggagtggcttctgggggccttcgccagcggagggcccgcgaggccgccctcggagcgccgccaggtacgtgcgttttcctt

SEQ ID NO: 1031659 - DNA, 120 bp, Artificial Sequence
  ENSG00000287431_3 (sequence is synthesized)
ttttccttgtttcccgcgctcccagagcgcactctcggtagggaacgaataaaatcccggctggtgtgtaagagcctttcgctgcaaacgtgtctttctgcgggattcggggagccgccg

SEQ ID NO: 1031660 - DNA, 120 bp, Artificial Sequence
  ENSG00000287431_4 (sequence is synthesized)
aacgcggggtagaccccggcccaaagtgttcctgcagcttccaccagggacccttctccaccctcaccttgggctcggagcgggtgccagtttggaaatgcttgtctcttctgcagctcc

SEQ ID NO: 1031661 - DNA, 120 bp, Artificial Sequence
  ENSG00000287431_5 (sequence is synthesized)
gattgaattcgcccaggaggaggtgcgccctgcctcggcctcagagctgggaggaccgggctttgttccccgaagctctcccaccccgtcctcctggaaaatgcggattttttctagtag

SEQ ID NO: 1031662 - DNA, 120 bp, Artificial Sequence
  ENSG00000287431_6 (sequence is synthesized)
ggatgctcagttttgagggggttgttttcggaggaagcttgggttgggaaagcccgatattggccccaatctggcgggcagcttcccttgtcttggagcagcccctcctagcccccggag

SEQ ID NO: 1031663 - DNA, 120 bp, Artificial Sequence
  ENSG00000287431_7 (sequence is synthesized)
ccccggacttacacggttaggagacgcccatgggctttgggggtattctgcggggtccgaggaggccgggtggcctgggcggggtccgaggaggccgggtggcctgagcggggtccgagg

SEQ ID NO: 1031664 - DNA, 120 bp, Artificial Sequence
  ENSG00000287431_8 (sequence is synthesized)
aggccgggtggcctgagcggggtccgaggaggccgggtggcctgagcgggctccttcccctcccccatgtgcacgtcaaacaaaagaatcttcgaacagttttggggacagaactcttcg

SEQ ID NO: 1031665 - DNA, 120 bp, Artificial Sequence
  ENSG00000287431_9 (sequence is synthesized)
gaatgtgagcctgtcctccccgccccccttcctaggaaggacaggggtctttcaacaaaggcaaggctgcggttggagcgggctgaagggaaggagcgctgttattttggggtacttgat

SEQ ID NO: 1031666 - DNA, 120 bp, Artificial Sequence
  ENSG00000287431_10 (sequence is synthesized)
gaaagagaaactcactttctctttctcctcccaaaattagaggcagctgagtcagagctctccctactttcttacctgattaatggggtttcacacgatgtttgcatttggggtgactgg

SEQ ID NO: 1031667 - DNA, 120 bp, Artificial Sequence
  ENSG00000287431_11 (sequence is synthesized)
gtttgaagactttcagaagtgggaaaggatcctgcttgtgtgggagattggaaagctggcctccacccggtgggggatagaacccctatggagtgaaatggattccaggccattttgcgg

SEQ ID NO: 1031668 - DNA, 120 bp, Artificial Sequence
  ENSG00000287431_12 (sequence is synthesized)
aagattggaaatttaaggatttgacgggggggcggtgattttgtgtccttttctctcccccctcccccctccccagtttagaacaaagggcggaggcgaaggaggcaagatgggtggtgg

SEQ ID NO: 1031669 - DNA, 120 bp, Artificial Sequence
  ENSG00000287431_13 (sequence is synthesized)
gctcggaagccggagtcgaaagaagaatgttataaaagtccctcacttcccagtccccgcgcactcccaaatagctcatcagagtttgggtggggacaaagtgaatgaccgcctagagtc

SEQ ID NO: 1031670 - DNA, 120 bp, Artificial Sequence
  ENSG00000287431_14 (sequence is synthesized)
gggtttggtacccatggcccggttttcggcgcgggcgtccggagcccgggggaagctcctccagctcgtcccaagtcgcggttggccagggcgagagaggtcggggcacagcgcgcggtt

SEQ ID NO: 1031671 - DNA, 120 bp, Artificial Sequence
  ENSG00000287431_15 (sequence is synthesized)
tctcctgccgccttcgaggaccgagactcggggttcgcggctccctgactgcgcaagtctcctcgcccctcctgctcccccctcccccccgccgaaagacgctcggagcgcacacccgcc

SEQ ID NO: 1031672 - DNA, 120 bp, Artificial Sequence
  ENSG00000287431_16 (sequence is synthesized)
tgcaccaaagccagggatctcatttctctcaaaataaaacaacaagccataaaggctcctgattccagtggaaaaggcgccgcagatttatggtccctccaaatccccacactctaatta

SEQ ID NO: 1031673 - DNA, 120 bp, Artificial Sequence
  ENSG00000287431_17 (sequence is synthesized)
tccctgtttttagtttacttatgggtggtgaccaataaaatgattttccattttgaatttttttttcaacataaaaaatgcaagcttcgcttccctcttacccgcttggatggatctttt

SEQ ID NO: 1031674 - DNA, 120 bp, Artificial Sequence
  ENSG00000287431_18 (sequence is synthesized)
ccgtgcgggaagcaaagaaatcccgtttccctcggccttatcggcccagggctgagctgctgcctccggttgagcgaacccggcctgccgcagcaccccccaagcacccccgccccgcac

SEQ ID NO: 1031675 - DNA, 120 bp, Artificial Sequence
  ENSG00000287431_19 (sequence is synthesized)
acccttaattgcaatttaagggagaatattctttccgtcctctcttcgcccaagggcatttgcagggacccctccctagaagtcctgtcgtgggcctagcggctagaagggccaccccgc

SEQ ID NO: 1031676 - DNA, 120 bp, Artificial Sequence
  ENSG00000287431_20 (sequence is synthesized)
agagcgggtctccgacagccccagcccggtcacctttcaaactgcgccctcctgggccccgcattgggcgcgagcctggggcgcccaagggcccccactgaggaggaaggttgccggacc

SEQ ID NO: 1031677 - DNA, 120 bp, Artificial Sequence
  ENSG00000287431_21 (sequence is synthesized)
gagccctcgccaccgcttggcgcccccatcccccatcctcctccctttgttcgcctttccggacgccgacttggagatggcaggaaaaaaaaaataatcagatggaaatcaaagattagc

SEQ ID NO: 1031678 - DNA, 120 bp, Artificial Sequence
  ENSG00000287431_22 (sequence is synthesized)
ctgggtgcgcgggcggcctccgccgggccgggccatgctcggcccgcgcctcataaatcttcctcgcgacgtgacaacagccgcggcctcgtttccctgggaactcaggaacgcatcgat

SEQ ID NO: 1031679 - DNA, 120 bp, Artificial Sequence
  ENSG00000287431_23 (sequence is synthesized)
cctcctcgccgtccgcgcaagtcccctcttcgggagcgagaacggagagtccctggtgaccctgacttctggccagcgcaggacgccccaggccccagccagggtatcatgcacaggagt

SEQ ID NO: 1031680 - DNA, 120 bp, Artificial Sequence
  ENSG00000287431_24 (sequence is synthesized)
ggaggaaggtggaagggaaggggcccaaccctcacccaagaaagcgcagcaaatacccacaccccgcaggttaaaccaaacacattattaggggccgcatcttctctcctccgcgccgcc

SEQ ID NO: 1031681 - DNA, 120 bp, Artificial Sequence
  ENSG00000287431_25 (sequence is synthesized)
tgagaagggggcggaaggaaggacggagaagggtgaggggcggattaacccctccctggcgactcctttgtctggcccggacattgctgagccgagtggggcgcccaggagccagcgagg

SEQ ID NO: 1031682 - DNA, 120 bp, Artificial Sequence
  ENSG00000287431_26 (sequence is synthesized)
ctcggcccaggtgtgcgggccgcggtggggcgcaggttcgcagcggagccacgagatccccgcgcctccggctgacgtccgggcgcccagggtctgcggccccacgtgcgatccatccgg

SEQ ID NO: 1031683 - DNA, 120 bp, Artificial Sequence
  ENSG00000287431_27 (sequence is synthesized)
cccacgtgcgatccatccgggagctgcgcctcagacgcctcgtggagcgggggagaacctgaaggaagtcgtggcgcgtttagatattttaaaaactcgaattaattgggaaaataggaa

SEQ ID NO: 1031684 - DNA, 120 bp, Artificial Sequence
  ENSG00000287431_28 (sequence is synthesized)
cccttgttgtggcggttgtttttgacctttcctactattaaaagaaatgttgccacgtttaatttttgttgccatgagatatggagggggtagcccagcattttgaagtaatttgataag

SEQ ID NO: 1031685 - DNA, 120 bp, Artificial Sequence
  ENSG00000287431_29 (sequence is synthesized)
ccttcaagtagtaaatccgaaagggaggccggcggcccaggtatagtttctttgtaacctgaatttacaatgaaagcattctcctttatggatataatagattagatttcacaacttaat

SEQ ID NO: 1031686 - DNA, 120 bp, Artificial Sequence
  ENSG00000287431_30 (sequence is synthesized)
tcaccggaatggctccgtttaagggagctccggctgattttattacgccaagccaaattggatgtttgtggtcttaacgaaaagcgatcgtgacataaaatatataatttttaaagtaaa

SEQ ID NO: 1031687 - DNA, 120 bp, Artificial Sequence
  ENSG00000287431_31 (sequence is synthesized)
aaaccagcgggttggatcctgtcccctcccctatccttgctccttactcccaatcccccagtgtgggaaatacggataattatttgtgtgtgttggtttctaccggggagacaggcgctc

SEQ ID NO: 1031688 - DNA, 120 bp, Artificial Sequence
  ENSG00000287431_32 (sequence is synthesized)
tgggctccttccccggcgggccagaggcctcgccggccagtgcgcacgcggcgccggttcccgaccaaggctccggcccgctctgctggctcgtttgaaacgtcgacattctcagcgcac

SEQ ID NO: 1031689 - DNA, 120 bp, Artificial Sequence
  ENSG00000287431_33 (sequence is synthesized)
gatccggggtctcgggggcacccatggggcccgaagcctctgcctgccggcggcgaccggacagctcccccgggcgcgcagggtagaggaagcgccctcgaaagcccccgcacgcattca

SEQ ID NO: 1031690 - DNA, 120 bp, Artificial Sequence
  ENSG00000287431_34 (sequence is synthesized)
cgagccggccctgcgcgggcacagcggcagccgcggcgggacacccggcagggtcttcggcgctactttgtgccaaaaactgcgctcccggagacccgggcaccgccggcgtcggcagct

SEQ ID NO: 1031691 - DNA, 120 bp, Artificial Sequence
  ENSG00000287431_35 (sequence is synthesized)
agagcgggacccagctcccaccgcgtcctccactggagcccctttcggcccctcggcgagtgcggcccgtggggagtgggcgtcggcgcgaggaagttccccggcccgggcgaccccggc

SEQ ID NO: 1031692 - DNA, 120 bp, Artificial Sequence
  ENSG00000287431_36 (sequence is synthesized)
ttctgagcggcccctccccacgtcgccgcccgccaggccgacggaggaccggggcggggacgggggtctcagcggcccattctgctgtcacttctgacctattctccagcaacggcgcgt

SEQ ID NO: 1031693 - DNA, 120 bp, Artificial Sequence
  ENSG00000287431_37 (sequence is synthesized)
ccccccctcggctttttcgcgaggtttgttgaagacggatttagcccccgcagagctggggaaggacggatggacggaaggcccagcgcggcccaccccttcccctcgtcgtctcccggc

SEQ ID NO: 1031694 - DNA, 120 bp, Artificial Sequence
  ENSG00000287431_38 (sequence is synthesized)
cggctggcaggagccgcagcgacagcttcggggagcggggcctgccccaagacccccttcgcggcatcgggagccaggcgtggccggaggcaccgcggctgctccacgtggctcccgccg

SEQ ID NO: 1031695 - DNA, 120 bp, Artificial Sequence
  ENSG00000287431_39 (sequence is synthesized)
ccaccccgcgcggggaggacgcgtgcgtgcggtgcgtggccggcgggctgcggggacgcgcttgaaattaaatcttcgcagtgcctgaccttgttttttcctcggccctgataactgcag

SEQ ID NO: 1031696 - DNA, 120 bp, Artificial Sequence
  ENSG00000287431_40 (sequence is synthesized)
cagctgttttttccagaatccctgctgctgggggaggggcgttattattatttttggttgtcacaacctcctggaaaaattccctggcctcagaaagtgtaacaatggcctggcggattt

SEQ ID NO: 1031697 - DNA, 120 bp, Artificial Sequence
  ENSG00000287431_41 (sequence is synthesized)
ctggaggaagcgccccctcctctgctttctgcggggacacttctgccctcgagctgcagtggggacctcctcccctgctctggccctatagccccctccccggccttcagagccttacat

SEQ ID NO: 1031698 - DNA, 120 bp, Artificial Sequence
  ENSG00000287431_42 (sequence is synthesized)
caggctcctaagtacgtggccttggggtcctgcgggccccttctgcttgccgtccctgcccctggtcacgcctgggaaaggttgcagctctgaactggggagaagcttatagtctccagc

SEQ ID NO: 1031699 - DNA, 120 bp, Artificial Sequence
  ENSG00000287431_43 (sequence is synthesized)
acgaatgaggcttgaggggcacgaggcagaggcctggacaccccacccacctggagccagtgaccctcacccagtgcctcctttaagacaccactgcaggctgggtacggtggctcacgc

SEQ ID NO: 1031700 - DNA, 64 bp, Artificial Sequence
  ENSG00000287431_44 (sequence is synthesized)
ccagcactttgggaggcaggcggatcactaggtcgggagtttggggccgggcgcggtggctcac

SEQ ID NO: 1031701 - DNA, 65 bp, Artificial Sequence
  ENSG00000287431_45 (sequence is synthesized)
cagtcccagctgctggggaggctgaggcaagagaatgacttgaaccggggaggcggaggttgcag

SEQ ID NO: 1031702 - DNA, 120 bp, Artificial Sequence
  ENSG00000287431_46 (sequence is synthesized)
gcctgggcgacaaagtgagactccatctgaaaaaaaaaaaaaaagacaccactgcccagccgtacttggaagacatgtctcctccccaggaatcctgctgtgtttgcttttggggtcagt

SEQ ID NO: 1031703 - DNA, 120 bp, Artificial Sequence
  ENSG00000287431_47 (sequence is synthesized)
gctagtccagaagcagttaaagattaaccggcctgggccctggggtagaagaggaggctgaggagggggaggggaggggaaggggctgcagcacaagtggtgcctgattcctgggccatt

SEQ ID NO: 1031704 - DNA, 120 bp, Artificial Sequence
  ENSG00000287431_48 (sequence is synthesized)
ccctggcagccaagtggctgctgggctctgcacacagcccatcccccccagtgctgctgcccgcgttccagcttgcccccacctgccaggctgtgcagtgggttcaggtgggaagcagtt

SEQ ID NO: 1031705 - DNA, 120 bp, Artificial Sequence
  ENSG00000287431_49 (sequence is synthesized)
gctgggcccacctgtctggcaagggcagttggggagccctggctgcttagcacaggggtgaccccagcttctggctcacacatccctgcagactgtgggtgcttagtgtggaaagaggaa

SEQ ID NO: 1031706 - DNA, 120 bp, Artificial Sequence
  ENSG00000287431_50 (sequence is synthesized)
ggacctctgccctcctggcccttcctccagtgggacgagaagcccaggaaagaggctgaacccaggaagggctctgggcagcctggccgctggtctcgcagtgtgtggctggtcttggcc

SEQ ID NO: 1031707 - DNA, 120 bp, Artificial Sequence
  ENSG00000287431_51 (sequence is synthesized)
tgtgtgtgtgtgtgtgtgtgtgtgcaccatacagccaatcctgcgcctgcatctccttctcctgcatgggccctccttgatcaggaaggggaggcaggaggatctcagcccccacctcat

SEQ ID NO: 1031708 - DNA, 120 bp, Artificial Sequence
  ENSG00000287431_52 (sequence is synthesized)
gaaggggaggcaggaggatctcagcccccacctcattctaccccagtgggagtggcctcttcatgtccagttggtcccaggatcccctaacccatcatcatcctgggaggaaggcagtgg

SEQ ID NO: 1031709 - DNA, 120 bp, Artificial Sequence
  ENSG00000287431_53 (sequence is synthesized)
ctcctcccagcagagagctccaggacccgccctgccctgtgggcggcagggccctcctcctaagcccctcttcctgcccataaatgtatttacacttgtattaccccaggtacgtggctg

SEQ ID NO: 1031710 - DNA, 120 bp, Artificial Sequence
  ENSG00000287431_54 (sequence is synthesized)
tgacaatggcatccccagcctgcatggaggacaggaattgaactttagtctccaggcaatgaaggtgcagggactacactttattaatggttgttatgtaataaaaaacgataaaatggc

SEQ ID NO: 1031711 - DNA, 120 bp, Artificial Sequence
  ENSG00000287432_0 (sequence is synthesized)
atatacacagtaccagtttccgtgtttgtaggggtggggcttatatggacgtcccaattaatgaaatgcctgcaagtctaggtttcatacatggagtgcaagattccatgacggtgccta

SEQ ID NO: 1031712 - DNA, 120 bp, Artificial Sequence
  ENSG00000287432_1 (sequence is synthesized)
gaggaagtctctcatagatgctcacgttctctcgacaagatatttggggaggacccctggctactgtcactgctgccatgcctgccaggaggaggcaccttcctgacacttcactgctgc

SEQ ID NO: 1031713 - DNA, 120 bp, Artificial Sequence
  ENSG00000287432_2 (sequence is synthesized)
tgctcagcaggcctgccaagtggttctgctgtgttctaggagaaacaggaaaaatgcctctcctcccactttgcactgtgctttgtcacctgggccctaaaacaccattgcctgcccctg

SEQ ID NO: 1031714 - DNA, 120 bp, Artificial Sequence
  ENSG00000287432_3 (sequence is synthesized)
ccacaccattccattctcccttctcttcttccattctcccttccctccctctcttcttcccactgcctccaagacacctgtactggaactttgtccattcttacactcacacacacacac

SEQ ID NO: 1031715 - DNA, 120 bp, Artificial Sequence
  ENSG00000287432_4 (sequence is synthesized)
atgcacatgcatatgtgcacacacaaaagtctcttgtccatcagatcatacaaatatatgcttgggacaggggtgatcacatgccccacatgcccagtggacatttaggctcagatagga

SEQ ID NO: 1031716 - DNA, 120 bp, Artificial Sequence
  ENSG00000287432_5 (sequence is synthesized)
caattctttcacaaggatgacaaaacctaccttccgtggttgctgtgagaacaagaaattgtacatacagtgcccattctgcagcaaacccaacaatgaattaaaatccacaataggaca

SEQ ID NO: 1031717 - DNA, 120 bp, Artificial Sequence
  ENSG00000287433_0 (sequence is synthesized)
agtgacatccggggaggcgccccagccctccagatctggccgaaggagaatggttgctaagctggggagaataacggaggaggctggtggccaacagctgcccaacatccggcctccagc

SEQ ID NO: 1031718 - DNA, 120 bp, Artificial Sequence
  ENSG00000287433_1 (sequence is synthesized)
tgtgtcctgcatccctaaatgtctcctcccgaggtggctggagggttgaaatctgtcttctctgccatccctccccgagcagaggcgctgttgcagggccttgcctggtgcctcctgctc

SEQ ID NO: 1031719 - DNA, 120 bp, Artificial Sequence
  ENSG00000287433_2 (sequence is synthesized)
tgcctggtgctgcccctctggccttcccacagaggccacagtgtcgctccctgctggaaaccagcgtgctcaccgtccacaccggtgcatcccatgctggctgctcaaggaccaccctga

SEQ ID NO: 1031720 - DNA, 120 bp, Artificial Sequence
  ENSG00000287433_3 (sequence is synthesized)
gctcagcctggacctggctccgggatatttgcattcagcaggacacggttataacagaagcctcccacctccctgaaaatacaatacacttctgacatcctcccagtctaagaaaaggca

SEQ ID NO: 1031721 - DNA, 120 bp, Artificial Sequence
  ENSG00000287433_4 (sequence is synthesized)
ccaacaatgttcaagtcatgggtggcttcagtgaaaacgctggtgaaatgatgacagtttggctggcttggatggttttgctgctagtgtgaagaatgtaattgctcaggcctcggcctg

SEQ ID NO: 1031722 - DNA, 120 bp, Artificial Sequence
  ENSG00000287433_5 (sequence is synthesized)
ctggcctgaccccagcgagcccctggccacacactgcttgatcctcgaaatggaaaatgcaggcagccaagtcagcagggatctggcgacgcagacattctcggagtggagcaaagcgct

SEQ ID NO: 1031723 - DNA, 120 bp, Artificial Sequence
  ENSG00000287433_6 (sequence is synthesized)
ggagaaaagcacttagtggatggggtttctttcttcttttcttttcttttctttttttgaatcacgttgattgcagtgcgcccaggctgaggagggtatgcctgtgctcccacacagctc

SEQ ID NO: 1031724 - DNA, 120 bp, Artificial Sequence
  ENSG00000287433_7 (sequence is synthesized)
ccacagatggccctggtcaccatcagaacgcatgcagcttcccaccccacatctgactttctgaagctcaggcaggcctggacaataccacactagctgtcactaaagctccgaagccac

SEQ ID NO: 1031725 - DNA, 120 bp, Artificial Sequence
  ENSG00000287433_8 (sequence is synthesized)
gttttccagattgtcttgatttccccagatattttgagtccaggcctcacagccattcaaccacaggctttagaattgagcctggcatttcatatccttttccagttttcaaaataagtc

SEQ ID NO: 1031726 - DNA, 120 bp, Artificial Sequence
  ENSG00000287433_9 (sequence is synthesized)
tttcctctggagaaaaatattggcctcctttagaagcttgggcctgaatttgctgcatttctctcaagtcaggcaggggtccagaccatgttctacgatctttcacctagctctggggaa

SEQ ID NO: 1031727 - DNA, 120 bp, Artificial Sequence
  ENSG00000287433_10 (sequence is synthesized)
atctttccccatcctacctttgtgagcatggtggcataaaatggacactgtccaggagaggctgcaggaattagcccttcagggctggggagagctgtgtcctgcccttggactgtagct

SEQ ID NO: 1031728 - DNA, 120 bp, Artificial Sequence
  ENSG00000287433_11 (sequence is synthesized)
gtactttcaacacctcttccctgttgaaatttcttctggggctactaataattaaccaagcttgaaagcctgacttcgctttcttctctgtttacttggtgactggtttacacaccaacc

SEQ ID NO: 1031729 - DNA, 120 bp, Artificial Sequence
  ENSG00000287433_12 (sequence is synthesized)
aagtgaacaatctgtcaataagtagtcaggaatcaactgtctcaatatttaataattcataccacccactaacatctactgagactctactgtgtacaagttctatgatgggaaacaaag

SEQ ID NO: 1031730 - DNA, 120 bp, Artificial Sequence
  ENSG00000287433_13 (sequence is synthesized)
gtcaagatgccaaagacctgccctcagggagcctccactccggcaaggcagagtccaaaacagacaaacaaatgtagcatcaggtcttacagaaattccaagctggagaacattagcaac

SEQ ID NO: 1031731 - DNA, 120 bp, Artificial Sequence
  ENSG00000287433_14 (sequence is synthesized)
tcttgagtgtttcctggaagagatggtgtttgagttgggctttgaaggacagggagggattggcacagagagggcattccagagattctactgattatttattaggctgattgaagttac

SEQ ID NO: 1031732 - DNA, 120 bp, Artificial Sequence
  ENSG00000287433_15 (sequence is synthesized)
ttgggcgagcacggttacccctccctgaccactaaattcccaacacttaagtcttgcactggaagaattgttttcacaaccagaaaaattttggttcgggtctatgcaaatcatccatgt

SEQ ID NO: 1031733 - DNA, 120 bp, Artificial Sequence
  ENSG00000287433_16 (sequence is synthesized)
tggtgataagaaagaaagaaaggggttggggtaaggaagaataaaaggagataaattgggcttggaacaactgtagaggtttttgcagtatgacacgagcaagaaaatttaaaaggatga

SEQ ID NO: 1031734 - DNA, 120 bp, Artificial Sequence
  ENSG00000287433_17 (sequence is synthesized)
tggtagaacttctgtttctgcaagtgtgaaggagccaagatgtagctctagaccccacagaagccagaagggtgagtctgtaactgggaaacacgatgttagaaacacattgaacattct

SEQ ID NO: 1031735 - DNA, 120 bp, Artificial Sequence
  ENSG00000287433_18 (sequence is synthesized)
gctgaaatgtttagaacatcttagaagaactggatgggactgtgtgcttcatggctagacttgaattcaagtcctgggttagttgctcagagatttgtaaccataggcaagatacctaaa

SEQ ID NO: 1031736 - DNA, 120 bp, Artificial Sequence
  ENSG00000287433_19 (sequence is synthesized)
atgctgagccgccattaactcagtaaatacagtatccacaatgcagagagagtgaattgaggaggtacttcattccagatagccactattgttatggttgttattgaccaaaattttttt

SEQ ID NO: 1031737 - DNA, 120 bp, Artificial Sequence
  ENSG00000287433_20 (sequence is synthesized)
taaaatccccatatttttattatctgcaaaatataaaataacttgatgtgtatgtcattgaaacttttgggagggccatagggagctctttccaaagtctacgatgatccaggcaagaaa

SEQ ID NO: 1031738 - DNA, 120 bp, Artificial Sequence
  ENSG00000287433_21 (sequence is synthesized)
aattaagattgttgttcacagcaaccagtattactaattaaaggtgtatgaaatcacattgacagtctgtttagtgggtcagtgtaaggattttcgtggaactgctcatgacctcagtta

SEQ ID NO: 1031739 - DNA, 120 bp, Artificial Sequence
  ENSG00000287433_22 (sequence is synthesized)
tttaactctgttcttcccatgagctatgaattacattaccctgaagatgatggatcatgatcctcccctgtaaaaattccctgtggtttcccactgaacttaagatcaaaaataccaagt

SEQ ID NO: 1031740 - DNA, 120 bp, Artificial Sequence
  ENSG00000287434_0 (sequence is synthesized)
agattccagaggacaaaaggcagggaacagcctggtcttggggtctttaaacagagaggcgccatctactgccgagaacccagtcaacatctcatggacaaagctgcactaacccccggc

SEQ ID NO: 1031741 - DNA, 120 bp, Artificial Sequence
  ENSG00000287434_1 (sequence is synthesized)
cggctgagctctgggccccgttagcctttctttgaggctcgtccactaaaaggcagccccagtagtcccagctgaaatgctccacacccgagccccgctggcctgcggaagcgaagactg

SEQ ID NO: 1031742 - DNA, 120 bp, Artificial Sequence
  ENSG00000287434_2 (sequence is synthesized)
acaagcactctgtccgcgcgctgagtgggggctcgcggcaccgggtgctccgcccaggccccagcacactcactcaccagcctggtagctcggtacggcccgggccccacgatgcgatgc

SEQ ID NO: 1031743 - DNA, 120 bp, Artificial Sequence
  ENSG00000287434_3 (sequence is synthesized)
tccatggcgcgtaggcagcagcggccgcagccgcgccagcgctgatccccgccagccggaggagcagcagtttgaatcccaagcccgcgggctgcgggcgctgattgggcggcgcggcag

SEQ ID NO: 1031744 - DNA, 120 bp, Artificial Sequence
  ENSG00000287434_4 (sequence is synthesized)
gaaatgcgcggggaggcaggcgtcttctccgagacccgcggcgctgggagctccgcgtgcgaacttgcccggggcgaaatctgttgcccaccctggtcccaccgtgcgagcacacctagg

SEQ ID NO: 1031745 - DNA, 120 bp, Artificial Sequence
  ENSG00000287434_5 (sequence is synthesized)
cagagtgagctgtccacaggcgcatacttgagcccacttgcccaactcctaagatcttatcgggaagctgctgatcaacagttcaagtgttttctattaggagactgcctttccctggtg

SEQ ID NO: 1031746 - DNA, 120 bp, Artificial Sequence
  ENSG00000287434_6 (sequence is synthesized)
ccggctgtgaccaactattattttagagagacaattaacaaccacctgaccatcacctgatggctgcctgacattcctgatgtgtgtgtgtatgagggggagccctctcctgccctgctc

SEQ ID NO: 1031747 - DNA, 120 bp, Artificial Sequence
  ENSG00000287434_7 (sequence is synthesized)
atgcctgactagctacctactgtaacaccttaaccagattttctttgtcatggcttttcttctcaaatttatctctctttacctaaaaaaatgaataaaagcatcttactttggccactt

SEQ ID NO: 1031748 - DNA, 120 bp, Artificial Sequence
  ENSG00000287435_0 (sequence is synthesized)
agcaacgtaattgaagcctgccacgctcacctctcagccctccacctccagcccagctcctgctcagcgcggagctgctttggagaacttgctgctggcgcccaacagctgggtgaattc

SEQ ID NO: 1031749 - DNA, 120 bp, Artificial Sequence
  ENSG00000287435_1 (sequence is synthesized)
tgcttacagtgttttccaaagaggcctgtaggacatctgggtcttccatggtggtgggggttttggcctcaacaacaaggctctggtggcagaaatgatagcaacccagtgaaaagagag

SEQ ID NO: 1031750 - DNA, 120 bp, Artificial Sequence
  ENSG00000287435_2 (sequence is synthesized)
ggacaaaagggtcaaaggagtcagtgcaaaagcactgtctgggaaagcgaatcaacccagattgtcccctcgggaaacatggcatgtgcttggtgtgacagctgattctccccttaatca

SEQ ID NO: 1031751 - DNA, 120 bp, Artificial Sequence
  ENSG00000287435_3 (sequence is synthesized)
ctgccatgaaaacaaaataaccataagaacaatggcagattagacaagggaaattaaggaacccaaatactgacaggacgcatttttgaagatacagcagactcctgggtccttgtgaca

SEQ ID NO: 1031752 - DNA, 120 bp, Artificial Sequence
  ENSG00000287435_4 (sequence is synthesized)
ctacccgaacctgcacggtgtcaaaatggcctccacaagaagcaatccaatggggctctgttctctccttgccaagaccacgatgataacgcagttgtgatggccacaggactaggaagg

SEQ ID NO: 1031753 - DNA, 120 bp, Artificial Sequence
  ENSG00000287435_5 (sequence is synthesized)
accatggatataggcagcaaagtctaaggaaattttcttagacagaagtctgaaactagcatggagaataaatggttaaggaaagagagagaaagagagacagcgagagagagcgagagt

SEQ ID NO: 1031754 - DNA, 120 bp, Artificial Sequence
  ENSG00000287435_6 (sequence is synthesized)
gagagcgaaagcgagagcgagagagacagatcagagatgggacctccaaagccaggatgtagcaaggttaccagcagcagccctgtaagctctcccttgtaacccagcaactatgttgtg

SEQ ID NO: 1031755 - DNA, 120 bp, Artificial Sequence
  ENSG00000287435_7 (sequence is synthesized)
aggaagcccaggtcgcctggaaaagtccacatggacaggaacccaggaactcagctgacagccagcaccagctggcccacctgtatgcatgggccctcttggaagtagaccctccagcct

SEQ ID NO: 1031756 - DNA, 120 bp, Artificial Sequence
  ENSG00000287435_8 (sequence is synthesized)
tcagtagaacccctccaactgattcaatgtgatacaaagatgaaccttccctgccaagccctgcccaaattgcaggtttgtgggcaaaataaattattgttgttgttgtaatctactaaa

SEQ ID NO: 1031757 - DNA, 120 bp, Artificial Sequence
  ENSG00000287437_0 (sequence is synthesized)
atgacttccagaagggtggctgtgaactctacaaaatcctcagataccaaagaaagattccactcttctgcagacattcagcttcagcgaggcaagaggcctcccagggctccacatgaa

SEQ ID NO: 1031758 - DNA, 120 bp, Artificial Sequence
  ENSG00000287437_1 (sequence is synthesized)
aaattaactgaatgacctggaagacaatctccagaggggtgaccacaagggcccacccacctactaggggacagaagctctctggtcaagcacctatatgctcccccatcaccagcagcc

SEQ ID NO: 1031759 - DNA, 120 bp, Artificial Sequence
  ENSG00000287437_2 (sequence is synthesized)
aaggaaattctacactgatatccagcaggaaggaagtttccacagatgagaacaggagcaggttagcatctcctaagctagccaactgctaagagagctccagcggcctcctttcagata

SEQ ID NO: 1031760 - DNA, 120 bp, Artificial Sequence
  ENSG00000287437_3 (sequence is synthesized)
accaaagcgcatgggaatggaaagcaggcagggaccccctggacagcttcctgcctggggcggaggatacatgcctgtctctcgggatcctcacagtcttcctcggtttgcttcttggtc

SEQ ID NO: 1031761 - DNA, 120 bp, Artificial Sequence
  ENSG00000287437_4 (sequence is synthesized)
ttatcagggcgccagggccgccagtgcctctggtcacgggaacgctcagcagcaagccagatctgccacctgggcagagtcttatcttttatttcctggtcatcctcttctggttcatcg

SEQ ID NO: 1031762 - DNA, 120 bp, Artificial Sequence
  ENSG00000287437_5 (sequence is synthesized)
tcatcctcatctagacaagaatgagacttcttcacctcatcagcaaataaaaccaccatcgccactcaatcagcctgctatgtcagggactgttgggcacccgcaatgccaagatgtgta

SEQ ID NO: 1031763 - DNA, 120 bp, Artificial Sequence
  ENSG00000287437_6 (sequence is synthesized)
agagccatgccagtctcccaggatactcagtggcatttaggaactctttgtaatcaatcaagtcctcaggaagcaaaggaagacaaggtgatcaaatcaaattatttttaatagtatagt

SEQ ID NO: 1031764 - DNA, 120 bp, Artificial Sequence
  ENSG00000287437_7 (sequence is synthesized)
gattaaaatggaaatgacacatactctagaacagtactgtccaacagaactcgctgtgatgatgaaaatgccctacatacctgcattaacagggtagccacatgtgactcactgggcact

SEQ ID NO: 1031765 - DNA, 90 bp, Artificial Sequence
  ENSG00000287437_8 (sequence is synthesized)
ctgcattaacagggtagccacatgtgactcactgggcacttgagatgtagctagtaaaggaactgaattccgttgtcgcccaggctggag

SEQ ID NO: 1031766 - DNA, 88 bp, Artificial Sequence
  ENSG00000287437_9 (sequence is synthesized)
tcaccaggcctggcctgaattcttaattttatttaattttaaatagccacatgtggctagaggttactgtattagacaacacagtttt

SEQ ID NO: 1031767 - DNA, 120 bp, Artificial Sequence
  ENSG00000287437_10 (sequence is synthesized)
agaatgctaaatgacatttgatgatggcactagtttagattttcttaagtcatccgaatttttagccagggaccgtataattaattatgacctatgctcactagaacttgcctttaaaaa

SEQ ID NO: 1031768 - DNA, 120 bp, Artificial Sequence
  ENSG00000287437_11 (sequence is synthesized)
agccaaatcaatatccaataatttatttcactttgtttcctaactctgaacatgtagaagggaagaggaagaaagccagagttatctgtaaagttcaaggttaaaaaataaagtatacaa

SEQ ID NO: 1031769 - DNA, 120 bp, Artificial Sequence
  ENSG00000287437_12 (sequence is synthesized)
aatggtacagccacacaggaaatcattttggcagtttcttacaaaactaaacatgcacttagcataactgcactcttgggcactgatcccagataaatgaaaacctacgtttacacaaaa

SEQ ID NO: 1031770 - DNA, 120 bp, Artificial Sequence
  ENSG00000287437_13 (sequence is synthesized)
acctatatgctaatactcagaagcagcttcatgcataatcgccaacacctggaaacaatccaaacatccttcagtaggttgaacagttaagctgtggtccatttacacaatggaatacta

SEQ ID NO: 1031771 - DNA, 120 bp, Artificial Sequence
  ENSG00000287437_14 (sequence is synthesized)
ctcagcaatcaacatgaacaaaccattgatatatgcaacaatttgtaggtatctcagggaagttatgctaagttaaaaaagccaatctcaaaaagttacacaaaacacaactgttcccag

SEQ ID NO: 1031772 - DNA, 120 bp, Artificial Sequence
  ENSG00000287437_15 (sequence is synthesized)
ggatgtggacaaatcggaagcctggtgccctgctggtgggaatgtaaaatggtgcagctgccgtctgctgtatggaaaacagcatggcatactagacacaggattaccatatgaggcgat

SEQ ID NO: 1031773 - DNA, 120 bp, Artificial Sequence
  ENSG00000287437_16 (sequence is synthesized)
agcatggcatactagacacaggattaccatatgaggcgattccactgctgaatatctacccaggagaactgaaagcagagtctcaaacagatactgtacacccatgttcatagcagcatt

SEQ ID NO: 1031774 - DNA, 120 bp, Artificial Sequence
  ENSG00000287437_17 (sequence is synthesized)
ttgacaaatggatggtatacacacatagtggagaagtgttcggctttaaaaaggaaggaaatcctggcgtgacatggatgaaccctgacgacactacgctaagcggaatcagccagtcac

SEQ ID NO: 1031775 - DNA, 120 bp, Artificial Sequence
  ENSG00000287437_18 (sequence is synthesized)
aggaggtcaactactgtatgattccacatccaccaggttcctaacgtagtcacattcatagagacagaaagtagaatgactgctggggcctggggggagggagaagtgaggaatttgtct

SEQ ID NO: 1031776 - DNA, 120 bp, Artificial Sequence
  ENSG00000287437_19 (sequence is synthesized)
ttaatgggtacagacttggggaagatgaaaaagttgcagaggtcgatagaggtgatggctgcatggcagtgtgaatgtacttaatgtcactcaactgtacacttaaaaatgatcaatttt

SEQ ID NO: 1031777 - DNA, 120 bp, Artificial Sequence
  ENSG00000287437_20 (sequence is synthesized)
atattatattttacaactaaaaaattttgttaatgttatataccttatgattccatttatataaccttcatgagataacaggaaaacagagagagaacagattagtggttcccatgagtt

SEQ ID NO: 1031778 - DNA, 120 bp, Artificial Sequence
  ENSG00000254409_0 (sequence is synthesized)
accagattcattccaaaccaagatacagaaaacctgagagaaaggaaatgaatttaaatggatgaaaatagggcgggagagttagagtttctctgtctgccagtgggggaaagcgctgca

SEQ ID NO: 1031779 - DNA, 120 bp, Artificial Sequence
  ENSG00000254409_1 (sequence is synthesized)
agagagaggtcctattcccattgtagaggctaggaaactgatctccaagacgttagactttcagcctccattcacctggagtgagagggaaaggaggacagctggcctgaagtaggcaga

SEQ ID NO: 1031780 - DNA, 120 bp, Artificial Sequence
  ENSG00000254409_2 (sequence is synthesized)
ggaatcatggtactggctcatggtttggtaggagcagcgaaacttctcagaatgcgaggctacaagcccagtctctatgcttactagctggtggatgtccctggacctcagtgtccctgt

SEQ ID NO: 1031781 - DNA, 120 bp, Artificial Sequence
  ENSG00000254409_3 (sequence is synthesized)
ccacatatgagggagtaatgtcagatggacctagtccagagaaccagccctcccagggggcagccaggctcaaggtaaagtccaggatggggtcccatcctgactccaccctgccttgcc

SEQ ID NO: 1031782 - DNA, 120 bp, Artificial Sequence
  ENSG00000254409_4 (sequence is synthesized)
ccaagatacagaaaacctgagagaaaggaaatgaatttaaatggatgaaaatagggcgggagagttagagtttctctgtctgccagtgggggaaagtaggcagaagactctgcttccaag

SEQ ID NO: 1031783 - DNA, 120 bp, Artificial Sequence
  ENSG00000254409_5 (sequence is synthesized)
ggagagacttatactttaaccttggagcataagaagaggaaactgaggctgagagggaggaagtgtcttgcccaaggtcccccaggcaacaagcaatggaaccaggatttgaaaccagga

SEQ ID NO: 1031784 - DNA, 120 bp, Artificial Sequence
  ENSG00000254409_6 (sequence is synthesized)
cttttcatcttaatcttcctcctgtggatatataagatcattataacatgaggaatttggaagagccaacgtactaaggtattgaactgatccttaccaggatgaaagctcctttctagt

SEQ ID NO: 1031785 - DNA, 120 bp, Artificial Sequence
  ENSG00000254409_7 (sequence is synthesized)
cagagagcaaaggcagagatccttgtctcttttcttcactgtggtgctcccagcactgagaacaatgcttggcaaatgggtggaatattttcccagatggggagagagacttatgcaagc

SEQ ID NO: 1031786 - DNA, 120 bp, Artificial Sequence
  ENSG00000254409_8 (sequence is synthesized)
cattaaggaggctgctctgcctgcgtgtcgaaggaggacatcttcagtgactgaagttttcactgagcagttggcagtcgacgcacatggaggacacacatgaggcctaggaaggcagcc

SEQ ID NO: 1031787 - DNA, 120 bp, Artificial Sequence
  ENSG00000254409_9 (sequence is synthesized)
gtcaacagaactgtcttattgtctgtcctcatggaattgactttccagtggagaaggcaaagccctgtcctaactatgggagtcacagagatgcataaaataaattccctcatctccgga

SEQ ID NO: 1031788 - DNA, 120 bp, Artificial Sequence
  ENSG00000251438_0 (sequence is synthesized)
aaactggtagcctggggttagtgggagagggtcaaagaattcacagaacaaaaggtgtgcaataggagatagcacaaatagtatttaaaagcaagcattaggccattaaacttctgagtc

SEQ ID NO: 1031789 - DNA, 120 bp, Artificial Sequence
  ENSG00000251438_1 (sequence is synthesized)
agatgtcagacaagcctgggtctgaggctcagctccctcacttactagtcactggaccctgatcagtgattcactccctctaagcctcactcttctcattctatgcttgtataatccttg

SEQ ID NO: 1031790 - DNA, 120 bp, Artificial Sequence
  ENSG00000251438_2 (sequence is synthesized)
aactcagctgtacataatgcctgaaacacgtgctggggactgaatgctgccctccaataggatggagactgaatgctgcccaccagcaggacagtgcctccatggatgtgaccatggcag

SEQ ID NO: 1031791 - DNA, 120 bp, Artificial Sequence
  ENSG00000251438_3 (sequence is synthesized)
agaaaaacccagtgaggctccagatctgagcctgtctccctaggaaaagcaaacccaggatctgggtatcctgcctgctcattttccctgaatgaagatgaactcttccccaacccttat

SEQ ID NO: 1031792 - DNA, 120 bp, Artificial Sequence
  ENSG00000254404_0 (sequence is synthesized)
aaaaagtattgttctattgatttaaaggaaactgtccttgacattttcgtgtctcactgtggggcaggggaggatggacccactggcagagactggactgagaaaagttgcacaatttaa

SEQ ID NO: 1031793 - DNA, 120 bp, Artificial Sequence
  ENSG00000254404_1 (sequence is synthesized)
aatgccaaacaggggccagggttgtaggatctcttccctaccagtgatccatgtaatactttttttctccaaaaattctatcctttgaaataacttatccaataaatatgctgcatatac

SEQ ID NO: 1031794 - DNA, 120 bp, Artificial Sequence
  ENSG00000251434_0 (sequence is synthesized)
gaatgggaatttggaaactctgttggcctttgccataggaaaacaaggagagcatctgtgagtcctagagtctagctctgtcatccaggctggagtgtactggtgtgatctcggctcact

SEQ ID NO: 1031795 - DNA, 62 bp, Artificial Sequence
  ENSG00000251434_1 (sequence is synthesized)
tcatccaggctggagtgtactggtgtgatctcggctcactgcaacatcctgcatgccaccac

SEQ ID NO: 1031796 - DNA, 77 bp, Artificial Sequence
  ENSG00000251434_2 (sequence is synthesized)
gatccacccgtctcggcctcccagcagtaaatttttgaggaacttaaactaccagccttatcttggtagatacccca

SEQ ID NO: 1031797 - DNA, 120 bp, Artificial Sequence
  ENSG00000251434_3 (sequence is synthesized)
aggaacttaaactaccagccttatcttggtagataccccatcgtctcaatcttgatgagccacaggcattttgttgttactgttatttgaatttttataatccaagccattaaagagaca

SEQ ID NO: 1031798 - DNA, 120 bp, Artificial Sequence
  ENSG00000251434_4 (sequence is synthesized)
agtctggtcagcttattatatggtatcaacaattggctcaaatgggaagagcagttgttgtagactgaattgtgtctcccccaaatccatatgttgaaactctaacacccaatatgactg

SEQ ID NO: 1031799 - DNA, 120 bp, Artificial Sequence
  ENSG00000254401_0 (sequence is synthesized)
accttcctgtataacaagaaccttaacatcacagtcagctcttgattatctgagccagacagactggtttgaagagcaagatatagcagtgacctgctctactacttggattctggatgg

SEQ ID NO: 1031800 - DNA, 120 bp, Artificial Sequence
  ENSG00000254401_1 (sequence is synthesized)
tttagagaatcaccaggaagtcaggaacaaagagttcctgggcagctggcaccacagtgcagatcatgacatggaacacagaggaatggctgctgccatctttgaccatgggatgccaca

SEQ ID NO: 1031801 - DNA, 120 bp, Artificial Sequence
  ENSG00000254401_2 (sequence is synthesized)
tctcgaaacaccaactctgctggtccccagagcccagatacagctacttgtgcttctatcaccgtgtccctggaaacagatgttgctgctattactggaactgccataaaagattctctg

SEQ ID NO: 1031802 - DNA, 120 bp, Artificial Sequence
  ENSG00000254401_3 (sequence is synthesized)
ctgcctggcttttttgctccccaatctgagcttatgataaatgcctcactgttgctgcaaggagggggccaatacccaggacaacaggacagccaaaaacaaacaaacaaacaaatgaac

SEQ ID NO: 1031803 - DNA, 120 bp, Artificial Sequence
  ENSG00000254401_4 (sequence is synthesized)
aaacagaaaagttccagactctggtgaaacacatgtttcaggcccctcagcaagagtggacaagacaaacatctttacaagcccctccccaaaaggtgccttgagctgtccagaagagac

SEQ ID NO: 1031804 - DNA, 120 bp, Artificial Sequence
  ENSG00000254401_5 (sequence is synthesized)
aaaccgaagccctgcactggaagggaggaaaagagagaggaacccctccccccagcaaggagcggagttagctgaaaactgcaccgatcccctcttgggctcttccttggctgctgcccc

SEQ ID NO: 1031805 - DNA, 120 bp, Artificial Sequence
  ENSG00000254401_6 (sequence is synthesized)
ttcggcgcaactgcccttcctcttgggcttcggcagtgggaagagagcgagccgggtgcttttgagctgcagtgcgcggagaggcttcgcgaggctgggctcagtattcgttaatgatca

SEQ ID NO: 1031806 - DNA, 120 bp, Artificial Sequence
  ENSG00000254401_7 (sequence is synthesized)
tttccgtagtttccatctgaagacttagctctacccttctggtgcagaacaggaaagcctaatctgtcttccctgagattcaagaaattcaagaggctgctcctcctggggcctctgtcg

SEQ ID NO: 1031807 - DNA, 120 bp, Artificial Sequence
  ENSG00000254401_8 (sequence is synthesized)
gtatcctccttgttgctcctagttaaactcttattcctcaggtaagatggtgctgagtctactcaccatcggactgtggtgtctagtattggacaccacatccctgatgtgccctgacac

SEQ ID NO: 1031808 - DNA, 120 bp, Artificial Sequence
  ENSG00000254401_9 (sequence is synthesized)
ctcagtgctctcccacatagaacctagtgggcactgtgtccccgcatctatctgaagaactgctcaagaggctttgtgggaggtctagctcctcctcaccccctccaggcttgacatgcc

SEQ ID NO: 1031809 - DNA, 120 bp, Artificial Sequence
  ENSG00000254401_10 (sequence is synthesized)
tccacccccaccaccccgtacccttcgcagcatacttccagtcaggcagcaatcagcttgcacctgagagggatcagctgtggtgactgaggctggcttgctcttgcagccccaggaaca

SEQ ID NO: 1031810 - DNA, 120 bp, Artificial Sequence
  ENSG00000254401_11 (sequence is synthesized)
cagagattcgtgctgaagaaccaaatggtttctacagtacaagcaggcgccagggactccgcaggaggcatcactggcaccttctaattgatgagcagtccagctctgaagctgtgggct

SEQ ID NO: 1031811 - DNA, 120 bp, Artificial Sequence
  ENSG00000254401_12 (sequence is synthesized)
ctaaagccagatacctcctccaggtgactctgatcttcctctcccagctgaatagagtgaacttcagcgtttctggcctccagttcctgaactctgcttcttccaaggcagttttagctt

SEQ ID NO: 1031812 - DNA, 120 bp, Artificial Sequence
  ENSG00000254401_13 (sequence is synthesized)
aggcatcgccttctccgggaagctcttcctgacccccattgctacccacagtgagtcacttgctctctgttcctcacttccacgatgtttcctcctgtctccatcattctactcattagc

SEQ ID NO: 1031813 - DNA, 120 bp, Artificial Sequence
  ENSG00000254401_14 (sequence is synthesized)
ccaggtggcaattatttgttgtggtgtttgttgtagacaaagacagtcttgtttttttggttttggcattttgctactaaatgtgtttttgataaatgaataaatataataacaccacaa

SEQ ID NO: 1031814 - DNA, 120 bp, Artificial Sequence
  ENSG00000254401_15 (sequence is synthesized)
atcatcaaccatttggacttgccttgaacttactctctcagttactcagcaatcatggacagagctcctcctatgagcaggccatcgttaaaggtgccagagatagggagtgaggacgtc

SEQ ID NO: 1031815 - DNA, 120 bp, Artificial Sequence
  ENSG00000254401_16 (sequence is synthesized)
atctgcatcttctgccagcatctgtgagtctgtggcagtatttgagctgagatcctaccttcctgtataacaagaaccttaacatcacagtcagctcttgattatctgagccagacagac

SEQ ID NO: 1031816 - DNA, 120 bp, Artificial Sequence
  ENSG00000254400_0 (sequence is synthesized)
cactccacgtagccaggagatctctagccttcctctcatccaccaaccgtttcagctcacccctggttgaggtcgttctccgtgttgtccagccacaggcgaacggcgactgcgttgccc

SEQ ID NO: 1031817 - DNA, 120 bp, Artificial Sequence
  ENSG00000254400_1 (sequence is synthesized)
cggcgccgagtcccctggattggggaagcctgaggactgtggagtgatccagggaaggaggatgaaccccaagctttatcctctacaggagagaagtgtttgtgttgggggtagggggcc

SEQ ID NO: 1031818 - DNA, 120 bp, Artificial Sequence
  ENSG00000254400_2 (sequence is synthesized)
tgagctgcgtccccggctagtgggggtctgtgaaggagttcggggctgcgggatgatccctggctgtgtcctctagacgcgagccgcgcctggctaaactcgatggttcgctgcgccgcg

SEQ ID NO: 1031819 - DNA, 120 bp, Artificial Sequence
  ENSG00000232892_0 (sequence is synthesized)
aactgcaatcatgagtcttcagaacaccttatgttcacattccctcatagtgccacagaccctccttttcttgtgaactggataatcacatacctgcagcccccttcccttattgatatc

SEQ ID NO: 1031820 - DNA, 120 bp, Artificial Sequence
  ENSG00000232892_1 (sequence is synthesized)
accttcaaaaattgaagaaatgtcaacattggggaagaagaacacagcaggatgtgtcaagtggagctgatattgtccgggaaaaatggctgactgcacactcttcggctcacccagctc

SEQ ID NO: 1031821 - DNA, 120 bp, Artificial Sequence
  ENSG00000232892_2 (sequence is synthesized)
gaactcttgcattatgatgagacagcaacaaggcaccatcttggagaagcagagagcagctctcatcagacaccgaacctgctggcaccttgatcttgaacttctcagcttgcaaaactg

SEQ ID NO: 1031822 - DNA, 120 bp, Artificial Sequence
  ENSG00000232892_3 (sequence is synthesized)
ccagaaataaatttcttttgtttataaagcacccagtctcaggattttatcttctatggaattacctcctctaagagttttctcccaaggcaaactgcatgaaagtcaggtctctacgtt

SEQ ID NO: 1031823 - DNA, 120 bp, Artificial Sequence
  ENSG00000232892_4 (sequence is synthesized)
ggctatgcctggctctactgtatacactggcttttgaacctggtcatatgttggtgtcttggttggaatctggagaatggagtgggggaatgaatagtttaaatctggattatgcatatg

SEQ ID NO: 1031824 - DNA, 120 bp, Artificial Sequence
  ENSG00000232892_5 (sequence is synthesized)
gaagactcaagctaagagcatttaggaatcctgaattaagccaagagtaaacaggagtgaaatgggtaaggtttgattcaggtttatctaagttaattgactgaaaaaataccctgaaga

SEQ ID NO: 1031825 - DNA, 120 bp, Artificial Sequence
  ENSG00000232892_6 (sequence is synthesized)
tcatgatgtcagagaagttgtgggtgcagaactccatttgtaagaaatttgctagtgaatgggagttgaggtagttaaagcaatgagcaaagatttcttttttcaggaggttaagggtga

SEQ ID NO: 1031826 - DNA, 120 bp, Artificial Sequence
  ENSG00000232892_7 (sequence is synthesized)
ttggaaggagagaaatggtacgttaacttaaggagccataaggttaattatgtttaataggagaatgaaatgtgagcagagtgaatggagtgggaaggctgaggtttggaaatgtgtagg

SEQ ID NO: 1031827 - DNA, 120 bp, Artificial Sequence
  ENSG00000232892_8 (sequence is synthesized)
tccattctgagacaaagtgaaaagaaaatgaataaaatgatgattctaagaaaacgtattaagggaacaaaatgtgaggagtctgggggcttttttggtaagtccttcttagttgaggag

SEQ ID NO: 1031828 - DNA, 120 bp, Artificial Sequence
  ENSG00000232892_9 (sequence is synthesized)
gtggtgaaggcatagaagtttagaaagattctcactagctcttttcgcttggttcatgaaagaatcgtgactggaaaactatattctgttacattattaaatgttttgatagaattttct

SEQ ID NO: 1031829 - DNA, 120 bp, Artificial Sequence
  ENSG00000232892_10 (sequence is synthesized)
tgggttcaggctccatgctttttgcctctggataatatttataaacaaggagtcctactctgtctctgaaaagaacagtcaacatagttttatgagagctgcttttctggtataattact

SEQ ID NO: 1031830 - DNA, 120 bp, Artificial Sequence
  ENSG00000232892_11 (sequence is synthesized)
ctaatgctgtatttatcctcaaggtcagtagtggccattaaaaaaagctgtccctttccctggagaacagcatcctcccccgacaaataatttctgttggaagaacattctgtaagtcca

SEQ ID NO: 1031831 - DNA, 120 bp, Artificial Sequence
  ENSG00000232892_12 (sequence is synthesized)
tgttctcactacaaatattatccaatgtagtactgaaggacattttaaaaacaaagtcctttttgatctttctgagccaaaatgtcttcgacttaattccttttccacaaaataagaaac

SEQ ID NO: 1031832 - DNA, 120 bp, Artificial Sequence
  ENSG00000232892_13 (sequence is synthesized)
atcttttggattgaggattagtcttgcaattcctactctccttcttcacaaatgtctttatttagttttggttcccatgtctgaatgagtgatttgaatagatggcctctaagttccctt

SEQ ID NO: 1031833 - DNA, 120 bp, Artificial Sequence
  ENSG00000232892_14 (sequence is synthesized)
ccatttctaacatgctggggctctttgagtctgggtgattacagctattgtgtcttatttccttggtatacactaagcttcttgaggataaatagggaacatgttttatttgtctttggg

SEQ ID NO: 1031834 - DNA, 120 bp, Artificial Sequence
  ENSG00000232892_15 (sequence is synthesized)
tcccccaaaacatgtaggctggagaacctgtataagtaaatctctgttactgaaaaaaatacataagttaattaaataaataggaatacccacaaatatcatagcattgcctggaaatat

SEQ ID NO: 1031835 - DNA, 120 bp, Artificial Sequence
  ENSG00000232892_16 (sequence is synthesized)
tgtcttaatgagaactagaaaagaaaggctcttcaaggtggacaaaacacctaagtacatggcttgattctcaaagcaccaaggcacaggcactggctcatcagataaccaacctctttt

SEQ ID NO: 1031836 - DNA, 120 bp, Artificial Sequence
  ENSG00000232892_17 (sequence is synthesized)
ggctgtgtgctattgtgcagaacacaacctccataactgtgctgggcatgcctgccactgacacacagcatcttagctccagtgaagcctgaggagcaggcttccttatagctccctcac

SEQ ID NO: 1031837 - DNA, 120 bp, Artificial Sequence
  ENSG00000232892_18 (sequence is synthesized)
tgttctgcatgtaagtcaaggggacagctgtcctgggagccaatacaccactaacctaagtatctagaccacagccacaaaatgatatacactctcctccaatatactattagggatcaa

SEQ ID NO: 1031838 - DNA, 120 bp, Artificial Sequence
  ENSG00000232892_19 (sequence is synthesized)
caccatcctatattatgtctctgtttacctcaggcacctgcagaggtaaagcctcactattcatcaactattaatctcacactattttgttccaattcctttttctcttatatccatatc

SEQ ID NO: 1031839 - DNA, 120 bp, Artificial Sequence
  ENSG00000232892_20 (sequence is synthesized)
actggccctcctatatctgtgtctttatgaattagcttatgctccctatctttttcttcttctcttttcacttctaccacttcctagacttcaatgaaattgaactgtagctcacacaag

SEQ ID NO: 1031840 - DNA, 120 bp, Artificial Sequence
  ENSG00000232893_0 (sequence is synthesized)
aatcccagagctcttgtgaagttactttcatctatggatggttattaaattggtgttttcagcttacagtgaaagatcttcagaacaccaattcagttgccttcagggttaaaccataat

SEQ ID NO: 1031841 - DNA, 120 bp, Artificial Sequence
  ENSG00000232893_1 (sequence is synthesized)
atcaacacaaaatggatcaagagccagtcatcctaaaaagaccacatgcatggcccctgatctagcaaaagtagtcacaaatgcagctgaatgtgtggaaacctctaagagaaaatgtgt

SEQ ID NO: 1031842 - DNA, 120 bp, Artificial Sequence
  ENSG00000232893_2 (sequence is synthesized)
aaagagtggctccagtcatggaacgtggagaaagctgccacagaagcaaaggctgcctatgctcatgccagcactgacagggagaactctccgccctctaccttgggtattctggctcca

SEQ ID NO: 1031843 - DNA, 120 bp, Artificial Sequence
  ENSG00000232893_3 (sequence is synthesized)
atgacagggctgtctctggaatgaagttctggatcatagtcctgagagaaattccaagactcatcttttttcatccagatttctacactccagaagggtaaagaaaaagaaaaagaaaaa

SEQ ID NO: 1031844 - DNA, 120 bp, Artificial Sequence
  ENSG00000257178_0 (sequence is synthesized)
tttctctcctccgcgccgccgccgccggtgcgcaggccggctggggactcgcctccgctcgggccttcggtttcgctccctcgctgagtcccttctccccgccaacaaaaggtgatgatt

SEQ ID NO: 1031845 - DNA, 120 bp, Artificial Sequence
  ENSG00000257178_1 (sequence is synthesized)
cctagcggactgggcacgcctggacggcggagggtggctgggaggggcgaggtcacgctagcaacctgtggctgccaggagaaggcggctgggaagccacggaaagacccgggagcgcag

SEQ ID NO: 1031846 - DNA, 120 bp, Artificial Sequence
  ENSG00000257178_2 (sequence is synthesized)
gggaggtggctcagctcgcgcgcagcccctgctcttattttactattatgcgtgttgctgttcgtatccttctgggcggtgaaggggagaggcagcctcccgctccggtgaaacccgtcc

SEQ ID NO: 1031847 - DNA, 120 bp, Artificial Sequence
  ENSG00000257178_3 (sequence is synthesized)
tgggagtcgcccataaaccctgttctccatctcaggcggctggaggggtgaggggggtgcggcgccttggtgggattggcaggtggtgacttccagggcgcagaggagaaaaatctctgc

SEQ ID NO: 1031848 - DNA, 120 bp, Artificial Sequence
  ENSG00000257178_4 (sequence is synthesized)
tcttgggcgccaggatcaaggatacccaaacccgcggtggctctgccgcctgttcctctctcttggggtgctggggcacctgggccgcatcccttgtgaagtgtagagcagcagagaggc

SEQ ID NO: 1031849 - DNA, 120 bp, Artificial Sequence
  ENSG00000257178_5 (sequence is synthesized)
ccggccgccggcccagcggccctcccaaacttccgaaatgccgacgggttggacgggtttccgagagctggcgagttgagaaggacaggaggtatggggtgggggaggggcctggaccgt

SEQ ID NO: 1031850 - DNA, 120 bp, Artificial Sequence
  ENSG00000257178_6 (sequence is synthesized)
tggagtgggtcctggagaccctaagtggcctatgacaagatttggaaaggtccctggttgacgctagggagctggtggggatcctagcagcgcattttgtctgtgggccctgggccagac

SEQ ID NO: 1031851 - DNA, 120 bp, Artificial Sequence
  ENSG00000257178_7 (sequence is synthesized)
tctagtctccctgagtgcccagatgggggtctgagattacctattggaccctctcttggcaaagacaaccatagtgtgatagtttgcttttttctcccaaatatgtgtgagttcagcctg

SEQ ID NO: 1031852 - DNA, 120 bp, Artificial Sequence
  ENSG00000257178_8 (sequence is synthesized)
tctgggagaatgttgatgttagaaatcaggcccagaggccaacattggcaattcctagatttaagattaaaagaaaatcagagggtctctggacctagttgtgggcaggtgggaactctc

SEQ ID NO: 1031853 - DNA, 120 bp, Artificial Sequence
  ENSG00000257178_9 (sequence is synthesized)
ctcctacccacctgcaaggtcccaggactgggcataggcagagatctctggagtgttgcagttagagggttgtttttgtgttgttcctgtatttgttaatgaaattgatattattttgac

SEQ ID NO: 1031854 - DNA, 120 bp, Artificial Sequence
  ENSG00000257178_10 (sequence is synthesized)
acagtctcagttccctccagcccaatccccagactctcagcttagtaaattcacggcttctgggagcttcagaaagttggttcgtaaaccccagatgcccattttggccctaccaccagc

SEQ ID NO: 1031855 - DNA, 120 bp, Artificial Sequence
  ENSG00000257178_11 (sequence is synthesized)
aacccaagcaggtggctaggcgagttcatatgtgtttagaaggaaaggacccgtctggggctaggaaggtggggaaatggggttcctccccacacctccccgggatagaccctctctcct

SEQ ID NO: 1031856 - DNA, 120 bp, Artificial Sequence
  ENSG00000257178_12 (sequence is synthesized)
ggctcccaggatgtgtgagaggctgggaggggccctatatcatctggctgcatcttttatggttcctcattgcccttcattcggaaatgaaacgcctttgatcttttctcaggttgtaaa

SEQ ID NO: 1031857 - DNA, 120 bp, Artificial Sequence
  ENSG00000257178_13 (sequence is synthesized)
cggaattgcccgtcattaaatatccggggccccatctgcttggtctcccagcatttttctttacagctgtttctctctctttttaccactgaatttttccaaaaggacttttattacacc

SEQ ID NO: 1031858 - DNA, 120 bp, Artificial Sequence
  ENSG00000257178_14 (sequence is synthesized)
accttcacacccagccgcctcttcctcctcccttcgctgagaggcgctttggaaaatatctagatattcgtttgatcacaaactaaaggcttggaggggcacggaggagccgattggggt

SEQ ID NO: 1031859 - DNA, 120 bp, Artificial Sequence
  ENSG00000257178_15 (sequence is synthesized)
tttgttttttctaaaaaaaaaaaaaaaaaaaaagtcctggggggaggggaggggcgcgaaggcacccagaaaggcctgaatctgacttcgtggcagcctcagaatgacccttcctccttt

SEQ ID NO: 1031860 - DNA, 120 bp, Artificial Sequence
  ENSG00000257178_16 (sequence is synthesized)
tgtgcttagctaatgtttacatctcataattcatgcgccaccgagagttgcgcggcggcggcggaggcaaggttctcgtccctttgcgaactggctacttgaaattctaatagaagagga

SEQ ID NO: 1031861 - DNA, 120 bp, Artificial Sequence
  ENSG00000257178_17 (sequence is synthesized)
gaattgaaaaccttgtaatcccaagaacagactcgcactgcctttttctgttcccagagctcaaaactagaacaaaacgaaataaaaccaaagcactcaaaccacaccccaaacgaagaa

SEQ ID NO: 1031862 - DNA, 120 bp, Artificial Sequence
  ENSG00000257178_18 (sequence is synthesized)
ggcgcggaaagtaggagaactggaaaatttctgggccaagaagatctgtctgtcttctgtatataccctgtagatccgaatttgtgtaaggaattttgtggtcacaaattcgtatctagg

SEQ ID NO: 1031863 - DNA, 120 bp, Artificial Sequence
  ENSG00000257178_19 (sequence is synthesized)
ggaatatgtagttgacataaacactccgctcttatttttccagaagaaaaaaatatatatatatgtatatgtagtatttttctgaatgaggacagtctggtgactggccacacgaagact

SEQ ID NO: 1031864 - DNA, 120 bp, Artificial Sequence
  ENSG00000257178_20 (sequence is synthesized)
ccttcctctttattcctctatcttttcctccttcaactggttagagatggagaaatcatctacctgaactctccccacgcctgcccctgggagccttggtcccttttcacatctctttaa

SEQ ID NO: 1031865 - DNA, 120 bp, Artificial Sequence
  ENSG00000232895_0 (sequence is synthesized)
acagaaaaggatgtctagtgctcatcactttgcagggggtaagacttccctgtatgccttcaccaaaggaaagctgccccatggagaggtccaagctgcaagaaactgataccttcacct

SEQ ID NO: 1031866 - DNA, 120 bp, Artificial Sequence
  ENSG00000232895_1 (sequence is synthesized)
cctggccaacgccctcatgacagccttgtgtgagagaccccgggccaaagggatgcagataagccacacttggattcctgactcaccgtgagacaacgttttgttgttttaagccactaa

SEQ ID NO: 1031867 - DNA, 120 bp, Artificial Sequence
  ENSG00000260422_0 (sequence is synthesized)
cgaaggctccgcggccctggagagccggctttagggcagccactggccgggcggtctcccaagtcaatggcctctgtgggaaaggcagtgatgtcacctcgaatgtattttcggggcttt

SEQ ID NO: 1031868 - DNA, 120 bp, Artificial Sequence
  ENSG00000260422_1 (sequence is synthesized)
gccctgctttctcctgatctctccctctcaggctgtttccctgttttatttttctcctctttctttctctccttccagcttctttgagggcattatgacttttttccaagtttagagctc

SEQ ID NO: 1031869 - DNA, 120 bp, Artificial Sequence
  ENSG00000260422_2 (sequence is synthesized)
aaatccactgaaggcccgcacgcagccccatgactgccatggcaacgccgggcctggtacactttttttttttttttgcataaaaagtagagaaagattgaaaagagggacaagaatgaa

SEQ ID NO: 1031870 - DNA, 120 bp, Artificial Sequence
  ENSG00000260422_3 (sequence is synthesized)
agggggaacggagccagtttggcctgcgcggggctggtgtctgctgggcaaggacagaagcacacggggaacgggactcgtgaggccggaggagccagcggaggggcctttgagaaacaa

SEQ ID NO: 1031871 - DNA, 120 bp, Artificial Sequence
  ENSG00000260422_4 (sequence is synthesized)
atttgtgatccttcacggtcaaagcttccgaaaaagctctgcgcttctgacggatgacaagagagggagggcaacaaagttctcacaagaaataaggtctcgcttttgaacatgtaccca

SEQ ID NO: 1031872 - DNA, 120 bp, Artificial Sequence
  ENSG00000260422_5 (sequence is synthesized)
attgcatagtttagaggaagctttcaaaaatctgtctagcctctcaaaaagaaagacaaaaagaagaagaagaagaaaggagcgaaaagtctcaaaaggacttttgacctgtgtagaaag

SEQ ID NO: 1031873 - DNA, 120 bp, Artificial Sequence
  ENSG00000260422_6 (sequence is synthesized)
actcgaaggtgtcagctgtgtcaaatcaactcaaaataatcgatgacaaacagaaagagacattcattactgtaccttcttcccctagagaatataacattaccttgaactcctgaaaga

SEQ ID NO: 1031874 - DNA, 120 bp, Artificial Sequence
  ENSG00000260422_7 (sequence is synthesized)
aaatgaatgtcatgtctccgatatgttttgtgtccattctatcaaaaagcagattgcaaacagtctgagaaagcagctcctgaaaaatccagacaactgcccccatgaaagccggggcca

SEQ ID NO: 1031875 - DNA, 120 bp, Artificial Sequence
  ENSG00000260422_8 (sequence is synthesized)
gcaggtgaggtgacttgagcgtgcaggcatggatcgcggtctcctgctgcccagggctcttcctgctagcatcagcatctgatggatgagagccccatctagttcctgggccctgggtta

SEQ ID NO: 1031876 - DNA, 120 bp, Artificial Sequence
  ENSG00000260422_9 (sequence is synthesized)
ctgccctctaatcctgtccttgacctccttcccaaaagtgttatcagccatagtccaagctccatgttctccatgtggttacacacaaatgcaccaggccaagagtccttgaaaaactta

SEQ ID NO: 1031877 - DNA, 120 bp, Artificial Sequence
  ENSG00000260422_10 (sequence is synthesized)
gacactaatcacagaagacacagtcctcaagaagggaatggcaatgttatttctaccagcagcaatggctcaggccaaggagttggaaagaagagacaaagaggaaggcgaaggcaggct

SEQ ID NO: 1031878 - DNA, 120 bp, Artificial Sequence
  ENSG00000260422_11 (sequence is synthesized)
ctggagaggacatggactctgaggcgggtctggagattgttcatgggcacagagtaacaggaatgtcccacactcaggtgcagggtgactgggtgttgagcgggctggactcactgactg

SEQ ID NO: 1031879 - DNA, 120 bp, Artificial Sequence
  ENSG00000260422_12 (sequence is synthesized)
gcacactatccagaaaaggctttgtgcttctcctacacatgagctgtgggatccccactcctagtccttggatggggcagatgccattactttccagtcattaaacgttaggactcttta

SEQ ID NO: 1031880 - DNA, 120 bp, Artificial Sequence
  ENSG00000283103_0 (sequence is synthesized)
agtgtacccaggcgcggtgcctgctgggaattgtagttgacgttggtcagcacggaggccacaggatcccagcccggcctttgtgggactgaggtggcgctgagtgggagagcagcaggc

SEQ ID NO: 1031881 - DNA, 120 bp, Artificial Sequence
  ENSG00000283103_1 (sequence is synthesized)
gatgcgcgaaaggcgggacttggagataaatactgagcacccacaacaggcagccagcaccactgcagattggatactgcaatgatgataagcatggcctgcctttatggagaaagccaa

SEQ ID NO: 1031882 - DNA, 120 bp, Artificial Sequence
  ENSG00000283103_2 (sequence is synthesized)
accctggtttctttcagttcaaggcatgtggtgatcatgctgcctaagagtatctttgtttacctgaggaccttgggccatgccaagtatttgtcaacaatgtgatttatggttctggat

SEQ ID NO: 1031883 - DNA, 120 bp, Artificial Sequence
  ENSG00000283103_3 (sequence is synthesized)
gttcctgtggataacctcaaggagcacgggacctgggacatgactgcccccagcattccttctggcggcagacagagtttgtcagttcgccaacatcctgctttcatgagaacagtttgc

SEQ ID NO: 1031884 - DNA, 120 bp, Artificial Sequence
  ENSG00000283103_4 (sequence is synthesized)
tgtttgctcacagagcctccagtggtatactgagttggtcacgaccctcattccttcggcctccaacatctccccttttgtttttgcattaattgaataaaggtaatttcaggctgtgca

SEQ ID NO: 1031885 - DNA, 120 bp, Artificial Sequence
  ENSG00000283103_5 (sequence is synthesized)
ctgaggtaagggcgggttaaagcctgtcctataccaagcaagttgtgcagccaactgggggactgaatcccagtgtgatgtgatgaagaggtgttgaaggtccaccaccagtgccagtga

SEQ ID NO: 1031886 - DNA, 120 bp, Artificial Sequence
  ENSG00000283103_6 (sequence is synthesized)
agtttgtgccaagagattccgctggctcatggctcgtactggaggtaacaggcccacggttgaataccatggatccctccggtctcccgttccatggtcacacacacctggagggcaccc

SEQ ID NO: 1031887 - DNA, 120 bp, Artificial Sequence
  ENSG00000283103_7 (sequence is synthesized)
acacggtttgtccatctcctgtaaaaacacaagcataccctcgtccccacgtcagcaaatccaccggacctttccattgtccttcttctggggatttccataacacttttggataaactt

SEQ ID NO: 1031888 - DNA, 120 bp, Artificial Sequence
  ENSG00000283103_8 (sequence is synthesized)
gcctcttttcctctagcagttgccagtgtcgttctgctggggtcttgccatccgtaccaggagtcaaacaatttaaagtaaacaaggctaaatgtaattttgtttgaagtggtaattggt

SEQ ID NO: 1031889 - DNA, 120 bp, Artificial Sequence
  ENSG00000283103_9 (sequence is synthesized)
cccctattctccctttttgttttttcagcatgcgttgtagtgtttgatgtacccgctcaataatgcctggccctcagggattgtatggaattcctgttttatgattgattgcccacaatt

SEQ ID NO: 1031890 - DNA, 120 bp, Artificial Sequence
  ENSG00000283103_10 (sequence is synthesized)
gtaaaaaattgggaaagcatgactaacataagcgagtccactgtcagttttaaattgtttagggacccccatatgggcaaatgacgacagacagtatcgtcagacatgaccagctgtttc

SEQ ID NO: 1031891 - DNA, 120 bp, Artificial Sequence
  ENSG00000283103_11 (sequence is synthesized)
cccagtttggcatgtggcatgtaacatatgggagtaagtgtctatattacatgaacatagcggagttagccaaaggctgctatatatatgtaacatccatctgccagatttcatttggag

SEQ ID NO: 1031892 - DNA, 120 bp, Artificial Sequence
  ENSG00000283103_12 (sequence is synthesized)
ccaagcctcgtgggttgcatccttccacaggtgcaacaccagggacatgctggcaagtggggcaggcttgcacaataactcaagcctggctgcgaggcagatgaaacatacgagtaaggg

SEQ ID NO: 1031893 - DNA, 120 bp, Artificial Sequence
  ENSG00000283103_13 (sequence is synthesized)
caagttgttctgatgcagtaaagcatgggaagcttgggcttgttgaaatatagaactgatgaatttatctgctctatcattacctagagatagtggccccaggaagttgtgtgtgagatc

SEQ ID NO: 1031894 - DNA, 120 bp, Artificial Sequence
  ENSG00000283103_14 (sequence is synthesized)
gagtctcagaaataggttaagcagttctggttttaaggtgctcttgtgtgggcggcaagccatccaggcgccgaagcaagagacagaggacacgggctgttccagtataataaaatataa

SEQ ID NO: 1031895 - DNA, 64 bp, Artificial Sequence
  ENSG00000283103_15 (sequence is synthesized)
caccagagggctccttggtctagtggtgacgccagcgtttgggaagaccgtggtctagcggggg

SEQ ID NO: 1031896 - DNA, 60 bp, Artificial Sequence
  ENSG00000283103_16 (sequence is synthesized)
gggaaagggtggggggcggtctccctttccctgggggagcacagttatccggaggcctaa

SEQ ID NO: 1031897 - DNA, 120 bp, Artificial Sequence
  ENSG00000283103_17 (sequence is synthesized)
cccaccgaccctgtggggctggtccgtacactcttgatagtggcagttttaatgcaactagctacatttacgacataggctgaattacagacaatattaataggaaataaagctgtgagc

SEQ ID NO: 1031898 - DNA, 120 bp, Artificial Sequence
  ENSG00000283103_18 (sequence is synthesized)
tgaattacagacaatattaataggaaataaagctgtgagctttaaaacttgaataactgccattaattcagagtgttgagctgaaactctaggggtctttattatttaagtatatttagg

SEQ ID NO: 1031899 - DNA, 120 bp, Artificial Sequence
  ENSG00000283103_19 (sequence is synthesized)
tccataaatggctgtgtggcttttggaagagccatcggtaaaataggtctgtccacctgaaatgggtttgtgatgagcaatcacagggggaataaaagggtgaattttataaaactgcaa

SEQ ID NO: 1031900 - DNA, 120 bp, Artificial Sequence
  ENSG00000283103_20 (sequence is synthesized)
aattttgtctgatggataatggttatctattatttctacaaaatctgcgaaagtgatttgccatgcagtggacatctcccaggccgcagcctgttgttgggaatccaaggtaacaataat

SEQ ID NO: 1031901 - DNA, 120 bp, Artificial Sequence
  ENSG00000283103_21 (sequence is synthesized)
tttatcaggatcatatcctgtaagcatttttgatctatgcctgcctattgttataagttgtgtgactaaagcaagataaacttgcaaagattttactgtttgactggataaaaaaagcca

SEQ ID NO: 1031902 - DNA, 120 bp, Artificial Sequence
  ENSG00000283103_22 (sequence is synthesized)
agtcagcctctcactctctacccgctgggcggtaccccgcatctcgctctggccgccccagaggttcgcggcttctggacctgctgtgcccctctccagcctggatcaggacggagaaca

SEQ ID NO: 1031903 - DNA, 120 bp, Artificial Sequence
  ENSG00000283103_23 (sequence is synthesized)
cccccgaaacccacctcaccagcacagccggcggacccttccggaggtggccgcagagactagccaacttgcgcgcccgccgacccggaccacagctcccagcacacctcaagggcccac

SEQ ID NO: 1031904 - DNA, 120 bp, Artificial Sequence
  ENSG00000283103_24 (sequence is synthesized)
gccaagacactgggtccaaggaggggggtgagaaatatcaaagggagcccattccatataatccatacaatttgagtgatggggctaggagtgattggtgaacacgccagtaacattaat

SEQ ID NO: 1031905 - DNA, 120 bp, Artificial Sequence
  ENSG00000283103_25 (sequence is synthesized)
aaagctgaggcctaataaatacataatttttccatggtgacttaaccatgcctgagattggactgcaagacagctgcagttgagtgacgtatccatggtgatacataaagggagtccttc

SEQ ID NO: 1031906 - DNA, 120 bp, Artificial Sequence
  ENSG00000283103_26 (sequence is synthesized)
caatgggccggtgtaattgatgctattgctctgtgtcagacggagttaggggtcctggtgcccacgctccctgatcataatatatctcaggaggagtgtcgctccagagtaccagtcgta

SEQ ID NO: 1031907 - DNA, 120 bp, Artificial Sequence
  ENSG00000283103_27 (sequence is synthesized)
ctaccagtgggttaggaacatatgcccaatatgtttttgcctctacacaggggaaacataccgcacaggacactacagctagcatggccaagaacatggagtcaggggtttttgcctgac

SEQ ID NO: 1031908 - DNA, 120 bp, Artificial Sequence
  ENSG00000283103_28 (sequence is synthesized)
cctggcgctccagtagtttctcagcttcttgtgtcgttttcttgatctgtccccatgttatggggttggatgtcattgtgactccggtcggcccttgttctgtctttgcattcagattcc

SEQ ID NO: 1031909 - DNA, 120 bp, Artificial Sequence
  ENSG00000283103_29 (sequence is synthesized)
tcctatagactatgagcaaaaaaacagagacataacaacattattcttgtaattattataaaagagacattgaagttatgtttaagatgctgttattcataaatgggagtgttgccttcc

SEQ ID NO: 1031910 - DNA, 120 bp, Artificial Sequence
  ENSG00000256803_0 (sequence is synthesized)
ggaccacaccatctgcgcagcctgcaccctcgcggcccggtaaacttgacagtttcttatagagcacagaagccgtggtggtgtcatggaatattgtcaatttcggttacatttcatcat

SEQ ID NO: 1031911 - DNA, 120 bp, Artificial Sequence
  ENSG00000256803_1 (sequence is synthesized)
ggtcaagtcaactccaggaggcagcatcatggacgatttggcttatgttctgcttttgtcttctacagaaccttgtgtctcactgttgtctccttcctggctggggttatcacatggcat

SEQ ID NO: 1031912 - DNA, 120 bp, Artificial Sequence
  ENSG00000256803_2 (sequence is synthesized)
atccaactgattccatggaaagcttgtgtttaccctcaatagttagagacgtacaaggatggagagggaacagagccatcttcccagaaccaacttctgccagaggagtcccatgataat

SEQ ID NO: 1031913 - DNA, 120 bp, Artificial Sequence
  ENSG00000256803_3 (sequence is synthesized)
acagagaaaaagttttacgtgagcgccacattccagtttgcagagttaagatagatgaggacattcattaaattcatgtattaattctaattcaagatgcactgaatttccatcatgtga

SEQ ID NO: 1031914 - DNA, 120 bp, Artificial Sequence
  ENSG00000256803_4 (sequence is synthesized)
atcagatgttttatttatttctctctcattgtatggataatgtctataactagagaatgagactcaatcctaccttttcttccaaactgtctatcttcactagggtggagttcttgtcta

SEQ ID NO: 1031915 - DNA, 120 bp, Artificial Sequence
  ENSG00000256803_5 (sequence is synthesized)
tgcagtcctttctactgttagcccaggttttctcctcatttgttgtaaaatagtagcaactattttggtaccattgccacatcttaggacatggattacatctgtggtctgaaaaggaaa

SEQ ID NO: 1031916 - DNA, 120 bp, Artificial Sequence
  ENSG00000256802_0 (sequence is synthesized)
gctcctgccgctctgatgttgctagacctcctcagcactcagcccaaggcagccaggaagaatgaacgaatggtgattcagagggaaaggaggaagctgcgtggcatttcagagatactt

SEQ ID NO: 1031917 - DNA, 120 bp, Artificial Sequence
  ENSG00000256802_1 (sequence is synthesized)
gttttgatatgtgaacatttcttctccttcatagaaaactctgcttcacaaacacaggatattggaaatggaagtgggcttttcagtgctttgggaacaatcacaggagattctgccttg

SEQ ID NO: 1031918 - DNA, 120 bp, Artificial Sequence
  ENSG00000256802_2 (sequence is synthesized)
gctgtaatccagaacgtatggagatttgaagttgtcgcaaacatactttgaaggccaccagatgcagctgtacaattgaagtccatcagctcacttgcctcaataaagcctgccactgca

SEQ ID NO: 1031919 - DNA, 120 bp, Artificial Sequence
  ENSG00000256802_3 (sequence is synthesized)
agaacctcccctcccccgccggggcctgggcgcgcctgcccttcgctccccgacctcctgctgcagctctgggcccctcggccgctccctcccctcctcccttgctcaccccacggttgg

SEQ ID NO: 1031920 - DNA, 120 bp, Artificial Sequence
  ENSG00000256802_4 (sequence is synthesized)
ccgcggatctccagcacgccgccccagtcctcggcgtcccgcagcgcctgccagggtcgccgagcctcccctgcctcctggccgcctctgcagtgccgtcctcccggggctggctctctc

SEQ ID NO: 1031921 - DNA, 120 bp, Artificial Sequence
  ENSG00000256802_5 (sequence is synthesized)
cccaggcccccgctttggccacccaggcactttccgccctgagcgtggcagctgctgccgggggtcctgggaccgcgggatgggaactcccacgcagcgtcccacaggctcctggccgcc

SEQ ID NO: 1031922 - DNA, 120 bp, Artificial Sequence
  ENSG00000256802_6 (sequence is synthesized)
gcgagcccgcgcgactcgcacgagcatgtccacccgcagcgaggggccggtcactgctacggagcccgccagaaggcaaagccccagacagcaaatagggaggcggctggcacccaggga

SEQ ID NO: 1031923 - DNA, 120 bp, Artificial Sequence
  ENSG00000256802_7 (sequence is synthesized)
ttcttttcatatcagagctaatgagttttgatatgtgaacatttcttctccttcataggtaatgtgttgatttggcactttaatcttagaataatcatttctaaaaccaacccaactgct

SEQ ID NO: 1031924 - DNA, 120 bp, Artificial Sequence
  ENSG00000256802_8 (sequence is synthesized)
tttctttacaattttggccttagcaaacagatgagtccgttgacttgagcattgcttgggcactgtctgtgtgcaggtcaggcaggggatgctggtggctgggaaacatagaggatggag

SEQ ID NO: 1031925 - DNA, 120 bp, Artificial Sequence
  ENSG00000256802_9 (sequence is synthesized)
gtgtcttgggtgtacatgaaggggtggggtcaagtccacagggggtcggcccctggcagcagtcctggagggcttcgtggaggaagggagaattgagtgagaaagtggtccccaggtaag

SEQ ID NO: 1031926 - DNA, 120 bp, Artificial Sequence
  ENSG00000256802_10 (sequence is synthesized)
agggaagagcatccagggagaggagactgcttctgggaagaccagaggcatcacctcgcaggggctggtatggtggtggctcaggtgggaggaagagagacctcagggaaaataacaggt

SEQ ID NO: 1031927 - DNA, 120 bp, Artificial Sequence
  ENSG00000256802_11 (sequence is synthesized)
ggaggcctgctctggtggggaggcaggctggtggtggagtcatggctgcaggccagggagatgcctgaccaacaggtgtgttggccagggtccctgtagcaaaaacacggagctgaggac

SEQ ID NO: 1031928 - DNA, 120 bp, Artificial Sequence
  ENSG00000256802_12 (sequence is synthesized)
ctcatggcagggaccccatgcagagggagccgcgggtggcatggggatagtcacctggctctcctgctctcggcctcctgcagctcccctcactccctgccctgccacacaaggtcaaac

SEQ ID NO: 1031929 - DNA, 120 bp, Artificial Sequence
  ENSG00000256802_13 (sequence is synthesized)
ccaccaggaggcagaaggcgaagggcgaggtcccagggtgaggagcagggaggagatggtggcagcagggaaggtgatgcctgctgcagagtgagacctgggactgccaaacacacagtg

SEQ ID NO: 1031930 - DNA, 120 bp, Artificial Sequence
  ENSG00000256802_14 (sequence is synthesized)
acgggagctgaggaggcctgccgggggaggaagacagtggctggcagtgacaggaagggagggtcagcatggggcggcagtcccagagctcagggctccctgccaggccagcctttgtgg

SEQ ID NO: 1031931 - DNA, 120 bp, Artificial Sequence
  ENSG00000256802_15 (sequence is synthesized)
cctgtggggtggaggtggcaattgctgtcatgtcataaacacgtcaagcttacaatgaaatctccagtgtggcttgggagcaaatacatgtgcaggtgtttgagtatctgtgctcttacc

SEQ ID NO: 1031932 - DNA, 120 bp, Artificial Sequence
  ENSG00000256802_16 (sequence is synthesized)
taacctcagggagcaggaaaacgaaagcttatcatgtaaacacatcagcagcagggcttatgtgtgtctccacactggaacccccaagacaagagactggaggcagagttgatttccaag

SEQ ID NO: 1031933 - DNA, 120 bp, Artificial Sequence
  ENSG00000256802_17 (sequence is synthesized)
cccagagtgctgggcagcctttgggttttatgtctgcttgcttggagctcagtgatagaaatctaggccccagaagaggaaaggactgtcctgcataaccagcacacccggggaatgctt

SEQ ID NO: 1031934 - DNA, 120 bp, Artificial Sequence
  ENSG00000256802_18 (sequence is synthesized)
caggtgcagctggatccaggcatcctcaaatagtgtgattaggactccactttcctttgtcaccttggcttggctcttccctgctctgtgttgttttcagacgaggtggggccccagcag

SEQ ID NO: 1031935 - DNA, 120 bp, Artificial Sequence
  ENSG00000256802_19 (sequence is synthesized)
ctctggtcctcctgacatcctagagaagagccagcccttccctcctggggtctacaccgtcccctaagggacctcagactgggctgatggaaggtctcaagcaggccatgtgaagggcac

SEQ ID NO: 1031936 - DNA, 120 bp, Artificial Sequence
  ENSG00000256802_20 (sequence is synthesized)
tgcacaggaaacacagaaacgggaatcctataaggtcagcagagctctgagccctttgttcttgggcctgtttttatgatcctccctctacatgtagctcacacttccctgcttctgtgc

SEQ ID NO: 1031937 - DNA, 120 bp, Artificial Sequence
  ENSG00000256802_21 (sequence is synthesized)
aggcaccaggtgagggggttgtcatggcctcctgccactcttgaggctgtcagatattacctgtgctgtccctgcattctcaagctccaaattgtcaactaagaaatggtcacttaaaaa

SEQ ID NO: 1031938 - DNA, 120 bp, Artificial Sequence
  ENSG00000231272_0 (sequence is synthesized)
ccacactctattcaaaatggagtcactcttgttcaaatgcctctgacaaaagcggtgtgacaagcctgggattcccatagtgatcatgctggtaggagtgaggtgttattatttagaaac

SEQ ID NO: 1031939 - DNA, 120 bp, Artificial Sequence
  ENSG00000231272_1 (sequence is synthesized)
cttcttctccatttcaccaacacgctgcacagtctgtgtattcagcgtcaccaaagagatttttaattcatcagcctggtttttgtggattgttcgttgccttctcagtgctgtaacaca

SEQ ID NO: 1031940 - DNA, 120 bp, Artificial Sequence
  ENSG00000231272_2 (sequence is synthesized)
tagagacactggtacaggcattaggaaggatgggagaagataccaaatggtataagacatggtctggtatttccagggataggatcatccatttaggaaaacagctacatagagacatgc

SEQ ID NO: 1031941 - DNA, 79 bp, Artificial Sequence
  ENSG00000228028_0 (sequence is synthesized)
ctgagggctgaggatcagatacactatgttgaggttgaggatcagatacaccatgctgaggttgaggatcagatacatc

SEQ ID NO: 1031942 - DNA, 120 bp, Artificial Sequence
  ENSG00000228028_1 (sequence is synthesized)
gaatgaaggagaaggaaagtagttctcaggaggtttatgaatttttgttttcaaaaagctttactcataaataagtagattttaaaccaagaaatcatacactgctgaaaggagtatcag

SEQ ID NO: 1031943 - DNA, 120 bp, Artificial Sequence
  ENSG00000228028_2 (sequence is synthesized)
caactttcaagaagggcaattaggtcgtatctatcaaaagacaaacgacaaatgcttatagctgtggcccagcttttctaattctgggaattatctcacagtaaatatagatgttattca

SEQ ID NO: 1031944 - DNA, 120 bp, Artificial Sequence
  ENSG00000260425_0 (sequence is synthesized)
tacaggtttgagccaccgcgcccggccaaggaccagttttcaacaaaaagcacaagacgttcaaagaaacaggaaaacaggtaccattcaatggaagaaactgacaaaaccgagaattct

SEQ ID NO: 1031945 - DNA, 120 bp, Artificial Sequence
  ENSG00000260425_1 (sequence is synthesized)
cactttgggaggccaaggcgggaagattgcttgaggccaggagtatgacaccagcctgggcaacactgtgagaaccccgtgtctacacaaaaagcacacagaaaaaatgagctgagtgta

SEQ ID NO: 1031946 - DNA, 62 bp, Artificial Sequence
  ENSG00000260425_2 (sequence is synthesized)
ccgtgtctacacaaaaagcacacagaaaaaatgagctgagtgtgcctgggaggcagagcttg

SEQ ID NO: 1031947 - DNA, 120 bp, Artificial Sequence
  ENSG00000205745_0 (sequence is synthesized)
gaagcctttgggtggagcgatgtggaagtccttcctcatcaggagtttcacatggtacaggccccagggtcctcaaaggtgacctgcaggtctgcgagcacctccttgttgggaaagatc

SEQ ID NO: 1031948 - DNA, 120 bp, Artificial Sequence
  ENSG00000205745_1 (sequence is synthesized)
tttaagtcatccagcaggttttgcagtcaatgtcgttacctccttgtgcaccaggccatcatggggagagcaggttcttcacattcaagtccatgactgtggctggacaaggtgatagcg

SEQ ID NO: 1031949 - DNA, 120 bp, Artificial Sequence
  ENSG00000205745_2 (sequence is synthesized)
acactgcagccatctccagggaaccagtggcctgtttgctgtgtgtgcttccacactggcctcccacgtgccagctggtgttacctgcgtcgctcactcctgctgctggagtggctgcgt

SEQ ID NO: 1031950 - DNA, 120 bp, Artificial Sequence
  ENSG00000205745_3 (sequence is synthesized)
cagcagggggagctgagagcagtaagtggctggaacagcccagggaaggaggagatccctgggaagcaagatcggagttcacgtggaggacgctggaaccacagaagcatgtgtgtttgt

SEQ ID NO: 1031951 - DNA, 120 bp, Artificial Sequence
  ENSG00000205745_4 (sequence is synthesized)
ggcaacctcacggctccactgctggagttaatgatccatgagcaaaacactgagcccatccacactggccgctggcggatggacaccgccatgctagatctgtgcggtcgcccggggagc

SEQ ID NO: 1031952 - DNA, 120 bp, Artificial Sequence
  ENSG00000205745_5 (sequence is synthesized)
accgggccattcctaacaagcgtgcagtcgagatgcagacaggaaggccaagggagggagaagggggcttcagcacacggcagcgcgtggcccctgggcccgaccccttctccggcagcg

SEQ ID NO: 1031953 - DNA, 120 bp, Artificial Sequence
  ENSG00000205745_6 (sequence is synthesized)
ctcctggcggtcagagtgacctactcgactggcacttctggtgtgtaggaatctctggtagatcaagttaaaaggcagattttgaatccctggatctggggtggggcctgaaattctgca

SEQ ID NO: 1031954 - DNA, 120 bp, Artificial Sequence
  ENSG00000205745_7 (sequence is synthesized)
tttctgaggggctcccaggtaaggccaaggctgctggccggctgaggagttaacagtgtgtgctctggagtcacgtggattcctgcttgccagtagcgcgccttggaaagtcaccccgcc

SEQ ID NO: 1031955 - DNA, 120 bp, Artificial Sequence
  ENSG00000205745_8 (sequence is synthesized)
tggctctgccatttccttctctgtacatacagtgttgtctgcggtgagggtgacacagctgaataggcacaatgggccggaccagtgccgggcacgcggtgcatgcgaagtcagtagtta

SEQ ID NO: 1031956 - DNA, 120 bp, Artificial Sequence
  ENSG00000205745_9 (sequence is synthesized)
taactgctcgtctgtgctgcaaccctgcagtgcacccttcgcctgcacaataaaatctaccatcagccaccaccgtgccctgccctcccgtgcaccagtcaccctgagcattgtacggga

SEQ ID NO: 1031957 - DNA, 120 bp, Artificial Sequence
  ENSG00000205745_10 (sequence is synthesized)
gttctggaaaggagcagagttttctcaaatgcagagttgcccttgattttgaatgccgttctctccctgatccccccagcaaagtcctcctccttcttttgggctctgagacctccagag

SEQ ID NO: 1031958 - DNA, 120 bp, Artificial Sequence
  ENSG00000205745_11 (sequence is synthesized)
ccacctccaggaagctgagaagacaggaagtgtttttactcttttccattcccagttttgtacatcacctgacgtatactaggttttaataaatggtgaaagaatgaatgaaacaacaaa

SEQ ID NO: 1031959 - DNA, 120 bp, Artificial Sequence
  ENSG00000283392_0 (sequence is synthesized)
aaaggcaggggcgatgtgcacagtctgcggggcctcgaagtcagccattatgccccccaaagtgagcagcgggtgagcagccaccactgtgacctcaccctgcccccgactcccagttct

SEQ ID NO: 1031960 - DNA, 120 bp, Artificial Sequence
  ENSG00000283392_1 (sequence is synthesized)
gaaaattcttcattagcaccaaatccaaacttttcctcagcagtggcaggacccaggcgcgggtcctccttcctcctcccgccccctcgcggtcagacaacagggatctgtatgtttgca

SEQ ID NO: 1031961 - DNA, 120 bp, Artificial Sequence
  ENSG00000283392_2 (sequence is synthesized)
agcattctttcaggcagggctcctgcggatggcagctagaagctctgaagttacctccttcccagttcatgtaagatgcggcaggaagcagcattccacctgaagaaaaatcgtcatcat

SEQ ID NO: 1031962 - DNA, 120 bp, Artificial Sequence
  ENSG00000283392_3 (sequence is synthesized)
catgcctctctgttcctcggcagccaatggctgactcactcccttggctctgggaggcttggttgctcgactctgattgtgaagcatgtgcagatagtgtgttcacatccaaaatcatgc

SEQ ID NO: 1031963 - DNA, 120 bp, Artificial Sequence
  ENSG00000283392_4 (sequence is synthesized)
atgcacacacaactcctaaacacaacctcatgtgtcctctgtgccaatcacgcaaacgcaccatgcctgaagggggtgtgtcctccccacacagtggggtgctgacagaagccattctgc

SEQ ID NO: 1031964 - DNA, 120 bp, Artificial Sequence
  ENSG00000283392_5 (sequence is synthesized)
aaaggcttgttaattcttagacagtcgggtgtgaatatcatgctgacatttatagcgtgtcttcaccacactccgtctcacccacgctgaaccacgcacctgcaggagggaatgctggta

SEQ ID NO: 1031965 - DNA, 120 bp, Artificial Sequence
  ENSG00000283392_6 (sequence is synthesized)
gtgtgttacccaaacacagacctgagggagggggactaggagggaagagaaaagggaagatgtggtctggcttctccaagcctatctttgggtgccctggatgcctgataaattccagcc

SEQ ID NO: 1031966 - DNA, 120 bp, Artificial Sequence
  ENSG00000283392_7 (sequence is synthesized)
ttggacgaaaacaaaaggctttatcttttaaaacaagtttaggaagatgttagaatttattatatagaaaaatataacaaaacaaaacatgggctgtgcagtcagagaaacgtggtttta

SEQ ID NO: 1031967 - DNA, 120 bp, Artificial Sequence
  ENSG00000283392_8 (sequence is synthesized)
agtcccagttctacaatttaacaagctacatgacctgggtcaatcacttagcctctctgagccttctcaccagtaaaacggagctcacagaggtatctatttctcagagttgtggtcaag

SEQ ID NO: 1031968 - DNA, 120 bp, Artificial Sequence
  ENSG00000283392_9 (sequence is synthesized)
gaaagttaggttagtgattcatttgctggaacataaagaaataaatactcctttatttgaacttctaagtcatgggtggcatgccagggtgactttgtcctgatattagggttactaggg

SEQ ID NO: 1031969 - DNA, 120 bp, Artificial Sequence
  ENSG00000283392_10 (sequence is synthesized)
tccttttctagttgtcctggatctcagcatcctgcctccaaccctggtattcccacgcataccagaggtggatccacaggtcatctcccctgcagattcagccccttcccagttcccaag

SEQ ID NO: 1031970 - DNA, 120 bp, Artificial Sequence
  ENSG00000283392_11 (sequence is synthesized)
tatctctgggcttgaggggaacatgtattatgttgctcaacactgtcctggttgcaagtgacagaaaatggaaatttattggtttgtgtgattagaaagtttgagggtgagtgggtgcag

SEQ ID NO: 1031971 - DNA, 71 bp, Artificial Sequence
  ENSG00000283392_12 (sequence is synthesized)
cacttgatgccaagagttcaacaccagcctgggcaagatagtgagacatgtttctacaaaaaaaaaaaaaa

SEQ ID NO: 1031972 - DNA, 120 bp, Artificial Sequence
  ENSG00000260426_0 (sequence is synthesized)
cagccccagctctggtgcttctagatagctggtgaacctctgtgcgcctccgtctcctcgcttacagaggtaatagtgcttgcctcatttgggtgttatgaggatgaggggaaaaggacc

SEQ ID NO: 1031973 - DNA, 120 bp, Artificial Sequence
  ENSG00000260426_1 (sequence is synthesized)
aaccctgtgcgatgctgggatgtggccagcaccctggaggcagccctagaaaactccctcccaccagcagcctagagtccacagcattcccacggtgcccggggccgggctcccccgtcc

SEQ ID NO: 1031974 - DNA, 120 bp, Artificial Sequence
  ENSG00000260426_2 (sequence is synthesized)
cattgccctgccatcctggggcatcaccctcacctgggtgactgaggggcaacagccccacatccgtgctgcaggtggagggagtgggaaatgagagcggatggcaagcagcctcctcca

SEQ ID NO: 1031975 - DNA, 120 bp, Artificial Sequence
  ENSG00000260426_3 (sequence is synthesized)
tgaggacgagtcaagaggagagggcgtctctgcacacccccctgccaccccagctgcagccccgctgacactcgttggccaggttccattgctgaaaggagttaggggagtctggacacc

SEQ ID NO: 1031976 - DNA, 120 bp, Artificial Sequence
  ENSG00000260426_4 (sequence is synthesized)
atgggacagttggcagactcagccccagggtgtaaaacacaaagcagctgtcatctcggggccaaggtttgctttgcgaaagaagcagagatgaaggccacgtggaagcctctgttcgct

SEQ ID NO: 1031977 - DNA, 120 bp, Artificial Sequence
  ENSG00000260426_5 (sequence is synthesized)
tcgtgcacacgattctgcacccacaaacagccacggtgctaggggtttccacatggtgtccccttgacgctcacagaactccggggaggctgtgaggtcaccccattttctggatgaacc

SEQ ID NO: 1031978 - DNA, 120 bp, Artificial Sequence
  ENSG00000260426_6 (sequence is synthesized)
tcacagtgggagagggatttgtcacggtcacacagtccaagcatgtaagagaagaggtgccttcaggactggcacccaggcgtcactcctgtcccccactccctctgcagaagcccctca

SEQ ID NO: 1031979 - DNA, 120 bp, Artificial Sequence
  ENSG00000260426_7 (sequence is synthesized)
ctgcgtgtaccatgcgtgcccctgtggcaacgagtcaccgactcatctcgtttccttcccgtgcagatgcttcgggtagcagcccagcgctcttcactggactgaaggcacctcttctct

SEQ ID NO: 1031980 - DNA, 120 bp, Artificial Sequence
  ENSG00000260426_8 (sequence is synthesized)
ttagagagagaacattttcaaaggttaagcctaaaaatcaggacagattttactttgttattgttgtttcttgaggcctaatttttaaaaagcctgtgtgctggctgctgatggccttga

SEQ ID NO: 1031981 - DNA, 120 bp, Artificial Sequence
  ENSG00000260426_9 (sequence is synthesized)
tgagaaagtggccgtcaattaaacagacaagggggaaccgaggaatccaggtcagcacgatttcctgatctgtggcagtgactgtgacctgactggacttgagctggaacttcaaataac

SEQ ID NO: 1031982 - DNA, 120 bp, Artificial Sequence
  ENSG00000260426_10 (sequence is synthesized)
accattaggtcctaatcatatcagaggtgatctaacatgacttcccacaccatcccctttcaaagatgcaagtcacatgggcacgtctgtaaaatgctgaaggctgcaccgtgtgagctg

SEQ ID NO: 1031983 - DNA, 120 bp, Artificial Sequence
  ENSG00000260426_11 (sequence is synthesized)
cacaaattcaaagttttctgactttgccagcccagtaacactgccaggtgccagcttgtggcatttctgtcagaaacccagctggcatgaaagtgggtttttcatccagcctggagtagc

SEQ ID NO: 1031984 - DNA, 120 bp, Artificial Sequence
  ENSG00000260426_12 (sequence is synthesized)
cccctgcattcagaaattctttgcctgactacagaagtctaaatcaggactcactttcccccgagctagaggaggaggaatgtgaagccttggaaagagtcggcaccattctgggagtca

SEQ ID NO: 1031985 - DNA, 120 bp, Artificial Sequence
  ENSG00000260426_13 (sequence is synthesized)
gattagtacaccccaagaaagggagagtggctgggccagctgcgacacagtccccaaccgctacccgttcctccaccgcccaccaagcccagagcagcctccctcagccagaagacagct

SEQ ID NO: 1031986 - DNA, 120 bp, Artificial Sequence
  ENSG00000260426_14 (sequence is synthesized)
tggaggatggaagactgttcaacttgtggcttaagcacattattaaaaccaaagaggaaaattctttgaagagatggggtggagctgaatttaagagaaataataaaaaccatgaccagg

SEQ ID NO: 1031987 - DNA, 120 bp, Artificial Sequence
  ENSG00000255446_0 (sequence is synthesized)
acaatactcatccaggcggatggcccaccagcgcaaagggctgaaaagttccatggcagcctcataactggagggtgtgtccatgaggagggtttcgatgacacgctgaaagctcgggca

SEQ ID NO: 1031988 - DNA, 120 bp, Artificial Sequence
  ENSG00000255446_1 (sequence is synthesized)
gatctctgcagaagctgcaacacagaggagagaaggcacatgtctccaggcccctttccaagctggctagccctctggctgggtctgcccagatgcaaacagccaggcccatcagcgaga

SEQ ID NO: 1031989 - DNA, 120 bp, Artificial Sequence
  ENSG00000255446_2 (sequence is synthesized)
tgtaagatttgtggattgcccgagtcttccttagacttcttgggttgaggtgagcaaggtgccgtttttctttctgttggagatcaaggcagagtattgatcatagaagctgctggcctg

SEQ ID NO: 1031990 - DNA, 120 bp, Artificial Sequence
  ENSG00000255446_3 (sequence is synthesized)
attttttaatgcagtgtggaggctgggaagaggccactgagggttttatttcccaccagaaacttgcctctcatcagtggttagagatgccctgagccatgcttcactgggggcatgtga

SEQ ID NO: 1031991 - DNA, 120 bp, Artificial Sequence
  ENSG00000255447_0 (sequence is synthesized)
aggcagcctttctaggagctggttctttctaaggataccaggctccttcctggaagtctttgattgtcctgcaacaagtgcattgatgacaaaatggaatgcagtgctcagccctcctgg

SEQ ID NO: 1031992 - DNA, 120 bp, Artificial Sequence
  ENSG00000255447_1 (sequence is synthesized)
ggagccctcctcccacacaccgtggcttctatgaaaggactaaatttaggacctgaaaccagctgaaatggggacagcagagcctgctgcgccgcagctgcccatccaggtaaggaaacc

SEQ ID NO: 1031993 - DNA, 120 bp, Artificial Sequence
  ENSG00000255447_2 (sequence is synthesized)
atggcacagagaggttagcaacatgtcccaaatcacatagaaaggcctccctctctgcacaccgagagaccaaatatacaaacggacaatggccaaaccgtatatgataatagaactctt

SEQ ID NO: 1031994 - DNA, 120 bp, Artificial Sequence
  ENSG00000255443_0 (sequence is synthesized)
atacttcgttggtagtcatcattaggctcaatgattataacagtaaatgactaaagcagttttgaactcaccatctgattcagatccatgagtggtatgggaccccccactggggtggaa

SEQ ID NO: 1031995 - DNA, 120 bp, Artificial Sequence
  ENSG00000255443_1 (sequence is synthesized)
tgtgtcttggtctcctgtaatgagcaatcaggaagaagggactgctttttagtcatcagcaccatggaggtccagaggacaaaaggcaaaacaatattattgtgaggaatgtaaagtgat

SEQ ID NO: 1031996 - DNA, 120 bp, Artificial Sequence
  ENSG00000255443_2 (sequence is synthesized)
tcaagactaagaaactcactcaaaaccatacaattacatggaaattaaataacctgctcctgaatgacttctgggtaaataatgaaattaatgcagaaatcaagaagttctttgaaacta

SEQ ID NO: 1031997 - DNA, 85 bp, Artificial Sequence
  ENSG00000255443_3 (sequence is synthesized)
gcagtagtaagagggaaatttatagcactaaatttaaacgcccacataaaaaagttagaaagatctcaagttaacaaaaataaat

SEQ ID NO: 1031998 - DNA, 120 bp, Artificial Sequence
  ENSG00000255440_0 (sequence is synthesized)
agttctttcctttgtctgagctcagcggagaccgccgccgagactacgactcccagcagctccgcgttccccctttcctcaaaagaaaaagatctacctcgaggtgtttcagattcagga

SEQ ID NO: 1031999 - DNA, 120 bp, Artificial Sequence
  ENSG00000255440_1 (sequence is synthesized)
taaacaagatagacaagccttgttcctgcccttaagaagcccaggacgaggaatacagacaaataacacattattgaaatgccctgataagtgcttttcatagataatactatggaatta

SEQ ID NO: 1032000 - DNA, 120 bp, Artificial Sequence
  ENSG00000255440_2 (sequence is synthesized)
cagaggaggggcacttaatccagactgggaggggcataaaaggtatccttgaagaaatcatagctaaacttgctatccaggaaaaacttgtgagaaattttgttaggatgtttcagctgc

SEQ ID NO: 1032001 - DNA, 120 bp, Artificial Sequence
  ENSG00000255440_3 (sequence is synthesized)
caggattgattcattcaatggctcataaatctgccatcctcaggacccagtgatgtccaaggactgaaaaggattgtgtgtctctacttattagcttgagaaaccttgccagaggtcctt

SEQ ID NO: 1032002 - DNA, 120 bp, Artificial Sequence
  ENSG00000255440_4 (sequence is synthesized)
ggacgctttctacctatttgcccaaattagatatatccctggcaaggtgaatgagtgccttagatcagtcccaattcccttctgtaggcctgaagctagagagacttagcaggaagatgg

SEQ ID NO: 1032003 - DNA, 120 bp, Artificial Sequence
  ENSG00000255440_5 (sequence is synthesized)
aacttacccaaaagtagagctctgccagcatgggaaaaaggaaaagtgcctgcaacaggaaaaacaacaaagagagagaggtggagaggaacacgccaaagaaagagagagagcccacac

SEQ ID NO: 1032004 - DNA, 120 bp, Artificial Sequence
  ENSG00000255440_6 (sequence is synthesized)
tatcctaagctcctgaatgcactgtgacatccaggtgtcctggggaagacataaacacatcatacagcacccacaggaacttcaagagactggagttaataaagagattaaagagattaa

SEQ ID NO: 1032005 - DNA, 120 bp, Artificial Sequence
  ENSG00000255449_0 (sequence is synthesized)
aagtattattaaaatataaaggaccaaatagtgatccttgtagaacttgagggattctgagaaatagttgaaatgacactgtctcagggttaggtagactggagagcccaacgctgatga

SEQ ID NO: 1032006 - DNA, 120 bp, Artificial Sequence
  ENSG00000255449_1 (sequence is synthesized)
ggcagaggaatgtgtgcagccactgctatcctgggtcagcaaaatgagggtacatgatatataaagatgacctcccaagaaggacaagtctgtaagacaaaggcccaagagatccccacc

SEQ ID NO: 1032007 - DNA, 120 bp, Artificial Sequence
  ENSG00000255449_2 (sequence is synthesized)
ctgcacaccaggagaatgctggatgtggaaagagaaagtagacagatggagtctcactctctcacccagagctcacattctagtaaaatgaaacaagaggccactgactgctggaaatcc

SEQ ID NO: 1032008 - DNA, 120 bp, Artificial Sequence
  ENSG00000255449_3 (sequence is synthesized)
aagtgtaaggtcataggagactacaaacccataatcctctggagattagactggagacagccacagcccattggagtggctggatcaatggaactcaagtgatgaactgggctgctgctg

SEQ ID NO: 1032009 - DNA, 120 bp, Artificial Sequence
  ENSG00000255449_4 (sequence is synthesized)
ctttactgcaggctcacagtgtcatgtacaaagcaatgaaagataactctgcaagggcctgtggatccatgggattggagcttgagactattattgaggcatcctcaacctgccactagc

SEQ ID NO: 1032010 - DNA, 120 bp, Artificial Sequence
  ENSG00000246323_0 (sequence is synthesized)
ttacctaccgttggaaccgcgatgccccgttccctggccgcggccgcttctccaggacccgcggcgacggcaagagggcgagaactgaggccccaagtggctccgcggccgagaagcctc

SEQ ID NO: 1032011 - DNA, 120 bp, Artificial Sequence
  ENSG00000246323_1 (sequence is synthesized)
ttcctggggcggccgctgacgggaggttaaagctacggctgtggcgcggggccagcccgcaggtggcagtaaagtgttttgtccaaactaaattacaacgactgcttcccaatagatgga

SEQ ID NO: 1032012 - DNA, 120 bp, Artificial Sequence
  ENSG00000246323_2 (sequence is synthesized)
agcaaagcgtctggacgaaggagagcttttttctcatggtgctgctgtgttagcctagtgacagctctgtatggcccacacctggtccacaggaagctctcaggcacctcttgcccgaac

SEQ ID NO: 1032013 - DNA, 120 bp, Artificial Sequence
  ENSG00000246323_3 (sequence is synthesized)
aaacttgggagtacaggctaatcccagtgcagattcaacattcctctactctgctgccaaaacagccgccagcctgtgggagtcagacacaggcccacggtgcccctcagactgcaggag

SEQ ID NO: 1032014 - DNA, 120 bp, Artificial Sequence
  ENSG00000246323_4 (sequence is synthesized)
gtacaagtcaagtgctctgagcagatccattgaaggcccactccctcgacttgaagtaaaaggcaggcaggcacctgtggtaagaatcacagctcaccagcaacagtctccaaagacatt

SEQ ID NO: 1032015 - DNA, 120 bp, Artificial Sequence
  ENSG00000246323_5 (sequence is synthesized)
ctacctgctttgtctaaatcctctgaaatttctagagggggtctatctcagaaattactttagttttttggtggatggagggaagaagatggtttcttttataataatcttgttgcttca

SEQ ID NO: 1032016 - DNA, 120 bp, Artificial Sequence
  ENSG00000246323_6 (sequence is synthesized)
gttaaaacagtggttctcaactgcgacaattttgggggaccatgtgtgcagacatttttggtttttttttaaactttttttttccttctgaattcaggatctgctgaatacagacatttt

SEQ ID NO: 1032017 - DNA, 120 bp, Artificial Sequence
  ENSG00000246323_7 (sequence is synthesized)
tgattgtcaccactggagaggtgctattggctggtgggagaaggtcaaggatgctggtaaacatcctttacggcacaggacagcccctacagcaaagaacagcaattctgtttgttacag

SEQ ID NO: 1032018 - DNA, 120 bp, Artificial Sequence
  ENSG00000246323_8 (sequence is synthesized)
agatgagagaatacctcactaaaagaatacttcaaaattacatcactttttcttctttttttcctacaaattctttacctgtagatggaaacgtcacatttcaatatatcaatagagtca

SEQ ID NO: 1032019 - DNA, 120 bp, Artificial Sequence
  ENSG00000246323_9 (sequence is synthesized)
aaaatagcatttgcaatagctatttggccaggatgagaagtgactggtatagaccaatcctttgtgtttccaagactccttctggagatgaggccatgccaggaaaattactacttgaga

SEQ ID NO: 1032020 - DNA, 120 bp, Artificial Sequence
  ENSG00000240445_0 (sequence is synthesized)
atgcgcgactccgagctggccaaagaagttcgtcccctttgtgaggcccgggatgggaggcgcccggttcccccagggacagcttcaagcggtagggacagacatctgaggacccagcct

SEQ ID NO: 1032021 - DNA, 120 bp, Artificial Sequence
  ENSG00000240445_1 (sequence is synthesized)
cagggatgctgtccccgggcttccaggctccagcgccgtaggactgaggcagactccacggtgagaaagagacccgatctaacccaggcctttcatcagagcccaggagggaaggcagga

SEQ ID NO: 1032022 - DNA, 120 bp, Artificial Sequence
  ENSG00000240445_2 (sequence is synthesized)
aatctccagaacaaggaggaggtggtgatcatggagacagatttggctgaaatgcctgagaaaggaggtgagaattgcggacgtgttgaacttgtagcgtggaaggacgaaattcctgct

SEQ ID NO: 1032023 - DNA, 120 bp, Artificial Sequence
  ENSG00000240445_3 (sequence is synthesized)
cctgaagggaaaacggttggctcaggggaggtggctcttggctggctgtctccattgtcttggggatggatgggctttttaagtgagactgaagagcttggtatgggagcaccgcccttt

SEQ ID NO: 1032024 - DNA, 120 bp, Artificial Sequence
  ENSG00000240445_4 (sequence is synthesized)
agctgggcacacagtggacccttcaaagctacccccaaaatttctgtcttcccaggattctccccatttccaagagaagagcacagaagagggagaagtggctgctctgcgcctcacggc

SEQ ID NO: 1032025 - DNA, 120 bp, Artificial Sequence
  ENSG00000240445_5 (sequence is synthesized)
aggtggtgatcatggagacagatttggctgaaatgcctgagaaaggagttctgtcttcccaggattctccccatttccaagagaagagcacagaagagggagaagtggctgctctgcgcc

SEQ ID NO: 1032026 - DNA, 120 bp, Artificial Sequence
  ENSG00000240445_6 (sequence is synthesized)
cacagaagagggagaagtggctgctctgcgcctcacggccagatcccaggcggcggcggcggcggcggcgcccgggagccggagccttcgcggcgtccacgtccctcccccgctgcaccc

SEQ ID NO: 1032027 - DNA, 120 bp, Artificial Sequence
  ENSG00000240445_7 (sequence is synthesized)
cagccgcggccgggcgggcggcgaagatggcagaggcaccggcttccccggccccgctttctccgctcgaagtggagctggacccggagttcgagccccagagccgtccgcgatcctgta

SEQ ID NO: 1032028 - DNA, 120 bp, Artificial Sequence
  ENSG00000240445_8 (sequence is synthesized)
cgtggcccctgcaaaggccggagctccaagcgagccctgccaagccctcgggggagacggccgccgactccatgatccccgaggaggaggacgatgaagacgacgaggacggcgggggac

SEQ ID NO: 1032029 - DNA, 120 bp, Artificial Sequence
  ENSG00000240445_9 (sequence is synthesized)
gggccggctcggccatggcgatcggcggcggcggcgggagccgcacgctggtctccgggctgctccttgaggactcggtccgggtgctggcacccggagggcaagaccccgggtctgggc

SEQ ID NO: 1032030 - DNA, 120 bp, Artificial Sequence
  ENSG00000240445_10 (sequence is synthesized)
cagccaccgcggcgggcgggctgagcgggggtacacaggcgctgctgcagcctcagcaaccgctgccaccgccgcagccgggggcggctgggggctccgggcagccgaggaaatgttcgt

SEQ ID NO: 1032031 - DNA, 120 bp, Artificial Sequence
  ENSG00000240445_11 (sequence is synthesized)
cgcggcggaacgcctggggaaacctgtcctacgcggacctgatcacccgcgccatcgagagctccccggacagacggctcactctgtcccagatctacgagtggatggtgagttgcgtgc

SEQ ID NO: 1032032 - DNA, 120 bp, Artificial Sequence
  ENSG00000240445_12 (sequence is synthesized)
cctacttcaaggataagggcaacagcaacagctctgccggctagaagaactccatccggcacaacctgtcactgcatagtcgattcatgcgggtccagaatgagggaactggcaagagct

SEQ ID NO: 1032033 - DNA, 120 bp, Artificial Sequence
  ENSG00000240445_13 (sequence is synthesized)
cttggtggatcatcaaccctgatggggggaagagcggaaaagccccccggcggcgggctgtctccatggacaatagcaacaagtataccaagagccgtggccgcacagccaagaagaagg

SEQ ID NO: 1032034 - DNA, 120 bp, Artificial Sequence
  ENSG00000240445_14 (sequence is synthesized)
cagccctgcagacagcccccgaatcagctgacgacagtccctcccagctctccaagtggtctggcagccccacgtcacgcagcagtgatgagctggatgcgtggacggacttccgttcac

SEQ ID NO: 1032035 - DNA, 120 bp, Artificial Sequence
  ENSG00000240445_15 (sequence is synthesized)
gcaccaattctaacgccagcacagtcagtggccgcctgtcgcccatcatggcaagcacagagttggatgaagtccaggacgacgatgcgcctctctcgcccatgctctacagcagctcag

SEQ ID NO: 1032036 - DNA, 120 bp, Artificial Sequence
  ENSG00000240445_16 (sequence is synthesized)
cgagcctgtcaccttcagtaagcaagccgtgcacggtggaactgctacggctgactgacatggcaggcaccatgaatctgaatgatggggctgactgaaaacctcatggacgacctgctg

SEQ ID NO: 1032037 - DNA, 120 bp, Artificial Sequence
  ENSG00000240445_17 (sequence is synthesized)
gataacatcacgctcccgccatcccagccatcgcccactgggggactcatgcagcggagttctagcttcccgtataccaccaagggctcgggcctgagctccccaaccagctcctttaac

SEQ ID NO: 1032038 - DNA, 120 bp, Artificial Sequence
  ENSG00000240445_18 (sequence is synthesized)
agcacggtgtttggaccttcatctctgaactccctacgccagtctcccatgcagaccatccaagagaacaagccagctaccttctcttccatgtcacactatggtaaccagacactccag

SEQ ID NO: 1032039 - DNA, 120 bp, Artificial Sequence
  ENSG00000240445_19 (sequence is synthesized)
gacctgctcacttcggactcacttagccacagcgatgtcatgatgacacagtcggaccccttgatgtctcaggccagcaccgctgtgtctgcccagaattcccgccggaacgtgatgctt

SEQ ID NO: 1032040 - DNA, 120 bp, Artificial Sequence
  ENSG00000240445_20 (sequence is synthesized)
cgcaatgatccgatgatgtcctttgctgcccagcctaaccagggaagtgtggtcaatcagaacttgctccaccaccagcaccaaacccagggcgctcttggtggcagccgtgccttgtcg

SEQ ID NO: 1032041 - DNA, 120 bp, Artificial Sequence
  ENSG00000240445_21 (sequence is synthesized)
aattctgtcagcaacatgggcttgagtgagtccagcagccttgggtcagccaaacaccagcagcagtctcctgtcagccagtctatgcaaaccctctcggactctctctcaggctcctcc

SEQ ID NO: 1032042 - DNA, 120 bp, Artificial Sequence
  ENSG00000240445_22 (sequence is synthesized)
ttgtactcaactagtgcaaacctgcccgtcatgggccatgagaagttccccagcgacttggacctggacatgttcaatgggagcttggaatgtgacatggagtccattatccgtagtgaa

SEQ ID NO: 1032043 - DNA, 120 bp, Artificial Sequence
  ENSG00000240445_23 (sequence is synthesized)
ctcatggatgctgatgggttggattttaactttgattccctcatctccacacagaatgttgttggtttgaacgtggggaacttcactggtgctaagcaggcctcatctcagagctgggtg

SEQ ID NO: 1032044 - DNA, 120 bp, Artificial Sequence
  ENSG00000240445_24 (sequence is synthesized)
ccaggctgaaggatcactgaggaaggggaagtgggcaaagcagaccctcaaactgacacaagacctacagagaaaaccctttgccaaatctgctctcagcaagtggacagtgataccgtt

SEQ ID NO: 1032045 - DNA, 120 bp, Artificial Sequence
  ENSG00000240445_25 (sequence is synthesized)
tacagcttaacacctttgtgaatcccacgccattttcctaacccagcagagactgttaatggccccttaccctgggtgaagcacttacccttggaatagaactctaaaaagtatgcaaaa

SEQ ID NO: 1032046 - DNA, 120 bp, Artificial Sequence
  ENSG00000240445_26 (sequence is synthesized)
tcttctttgtacagggtggtgagccgcctgccagtggaggacagcacccctcagcaccacccaccctcgttcagagcacaccgtgagccctcttcggccattctgtggtgttttaatatt

SEQ ID NO: 1032047 - DNA, 120 bp, Artificial Sequence
  ENSG00000240445_27 (sequence is synthesized)
ttcctttgactttctgagtttttcacatgcattaacttgcggtatttttctgttaaaatgttaaccgtccttcccctagcaaatttaaaaacagaaagacaatgttgtaccagttaccat

SEQ ID NO: 1032048 - DNA, 120 bp, Artificial Sequence
  ENSG00000240445_28 (sequence is synthesized)
tccaggtttgagcatcacaagcttttgagcgcatggaactccataaactaacaaattacataaactaaagggggattttctttcttcttttgtttggtagaaaattatccttttctaaaa

SEQ ID NO: 1032049 - DNA, 120 bp, Artificial Sequence
  ENSG00000240445_29 (sequence is synthesized)
actgaacaatggcacaattgtttgctatgcgcacccgtccaggactgaaccatgcataggcaaaacgagtggagcacagcgtccagcccagtgtgtttccagttctgagtcagggtgatc

SEQ ID NO: 1032050 - DNA, 120 bp, Artificial Sequence
  ENSG00000240445_30 (sequence is synthesized)
tgtggacgggaccccagcaccaggtctacgggtgccagatcagtagggcctgtgatctcctgtcagtgtcctcagctaatgtgaacagtgttggtctgctggttagaaactagaataatg

SEQ ID NO: 1032051 - DNA, 120 bp, Artificial Sequence
  ENSG00000240445_31 (sequence is synthesized)
atattttcaggaaagaaatcagctcagctctccactcattgccaaatgtcacccaaaaagggtttagttttaaggagaaagaaaaggaaaaaaaaaaaaagtcctgttttgctttgcaga

SEQ ID NO: 1032052 - DNA, 120 bp, Artificial Sequence
  ENSG00000240445_32 (sequence is synthesized)
acaaatgaacttacaggtgagcattaagcttgcagtgagaaatgtgcaaagagtaaaaacccaagtcaatgctgaggcagttccaacttcactgttttcctaaatacacatccttgatta

SEQ ID NO: 1032053 - DNA, 120 bp, Artificial Sequence
  ENSG00000240445_33 (sequence is synthesized)
ttttcagccttgctatataatctgatctgctagaagtgtatgagtgagaggcaatagcatataaactgattttttaaatataagcttaggttgtaattgtacaagcgactcaatggaagt

SEQ ID NO: 1032054 - DNA, 120 bp, Artificial Sequence
  ENSG00000240445_34 (sequence is synthesized)
acaaaatagggcagttttaacttttttttctgcttctgtggatttcattttgttgtgttttcaaaaagttatggtgctgtataggtgctttctgtttaacctggaaagtgtgattatatt

SEQ ID NO: 1032055 - DNA, 120 bp, Artificial Sequence
  ENSG00000240445_35 (sequence is synthesized)
cgttaccttctttggtagacggaatagttgggaccacctttggtacatatgaaattggtataacgatgctctgattagcacagcatatgcatacttctccaaagtgatatatgaagactc

SEQ ID NO: 1032056 - DNA, 120 bp, Artificial Sequence
  ENSG00000240445_36 (sequence is synthesized)
ttttctttgcataaaaagcattaggcgtataaatgtataaatatattttattatgtacagtacaaaaatggaaccttatgcatgggccttaggaatacaggctagtatttcagcacagac

SEQ ID NO: 1032057 - DNA, 120 bp, Artificial Sequence
  ENSG00000240445_37 (sequence is synthesized)
ttccctgcttgagttcttgctgatgcttgcaccgtgacagtgggcaccaacacagacgtgccacccaaccccctgcacacaccaccggccaccaggggcccccttgtgcgccttggcttt

SEQ ID NO: 1032058 - DNA, 120 bp, Artificial Sequence
  ENSG00000240445_38 (sequence is synthesized)
ataactcctctgggggtgatattggtggtgatcacagctcctagcataatgagagttccatttggtattgtcacacgtctcctgcctcgcttgggttgccatgtttgagcgatggccctg

SEQ ID NO: 1032059 - DNA, 120 bp, Artificial Sequence
  ENSG00000240445_39 (sequence is synthesized)
ttgatttcaccctgccttttactgaatctgtaaattgttgtgcaattgtggttatagtagactgtagcacattgccttttctaaactgctacatgtttataatcttcatttttaaagtat

SEQ ID NO: 1032060 - DNA, 120 bp, Artificial Sequence
  ENSG00000240445_40 (sequence is synthesized)
gtataattttttaaagtatgtattctattcatatggtctgcttgtcagtgagccagacttgcttactatattcctttataataatgctagccacttcctggattctttagtaatgtgctg

SEQ ID NO: 1032061 - DNA, 120 bp, Artificial Sequence
  ENSG00000240445_41 (sequence is synthesized)
tatgcaagaactttccagtagcagtgaaggagggttgcctctccaagcttcctaagggatgctgccctgggtggggatgcattgcagaggcagtagtagcatgggggctagagtggggag

SEQ ID NO: 1032062 - DNA, 120 bp, Artificial Sequence
  ENSG00000240445_42 (sequence is synthesized)
cgagatggaaaagggtggggggataggagaattctagagtgcttccagcatgagggtcctgagaacttctgtcctgagttcagagaaacatgcaaagtaactaacaaaatcgctacttgc

SEQ ID NO: 1032063 - DNA, 120 bp, Artificial Sequence
  ENSG00000240445_43 (sequence is synthesized)
ctttgcagttttacagacccagggagctgctttgggagtgagaaaggcaaccctccaatgtgtttcaactttaaaatgttgaattcttttcagacatgtggtatctcatttattctcctt

SEQ ID NO: 1032064 - DNA, 120 bp, Artificial Sequence
  ENSG00000240445_44 (sequence is synthesized)
ttctagcgtttgttgaatttcaggcagaatgtcttacagaatgtcctagaaccagattatcatttaatccgaaacagctgaggaagggacagagaaggtacaagggcaaggcagcataaa

SEQ ID NO: 1032065 - DNA, 120 bp, Artificial Sequence
  ENSG00000240445_45 (sequence is synthesized)
acagatcaggagaatgaagagggaatgctttggttttttgttctgttttgttttttctttttcaagtaactaaaacagcatctacatgtagagtgtcgtggagagctgagaccagggtaa

SEQ ID NO: 1032066 - DNA, 120 bp, Artificial Sequence
  ENSG00000240445_46 (sequence is synthesized)
agtcaagtgcagcatcagtactgcgagacccaccagcccctggagagggtcagctgagaatctggtagtgaagcctgtgtagggtcccggcaccctcaccctcagccacctgcagagagg

SEQ ID NO: 1032067 - DNA, 120 bp, Artificial Sequence
  ENSG00000240445_47 (sequence is synthesized)
ccagggccccagagactagcccggttctgaagtgggcaggggtgctgccagagccttccgccccttatattgagaccctgctttcaggacaggccagccgttggccaccatgtcacattc

SEQ ID NO: 1032068 - DNA, 120 bp, Artificial Sequence
  ENSG00000240445_48 (sequence is synthesized)
tgagtgagtgtcacgggtccctaacaataattttctgatctggagcatatcagcagaatgcttagcctcaaggggcctggcagctgtaatgtttgatttatgatgagaactatccgaggc

SEQ ID NO: 1032069 - DNA, 120 bp, Artificial Sequence
  ENSG00000240445_49 (sequence is synthesized)
cacacttggcctctaaataagctgctctagggagccgcctactttttggtgagaaattagaagagtacctaatgttgaaaacatgacatgcgctcttgggatctgctgttctctccaggg

SEQ ID NO: 1032070 - DNA, 120 bp, Artificial Sequence
  ENSG00000240445_50 (sequence is synthesized)
ctccagaacctgatacctgttaccaaagctaggaaagagctttatcacaagccttcactgtcctggcatgagaactggctgccaggctcagtgtaccccattaaatgtgaatgaatctga

SEQ ID NO: 1032071 - DNA, 120 bp, Artificial Sequence
  ENSG00000240445_51 (sequence is synthesized)
catggcagctgggcacacagtggacccttcaaagctacccccaaaatgtgagtgaaatgttaacttctatggcaagaattcacctctttggttgtcaaaaatgttttgttttacatagga

SEQ ID NO: 1032072 - DNA, 120 bp, Artificial Sequence
  ENSG00000240440_0 (sequence is synthesized)
agagctgtgctgcccatgggagtccagagaaggagcacactaaggaccaacaccagagagaagacagctgtctgcaaaccagaaagagagtcctcactgcacttcatatctgccaatgga

SEQ ID NO: 1032073 - DNA, 120 bp, Artificial Sequence
  ENSG00000240440_1 (sequence is synthesized)
ccttgctcttgaacctcccaacctgcagaatcatgagaaacaaacattgtgtaagccacccactctacagtaatttgttctagcagaccgagctgactgaggtatggtctcatcacgtaa

SEQ ID NO: 1032074 - DNA, 120 bp, Artificial Sequence
  ENSG00000240440_2 (sequence is synthesized)
ccacttttaaccttagtctttctatctgtaaagtaagtgggttagagaaatcattctagaagatgtttctgctttaaaacaaattcttctatttcctttccaatgtgaagtttgggtggt

SEQ ID NO: 1032075 - DNA, 120 bp, Artificial Sequence
  ENSG00000240449_0 (sequence is synthesized)
cgatgcgccgccagatggctgccctgggagaagcggcggccgcactcctcgcaggcgaagggccgctcgccggagtgcacgcgcgagtgcgccaccagccccggacaggagctgccatct

SEQ ID NO: 1032076 - DNA, 120 bp, Artificial Sequence
  ENSG00000240449_1 (sequence is synthesized)
atgaacccctagagccccggacatggagctagactactctcctgtttccttgtgtgcctccattagaggaaatgtctcttctcccagtcaggagttaaccacctgctgtaacttcctctt

SEQ ID NO: 1032077 - DNA, 120 bp, Artificial Sequence
  ENSG00000240449_2 (sequence is synthesized)
ccagctggaagcttaaggccttggtatttgagacttcacccttcaaaatgtcttggaggatggcccagcaaccagccaaatggcccaatggcctagcccagtggagacggtctcagcttt

SEQ ID NO: 1032078 - DNA, 120 bp, Artificial Sequence
  ENSG00000240449_3 (sequence is synthesized)
tgacaagctagccggagaaagggctggacaggaaggggcccactggacagcgaatattgatagggcccctgggaggatcaattttcccctccaacagtgcctggctcccattatcagatt

SEQ ID NO: 1032079 - DNA, 120 bp, Artificial Sequence
  ENSG00000247498_0 (sequence is synthesized)
gtgtggacagcctacaccaagggaagagtcaggggagaaggaacacaagactccggaagcatgccagcgtataaaaccacttgggacagaactggagtcagagataccaatttgggaagg

SEQ ID NO: 1032080 - DNA, 120 bp, Artificial Sequence
  ENSG00000247498_1 (sequence is synthesized)
agaaggatctagtgacagaaacttgggagtgcccagtggacactttgcctcattggttcgtgcctcagcttccaatctggacatggagcacaataacagtgggcccactgctctccgaat

SEQ ID NO: 1032081 - DNA, 120 bp, Artificial Sequence
  ENSG00000247498_2 (sequence is synthesized)
taacatcaatggatcagcacacactggtgtacggtctgctatgcatgcagccctgtgctaggcaaaagaagtatcagaccaggaactgacagcctcactgcaacaggaagagaggcttca

SEQ ID NO: 1032082 - DNA, 120 bp, Artificial Sequence
  ENSG00000247498_3 (sequence is synthesized)
cacaataagcgtttcattcaaccaggctggacctgtgcttattgagttgaacatcactgagcacaaaatgcaagccagacaccataagagctgtaaggatgataaagatgtctttctacc

SEQ ID NO: 1032083 - DNA, 120 bp, Artificial Sequence
  ENSG00000247498_4 (sequence is synthesized)
gtcaggagagaaacacatgcaaagattatgctggctggaaggaaatgctggaatgaaggtggaaggtacatccagaatgttctgggggtgaggaatagcgaatgatgggttctgacttag

SEQ ID NO: 1032084 - DNA, 120 bp, Artificial Sequence
  ENSG00000247498_5 (sequence is synthesized)
aacatgaagggaaggtattaagaaagaggtgatattaagcatttattgagcatctctactttttttgtgtatgtgaccttgtttggaaatacaatatctcttcttgatgctggcaatgaa

SEQ ID NO: 1032085 - DNA, 120 bp, Artificial Sequence
  ENSG00000247498_6 (sequence is synthesized)
aggaacacaagactccggaagcatgccagcgtataaaaccgtcaggagcaatggctgacgcctgtaatcccagcattttgggggcctaatcgggcagattgcttgatgccaggagttcga

SEQ ID NO: 1032086 - DNA, 120 bp, Artificial Sequence
  ENSG00000247498_7 (sequence is synthesized)
tgtggacagcctacaccaagggaagagtcaggggagaaggaacacaagactccggaagcatgccagcgtataaaaccttctctctctgtgacctgtaatttgagggtgacaaaaaagaac

SEQ ID NO: 1032087 - DNA, 120 bp, Artificial Sequence
  ENSG00000247498_8 (sequence is synthesized)
gaagttggatttcccctggtaaggtctgatgttataccctttaatcatctttgttgggttctgccaagcctccccaaacttcccacacttctcattagtggatcagtgggtatccttgct

SEQ ID NO: 1032088 - DNA, 120 bp, Artificial Sequence
  ENSG00000247498_9 (sequence is synthesized)
agagactgaccgattgtgggtacaatggcacggttgttcttgctgaccacacatctgtttatacagtaccatgattgtttcttgagcaaacaaaagcaaagacagtgtagagacggggtt

SEQ ID NO: 1032089 - DNA, 120 bp, Artificial Sequence
  ENSG00000247498_10 (sequence is synthesized)
acaataacagtgggcccactgctctccgaattcctgcgcgcacttgaagaatcagaaataacacaaaccactgcagggtaattttgaatgctcatttgactatgcagtgacatcaagtgg

SEQ ID NO: 1032090 - DNA, 120 bp, Artificial Sequence
  ENSG00000247498_11 (sequence is synthesized)
tttggcactttcagctgtttagatttcagagaattaaaaggaaatggtcaccgacctgcctttgatagtacccgtataccccttcccaccataagaaaccagcgttccttagagaaatgg

SEQ ID NO: 1032091 - DNA, 120 bp, Artificial Sequence
  ENSG00000247498_12 (sequence is synthesized)
ctaattctagctctagggcaagaaatgctaagatgtgctcaaaacatctcattataccagcaagccagggagccatcaacgactactggagctgtgtcaaaaggaccaacaaaccaactt

SEQ ID NO: 1032092 - DNA, 120 bp, Artificial Sequence
  ENSG00000247498_13 (sequence is synthesized)
gaagaggctcccgctggccaacagtggggcaattagagcatcaataagaataatatctgtaacaaactgaaacgtatcaaatatgtttaaattcatatgtttataattacactcaaaaaa

SEQ ID NO: 1032093 - DNA, 120 bp, Artificial Sequence
  ENSG00000247498_14 (sequence is synthesized)
ttgttcttgctgaccacacatctgtttatacagtaccatgattgtttcttgagcaaacaaaagcaaagacagtgcaacgaaaacacaaaaagttttatcttctagtaagaactatgagaa

SEQ ID NO: 1032094 - DNA, 120 bp, Artificial Sequence
  ENSG00000247498_15 (sequence is synthesized)
gtgtgtagtatcaatttccaacttttggtcaactgaactgaaaagaatcaatggatgtatttatctgaacaggatttaatttgaatgcgcaactagccacagattacagctcaaaaaaag

SEQ ID NO: 1032095 - DNA, 120 bp, Artificial Sequence
  ENSG00000247498_16 (sequence is synthesized)
tgtatgtacttaaaaggaagcttatgtgaatttttttgagcctggtgaacattatgtgtgctgtacaatatataaaataacatcatcattacatattagaaataaaatgtgagaaatcag

SEQ ID NO: 1032096 - DNA, 120 bp, Artificial Sequence
  ENSG00000247498_17 (sequence is synthesized)
aaacatacacacacccctgattccagaaacacaacaggagctgactcaaaagggagtgtctggtgcaggcatgcagggaggaagaatgactctgagcttgaccattcaacttcgaaactt

SEQ ID NO: 1032097 - DNA, 120 bp, Artificial Sequence
  ENSG00000247498_18 (sequence is synthesized)
gctaataaatgtataatccctttgtaaacatctcttcacaaggtcataaagaaggaagactgaatgaaggacgccaggctttcattttagaattaattttgtcattgaatgcactcactg

SEQ ID NO: 1032098 - DNA, 120 bp, Artificial Sequence
  ENSG00000247498_19 (sequence is synthesized)
cattatttgatagagtacttttgcatttgaagtagtacatttgccttctaccatctcattaacattgctttcaacagaatcagaaataacacaaaccactgcagggtaattttgaatgct

SEQ ID NO: 1032099 - DNA, 120 bp, Artificial Sequence
  ENSG00000247498_20 (sequence is synthesized)
gtaagcatgtatctggctttttctatatgaaataaaggaagccaaatagtaaacgaggggaagtttctctttactgaaatattgcaggtaataaaagaagaaggagaaacagagaacatt

SEQ ID NO: 1032100 - DNA, 120 bp, Artificial Sequence
  ENSG00000247498_21 (sequence is synthesized)
atcgttttatggcctctaatggaacaagacatctaggcaatgatgaactatggtcaccaacatcactcaatcagggacaatcagacactgtgggcccctgaaggaagtaaacaccaccac

SEQ ID NO: 1032101 - DNA, 120 bp, Artificial Sequence
  ENSG00000247498_22 (sequence is synthesized)
gtaggaaatattctcaccaaaacttcaaaaacttgaatctgatctagtctttagtttcaactactaatttacaggcaatacggggctcagagggatgtggtaaaatgtcacggaaatata

SEQ ID NO: 1032102 - DNA, 120 bp, Artificial Sequence
  ENSG00000247498_23 (sequence is synthesized)
atcagcaaaatccagtacagataataagaagacaaatgatccacagatggaaaggaagaatgtaaagttgtgttggtaaagaaattcacagattaataaaagcttaaaaatgtaccatca

SEQ ID NO: 1032103 - DNA, 86 bp, Artificial Sequence
  ENSG00000247498_24 (sequence is synthesized)
gtacaatggcacggttgttcttgctgaccacacatctgtttatacagtaccatgattgtttcttgagcaaacaaaagcaaagacag

SEQ ID NO: 1032104 - DNA, 120 bp, Artificial Sequence
  ENSG00000247498_25 (sequence is synthesized)
tcccaaagtgctgggattacaggattttcttcaccttatctcctctatgactcttcctgccttccctcatcattctagacctcgctgatcaccttccaccaggaactatacaagacttgg

SEQ ID NO: 1032105 - DNA, 120 bp, Artificial Sequence
  ENSG00000247498_26 (sequence is synthesized)
ggtctgttctgttcaaaattacagaaaccctattttctgcctattagttaacttatgaatacatattaagtaataatgaattgaaataaatgaataataaatgtctcaatttctgttata

SEQ ID NO: 1032106 - DNA, 120 bp, Artificial Sequence
  ENSG00000281202_0 (sequence is synthesized)
ctgcagggaggacctcacttggccaagttctccatatgccttcagatggagactgagggcagaggagagtgcagcttatccaagatctcaaggctagtaattggtgagaaaattctgcac

SEQ ID NO: 1032107 - DNA, 120 bp, Artificial Sequence
  ENSG00000281202_1 (sequence is synthesized)
agaaccattcccagtggtgagactgtttttgtccttcagcccgggaaaggcagacctggctccctccttttatttgcaagcctcaaaaccatcaagacagggttaaagatgccccactcc

SEQ ID NO: 1032108 - DNA, 120 bp, Artificial Sequence
  ENSG00000281202_2 (sequence is synthesized)
aaaaatggttgcaagctcaacacggctcctttccagacactcgaagggcgcggaccttcgctgagacgccacccacgcaagtggaggaagcacttgcgccactgctgagcggttggaagg

SEQ ID NO: 1032109 - DNA, 120 bp, Artificial Sequence
  ENSG00000281202_3 (sequence is synthesized)
ggaacactgcagcgatgacccacgagtgtcaacgagaccaggtgcccattagggaaacagagatggagaagaaatcacgcgccaaggtctgaaattcggcgtggctctcactcgacatct

SEQ ID NO: 1032110 - DNA, 120 bp, Artificial Sequence
  ENSG00000281202_4 (sequence is synthesized)
cgacatctccccattctcgccacccgtgcacccgcctgcagcggcgcaccgggctcggtgctgcacctgcctcctggcgcctgcgccactgcccccgcgcgggtcccaccgcgcaggacg

SEQ ID NO: 1032111 - DNA, 120 bp, Artificial Sequence
  ENSG00000281202_5 (sequence is synthesized)
tgcttccgacgtctgctgtggatcacacgcggtcgctgccaaagcctccatttcggttctgacccagtgactttggggacgcccagggaggagatgtggagaggatgtggccaaggtgaa

SEQ ID NO: 1032112 - DNA, 120 bp, Artificial Sequence
  ENSG00000281202_6 (sequence is synthesized)
ccagccagtgtaagtgctaatgcttctggcttctcggtaacacctaccctgccccaccacccaaatcgggccttgatcaaaaaagaagcgtcttgacaatacatttttagacataaataa

SEQ ID NO: 1032113 - DNA, 120 bp, Artificial Sequence
  ENSG00000281202_7 (sequence is synthesized)
cttctttgcgattttgcaaggatgtttgtgaatgtactttgtaactcctagaaaataggcaaaaaaccgtgagtggatgtagtcgcaccgctggcacctgtaagaacgcgccctaaagct

SEQ ID NO: 1032114 - DNA, 120 bp, Artificial Sequence
  ENSG00000281202_8 (sequence is synthesized)
gtggaactgctattcaggttccaggcacacgtctcaagcctcaaacctccaagagttgccttagctgctcattttactggtaagaagacggaggtcaagcctgaagatagtggctctgct

SEQ ID NO: 1032115 - DNA, 120 bp, Artificial Sequence
  ENSG00000281202_9 (sequence is synthesized)
gttttcttaggctgcttgaagctttagataagcaggaaaattccatcaaagaaatccctgtatgtaaattgggagaaaaagatatgatgaatattaatgcagaggcctctgaacaaatgg

SEQ ID NO: 1032116 - DNA, 120 bp, Artificial Sequence
  ENSG00000281202_10 (sequence is synthesized)
aacctccattttcacatccagcacaggatcatttgcagccagacaacctgagagtcaaccccaactctaccttttactaattgcatgatattgggcctcagtttgctcatctgtaaattg

SEQ ID NO: 1032117 - DNA, 120 bp, Artificial Sequence
  ENSG00000281202_11 (sequence is synthesized)
ggtgcagtgatagaatctatcccacagggttttgctgagcattaaatgagtttaaacttgtagatggcttagaataatgcctggcatgtagcaagtacgcagttactggcgcctggtgta

SEQ ID NO: 1032118 - DNA, 120 bp, Artificial Sequence
  ENSG00000281202_12 (sequence is synthesized)
tatagtaagtactcgatatacattaactatttttcaaagacaccacagctcacctgggaaggaatctcaggtatttgcctgagattcaagcaaacaaatatggaagctaccaaaggctca

SEQ ID NO: 1032119 - DNA, 120 bp, Artificial Sequence
  ENSG00000281202_13 (sequence is synthesized)
tgaagcctgaaggatccttgcagagagatgttctaaatgttgcctagaaaggcagtttggagggaggcctctccagtcagaggtctggatgctaagtttagctctgccacatattagcca

SEQ ID NO: 1032120 - DNA, 120 bp, Artificial Sequence
  ENSG00000281202_14 (sequence is synthesized)
ggtaattttgaagtaataaacaatctctttgtgcctccatttcttcttgtgtaaaatgaggggctgttgtgaagattaaataaatacatgtaaagcatttaaagccagacctggcagaaa

SEQ ID NO: 1032121 - DNA, 120 bp, Artificial Sequence
  ENSG00000281202_15 (sequence is synthesized)
aacgaccgggcctcttccggaggcctgcggcagagtcgcctaagcatttgaatggacctcagccctaggaccctggcgccctcggaaaccggatctgaggtccggatcactaacgttcag

SEQ ID NO: 1032122 - DNA, 120 bp, Artificial Sequence
  ENSG00000281202_16 (sequence is synthesized)
agatgcaagggaagccgagaagttgccgaaagggcctgagagctgcttctccttctccctgggcagcaaacctccaagcctgtgcgggccaatctttgcatcctggtaaccagcgcttta

SEQ ID NO: 1032123 - DNA, 120 bp, Artificial Sequence
  ENSG00000276517_0 (sequence is synthesized)
ctggacagcaatgtaagtgtgaaatgtctttcaagagagtatggtgttggagtgaccaccatacatgacctgaacaaacagaaagataaaccattgatgttctgtgctgcaagtggtgaa

SEQ ID NO: 1032124 - DNA, 120 bp, Artificial Sequence
  ENSG00000276517_1 (sequence is synthesized)
tagaggttaatgaaaaatagaaaaagcactccatgaagctaaaaatgaagatattgattgtgtattgaaacagtgaatccatcagtgttggcagtgaacacgtgcctcttaatggtatgc

SEQ ID NO: 1032125 - DNA, 120 bp, Artificial Sequence
  ENSG00000276517_2 (sequence is synthesized)
tgatcatgaaacaagtaacgatctatcatgatgaactgaatgttgaaaggagctgtgaatattcaacacactggttgcagaagtttaagagaagatacgacattacatttttaaagattt

SEQ ID NO: 1032126 - DNA, 120 bp, Artificial Sequence
  ENSG00000276517_3 (sequence is synthesized)
gtggtgataaagcatctgatgatcaggaagcaatggagaagttcattgataaatttgccaaagtcatggctgatgaaaatctgccagaacagtttataatgctgatgaaatatatccctg

SEQ ID NO: 1032127 - DNA, 120 bp, Artificial Sequence
  ENSG00000276517_4 (sequence is synthesized)
ttctggtgttattgtctcaaaaagacactgggctacagttgatgggacagcccctccaggaattaaggataccaaggacagaataactgtcctgggatgtgctaatgcaactggcataca

SEQ ID NO: 1032128 - DNA, 120 bp, Artificial Sequence
  ENSG00000276517_5 (sequence is synthesized)
taagtacaaacatgctctgataggcaaaacctttcacacttgttgttttcaaggagtgaatttcttaccagtccatggttactctgacacaaaagtatggatcaccacagacatcttttc

SEQ ID NO: 1032129 - DNA, 120 bp, Artificial Sequence
  ENSG00000276517_6 (sequence is synthesized)
tgattggtttcataaacactttgtaccagtggcttgtatgtactgcccataagctagactggatgatgtaggagtttgttattccttgatatcacccaattcatcctccagctaaaattc

SEQ ID NO: 1032130 - DNA, 120 bp, Artificial Sequence
  ENSG00000276517_7 (sequence is synthesized)
tcaaaactaatgtttatgccatgtactttccctcagatgtgacttcattaattcagccatgtgaccagggtatctttagatcaatgaacagaaaatataaatccactttcttgaacagca

SEQ ID NO: 1032131 - DNA, 120 bp, Artificial Sequence
  ENSG00000276517_8 (sequence is synthesized)
tgctggcagcagtgaacagaggcatgggtgcagaaaattttcaaaaggagtttagtataaagaatgccatatatgttgttgccaatacttggaacacagtgacaaagacacagttgtgca

SEQ ID NO: 1032132 - DNA, 120 bp, Artificial Sequence
  ENSG00000276517_9 (sequence is synthesized)
tgtctggcacaacctctggcctgcaactgtgtttagtgataatgatgaactgtgtgtgtgtgactttgaaggattctgtatgtcaagtgaaaaaaaatgatgtctgacctccttacatat

SEQ ID NO: 1032133 - DNA, 120 bp, Artificial Sequence
  ENSG00000276517_10 (sequence is synthesized)
gtaaaaaatataccttcagagttcagcagtaagctggaagaagtagatgtcaaagaagttttgaactttgataataatgcttcagttattcattcattgactggtggtaaaatagtcgaa

SEQ ID NO: 1032134 - DNA, 120 bp, Artificial Sequence
  ENSG00000276517_11 (sequence is synthesized)
atggttttgaatcagggttatgatagtgatgaagaaggtcaagataacaccacagaaaaggtgcttatagaagaagacatggtgaaaatgtatggtgggcatattgaaggattacggcag

SEQ ID NO: 1032135 - DNA, 120 bp, Artificial Sequence
  ENSG00000276517_12 (sequence is synthesized)
cattaacaacagaatgaaaaaccatgtcagtttttaaaattgaagagagacttctgagctaaaaaccatgttaatgaggcagatgactccacaagaaccatttttaaaagccttccagca

SEQ ID NO: 1032136 - DNA, 120 bp, Artificial Sequence
  ENSG00000276517_13 (sequence is synthesized)
gaatgtctcttcatcccccgtaggatccacttcctggtccctcagctgcttctgatgtttcttcttaactaaaaaacacagtttatagtaacctttgaataaaaacacagcatcataggt

SEQ ID NO: 1032137 - DNA, 80 bp, Artificial Sequence
  ENSG00000276517_14 (sequence is synthesized)
gtttatagtaacctttgaataaaaacacagcatcataggtgaagactgaaagcctgctgttgtttgtagctgctttttcc

SEQ ID NO: 1032138 - DNA, 74 bp, Artificial Sequence
  ENSG00000276517_15 (sequence is synthesized)
acccccggctctgtggttggttttgtttaatagctgaaacaggtatcctggtgatgctactatgctgcttagtt

SEQ ID NO: 1032139 - DNA, 120 bp, Artificial Sequence
  ENSG00000276517_16 (sequence is synthesized)
tgaaacaggtatcctggtgatgctactatgctgcttagttgtcctgacacattattttttcagtgttaatggtatgtcatatttttactgttaagtacttaatgtatgaataaatgtaag

SEQ ID NO: 1032140 - DNA, 120 bp, Artificial Sequence
  ENSG00000276517_17 (sequence is synthesized)
aaaacaattgcctattgttagcatgtagattaagagtcaggaatgatgactcttgttgacatgggtggctgagatagtgacacctttgctttctgatggttcagggtacacaaactttat

SEQ ID NO: 1032141 - DNA, 120 bp, Artificial Sequence
  ENSG00000276517_18 (sequence is synthesized)
tacaggcacaaaattatcaaaaatacggtataaaattaccttaaggctatgtatataagggatgtgtgtatgtgtgtatacacacaaaaataaattttgtgtttccacttggatcccctc

SEQ ID NO: 1032142 - DNA, 120 bp, Artificial Sequence
  ENSG00000276517_19 (sequence is synthesized)
cctaagataactcattgtgtacatgcaaatattagaaaatgcaaaaaaaagaaaaaaaaagaaatctgaaacagttctagtctcaagcattttggatgagggatacccatcctctatttt

SEQ ID NO: 1032143 - DNA, 120 bp, Artificial Sequence
  ENSG00000276517_20 (sequence is synthesized)
atcaccattttcatgctgtattaaaatgaaattgccaactcagttcaaaggaatttttcttcttagctttacattgttgattcatggtggaggcgaacaaactatcgactggtgggttgg

SEQ ID NO: 1032144 - DNA, 120 bp, Artificial Sequence
  ENSG00000276517_21 (sequence is synthesized)
ataccttggtccagagaggtccttgtgacatatctcatggcccattacctaggtgatgtgagtcttgccttctgcctgcaataaagttttgttggaatgcagctatgcccatttactagt

SEQ ID NO: 1032145 - DNA, 120 bp, Artificial Sequence
  ENSG00000276517_22 (sequence is synthesized)
gtattgtccatagctgcttctctgctacaatgtagattagcagttgtaacagagactatatggcccccccaggttaaagtatttattagctgtccttttatagaaaaaaatgtcccacat

SEQ ID NO: 1032146 - DNA, 120 bp, Artificial Sequence
  ENSG00000276517_23 (sequence is synthesized)
cagatttatggaaatgtctgttcctttgtttacgttttgcccatgactttttaacactttcacagacattattgttcattattatatgtcagaaataaactcactttttgtaaactttcc

SEQ ID NO: 1032147 - DNA, 120 bp, Artificial Sequence
  ENSG00000276519_0 (sequence is synthesized)
tgcctatgcctgggagactggcagggaagttggggaggtacatgaagcataatcagagttaccagtgttcggtgaaccaccgaaccagtgtttgctttcatacgaccgcgtgtcagatca

SEQ ID NO: 1032148 - DNA, 120 bp, Artificial Sequence
  ENSG00000276519_1 (sequence is synthesized)
aatactgctacatacccagaattcaggattttctactatattctattctagtacaaaatgagattttttcccctcaaaatcagttcacaataacttctaatacatctgttatgaaaaatg

SEQ ID NO: 1032149 - DNA, 120 bp, Artificial Sequence
  ENSG00000243799_0 (sequence is synthesized)
ttctagatgaggatgattttctctctgccattggatgtcccttggtatttcgatctccatgaaacttaacatcgtcccatttttccagttgtgtttgaatgtctatgcacgtaaccagtg

SEQ ID NO: 1032150 - DNA, 120 bp, Artificial Sequence
  ENSG00000243799_1 (sequence is synthesized)
tttgactagctcattgtgagagatagaaaattcaaattggagaaggtccctacagctctacctttccaccagtccctgctgtttcactggccctggcactgcactggagagactagcttc

SEQ ID NO: 1032151 - DNA, 120 bp, Artificial Sequence
  ENSG00000243799_2 (sequence is synthesized)
tgagcaagatcggtggctccctggcctggaatctcttcacccagctcacgtaggaaagccacagaaagacaaagaaaccacttgcattaaccctttgtggcagtctacaacaatgactgc

SEQ ID NO: 1032152 - DNA, 120 bp, Artificial Sequence
  ENSG00000243799_3 (sequence is synthesized)
gggctccattgaactcacaacctggatttctttagtagtgcatgggcttcatgagttaaccattcctatgggatctttaggatggtgtgtcaaactttactcttaataatcttgctttct

SEQ ID NO: 1032153 - DNA, 120 bp, Artificial Sequence
  ENSG00000243799_4 (sequence is synthesized)
gattccaattccaagtcacagtggttggatgttgttggtgaagtggaaacatctggctctgtcacggcttagtgtgtgacttgaagtaagtttcttgatctctctgagtttcagtttcct

SEQ ID NO: 1032154 - DNA, 120 bp, Artificial Sequence
  ENSG00000243799_5 (sequence is synthesized)
catttgaaaatggggaattaattgtcttttagggataagatgaggattaaatgatctaatgtatgtaaagtgccaggcatacaataggtactcaataaatgtgatttccattcttttaca

SEQ ID NO: 1032155 - DNA, 120 bp, Artificial Sequence
  ENSG00000230631_0 (sequence is synthesized)
agaactgatgtgggaaacagtggcagagagttagagaaagcagcaaagactacaagacttcagagtcacagctggctacaaacccaccccctgcacccagtaccactagctggagacact

SEQ ID NO: 1032156 - DNA, 120 bp, Artificial Sequence
  ENSG00000230631_1 (sequence is synthesized)
ttgtactgggccttcccatcggccaacgtgtggcatgaacgaggctgcatccctcttccatagcacctgcactcgtaggctctgcaaatttcatccccacctttggcccttcaggcctag

SEQ ID NO: 1032157 - DNA, 120 bp, Artificial Sequence
  ENSG00000230631_2 (sequence is synthesized)
ggcaagtcacagctccccagaactgttcatccccaggtgtctcgccatccctagatagcacctgtaagcctgactacacctctgtaaagcgtgcccttcattaaattttcttctgttaaa

SEQ ID NO: 1032158 - DNA, 120 bp, Artificial Sequence
  ENSG00000243795_0 (sequence is synthesized)
tttttagctcaatgccaggtgattcttttgtacattaaatttttagaaacagtaccaagatagaattttgcaagacagcagaggactcccggatcacacatgtgttagaatatctggatt

SEQ ID NO: 1032159 - DNA, 120 bp, Artificial Sequence
  ENSG00000243795_1 (sequence is synthesized)
aaatgaatcagacaccccttttcctggatgatatttatacacctgaattgtgtgttaaggagcctgtgttgcttgcgtagatgctgaagagtggccgagcctgggaagtgatgaagcaga

SEQ ID NO: 1032160 - DNA, 120 bp, Artificial Sequence
  ENSG00000243795_2 (sequence is synthesized)
ggacagaagagccccagtcagggatgcagtggagagctgtgcattaagctggcagttgggaagaagagctgacataaatagttcatggagagtcctggtgggagaaggtgatatctgtct

SEQ ID NO: 1032161 - DNA, 120 bp, Artificial Sequence
  ENSG00000243795_3 (sequence is synthesized)
tactgcagaactagggtaatatgaagaaaaccaacatggaaaaccgtgtctccctccttgtgttgttttggaggcagtccaggaaaggaggacggatctactttctaacttgtggagaga

SEQ ID NO: 1032162 - DNA, 120 bp, Artificial Sequence
  ENSG00000243795_4 (sequence is synthesized)
tcatgggcaagtcaccctggtctaagtttcttcaaggtaaacattacgtgtgccttctctgatctaccggcttcaaccatggaatggtcatccctgtctagagactcataaacaaccatg

SEQ ID NO: 1032163 - DNA, 120 bp, Artificial Sequence
  ENSG00000243795_5 (sequence is synthesized)
gatggagctggcatggcacttggaggctggaggtggtgagaggttgttgtacagagtattcaatttctccagtgaattcatccagtcagactctcatacattggctctcaacagactctt

SEQ ID NO: 1032164 - DNA, 120 bp, Artificial Sequence
  ENSG00000243795_6 (sequence is synthesized)
ttattttcccttttccctgcatagtccttccaacctgaaattcccttgctttctctttgtataactaaatcttaagactcaggttcaccttctcttcctctgtgaagccttcactgaatg

SEQ ID NO: 1032165 - DNA, 120 bp, Artificial Sequence
  ENSG00000243795_7 (sequence is synthesized)
caattcacccataactcccctctcttacaccccgatagctggtagtgcctatgttgtcccacttcttaagtttccacattgtccagtactctttgttaggtttctgggtatttaagagcc

SEQ ID NO: 1032166 - DNA, 120 bp, Artificial Sequence
  ENSG00000243795_8 (sequence is synthesized)
accagctggcattccttgcagatggattccagaagtccctgaaaaagaaattgtagagtcatattggactcatattgaacacagaaggaataaattgttggggttgggtggaggcggtga

SEQ ID NO: 1032167 - DNA, 120 bp, Artificial Sequence
  ENSG00000243795_9 (sequence is synthesized)
ctggactcacatgagaatagacaactgatacactctttcttcatgggaagatatttagcacagagagcatccttcttttccttctctgcttctttctcccagagagagggataaggagac

SEQ ID NO: 1032168 - DNA, 120 bp, Artificial Sequence
  ENSG00000243795_10 (sequence is synthesized)
tgggtgttggcaagcaatgtcttcagcccagagaaagttctcagagatgcaccaaggcctcaggctaaactgcagagtaggcaaaactcttcaccactgttcctcccactccttcagttc

SEQ ID NO: 1032169 - DNA, 120 bp, Artificial Sequence
  ENSG00000243795_11 (sequence is synthesized)
cccagcaccccagatacctccagccctcacactgccaacttcgggcattccttccttggtgtctaactgggcttgatcttcataaagactatatggtgaagttagcttttcctcttccca

SEQ ID NO: 1032170 - DNA, 120 bp, Artificial Sequence
  ENSG00000243795_12 (sequence is synthesized)
ccaggtactgatctcttaaaacgaataagatgtaggtaatcaaattggctttatctttctattaggtattctagactaaaagctccattaaactgatgtaatttagtaagggagatgttg

SEQ ID NO: 1032171 - DNA, 120 bp, Artificial Sequence
  ENSG00000243795_13 (sequence is synthesized)
gggggctaagggctttgtctatctctatcagctgctctcctctccccacaagctagactttggataaaataccagataacagattttgtgacttggcacatggcttcctttctcccagac

SEQ ID NO: 1032172 - DNA, 120 bp, Artificial Sequence
  ENSG00000243795_14 (sequence is synthesized)
ttctttgtgcctccctcttgcaaccagctaaagagtcatccttgtgggaacaactgggaattggcacagagactattggaaatcacaggtgatcctggaaccgagtgtctcccgaatgcc

SEQ ID NO: 1032173 - DNA, 120 bp, Artificial Sequence
  ENSG00000243795_15 (sequence is synthesized)
ttattagtacaagcctcttgggactacttggaaccttccaaagggaatttcactctcttaatttcatactcagtgcaggataaccttctataatgttcccaactggcagcagccagccct

SEQ ID NO: 1032174 - DNA, 120 bp, Artificial Sequence
  ENSG00000243795_16 (sequence is synthesized)
ggatgaagtacttcctgtaaggagaagtttagtcctttccaaggcagcctgttccattgtctgtacttgttgggaatctctttttgtataaaacagaagtttagttacagttttactttt

SEQ ID NO: 1032175 - DNA, 120 bp, Artificial Sequence
  ENSG00000243795_17 (sequence is synthesized)
aaggaatgtggaatacatctcttccccatgacagctcttcaaattattaaacaacagtgtggttctcagtacctctctccctccctctctatcccctcacacacacacacacactctctc

SEQ ID NO: 1032176 - DNA, 120 bp, Artificial Sequence
  ENSG00000243795_18 (sequence is synthesized)
tctctaggttagacatttacatttcctcaatgtttctcatctgacatggctttaagatcttacaacctctgattcccttctttggacattacactttgttaataagaattggtcggctgg

SEQ ID NO: 1032177 - DNA, 76 bp, Artificial Sequence
  ENSG00000243795_19 (sequence is synthesized)
tttggacattacactttgttaataagaattggtcggctgggctcagtggcttacgcctgtaatcacagcacttcga

SEQ ID NO: 1032178 - DNA, 120 bp, Artificial Sequence
  ENSG00000243797_0 (sequence is synthesized)
cttaactacctgggaatgtagcccattaggtctcagccttattttacccagtcactattcaagatggagtcactctagtttgaatgcctctgacagtaatgaagaagtaaactccgagac

SEQ ID NO: 1032179 - DNA, 120 bp, Artificial Sequence
  ENSG00000243797_1 (sequence is synthesized)
agcacatgacttccctctgatgacgtaaggttgctgggaggaccagctcactgacagattaaagttaccaagttgaagtgatgagcttgaatccttctgcagtcacacgtttggcctagc

SEQ ID NO: 1032180 - DNA, 89 bp, Artificial Sequence
  ENSG00000243797_2 (sequence is synthesized)
gaaatagaaccacaaagaaaatatcagaacacattgcacttagtaaagaacaagggggagtcttcatccacctaagatgtaacttgctc

SEQ ID NO: 1032181 - DNA, 120 bp, Artificial Sequence
  ENSG00000243797_3 (sequence is synthesized)
cgtggaactgttcaaatttccatctggtgtcatttttcttctacctgaagaattttcttgaatattccttatagcataggtctgctggcaataaattatcagttttggcttgtctgaaaa

SEQ ID NO: 1032182 - DNA, 120 bp, Artificial Sequence
  ENSG00000243797_4 (sequence is synthesized)
atgagatgtgatggttttatcaaggagagttcccctgcacatactctcttgcctgctgccatgtgagacatgactttgctcttctttcaccatctgccatgactgtgaggcctcctcagc

SEQ ID NO: 1032183 - DNA, 120 bp, Artificial Sequence
  ENSG00000243797_5 (sequence is synthesized)
agattgagcgatttaaagcccaggccaagtgcagcagcttgcttgagtcctggtggaaaaggccttgtatggaagccccagggacaacttccaccactgaggaattttcagtcttctgca

SEQ ID NO: 1032184 - DNA, 120 bp, Artificial Sequence
  ENSG00000243797_6 (sequence is synthesized)
tctgtcaatcaactgaaccatttatagctggtgtcttcttttctcgtgcccataagccctgtcactgttgagctgggcccaccttaagactgatgtcctttgcaatttctgggactactg

SEQ ID NO: 1032185 - DNA, 120 bp, Artificial Sequence
  ENSG00000243797_7 (sequence is synthesized)
caagtgctcctaactgtcctccctgcctccagccttccaacctgcagccactcgagttgccttcctacacgtcagagccgaccatgccattctcctgcttaaaaacccatctcactggct

SEQ ID NO: 1032186 - DNA, 120 bp, Artificial Sequence
  ENSG00000243797_8 (sequence is synthesized)
aaagcagagctctggcaaattgagcttcacccaatcttgtcctgcagagaagccaagtctccactgaatacaaagagacacacccttctgcctggacggtatcagtaggttgaaattttt

SEQ ID NO: 1032187 - DNA, 120 bp, Artificial Sequence
  ENSG00000243797_9 (sequence is synthesized)
cacccttctgcctggacggtatcagtaggttgaaatttttaaaaaatgaaatagaaccacaaagaaaatatcagaacacattgcacttagtaaagatggagtctcgctatgttgcccagg

SEQ ID NO: 1032188 - DNA, 120 bp, Artificial Sequence
  ENSG00000243797_10 (sequence is synthesized)
aaatattcatcagtaagtgctgaccaactcaaaggcttaaaattcaactcattgatgaatcacagaagatccaatgactgactcagatccacccactgttcttcagtccgtcttaccctt

SEQ ID NO: 1032189 - DNA, 120 bp, Artificial Sequence
  ENSG00000243797_11 (sequence is synthesized)
tcttttgatactttgggatagaatttgtattaacagaagttttgaagtcattcagaatgccacatgaccaacgtggggtcaccaattggaacagggaagagatgtgcacaatggccctct

SEQ ID NO: 1032190 - DNA, 120 bp, Artificial Sequence
  ENSG00000243797_12 (sequence is synthesized)
gctgcgtggggaagaatcctggaaaatgacaggacaccttgaacattcaagccctaggtgagcagtcagctgagtgcaaccacatgaaggatcatagctgacacaacctagtgctgagaa

SEQ ID NO: 1032191 - DNA, 120 bp, Artificial Sequence
  ENSG00000243797_13 (sequence is synthesized)
gaactggccctgctgagccctgaccaaattgtagaattatgagcaaacacatggtagctttaagccacaaagtttgagggtgttttcttttgtaataataaacatttgctctactataca

SEQ ID NO: 1032192 - DNA, 120 bp, Artificial Sequence
  ENSG00000248677_0 (sequence is synthesized)
tgtcacgactaggggtagttgctgggccccagcgtcaagcacatacaggtgacaaattccgtctctgagtgagggcccaaagaagctctcagctcaataaacggagatgtgtgtgatgta

SEQ ID NO: 1032193 - DNA, 120 bp, Artificial Sequence
  ENSG00000248677_1 (sequence is synthesized)
cacacatgtgcagggtactagtgggagacagggcaagggaacctagaggtgttgctggactgatcctagaagatgcagagtattagcctaacagaggaaggacattccaggatgagaaat

SEQ ID NO: 1032194 - DNA, 120 bp, Artificial Sequence
  ENSG00000248677_2 (sequence is synthesized)
gtctggagacacagccctgaggacagaaattccccagggctctcagtggccaggggccaagcatggcagcagaaatccaatgtgaggctgttggccaaagccaggcacaggaagggtgtg

SEQ ID NO: 1032195 - DNA, 120 bp, Artificial Sequence
  ENSG00000248677_3 (sequence is synthesized)
ccatggtcagcacttttgggggtaccattaaaagatgtaccccaaagaggggtatggtctaacatgcgttttaagaaaagttcactttgtcttaacagatggaattatgagaggccaaga

SEQ ID NO: 1032196 - DNA, 120 bp, Artificial Sequence
  ENSG00000248677_4 (sequence is synthesized)
ttgaagatggaggtaaaggttggggggatggccttttgagagaaatagaaaatcagtaatgggcacagtattaggtatgcaaaggattatttaggagaaaataaattagggtcagttatt

SEQ ID NO: 1032197 - DNA, 120 bp, Artificial Sequence
  ENSG00000248677_5 (sequence is synthesized)
gtagttgctataagaagcgatctcaaatcagagtggcatcacatgttaagagtttatttcttattcacttcccagtccactgtgggcctgcatggggcctggggtatggggaaggagaac

SEQ ID NO: 1032198 - DNA, 120 bp, Artificial Sequence
  ENSG00000248677_6 (sequence is synthesized)
tctgctccacacagtcattcaggaatcctggctctttcaggcagaagttctgccattcccttgggccctggagttttcagctagttctctgcagagggccagcaaaggggtgaggggaag

SEQ ID NO: 1032199 - DNA, 120 bp, Artificial Sequence
  ENSG00000248677_7 (sequence is synthesized)
aaataggatggagcatcctgcaggaggtttagggtccaggtctggggggtggccagcacatcactcacatgcatattttggtggccagaactcagacatgtggccccatctaacttgagg

SEQ ID NO: 1032200 - DNA, 120 bp, Artificial Sequence
  ENSG00000248677_8 (sequence is synthesized)
gaggctggactatatagtccagctgagagcccagaacaaaaaggaactgggtctggcaaacacagcacactgactttgccacaacatgtttcggaggtaaaatctttgggggctcagtaa

SEQ ID NO: 1032201 - DNA, 120 bp, Artificial Sequence
  ENSG00000248677_9 (sequence is synthesized)
ttgattcaacgtggaagaaggagagaggaaagttcagagagcttccaggtttccaccagggaggtcggaacaggttgccttagatggtgaccgcaggagccactgcctgagcaaggaaga

SEQ ID NO: 1032202 - DNA, 120 bp, Artificial Sequence
  ENSG00000248677_10 (sequence is synthesized)
tggtgcattcattttaaaatcgctgtgtagcttaacattcactgcccgtattaacatgtgtcctgcattccatttattggagaaatgtttctttttctttattttttaaatgaatataat

SEQ ID NO: 1032203 - DNA, 120 bp, Artificial Sequence
  ENSG00000248677_11 (sequence is synthesized)
ttacaatgtaaaaggtcaaataaaatgaaagtgaaacagaaaaatcctcacttttcaatattcctttctcatctaatgaagaccccttcccttctctatttctcccggctccctgcctta

SEQ ID NO: 1032204 - DNA, 120 bp, Artificial Sequence
  ENSG00000248677_12 (sequence is synthesized)
ggcctaaagcaacaaccagaagccttcctgggtgtttacattacagcacaccagactgcaggcaccgccaccccagactctgcctgcagctaaagtcaccaagtttgccgtgccccataa

SEQ ID NO: 1032205 - DNA, 120 bp, Artificial Sequence
  ENSG00000248677_13 (sequence is synthesized)
ctgaggtcattggcagcccagcaccaagcctcactggcatcaagggcagcgggttagtaagcatggctccacacgggtaagcagttctaggaaatgggaagaaacccagaccatccatct

SEQ ID NO: 1032206 - DNA, 120 bp, Artificial Sequence
  ENSG00000248677_14 (sequence is synthesized)
gtaagtttgctggattttctctctcttttaagagtctttcaacagggcatacagcccattctcaaatttagatttctgtttttgttaagaacagggactgtggaacgaatttgcctgact

SEQ ID NO: 1032207 - DNA, 120 bp, Artificial Sequence
  ENSG00000248677_15 (sequence is synthesized)
ttgccatcattctgccatttcctagctatgtggcctcaggcaaactgattaaacttactggcctcagaatggggaaaatttctgtaactcatgcctggaattacgtgaagatgaaaagca

SEQ ID NO: 1032208 - DNA, 120 bp, Artificial Sequence
  ENSG00000248677_16 (sequence is synthesized)
ggcatgtccatgagatgcttacaagagggaccagcgccgtgtacctattctgtgcatcctacccgtccactgttccttctccgtgtttcttgaagaagctggagttttctttcagtcttc

SEQ ID NO: 1032209 - DNA, 120 bp, Artificial Sequence
  ENSG00000248677_17 (sequence is synthesized)
tgcttctcctgttgcttcctctaactgaaggaagaatcagtccatggcttctgctccatgctttctgctcttggttcaggctccaactttcccattaatggaagagaatggctctcctgc

SEQ ID NO: 1032210 - DNA, 120 bp, Artificial Sequence
  ENSG00000248677_18 (sequence is synthesized)
tcccagctgtaatgaactaattaatttttctatctctctaatcattctctattccctgccaaaccctctgggtgtctgttttgttctattgttcaagcctggactttgagggtaggctgg

SEQ ID NO: 1032211 - DNA, 120 bp, Artificial Sequence
  ENSG00000248677_19 (sequence is synthesized)
gggcattgctagtccccacaattgctaatccaggcacttgagtcattatcttctatacatcacacttaacaaccagagggaagtgcaacctcgtgggcctcggaaaggaaaccacccaca

SEQ ID NO: 1032212 - DNA, 120 bp, Artificial Sequence
  ENSG00000248677_20 (sequence is synthesized)
gacttgtgcgccttcttcgcaggccaggctctccttcccccatggtaagaaggtgaagacttggagattggtgagtcaggcaatcaaggtcaaattgacatactctagaagattacatgc

SEQ ID NO: 1032213 - DNA, 120 bp, Artificial Sequence
  ENSG00000248677_21 (sequence is synthesized)
cgtgtggaacagtactgggcagtggacccactgggacaggggctcaggaggctatggcagtcccgcaggagattctggagtaacagacatccccaggacctcagcgtttcataggaacga

SEQ ID NO: 1032214 - DNA, 120 bp, Artificial Sequence
  ENSG00000248677_22 (sequence is synthesized)
catggcacacattggtggtggctgtcctcccaggcagtaccccacatcttgtcttccgtgtttgggcacccaggctggagtagcaacccatctcagtcaatggcaaaggaagaggggctg

SEQ ID NO: 1032215 - DNA, 120 bp, Artificial Sequence
  ENSG00000248677_23 (sequence is synthesized)
tgtgtgagcagcagggaacaactttcagcttataattcgggacttacaggaaagaaaagaaaatgtctactctcctaagagaaatctgatcatctgccggcataaatgttggttgacctt

SEQ ID NO: 1032216 - DNA, 120 bp, Artificial Sequence
  ENSG00000248677_24 (sequence is synthesized)
gactcttctctttggatgcctgaaaacctgaacaaggcagttggggccaggacagcccagaaaggcaggtttgagtgggggccccggcctttacagaaacattctagtgtccatggtgat

SEQ ID NO: 1032217 - DNA, 120 bp, Artificial Sequence
  ENSG00000248677_25 (sequence is synthesized)
cctaccggaaagccagtgtcaagaaccactgagccccaggacgcaggtttccttgcctctatcaagatacaggccccgctacagtactgctgagagcaagaaatagaagcacctgcaaga

SEQ ID NO: 1032218 - DNA, 120 bp, Artificial Sequence
  ENSG00000248677_26 (sequence is synthesized)
cagtgcagccctcacaagctagacatttgatgtcatgggaaaacttgcacccaggcagttgagtgcacttgttcagcagacctgttggggataatgggaagagggagcatatctggctga

SEQ ID NO: 1032219 - DNA, 120 bp, Artificial Sequence
  ENSG00000248677_27 (sequence is synthesized)
ccttgaggacagaaaggaactctcatcaaaattacttgaccaagagaacattccaggtgcccaactctgccaaacataatagcaaatatgtaccaggaaagtaagaaaaacttatgggtt

SEQ ID NO: 1032220 - DNA, 120 bp, Artificial Sequence
  ENSG00000248677_28 (sequence is synthesized)
ctcccatgcactatgccccatgcctctctctcactatggcccagtccacgcatggaggtcccagttggtgctcaggttcgtagcgcctacacgaataaatgcagtgctgtttaccgcctc

SEQ ID NO: 1032221 - DNA, 120 bp, Artificial Sequence
  ENSG00000248676_0 (sequence is synthesized)
ggagatcaagaccatcctggctaacacgggtctgaacgtatgatgccagtgactggaaggaaacacttaagggattcagaggtgacctggatgtgcttagagttctgctggtaaccaggg

SEQ ID NO: 1032222 - DNA, 120 bp, Artificial Sequence
  ENSG00000248676_1 (sequence is synthesized)
ttctgacaagagattacagataaggaaatgctgggtgaaggacatcctttacagtggctctggaagacctgccccacaatgggaatggccgtgtactttgaatcaactgctttgattatg

SEQ ID NO: 1032223 - DNA, 120 bp, Artificial Sequence
  ENSG00000237949_0 (sequence is synthesized)
gcagtgagccatgccaatgtggtttggctggactgtgagtgcttgatgcagtctgataggaggatgggggtggcgcagagaacattgaaatcagaaaggattctgctctgtagagacaaa

SEQ ID NO: 1032224 - DNA, 120 bp, Artificial Sequence
  ENSG00000237949_1 (sequence is synthesized)
ggaaacacagagacatagacatggatctgggaaatacaccttttgctactcgttcagttttagcaaggaggtttcttgcatggctaagcaaaacttaaacttcctctgagaattacagga

SEQ ID NO: 1032225 - DNA, 120 bp, Artificial Sequence
  ENSG00000237949_2 (sequence is synthesized)
attacaggacctgacaaagctatgaagattaaaacctataggaagaaaatctgaaccagaaacagtatggcagaattgggatctgactcacagagggaagaacttataattcttcacaga

SEQ ID NO: 1032226 - DNA, 120 bp, Artificial Sequence
  ENSG00000237949_3 (sequence is synthesized)
cgcctaaatacctgacgtgtgacagcaaatgcctgttcccatggagctgctgcttctgagaaagcttgaaacagacaaagaataaggtagaaatgacctcctcactagagatgaaaagaa

SEQ ID NO: 1032227 - DNA, 120 bp, Artificial Sequence
  ENSG00000237949_4 (sequence is synthesized)
ctttattgttcacccccagaagcaatcgctctctcacaaggcaacacacgcaatagagtgaacagtgattctacagtctgattctggaaaaggcgaccacagtggaaagagtgatccaca

SEQ ID NO: 1032228 - DNA, 120 bp, Artificial Sequence
  ENSG00000237949_5 (sequence is synthesized)
caagtatagggcctcctgattaaaacactaagatttcatctcacgctgtgcctttatactgttgagatactaaagaggacactaaagatcaaagtgctactttacaacattttgaagaaa

SEQ ID NO: 1032229 - DNA, 120 bp, Artificial Sequence
  ENSG00000237949_6 (sequence is synthesized)
acaactgctacctgtgtattagtttgtgcagatgtgttacacagcttagctgtgtctgtaccagtttattagaatcaaagtatttttaaagtacctaaggccaggcacagtggctcacac

SEQ ID NO: 1032230 - DNA, 120 bp, Artificial Sequence
  ENSG00000237949_7 (sequence is synthesized)
ctgtacctccaaacctgggttggctttgagacttgctttggttagtagaatgcagcagatgtgatgctatgcagtcccaggcctacgcctcaaaagctgtgcttgcttctgctccttctc

SEQ ID NO: 1032231 - DNA, 120 bp, Artificial Sequence
  ENSG00000237949_8 (sequence is synthesized)
ttgacctttgcctctattagccctgactagcctgctgaagggacagagaccacaggcacagagctgaggtgtgccagctgaggccatctgaaacatgggagagagagatggctatggtca

SEQ ID NO: 1032232 - DNA, 120 bp, Artificial Sequence
  ENSG00000237949_9 (sequence is synthesized)
agcaagtaaattctaaatcagaatccatacataaagtgtttgcaatgtccagttatatctccatgatattttctttgtggaagttgattgttcttccttacaataaattgcttgaattgt

SEQ ID NO: 1032233 - DNA, 77 bp, Artificial Sequence
  ENSG00000237949_10 (sequence is synthesized)
atgcctgtaatcccagtgactcaagaggctgaggtatgagaatcaatcgtttgaactcagaaggagaggttgcagtg

SEQ ID NO: 1032234 - DNA, 120 bp, Artificial Sequence
  ENSG00000237949_11 (sequence is synthesized)
cacatgcctgtaatcccagtgactcaagaggctgaggtatgagaatcaatcgtttgaactcagaaggagaggttgcagtgagtggagatagcaacactgtactccagcctgggtgacaga

SEQ ID NO: 1032235 - DNA, 120 bp, Artificial Sequence
  ENSG00000237949_12 (sequence is synthesized)
tggagtacttcattttaaatgccgcaactcagcaagaaaaaaaaagtgtctggtatcttcctgaacaactacctggtattatacaggtgagataaattgtgatgccaccaaatgtcctat

SEQ ID NO: 1032236 - DNA, 120 bp, Artificial Sequence
  ENSG00000237949_13 (sequence is synthesized)
atataaacgtatggacatatattcttttctgaaaactgtatttatactgcataatttctatcttatattttcatgaatggtgcctgttcatttccttatatcattaaatacacttcaaga

SEQ ID NO: 1032237 - DNA, 120 bp, Artificial Sequence
  ENSG00000237949_14 (sequence is synthesized)
aaacgtcatttccagtggactcccaacaagagcataaacttttgatgtcagaaaaacagcgcagacatgatctggactctgggatatgtaagatgaccctcgtcttaggaggccacatgg

SEQ ID NO: 1032238 - DNA, 120 bp, Artificial Sequence
  ENSG00000237949_15 (sequence is synthesized)
tatgaggaagctgagctttccctagggaaacaagaaaaagagtggaaacttaacattgtcctatttttgtgctttacatttattatcctacttagtgcttccccaaaacttagaaactgt

SEQ ID NO: 1032239 - DNA, 120 bp, Artificial Sequence
  ENSG00000237949_16 (sequence is synthesized)
tattatctcattttacataggaggaaactgtgacttagagagatgaagataccttatatatagatcttggatttgggaccagaactgccctagtctagaccttagttctttctatttcac

SEQ ID NO: 1032240 - DNA, 120 bp, Artificial Sequence
  ENSG00000237949_17 (sequence is synthesized)
cattctgcttctctgagaggtaaacgacatcttaaaatcaagtcagataaaatgctttatacaactacatgaagaaaaaatttaaattttatgagtggaataggacatttggttactcgg

SEQ ID NO: 1032241 - DNA, 120 bp, Artificial Sequence
  ENSG00000237949_18 (sequence is synthesized)
aatcagggagataatgcaatgttcttatgcttcatgtttaattccctgaagcttaaaaggggaatcttgaggacaagtagggcagtctctctttccttaggtcgggaatcagggagaaat

SEQ ID NO: 1032242 - DNA, 120 bp, Artificial Sequence
  ENSG00000237949_19 (sequence is synthesized)
gaaaaaggatagagtgggtgtggagataatggtagctcagtctaggagaaatggagcccgctcatctctacatgaactaaatactggcagagattgagaatttttgtatatcctgcatca

SEQ ID NO: 1032243 - DNA, 120 bp, Artificial Sequence
  ENSG00000237949_20 (sequence is synthesized)
cttttaaaaagtagatcacttctaacaatataggattgaagacaataagagaggcctaggggtcttttaatctatattagctaaatgtctttgataacatttaataaacttggcaatgaa

SEQ ID NO: 1032244 - DNA, 120 bp, Artificial Sequence
  ENSG00000237949_21 (sequence is synthesized)
ttttttgctttgtttctcctaagttttgtcttgtttatgacattaataattttctaaaatctctgatttcttttctgtagaatgcttgaaaaatgacagctcaatatgcacattacccca

SEQ ID NO: 1032245 - DNA, 120 bp, Artificial Sequence
  ENSG00000237949_22 (sequence is synthesized)
tccctaaccaccttcgtcactactttgaatactcttctctcacccgacactgcagttaaatatgattggaatccttgtttctatagtaaaccagtctactttattttatggatgattaat

SEQ ID NO: 1032246 - DNA, 120 bp, Artificial Sequence
  ENSG00000237949_23 (sequence is synthesized)
ttaaaaaattaaactctgggcttccttcaggttttctaaggtttttcccactggcttataatggaaaattcaaaaagggcctctcaggtaacagagacaagtttgtagatttaaaaaaaa

SEQ ID NO: 1032247 - DNA, 120 bp, Artificial Sequence
  ENSG00000237949_24 (sequence is synthesized)
attcctttagaaaagacaaggtttctgtgacctcctttttgtgagacaatgaaagtgacaagacaagatcttaaataataaagttaaagccatcagtaaaggcaaaagtcaaagatgtga

SEQ ID NO: 1032248 - DNA, 120 bp, Artificial Sequence
  ENSG00000237949_25 (sequence is synthesized)
aacatctgtgagaacacacgtaaaagctagtggggatatctcgaggaacagagctcagttttgcatcaaagttcaggccaactgaacaccaaggcttgatggcagccagagtcttgctgt

SEQ ID NO: 1032249 - DNA, 120 bp, Artificial Sequence
  ENSG00000237949_26 (sequence is synthesized)
gtagagtctggttgctttctgaatggacacggattcttgctttgaagattacttgttaactcaccaaacacacccagcccagctacctgcatcattcctttgtcaaggttcccacctacc

SEQ ID NO: 1032250 - DNA, 120 bp, Artificial Sequence
  ENSG00000237949_27 (sequence is synthesized)
tggcccagctgcaggtgaaggccagattctcagggtattttacccatccccacttcttctcttttaaaaatcactattctgaatttacagttggccaatgacctctaactggattaataa

SEQ ID NO: 1032251 - DNA, 120 bp, Artificial Sequence
  ENSG00000237949_28 (sequence is synthesized)
aatgtctaatttagtttggaacattgagcttctgtttcactttggcttgttcaggtttttattaaatcagaataaattttcatagtccccatggaaatgccagccttctccattaagttg

SEQ ID NO: 1032252 - DNA, 80 bp, Artificial Sequence
  ENSG00000237949_29 (sequence is synthesized)
catagtccccatggaaatgccagccttctccattaagttggcaaaacatttccatttccaaagaagtattaaaacctgtt

SEQ ID NO: 1032253 - DNA, 120 bp, Artificial Sequence
  ENSG00000237949_30 (sequence is synthesized)
tggcgacagaacgagactctgtctcaaaccaccaccccaccccacccccccaaaaaaaacccctgtttccagagaaggtcctgtattggtcaggactggtcaaataaacatgggtcataa

SEQ ID NO: 1032254 - DNA, 120 bp, Artificial Sequence
  ENSG00000237949_31 (sequence is synthesized)
tggtcaaataaacatgggtcataataatcatgacgtcctgtcctggtttttatcttttgggtatggtttgtcttttgctacttggtgtttctacccaatctatttcatatctgtttcccg

SEQ ID NO: 1032255 - DNA, 120 bp, Artificial Sequence
  ENSG00000237949_32 (sequence is synthesized)
cgtttctcttgtatatttcagcccaaacaccaaagctgtgatccatttttagtttccaaggtcacattggcacagaaatctttctgcaggcatcccttgaggaaaacaccaaactacaac

SEQ ID NO: 1032256 - DNA, 120 bp, Artificial Sequence
  ENSG00000237949_33 (sequence is synthesized)
tttctgcccttaagctaaaggctgtataagcctctagcttcttgccttctgttcagctggggatttttctcttccttttttattcactctttttccatttccttctcttggcaccaggta

SEQ ID NO: 1032257 - DNA, 120 bp, Artificial Sequence
  ENSG00000237949_34 (sequence is synthesized)
ccccagattcctttctcttgctctctcctgctttctttcatttgaccctgaaagccaaaatgctgataagctcccttcctttgcctcattaaaaaattgccataaaatttatagctgact

SEQ ID NO: 1032258 - DNA, 120 bp, Artificial Sequence
  ENSG00000237949_35 (sequence is synthesized)
taggccaaccatcgctgatcttcttgatttagttactgccaagaagtgttttatgatcatccactgacttatttacaacaaacccaatgaagtccttggtattaggagcctgtatagata

SEQ ID NO: 1032259 - DNA, 120 bp, Artificial Sequence
  ENSG00000237949_36 (sequence is synthesized)
ttacttgtttggaaaatagggtgggtacttaggtacttgaatttctctgtgtaggctggggtggtttgggttgttttgcttatgcatttcatatggaaaggcataatcccaagccttcat

SEQ ID NO: 1032260 - DNA, 120 bp, Artificial Sequence
  ENSG00000237949_37 (sequence is synthesized)
atgtaataacatggactcattgtgctgctgtgtggcaaatgtatacagccctgagacagcacaggaaattttccaatacttctctaagcattagtttcaggaggccatttgtgaggctgg

SEQ ID NO: 1032261 - DNA, 120 bp, Artificial Sequence
  ENSG00000237949_38 (sequence is synthesized)
taagagaaaacaaattgtgttggtcataataaaattgtccgttggtggaaactgtttgaatacctcaacgtaatgaggttaattgattatacaaaagtgatttagaggctgatgtaataa

SEQ ID NO: 1032262 - DNA, 120 bp, Artificial Sequence
  ENSG00000237949_39 (sequence is synthesized)
ccacctgttttgagtctgctatttgaaagacgggtcagggcaggaataaattaaatgtttgcaacatttgaattgtgttgattgttcagttgtgtatttagaatatgtgaaagggatctg

SEQ ID NO: 1032263 - DNA, 120 bp, Artificial Sequence
  ENSG00000237949_40 (sequence is synthesized)
ttccccctgtaatccctgatgctgttgttggtcacaacataaatttaaggtgttcaatagtaccaaagctctttaacgggtgaggctttgtcctgagtaaaacagtgtaattacctggaa

SEQ ID NO: 1032264 - DNA, 120 bp, Artificial Sequence
  ENSG00000237949_41 (sequence is synthesized)
cagatccataaagaagagttgtaatgcatgtttccaaagagaaatcctgactgtattttttggaaagtgaaccctaaaacaatggtgccaggaattactcgaacacttcattgtcataga

SEQ ID NO: 1032265 - DNA, 120 bp, Artificial Sequence
  ENSG00000237949_42 (sequence is synthesized)
agaaatctgatgtctgaggaacagttgtaataatctgccttctctgtttgcttcccccaacctggctaaggattgacttagggtctggggtggtggcaataaagattaagtgtctgcaac

SEQ ID NO: 1032266 - DNA, 120 bp, Artificial Sequence
  ENSG00000237949_43 (sequence is synthesized)
agaggaagggaagattggaaactggttggagtaagaactgagcctgtggactatgagaatgtcagagcagaaagggctttagagtgaatctggataccctcatttatatagatgtggcaa

SEQ ID NO: 1032267 - DNA, 120 bp, Artificial Sequence
  ENSG00000237949_44 (sequence is synthesized)
tggaaggagaccccaggtgattttcttagggtcacacggtgataccttgttgtgatgaatatatacagctagtagaacttttgattaatgtgagtgcggcagatttattgcaacaggggc

SEQ ID NO: 1032268 - DNA, 120 bp, Artificial Sequence
  ENSG00000237949_45 (sequence is synthesized)
tgaccaagatcaacagaacccaccagctaactgtgaatgtgagaacagtaagaatggctgctgttttaagcctcttaagttttggaggtggttgtttgcaacattcttgtggcaacactt

SEQ ID NO: 1032269 - DNA, 120 bp, Artificial Sequence
  ENSG00000237949_46 (sequence is synthesized)
ggctagtcagtggtgctataatgagaggttggtcactgagaggagaaagagggagcaggataatccctggcatggtaggtcttgcagtttccatcatggagtatggtggccaatttaaga

SEQ ID NO: 1032270 - DNA, 120 bp, Artificial Sequence
  ENSG00000237949_47 (sequence is synthesized)
aagaaactgtcctggaaacagatcccagaaaaatctcctcactgtgattgtggcattgtgctgtctaaatgccagacaatcctgaagggtttgtatcatcacttcctaaattagaaatga

SEQ ID NO: 1032271 - DNA, 120 bp, Artificial Sequence
  ENSG00000237949_48 (sequence is synthesized)
tcctagggctcttccaattctgattttatagaaaaggaagcagaggctgcgcagtgttaaggcaagactagctgcttaagttaatgggcccaacacaaaacaaaactgtggagtcccttg

SEQ ID NO: 1032272 - DNA, 120 bp, Artificial Sequence
  ENSG00000237949_49 (sequence is synthesized)
ggccttaaactaagcacaaagcccttttaagtatgggactctgtgagaccgcacagatcttatgcccatgaagctgacccagatttaggcaatttgtccaaggacatcacttcggaagat

SEQ ID NO: 1032273 - DNA, 120 bp, Artificial Sequence
  ENSG00000237949_50 (sequence is synthesized)
tcatccatcaggctattctttacccaaaaatgtaacttggtatatttgttaactgctagttcaagaagcagggcaggaacctaaggcctctagttcccactccagtgattcttctttttt

SEQ ID NO: 1032274 - DNA, 120 bp, Artificial Sequence
  ENSG00000237949_51 (sequence is synthesized)
atggtttggccttgtccccacccaaatctcatattgaattgaattatggggagaggtctttcctgcgctgttcttatgatagtgaatgagtttcatgagatctgatggttttaaaaatgg

SEQ ID NO: 1032275 - DNA, 80 bp, Artificial Sequence
  ENSG00000237949_52 (sequence is synthesized)
acaagctctctttttttaccttccaccatgattttgaggcctccccagtcctgtggaactgtaagttcaataaacctctt

SEQ ID NO: 1032276 - DNA, 120 bp, Artificial Sequence
  ENSG00000248673_0 (sequence is synthesized)
agtttattatgtttggggttggaatcaccaagagaccaattaacaccttatttttaggattagccattctggtatttgcagatagtttcttaaacaggactgtttggagttcacactgta

SEQ ID NO: 1032277 - DNA, 120 bp, Artificial Sequence
  ENSG00000248673_1 (sequence is synthesized)
ggagtaagtgaagtgttgataaaagagattccagaacaaataaagatttctacagtaaaagctggggaggtgtgtagggctccagtctttgggttcacagcttggctctacattcattgc

SEQ ID NO: 1032278 - DNA, 120 bp, Artificial Sequence
  ENSG00000248673_2 (sequence is synthesized)
aaataaaaccccaaggtgaacaagattgaaagtgaaggcagcgctctaaggaggaagccagctggcttgaatggtgatgtaaacagccttggagctttaaccaaacttgagtaagaactc

SEQ ID NO: 1032279 - DNA, 120 bp, Artificial Sequence
  ENSG00000248673_3 (sequence is synthesized)
cctgacttggaaacactcaagtttcccacacatgactggatggccctggccacactgggaacggaatgggggcctcccattggaactcagggtggagggggaagctcgaccagctattgt

SEQ ID NO: 1032280 - DNA, 120 bp, Artificial Sequence
  ENSG00000248673_4 (sequence is synthesized)
agagtgctcgcagcacttgggagttggcagatgaactcttttagtggttgttttttaaaaattgctttgagtggtctggggaatacattaatttaatatcctcttcatattcagaatatg

SEQ ID NO: 1032281 - DNA, 120 bp, Artificial Sequence
  ENSG00000248673_5 (sequence is synthesized)
taacaccattgtgagaaataaaaccccaaggtgaacaagattgaaagtgaaggcagcgctctaaggaggaagccagctggcttgaatggtgatgtaaacagccttggaggttgtaaaatt

SEQ ID NO: 1032282 - DNA, 120 bp, Artificial Sequence
  ENSG00000248673_6 (sequence is synthesized)
tgtggggcaaaggcggtatggagtaatgacaggaaaaagaatgctgtccatttttactgtgaaaaaactccctatttcagaaagatatacattagggttgtgaggttgtaggctgaatga

SEQ ID NO: 1032283 - DNA, 120 bp, Artificial Sequence
  ENSG00000248673_7 (sequence is synthesized)
agattggaagaaacttgttgattattattaaatgcctctcaatatttcagaagacattcccccaccctgaaagtataatgtgatagaaagaactatggagttaggcaacctgtgatttga

SEQ ID NO: 1032284 - DNA, 120 bp, Artificial Sequence
  ENSG00000248673_8 (sequence is synthesized)
gttgtgcgaaaacgggaaagttatttgtttagtcaaagcctctgtttccacttccatcaagtgagataataatatgtacttcactaggttattgggaggatgaaatgactaccagtactg

SEQ ID NO: 1032285 - DNA, 120 bp, Artificial Sequence
  ENSG00000248673_9 (sequence is synthesized)
cagatacatttctgatacccacagcttcctgagcaaggtatagattagctatctctttggtttccctgaggtagcacaacagaaccaagaaagttcttataaaatgtgttgttctcaatt

SEQ ID NO: 1032286 - DNA, 120 bp, Artificial Sequence
  ENSG00000248673_10 (sequence is synthesized)
ttgcacttgcttcgaaagaactagaaaccaaggcatggtgccatctcaagaagacagaagcagaagcctgccagaaactggcttggttgaaactctggttcaaagcatcaggaagctagc

SEQ ID NO: 1032287 - DNA, 120 bp, Artificial Sequence
  ENSG00000248673_11 (sequence is synthesized)
aaaaaagataaaatgtacaacactgaaaaatgactaacaaccaaattccagcattttgaagaaactgacaataattctaagccagatggagagaaccgagaataaccggtgtagctttcc

SEQ ID NO: 1032288 - DNA, 120 bp, Artificial Sequence
  ENSG00000248673_12 (sequence is synthesized)
tcatatgtcatacctctactttgcctcccccatttgaagacctggtgcctatatcaaacagaaaactgtccagttctgtgaggagagcagagtgcctctctatacgtttctcccacagcc

SEQ ID NO: 1032289 - DNA, 120 bp, Artificial Sequence
  ENSG00000248673_13 (sequence is synthesized)
acctgccctctgcctcttgtccccactcaggctgccaccctgtcatatttaggccaagaccccaaatctcagaaaaaaggtgatcaggaagtagtggtgtgctgacaatggtccaaggcc

SEQ ID NO: 1032290 - DNA, 120 bp, Artificial Sequence
  ENSG00000248673_14 (sequence is synthesized)
tgagtggggtggatacacccttgaataatcccttccccttgagaatgagtggaaattgtgactggcttctagccagttgagtaccgtgaaggtgatggatgtcactcctgtgattatgtt

SEQ ID NO: 1032291 - DNA, 120 bp, Artificial Sequence
  ENSG00000248673_15 (sequence is synthesized)
acattatctaagaattgtcctagtgggccctaacaagagattcttttgctggccttgaagaagtaggctgacatatcatgagtggacctgggagagggccacatgcaaggaacagagggg

SEQ ID NO: 1032292 - DNA, 120 bp, Artificial Sequence
  ENSG00000248673_16 (sequence is synthesized)
gcctgtagatgccgagagcagccctggctgacagccagcaagaaagcagggacctgcattctacagctgcaagaaactgaattctgccagcaaccccctgagctttgaagaggatctcaa

SEQ ID NO: 1032293 - DNA, 120 bp, Artificial Sequence
  ENSG00000248673_17 (sequence is synthesized)
gacccagaaagaaatgcagccagccaacatcttgatagcacccttgtgagactccgagcagaggaccaagctaggccatcttcagactcctgccccgcagaaactgtgagataataaatg

SEQ ID NO: 1032294 - DNA, 120 bp, Artificial Sequence
  ENSG00000248673_18 (sequence is synthesized)
tgtaaacccttgggaatggacaatgatgaaatgaccccaaacatgattattccttgctacttcctgaaatctgttcctcaaatccccaaactaacagttccctgaatttacagttcacaa

SEQ ID NO: 1032295 - DNA, 120 bp, Artificial Sequence
  ENSG00000248673_19 (sequence is synthesized)
aagtgttcaagggttttcagacccttcgcctggctccacagaaagtgcggaagggagggattttaaagatgtgcacaagtgggtcagccaaggttcacttcttgagatcttccagatatt

SEQ ID NO: 1032296 - DNA, 120 bp, Artificial Sequence
  ENSG00000248673_20 (sequence is synthesized)
tattaggagttcatgggaggggatgttcatttctgtagacacaggatggatttttcaaaatgtaaagtgcaggtacttttaagtctatggctagactgagataagcatgtctgctgatga

SEQ ID NO: 1032297 - DNA, 120 bp, Artificial Sequence
  ENSG00000248673_21 (sequence is synthesized)
tggaattgttcagatgtagcctgtctagtttactcagaggccaccaagcaaagccagaggagcagtgggaggcatgccaggaagttgacattgaagcgactttcccaggctccagaggca

SEQ ID NO: 1032298 - DNA, 120 bp, Artificial Sequence
  ENSG00000248673_22 (sequence is synthesized)
ccattctagggtagcatgtgaaatatgtgcaccttgactccattgtgcttgtttcctaggctttaatggggcttataaacactcagtctgcttataaacactcagttggataattagcaa

SEQ ID NO: 1032299 - DNA, 120 bp, Artificial Sequence
  ENSG00000248673_23 (sequence is synthesized)
atgtttatttgctattgtgtgcataaagcactatgctagacactggggccattcagggcaacctggctagggtggtgttttctatgtttgcccttctaccacctatcctgatacatatgt

SEQ ID NO: 1032300 - DNA, 120 bp, Artificial Sequence
  ENSG00000248673_24 (sequence is synthesized)
ctctctatatatagcaagaaaaagcaaatatgtgctcttttctttccagaatctcttgtttgcggcccttttcctaaatcagtcagaggtatatgcattctttggagaaaaatttaaatt

SEQ ID NO: 1032301 - DNA, 120 bp, Artificial Sequence
  ENSG00000248673_25 (sequence is synthesized)
gttagaaaaaaagagacaaaaatttatttctctttaaatttcccaaatcagctcttttgccctcttattaaattgaggtatgacatgcctacagtgagtgcactaatctcaagcacatga

SEQ ID NO: 1032302 - DNA, 120 bp, Artificial Sequence
  ENSG00000248673_26 (sequence is synthesized)
ttcagtggatttttgcaaatgtatatacccatacaaccaccacccagatcaagatataaacattcccacaaactccagaaggctcacttggccccttcccagtcaacacccagccactct

SEQ ID NO: 1032303 - DNA, 120 bp, Artificial Sequence
  ENSG00000248673_27 (sequence is synthesized)
tgagagtaacttctatcctaacatctatcactgcagagtaacttgtctgttcctgaacttcatataaatacaatcttacaggatgtactttttttttattggtttctttcattcgacgta

SEQ ID NO: 1032304 - DNA, 120 bp, Artificial Sequence
  ENSG00000248673_28 (sequence is synthesized)
atgtcttttagatttatctgtttggagcagtagttcatgtttttattgatgtgtagtatttcattgtataaatgtcactatttatccattgtactgttgatggatatttaagttatttcc

SEQ ID NO: 1032305 - DNA, 120 bp, Artificial Sequence
  ENSG00000248671_0 (sequence is synthesized)
gtctggcctgggtgggactgagcccattcggggggactccggggttctggtgtaggtagatccggggcaggctcaggaccaagtccctctccttccaccaaggagcgcccagaggccggc

SEQ ID NO: 1032306 - DNA, 120 bp, Artificial Sequence
  ENSG00000248671_1 (sequence is synthesized)
gggagctccaggttcacctcctcctcctccaggaaatcccacttccaactggatgtctggatgaactactgaaagctgctgagtgtcctgcagcaggcttccgaggtgatcgatcgggca

SEQ ID NO: 1032307 - DNA, 88 bp, Artificial Sequence
  ENSG00000248671_2 (sequence is synthesized)
gagtcagtcagagagccttgggcttctacaggtgtatccagcagctccagagagacagcgaccagggagaaggggccatgatgacggt

SEQ ID NO: 1032308 - DNA, 120 bp, Artificial Sequence
  ENSG00000248671_3 (sequence is synthesized)
caggtgtatccagcagctccagagagacagcgaccagggagaaggggccatgatgacggtggtggttttgtcaaaacgaaaagggggatatgtaggggaaagaaagagagatcagactgt

SEQ ID NO: 1032309 - DNA, 90 bp, Artificial Sequence
  ENSG00000248671_4 (sequence is synthesized)
tttaatctgtagctttgccccagccacttttccccaaccactttgacccaacctggagctcaaaaaacatgtgttgtatgaaatcaaggt

SEQ ID NO: 1032310 - DNA, 65 bp, Artificial Sequence
  ENSG00000248671_5 (sequence is synthesized)
tcaataaaccaggggcacaatacactatggaaagctgcagggagccctgcccttgaaagctggag

SEQ ID NO: 1032311 - DNA, 89 bp, Artificial Sequence
  ENSG00000248671_6 (sequence is synthesized)
gacacccataaagggtctgtgctgaggtggactagtcaaagcggaaagcctcttgcagttgagagagaggaaggccactgtctcctgcc

SEQ ID NO: 1032312 - DNA, 120 bp, Artificial Sequence
  ENSG00000248671_7 (sequence is synthesized)
gaggacctgatttttcttcacccatagttagggaggcgcaatcgccctggctttggggctggggcctccggggaggttccggtaggggcgttggagaggccgctctttttgcaaggcccg

SEQ ID NO: 1032313 - DNA, 120 bp, Artificial Sequence
  ENSG00000248671_8 (sequence is synthesized)
agacggcgggccctgcgcaggccgccctattccgcgccctcagggcgtcagtatccgcctgaggccggataccccagctgggcccggatgccgtcgatgggcccggagcatcctcggcgc

SEQ ID NO: 1032314 - DNA, 120 bp, Artificial Sequence
  ENSG00000248671_9 (sequence is synthesized)
tccctcactctgttactgtgaagaggaagcctgaggtgtagcaggcccaggccccagaagtatggaaaaaaatgaggtagggagggaggggacctcaggagaagactgaggtctacagaa

SEQ ID NO: 1032315 - DNA, 120 bp, Artificial Sequence
  ENSG00000248671_10 (sequence is synthesized)
tcccagggtcaaggggatggtgcagtgttctggcactatccttgatgttccaagaggggtgagaatccatctcctgagtaaaaacttcacatggggtgaggaggggagaagagaacagaa

SEQ ID NO: 1032316 - DNA, 120 bp, Artificial Sequence
  ENSG00000248671_11 (sequence is synthesized)
aggaagcagggaaggccaagacagccaccagccttacagcaattttaaccagaaatggacacagaccctggaccccatcacaggagtgcaggcctaggactgtctccaggtgatgcatag

SEQ ID NO: 1032317 - DNA, 120 bp, Artificial Sequence
  ENSG00000248671_12 (sequence is synthesized)
ctcccttgtcaggttagtgggttcagggattgtgacgtctgcaggggtgtggaaggctgggcaatgggagcagcttactgggctggaccagaaatactgaacttcttttccatcagtgaa

SEQ ID NO: 1032318 - DNA, 120 bp, Artificial Sequence
  ENSG00000248671_13 (sequence is synthesized)
atccacttctgggtcagaaaaaactgtgagttctagaggggcagggcctaggaggaggtcaggtcctgagccttcctggtttgaccccctcccaccccctgtgtttctgggtctgtcctc

SEQ ID NO: 1032319 - DNA, 120 bp, Artificial Sequence
  ENSG00000248671_14 (sequence is synthesized)
acttccacccagcggatcctgagtctcttcctttgagtccctgtgagtgtgttgtgtgcagtggggccgggctgcttcatccactgcacgttaaatgtttccaacactttccggccaaag

SEQ ID NO: 1032320 - DNA, 120 bp, Artificial Sequence
  ENSG00000248671_15 (sequence is synthesized)
cttagagttgtcagaccaccgactttgaatgttgacctggttccttgtggaacagagtaatagctattgaagtttaaagtcactttcctgcgtggatggtgaagaggcaggctgttcagg

SEQ ID NO: 1032321 - DNA, 120 bp, Artificial Sequence
  ENSG00000248671_16 (sequence is synthesized)
cataactgccctcaggcctggagggctgtggaggtcaccgttggcggtgggtggatctggaacctctgtggctctagactttcaactatttcattttttcttttgtagtttttgtttgtt

SEQ ID NO: 1032322 - DNA, 120 bp, Artificial Sequence
  ENSG00000248671_17 (sequence is synthesized)
gatgccaaactcagcctgtggggaacatggattttcacaacagcaaccacagagcgtggtttccatttctattccctgttcatgtgggaggcagagaaggaaatcaggtgctcagttcca

SEQ ID NO: 1032323 - DNA, 120 bp, Artificial Sequence
  ENSG00000248671_18 (sequence is synthesized)
gggacatcacaggactaggacatgtgcagtgagggtggaaggcagaggcattgctttaggagaataaaattactgcatgcacacacatatgtatgtatatggatgtatgtacacaaacat

SEQ ID NO: 1032324 - DNA, 120 bp, Artificial Sequence
  ENSG00000248671_19 (sequence is synthesized)
gcatatttatagattctgttctctctctctatatacaattttctttatttcacacttgatatgatttctaaatttaaatacctttgagacaaacgtgaattgtgatgggatttaaaaatg

SEQ ID NO: 1032325 - DNA, 120 bp, Artificial Sequence
  ENSG00000248671_20 (sequence is synthesized)
tcagtgaaaaatggaattaacaataaaaatataaatataaactttatttctcaatttaagctctactgaggtccagacactccattaagcgatgatcccagccattcattccattgctaa

SEQ ID NO: 1032326 - DNA, 120 bp, Artificial Sequence
  ENSG00000248671_21 (sequence is synthesized)
agaactgagggtaatgggaatttaaccgtgtcaatgcagtcttctattattaactaaagaaaaatgggtgccctttacagttattttaagattagggaaaaaatgtcagaagaaaccaaa

SEQ ID NO: 1032327 - DNA, 120 bp, Artificial Sequence
  ENSG00000248671_22 (sequence is synthesized)
tcaggactgtaatgttgatgcctaataatttcccatgaaaactcttgcaaaattacccatgtttgatgagaggaaggaacagaagtgttgttgtggtgcagagggactctctagtgaagc

SEQ ID NO: 1032328 - DNA, 120 bp, Artificial Sequence
  ENSG00000248671_23 (sequence is synthesized)
tttacagggcgcttttctgcaaaagtatttgctaattttctctaagaactctcctagtaagcagatgttatggtgctttgatcttacagaaagtcaaccagcaaaatgccttgagcatcc

SEQ ID NO: 1032329 - DNA, 120 bp, Artificial Sequence
  ENSG00000248671_24 (sequence is synthesized)
ccaaaacctccatggcttttgcttttgagaagtttgcttttgctttgactggaccacttctacctcttggtagccattgcttgaattgtgctttgtcttcaggatcttattgataaagcc

SEQ ID NO: 1032330 - DNA, 120 bp, Artificial Sequence
  ENSG00000248671_25 (sequence is synthesized)
agtttcactccctgttataattcttcaaaataatgcttcaggatctgattccgcttgctcaaaatagttactaatagctctgcttttgtccactgctgatctaggcacaagggtatttgg

SEQ ID NO: 1032331 - DNA, 120 bp, Artificial Sequence
  ENSG00000248671_26 (sequence is synthesized)
gactcatcaaatgtaaaatttctcaactttcacgttatagtcagtattgtgtaagctgaaccaattgagatgcctgtggtgttggctatagtatctcttgctaattgtcaatcctcctca

SEQ ID NO: 1032332 - DNA, 120 bp, Artificial Sequence
  ENSG00000248671_27 (sequence is synthesized)
attagggcatagaaacgattttttttctcaaaaattggtatggatgtccctcctctgttgacttcatcttcaacattgtattatctcttcttagaataaggtatccatttgtaaatgact

SEQ ID NO: 1032333 - DNA, 120 bp, Artificial Sequence
  ENSG00000248671_28 (sequence is synthesized)
gattcttcaggttatttttcccgtacacttttcataaagaataatttatttcaccattttttgtaccccagcttcaccgtaaatttgatgtttgttcttgcttcaggtttgacagaattc

SEQ ID NO: 1032334 - DNA, 120 bp, Artificial Sequence
  ENSG00000248671_29 (sequence is synthesized)
cttgcttcaggtttgacagaattcatgttgctgccatagaggggctcttttcaaactgatgtcttaaatcttgttcagatatgttaaaacagggccaggcacggtggcttacgcctgtaa

SEQ ID NO: 1032335 - DNA, 120 bp, Artificial Sequence
  ENSG00000248671_30 (sequence is synthesized)
attacctgctgcaatgacaacatctggctggatggcagagagctgacagaccgtcgcgacgtcccagtccagctgggccactgtcaccctggggctgtctaagttggcagtgatatctgc

SEQ ID NO: 1032336 - DNA, 120 bp, Artificial Sequence
  ENSG00000248671_31 (sequence is synthesized)
acctaatgagaggccattgagaaggacattccctcagagctgctagaggacccagctgtgacagtccctgaagatgtatgcccgggggtggcacatcttgcagatggccaggcctgtgag

SEQ ID NO: 1032337 - DNA, 120 bp, Artificial Sequence
  ENSG00000248671_32 (sequence is synthesized)
gccagcaccactgccaagctctaggacagtcctggtgggaggaaagggggtcatgtctgcgactgcaccagggtaagcctgcctcggtgccctgccctgtgccctgaggtcacctatcag

SEQ ID NO: 1032338 - DNA, 120 bp, Artificial Sequence
  ENSG00000248671_33 (sequence is synthesized)
tgaaggctgctgggttctcgatggcccattctgcaaggtagagggcggcatcccatgtgaccaggactgtgatgccgtgggagatgatggctgtgctcttggagagtgtgactgagcctc

SEQ ID NO: 1032339 - DNA, 120 bp, Artificial Sequence
  ENSG00000248671_34 (sequence is synthesized)
ccgagggcagcaccaagagaaggcgagagagtcagtccagcgatcagaaggcaagtggcttagaagacaagcagccatccaccacatggctgaataaaccatgacaggacaaatcgccac

SEQ ID NO: 1032340 - DNA, 120 bp, Artificial Sequence
  ENSG00000248671_35 (sequence is synthesized)
tcagcaatgagaagcagctaactgttgacatgccaacagcttgcacaggcctcaagggtgtcacgtggcatgaaagacactcatctcaggccacacaggattccattcattgaacattcc

SEQ ID NO: 1032341 - DNA, 120 bp, Artificial Sequence
  ENSG00000248671_36 (sequence is synthesized)
ttcctgagacaatggaattctggcgatggagcacaggtcagttgtggccaggggccgggtgtggctatgaaggggtggctgccttgtgatgattcaatatgctatgtttttcctttgtgg

SEQ ID NO: 1032342 - DNA, 67 bp, Artificial Sequence
  ENSG00000248671_37 (sequence is synthesized)
tgtgatgattttttttgagctctgttccccaggctggagtcagtggcacaatcttggctcactgcaa

SEQ ID NO: 1032343 - DNA, 120 bp, Artificial Sequence
  ENSG00000248671_38 (sequence is synthesized)
gcccaagtaggtgcgactacaggcatgtgtcaccatgtctggctaatttttctacttctttttgacagtttcactctcgttgcccaggtgggagtgcaatagcgcgatcttggctcacta

SEQ ID NO: 1032344 - DNA, 120 bp, Artificial Sequence
  ENSG00000248671_39 (sequence is synthesized)
tacaggtgtgagccaccacacccggacctgtcaactattctttgaggactgggcaccaggtccttgtgaagcaggtagagtgtgtcacctattggacaaatgcctcacaaccctataaga

SEQ ID NO: 1032345 - DNA, 76 bp, Artificial Sequence
  ENSG00000248671_40 (sequence is synthesized)
tttgaggactgggcaccaggtccttgtgaagcaggtagagtgtgtcacctattggacaaatgcctcacaaccctat

SEQ ID NO: 1032346 - DNA, 85 bp, Artificial Sequence
  ENSG00000248671_41 (sequence is synthesized)
ttttcactttgtctgtgcgtccttctcataccagcaaatagctccggtggccctgggtggactccttggccatcagggtctccac

SEQ ID NO: 1032347 - DNA, 120 bp, Artificial Sequence
  ENSG00000248671_42 (sequence is synthesized)
ggtggccctgggtggactccttggccatcagggtctccaccagcacctcgtacagctcatccaaaggctctgtgtggacagcctcgtgctgggggcagacagagtgagagcttgtttgct

SEQ ID NO: 1032348 - DNA, 120 bp, Artificial Sequence
  ENSG00000248671_43 (sequence is synthesized)
ttcgttctaatctgtaaaaatggccagatgattttcaccaagtttggaggggagatatgggatagaatggtgtaataccggccagctgccatataaaatattcacttcgttgggcgtggt

SEQ ID NO: 1032349 - DNA, 89 bp, Artificial Sequence
  ENSG00000248671_44 (sequence is synthesized)
gacagcctgggcaagagaccttgtctctaaaaaaaaaattcacttggtagggaaacctggatgggagggccttcaaagagaggtgttga

SEQ ID NO: 1032350 - DNA, 120 bp, Artificial Sequence
  ENSG00000248671_45 (sequence is synthesized)
gggaaacctggatgggagggccttcaaagagaggtgttgaaagtgtagggttgggtgtagtctagggcaggagacaaggattctgtgagagctgccacatgaccatgacagagaggagga

SEQ ID NO: 1032351 - DNA, 70 bp, Artificial Sequence
  ENSG00000248671_46 (sequence is synthesized)
gctggccccatcctaagattcacagggcagcagcagggtacactgggtgactgctgccctctcctggtgg

SEQ ID NO: 1032352 - DNA, 120 bp, Artificial Sequence
  ENSG00000248671_47 (sequence is synthesized)
cagcagggtacactgggtgactgctgccctctcctggtggcacagggcagacctactggtgaccacagatgcacccttttggggaggactagggagaaagaaggtattggagaagcaggg

SEQ ID NO: 1032353 - DNA, 120 bp, Artificial Sequence
  ENSG00000248671_48 (sequence is synthesized)
gattgtttatttgctaaaagtgtggccctttcacacagaagatctgctactgcctactgaggaatggcctctcgacatccttatgtcaaaccctgcatgttcgggctcatctttaaaatc

SEQ ID NO: 1032354 - DNA, 120 bp, Artificial Sequence
  ENSG00000248671_49 (sequence is synthesized)
gaaaaacaatctggagggacgacttgagaaggcatcctgagcctatgcagaaatgcagaaacacttccatgatctaaacaacctatgtgaaggcctgaaagccaaagcaagatcctctta

SEQ ID NO: 1032355 - DNA, 120 bp, Artificial Sequence
  ENSG00000248671_50 (sequence is synthesized)
ttacaaagctgtccgacaaaaagttttccaagtaacactggaggtccatcagtcactcttcctggtctggaaatgccagaaatgtcctccttggtccttctgagagtcaagatcttttca

SEQ ID NO: 1032356 - DNA, 120 bp, Artificial Sequence
  ENSG00000248671_51 (sequence is synthesized)
aaatcacctcaggagccacagaaccacttcatcctacctgaaattgcaggatgacttcttttgaccagaatctcaaaaatatattcgttgatagttttgattcctgggagccgccattgc

SEQ ID NO: 1032357 - DNA, 120 bp, Artificial Sequence
  ENSG00000248671_52 (sequence is synthesized)
ttgcaaaagatgtgccagagactagacattttctgtctcctcacttgtctggggaagactgaagttttacagaaacacagagatgggaatctgaccctctgagcagcctcaggattttct

SEQ ID NO: 1032358 - DNA, 120 bp, Artificial Sequence
  ENSG00000248671_53 (sequence is synthesized)
cctgcccatgaaggtggtggacatgttcaggagctgtttgcctgcgtgtgctgtgaacttcaagtgagccaagagctggttagagctgcaaggacaccgcctgcacaggatgcccggggc

SEQ ID NO: 1032359 - DNA, 120 bp, Artificial Sequence
  ENSG00000248671_54 (sequence is synthesized)
cagacagggaaagtgcccttaagaaaacacacatgatatccatgcatcctatcatcagaaaagatgcacccaccagtatgacaatggagaactctctcattctggaggatccttttgaat

SEQ ID NO: 1032360 - DNA, 120 bp, Artificial Sequence
  ENSG00000248671_55 (sequence is synthesized)
aatcccttagtaatcttttgtcccctaaaccacataaacaaattcatactaaaggaaatcccacttccaactggatgtctggatgaactactgaaagctgctgagtgtcctgcagcaggt

SEQ ID NO: 1032361 - DNA, 120 bp, Artificial Sequence
  ENSG00000248671_56 (sequence is synthesized)
ggactcctgtgttaacttctggtgtttcagcctaagagagaatgttaatataaccctggtcctggaacaccatgctgaccaacacctaccagctttcaggagataagacagctggctgat

SEQ ID NO: 1032362 - DNA, 120 bp, Artificial Sequence
  ENSG00000248671_57 (sequence is synthesized)
ggggcagggatccagagaaggcacgggtccacacctgcacatgttgcccagtggcagagttcatgacaagcaataagccccaggacaatgtcattcccagccacctggctgtcatctgct

SEQ ID NO: 1032363 - DNA, 120 bp, Artificial Sequence
  ENSG00000248671_58 (sequence is synthesized)
ctttcatgacccctctctcctggtacctctaggcactggcatgtcctccagaggctgtaggagggcatgatactcagtactctcacacctgcaggaggcaagaaagatggaaacagctaa

SEQ ID NO: 1032364 - DNA, 120 bp, Artificial Sequence
  ENSG00000248671_59 (sequence is synthesized)
ataccatggcttctggattttttttggtgggcatggcatattttgcatttgctttaataatggtggaacccagtcagtggcttgcaatacggatctagatgactctggacacctgtagag

SEQ ID NO: 1032365 - DNA, 120 bp, Artificial Sequence
  ENSG00000248671_60 (sequence is synthesized)
gacaatttccagaaggtcacaagttcttggagactttttcatgagttctttgactgaaaaggtggttcaaagagcttctatactgacttagaaaatgttgcagaggccaggtgcggtggc

SEQ ID NO: 1032366 - DNA, 61 bp, Artificial Sequence
  ENSG00000248671_61 (sequence is synthesized)
gtgacactggactccagcctgagcgacggagcgagactctatctcaaaaataaaataaaaa

SEQ ID NO: 1032367 - DNA, 79 bp, Artificial Sequence
  ENSG00000248671_62 (sequence is synthesized)
tgaagacaaaagaaagtgttgcagacactggtgaacaggtaggccctctcctgccactccaggtaaaagtttcttggcc

SEQ ID NO: 1032368 - DNA, 120 bp, Artificial Sequence
  ENSG00000248671_63 (sequence is synthesized)
taggccctctcctgccactccaggtaaaagtttcttggccacaaacctgatttagcaatatcccttcatcttaggtgggtaacagaaagctattcatgacctatccaagcatggagaggg

SEQ ID NO: 1032369 - DNA, 120 bp, Artificial Sequence
  ENSG00000248671_64 (sequence is synthesized)
gatttgacttagaaaactgttaggtggactagttgctgaaagaaagtgcattctagggctcacaggcctacacatagagttgctatcacataaagcatatgtacgaattctttctgagcc

SEQ ID NO: 1032370 - DNA, 120 bp, Artificial Sequence
  ENSG00000248671_65 (sequence is synthesized)
catgacaagatgagggtgcacttcatcagtctcctatgctggtatgaataggtacttgcctgaaaaataaaagaataattcaggaagcccattcttctacaggacaccaggcagtacagt

SEQ ID NO: 1032371 - DNA, 120 bp, Artificial Sequence
  ENSG00000248671_66 (sequence is synthesized)
aggagtcctggggttgctgtggtatttatgttttaaggttgtcttttaatcatcttcagcaaattcaacagtcttcaggaacataaaaaaattattcaacattgcataaaaacgaccaaa

SEQ ID NO: 1032372 - DNA, 120 bp, Artificial Sequence
  ENSG00000248671_67 (sequence is synthesized)
aatgtatccatgataaagaactgtaccaatataataataacattaataacaatcataatggtgatgatataaatgtcaatttaatgaagagagtaataaaaatgcagatatttaagaaca

SEQ ID NO: 1032373 - DNA, 120 bp, Artificial Sequence
  ENSG00000248671_68 (sequence is synthesized)
gacccaggaccacaggcagagctctgttcgaccagagaggagactgagcgtgctggcaggggtgaggggttttccgtggcccagccaaacaccaccttctctcaagggccctgtccttat

SEQ ID NO: 1032374 - DNA, 120 bp, Artificial Sequence
  ENSG00000248671_69 (sequence is synthesized)
cccagaagtggttgttttcctcctgtggtctctgaaacacacaggcatggctctgggacagagccatgtggtgacgactgtaacgggagtatgcctgtctccaacaagagggctgtggct

SEQ ID NO: 1032375 - DNA, 80 bp, Artificial Sequence
  ENSG00000248671_70 (sequence is synthesized)
taacgggagtatgcctgtctccaacaagagggctgtggcttgaaggtcagcttaagaggcacccctgtcctttgatgtca

SEQ ID NO: 1032376 - DNA, 120 bp, Artificial Sequence
  ENSG00000248671_71 (sequence is synthesized)
gcaggcagccagcctccgcaggaccccgaccagcgacacgatggcttctgggcaatacagcacgtctacggtgaaagcttcaggttactgaaagggaccagcggacagttccaggtcatg

SEQ ID NO: 1032377 - DNA, 120 bp, Artificial Sequence
  ENSG00000237943_0 (sequence is synthesized)
cggagctgccacaacccatcttcccacaactcggaacttggaaaaaggaacccaggacacgactttgcttttcttttggacctagttgatacaagttaacaggatatgcttctggcctgt

SEQ ID NO: 1032378 - DNA, 120 bp, Artificial Sequence
  ENSG00000237943_1 (sequence is synthesized)
ttctggattctaagggtagaaccagcataaaactagtcagtccaagtatttctaaagatccacagacacagttctcctggatttgggaagcctagagatattagcacaataattaaggcc

SEQ ID NO: 1032379 - DNA, 120 bp, Artificial Sequence
  ENSG00000237943_2 (sequence is synthesized)
caacaacttttaaaagcctttccactgcacagtgaaagaaaaccacaaactccttgtttaataagtgggatcacgtgcttttaacacgaggaaaaggtcaatctgaagcaactgatatgg

SEQ ID NO: 1032380 - DNA, 120 bp, Artificial Sequence
  ENSG00000237943_3 (sequence is synthesized)
cacctctgatagcttgagacaaatatcctcttgatcattgtttcaccatatttgtctttgctcatggagaaccattttgatccgtggtttagcctcccaggtgattgaacaataccggtg

SEQ ID NO: 1032381 - DNA, 120 bp, Artificial Sequence
  ENSG00000237943_4 (sequence is synthesized)
atctgaggcagaccctctgtgacggataacaggaaagaatattgattgaacatctactcaagaactgcaaaacagagattacctgacctaaagcatttatattgccaatcatgttggaga

SEQ ID NO: 1032382 - DNA, 120 bp, Artificial Sequence
  ENSG00000237943_5 (sequence is synthesized)
gtccatgtggtgatttctgaaaacgagatgtgagaaagaagaggataatttaagtctagacctacagattgtgctgataaagtgatgaagaactacaatcttcttagtcatttcattgta

SEQ ID NO: 1032383 - DNA, 120 bp, Artificial Sequence
  ENSG00000237943_6 (sequence is synthesized)
gttctgccctgatgtttcctggaataatgctgaggactgcctttcgggtagccgccctattcagttcacttcatctcggaaatacctgacccctgccttggatccagcggccctcctgag

SEQ ID NO: 1032384 - DNA, 120 bp, Artificial Sequence
  ENSG00000237943_7 (sequence is synthesized)
acctctagccagggacgcgcgctcggtcccccgccgtgcgcccccggtcccgcgcccaggctcccgcccctggcctccttaccagccacttgtcgcccagctgcgaactggagcgggagg

SEQ ID NO: 1032385 - DNA, 120 bp, Artificial Sequence
  ENSG00000237943_8 (sequence is synthesized)
cggcggccggagggcccaggacagccccgggagggcggcgaggcggagcaggagcgccccggctccggccacattctcagagtcaggaaaaggggcgagaggccacatgtctccctctcg

SEQ ID NO: 1032386 - DNA, 120 bp, Artificial Sequence
  ENSG00000237943_9 (sequence is synthesized)
cccaactgaaaacgaaacggcgctccagcagattgggtggaaagagctgggtctcttttctctgtttttcacgctagaaagggcttgtaaacattgttccttttaaaatgacctacccca

SEQ ID NO: 1032387 - DNA, 120 bp, Artificial Sequence
  ENSG00000237943_10 (sequence is synthesized)
ggcatttgtttgggcacacttctgtcctggggtcatcgttcctaggtggcttcggacctgggacttttcctgtatctgcacattgtcgttttatacacaattgccaaggtgggactgctt

SEQ ID NO: 1032388 - DNA, 120 bp, Artificial Sequence
  ENSG00000237943_11 (sequence is synthesized)
tggagaccacgtcttgcatccttccttctatatgggatttaggatagaaattaaaaagaaaacatattattttgagtcttgatttggagaaaggtagtattcaggaggaagtaggctatg

SEQ ID NO: 1032389 - DNA, 120 bp, Artificial Sequence
  ENSG00000237943_12 (sequence is synthesized)
atacacatagaaaatttgaggacagtgttacttaacaaggacatttctgtctctgcagaagtcacagcttggaggaaaccagtttgcactatttgatgaggaatttggccaccaaaccac

SEQ ID NO: 1032390 - DNA, 120 bp, Artificial Sequence
  ENSG00000237943_13 (sequence is synthesized)
tgatactttcccaaaggtttggcagaaattgttttttgagtggctcaccagagtacccagaagaatcagtatggaattagaggacagtggcctaccctaaataaagacatgagtgatgta

SEQ ID NO: 1032391 - DNA, 120 bp, Artificial Sequence
  ENSG00000237943_14 (sequence is synthesized)
gaatcactcaagaggggagcaaagctcaggaaatgagatcagcccagtctccatgtgatgaagcagatcacagatcctccccggatacacgtttaccccaagatgagagcaggctaagag

SEQ ID NO: 1032392 - DNA, 120 bp, Artificial Sequence
  ENSG00000237943_15 (sequence is synthesized)
tattcagaaaatatcaaaattattctgggagctatgggtcaaagttgataggcacaaacaaacaaaaacgaaaggtattttaaattcacagcttggataagtaaaagggagatgttgtca

SEQ ID NO: 1032393 - DNA, 120 bp, Artificial Sequence
  ENSG00000237943_16 (sequence is synthesized)
gtcatttctcttcttcaatccaactttagattttcaagccggaaaaagggtaattagaagttagaaattgttattgccagaaaatagctctaaaccctgaaaaaaaaaaaaaaaaaaaaa

SEQ ID NO: 1032394 - DNA, 120 bp, Artificial Sequence
  ENSG00000237943_17 (sequence is synthesized)
tcggtggatgctatagtgcccatggaaagactctagtctgaagataccagtctctccctcccaagatcacctcccctgaccaaccttctgcactcctgacagatacaagggagcaagcaa

SEQ ID NO: 1032395 - DNA, 120 bp, Artificial Sequence
  ENSG00000237943_18 (sequence is synthesized)
gttgcacccaacctaatagtaaattgcagggacatttccattctaaggaaggaatttttgtgtgtgttgcaactcagcttctgctctggcattttgctgtgcatttatattgccaatcat

SEQ ID NO: 1032396 - DNA, 120 bp, Artificial Sequence
  ENSG00000237943_19 (sequence is synthesized)
catctcagaagtaaagatgctgattatttgacatcgccattggaatctcaaaacagtgtaaagcatttgctaaaaagagtcactttctgagaaatgactcagaattcgacttacgtacta

SEQ ID NO: 1032397 - DNA, 120 bp, Artificial Sequence
  ENSG00000237943_20 (sequence is synthesized)
gcagaacttattgcccataaaaggaaaggccacactttttgtgaaaacttaataatccctaggatgtaaaattatactgagttaaatcctagtcccatttttagtacaagaaactggaaa

SEQ ID NO: 1032398 - DNA, 120 bp, Artificial Sequence
  ENSG00000237943_21 (sequence is synthesized)
aaaataatccactctcaaatggtaagacaaattgagatattgctgaaaagcctcttgaccctgaaaagttctgaataataaactgataaaagcagcagcagcatctaacttgacaccagt

SEQ ID NO: 1032399 - DNA, 120 bp, Artificial Sequence
  ENSG00000237943_22 (sequence is synthesized)
catgtcatttgtaagtaaggttggtaaatagtaatgaaattcaagcaatattttcagctatgaagagctgctcaaaccaagcaaaggccaagatctactttaaattttgtctacgtatct

SEQ ID NO: 1032400 - DNA, 120 bp, Artificial Sequence
  ENSG00000237943_23 (sequence is synthesized)
ttaaacaaggcatctgtcttgggggcattgtgttagcatctgtaccggtaacacctcatccagggttggcttgataagaggcttcacattttttgtagaataagaaaaaaacctggcatt

SEQ ID NO: 1032401 - DNA, 120 bp, Artificial Sequence
  ENSG00000237943_24 (sequence is synthesized)
cattgtcacaacacactgatttgttcatgcagtagtgcttggggtcaaaaactcttggaatgaccaggcagagtggctcacacctgtaatctctgcactttgggaggtcaaggtgggcgg

SEQ ID NO: 1032402 - DNA, 120 bp, Artificial Sequence
  ENSG00000237943_25 (sequence is synthesized)
acctcaattactgttgatagtaaaactgatatcaactcttcgaaaccagtgaaaggtgaatggaaaccttaccctaggttaaggtttaaaaaatgttcataatatatatttgaaagttcc

SEQ ID NO: 1032403 - DNA, 120 bp, Artificial Sequence
  ENSG00000237943_26 (sequence is synthesized)
attatttaaaatattcattagacatgctttgtaatgttaagttacttcaaaaaatcttacacaagggaagggaagtatgtattattccttcatttaagagaaagataatgtgtgaatatt

SEQ ID NO: 1032404 - DNA, 120 bp, Artificial Sequence
  ENSG00000237943_27 (sequence is synthesized)
agttaatatttatcgtacatttactacctgtgtcgaagcgtagtgttacacacttaatttcaattatttaatttgattctaacaatgaatcccctgagatggataatatcctcttcattt

SEQ ID NO: 1032405 - DNA, 120 bp, Artificial Sequence
  ENSG00000237943_28 (sequence is synthesized)
tacagatgagacaattgagacttaaaggttaaacaaatgatttcctaagctcattcagctaataaacggtaggggactgcttgacaccagtccagttgaccctcaaatccatgatttctg

SEQ ID NO: 1032406 - DNA, 120 bp, Artificial Sequence
  ENSG00000237943_29 (sequence is synthesized)
ccaccatattcacagaaacaagacaagagctgaaaatatagcctgactcttgaaacagtcaaagaattgtgtatgtttatgaaagttctgattaataagatattctgaggacaaaagaca

SEQ ID NO: 1032407 - DNA, 120 bp, Artificial Sequence
  ENSG00000237943_30 (sequence is synthesized)
aggcatgggtagaggggcaatgtgtagattagaatgtatcacaatgcccactaaatagtaaaaccatagaaaatgaaatttaatccttactgtgtagaatatttagagtagattgttttt

SEQ ID NO: 1032408 - DNA, 86 bp, Artificial Sequence
  ENSG00000237943_31 (sequence is synthesized)
cagaactgagtccattctcaattttctgtgcaaattggggaaggctgttgataatcggtggatgctatagtgcccatggaaagact

SEQ ID NO: 1032409 - DNA, 120 bp, Artificial Sequence
  ENSG00000237943_32 (sequence is synthesized)
aacctttagtgtgaaggatcctccaggtgagagaagcctttatgtcttctgaaatggttctgctgtgtccccacccaaatcttgtattgaagctcccataattcccgcgtgctgtgggag

SEQ ID NO: 1032410 - DNA, 62 bp, Artificial Sequence
  ENSG00000237943_33 (sequence is synthesized)
ggacccagtgatctcaccagatctgatgattttataagaggtttcccctttcacttggctct

SEQ ID NO: 1032411 - DNA, 120 bp, Artificial Sequence
  ENSG00000237943_34 (sequence is synthesized)
gctataaaattctgagactaaatatcaaattaaagaaagtactaattgtcagcgatgggggatgtactgctatttgcttctagtggtactcactgctcatttcctatattcactggtata

SEQ ID NO: 1032412 - DNA, 120 bp, Artificial Sequence
  ENSG00000237943_35 (sequence is synthesized)
aaaaaatttcaaacaccctcaaaaaagcctatactggtggtaccaggaaaacgctgaaaatcattactttctgtgtggtgtccagctcttttggttacatcatcacttcgaccattcact

SEQ ID NO: 1032413 - DNA, 120 bp, Artificial Sequence
  ENSG00000237943_36 (sequence is synthesized)
ttgtgtgagtcacttagacgtgctttgtttcttggtcacagttgatccctcaactcaagcatctcaccctcaaaatgtttgtttgggacccaagaggcaaaccttgagatgggttatttc

SEQ ID NO: 1032414 - DNA, 120 bp, Artificial Sequence
  ENSG00000237943_37 (sequence is synthesized)
tttcaccttggattggctcatctgctgggagtggagccaagctgacatttcctttcctttttgtctgcctatcactacgtagaggcagcacataagagagggaaagccatgcgcgtggag

SEQ ID NO: 1032415 - DNA, 120 bp, Artificial Sequence
  ENSG00000237943_38 (sequence is synthesized)
tccagcacatcacccagaaggcagatgttctatctccattttactcattaaaacaaacaaaaccacacctggattgcctggtacttaaataaaatgcactatgatgattgaagaaaaata

SEQ ID NO: 1032416 - DNA, 120 bp, Artificial Sequence
  ENSG00000237943_39 (sequence is synthesized)
ccccgaagtgtttcaagacttgattaaatcactcaggtctgcactaggaagcgagttatgatgatgcccctaatctatatgaacccaaataaagccaaaacacacacaccttttaaggat

SEQ ID NO: 1032417 - DNA, 120 bp, Artificial Sequence
  ENSG00000237943_40 (sequence is synthesized)
aaaactatattccattaaaattagccccgcatttgtcaatatctaacagcattggactgaccctcaggccagaggctgtagctcttggaagatcctagccaggaggtttgagagtggcca

SEQ ID NO: 1032418 - DNA, 120 bp, Artificial Sequence
  ENSG00000237943_41 (sequence is synthesized)
gtacctcggaagtgctggctcactctgacatcatcagaacctggcatacagtaggcgctcattgggtatttgctatggaaattaggcaggaaagtgcgtctgtgtctggaaacaaagagg

SEQ ID NO: 1032419 - DNA, 120 bp, Artificial Sequence
  ENSG00000237943_42 (sequence is synthesized)
caaagcttaagcagtgatccccatgcagattctttctgcaaactacaaaacagaagcttccctagttcagactgccatccatctggctctttctccaattgtttttcagcggatcctgtt

SEQ ID NO: 1032420 - DNA, 120 bp, Artificial Sequence
  ENSG00000183938_0 (sequence is synthesized)
acgatttctgtctgagccaaccaggtgcctcagacttctctgctgtgtggccctttctttctggggagcagcctccatggacaccaaggtcacccagagacctagatttctggtcaaagc

SEQ ID NO: 1032421 - DNA, 120 bp, Artificial Sequence
  ENSG00000183938_1 (sequence is synthesized)
cagaaagcaaagatggactgtgttcctataaaaagacatagttatgtttactggtatcataagacgctggaagaagagctcaagttttttatttactttcagaatgaagaaattattcag

SEQ ID NO: 1032422 - DNA, 120 bp, Artificial Sequence
  ENSG00000183938_2 (sequence is synthesized)
aaagcagaaataatcaatgagcgattttcagcccaatgcccccaaaactcaccctgtaccttggagatccagtccacggagtcaggagacacagcacggtatttctgtgccaacagcaaa

SEQ ID NO: 1032423 - DNA, 120 bp, Artificial Sequence
  ENSG00000237941_0 (sequence is synthesized)
gctgcccgcacgccccgacgggagctgcgcccagcctcccctctggagtcggcgctccaggctgctgcccggccggtggccaaggccccagcaccaccgtccctcctgcagggcatccag

SEQ ID NO: 1032424 - DNA, 120 bp, Artificial Sequence
  ENSG00000237941_1 (sequence is synthesized)
cacctacccttccactgggcggctcctggttctggtcccggctggctcactcaggctgcctttggaccagattcttgaacttttccaccaaggatgttgctgctgtttgtagcgtcggat

SEQ ID NO: 1032425 - DNA, 120 bp, Artificial Sequence
  ENSG00000237941_2 (sequence is synthesized)
cctggaaaatcgctgtgttggggagcagcaggctctcccttgctcccccagggcctgggaaaatcaacccacctctgccccccgaccccagggctgtaacctggtgtctggtagccccac

SEQ ID NO: 1032426 - DNA, 120 bp, Artificial Sequence
  ENSG00000237941_3 (sequence is synthesized)
tgtgataaaccgaagcccagcacagtttgggactcgccccgagttgacttatgcagcccccagaacagaggctgaaacccggcgcatcctggtgaagccacacccagccggcctggtccc

SEQ ID NO: 1032427 - DNA, 120 bp, Artificial Sequence
  ENSG00000237941_4 (sequence is synthesized)
ggggtcccctccactcccatctgcttccctttcagagccggggctgagtcggcagggacgcaggctcagggccctggattcccgctttctggacacttgcgtgcatgcccagcaccagct

SEQ ID NO: 1032428 - DNA, 120 bp, Artificial Sequence
  ENSG00000237941_5 (sequence is synthesized)
cgcccttctgagaaagcaatccctcctcagaggggagaagccgtggctgtgatgggcaggaagtggtcaggacccactgccgagcaccaactccccatgccaccaccaggggtgcgcctg

SEQ ID NO: 1032429 - DNA, 120 bp, Artificial Sequence
  ENSG00000237941_6 (sequence is synthesized)
gactcctggaaaggggtcgcgtcagggtgcagcccatcaaaggcttcccaagaggcaagaggcaaggagaagtgtcctactttaaacggccagcctcagtggtcggccctgttcactctg

SEQ ID NO: 1032430 - DNA, 120 bp, Artificial Sequence
  ENSG00000237941_7 (sequence is synthesized)
ccacctcagagagagtgaacccagcagaggtgtgacgggaggctggggagagaccccagcaccttgagcacacaggagccaggaggagcccaacagagcagcaggggctggggtcttctc

SEQ ID NO: 1032431 - DNA, 120 bp, Artificial Sequence
  ENSG00000237941_8 (sequence is synthesized)
ctgaagcctgactccatgggaccccaaagaagcagatggaaaactgaaaaagaaaacccctcaagtgagccactggaaagaaagcaaaacaagagaaaataaatgagttgtttgacataa

SEQ ID NO: 1032432 - DNA, 120 bp, Artificial Sequence
  ENSG00000237940_0 (sequence is synthesized)
acgggtgagtttgtttctcacaggtgcgactctgtctctatttgcatcaggttcagtttcttcctggttgaccttgtgggtgtgaatgttgtcacagacctgccgggccatctttctgca

SEQ ID NO: 1032433 - DNA, 120 bp, Artificial Sequence
  ENSG00000237940_1 (sequence is synthesized)
gagaggaaggggacagggaggaagatggtgtctgcaaaccaggaagcagccttgccagacacaggattggccacaaccttgaccccagacttccagcctccagaactgtgagaaataaat

SEQ ID NO: 1032434 - DNA, 120 bp, Artificial Sequence
  ENSG00000237940_2 (sequence is synthesized)
ggcacagggcatgggggaactggttccagacctgcctcctgggaagttgggagggggcatttcaacctgttaatttctcaaattatgtagtcattcaaaaagaaatagaaacacttcatt

SEQ ID NO: 1032435 - DNA, 120 bp, Artificial Sequence
  ENSG00000237940_3 (sequence is synthesized)
tagaaaataacctatatgtggtggtccattttcagttctaagtgccttcatataggtttaagcaggctatgtggaaatagagaaataaagaagcagaaatgtactgagtcaccaccctgc

SEQ ID NO: 1032436 - DNA, 120 bp, Artificial Sequence
  ENSG00000237940_4 (sequence is synthesized)
cctccttcctgctttccctttcacccagcggccacgtgcctatcagtaggagccccctcaactaccctctcctcaccccaccaaagaatttagtttaggctagcttgcaacataaataat

SEQ ID NO: 1032437 - DNA, 120 bp, Artificial Sequence
  ENSG00000237940_5 (sequence is synthesized)
tataccctttcttatcagctacgtgcagccaccagggccatagtcaaatgtttgaagagtcctgagacagttgcaatgcatggtgggctgcaataaaatgcagcagaaagatcctaaaga

SEQ ID NO: 1032438 - DNA, 120 bp, Artificial Sequence
  ENSG00000237940_6 (sequence is synthesized)
acagacttgaaatcttaatccaacgaccaataggtgatgtccaggaagatcgtaaccccatttactcagtcaatgaggaactgggggagggacctgcgcactaggggataaattgcttgt

SEQ ID NO: 1032439 - DNA, 120 bp, Artificial Sequence
  ENSG00000237940_7 (sequence is synthesized)
tgaaactctgctgggggtggctgcatgccagccagacacccagtcttgcaagactgtcattgaaaatctccgttttgctgttctccgggtctctgcgtccagtctttgtgtttggacgga

SEQ ID NO: 1032440 - DNA, 120 bp, Artificial Sequence
  ENSG00000237940_8 (sequence is synthesized)
cctgccgggccatctttctgcaagaagataaaggaagaccaggagtgcctgccgaactcctatggaggaagtctaggagaggaaggggtaggaccaagggcactgctgtgggctgaaggg

SEQ ID NO: 1032441 - DNA, 120 bp, Artificial Sequence
  ENSG00000237940_9 (sequence is synthesized)
aggaagatggtgtctgcaaaccaggaagcagccttgccagacacaggattggccacaaccttgaccccagacttccagcctccagaactgaaggactgagttcattttcagcgtgtctgg

SEQ ID NO: 1032442 - DNA, 120 bp, Artificial Sequence
  ENSG00000237940_10 (sequence is synthesized)
cttttccatttctgtggcctgggaaggaatttccctgcacaggctctcttgcctgccaccatgtaagacctgcctctgctcctccttcaccttccgccatgattgtgaggccaccccagc

SEQ ID NO: 1032443 - DNA, 120 bp, Artificial Sequence
  ENSG00000237940_11 (sequence is synthesized)
catgtggaactgtcaagaggctgggaggtgccctctgcctttcaagatcagagagtagctgatccccctcctgccgtcatttatggactgaataaccacagagagtgtgaggccggcgga

SEQ ID NO: 1032444 - DNA, 120 bp, Artificial Sequence
  ENSG00000237940_12 (sequence is synthesized)
tgcctgtttgtcattgtcagtttcaaatactttttaattttgaatagttgtagattttcagaagggttatgaagattgtgcaggcagtttctgcaagctgctgctaatttccctcagctt

SEQ ID NO: 1032445 - DNA, 120 bp, Artificial Sequence
  ENSG00000237940_13 (sequence is synthesized)
ccacgtcttcgctgccatggtccacctgcagcagccaagaaagccgcgttgcatcgccacgagctaaactccagccttcggatttcagagcttccatccatgtcctctctctgctgtgac

SEQ ID NO: 1032446 - DNA, 120 bp, Artificial Sequence
  ENSG00000237940_14 (sequence is synthesized)
cccacctggggtgccacgtcgtgtctgatcctcctgtgtcctcggcttctctggtctgtgacatttctgtctctcctttgccatgaccctggcagtgtggaggagactgttgggcaccct

SEQ ID NO: 1032447 - DNA, 120 bp, Artificial Sequence
  ENSG00000237940_15 (sequence is synthesized)
gtggatgcccctcagtctgggttcatctgtccttttcctcatggttagcctgaggtggtgggcttccgcaaataataccaaggaggtgaaatgttcttcccctcacggcctctcaggggc

SEQ ID NO: 1032448 - DNA, 120 bp, Artificial Sequence
  ENSG00000237940_16 (sequence is synthesized)
atagaacatcctcttgacttcacaggtggcgttaacccgatcgcttgtgtgaaaataacgcatcgggaggcactaggctgagggcttcagtacctcagaagcaaacccagttcctgcaca

SEQ ID NO: 1032449 - DNA, 120 bp, Artificial Sequence
  ENSG00000237940_17 (sequence is synthesized)
cagaaaccccattcagggtaaggggtcctgtcctaggaaagaaaattcaagtttaaacagaaactgccagctaacctcaaagcagaggccgtgtgactgctgtttcacttcaatccatcc

SEQ ID NO: 1032450 - DNA, 120 bp, Artificial Sequence
  ENSG00000237940_18 (sequence is synthesized)
tttttctgttcttccttccaagaacactgatgaaggttttccttgtgctccttggtagagcccaaactgctgtagttcagtgctgcccagctcatggattcctgtctcctcaaataactc

SEQ ID NO: 1032451 - DNA, 120 bp, Artificial Sequence
  ENSG00000237940_19 (sequence is synthesized)
tttacactttcacgtgcctacgtttatcttctaacacttggatcaggtggcgtccgccaggtgtcttcgctgtaaagtcactgtcttcccttccaccgctccactctttgggatgagtca

SEQ ID NO: 1032452 - DNA, 120 bp, Artificial Sequence
  ENSG00000237940_20 (sequence is synthesized)
cgaagcctgtgctaccttcaggggagggctggggaagagttaaactccatctcctggaggggctgctacatatgatcatatgatgttatttggagtaagaaagatttgcctcttctccac

SEQ ID NO: 1032453 - DNA, 120 bp, Artificial Sequence
  ENSG00000237940_21 (sequence is synthesized)
ttaatttgctcacattcattataatccattatttaatacatttttcttccatttgatcatattacttgctgataggaaggactgagttcattttcagcgtgtctggcttttccatttctg

SEQ ID NO: 1032454 - DNA, 120 bp, Artificial Sequence
  ENSG00000237940_22 (sequence is synthesized)
tggcctgggaaggtgggtggctacatcatcatccatggtctctgaaatatcctgtgttaccaaggcctgcttgttccaccaaactgctccataggcagttgtgacacccagaaagatgct

SEQ ID NO: 1032455 - DNA, 120 bp, Artificial Sequence
  ENSG00000237940_23 (sequence is synthesized)
gctgttcttgtgatagtgaataagtcccaagagattctgatggttttataaacaggaatttccctgcacaggctctcttgcctgccaccatgtaagacctgcctctgctcctccttcacc

SEQ ID NO: 1032456 - DNA, 120 bp, Artificial Sequence
  ENSG00000237940_24 (sequence is synthesized)
ttccgccatgattgtgaggccaccccagccatgtggaactggacgcctgctggccacacatcaccatgaggatgcacttgactgaatctggaagaatcccagggctgtggaagattttgg

SEQ ID NO: 1032457 - DNA, 120 bp, Artificial Sequence
  ENSG00000237947_0 (sequence is synthesized)
actaacagtgagaagcctcagcacagagttgcacagagagactgcctctgcatttgtgacactgacagcacagacaccataactccagccatgacaggctctgcacacagggacccagga

SEQ ID NO: 1032458 - DNA, 120 bp, Artificial Sequence
  ENSG00000237947_1 (sequence is synthesized)
agtgaagggcactgcagaccatacctctgactgtgacagaccccgaacatccacagagacagtaacatcagcattgacaggctcagcaaacagagaaatagggaggaatgggctctgtcg

SEQ ID NO: 1032459 - DNA, 120 bp, Artificial Sequence
  ENSG00000237947_2 (sequence is synthesized)
aacagacacagggacaagtactgcaaacagtgacacaaacagtactagcctctcccaataataccaagctctgcaaataaaactaaactccacagaatgacaaacagtgccacggtctac

SEQ ID NO: 1032460 - DNA, 120 bp, Artificial Sequence
  ENSG00000237947_3 (sequence is synthesized)
aaatggtgacacaggcaatgacaagctttgcaaacagctccaagctctgcaaataatgacacacagggccaagctctgcaaacacgtgtgaggagacagaagcacacagaggagaattca

SEQ ID NO: 1032461 - DNA, 120 bp, Artificial Sequence
  ENSG00000237947_4 (sequence is synthesized)
cctgccagggccatagaaatcctgcgctgctgtccagcactgggattcgtgtctgcccaactctcagcaaacaggcatgagggctggaagaggagaaaacacaactggctaggagaaggc

SEQ ID NO: 1032462 - DNA, 120 bp, Artificial Sequence
  ENSG00000253247_0 (sequence is synthesized)
gtgtccaatgtgaagtgtagctggtagagtctgggggaggcttggtacagcttggggggtccatgtgactctcctgtgcagcctctggatacactttcagtaactatggcatgcactagg

SEQ ID NO: 1032463 - DNA, 120 bp, Artificial Sequence
  ENSG00000253247_1 (sequence is synthesized)
gaggcatatactactcagactctgtgaagggccggttgaccatctccagagaaaacaccaagaactcactgtatctgcaaataaacagtttcattgctgacaccatggccgtctattact

SEQ ID NO: 1032464 - DNA, 120 bp, Artificial Sequence
  ENSG00000253244_0 (sequence is synthesized)
attcaattctcataattctcctgacaacattctctccaagcctcagttctctccttcaaaatcattatgattattcccatttttcagataaggagcctgagtcccagagagcagaaatga

SEQ ID NO: 1032465 - DNA, 120 bp, Artificial Sequence
  ENSG00000253244_1 (sequence is synthesized)
aagctcagttccaagtgccacctaacacttgaactctgatcctggggaaccaagacacaatagggaggccataaaaactgtggaatgaatcagtgaacaaataaatcctatttctaaaga

SEQ ID NO: 1032466 - DNA, 120 bp, Artificial Sequence
  ENSG00000241792_0 (sequence is synthesized)
ccatagaaacctcgtcaggactagctttatctgtgctatgctggtggtacaggctcagtgatgggaaattcaagtaaggaaaatagaagactatgaaagtcggtgaattcacttttgtct

SEQ ID NO: 1032467 - DNA, 120 bp, Artificial Sequence
  ENSG00000241792_1 (sequence is synthesized)
tctctggatatttagtcccttagcactgagtggaagggcttcacagaatccttggtttttcaagaaaagaggagaaaactcttctatagattgaaaaattatatggcacgtggattttga

SEQ ID NO: 1032468 - DNA, 120 bp, Artificial Sequence
  ENSG00000241792_2 (sequence is synthesized)
caagggttagatatctcagatttctgttctgttgtctcttatcctcctctttccacaacctaatggaaaagctattcttactctccagcttctctacctttagaactggggaaacaccac

SEQ ID NO: 1032469 - DNA, 120 bp, Artificial Sequence
  ENSG00000241792_3 (sequence is synthesized)
cagcatgactcactggggtgtggtgacggttattttttcttaattagtcaaaatgtgcaatgtgctaattacttgaatcataagaaaaaaatcattaaataaaaatcacatttgactggc

SEQ ID NO: 1032470 - DNA, 120 bp, Artificial Sequence
  ENSG00000249604_0 (sequence is synthesized)
tttatatatatatatgctgttaaatacagatatatattagatgacattgttaggtacattcaagcttagaattctatcttcctgttttttaaattttttaaaagtggatccatttatcat

SEQ ID NO: 1032471 - DNA, 120 bp, Artificial Sequence
  ENSG00000249604_1 (sequence is synthesized)
tttatcatgaatgccctcctttttcttaacaataaagtatcacttagagtaccttttgtcaaaaaagaaccacttttctttttaaagtattttcttagtattgtaaaaccttttcatttt

SEQ ID NO: 1032472 - DNA, 120 bp, Artificial Sequence
  ENSG00000249604_2 (sequence is synthesized)
gaacttttctgtacccttatgttgggggaatgtctcttttttggggaagatagattatgtctcttaaaacaacatataattggatattaaaaaaatccattctggcaagctgtcctttag

SEQ ID NO: 1032473 - DNA, 120 bp, Artificial Sequence
  ENSG00000249604_3 (sequence is synthesized)
ccagtaagtttagtcctcttacatttactctaattactaatatctaacatactattctgagatttgtttatctgctttattcattcttttcccccttccttctcatcttcctttaggttg

SEQ ID NO: 1032474 - DNA, 120 bp, Artificial Sequence
  ENSG00000249604_4 (sequence is synthesized)
agacaaacagggtgaatgttcactcttacatttttaacacgcttacttaaagtctagttgagtggttggcaaactacagcccaaaggccaaatccatcctgccgcctttgtacagccaga

SEQ ID NO: 1032475 - DNA, 120 bp, Artificial Sequence
  ENSG00000249604_5 (sequence is synthesized)
gagccaagactagcttttacatttataaatggttgaaaaaaaaaccaaaatgttattttgatacgtgaaaagcatatgaaatttaaatctttcctttagtgtaaaatcaaggggcaaaaa

SEQ ID NO: 1032476 - DNA, 120 bp, Artificial Sequence
  ENSG00000249604_6 (sequence is synthesized)
gatctatttatagatctatttacagatcatgaaattcgaatttcatgatctataaataaagtttaactggaacacagcggttcatgatgtaaaaaaactaatttgtttacatacgttcta

SEQ ID NO: 1032477 - DNA, 85 bp, Artificial Sequence
  ENSG00000249604_7 (sequence is synthesized)
ttcatgatgtaaaaaaactaatttgtttacatacgttctatggctgtttttgcattaaaatagcaaaatctggttgggaggccaa

SEQ ID NO: 1032478 - DNA, 120 bp, Artificial Sequence
  ENSG00000249604_8 (sequence is synthesized)
gaacccaggagtttcagaccaccttggcaacacagtgagaccctgtctttaaaaaataaaaaaaaaattttaattagctgggtgtggtggctcaagcctgtagttccagctactcgggag

SEQ ID NO: 1032479 - DNA, 80 bp, Artificial Sequence
  ENSG00000249604_9 (sequence is synthesized)
tccagctactcgggaggctgaggtgatgatatcacgccaatggactccagcctggtggcgcgatctcggctcactgcaac

SEQ ID NO: 1032480 - DNA, 120 bp, Artificial Sequence
  ENSG00000249604_10 (sequence is synthesized)
cctgcctcggcctcccaaagtgctgggttaacaggcatgagccaccgtgcctggccctctccttatttaatatatcatatatagcatctctgctttgtcctatttatcaaaaaacattat

SEQ ID NO: 1032481 - DNA, 120 bp, Artificial Sequence
  ENSG00000249604_11 (sequence is synthesized)
ttttcctttgttaggtcctcgatcttatcatctaaccatttttaaactacaaatttgtattttagaaatatttggtctagcaaaatggctccgaagcaaaaatcaggactcttttgcttc

SEQ ID NO: 1032482 - DNA, 120 bp, Artificial Sequence
  ENSG00000249604_12 (sequence is synthesized)
agttcatcaaacaggccagttaggctatggaatgaacaaacaggaaggaaagggtattgccacctcagggaatactgtcacagaactcttcctccctgtacctatttttccctcctctct

SEQ ID NO: 1032483 - DNA, 120 bp, Artificial Sequence
  ENSG00000249604_13 (sequence is synthesized)
ctctgacttcattctttccaactgcaaaccagcttttcaatgaaaaatgagctatcctgagatgcctattttcccagtttcaccaccaaaaggaaaagccctctattttctagattcaac

SEQ ID NO: 1032484 - DNA, 120 bp, Artificial Sequence
  ENSG00000249604_14 (sequence is synthesized)
ctgagaaattctggggaaggattcaaatgcttcagtaaggtgtcctgcggtgataccaacttgagataacttaaatttattttatggcttgaggtttctaactatgccatgctattctta

SEQ ID NO: 1032485 - DNA, 120 bp, Artificial Sequence
  ENSG00000249604_15 (sequence is synthesized)
tcccaaaactatgtgaggattgatgtatagttgtgaattgttgagttctgtgcctggcctacagattaaccagttacaaaaaggttagaaattctgatcagtctacttttggtcagtatg

SEQ ID NO: 1032486 - DNA, 120 bp, Artificial Sequence
  ENSG00000249604_16 (sequence is synthesized)
tccctcaacttacttatcactgtggccaagaaggtgagtttatgtaaagatatggcatctgccgttcaaccacagttaagggtaaaagggactgaggtcagaaaaaaggaattcctcaga

SEQ ID NO: 1032487 - DNA, 120 bp, Artificial Sequence
  ENSG00000249604_17 (sequence is synthesized)
agaagcaggtattcttgtccaaggaacaggtgctagacagtggaaacataaaaatccaactcaaaccaaataaagtatagactaaattgacattgatacattctcacaaacagatattat

SEQ ID NO: 1032488 - DNA, 120 bp, Artificial Sequence
  ENSG00000249604_18 (sequence is synthesized)
acagctcctaagaactttacaggagaatatttaataatatgaaaatatgctcataatactttaagtgataaaaagcaatttttaaaattatgaaaattattccattttaaggaggcaaat

SEQ ID NO: 1032489 - DNA, 86 bp, Artificial Sequence
  ENSG00000249604_19 (sequence is synthesized)
gcttacatgtacatgtagaaaaaagactggaaggtgatacatgaaaatgtcaatacgatctcagtctttacctactgaacagagga

SEQ ID NO: 1032490 - DNA, 120 bp, Artificial Sequence
  ENSG00000249604_20 (sequence is synthesized)
atgtcaatacgatctcagtctttacctactgaacagaggatgttgtacactgattacatttacccttttcttccataggatcatagaagtgttcctattagggagaattcaggccgtctc

SEQ ID NO: 1032491 - DNA, 120 bp, Artificial Sequence
  ENSG00000249604_21 (sequence is synthesized)
aatttctgaaggctgggaagtccaagaggatagcactggcatctggcaagggccttcatgctgcatcatcccatggtggaaggcagaagggaaaagaatcaatcagaatgatggacacag

SEQ ID NO: 1032492 - DNA, 120 bp, Artificial Sequence
  ENSG00000249604_22 (sequence is synthesized)
catctttatggcctatctagtttactgtagtttttatgggcttaagaagaagaccaccttgtctaatcatgaaattttgaaaaatttaaacataaaaaataaaattcctacattctggaa

SEQ ID NO: 1032493 - DNA, 120 bp, Artificial Sequence
  ENSG00000253242_0 (sequence is synthesized)
gcctgtgctgactcagccgccctccctctctgcacctccggatcagccagactctcctgcaccctgagcagtggcttcagtgctgatttctactggatatactggtaccagcataaacca

SEQ ID NO: 1032494 - DNA, 120 bp, Artificial Sequence
  ENSG00000253242_1 (sequence is synthesized)
ggtccccaggcacttctctggattaatggaaggccggtccaataaagggctcttgctcatatctgatctccagtctgaggatgaggcttactattactgtatgatcgagcacagcagagc

SEQ ID NO: 1032495 - DNA, 120 bp, Artificial Sequence
  ENSG00000243861_0 (sequence is synthesized)
gctgctaaatacatttttggagattcactattctgtttagaaacgttcctgctgacaccagtgttctgaggggccttatcttccacccccaaggagtttatatgcatcctaagagaaatt

SEQ ID NO: 1032496 - DNA, 120 bp, Artificial Sequence
  ENSG00000243861_1 (sequence is synthesized)
gtacaaagtcaaaatgacttgaatactaaccacagaatattaagtggcttccactagatcagcattcccaatgtgtatcctgtgccccaatcctgtgagtaaatttgtagaccaaaaaaa

SEQ ID NO: 1032497 - DNA, 120 bp, Artificial Sequence
  ENSG00000288024_0 (sequence is synthesized)
attatttttgtttttgatcatttcaagaggtttctagtcgatagtgggacaaaatttctaatttgggaacctaattttctcttcaaatcttctttacatctctagcttattaatacacct

SEQ ID NO: 1032498 - DNA, 120 bp, Artificial Sequence
  ENSG00000288024_1 (sequence is synthesized)
cagaagtgttacaggaattaattagcaggattttgaagaatattttgaggtattgattttaatcttattaaatgaaataaccacgtgtcaacctgggggaaagactgagtgaagaccatc

SEQ ID NO: 1032499 - DNA, 120 bp, Artificial Sequence
  ENSG00000288024_2 (sequence is synthesized)
atgatcatctcaaaactcaaaggaatttgcatccagaatggcttaactttgaaaataggcctctcattccaagagagattttaatacaatgcaaagcatcaaaaataacttgaaaatatg

SEQ ID NO: 1032500 - DNA, 120 bp, Artificial Sequence
  ENSG00000288024_3 (sequence is synthesized)
atgaatgctgtgaaattcatgaaacatgaataaaaccttaggatattccatgtttatttcagagaagatataagaaattgatttttacatacttaaaggctttccaaagcaagattagaa

SEQ ID NO: 1032501 - DNA, 120 bp, Artificial Sequence
  ENSG00000288024_4 (sequence is synthesized)
taatctcaaactctgaaagtcattttataaggtacattggtaatcattgcatctgctacttcacaaggttttgtactctttgaaaggtgtcgagcagatcacccttcaaaaatgttccag

SEQ ID NO: 1032502 - DNA, 120 bp, Artificial Sequence
  ENSG00000288024_5 (sequence is synthesized)
ttttctactgaatgaactgaaaggcctcccaattccatattcaaaagattgtgcaatttcatgatttgaaaaattatataaagtcctagtgaattaattcattctgcagccaaaccccca

SEQ ID NO: 1032503 - DNA, 120 bp, Artificial Sequence
  ENSG00000288024_6 (sequence is synthesized)
ggagtcctgtcctcaggacctccctgagccgacttccaccgagggagggggagcttcaggaggcagagcttcaggatgcctgctgtgttctggggacatccttgtcatatccggttttca

SEQ ID NO: 1032504 - DNA, 120 bp, Artificial Sequence
  ENSG00000288024_7 (sequence is synthesized)
gcttcttcttgaagattgtttcgtatcctggcttcatttctcagagaagagccgcgaggagatataaccatctcctttcacattggtctcctcccctcctggaaaacaatgagctccttg

SEQ ID NO: 1032505 - DNA, 120 bp, Artificial Sequence
  ENSG00000288025_0 (sequence is synthesized)
atggtgcaaatgctcatacaggcagctgatgtcagttctgggaactggtattaagagcagtggcatgaaacagagttgatgaattagacagaaaagacagtccattttcggattgctttc

SEQ ID NO: 1032506 - DNA, 120 bp, Artificial Sequence
  ENSG00000288025_1 (sequence is synthesized)
aaaaaagcagcaagagagaagcaaagctgcaaaagcaaatgaaaactccagcccagaacttgacatttgaaatatcaaaattatagttgggagagattaaaattgctgcccagtctgtga

SEQ ID NO: 1032507 - DNA, 120 bp, Artificial Sequence
  ENSG00000288025_2 (sequence is synthesized)
tgttttccactcatctctcttggaggatgaaaatcactgtttttttaaagttctctttttttcttattagctgccttagaagacgtttttgttagaatgactgagtccttagaaaatgtt

SEQ ID NO: 1032508 - DNA, 120 bp, Artificial Sequence
  ENSG00000288025_3 (sequence is synthesized)
tttgttagaatgactgagtcccaaagtgaaatttcccaaagtatgtgttaaagaacagaagcagtattaaaaagtgaataagctgcttaaagatccttaaaacagacatatcatcttaaa

SEQ ID NO: 1032509 - DNA, 120 bp, Artificial Sequence
  ENSG00000288025_4 (sequence is synthesized)
tatctaagataccttcatccatagaaaaacaaaatccacatcctccctaaaagtgatcaggcttttagagcatgccagaagatgatattaatattcagtcttgcatcattctccttcttt

SEQ ID NO: 1032510 - DNA, 120 bp, Artificial Sequence
  ENSG00000288025_5 (sequence is synthesized)
tcctggacacagtaaatcatcatcactggagaaaaggaccagcatttgggagagcttttcatagcctgtgtaattaagttaaggaattttaaagaggaatttttctaagtctcagaggga

SEQ ID NO: 1032511 - DNA, 120 bp, Artificial Sequence
  ENSG00000288025_6 (sequence is synthesized)
aaaagtgttctctttatattagcagtacagacactgttgtgttccaagaatggacaccaaggatgaattcaatgaattccctctttgtatcacacatttgtaccaggttcttttcagaaa

SEQ ID NO: 1032512 - DNA, 120 bp, Artificial Sequence
  ENSG00000288025_7 (sequence is synthesized)
tcaggatttttaaaagcaaaaaacattttctttcttagatgttgcagttaacttcatgtagtgtaggtaatatagctgctgcatttaaaacaatcctatatactttatcatcctcacata

SEQ ID NO: 1032513 - DNA, 120 bp, Artificial Sequence
  ENSG00000288025_8 (sequence is synthesized)
gttctgaggactgggataagtcctgttgtgtgggacaacattcagagtaaatttgggcattaaataaatgatagtgaagaatctgcctctttttaaacctgtaatgaaatgactttccta

SEQ ID NO: 1032514 - DNA, 120 bp, Artificial Sequence
  ENSG00000288025_9 (sequence is synthesized)
gtcaagaaatatacattttctgttcttttttaatctgattatttgcctttctactaggaagcatcatatttttcaaagtgcctgcatcatctcctcagaggatctctgtctttctcttct

SEQ ID NO: 1032515 - DNA, 120 bp, Artificial Sequence
  ENSG00000288025_10 (sequence is synthesized)
gactcaacacatacatacatttctgctctaatctacagtaatactttggagtagaacaactgacataagatgttttttatagagaaaaaattacatacctttttcttctttccttttggt

SEQ ID NO: 1032516 - DNA, 120 bp, Artificial Sequence
  ENSG00000288025_11 (sequence is synthesized)
cttggcagaggatgcttcttaaatgctcacactcactgggtgagtttgggcaaaaggagaagagaggaggtgctggaaggagcttctttacaaatgaacctttgtctgccttgtctctgg

SEQ ID NO: 1032517 - DNA, 120 bp, Artificial Sequence
  ENSG00000288025_12 (sequence is synthesized)
cctgggatcgacagactcgctgctccagccaggactgtggggaggaggggagtggaaggagacaaggctgcaaggactgcctcctttggaagtgttcagtttgttccaaaccaggcgaga

SEQ ID NO: 1032518 - DNA, 120 bp, Artificial Sequence
  ENSG00000288025_13 (sequence is synthesized)
acgaatagaacagcttctttacagagggaaataactagtctatacaagaacctcagggaggcagactctggtagcaataaaacataaaacctgagggattttaaaagaacacagagtgat

SEQ ID NO: 1032519 - DNA, 120 bp, Artificial Sequence
  ENSG00000288025_14 (sequence is synthesized)
gtgtgtgtgtgtgtgtgtttgtgtgtctgtgtgtgagagagagagagagagagaagaggaaagtggggaatggctagctgcgcacctcttcccctttcacagttttcctagccatctaga

SEQ ID NO: 1032520 - DNA, 120 bp, Artificial Sequence
  ENSG00000288025_15 (sequence is synthesized)
tcacagttttcctagccatctagatctgttacaaaatcctggtagaagatacgttccaattcaccttccatttctcacccaaagactcattagtagtcaatggaaagctaaaatgatgac

SEQ ID NO: 1032521 - DNA, 120 bp, Artificial Sequence
  ENSG00000288025_16 (sequence is synthesized)
taaaaagaaatgtattctgtgccttagaaataaaagcacaaaagaaattttattctgttttcagcaaactatactggaattctagcatctgttaactgttgtttaggtttttaaaaaatt

SEQ ID NO: 1032522 - DNA, 120 bp, Artificial Sequence
  ENSG00000288025_17 (sequence is synthesized)
cgattaggagtagtgttttgggaattagagatattatattgtaatggagttggaattatctagacagacaattgaggcaagggcattccaggttgaattacaaaggcatgaaggtgaaaa

SEQ ID NO: 1032523 - DNA, 120 bp, Artificial Sequence
  ENSG00000288025_18 (sequence is synthesized)
agagggtgacaacttcggagattataggtggtttcatttggctaaaaccaaaggtggtaggagatgaaatttgagagacaagaagcagcaaattgatgaattacctcatatgccatgcta

SEQ ID NO: 1032524 - DNA, 120 bp, Artificial Sequence
  ENSG00000288025_19 (sequence is synthesized)
aaaaaattgtttttatcgtgaagatgaatggaaagatgatgaaaacatattaaaaaggatgaaaagcctgactgcagtgtgaaagaaggatggtttcctgggaggaaaggagactaaaga

SEQ ID NO: 1032525 - DNA, 120 bp, Artificial Sequence
  ENSG00000288025_20 (sequence is synthesized)
cagaaaataccggcttttgctgtagtccagaagggaagataggaaggaaaactgaaaagacctgatgaccacttaagtgtttatgtttagcatagagataggaaattttattaactttca

SEQ ID NO: 1032526 - DNA, 120 bp, Artificial Sequence
  ENSG00000288025_21 (sequence is synthesized)
aatagaaatgagttagttggtgaacgttgagtttaaggaaccctaaatacagttgagaatgtttagtaggcagttggttaaatagacctagagcttaggaaaaagcctggtctagagaat

SEQ ID NO: 1032527 - DNA, 120 bp, Artificial Sequence
  ENSG00000288025_22 (sequence is synthesized)
tagttcatcaaccaatcaactcaatatcaaataatctcaactaaataactaatgcaggtattcaactaaatgatagccgaagtcatggttgtaccactaagaagttactgtgctcttact

SEQ ID NO: 1032528 - DNA, 120 bp, Artificial Sequence
  ENSG00000288025_23 (sequence is synthesized)
gtgtgccaggcatttcatacgtctgaactcgttcactctccttccaaccctatgaagtaggtactattattagtcccattttataaacgaggggaacatcagagatgtcaggtaacctgc

SEQ ID NO: 1032529 - DNA, 120 bp, Artificial Sequence
  ENSG00000288025_24 (sequence is synthesized)
cccaaatcacacacacagccagaaaatggcgagaccctggcagtgtgtttctagtgtctttgtttcccaccattatgctgtactgccccttagaatagattataaagttcatgatacgac

SEQ ID NO: 1032530 - DNA, 120 bp, Artificial Sequence
  ENSG00000288025_25 (sequence is synthesized)
tgagagcagaattattcaaggaatgggcagagaactgggaaggaaactgagaagaggtagccaaagaagtaggggaaaattaggagagtgtcatcatggaagttaaaggaagagtatttc

SEQ ID NO: 1032531 - DNA, 120 bp, Artificial Sequence
  ENSG00000288025_26 (sequence is synthesized)
aagagaatggaggtgaatggaaggctgctaatgacagcagtgctgggagaacaacacgtgcacaccctgatatgaaggtaggcagagcaaagagaaggtcaatacaaccagaagcagttc

SEQ ID NO: 1032532 - DNA, 120 bp, Artificial Sequence
  ENSG00000288025_27 (sequence is synthesized)
cagccctgacagagatcaaatctctgcttggtctccatttcgctgaaactggagcaagtggcatggacctcaggaagggagatgagaggtgtgtgcgcaatggactgcacatttcctttg

SEQ ID NO: 1032533 - DNA, 120 bp, Artificial Sequence
  ENSG00000288025_28 (sequence is synthesized)
catatttataaacaagtctgctgtgattcttactaaataaagatgatgccatacacagatggagttaatttgtttgcatgatttaaatgtatataaatatgtgaatatgaggaggaaaat

SEQ ID NO: 1032534 - DNA, 120 bp, Artificial Sequence
  ENSG00000288025_29 (sequence is synthesized)
ggaaactagcctttattccactttaagagctatccgtcctgtttacctcaggtagatctaaacagaggtatggtgccaaggcaaatcaacattccctgtagatggatcctctctttactc

SEQ ID NO: 1032535 - DNA, 120 bp, Artificial Sequence
  ENSG00000288025_30 (sequence is synthesized)
tgttttactcttatttccctgtgtgtctaattctgtctaaatttcccttattgtgttgcttattttgtctccttgtgtctgaattcatagctgctcaaaatagttgattcatttttatat

SEQ ID NO: 1032536 - DNA, 120 bp, Artificial Sequence
  ENSG00000288025_31 (sequence is synthesized)
tcagcaacactgaaatccatacaatatgcttggcattgtgcttatgaatgctgcctgtaagtggtacacagcagctcttggtaatgatctaatcatctctggatcatgttctgagccact

SEQ ID NO: 1032537 - DNA, 120 bp, Artificial Sequence
  ENSG00000288025_32 (sequence is synthesized)
taggaaagttttcccctaagaagcacatttggaccctggcctccaaatcccttgtgttttcaaacatgtgtttattactagctggacttcctatcatttctaggaagaatcattaaacaa

SEQ ID NO: 1032538 - DNA, 120 bp, Artificial Sequence
  ENSG00000288025_33 (sequence is synthesized)
tatcaaacttataattgcttgtcattcatcctgatgtccattacatggggatgtccttttgagaaggagttcaattccaaaccaaggcctgcaatcacagagtctgcctttgtggttttt

SEQ ID NO: 1032539 - DNA, 120 bp, Artificial Sequence
  ENSG00000288025_34 (sequence is synthesized)
aatttgtggctcaaatctgaaaccactctttgttttcctgtaaatggagccttaaggccttttagttttctttcctgatgggctgttactcagacctcttatcgaacccgctttatgttg

SEQ ID NO: 1032540 - DNA, 120 bp, Artificial Sequence
  ENSG00000288025_35 (sequence is synthesized)
ctctgaagaccacctgtttctttgagacggcctcaggagcctcccaaagtgaatcttttatgtgacatagagcttctattttaagtaaaaccatccaaatgtaatgtacagatttccaga

SEQ ID NO: 1032541 - DNA, 120 bp, Artificial Sequence
  ENSG00000288025_36 (sequence is synthesized)
aaatatgtccagctatgtatttttatgtgatgatgatgacgatggtgatgatgatgtgtgtgtttatttctataggtatatgttatcactcttaggtgcagtcaggtttgttagaaatag

SEQ ID NO: 1032542 - DNA, 120 bp, Artificial Sequence
  ENSG00000288025_37 (sequence is synthesized)
aaaatcctcacaaattagtgataagaccaattcgtgagtagagaaacattttatacagaatttaagcaattacattcaaagtactgaaattaaatttgtaaagagacctaattagtattt

SEQ ID NO: 1032543 - DNA, 120 bp, Artificial Sequence
  ENSG00000288025_38 (sequence is synthesized)
ctttttaaaaaaaaaaaaacctcccaaaattgaaaaattgagaaaaacaccaaaaaacagcaaaatccttccaatcaggtgaagtctgaagagatgtctcagatataaataatttcagat

SEQ ID NO: 1032544 - DNA, 120 bp, Artificial Sequence
  ENSG00000288025_39 (sequence is synthesized)
atcagacatcttaagcttgtgagagaaaaaaaatggaacatgcattagttcttcctctgatgtccacctgggagctcatgcattcaccctaatttagaatctgctgctcctctgttccat

SEQ ID NO: 1032545 - DNA, 120 bp, Artificial Sequence
  ENSG00000288025_40 (sequence is synthesized)
gattgacccctttctctcatttccctcaggcttgactccttctgggctcaccaaggctggcagtatggggagaagcagcagctggtttcggccttcacagctcacatcttcccaggagag

SEQ ID NO: 1032546 - DNA, 120 bp, Artificial Sequence
  ENSG00000288025_41 (sequence is synthesized)
aggtcctgagttattgccctaatcttctcaaagctgtttcacagacacaagcatctggttgtgactcatgtcccatttgaagctggagaagcagcaagatagactaagatatgaattccc

SEQ ID NO: 1032547 - DNA, 65 bp, Artificial Sequence
  ENSG00000260507_0 (sequence is synthesized)
tcagggagcctcctctaaacagaaaagactgacccccagtcagtgttttattttccctgatgacc

SEQ ID NO: 1032548 - DNA, 120 bp, Artificial Sequence
  ENSG00000260507_1 (sequence is synthesized)
agactgacccccagtcagtgttttattttccctgatgaccgcaggccatgaacttatggaacaataaggttaaaaaaacctgaatatccaacagcatgacactgactaaagaaatactgg

SEQ ID NO: 1032549 - DNA, 120 bp, Artificial Sequence
  ENSG00000249231_0 (sequence is synthesized)
aaccagagttcgtaattctaatgacctctccagatttatggctgcagcattcccaagaaggggtagggaggggcatataatgagctaccctcaggggatcagaaagaaaagggaagctgt

SEQ ID NO: 1032550 - DNA, 120 bp, Artificial Sequence
  ENSG00000249231_1 (sequence is synthesized)
caccaggggcccctcctgctgaagactgtctggacttcctgattttcactcctgtataaaccccctcccccattactacctttgtctccttggggaaaaaaaatgtttttcacttaagca

SEQ ID NO: 1032551 - DNA, 120 bp, Artificial Sequence
  ENSG00000249231_2 (sequence is synthesized)
aaataataactacccagtatttgtttctggagtgaaattgtaaacttcattgtacattcttcctggctttgatgcttatcgtgaagagttcagtgaaaataaattgtttttatgaaagca

SEQ ID NO: 1032552 - DNA, 120 bp, Artificial Sequence
  ENSG00000249231_3 (sequence is synthesized)
agttttatagatgagtacacagaaaatcagaggtttaactaacatgatcaagatctcctaaccagttaagtggtgaagttggaatttttacccaagtctgtttgctaaatgtatgctctt

SEQ ID NO: 1032553 - DNA, 120 bp, Artificial Sequence
  ENSG00000249231_4 (sequence is synthesized)
catcattacatctacataggaccagctacataacttgtagtgcccagtgcaaaatgaaaatgcaccctaggctgtgatcctggaactgaacatctgatgagtcaatacagggcacggagt

SEQ ID NO: 1032554 - DNA, 120 bp, Artificial Sequence
  ENSG00000249231_5 (sequence is synthesized)
agtgctcttctccctgaaccatgagacctgcatctcaggttgcagaaaacatgtggagcagaggtacagagccttcactttgctgcagcaacaaataaagactttgaagtcctccattgg

SEQ ID NO: 1032555 - DNA, 120 bp, Artificial Sequence
  ENSG00000249231_6 (sequence is synthesized)
catggaactgtaagaatatgttctgtggacactacagatgcagattaaatcacctgcaaagtgaatctgtcagccctaacaataagaatagctcttttatgatgagcaggtgagaccagg

SEQ ID NO: 1032556 - DNA, 120 bp, Artificial Sequence
  ENSG00000249231_7 (sequence is synthesized)
taattaccgaagaaagagagtgatgtgttcattgaagtctactcatggaggaaagaaggctatttcaacatgggaaactgaaatcgggcatatccctgcggaagaagctgtctcttagcg

SEQ ID NO: 1032557 - DNA, 120 bp, Artificial Sequence
  ENSG00000249231_8 (sequence is synthesized)
agaaatggccagaatgttccttgctgcagatgcattggccccatctgcaggtcctctttgacacctaccttactctctccctccactcacactctgagaactgtgctcaggggcagcgct

SEQ ID NO: 1032558 - DNA, 120 bp, Artificial Sequence
  ENSG00000249231_9 (sequence is synthesized)
acaacttccacattggtctttacagggcttgagtgattatttcaagaacagaacgctgtgtggaaacctttaccatatttcgttgtatctaagacacattttttttttttgaaatttaac

SEQ ID NO: 1032559 - DNA, 120 bp, Artificial Sequence
  ENSG00000249231_10 (sequence is synthesized)
atctctaaggttgggttatgtttcttcatcattgtcaggttggagcttaatcagcagcacttttttttaatgtcacacacagtaatggtgatgcatctcacaattgagatcatcttagac

SEQ ID NO: 1032560 - DNA, 120 bp, Artificial Sequence
  ENSG00000249231_11 (sequence is synthesized)
atgatggaatatggaatcgtgtgcctgttacaagccaggctcttgtctgggttctagagacggtggaaaccaagacagcaccatcctctagtggtgttcacatcccaccacagtggagtc

SEQ ID NO: 1032561 - DNA, 120 bp, Artificial Sequence
  ENSG00000249231_12 (sequence is synthesized)
tgtggagagagattttgtaagtccggtctggaagtggtcattgttcagaatccagccacgtgggtacatggaactgtaaggctatttcaacatgggaaactgaaatcgggcatatccctg

SEQ ID NO: 1032562 - DNA, 120 bp, Artificial Sequence
  ENSG00000249234_0 (sequence is synthesized)
cgaaaggctcagagctgccaggcataacagggcgcactcacctactgagtgtacagctccagagacactgaggagtttatggaaaatgacagcatcccactacaccacagaaaacatacc

SEQ ID NO: 1032563 - DNA, 120 bp, Artificial Sequence
  ENSG00000249234_1 (sequence is synthesized)
ccactgaaaggggtaaagttactctcagatttctccatgaagtcttctatattaaaccagcatgaaggactgaaccttacactacgtatctggcaactcaaattctgatggagaaaaaat

SEQ ID NO: 1032564 - DNA, 120 bp, Artificial Sequence
  ENSG00000249234_2 (sequence is synthesized)
tcataggaaaattcataagaaaaaaatagccgatatgagtatccctcctgactggctctcattaagtagctactactgaagcatatgaagaaggcaacatattcatataaagagtaaaaa

SEQ ID NO: 1032565 - DNA, 120 bp, Artificial Sequence
  ENSG00000249236_0 (sequence is synthesized)
atgacacctgaacaggctgcttcacaggaaagaaagacagatcttaagtaaccctaaacttgaaaaatatgcaggaagcatgtctgccatttactctagagggagacattatctgtatct

SEQ ID NO: 1032566 - DNA, 120 bp, Artificial Sequence
  ENSG00000249236_1 (sequence is synthesized)
ttgaagactgtaagtaagcctgtcctttgctccacggctctgagagtctaccttccaacattctttaaaagtttcggattatgaaataaaatgctgttcatccactgaagaacagaccct

SEQ ID NO: 1032567 - DNA, 120 bp, Artificial Sequence
  ENSG00000249236_2 (sequence is synthesized)
aggggcactggatagctggggaagacgcaagagggagaattgctttacaaccctttggctattgtcactccagttcctagcttaaaactgtacgggacatttccagtatagagcctgctg

SEQ ID NO: 1032568 - DNA, 120 bp, Artificial Sequence
  ENSG00000249236_3 (sequence is synthesized)
agaatgaacatgaaatcaaggacattacctgatgatggattatgtagatggcgaaggtgtggtggcacggagacctcttggtgaccaggccggacactgagcaatctgtccagcagctta

SEQ ID NO: 1032569 - DNA, 120 bp, Artificial Sequence
  ENSG00000249236_4 (sequence is synthesized)
tcagaagaagacacagtccaaactttgtaggaaaatacctgattagaatcactcttccaggggttatctagtaacatctggcagccagttctgttatttaataaatcctgctcacttcga

SEQ ID NO: 1032570 - DNA, 120 bp, Artificial Sequence
  ENSG00000249236_5 (sequence is synthesized)
tcgaagtcgtggtcaggagtaagactgagctgggtagagatagtaaggggcatgagagatggagaaagaaagcctcagctaccatgagactttgttcagtgctatgatctgaatgtgttt

SEQ ID NO: 1032571 - DNA, 120 bp, Artificial Sequence
  ENSG00000249236_6 (sequence is synthesized)
ctaactcccaagaagatggtactacaagatgattggaaggtgattaggtcatgaaggctctgcccttatgggattagtgccctcataaaaggggcaccagagagctaactgccttaccct

SEQ ID NO: 1032572 - DNA, 120 bp, Artificial Sequence
  ENSG00000249236_7 (sequence is synthesized)
ttctccatgtgaggacggaatgagagggcgccctcatccaaacactgaatctgctggtgccttgattttggactctacagccttcagaactgtgataaataaatttctgttttttataaa

SEQ ID NO: 1032573 - DNA, 120 bp, Artificial Sequence
  ENSG00000249236_8 (sequence is synthesized)
acactcaccactttgattccaacagcgaagtcgaagtcgtggtcaggagtaagactgagctgggtagagatagtaaggaagctgaaccccatcctaactgatgtaaaagagacaggccaa

SEQ ID NO: 1032574 - DNA, 120 bp, Artificial Sequence
  ENSG00000237365_0 (sequence is synthesized)
aggtttccctatgtgcagacatcgagcagagctactcgtaaggggtcccaacgccttatgaaatttaaacaatcaagatgaagccactaacctgtgaaagttctattcatctagtgtaga

SEQ ID NO: 1032575 - DNA, 120 bp, Artificial Sequence
  ENSG00000237365_1 (sequence is synthesized)
ccgctaagaccagcacgtcttctcatgccccacacagagccaagctccttcctagcctgcctggattctcctacctggaatcccctgtccacatcaattaaagcaacaaacaagccacga

SEQ ID NO: 1032576 - DNA, 120 bp, Artificial Sequence
  ENSG00000277749_0 (sequence is synthesized)
gcttttctgaacgctgcctgaccctcaaggctccattctgggccctcctcctccaggaagacccccgggctatcccaagacaggccatcagtcatgactccttgggtattgggccagagt

SEQ ID NO: 1032577 - DNA, 120 bp, Artificial Sequence
  ENSG00000277749_1 (sequence is synthesized)
ccagcctctgctgacagcagattggggccagcccttgctctcagcccagctaccaagaaagaaaagcggcccctggtggccaggagctggcggccacagctggaccctggtgtcattcac

SEQ ID NO: 1032578 - DNA, 120 bp, Artificial Sequence
  ENSG00000277749_2 (sequence is synthesized)
tgaccactctgtaaagtgtgtgaacacagataaaacatagtcattgtccaaaccacaaaaatgaccaaactccctttcctggctaatatgagtgactgctgcttctttattagtgaccat

SEQ ID NO: 1032579 - DNA, 120 bp, Artificial Sequence
  ENSG00000277749_3 (sequence is synthesized)
cattcctgccttctcgatgagaactcctatgataccgactcttagaatgctgattctaagccagcctcccgctgtcatctaacccagagcaaagcctgtttcctcaaaccctttcccaaa

SEQ ID NO: 1032580 - DNA, 120 bp, Artificial Sequence
  ENSG00000277749_4 (sequence is synthesized)
tcccctaacaccagcttgaatctgtgaagtcctttcccacacactctttctgggatgccccgcaactcccatggttgcatcccccttactacaacgagtcaataaacccagaataactcc

SEQ ID NO: 1032581 - DNA, 120 bp, Artificial Sequence
  ENSG00000272516_0 (sequence is synthesized)
aagctggtaggaactttccttcatcctttcctcttttccgaatattttgaaggtgcagttaatttgtgaagtcttgttacactcattgtatgggcctattaaggttttgttatgaaaaca

SEQ ID NO: 1032582 - DNA, 120 bp, Artificial Sequence
  ENSG00000272516_1 (sequence is synthesized)
ataggaacttaaatacccatgtgaaatgcgccttgcattgaccaacacgaaaggaggacgtttggtattttaaaatagtttattttatggtatcttttgaggggataggatttactttta

SEQ ID NO: 1032583 - DNA, 120 bp, Artificial Sequence
  ENSG00000272516_2 (sequence is synthesized)
atctttttcttcctaatacacgaagaatgatagttggaaattctgatttagtttagtacttagtcagaatggaggccccataagatttttaaaatactttggctgttttccccacacagt

SEQ ID NO: 1032584 - DNA, 120 bp, Artificial Sequence
  ENSG00000272516_3 (sequence is synthesized)
cttcattgcattttatccaaaacaaaaaggtcttgatcaaattacatgaaaaacgactagacatcattttagatctgtgctgcatctaacagtatactaattaaaacctttcaaaaaccg

SEQ ID NO: 1032585 - DNA, 120 bp, Artificial Sequence
  ENSG00000272515_0 (sequence is synthesized)
ataaaagaaaagaagaggaaaagataactctgttataccaattactaggtatgtgaaagagaaaacaaccaacagtgtataagggcgacagaatcaaggctgggatatggaaggagggga

SEQ ID NO: 1032586 - DNA, 120 bp, Artificial Sequence
  ENSG00000272515_1 (sequence is synthesized)
ggaagagaggaagagagaacagaaaatatttttccaagttgtggttcttgatccaagatctgaaaatataaggtttaacttgccaaagtagggcaatggcttgccaatgggacaacggct

SEQ ID NO: 1032587 - DNA, 120 bp, Artificial Sequence
  ENSG00000272515_2 (sequence is synthesized)
gctttgtaaaaccatttgctctgagttcagataagtaaaaactatttctcctattttccttgactctctcatgcatgatctcgggttctctgtattttccagttttggatgtcaccacct

SEQ ID NO: 1032588 - DNA, 120 bp, Artificial Sequence
  ENSG00000272515_3 (sequence is synthesized)
atatcagttagagtccacctgctatagtaaacaaccgacacaattacagtgatttaaataagtaaactctatttctgtatgtaataatagtcctgttagttccagttatcaggcagcttt

SEQ ID NO: 1032589 - DNA, 120 bp, Artificial Sequence
  ENSG00000272515_4 (sequence is synthesized)
gacccaggaagacattcacaaaatcagacaattttccttctgggttcctactattcaatagtttgtgcccttgtgtattcagtcaaaaataaactgcttccacatcttcattccaaccca

SEQ ID NO: 1032590 - DNA, 120 bp, Artificial Sequence
  ENSG00000272515_5 (sequence is synthesized)
ggaaaaagactcacccatacaaaaaagcttaacttgaatcatccagaagtagcatccaatatctccactcacacacattgttccaaacatgaggtacatatgcacacctagccagaggaa

SEQ ID NO: 1032591 - DNA, 120 bp, Artificial Sequence
  ENSG00000272515_6 (sequence is synthesized)
agccagggacatacaggttttagctggatggtcaaatgtttagataaagatatatttatagggaataaaggaaatgaatttagggagaaaagcactacctgtctgatttctgatttcttc

SEQ ID NO: 1032592 - DNA, 120 bp, Artificial Sequence
  ENSG00000272515_7 (sequence is synthesized)
aagttaccttctgttcaagttggctttggctatgcagtcagtggtttgctttcattatgcatttcctgaccttagtcctatccctggttccatttttatcatcccattactatctttcat

SEQ ID NO: 1032593 - DNA, 120 bp, Artificial Sequence
  ENSG00000272515_8 (sequence is synthesized)
cctctcatgtatgcctttttctttattttctgattccactcccacctctcaacccaaaattttgctgtaacctctttcagcagtatattttggtacctggtacagtcaacgtgctgagtg

SEQ ID NO: 1032594 - DNA, 120 bp, Artificial Sequence
  ENSG00000272515_9 (sequence is synthesized)
ttagggttccattaaaggaaaaatatacattttacataatttcataaagaaagatttcttacagttaagtaaattaaacaggatatcatgtacataatgcatttgatttagaagttgagt

SEQ ID NO: 1032595 - DNA, 120 bp, Artificial Sequence
  ENSG00000272515_10 (sequence is synthesized)
tgtacataatgcatttgatttagaagttgagttttatgatgtttagaaactgtaacaataaggataaaagataattctagaaaaattcatacattcaaaaaatactattgtaataaaagt

SEQ ID NO: 1032596 - DNA, 120 bp, Artificial Sequence
  ENSG00000272512_0 (sequence is synthesized)
tcccaactggggccgagttcaccagggcccacgggaggcgagcgagccctcccaccagcactggccctccaggccccagtctgtgcctccatcaggagcccccctgggccctccaggaca

SEQ ID NO: 1032597 - DNA, 120 bp, Artificial Sequence
  ENSG00000272512_1 (sequence is synthesized)
cagccgtgcacagcttgtaggagcctcccaggcccaacaagccaggccacccctggcccctggctgccctgccccctccctgagctccgagggccaggccagtgaccctgggcggggtag

SEQ ID NO: 1032598 - DNA, 120 bp, Artificial Sequence
  ENSG00000272512_2 (sequence is synthesized)
cattgggctgggggtcccacccttggtccccccagcagtcctactctgggggtcctggtcccaggagagcctcaaagtagcccttccccttgggagcctgagaccccatgagggaggccc

SEQ ID NO: 1032599 - DNA, 120 bp, Artificial Sequence
  ENSG00000272512_3 (sequence is synthesized)
ccttctccttgggagcttgagaccccgtgagggaggcccccttccccttgggagcttgagaccccgtgagggaggcctcctcagcagcacaggaagggacggtcttcttgggggcagctg

SEQ ID NO: 1032600 - DNA, 120 bp, Artificial Sequence
  ENSG00000272512_4 (sequence is synthesized)
gaagctcagcgtggccgggggaggggagttgctcagagaaggcatcagtgcagaaggggaaggagggcctggggcagcgaagctgggagtgtggggaggagctcagggtaagagaggcac

SEQ ID NO: 1032601 - DNA, 120 bp, Artificial Sequence
  ENSG00000272512_5 (sequence is synthesized)
cccacaaagtcacccgggctgtgggtcccaagagggcagggcatctctccaccaggctctggccttgaatgccctctccactgtggcgaaagggccctgcatagctgcccagggaccact

SEQ ID NO: 1032602 - DNA, 120 bp, Artificial Sequence
  ENSG00000272512_6 (sequence is synthesized)
caggttctgggggaatcacagtccttgggcagtcccttcgcagtctgggttcctttgtgctccacaccacctgccccctggcttttcccccttgtttcctcctaacttgtcgtccatccc

SEQ ID NO: 1032603 - DNA, 120 bp, Artificial Sequence
  ENSG00000272512_7 (sequence is synthesized)
atctgccgcaggctgggtggtgcatcatccgggcccagctggacggggctccagagggcgagggctgagtctgtccagaagctctgtcctcagcacccaaaacagggaaatggacccacg

SEQ ID NO: 1032604 - DNA, 120 bp, Artificial Sequence
  ENSG00000272512_8 (sequence is synthesized)
tagactagcgaggtctcaggaaacacagcctgaggggccgggctggacgggggcagcataggggctgtcctgggctccccctcaggccgcccccttctcagagcccccctcgggcctccg

SEQ ID NO: 1032605 - DNA, 120 bp, Artificial Sequence
  ENSG00000272512_9 (sequence is synthesized)
ggagccagcctctgcctacacccagccaggacgcccaccagaacctgcttaggcacgcgggggttctttctgccctccccaccctgcatcctgtggccccagacgtgaggtgccccctcc

SEQ ID NO: 1032606 - DNA, 120 bp, Artificial Sequence
  ENSG00000272512_10 (sequence is synthesized)
cgcggggggtcctttctgccctccccaccctgcatcctgtggccccagatgtggggtgccccctccagcgggggttctttctgccctccccaccctgcatcctgtggccccagacgtgag

SEQ ID NO: 1032607 - DNA, 120 bp, Artificial Sequence
  ENSG00000272512_11 (sequence is synthesized)
gtgccccctcccgcggggggtcctttctgccctccccaccctgcatcctgtggccccagatgtggggtgccccctccagcggggggtcctttctgtcctccccaccctgcatcctgtggc

SEQ ID NO: 1032608 - DNA, 120 bp, Artificial Sequence
  ENSG00000272512_12 (sequence is synthesized)
cccagacgtgaggtgccccctccagcggggggtcctttctgccctccccaccctgcatcctgtggccccagatgtggggtgccccctccagcggggggtcctttctgtcctccccaccct

SEQ ID NO: 1032609 - DNA, 120 bp, Artificial Sequence
  ENSG00000272512_13 (sequence is synthesized)
gcatcctgtggccccagacgtggggtgccccctccagcggggggtcctttctgccctccccaccctgcatcctgtggccccagatgtggggtgcctcttcccgcgggggggcctttctgc

SEQ ID NO: 1032610 - DNA, 120 bp, Artificial Sequence
  ENSG00000272512_14 (sequence is synthesized)
cctccccaccctgcatcctgtggccccagatgtggggtgccccctcacgtgggggtcctttctgccctccctactctccagacatttcctgcccctccccacctcaggtggcggctgctc

SEQ ID NO: 1032611 - DNA, 120 bp, Artificial Sequence
  ENSG00000272512_15 (sequence is synthesized)
agcagctggggtctggcccggtcccccatccctgcccctccccagcgatttttatcttggcttttggttttctgctgaatagtaggtgaaagtcatcttctcggtggagggggtgtggct

SEQ ID NO: 1032612 - DNA, 120 bp, Artificial Sequence
  ENSG00000272512_16 (sequence is synthesized)
ggcagcccctggtcacttccagttcatctctcactgcctccttgatgaggaccaagggtcaataaatgtttgctgaattcctttgcctctggggtgtctgggccgtgtgtgtctgggctt

SEQ ID NO: 1032613 - DNA, 120 bp, Artificial Sequence
  ENSG00000272510_0 (sequence is synthesized)
cagagaagatcagggacagcaggggcatcatttccctcctaaaaccaaattaacaaactattagctcaagttaaaatttcttctctccagctaaaaaaagataaaataaaaatcccaaac

SEQ ID NO: 1032614 - DNA, 120 bp, Artificial Sequence
  ENSG00000272510_1 (sequence is synthesized)
ttcacagacagcttattctaaaagtttgattttgtatctcagtataataggctatgctcaataagttctgcatgaggaaacaataaaagggataataaaggacttaaggtgtaaacatgg

SEQ ID NO: 1032615 - DNA, 120 bp, Artificial Sequence
  ENSG00000277744_0 (sequence is synthesized)
cctggcctacagtatgcttcatagaaatatgaaaagaatgagagcaaggttgagatagaaagtaacagggcatccctcctgagtaaaacaatcctgccccctcacgctctcgtctaccct

SEQ ID NO: 1032616 - DNA, 120 bp, Artificial Sequence
  ENSG00000277744_1 (sequence is synthesized)
ccggtgccagcgccagcatctggactcttggcaaggagccctggagccctggagcgagggaactccggccccacaaaggccagggaatcctccagtctggtgagacggagggcttctggg

SEQ ID NO: 1032617 - DNA, 120 bp, Artificial Sequence
  ENSG00000277744_2 (sequence is synthesized)
aagggaggcctatacaaggctccatgaaggaggtggaagcttgcaagacgatgatagtcttgtaatcagtccgatggagatggatgtaaataataatattaataaacaccatcaaatgtg

SEQ ID NO: 1032618 - DNA, 120 bp, Artificial Sequence
  ENSG00000272519_0 (sequence is synthesized)
agaaagcaacaaagacaatgactggcaagacagaagaattgtgcagagaaagaggaacactgtgacccgatcaaggacgaaatgattcccaacctccttagagccttgctggtgccgaga

SEQ ID NO: 1032619 - DNA, 120 bp, Artificial Sequence
  ENSG00000187185_0 (sequence is synthesized)
ctcggggcaccaggcagcctgcggagagaacaaggggagataagcttgaagaccgtggaccagcacaactgcacctcgggcagagccagccatctggaagggtctacgccccaccggtcg

SEQ ID NO: 1032620 - DNA, 120 bp, Artificial Sequence
  ENSG00000187185_1 (sequence is synthesized)
ctggttacccagcgcagcagctccaactgcactgtcccccaaagaccctagggctcgcaggatgaaatggggcctgctgccttttgggggtatttgtttccgaatacggaggctccgaag

SEQ ID NO: 1032621 - DNA, 120 bp, Artificial Sequence
  ENSG00000187185_2 (sequence is synthesized)
cagcatctccaagctgtattaacaggggaaaacagttctcccattttcagagaaccaaggcaatctttcccccaagaaaatcaccttgccggccaggcacagtggctcatgagacaggag

SEQ ID NO: 1032622 - DNA, 120 bp, Artificial Sequence
  ENSG00000187185_3 (sequence is synthesized)
ggaggatcgcttgaggccaggagttctagaccagcctgaacaacatattgagaccctgtctctacaaaacaacaagccaggcgcggtggcacaggcctgtggtcccagctactcaggagg

SEQ ID NO: 1032623 - DNA, 79 bp, Artificial Sequence
  ENSG00000187185_4 (sequence is synthesized)
tcaggaggctgaggcgggaggatggcgtgggcccaggagtttgaggctgcagtaagctatgatcgtgtaaaaaaaaaaa

SEQ ID NO: 1032624 - DNA, 120 bp, Artificial Sequence
  ENSG00000187185_5 (sequence is synthesized)
gtgcagggccctgaatgccaggacgggaatttaatctaattcaacttcagcaatgggctgagggacagcttcatgccaggcaaagggaaaaactctttacacacaggattgcctttgctt

SEQ ID NO: 1032625 - DNA, 120 bp, Artificial Sequence
  ENSG00000187185_6 (sequence is synthesized)
tcattcaatccccgcaacaacatgtgtgcaaacctcccacctggcatcctgcgtgtgtccagcacctccctgcacccgggcaccactcatgcaggtgggcttggcatcctcacagcctct

SEQ ID NO: 1032626 - DNA, 120 bp, Artificial Sequence
  ENSG00000187185_7 (sequence is synthesized)
gcagcacgtgccttcagagggaagagaaccggggactcgggagactcaaggcatctccagagtcacagcctgaagacagaaccccatgctctcctggacataaaagccatgcggtccctg

SEQ ID NO: 1032627 - DNA, 120 bp, Artificial Sequence
  ENSG00000187185_8 (sequence is synthesized)
gtagacaggatcccctccaagcattttccaaagcccgaggggctgcttacaagactctgcccatcacccccaacctggctgatctgggaccacatcagcacctggcctgactcttctacc

SEQ ID NO: 1032628 - DNA, 120 bp, Artificial Sequence
  ENSG00000187185_9 (sequence is synthesized)
aggatgccctccaagaccaacactgatgccttagtcaccctcaccagggaggctgggggtgcccccacatggctgctgcacctgatgttggaaacggaggctccaaaaacgtgagaaaac

SEQ ID NO: 1032629 - DNA, 120 bp, Artificial Sequence
  ENSG00000187185_10 (sequence is synthesized)
cctgcccctcctggcttcctcttgaggaaggcctcagaagacccgcctttggtcacaggacagaagctgggccaagaggcaaaggttttggccgccacaggggaaactctgggctcagag

SEQ ID NO: 1032630 - DNA, 120 bp, Artificial Sequence
  ENSG00000187185_11 (sequence is synthesized)
ctgccgaagtgactcacgggccctgctgggaagcagctgacgttccttgtctgcgccttacaaaaccacacgggctgcgagtgacagctggctgctctgagtggcggaggaatgttgttg

SEQ ID NO: 1032631 - DNA, 120 bp, Artificial Sequence
  ENSG00000187185_12 (sequence is synthesized)
ccagacaggttcctgaggcatctgctgagctgtgctccagaaaccagccctgggcagctgccacaccaggcagcctccacccctccccacaaccaggagtcttggagggcacccccacca

SEQ ID NO: 1032632 - DNA, 120 bp, Artificial Sequence
  ENSG00000187185_13 (sequence is synthesized)
acctcaacagaactctcccctcagggatccgtggaagtcagccactgccacagggacagccaccccttccaggcaggagctcatgggaaaccaagaccagggaacccatcccacccccag

SEQ ID NO: 1032633 - DNA, 120 bp, Artificial Sequence
  ENSG00000187185_14 (sequence is synthesized)
taagacttgaggccagggaggttggaggggtctccctgtgaccaaatctgtggccatcacaaccgaccttgaaccataatactaagaatgataacaataataatcacagctaacccttca

SEQ ID NO: 1032634 - DNA, 120 bp, Artificial Sequence
  ENSG00000268751_0 (sequence is synthesized)
gcagagcccaggaaactctgcccgcagcttatgacggtcattaaccagtttctgaccaaggacaaggacacctacatggacactgtcaacagataccacctcacggagccggaaagaaac

SEQ ID NO: 1032635 - DNA, 120 bp, Artificial Sequence
  ENSG00000268751_1 (sequence is synthesized)
ccgaggagacagaggccgtcgtgcagcaactggcacctcgggttcctgtccaggctgcctgtcccaaccatgagaatctgggcccagggccccaccctccctagctcccgccctgctgct

SEQ ID NO: 1032636 - DNA, 120 bp, Artificial Sequence
  ENSG00000268751_2 (sequence is synthesized)
gcctctactctctctcctgctgtgctgattggggcaagcctgggaacggctgccccccacctccccacccaggcctgtcccctgcgggacaatgctgcctaataaactcacctgcatcca

SEQ ID NO: 1032637 - DNA, 120 bp, Artificial Sequence
  ENSG00000268751_3 (sequence is synthesized)
acacggagtttaaggaccgcgtctcccgagatgccagagggacctgcgtccgcactgccccagtgtgacccgcatacctaccggccccgaccccgaaccgcgtggcgtccgcccgagccc

SEQ ID NO: 1032638 - DNA, 87 bp, Artificial Sequence
  ENSG00000268756_0 (sequence is synthesized)
aatcccccttacttttaaccagcatgccagctactcagatgacagacatttagcagctaagagcaaggactctatagccaggcagca

SEQ ID NO: 1032639 - DNA, 120 bp, Artificial Sequence
  ENSG00000268756_1 (sequence is synthesized)
attggaggccagcaagaccacgaacccactgggaggaatgaacaactccggacgggaggaacgaaccactctggacgcaccgccttaagagctataacactcactgcgaaggtctgcagc

SEQ ID NO: 1032640 - DNA, 66 bp, Artificial Sequence
  ENSG00000268756_2 (sequence is synthesized)
cccaaacatcagaaggaacaaactccgaacacatcagaaggaacaaactgcggacatgccgccttt

SEQ ID NO: 1032641 - DNA, 120 bp, Artificial Sequence
  ENSG00000268754_0 (sequence is synthesized)
agtgttccaacggcggagtcatatgaatcatcctgatgcttaataaacagatcccagaaggagcctggacatattagatcagaacttcccagggagcggcccagggatctggatttccag

SEQ ID NO: 1032642 - DNA, 120 bp, Artificial Sequence
  ENSG00000268754_1 (sequence is synthesized)
tgcatgccctgcggtgaccctcactccagaaagctcaggccccactgagctccagtgttctatctccagacatggattacacccggggctacacagcgagacagcgaacctgtgctgggt

SEQ ID NO: 1032643 - DNA, 120 bp, Artificial Sequence
  ENSG00000268754_2 (sequence is synthesized)
caccaggttgagggtggtggtgaggtggcgacacggaggcccagagtgaggaagtcatgtattcaaggtggcagagctgggatttgtatatcatctctgtacctgagcccctaacctgca

SEQ ID NO: 1032644 - DNA, 120 bp, Artificial Sequence
  ENSG00000268754_3 (sequence is synthesized)
agtcataataggcaacggatcaatgttatgatgcagtggaggcccttaccagaagccaaccagatgccagcaccatgctcttggatttcccagtctccagaatggtgcaggtggagacgg

SEQ ID NO: 1032645 - DNA, 120 bp, Artificial Sequence
  ENSG00000268754_4 (sequence is synthesized)
aaccctagacactgctcatcccaatcaggccctttccaggcctgtcccattccaatcgggcatcagatgtggcattgatcatcatctacttaacaaacgaggctcccctttcaatgcact

SEQ ID NO: 1032646 - DNA, 120 bp, Artificial Sequence
  ENSG00000268754_5 (sequence is synthesized)
tgggtctcctctgggccaaccttggttctgagatagcaggtgctgaaatactgctgaatcctcaaagccagactagccagtgcctggcacctgatgggaatatgatttcaacgaacagaa

SEQ ID NO: 1032647 - DNA, 120 bp, Artificial Sequence
  ENSG00000268754_6 (sequence is synthesized)
ctccatatggtgctgggtcctgggagttggagttacaaacaactaagatgacagactttgctccaagtagggattcttggctctcagccccatggagaaagtctccttatcacctttctg

SEQ ID NO: 1032648 - DNA, 120 bp, Artificial Sequence
  ENSG00000268754_7 (sequence is synthesized)
cacaggggaggaaatcgagatcaaaaaactcacagaatcctccccacaaagccgagaagcaggaagcagcaaccctcccagatgaagaagcgaaggctcggaaaagctaagtaacttctc

SEQ ID NO: 1032649 - DNA, 120 bp, Artificial Sequence
  ENSG00000268754_8 (sequence is synthesized)
caagctgacgcagctcgtgagaggagggactgggattcaaatccctgcagggggagaccagcagccccgacttcagccgccatgcctcctgcctgagaagctagctgcgaaggttccaga

SEQ ID NO: 1032650 - DNA, 120 bp, Artificial Sequence
  ENSG00000268754_9 (sequence is synthesized)
aggagactgccctccgggaacagaaacagcgcatgactgcgacctgtctgcaaaaatcttgatcacttgtaaatccttctccacctgataagttatcacattggctcatgatgttttttt

SEQ ID NO: 1032651 - DNA, 120 bp, Artificial Sequence
  ENSG00000268754_10 (sequence is synthesized)
tcattctcaccctatggcgtggatgctgttactaccccattttacaaaggagtaaagtgaggcccagagagaacagttaaatcacttccccagcttcactcaactcatctacggtgagtc

SEQ ID NO: 1032652 - DNA, 120 bp, Artificial Sequence
  ENSG00000268754_11 (sequence is synthesized)
gacggtacacatgcccttccacaacacaaaggtctccactttgccacgtgtcactctgatggttccaggtgcagattttgcgtctgcttcttgacttctaatggctgcaccattttgcat

SEQ ID NO: 1032653 - DNA, 120 bp, Artificial Sequence
  ENSG00000268754_12 (sequence is synthesized)
tggatggttataccatcatttatttgactcatctcctgtgcacaagcatctagtttatctgcaaacttttgctaccaaaaacaatgctgcaatgaataaataagctgatgcctgcttcta

SEQ ID NO: 1032654 - DNA, 120 bp, Artificial Sequence
  ENSG00000268754_13 (sequence is synthesized)
agtgctgagagctggcggaggacgtgccctcctgggctcagagcaggagactggcctcttgctccacatggactgaaattcccaggaaacaggctgcaggcatggacgctggacgttgtg

SEQ ID NO: 1032655 - DNA, 120 bp, Artificial Sequence
  ENSG00000268754_14 (sequence is synthesized)
gattcatttccccggctttttgcagggtggggaggacagagaagctgcagggagagatgaagttttttccttgaggatgaaaagctcttaaccttgcacgtttggcttcttctattcaat

SEQ ID NO: 1032656 - DNA, 120 bp, Artificial Sequence
  ENSG00000268754_15 (sequence is synthesized)
ttttttaaaagcagagatagggaggtatgtgattaatagcaaaagacagcatttaaggaccgccaggtgccaggtgttctaaacgtgccatgtattttagctcacagaatcctccccaca

SEQ ID NO: 1032657 - DNA, 120 bp, Artificial Sequence
  ENSG00000274204_0 (sequence is synthesized)
ggaagtgtgaggctccaggctggaggcagacctgtgttcggctgcaagctggagaggatggaccccaaaagcttggctgatttgaagtccatccataaaatggaactccagagagtttac

SEQ ID NO: 1032658 - DNA, 120 bp, Artificial Sequence
  ENSG00000274204_1 (sequence is synthesized)
acgtttcagtaatgctgcataacttaattataagatcttctctctttgtcttctttcagtgttataaaagctcttttgtccttgagcttcctttaccaagaaacatgcatttatgtatct

SEQ ID NO: 1032659 - DNA, 120 bp, Artificial Sequence
  ENSG00000274204_2 (sequence is synthesized)
aggagtcttcagatacatataatcatttttcccaatttccatgttaccagccttgccaggactttttctcagttccctgttacacaatgaaaatagtgtctctttattgataattttagt

SEQ ID NO: 1032660 - DNA, 120 bp, Artificial Sequence
  ENSG00000274204_3 (sequence is synthesized)
agcatcctaatgtggtataaatcgtcttccagagaagaaaatgtgtcagggttgcgttatcactgaggctagctgggaaagtagatcagcccattagtctgataattcgaagcgttgttt

SEQ ID NO: 1032661 - DNA, 120 bp, Artificial Sequence
  ENSG00000274204_4 (sequence is synthesized)
ctgttatttctgaacatcatgtgaactccttttctgggtgtattaaaggttttcccagtgtgtgtcagtgagactcctgattgaatttaatatgaataaagataaattctttacatttaa

SEQ ID NO: 1032662 - DNA, 120 bp, Artificial Sequence
  ENSG00000228792_0 (sequence is synthesized)
acggcactgcagtgacatttgtccccacacccggggaagtggccagcggagccttatgttttcttgaaagttcaaagtctcaggtgtcacaagtcccctcagccaaagattcctcaggtg

SEQ ID NO: 1032663 - DNA, 120 bp, Artificial Sequence
  ENSG00000228792_1 (sequence is synthesized)
gagccttgcttcccagaagcctccaaaacaaacagcagctcatgggcctctcctccctgcttccctgggttagttttcctctggaaaatcagatggggtctcaccatgttgcccaagctg

SEQ ID NO: 1032664 - DNA, 120 bp, Artificial Sequence
  ENSG00000228792_2 (sequence is synthesized)
gtcttgaactcctggcacaagcgatcctcctgcctcagcctctggagcagcagggactacaggcgcacaccaccacacctggccatatacatcacatgttgtttatacattcgtctatcg

SEQ ID NO: 1032665 - DNA, 120 bp, Artificial Sequence
  ENSG00000228792_3 (sequence is synthesized)
ttttaattctgctcctctgagatgagccagcttgtgcatgaagcaaggcttgaaggagaacacggctgcatggatcgctgggccactggactgaggtgctttgaaggtggcaatccacga

SEQ ID NO: 1032666 - DNA, 120 bp, Artificial Sequence
  ENSG00000228792_4 (sequence is synthesized)
acctttggatttgtggatctgtggatctgtgaagcaatgagtttcttcattgttgaattgaggtttaggtctcttacagctatgagccgcctagatgatgcatcttccgagaagttgccc

SEQ ID NO: 1032667 - DNA, 120 bp, Artificial Sequence
  ENSG00000228792_5 (sequence is synthesized)
agtttcaaaaattacagaagaaaacaaaaatgaacagaaccacagagaagtgggaattattttgctgatgtgaatgctggaaaaaaaattaaagtatgttttgtagcaattttaaagcaa

SEQ ID NO: 1032668 - DNA, 120 bp, Artificial Sequence
  ENSG00000270919_0 (sequence is synthesized)
ctcacagatgcccatacctgtcccggaaagggcggacgactccctgtccatgccacctgactctggtttagctgccgggagatttgggacatgttctggcccgtggaagaagaggactga

SEQ ID NO: 1032669 - DNA, 120 bp, Artificial Sequence
  ENSG00000270919_1 (sequence is synthesized)
atatcattcactccaggcacatgaaccactgaagagctagaaaagaggaaaatgcatttatcccgaggacacacctggtttgcatgagtctacgtgcccagccaaccacacaatctgccc

SEQ ID NO: 1032670 - DNA, 120 bp, Artificial Sequence
  ENSG00000270919_2 (sequence is synthesized)
catcgtgagcctcaaagccccttggccgtcctcctctcccttcagggcttcctctacactgctgagtagtcctgccatgtctagtagtctggtacttcctctcctcgttctccccagggt

SEQ ID NO: 1032671 - DNA, 120 bp, Artificial Sequence
  ENSG00000270919_3 (sequence is synthesized)
ctcccacgcactcttcagcccctatcctatgcctgtacatcctctgctctcagcagatgatttggttcccagaaagagagaagcttcttagaataaaaatcagtcccactgttcactcac

SEQ ID NO: 1032672 - DNA, 120 bp, Artificial Sequence
  ENSG00000223685_0 (sequence is synthesized)
agaaacttcatctgcattggcttcggcaaagcagaaatttattagcttacaagggagagtggattgtcattgagacatatgttctgcttacgtggagagtaacttgagcaacgttaccca

SEQ ID NO: 1032673 - DNA, 120 bp, Artificial Sequence
  ENSG00000223685_1 (sequence is synthesized)
cctctatgtggaaacacaggtttatttagtatgttgaaattccagacataactatctgttcagtagcagtggttcctataagacaacaacttcactgttcattttgtgctagtagaatgg

SEQ ID NO: 1032674 - DNA, 120 bp, Artificial Sequence
  ENSG00000223685_2 (sequence is synthesized)
tggttatactttggagagatgctaagacagcagatgctaaaatccagataccttttgtgaatatgaggcatatctactgggaacacatcataataatctgttgaggtaaacattaaagat

SEQ ID NO: 1032675 - DNA, 120 bp, Artificial Sequence
  ENSG00000223685_3 (sequence is synthesized)
ggtggcaataagcagttggagaaaaagaaaaatatcaacatgcaaggcaccattgttttcttgcttcttaattgtaactttttattttttgtgtatatggctatcacagagatttaaaaa

SEQ ID NO: 1032676 - DNA, 120 bp, Artificial Sequence
  ENSG00000223685_4 (sequence is synthesized)
gccaaaagataaaaacaagcaagaaagcaaacaaataaaagtaacaacaaaatttaagaaccccttgcatggaaggatgcttatttcctctggactgaaagatggcatcagaagtgggat

SEQ ID NO: 1032677 - DNA, 120 bp, Artificial Sequence
  ENSG00000223685_5 (sequence is synthesized)
ctaaagtaaagcttctaacaatccccatgagcactgagtgaccaagcaaggtacacgccaggcctgttctgtctgttgctctcacagaggagctggggatcgtggaggttcatgacagga

SEQ ID NO: 1032678 - DNA, 120 bp, Artificial Sequence
  ENSG00000223685_6 (sequence is synthesized)
aataactttcgaatcatatcatttggactggataacagtgttgaggcagagaagtttcataatctgcctaagatcattgcatttacaagtgacgaacccactgcacaaattttggcaatg

SEQ ID NO: 1032679 - DNA, 120 bp, Artificial Sequence
  ENSG00000223685_7 (sequence is synthesized)
cccactgcacaaattttggcaatgacagaaacttcatctgcattggcttcggcaaagcagaaatttattagcttacaaggctgtacaggaaacatggctggggaggtctcaggaaactta

SEQ ID NO: 1032680 - DNA, 120 bp, Artificial Sequence
  ENSG00000223685_8 (sequence is synthesized)
gccaagctgacacttagcgagcaagtacggacctctcctcgcaggctccggtgggaaaggctcctggaagggcgcgagccaggaaagtagatgaagtgaagagatgaagactgcgtgggg

SEQ ID NO: 1032681 - DNA, 120 bp, Artificial Sequence
  ENSG00000223685_9 (sequence is synthesized)
tagttgttggaaaagctcggatcatccccaacccagccccgtcttgtccggccccaaaaggcccatctcggccgagctactcacactttgtacggcagccgtgggtccgacgtcagcgtg

SEQ ID NO: 1032682 - DNA, 120 bp, Artificial Sequence
  ENSG00000223685_10 (sequence is synthesized)
atcttaaaggaaaccttcgacctgaggaaaagagcgggagagagtcagggtcgggcagctggaccaggaattatggcagtcgattgatgtcagagtgggattcaaagtagaacttcagtg

SEQ ID NO: 1032683 - DNA, 120 bp, Artificial Sequence
  ENSG00000223685_11 (sequence is synthesized)
gaaaagaaacctgagaagcactcttgaagagaggtttctgaataactttcgaatcatatcatttggactggatgacagaaacttcatctgcattggcttcggcaaagcagaaatttatta

SEQ ID NO: 1032684 - DNA, 120 bp, Artificial Sequence
  ENSG00000223685_12 (sequence is synthesized)
gcttacaaggccccatcttgtccatgcacctgtctgcttccttggcttcagagcattgcctccaagtcctctacagcacaactttcccttcagcatccaaccttatgatgtactgggata

SEQ ID NO: 1032685 - DNA, 120 bp, Artificial Sequence
  ENSG00000223685_13 (sequence is synthesized)
ttgtgttgcccctctcccctctctacctgtgctgggctttaaggctgacacacctataaaccccaggagtggagggaagggagagtggattgtcattgagacatatgttctgcttacgtg

SEQ ID NO: 1032686 - DNA, 88 bp, Artificial Sequence; identical to SEQ ID NO: 870445
  ENSG00000271351_0 (sequence is synthesized)

SEQ ID NO: 1032687 - DNA, 120 bp, Artificial Sequence; identical to SEQ ID NO: 870446
  ENSG00000271351_1 (sequence is synthesized)

SEQ ID NO: 1032688 - DNA, 120 bp, Artificial Sequence
  ENSG00000236708_0 (sequence is synthesized)
tgcaaaagctgtgggcactgaaagttttgctccaccggccgcgcagcacccacttggggtcgggctttgggacttgggggagtcaggagcaggcgggggctggggagaggacgaggccct

SEQ ID NO: 1032689 - DNA, 120 bp, Artificial Sequence
  ENSG00000236708_1 (sequence is synthesized)
ggggaggggctggaaaaggcttttcacagcgactggcacttgatatttccaagtcttctggatgtcactcaccggaaaccagaccctgcggtgcgaagactcaggtggcaaaggcaaaag

SEQ ID NO: 1032690 - DNA, 120 bp, Artificial Sequence
  ENSG00000236708_2 (sequence is synthesized)
ctggactgcattgtgtggccccagggagctgcagacagaggaactgagtcctggccactgtgcctgctgtctcttacaagtttagagatgctggcattgcatcgaaatcggacaacactc

SEQ ID NO: 1032691 - DNA, 120 bp, Artificial Sequence
  ENSG00000236708_3 (sequence is synthesized)
ccttccctcccttcccaggtactccattcccaaccttttccaccaacaggtccttattctcagaagccaaaaataatttattggtttccactgttctccttggctgaatcttcaagtaca

SEQ ID NO: 1032692 - DNA, 120 bp, Artificial Sequence
  ENSG00000236708_4 (sequence is synthesized)
agactctccataattcagccagcatctaatcagcaccttgcttctcttccattcttcctttctccagagtcatgattcttccttctcaagtcaaagaggaattacaagcaaatagacact

SEQ ID NO: 1032693 - DNA, 120 bp, Artificial Sequence
  ENSG00000236708_5 (sequence is synthesized)
atccttgaatgcagtttgggttacacagaatggggaatgaactcaatctcatttttgcttctttgttgaaataagctcagtatctcccttgcacagagattgaatcggcttcactaaggc

SEQ ID NO: 1032694 - DNA, 120 bp, Artificial Sequence
  ENSG00000236708_6 (sequence is synthesized)
aagcagcatttcctcttttctcccagtcagcatcgcagctctctgcattcccctctcgcagaggtgactattcattgtgttctttccaggaatgttttctgagcttcaggaggccctgag

SEQ ID NO: 1032695 - DNA, 120 bp, Artificial Sequence
  ENSG00000236708_7 (sequence is synthesized)
ttacctggataattagtgctgtccttttgcacaatgcaaaaacaaaactattatgagataatttctttagctaagttgggaatggggtttaaatgcgtgggcaaatagatctggcagtca

SEQ ID NO: 1032696 - DNA, 120 bp, Artificial Sequence
  ENSG00000236709_0 (sequence is synthesized)
caacctccacctcccaggagaacattcccagtctgcctttcactgagtttttacctgttcactagaacaacaaaagggaacccgatcgggaaactctgctgtcaactaagcaaactctaa

SEQ ID NO: 1032697 - DNA, 120 bp, Artificial Sequence
  ENSG00000236709_1 (sequence is synthesized)
gcaggttcccagaccttaggtcagcaatcctgttctaaggcatacatcacgagcagcattttgattttcatctggggaacttatagttcataaagacctactgatccattaaaatttcca

SEQ ID NO: 1032698 - DNA, 120 bp, Artificial Sequence
  ENSG00000236709_2 (sequence is synthesized)
cttgattttgccattagtaatctcttaaacaagtccaaggaagccagaggaagttatttcttgaatgcttttatactagtgctttcaagagttcgtgttgctgactccagtttttaaaat

SEQ ID NO: 1032699 - DNA, 120 bp, Artificial Sequence
  ENSG00000236709_3 (sequence is synthesized)
tattattctcatcttctgcaatgcctcgaggcatgtttttagctgaatagcaataattatgggattgtgcaatactggaagaagcagtaaaaataaaatgtaatactaaaaaaaaaaaaa

SEQ ID NO: 1032700 - DNA, 120 bp, Artificial Sequence
  ENSG00000236703_0 (sequence is synthesized)
ataaattggagtgtttctgcaaattctaagaggttcttaacattatccagaatggtgccctggtggacgatcatgcaccttgctggcgaggcgctttcttcaggtccataaatgcttgct

SEQ ID NO: 1032701 - DNA, 120 bp, Artificial Sequence
  ENSG00000236703_1 (sequence is synthesized)
atattcttgttgcttctatccctttctaatgctacagattgcactgatgcagtgaagcactgccaaatcaacgtggttaggaaagcagaagagcaaattaacagaagtctccttacagta

SEQ ID NO: 1032702 - DNA, 120 bp, Artificial Sequence
  ENSG00000236703_2 (sequence is synthesized)
tgaccacacaacaggagaaattgcaaaacattaactaaagttaaaaagtggtcgaactagcatgtgcacataaacatcttattatttaacaaaaaataaatttacccctaggaataccta

SEQ ID NO: 1032703 - DNA, 120 bp, Artificial Sequence
  ENSG00000236700_0 (sequence is synthesized)
aaacaggctggggcaggcaagacttcctgaaagggatgaggcctgcaccaagccagctagacaaaacctaaagtgtgtggaccccaaccactcctacaaccatatgctgcagctattcaa

SEQ ID NO: 1032704 - DNA, 120 bp, Artificial Sequence
  ENSG00000236700_1 (sequence is synthesized)
gcctttgtcctatgtctggagacttcttggaagctggagcacacaaatagctacagcaaacttgaggaatgggcatgaatagactggcttcggggaacctgccagcttggccgtgtggcc

SEQ ID NO: 1032705 - DNA, 120 bp, Artificial Sequence
  ENSG00000236700_2 (sequence is synthesized)
aaggtaataggcaagccaaggcagagctagagctcagagctggaggggaaattaaagcagcaaatgtagaaacattaagcctgaagaggcgacgacgttgaattctaaaatgcaggccaa

SEQ ID NO: 1032706 - DNA, 120 bp, Artificial Sequence
  ENSG00000236700_3 (sequence is synthesized)
agctcagactgcaagctgtctggctgctccgggtgtgcccagaagtcaaagtccagcaggggcaaaggtggaggtgtggtcctgcacgtggggtgttggggggatgtggaagaggaggtg

SEQ ID NO: 1032707 - DNA, 120 bp, Artificial Sequence
  ENSG00000236700_4 (sequence is synthesized)
ctttaagatccagagattccagctgccctggtgcacccttggaagaataaaaggctaggaactggacaagtcaggctcgagtccaagctgcctgaggaatcggggaaagaatggagctca

SEQ ID NO: 1032708 - DNA, 120 bp, Artificial Sequence
  ENSG00000236700_5 (sequence is synthesized)
ggcagtatttaaaaatccaggatagcagcaaagctggcggtggcccctgactctggtaagggcagcctgcagcaccatgccaaggggggcctgactgatcatgccctgcatttgcaaaca

SEQ ID NO: 1032709 - DNA, 120 bp, Artificial Sequence
  ENSG00000236700_6 (sequence is synthesized)
aggattagtagggtatgagtaggattctgctggtgcctgggaaggcagtgccatctacaactttacaaagttttaacaaaggcctgaaggacacaaccttccccaaagtcctgacgtcgc

SEQ ID NO: 1032710 - DNA, 120 bp, Artificial Sequence
  ENSG00000236700_7 (sequence is synthesized)
tgtttgctggcaacaaatagagtcaaaagaagagaggcacagaatgtgccaggggtgtgctgcgtacagccccgatgaccacaaggccttcttgggtcaagttctgccatctctggttaa

SEQ ID NO: 1032711 - DNA, 120 bp, Artificial Sequence
  ENSG00000236700_8 (sequence is synthesized)
gatgggctcaccctctaggaccctgattgagtcctcggaccaccaagagtgccccaccaagagcctccctcttctggtgactcgtgcctgcttcccgtggagagctccagaagggaggaa

SEQ ID NO: 1032712 - DNA, 120 bp, Artificial Sequence
  ENSG00000236700_9 (sequence is synthesized)
actgtgaggaggtggagaacgtggcagggatcctaactttcttactgaaggaagttcttcacaagtacccatctgccttcagggaagaaaacataactcattttggtctttcaaattcag

SEQ ID NO: 1032713 - DNA, 120 bp, Artificial Sequence
  ENSG00000236700_10 (sequence is synthesized)
ttctcaaaaccaaatcctgttgtcagcaatctgtgtcccaacgccttcttcagcaacagcattttccctgtggaattagtttccaatgttctttcttaaataaaccactgaagattaaaa

SEQ ID NO: 1032714 - DNA, 120 bp, Artificial Sequence
  ENSG00000236700_11 (sequence is synthesized)
agatagagtgagaccagagagaagaagtggcccaggaagtcataacctcctgttcctgacttggactttctccagttgaagcagaagacagttaactgcagggcactttgctggatttaa

SEQ ID NO: 1032715 - DNA, 120 bp, Artificial Sequence
  ENSG00000236700_12 (sequence is synthesized)
aatctatctggtcagatacttagtacctagatgtggagaccatatctcacagttctgtcaggcaggagcagtccaaacactttgattatcagctgtctcttgctcgggaaattactaggt

SEQ ID NO: 1032716 - DNA, 120 bp, Artificial Sequence
  ENSG00000236700_13 (sequence is synthesized)
accaacactgttatatatgcagaggtgtctgaaaaatgaatgcagatcaatttccagttccacacagagcacatctgtaaaatatgacctttggataatggctggagtgtttacctgcag

SEQ ID NO: 1032717 - DNA, 120 bp, Artificial Sequence
  ENSG00000236700_14 (sequence is synthesized)
caaagtgctgggattacatgcgtgagctactgcgcccagcctgacgtgcctatcattttatccgaaaagtggatggagttccagtggcaaaggaatgaacagtggagacaagagagttaa

SEQ ID NO: 1032718 - DNA, 120 bp, Artificial Sequence
  ENSG00000236700_15 (sequence is synthesized)
atagggtttgactcattaaagtctccgtatgctgggtttcaattttattctgaggcaagggcagggcatccgaggagtttaagctccttaaacacagggaattgaatgtgcttgtgtttt

SEQ ID NO: 1032719 - DNA, 120 bp, Artificial Sequence
  ENSG00000236700_16 (sequence is synthesized)
gggaagatcaccctagcaggattagaaaggaagaatcaagccgctgtcgctataatactgtcaaaacctaatgagtgtctaacataagacagccaccatgaagaagggtgaacctgcctt

SEQ ID NO: 1032720 - DNA, 120 bp, Artificial Sequence
  ENSG00000236700_17 (sequence is synthesized)
ctaattagtcaggaagagatttctttctctttcctctctttgttggtgtaaagagaagaaaggtgtaaagtacagatgggtttcaggcttgcacctgagaagctggtggtgatgcctact

SEQ ID NO: 1032721 - DNA, 120 bp, Artificial Sequence
  ENSG00000236700_18 (sequence is synthesized)
gagagaacggatctgtagttctagcctcaaggagttactgtttagcattagaggcaaaatgaaaaagtactcattgtttctgcccatgtttgcaaaaaggggacaagttattggtcccca

SEQ ID NO: 1032722 - DNA, 120 bp, Artificial Sequence
  ENSG00000236700_19 (sequence is synthesized)
aagtaaatgagataatgagaaaaaacttcagggaaaaaactgagaatactatagctgattaacttactgtttagttctcttaaaaatatctaccttcttatcattataattctggaatga

SEQ ID NO: 1032723 - DNA, 120 bp, Artificial Sequence
  ENSG00000236700_20 (sequence is synthesized)
aaatcaggaggactgcctagtactgccaattctgacagtgatctggctggagtgcagtggtgcacacgcctcacactgtgacacagcgggagagcccagagcgacagctgttggaatgac

SEQ ID NO: 1032724 - DNA, 90 bp, Artificial Sequence
  ENSG00000236700_21 (sequence is synthesized)
acacagcgggagagcccagagcgacagctgttggaatgactgcactcttcctgctcaagtctgacctttccaaaagtggtatgatcatgg

SEQ ID NO: 1032725 - DNA, 120 bp, Artificial Sequence
  ENSG00000236700_22 (sequence is synthesized)
atgaggaatcataatggtcagaatgggaacaaactgaccaaagggcttactggatgaagctaaccagatagagtgagaccagagagaagaagtggcccaggaagtcataacctcctgttc

SEQ ID NO: 1032726 - DNA, 120 bp, Artificial Sequence
  ENSG00000236700_23 (sequence is synthesized)
gagagaagaagtggcccaggaagtcataacctcctgttcctgacttggactttctgtaagtgtgattcccaacctggttactcatcagaatcatacaaggaacattagaaaagatatgtc

SEQ ID NO: 1032727 - DNA, 120 bp, Artificial Sequence
  ENSG00000236700_24 (sequence is synthesized)
gagaagtaggcaaatgatgcggctgaacaatgcctccttgacttcaggatataaaaactactttcatgagcttcaagtcagggtaatggtgctcagaaaaagaagccaatcaggagatct

SEQ ID NO: 1032728 - DNA, 120 bp, Artificial Sequence
  ENSG00000236700_25 (sequence is synthesized)
tagcaaggtggtgaggcaatctgccttttattcccctttcaagctatgagaagtaggcaaatgatgcggctgaacaatgcctccttgacttcaggatataaaaactactttcatgagctt

SEQ ID NO: 1032729 - DNA, 120 bp, Artificial Sequence
  ENSG00000236700_26 (sequence is synthesized)
acacaaggaaagtctgaggcagactatggaggaagacgagctgggagagaaaggctggagtgcagtggtgcacacgcctcacactgtgacacagcgggagagcccagagcgacagctgtt

SEQ ID NO: 1032730 - DNA, 120 bp, Artificial Sequence
  ENSG00000236700_27 (sequence is synthesized)
ttccttaatgagtaattatcacatttctttggctacttaaatgcattctctgagtcaggtaaaggagatcgtaatagttaatcaacaagaagtaattcttgggtacttaacaatagtcta

SEQ ID NO: 1032731 - DNA, 120 bp, Artificial Sequence
  ENSG00000236700_28 (sequence is synthesized)
agcacttaatcatacttaaaattgactattaatgaaccttataaaccattttgcaattctgaaagtgaatttctctgcaggcttagagattactaagccatttagatcttaccaaacaaa

SEQ ID NO: 1032732 - DNA, 120 bp, Artificial Sequence
  ENSG00000236700_29 (sequence is synthesized)
agctcttaacagcctcaactcagagatgacacgtgtctcttctgctcccaatccctcagccagaattagtaatgtgggctgctgaaaaatgtcaggagtgcatggatatttggagagtgc

SEQ ID NO: 1032733 - DNA, 120 bp, Artificial Sequence
  ENSG00000236700_30 (sequence is synthesized)
tgtttctgccaccttatttcataccaaaccacagaaacaaaattggtgactcttcttagtaaattagaacagagtatcaaaaggattattaggatcagagcatctggaatgaccaatgag

SEQ ID NO: 1032734 - DNA, 120 bp, Artificial Sequence
  ENSG00000236700_31 (sequence is synthesized)
acatgctggtatatgtcagactcttagcatcactctcatttcatactgctgttgatgatgtgaattttggaaatattctcccctattgggtctttctccatgacagatgatgtcctttgg

SEQ ID NO: 1032735 - DNA, 120 bp, Artificial Sequence
  ENSG00000236700_32 (sequence is synthesized)
cttcggttttttgcctaagaactgtaagtggtgcttgctagccctactaagaatcctgccattgttgcaaatttcagaaaaaaggctggagtgcagtggtgcacacgcctcacactgtga

SEQ ID NO: 1032736 - DNA, 120 bp, Artificial Sequence
  ENSG00000236700_33 (sequence is synthesized)
ttaacaattatatattccatctgggatgctctgaactcaggttaaacattcttcaagttattcccacatttttcaagttattcccacgttagtgacctactttattagtattattactaa

SEQ ID NO: 1032737 - DNA, 66 bp, Artificial Sequence
  ENSG00000236700_34 (sequence is synthesized)
ttcccacgttagtgacctactttattagtattattactaaagaaaagggctgggtgcggtggcttg

SEQ ID NO: 1032738 - DNA, 120 bp, Artificial Sequence
  ENSG00000228799_0 (sequence is synthesized)
agggacaggcgtcacccccaccagcaggtgcagaggtgccgttgcagcagttggatgtgaggccaagaagcagaagctaagggagggggtctggggcatccctggagctcagaagccaag

SEQ ID NO: 1032739 - DNA, 120 bp, Artificial Sequence
  ENSG00000228799_1 (sequence is synthesized)
gcccgtgcctgccccagggctggtgccatacatagttccaggtactggggacggagggtagccgatggggccctgagcaggacgtgcctcttctggacttgaccacagaacccaagcatg

SEQ ID NO: 1032740 - DNA, 120 bp, Artificial Sequence
  ENSG00000228799_2 (sequence is synthesized)
tctgagagagaaaatagcacccctgtccaaacatcacatgcctggcggaggaacgcagcctggcctgtgcagccgaatgttggagagtgcaccttcctctcttattttgttttatttcca

SEQ ID NO: 1032741 - DNA, 120 bp, Artificial Sequence
  ENSG00000228799_3 (sequence is synthesized)
gggaaagggaaaggaagacatgcaggtaatttatcaactaaattacaggctgactgataataaagctccccgccccacaaaaaaaggaaatgattgtggggttttagtgggttttcaatg

SEQ ID NO: 1032742 - DNA, 120 bp, Artificial Sequence
  ENSG00000228799_4 (sequence is synthesized)
gatgtcttccttctcatgctggctgagacatcaaacaccagagtggacttacttggctccagtgctggtgatgggcacttctgggtgaatggaatctggggtgtactagcaaatttgctg

SEQ ID NO: 1032743 - DNA, 120 bp, Artificial Sequence
  ENSG00000228799_5 (sequence is synthesized)
ccatttctgcacattctaacacctattaatttttgcaaatactatagccataatataacatcacattgttatttttgatttatgtttaactgaattcaggtaattttgtactggtgttca

SEQ ID NO: 1032744 - DNA, 120 bp, Artificial Sequence
  ENSG00000228799_6 (sequence is synthesized)
gaagattgactttaggttttcttacttgcaaattaccttttcatgtgtgttgcccatgttttaatgggttgaccttttttattgatgttactatggactgaactgcatccctgcgagatt

SEQ ID NO: 1032745 - DNA, 120 bp, Artificial Sequence
  ENSG00000228799_7 (sequence is synthesized)
catatgttaaagctcgagctcccagtacctcacaatgggactgtatttggagatagggcctttaaacaggtaactaagtgaaaatgaggtcataagggtgggccctggtccaatgtggtt

SEQ ID NO: 1032746 - DNA, 120 bp, Artificial Sequence
  ENSG00000228799_8 (sequence is synthesized)
ggtgtccttataagaagaggaaatgaggacacagacacacacacaggaatgactgcatgagacacaggaagaggccccatctacaagccaaggagagcctcaggagggtccaggaatgac

SEQ ID NO: 1032747 - DNA, 120 bp, Artificial Sequence
  ENSG00000228799_9 (sequence is synthesized)
taaattgtcatctcagacttgtagcttccagcactgtgagaaaataagtttctgtttttccattaaaaattctgattattattgttgaaaatgagcacaatggctttttaaaaaaaaaat

SEQ ID NO: 1032748 - DNA, 120 bp, Artificial Sequence
  ENSG00000228799_10 (sequence is synthesized)
gttggtattctatctgaccatctgagtgaaagctcttattagtgttagagtttttttcagatttctttgaattttctgtataaaaatattgtcagtaatacaaaatatattatcttttcc

SEQ ID NO: 1032749 - DNA, 120 bp, Artificial Sequence
  ENSG00000232465_0 (sequence is synthesized)
gactatagaagccaaattccaatgtgaaaatgcacctttcaattgcacagactaggtcataatggaggtgacagtcataaaagattttctagctctcagcagagctgtaaaccgggaccc

SEQ ID NO: 1032750 - DNA, 120 bp, Artificial Sequence
  ENSG00000232465_1 (sequence is synthesized)
ctcatccaggcagacagcacagaatctgaaaatctgcctatcaaaagcatcattcaagccacaaggctcttctgttcctggtaaaaggcaggcaggaaaagaggagacaaagaaaaacgt

SEQ ID NO: 1032751 - DNA, 120 bp, Artificial Sequence
  ENSG00000232465_2 (sequence is synthesized)
cattcatccttgatcagggatattttctcctcccagccactaatctgctctctgctcttacatttgtacatttttagaacgatattaaacatctgaagagtcattcagggagctaaagtt

SEQ ID NO: 1032752 - DNA, 120 bp, Artificial Sequence
  ENSG00000232465_3 (sequence is synthesized)
cactgtggtttgaagtcttataactacaaaataatgttgttctaactgatctttcacatcaatgcagacaaaagcactttggtatatatgtttaaggcttaaccctatcaaagtcaggag

SEQ ID NO: 1032753 - DNA, 120 bp, Artificial Sequence
  ENSG00000232464_0 (sequence is synthesized)
atcattttaggcttcattatttcagacagacaacagggttttcagtccgtacaaattcatcaaactgttcacttacgtgatttgcacacttttccatgtccatattttgaggaaaaagtt

SEQ ID NO: 1032754 - DNA, 120 bp, Artificial Sequence
  ENSG00000232464_1 (sequence is synthesized)
aaaaaaaaaaaaaaaaaaaaggaagatggagaaggcaatactttgcccaaagaaatggacttgtggtggtgacagtgggcatgggagagagatttggtgccaactggccttctaaaatcc

SEQ ID NO: 1032755 - DNA, 120 bp, Artificial Sequence
  ENSG00000232464_2 (sequence is synthesized)
tttggtgccaactggccttctaaaatccctcaaatcacagtgcatgcccccttgttttgcctgtgaaggctctgagctctcattacggaggaaactccatacttgtacgaagtacactaa

SEQ ID NO: 1032756 - DNA, 120 bp, Artificial Sequence
  ENSG00000224481_0 (sequence is synthesized)
gtctgaaccccgcgatgtcccccgcgctgttcgtcccctcttcgtctccctcttcgatgttccgggtcccagaaaccaggttatcacagtggcccggatcatagggaaattgcgaaatca

SEQ ID NO: 1032757 - DNA, 120 bp, Artificial Sequence
  ENSG00000224481_1 (sequence is synthesized)
tccagttgggatcaccgagcctgcagggtccccttcctgggcgagcctcctggccccgtgctatcggaggcctggacacccccgccagggacccagcgacccagcaagtccccaccccct

SEQ ID NO: 1032758 - DNA, 120 bp, Artificial Sequence
  ENSG00000224481_2 (sequence is synthesized)
ctaagggcgacctgggcctcggggtgagaggtctcctacactaaaaaggctgccgcccttcaatcctagaccccgagattcctttcactcgggaaatctcgtaatggcatccattgtcat

SEQ ID NO: 1032759 - DNA, 120 bp, Artificial Sequence
  ENSG00000224481_3 (sequence is synthesized)
tttgatctttatgccgaatttctagctcctgcgtctccattgccggtcctaaaagtcgccgtttcactaagcttcggaacctgactccgagaaatctattcgttcgtcccaagatctcag

SEQ ID NO: 1032760 - DNA, 120 bp, Artificial Sequence
  ENSG00000224481_4 (sequence is synthesized)
ccagaaagagaaatccgcgcggcggcctcttctagctcgggtgctgggaggccccgtcctgatcctctgtcgccctggccgatctccctcagggccacggggaagaggaacctgagcagc

SEQ ID NO: 1032761 - DNA, 120 bp, Artificial Sequence
  ENSG00000224481_5 (sequence is synthesized)
agtctctgacggtggggctccccctcgtcctgccaggaccctgccccaaggagaagaccccttaggacgttaccagatttaaacaatgttttctcctgctcttcagagcacctgggataa

SEQ ID NO: 1032762 - DNA, 120 bp, Artificial Sequence
  ENSG00000224481_6 (sequence is synthesized)
ggttcctgatgggtcttgggagcaaactaacatgtcgctccaggcgctcaagaccatccctctgattttcatattttggggctgagagcgtttaagaaggactgaaaaacgctgcagtct

SEQ ID NO: 1032763 - DNA, 120 bp, Artificial Sequence
  ENSG00000224481_7 (sequence is synthesized)
ttgaggggctaagtttggaggatgcgggagtgggagaggatgccttcttggctccttggagtggactggcagctggccaggacttagtcagtatctactgaaaccttgaatatcttggct

SEQ ID NO: 1032764 - DNA, 120 bp, Artificial Sequence
  ENSG00000224481_8 (sequence is synthesized)
gtgttaactgttttgacccaacatggagcgaaaatgttggttgtaccttgagattctgacatctggttgaagtccaggttcactggcccaggacaggtcattcagctgtttgaaaaaaaa

SEQ ID NO: 1032765 - DNA, 120 bp, Artificial Sequence
  ENSG00000224481_9 (sequence is synthesized)
cagaagagagaccaggccatccactgaggtaatctccatgcagcatgaaccactggttccaatgaacccaccatcaccatacttctcaggaatcgctggtcactagactgagagttctgt

SEQ ID NO: 1032766 - DNA, 120 bp, Artificial Sequence
  ENSG00000224481_10 (sequence is synthesized)
gaaagctgagatcatatcttactaatctctgtgttcatggttcccagctcagggtctagcactgagggagttctcaggagagtgttcatcaattattgaataaaagcgattgcaaacctc

SEQ ID NO: 1032767 - DNA, 120 bp, Artificial Sequence
  ENSG00000224481_11 (sequence is synthesized)
caccttctgccactcagccgaccaacatgctgccagagactgcggggacagtgacgtctgcctttccttcctttccctcccttccccgccccaatctttccaaggaagcagctggccagg

SEQ ID NO: 1032768 - DNA, 120 bp, Artificial Sequence
  ENSG00000224481_12 (sequence is synthesized)
agagaagccttaggggccacttcgttcggcatcccagggggcaggtgcgcggtacagggaagaagagggtttgactgttgttctcaacccccggcaccaaacctccaccctggtgcgcgc

SEQ ID NO: 1032769 - DNA, 120 bp, Artificial Sequence
  ENSG00000224481_13 (sequence is synthesized)
ccctccaggctcctgctggtctcagtcgccggtagttaggtctcctgtcagcctgagctcccgagacacccagccccggaaggacacgtaggggaaaccagctactcacttcggtcttgt

SEQ ID NO: 1032770 - DNA, 120 bp, Artificial Sequence
  ENSG00000224481_14 (sequence is synthesized)
ccgcaagggatccctttctgacgggaaagaaaggcggcgagtccggtcctgttgagtaagcggaagagagatcaaggggaagagaagaaaaatcctgtgaggtttcaagatctaaagtta

SEQ ID NO: 1032771 - DNA, 120 bp, Artificial Sequence
  ENSG00000224481_15 (sequence is synthesized)
ccatgaagtcgacctaacctcgtctggaggtcctcctgtggctggcgaaggtgagtcgagtccccgtcttcagtttgtcaaagtggacaaagcctacgacaatggccagtaccagctact

SEQ ID NO: 1032772 - DNA, 120 bp, Artificial Sequence
  ENSG00000224481_16 (sequence is synthesized)
aggcattcccagtctttccagttggtggtactggagcttccctacccaggatttccgtggattccaagggtacaactgaacagcttttgttgttccaactgctcttatttgaagaaaggg

SEQ ID NO: 1032773 - DNA, 120 bp, Artificial Sequence
  ENSG00000224481_17 (sequence is synthesized)
tggttagttttacctgttctagaaattcaccttgatggcgccacacaggatgccctcttttcatcactcggcatgatgtttttgagccaaatttctcccatttgggttaatcgcaggatc

SEQ ID NO: 1032774 - DNA, 120 bp, Artificial Sequence
  ENSG00000224481_18 (sequence is synthesized)
agcacgtccacagtgcaatggaaaagcaacgccctgggaaaacaaccttcataacgtcctctccgatgccagctggccaggacttagtcagtatctactgaaaccttgaatatcttggct

SEQ ID NO: 1032775 - DNA, 120 bp, Artificial Sequence
  ENSG00000224481_19 (sequence is synthesized)
cacagagaagagcctgaacacagaggcctggccccgttttccccagtttgttactgttagatcatacttttattgtcttatcatacttctccatgactatccattcttcaataaaactac

SEQ ID NO: 1032776 - DNA, 120 bp, Artificial Sequence
  ENSG00000224481_20 (sequence is synthesized)
tcttaaaaaacaaacaaacaaacaaaaaactgaggtttagctgtttccatgggccttcatttcctttggaaggcattcctgtcatgtaaaacttacattaaataaatacatctgctcttc

SEQ ID NO: 1032777 - DNA, 120 bp, Artificial Sequence
  ENSG00000224481_21 (sequence is synthesized)
ttgttatccctacggataagtgtaggaagggaccagggcactgccgttcaccaccagctttgcagcatatgtgactttgaaaacagtgtatagtgcataaaaattcatccctctttacaa

SEQ ID NO: 1032778 - DNA, 120 bp, Artificial Sequence
  ENSG00000224481_22 (sequence is synthesized)
acagatttttttgttccttctccacttccactgcttcacttgactagccttataggaaaaaaagttatttgtaaatatgatattgtttcagttgatcctcagcccgcccgttccccaccc

SEQ ID NO: 1032779 - DNA, 120 bp, Artificial Sequence
  ENSG00000224481_23 (sequence is synthesized)
agcccgcccgttccccaccccctgaaagtagctggaacaacaggtgtgcaccgtgtgctgggctcatttttgtatttttagtaaggattgccttttgccatattgtccaggcagctctcg

SEQ ID NO: 1032780 - DNA, 120 bp, Artificial Sequence
  ENSG00000224481_24 (sequence is synthesized)
aatgcctggactcaagtgatccgcctgcctgggccttcctgctcctccctgctgggattacagctgtgaaccaccccacttggccatcaattgtattttgaatttaaatgttttatagtc

SEQ ID NO: 1032781 - DNA, 120 bp, Artificial Sequence
  ENSG00000224481_25 (sequence is synthesized)
atcattcttcaaatattcttggttttgttgcatgtgcatgatggggttcaggacatgctaccccaaaatataacatcttggggtattgaatattttatgttaagggaatttgaataaaca

SEQ ID NO: 1032782 - DNA, 120 bp, Artificial Sequence
  ENSG00000224481_26 (sequence is synthesized)
atagaagcaggaaggtcactgtcaccctccccctgcccttctttcctgaagtcgattatagacccttatgtgagatgttccctctctgtacccagaggaaaggtgcatcctggagtctga

SEQ ID NO: 1032783 - DNA, 120 bp, Artificial Sequence
  ENSG00000264066_0 (sequence is synthesized)
aaaggcctcctcagtctgcagttccagctccaggtaagtgcaccttctctgggtctgtctgcctgtctgcttgttagtgtgaccaaagggaaccttctgcatcattacgccatctctggc

SEQ ID NO: 1032784 - DNA, 120 bp, Artificial Sequence
  ENSG00000264066_1 (sequence is synthesized)
ttgtttaacactggccctgggtccctatgagatcttaacagaccctagctccagtccccttcccataacccacctgggctgtgcctgaccacagaatcaaggagacgctggcctgcgagg

SEQ ID NO: 1032785 - DNA, 120 bp, Artificial Sequence
  ENSG00000264066_2 (sequence is synthesized)
gagctgtagagcagggagcaggaagctgtgtgtgtccagccctgacctgtcctgttctgcccccagcccctcacagtgcttttcaagccatgcttcctgtgcccccagtggggccctggc

SEQ ID NO: 1032786 - DNA, 120 bp, Artificial Sequence
  ENSG00000264066_3 (sequence is synthesized)
tactagtccgggcacccccagctctggagcctgacaaggaggacaggagagatgctgcaagcccaagaagctctctgctcagcctgtcacaacctactgactgccagggcacttgggaat

SEQ ID NO: 1032787 - DNA, 120 bp, Artificial Sequence
  ENSG00000264066_4 (sequence is synthesized)
ggcaaggaaaccgttaccattactgagtttagtaatggtaatggttctcttgctatacccagaaaacgtgccaggaagagaactcaggaccctgaagcagactactggaagggagactcc

SEQ ID NO: 1032788 - DNA, 120 bp, Artificial Sequence
  ENSG00000264066_5 (sequence is synthesized)
ctccagctcaaacaaggcaggggtgggggcgtgggattgggggtaggggagggaatagatacattttctctttcctgttgtaaagaaataaagataagccaggcacagtggctcacgcct

SEQ ID NO: 1032789 - DNA, 81 bp, Artificial Sequence
  ENSG00000264066_6 (sequence is synthesized)
tcccaccactttcagaggccaaggcaacaacatagtgagactcagtccctaatattaaaaaataaaaataaataaataaaa

SEQ ID NO: 1032790 - DNA, 120 bp, Artificial Sequence
  ENSG00000264067_0 (sequence is synthesized)
atccataatggattcctgggacattttcagatctccttccagcttcctcttcgccctttccaagtccgcccgcagtttcttctcctgctctaaggaaccctcaagctgagaagacacaca

SEQ ID NO: 1032791 - DNA, 120 bp, Artificial Sequence
  ENSG00000264067_1 (sequence is synthesized)
accctcaagctgagaagacacacagagacaagggcttgctctgttgcccaagctaaagtgcagtggtgtgagtgtagcccactgcatcctcacactcctgtgctcaagtgatcctcccac

SEQ ID NO: 1032792 - DNA, 120 bp, Artificial Sequence
  ENSG00000264067_2 (sequence is synthesized)
accgtgcctggcaatgtttgtagtttctttcatgaatttacctccttttattctttaatccctgcttatctctaaagagtaagtaactgaaagtaataaaacggaattttctcaacaata

SEQ ID NO: 1032793 - DNA, 120 bp, Artificial Sequence
  ENSG00000270006_0 (sequence is synthesized)
gcggctcagagcgcggctgtgtggggctgcggggctcccgccatgcccgctggggtaggtcctgcggaccccggccactggagccactcatcatttccgacggatgggccggaggggccg

SEQ ID NO: 1032794 - DNA, 120 bp, Artificial Sequence
  ENSG00000270006_1 (sequence is synthesized)
aaagaggtgggagcagcccgcgcggggccctgcgtcttgcataggcgcttctgggcgcggaattggaagcagtcgtcacccggaggcctgggcgtgcaagcaccgaagctctggctggcc

SEQ ID NO: 1032795 - DNA, 120 bp, Artificial Sequence
  ENSG00000270006_2 (sequence is synthesized)
ctgagcctccccaccccacccgctcttttcgctggaacgcgtgtactttgggcagttgctgacgtggagacaggacgtatgtcttcatattttagtaaaacccaatgccctctgcctctc

SEQ ID NO: 1032796 - DNA, 120 bp, Artificial Sequence
  ENSG00000270002_0 (sequence is synthesized)
ctttctgaggcataagcaggcacatgtcgcctgcaaagagggaaggggtgggtacttgtgaggagcccagcactgccttgcttggtctggacttacgcatttggaagagtagggagatca

SEQ ID NO: 1032797 - DNA, 120 bp, Artificial Sequence
  ENSG00000270002_1 (sequence is synthesized)
tttaagtctctaaggagaccaccaaatggaaagttgcccaggtctttctcaaatccaagagttcccaaacaaggagaatggtgtgctccatttcacaatgttggtaacttacgaaactgg

SEQ ID NO: 1032798 - DNA, 120 bp, Artificial Sequence
  ENSG00000270002_2 (sequence is synthesized)
aattcacacctaaatatgtcaagctccagagcctagacatcttctgctgttcaatgtggctaaatggcaatgaaaaatcatcctgagcatgggatcctgtacaagtcatcctgtgcacga

SEQ ID NO: 1032799 - DNA, 120 bp, Artificial Sequence
  ENSG00000270002_3 (sequence is synthesized)
ccatcttcccagtgggcctcactctacatggcaccacagctaggtgccccagcctgtcatgggatagaggctgcactctgcctgatgcccatgtgtttccaaagcaaagggggactcagg

SEQ ID NO: 1032800 - DNA, 120 bp, Artificial Sequence
  ENSG00000270002_4 (sequence is synthesized)
cctctctcccttgacccctctggggcacatcagggaggggctggcagattgctgaggaccatgaagggcagggcggtgggctttactggccccagagcttgccccaggctgtcctgacat

SEQ ID NO: 1032801 - DNA, 120 bp, Artificial Sequence
  ENSG00000270002_5 (sequence is synthesized)
gccccagagcttgccccaggctgtcctgacatccactgctctctgcaggaaggccaagaagtcactggagtggctgggggggcagcacagggatgagtgtgtgtgtgtgtgtgtgtgtgt

SEQ ID NO: 1032802 - DNA, 120 bp, Artificial Sequence
  ENSG00000270002_6 (sequence is synthesized)
gcatgaggagactccacagaggtggcaggatgggtctgggagggaaaggatgggaggagacactgaggcagccagtctgctcagagaggcagcggtcctggccagggggctgtacatgtc

SEQ ID NO: 1032803 - DNA, 120 bp, Artificial Sequence
  ENSG00000270002_7 (sequence is synthesized)
tctcgccccattctctaatgacctcaggacagtagccattgcatgtggggttcactggacaggaggaccccaccaccagcagcaaaatcataacacctgccttcatcccaccacattctt

SEQ ID NO: 1032804 - DNA, 120 bp, Artificial Sequence
  ENSG00000270002_8 (sequence is synthesized)
cttcattgacctccaagggctctacagctgcacgtgttggataaatgccagttccccagcttgtaacccaaggagtcatgagtcagagccacccgatcctcagctgtataagaggataat

SEQ ID NO: 1032805 - DNA, 120 bp, Artificial Sequence
  ENSG00000270002_9 (sequence is synthesized)
gctgaattcgagtcattgtgggaaattgactgaaacaaatgagcaacatctaacagtgctgaagagcatcatggcctttctcctcccttcctccctctggcactggtatcttcccatctg

SEQ ID NO: 1032806 - DNA, 120 bp, Artificial Sequence
  ENSG00000270002_10 (sequence is synthesized)
ctggctgacccttaccccctttccccgtatgcagacttcctcaaccagacccccaagctaaccacagtgggcccaccctctccccaacaccctcccttcactcctgcaactctcgcttgg

SEQ ID NO: 1032807 - DNA, 120 bp, Artificial Sequence
  ENSG00000270002_11 (sequence is synthesized)
cactctgctactgcttttgccaattgttctcacctcgggtggacaggcctctctgtgtcaccctcctatgagcccatgaggagggtgggccaaaagtcaggcttaatctgcctgctcctc

SEQ ID NO: 1032808 - DNA, 120 bp, Artificial Sequence
  ENSG00000270002_12 (sequence is synthesized)
cccagccagcaccactctacaaagttggaaggtccataagaagcagagcagctgcttctgaaagggcatccacctaaagaacgtgtgcgatggatcgccttgcaggtaacagggctgctc

SEQ ID NO: 1032809 - DNA, 120 bp, Artificial Sequence
  ENSG00000270002_13 (sequence is synthesized)
agaggcagatgcccctggaggtgtctcccacctgggggctgaccaccccgtggccctgttacagtgcacgtgcccaagcgccagctcctgcctaccttcctgatgccttctgaaggactg

SEQ ID NO: 1032810 - DNA, 120 bp, Artificial Sequence
  ENSG00000270002_14 (sequence is synthesized)
gacacgcagttgtcagcccctccgttcttgctgatggtccgccagagttcagcaaacgtgctgtcctgctccagggggttggtgcccttggctcggaagtactcatatacagcagaatcc

SEQ ID NO: 1032811 - DNA, 120 bp, Artificial Sequence
  ENSG00000270002_15 (sequence is synthesized)
cggacagtgccataagacatttccacttgtttggacaggtcctggaaagtcctgaaatgcagaaaggcagcgaggcatgagtacatgctgtgcattgcacactgcaaggatacaaatggg

SEQ ID NO: 1032812 - DNA, 120 bp, Artificial Sequence
  ENSG00000270002_16 (sequence is synthesized)
ctgcaaggcccttctgaactccaagcccggcatggcccactatccacattcttcattccccatcccccaaagttcaagtccttcagcccagagtgggacttgcagcgcctcattcaatta

SEQ ID NO: 1032813 - DNA, 120 bp, Artificial Sequence
  ENSG00000270002_17 (sequence is synthesized)
caggtgtgttttctcagtgcagattaattcaataagatgactgggcacctaaaaccaggttctttactgaactggagggataaaaggatgagtaagacatgattcctgccttcaaggagt

SEQ ID NO: 1032814 - DNA, 120 bp, Artificial Sequence
  ENSG00000270002_18 (sequence is synthesized)
ttatagtccagctatagaagcaaacatatagacagagaatcatagtatcaaagagtcagggcaacatgggaggctgtatgctgcggatctccaactcagacgcctgcagaggctgggcag

SEQ ID NO: 1032815 - DNA, 120 bp, Artificial Sequence
  ENSG00000270002_19 (sequence is synthesized)
gaaagaggcctatgttggcaagatgaacgataatgatggctggcctgtgacactcagagacagcatgaggaagaaacgcactcagagaccaactgactcagggtaaattaagaggcatcc

SEQ ID NO: 1032816 - DNA, 120 bp, Artificial Sequence
  ENSG00000270002_20 (sequence is synthesized)
cctccaaagcttgcagctgtgctggggtctagccaagtattgacttcgaatgctcccctccccatgacctcctcaaccaatttggtctttgaaaaaataaaaaaattggatttttatatc

SEQ ID NO: 1032817 - DNA, 120 bp, Artificial Sequence
  ENSG00000270001_0 (sequence is synthesized)
ggtgaaggatctttgacacaggcaacctccatccaggcacccagtggaaacggacagctgaccatatagcccagtgccttttctgacacacttcttccttggggaagttgaggttggggg

SEQ ID NO: 1032818 - DNA, 120 bp, Artificial Sequence
  ENSG00000270001_1 (sequence is synthesized)
cgggctgtgcacagggctccccagcctccctgtgtgtctgcttccttccctgccctccgcccggtggccccatggcccacagcccacagggaagcaggttggtgccacccctgcctcccc

SEQ ID NO: 1032819 - DNA, 120 bp, Artificial Sequence
  ENSG00000270001_2 (sequence is synthesized)
cgggcctgtaaatgcctcccttgggcccccatgaggccagtgagccagaagcccctctgacccagaggtcactgtgaccagcacatcctggagaggaggcctcgcccttgcacctttcat

SEQ ID NO: 1032820 - DNA, 120 bp, Artificial Sequence
  ENSG00000270001_3 (sequence is synthesized)
ctgcaagagttacttttacatttattttaaatgttgatttaagtatatacttcatctacagttatccatataaatagattcattacagggcctggctctgaataaacacagtaagttgga

SEQ ID NO: 1032821 - DNA, 120 bp, Artificial Sequence
  ENSG00000270000_0 (sequence is synthesized)
tgccaaatgcaaaaataaggaccagaaccaaacagggagcccctgtaagaaatgtgcagaaagaaggtaaaagccaggggaggggtgtcccagaccagaaggcatgaaggactagagggt

SEQ ID NO: 1032822 - DNA, 120 bp, Artificial Sequence
  ENSG00000270000_1 (sequence is synthesized)
tgaaatcaataaataggtattgagtatctataactctgattctcaggggtacttgtgttccttgggtgtaagatagtatgccagggatacaaaagatgggatacaattagtccgttttcc

SEQ ID NO: 1032823 - DNA, 120 bp, Artificial Sequence
  ENSG00000270000_2 (sequence is synthesized)
tgctgctccagtgttataagtagaacttgaggagtatgaggttggggaagaagaggatcattttatatcgaaaccaataccaatatagagtcgataataaatttcgtatgattacaaaaa

SEQ ID NO: 1032824 - DNA, 120 bp, Artificial Sequence
  ENSG00000273262_0 (sequence is synthesized)
tactgagctttctctgtctctagcgtctcatccttttgggggtttatggataggtaacaggctctctgcagatccaagcaagacagtcaggctggcaggaaatctggtgcacatccagtc

SEQ ID NO: 1032825 - DNA, 120 bp, Artificial Sequence
  ENSG00000273262_1 (sequence is synthesized)
aaaggcccaggggaggaatgtgctgctgcacaaacctgtctaaacgttgtgatggccccaatggtcactatagctgctgcccagaagcaggggcagtgaggtctctgttggccttcactg

SEQ ID NO: 1032826 - DNA, 120 bp, Artificial Sequence
  ENSG00000273262_2 (sequence is synthesized)
tgatgggcaagcttggaaacttggcccctggatcctaggtctgagaccacaacctaagttcagcccaggcccaggcatctttctccttctaccactcatatggttctggtcctacccagc

SEQ ID NO: 1032827 - DNA, 120 bp, Artificial Sequence
  ENSG00000273262_3 (sequence is synthesized)
tcgagttttccctatagccacaggtggcaggaggtttcagtttacttacaaagacaaatgttttaaatgtattatgacttcttcaaggatgttaaaaaaataaaaataaaaaaaccagga

SEQ ID NO: 1032828 - DNA, 120 bp, Artificial Sequence
  ENSG00000232286_0 (sequence is synthesized)
gtatttcctcttttaagaaattgagagcaagtaccttttacctgggaaggggaaactcatcaaatgctatctgctcttgggacccaatcctgagttactttatcagattaacctgatagt

SEQ ID NO: 1032829 - DNA, 120 bp, Artificial Sequence
  ENSG00000232286_1 (sequence is synthesized)
aagcaaagatggaaaacaaagcaggagatgaagggttcatagagataaacttcttcctattttgcctgggattccaggtagcagaactggagctcagacctcttttggggggatcctaag

SEQ ID NO: 1032830 - DNA, 120 bp, Artificial Sequence
  ENSG00000232286_2 (sequence is synthesized)
caatacttttgctgctcccttctggtccacatcacaagtctggagaatctaaaacaagctgggcaatgagaaaatctaactcttcatgtgttattcccaataaatcagttatgacataaa

SEQ ID NO: 1032831 - DNA, 120 bp, Artificial Sequence
  ENSG00000273261_0 (sequence is synthesized)
catttccaaattcacaagtgctcttggctggcttttcatgaatgatgcaatttctagttgaggtatgctggtatctacagctggcacattcctatcagagccttttccaggagttgtact

SEQ ID NO: 1032832 - DNA, 120 bp, Artificial Sequence
  ENSG00000273261_1 (sequence is synthesized)
gatgatgatctataaaagctgggtaagaactacattttaaaaaactgcagtcagtgaaaggcataaatgatatccctgtgctataatgaagggtaaatacagtaaaacttaacttgaaac

SEQ ID NO: 1032833 - DNA, 120 bp, Artificial Sequence
  ENSG00000273261_2 (sequence is synthesized)
taacttcataaactttaaaaaattatgagtagctgtacaataatatactacatttactgacaatgcagagaatttttaaaggattacattagacagccacagtgtctcaggtccaaaatt

SEQ ID NO: 1032834 - DNA, 120 bp, Artificial Sequence
  ENSG00000273261_3 (sequence is synthesized)
ttaaaccaagtattgctacaatatttccagatactcattcctcataaaaatctaaattaccatgattacaaacatatcatgagttatgatctattttttataggaacaacattcaagtta

SEQ ID NO: 1032835 - DNA, 120 bp, Artificial Sequence
  ENSG00000273261_4 (sequence is synthesized)
tttcacataaaacagcactttaatagtgttttacttttatgaaaatagataactcatttcaaaatagaaataaaatgtctgtacgtggggaccaaaattaataaaacatgttttacgtaa

SEQ ID NO: 1032836 - DNA, 120 bp, Artificial Sequence
  ENSG00000232283_0 (sequence is synthesized)
agccagatggactctgtgtccccagtccctgagttagctgaccgccagggcagggaggccatgttgctccacacttttttgaagaaggccttaccttgattccatatgtttcagaattag

SEQ ID NO: 1032837 - DNA, 120 bp, Artificial Sequence
  ENSG00000232283_1 (sequence is synthesized)
ctgtgtcatctacaagagaaggccaaaggtacacattttacaaatgaaggaagaggcaaccccatggactgaaatgttctctgaagtagaattgaccgcaatcaggcctggcaggcctgg

SEQ ID NO: 1032838 - DNA, 120 bp, Artificial Sequence
  ENSG00000232283_2 (sequence is synthesized)
agcagatcctgactgcagcagatgaaaaacagaacaagacaattacaagaccacgacatggcctctcaactaagtgtggttcgatttcaaagaatcctgcttctacagtggatgggcaca

SEQ ID NO: 1032839 - DNA, 120 bp, Artificial Sequence
  ENSG00000232283_3 (sequence is synthesized)
attctcctgagttgccaaatttcaagttactacatgttaatgcatttcgcacatatattgatcacataccttgactacggaggtgatgttacaatggatgaggctctgtaataaataatc

SEQ ID NO: 1032840 - DNA, 120 bp, Artificial Sequence
  ENSG00000232283_4 (sequence is synthesized)
caaattaggctcataactgccttccagcaagcatgtactagcatcaagaaacatctgactcccattctgtcattctgtacccacgtcatcttgactagacatcaattaagagtttcctgg

SEQ ID NO: 1032841 - DNA, 120 bp, Artificial Sequence
  ENSG00000232283_5 (sequence is synthesized)
aaaactcggaactatattcctggaggaatataaatacggtttttcaaagggagctactccattctcagctggaggaagaggggttagcctatgtgagtccaggagaacagaaagacaaat

SEQ ID NO: 1032842 - DNA, 120 bp, Artificial Sequence
  ENSG00000232283_6 (sequence is synthesized)
ggttgtataatataaggtagaggttctgggctatggagggcaggtaaagaaaccactagaatgaccaaagataaagagaaaggacaagaggacggacacagacactagcacaaacacaga

SEQ ID NO: 1032843 - DNA, 120 bp, Artificial Sequence
  ENSG00000232283_7 (sequence is synthesized)
cacacacaggcagaggagcaaccctggaacttgcttcttgaagagacgtagatttgtgccagaaacagagtgtgggagacagagcccacacaggagatgtgtggtccagagaggagttca

SEQ ID NO: 1032844 - DNA, 120 bp, Artificial Sequence
  ENSG00000273267_0 (sequence is synthesized)
ggtaggacttggtctctgaggacctctccctcctctgcactcatgcctgcctgctgcctgtgaggcttcgttggaacaaaatgcatcgccagctcccacctggagcactgtgctgctagg

SEQ ID NO: 1032845 - DNA, 120 bp, Artificial Sequence
  ENSG00000273267_1 (sequence is synthesized)
gaaaagtcttccttctcctcttcttcctcctccactttttcctcttcctcctcctcctcctcttctttttcctcttcctcctctgcctcctcttcctctttttcctttctcctcctcctc

SEQ ID NO: 1032846 - DNA, 120 bp, Artificial Sequence
  ENSG00000273267_2 (sequence is synthesized)
ttcctccttcactttttcctctttctcctcctcctcctccttcttctctactttttcctcttcctcctccccctcctctcctcttccatttttaaaaatttcagtaaatgtttcattagg

SEQ ID NO: 1032847 - DNA, 120 bp, Artificial Sequence
  ENSG00000273264_0 (sequence is synthesized)
gttggagcctgaatatttcacctaccactcagtgccctgagtctaactatgaacagggttctgtgtaccactctgggctcatgtcagtctagcagccaattaaaacctgatgttagccat

SEQ ID NO: 1032848 - DNA, 120 bp, Artificial Sequence
  ENSG00000273264_1 (sequence is synthesized)
ccatactgaaattgggtacctgttcttttaaaatctaattttgtagttatccctgttaaatgttatttacttatttctaatttgtctagttttgattctgttatctcgtgcattacttat

SEQ ID NO: 1032849 - DNA, 120 bp, Artificial Sequence
  ENSG00000273264_2 (sequence is synthesized)
tacttctaattcgtgccatctgaaatttgataagcatgccttctattttctctaagcagtggtcaaaaagtgttagaatgtatatattagtaaaaaagaataataaaaataccaaatcca

SEQ ID NO: 1032850 - DNA, 120 bp, Artificial Sequence
  ENSG00000273265_0 (sequence is synthesized)
ccagagaaaagccaggaaaaactccccatggatttagagacagagctctcaccttcaacaggttactttttccttgtctcaggcttccttggaaaacaacctataactaactttctggga

SEQ ID NO: 1032851 - DNA, 120 bp, Artificial Sequence
  ENSG00000273265_1 (sequence is synthesized)
ttgtctactccattgaactttgcatgcttggagcccctggcctcagcacactcaatcgcacaagccagcctgcagcacctgtacagcaccatgggagtcccctgcagagctgcaactttg

SEQ ID NO: 1032852 - DNA, 120 bp, Artificial Sequence
  ENSG00000273265_2 (sequence is synthesized)
agagtgggtatagtgacgtaactcaggttcttcaagggatgaacactccaactttgaaaccactagcctgtaggtgtggacgaaaaggcagctgcatgttataaaacaatattactcata

SEQ ID NO: 1032853 - DNA, 120 bp, Artificial Sequence
  ENSG00000275636_0 (sequence is synthesized)
gtggcttttcaaggtacacgctgaagacagcagagtgacaagctagatggaacctggatcctaaatcaccatgttaaaggccacccaccaaatactcaacattgaacagctctgtgagtg

SEQ ID NO: 1032854 - DNA, 120 bp, Artificial Sequence
  ENSG00000275636_1 (sequence is synthesized)
aggaatgtttcctaaagaaataatccaagattcaaagactgatagaatctgagaacaatggacaaaacccgaaatggctataatcacaatgaatgctgcaaagggctctgaaacatggga

SEQ ID NO: 1032855 - DNA, 120 bp, Artificial Sequence
  ENSG00000275636_2 (sequence is synthesized)
atggaaactgaacagcagaggacagaaaataaattacaaaattgctcagtagtacaaatacagtatttgtgatgggaattaagaacaatagttgaaaagaaaataaaaacctgatcagca

SEQ ID NO: 1032856 - DNA, 120 bp, Artificial Sequence
  ENSG00000275632_0 (sequence is synthesized)
tgggaggccaaggcaagagaactgttgaaggtcaggagttggagaccaaccagcccagggaatatatagggagaccctatctcttaaaaaaaaaaaaaattacctgggcatggtggcata

SEQ ID NO: 1032857 - DNA, 89 bp, Artificial Sequence
  ENSG00000275632_1 (sequence is synthesized)
tgagccgtgatcacaccactgcattccagactaggtacagagcgagtctatgtggagtgcaatgtctctaaaaaaaaaaaaatacccaa

SEQ ID NO: 1032858 - DNA, 120 bp, Artificial Sequence
  ENSG00000275632_2 (sequence is synthesized)
taaacagggactatgaggtatgtacaggaaattaatagctgaagaatattttaccatgttcaaaaactaaattcttcatgtggctgagagaagaaagaaaaaaatggtatgtttgtgttc

SEQ ID NO: 1032859 - DNA, 120 bp, Artificial Sequence
  ENSG00000275632_3 (sequence is synthesized)
catttgcaggtattacataaacccattttaaatgaactaaaatgcctaggatttgggggggaaaaattatcttgtgctcgcatttgaaggttcttctcagaaataaactgtttaaagaga

SEQ ID NO: 1032860 - DNA, 120 bp, Artificial Sequence
  ENSG00000275630_0 (sequence is synthesized)
cctgggctcggctcccacgctcgggcaggcctcccgccgggggatcggagctgcggtcactcgcggcttcggggccgtggcgtcccgcgcacagcttccgcgcctctgcaaggcgctctg

SEQ ID NO: 1032861 - DNA, 120 bp, Artificial Sequence
  ENSG00000275630_1 (sequence is synthesized)
gcaagggaagaagaatcttgaaagcctgtgacttcacagagacttcttgattgatgcccctgaaatcagcctgccaagtgtggcctctgcagcataaatacaaggagtctgatgacacaa

SEQ ID NO: 1032862 - DNA, 120 bp, Artificial Sequence
  ENSG00000275638_0 (sequence is synthesized)
gtgcccagaattttggtattgggacctccctcccacaagcattgccttctcctcctgttcttaggccttggctatggaaacccagcaatgcagtagcatcaggaataaggataattaaga

SEQ ID NO: 1032863 - DNA, 120 bp, Artificial Sequence
  ENSG00000275638_1 (sequence is synthesized)
taccattgggattcacagtttattgaaatttaataaaaattatttccaaagaatgagaatcctggggtagcgaggcaattaattaagcaattcatcttaaaagatggaatacttggaaca

SEQ ID NO: 1032864 - DNA, 120 bp, Artificial Sequence
  ENSG00000275638_2 (sequence is synthesized)
ccttagccatcattcaatgccaaaatgtttgggtttttttcatatcacatccgtcctatcttttcatcttcagtgaatcattcctcatgtttgtaattaaagccatatttaccatcataa

SEQ ID NO: 1032865 - DNA, 120 bp, Artificial Sequence
  ENSG00000261749_0 (sequence is synthesized)
aggtcttgaacactgctggaagcctactagatatttaatgtaatcaccatgataatggctaagatttattaagcatctgctatgtgctttatggtgctaagaacttctcatgtatttact

SEQ ID NO: 1032866 - DNA, 120 bp, Artificial Sequence
  ENSG00000261749_1 (sequence is synthesized)
cattgaatcttcacaaaaaccttatgaacatcagagctgatgaatactcagtcagaagaaatgcaggcctgcaggtttgtccacaaagtgttcccatcaaccgtgtaagacggctctctc

SEQ ID NO: 1032867 - DNA, 120 bp, Artificial Sequence
  ENSG00000261749_2 (sequence is synthesized)
aaatgttactgtctatatgaatccaccttgggatattagtaaaatgagtttctgatacagaagatctagaaagcgcctgaaatgctgatattctgtctcccaggtggaggagttcagcta

SEQ ID NO: 1032868 - DNA, 120 bp, Artificial Sequence
  ENSG00000261749_3 (sequence is synthesized)
ttaccttgactttgccgaagtcctaggcactcccatgccctcagagtctcattttgaatccaggcacttagggatgctatttttccacatcaaacagcttcctcccagccaaagaattct

SEQ ID NO: 1032869 - DNA, 120 bp, Artificial Sequence
  ENSG00000261749_4 (sequence is synthesized)
gcttacagaatgacaaagcaaaagcaaagaggagaagaatgaagtaaagacaaccaaaggaaaagactgatggctccttaagaatgatcttgataaaggaatggtggctgaggggtccat

SEQ ID NO: 1032870 - DNA, 120 bp, Artificial Sequence
  ENSG00000261749_5 (sequence is synthesized)
ctcctaaaccacccaccttactgactccctagagcaatgccatacagaaagctgcaccttgaggggaagacacaagaatcctggagtggaaaaaaattgggtaatgatgacagccttcga

SEQ ID NO: 1032871 - DNA, 120 bp, Artificial Sequence
  ENSG00000261749_6 (sequence is synthesized)
ggtcttgagagtaaagcagaagcaaaaaaaaagtgttatttttatcttttgaagatggttccctcttaagacttttgcgaatgattaagatttcaattatgttccaggaaaaaaataaga

SEQ ID NO: 1032872 - DNA, 120 bp, Artificial Sequence
  ENSG00000261749_7 (sequence is synthesized)
tttttgcttgacaaaaaaaatttttgtctagaacaggtgggaaggaagagatagtttagccacatccaagagacctgtaaattgggtacagtgaagtgaatggtgtaccagtcataaaag

SEQ ID NO: 1032873 - DNA, 120 bp, Artificial Sequence
  ENSG00000261749_8 (sequence is synthesized)
aatgttaactggagaagtctctgctgtcttcctgtaactgaggggggtgtaaccatccttgtggaagcgtccacttttattgaagattggctaaataaatctgtgcctactgaaactcaa

SEQ ID NO: 1032874 - DNA, 120 bp, Artificial Sequence
  ENSG00000261749_9 (sequence is synthesized)
gaagcatagctccctggagcaagttagtgaatattaatgtttagcacattataaggctctacaagtactctgatgttggaggccaagggggagataaacgagcaaggtttcaggaaatca

SEQ ID NO: 1032875 - DNA, 120 bp, Artificial Sequence
  ENSG00000261749_10 (sequence is synthesized)
tataaatatgcaactcacagtgcatatacacatatttcaggggggaagacagctgttatcaaccaggctgaaggtcaaaacgaaaattcttttgcatatctcttggtgggtaaaaggcca

SEQ ID NO: 1032876 - DNA, 120 bp, Artificial Sequence
  ENSG00000261749_11 (sequence is synthesized)
gactggggaccttgagacccagggacaatgcccagctctgaataggacatcggtggtatttcagtgagctagctcacatcttcacttctgttcctccatccataaaatgaggatatgaat

SEQ ID NO: 1032877 - DNA, 120 bp, Artificial Sequence
  ENSG00000261749_12 (sequence is synthesized)
acaaaaagaaaagagaaaagaaggagatgtgcagcctcacctattccaagggtcctaataggaccaagttgtcatataagcttctgttccgggcctgacagtgaatacatgccatagcca

SEQ ID NO: 1032878 - DNA, 120 bp, Artificial Sequence
  ENSG00000261749_13 (sequence is synthesized)
tgtcctttatgcaacatatttgcaaaagatttttacatggaagccactactccagtatcccaatcagcatctaactcagatacagtcttctataagttaaaacatggcctatgaagcgat

SEQ ID NO: 1032879 - DNA, 120 bp, Artificial Sequence
  ENSG00000261749_14 (sequence is synthesized)
tttttaaaagatttgtagtcaagaagagacacattctttgggggaggatgaggcaactggagtcgccaatgaccttagagagctggaacttgagacacacagagggaatgtgtgaattct

SEQ ID NO: 1032880 - DNA, 120 bp, Artificial Sequence
  ENSG00000261749_15 (sequence is synthesized)
aggatcaccaatggaatcaataagcttttacctgtaggggataaatcctggaagaattctagagtttgaaactgtctggaccatttgaagcagcatctcagaggcatcagagctgatgaa

SEQ ID NO: 1032881 - DNA, 120 bp, Artificial Sequence
  ENSG00000287379_0 (sequence is synthesized)
ggtcactgttgggagcctgtctggctgcaggactgctccccacctgggccctggactgtgggaagtgacccctgcagccacgtggaactctcctgttattccagttgaagagagaccata

SEQ ID NO: 1032882 - DNA, 120 bp, Artificial Sequence
  ENSG00000287379_1 (sequence is synthesized)
tggcattctggagatggctggatgcaagcatttaaaaccttcgagagaatacagtgcaccaaggagactattattatgattattgggaggatgataccaagagtttggagtatactctct

SEQ ID NO: 1032883 - DNA, 120 bp, Artificial Sequence
  ENSG00000287379_2 (sequence is synthesized)
cttcatcagtcccctaccactgattttctgtaatcttcatttgatgtatttccccataggctacaagtgctagcagctgcacaggtacttttctgtttagctaattctattatttagcat

SEQ ID NO: 1032884 - DNA, 120 bp, Artificial Sequence
  ENSG00000287379_3 (sequence is synthesized)
aagtttcacaagagaatctaaagtttgttgtgtaactgtagcctttacagtagaatttgctatagaacctatcatgagggatacatttctaatcattgcttcttttactttaaaccatgg

SEQ ID NO: 1032885 - DNA, 120 bp, Artificial Sequence
  ENSG00000287377_0 (sequence is synthesized)
aagcagcaagataaagtccctgcctacatgaagcttaccttgcagtggaggaggaagacaataacatcatgtcagagggttaaagacaaagtgttactgttctcctttaaacaagctaga

SEQ ID NO: 1032886 - DNA, 120 bp, Artificial Sequence
  ENSG00000287377_1 (sequence is synthesized)
ctggaccagattgtccaccctggactagctggcataacagatcctcttggctctctgagggcgccttctctccatcagaggtcgcacagcaccaccttgattccaggattcttggcacca

SEQ ID NO: 1032887 - DNA, 120 bp, Artificial Sequence
  ENSG00000287377_2 (sequence is synthesized)
ccttgattccaggattagcaatcgccaactgcgtaagcccaactgcacatgcaatcatatgacatgtgatcccatggcaaatgtaatcaccgctcaaccaatcccaggtgctgctactgc

SEQ ID NO: 1032888 - DNA, 120 bp, Artificial Sequence
  ENSG00000287377_3 (sequence is synthesized)
tacttcaaactgtaatagtgtctacaaacaatttgcactttggaatgccacaatcccagggggtaattaacaaatccagggaacaatctttttaaaagcctttaaaagcaacagagactg

SEQ ID NO: 1032889 - DNA, 120 bp, Artificial Sequence
  ENSG00000287377_4 (sequence is synthesized)
aagttcctcaagatgtgttaattagaaataaaatgcagcatggttatcggctgcagagctttctgaatgaagcagactctgaagagggactaagatttcaagagttagaagcagagttca

SEQ ID NO: 1032890 - DNA, 120 bp, Artificial Sequence
  ENSG00000287377_5 (sequence is synthesized)
caaagggccacccaaggactgtgaattccaaacataccattcactattccaaggtagaagactgcgttcaccagcatgcctcctttccggaagtggtcgctcatgtgctctaaccagttg

SEQ ID NO: 1032891 - DNA, 120 bp, Artificial Sequence
  ENSG00000287377_6 (sequence is synthesized)
gcgtccaaaccgctcactgtctggccattcttggagacatggagaggaatggtgacagggtagtattgccggcacttctgatggctcttcggtttgttgaaaagggtgaagatctccatt

SEQ ID NO: 1032892 - DNA, 120 bp, Artificial Sequence
  ENSG00000287377_7 (sequence is synthesized)
tctgttgggatttgtaaagggagtggagagagaagaggtcaactgatgataaaaatctgtttcatcggcttaagtggaatctctcaggagcctgaataaatgatatgatgaatgctgaaa

SEQ ID NO: 1032893 - DNA, 120 bp, Artificial Sequence
  ENSG00000287376_0 (sequence is synthesized)
gcgtgacacaaatttggccccgagggagctccatgtgcctgagtcccaggagccctagatgccagcgacagcttgtcaccaggcctgcgacgccaatgggcgggagtcggcggagctcag

SEQ ID NO: 1032894 - DNA, 120 bp, Artificial Sequence
  ENSG00000287376_1 (sequence is synthesized)
gacactgacgacgggcctgggggaaagcggtccccacacagcccggggccagaggagcgggctgccagggtcagacggaggaagaccgcgggaaacagactggacgtgcagggaaaggtg

SEQ ID NO: 1032895 - DNA, 120 bp, Artificial Sequence
  ENSG00000287376_2 (sequence is synthesized)
tcatgaggactggacatgggtctatcaggaccatcggcatgatgtcagccaaggatctcgtggcctgcctctgccaaggggggaccagcaccttgtcctgagcacttccagcctcccatt

SEQ ID NO: 1032896 - DNA, 120 bp, Artificial Sequence
  ENSG00000287376_3 (sequence is synthesized)
gccttcaacctggctgcattcagctgccatgcccctacctcctgatgtggccagcaccctccaggacttcatctaggtgcacccaaaggccgaggacgttgctggccagcaggaaattcc

SEQ ID NO: 1032897 - DNA, 120 bp, Artificial Sequence
  ENSG00000287376_4 (sequence is synthesized)
cacacccagacagctgtgtgtaactgtgcagcttcgggctgctgcaggtgctggccggactgtgttctgggcacactggactgtgtcactgcatggaggctgttgccggaggaggaagtg

SEQ ID NO: 1032898 - DNA, 120 bp, Artificial Sequence
  ENSG00000287376_5 (sequence is synthesized)
caggccccaaggcctatgtgcctggaaaccagctggggctgctgcaggaggagggctgcaggatgctccagctcagacctgactcagggttttagagggcacagggcataaagctgtgga

SEQ ID NO: 1032899 - DNA, 120 bp, Artificial Sequence
  ENSG00000287376_6 (sequence is synthesized)
catagacagccctactgcgcaggaagagcataaaccagccagagggcatgcatgggggctgctgttgcattctggtctcctttgaggtagggaaagatgtgtttctttctattttatggg

SEQ ID NO: 1032900 - DNA, 120 bp, Artificial Sequence
  ENSG00000287376_7 (sequence is synthesized)
tgagcaaactgaggcagagtggtggagtgatttcccccagcatcgatggcagatttagctccagggcttagattttaggatcctccctctcaaataccatgatgtatcatgggctttttc

SEQ ID NO: 1032901 - DNA, 120 bp, Artificial Sequence
  ENSG00000287376_8 (sequence is synthesized)
tccacagaaaattagaaactcagaaatggaaaggaacaatgaaacttacccattctcccactgctcacatttccttctggtctttttgtgtgtgcatataaaatatatctcagaaaattg

SEQ ID NO: 1032902 - DNA, 120 bp, Artificial Sequence
  ENSG00000287375_0 (sequence is synthesized)
aggggagagttgggtagagaattgagtcatggtgaaaacagggaagtagatgcccagagagagaatggagaacaaacagagaaggaagccaagaacaacctccaaggaaaacacaacatt

SEQ ID NO: 1032903 - DNA, 120 bp, Artificial Sequence
  ENSG00000287375_1 (sequence is synthesized)
caaggtacacgtaaaagaatagaagccagtaaagtagagaaagaaggacaaatcagagaggagaagagccatgagatacctctcagaagccatggtattaaacatctccagtgccccagt

SEQ ID NO: 1032904 - DNA, 120 bp, Artificial Sequence
  ENSG00000287375_2 (sequence is synthesized)
gcgctttcgaagtcactggaaattaccaccacagcaatttcagtagattagcaaggtgttgactagagtaccattaagagtgattgaaaggtaaagagatgaagacaacaaacaaaggct

SEQ ID NO: 1032905 - DNA, 120 bp, Artificial Sequence
  ENSG00000287375_3 (sequence is synthesized)
attcttctaagaaatttatcatgaagataagaagaaaagcaatgaaatgcagatcgacatcttcattttggacatctagtctctagaactctggaacaataaattcctgttgattatatc

SEQ ID NO: 1032906 - DNA, 120 bp, Artificial Sequence
  ENSG00000287374_0 (sequence is synthesized)
ggacacctgcgcgttaggagattctggagccagaaggacagccgaatggccttcgcccgccctgcccctcgcctgcttcagaagcccctggaaacgccccggtctgcgacccgggttcga

SEQ ID NO: 1032907 - DNA, 120 bp, Artificial Sequence
  ENSG00000287374_1 (sequence is synthesized)
gcagccagggggctcaagggaagctgaacgcctggtgggctcccgggatggctcttcccgttctttgcacagccttcacccagtgagggagcctgtgccctccctgctcagtcgcattcg

SEQ ID NO: 1032908 - DNA, 120 bp, Artificial Sequence
  ENSG00000287374_2 (sequence is synthesized)
gggcgctgcggagcttccgctgccttcttcggatcctgcgttcggcaccggggctccaccagggcagggatcgtggtgagggtcgctcgtggatcccctcgcggggagcagggtctggca

SEQ ID NO: 1032909 - DNA, 120 bp, Artificial Sequence
  ENSG00000287374_3 (sequence is synthesized)
ctcaccagggcgcacgactaggacttgttgaatgaatccgtcgtcgcctttatcttttagtcctttgaagagccttgagaatggaaatcatgagagatttttccatgggggaagttcttt

SEQ ID NO: 1032910 - DNA, 120 bp, Artificial Sequence
  ENSG00000287374_4 (sequence is synthesized)
ttacgaaacgtttattcagattgatttctcggcaccccgcggggagggcaacgggcagggcttccagtgcaccttctgcgcagtggagccgcgggggctcagctggacagtggtcgggtc

SEQ ID NO: 1032911 - DNA, 120 bp, Artificial Sequence
  ENSG00000287374_5 (sequence is synthesized)
gtggggctggagggcgggagcgggggaagggaaaagcaaaagcggggaaagaagccggagagcggtggaccagacatctagacctgaaaggctcgtgcggaggcagaggcgggatcttcc

SEQ ID NO: 1032912 - DNA, 120 bp, Artificial Sequence
  ENSG00000287374_6 (sequence is synthesized)
aggcagaggcgggatcttccggagaagcaacatgtaacagtttcattgaaagtaaggttgcccgggcacagtggctcacccctgtaatcctagcactttcggaggctgaggcgggcagat

SEQ ID NO: 1032913 - DNA, 120 bp, Artificial Sequence
  ENSG00000287374_7 (sequence is synthesized)
aactccatttcaaaaaaattaaaaataaaaataaataaatagagtgaggttaattttgaccttatggagtctctccccaacccctacatacctttgcacttgtggattgtcattttgtca

SEQ ID NO: 1032914 - DNA, 120 bp, Artificial Sequence
  ENSG00000287374_8 (sequence is synthesized)
tggctttgatataaaaatatatcaataagctatatgcagtgctaatgtaagtttgaatttcatcctgactccataagccactttccattttgataaagcctagaaatattcatgtccatc

SEQ ID NO: 1032915 - DNA, 120 bp, Artificial Sequence
  ENSG00000287374_9 (sequence is synthesized)
tccttgaatatgggtaatggatacctattgtggggcccactctcaatctcatggggttttttaatttttttaaattttcattcaggtctcaatagatatgcctgggctgcctgaaagcca

SEQ ID NO: 1032916 - DNA, 120 bp, Artificial Sequence
  ENSG00000287374_10 (sequence is synthesized)
ctgaaaatggcccgtggccttgtacatctgacagagtggactaaaatctaagccatggaatggggggatggaaagtgagaaacaccaaactcagcacacaatgactcagtttaaatctct

SEQ ID NO: 1032917 - DNA, 120 bp, Artificial Sequence
  ENSG00000287374_11 (sequence is synthesized)
gggctaagagatctatcatggcttctgggacataaggctttgtccggagggtgactgtaggctcccatgacaatgcctaccccagaaagctcaaggctgccagaggaacttactttagtt

SEQ ID NO: 1032918 - DNA, 120 bp, Artificial Sequence
  ENSG00000287374_12 (sequence is synthesized)
ccagccaatacctgctgatgatggtaggttcaggatctcccttttgtatagcacttactaagaagggaatccttcctccatccctttgagatgtgtttgtatctcctagggactccagtg

SEQ ID NO: 1032919 - DNA, 120 bp, Artificial Sequence
  ENSG00000287374_13 (sequence is synthesized)
tgtctttccctaggatctgaaagccattcctttgagctgtagttctcaggaaggactgagcctctgtcttccagtctctgtgggaggttagaatcctatcttctaatattgtcagctagc

SEQ ID NO: 1032920 - DNA, 120 bp, Artificial Sequence
  ENSG00000287374_14 (sequence is synthesized)
agacacagctggcctgatgaggcagacattcacaatgtttcacttgtgccctgccccctgccctctcccctacctccctctccccctataatgccatcacctctgtacaaatgggaacac

SEQ ID NO: 1032921 - DNA, 120 bp, Artificial Sequence
  ENSG00000287373_0 (sequence is synthesized)
aaagaggtatgtgtctgtttcagagaatctgctctcttctaccttgctttatttgggtggtgtgaccttggctcttctgtatattcatcctgcctgtcacttttcagaaccgaggcagca

SEQ ID NO: 1032922 - DNA, 120 bp, Artificial Sequence
  ENSG00000287373_1 (sequence is synthesized)
aaggaccataagcaattctccaatggtgaagatcgaccccagtcatgtaaaaacacgaggcaacacatttcacttttgcttaagaaggatcttgcagaaagtgaagaagagcaggaatag

SEQ ID NO: 1032923 - DNA, 120 bp, Artificial Sequence
  ENSG00000287373_2 (sequence is synthesized)
agaagacatttgaatgacgactgatgttctcttctttggcctgaggttttagaacacattcactgcctgatcactgtggcccagaagccatggcctctgctgagagatagggaccccatg

SEQ ID NO: 1032924 - DNA, 120 bp, Artificial Sequence
  ENSG00000287373_3 (sequence is synthesized)
ttccctctacacatcttcttccccaaagcctctctgaggctcctatgttcaaagaaacagtcctctggcaatggcctggtcctttctgccataccaaagaaagttgttttttgttttgag

SEQ ID NO: 1032925 - DNA, 120 bp, Artificial Sequence
  ENSG00000287373_4 (sequence is synthesized)
caagagatcacttctgattttcctacctttgacatggaccagactaattgacaaattctagaaggacagacacttccaaacgtctcttgacatactggcttcacaaaggttaggaaagct

SEQ ID NO: 1032926 - DNA, 120 bp, Artificial Sequence
  ENSG00000287373_5 (sequence is synthesized)
gttatggggaggacggagcctttctcctcttcctgagaacgtttgaagaagaaaggggctactgagaagtctggtagattcagcagctagtaaatatcgtgtctaaatgggcatctttta

SEQ ID NO: 1032927 - DNA, 120 bp, Artificial Sequence
  ENSG00000287373_6 (sequence is synthesized)
atcttttattaaactctgaggcagggttggtgtgttaggccattctttcttgctataaagaaatatctgagactgggtaacttataaagaacagaggtttaattggctcatggttctgca

SEQ ID NO: 1032928 - DNA, 120 bp, Artificial Sequence
  ENSG00000287373_7 (sequence is synthesized)
agaaagcataatgacatcttcttctggctaggcctctggaagcttccaatgatggtggaaggcgaagagggaacttgcgcatcacatggcaaaagcaggagcaagagagaggcgaggagg

SEQ ID NO: 1032929 - DNA, 120 bp, Artificial Sequence
  ENSG00000287373_8 (sequence is synthesized)
tgccgcacacttttaaaagaccagatctcatgaaaactcactattgtgaggacagcaccaagaggatcgtgctaaattattcaagagaaatcctcccccatgatccagtcacctcccacc

SEQ ID NO: 1032930 - DNA, 120 bp, Artificial Sequence
  ENSG00000287373_9 (sequence is synthesized)
gggattacatttcaacatgagatttggatggaaacacattcaagctttatcaggtagaagaacacatccctgattaaacgttacatcctgcgaagacagactgtgaaggccaggccacaa

SEQ ID NO: 1032931 - DNA, 120 bp, Artificial Sequence
  ENSG00000287373_10 (sequence is synthesized)
ctgtgaaggccaggccacaatagctggggagacaatgcattttttgttcagagcagccaccaacagtgatgacaagagccatcaatgggccaaggtcaaagatcagcagtccctctgtca

SEQ ID NO: 1032932 - DNA, 120 bp, Artificial Sequence
  ENSG00000287373_11 (sequence is synthesized)
cttcattcttcttctggctcccaatagagtccataggaactcaatctcagttctgaaatctaatcaaagctcatccactcagacccaagccaaggacaccaaagaacaaattcataaggc

SEQ ID NO: 1032933 - DNA, 120 bp, Artificial Sequence
  ENSG00000287373_12 (sequence is synthesized)
aaacaaagtcttcactcagccttctgcatttagtgattgtggaaatgtggtgcaactgccagctagatgagagactttggaggaaatgggtgatttaagccttgggagtgaggattagca

SEQ ID NO: 1032934 - DNA, 120 bp, Artificial Sequence
  ENSG00000287373_13 (sequence is synthesized)
agagagattgatgaagattctggacacatttgggaagcaccagagtgagagcgtgccatgactctccaggtgggcatctgaggaagcttaaaatgatgagccaaattaaaaataggaaat

SEQ ID NO: 1032935 - DNA, 120 bp, Artificial Sequence
  ENSG00000287373_14 (sequence is synthesized)
acatttgtcctggatgcagctaaaatccatcctttatgatacagtttattccttgatgccattgtctgctaggagatttcccggattctgaaagtgtgcaagcaatacttttcaattact

SEQ ID NO: 1032936 - DNA, 120 bp, Artificial Sequence
  ENSG00000287373_15 (sequence is synthesized)
gcacatacaccctgacacaccatgtggccttcaccaatttgctgcacaatctatcttaacagtaaccacaaagcatgcttcttgatagtatggacaaaatcatttctctcttttgttgct

SEQ ID NO: 1032937 - DNA, 120 bp, Artificial Sequence
  ENSG00000287373_16 (sequence is synthesized)
taggaattctgttgtaggctcaacttgctaaactagttgtgcagatcaacacatgagagacaggagcctctccactaaatgagggtgggaatgaaagtgagtaatgtctttggggccctt

SEQ ID NO: 1032938 - DNA, 120 bp, Artificial Sequence
  ENSG00000287373_17 (sequence is synthesized)
ggaataggcctttgctggtggaaaccctgctcaacaaagagaagaaagtatccagcacagggctaggcttgcatcagcaaagggaaacccagcaaccacatcagtgtaaatgattctgct

SEQ ID NO: 1032939 - DNA, 120 bp, Artificial Sequence
  ENSG00000287373_18 (sequence is synthesized)
attctacctggcacccactcttcttaatgtggtaacttaatttgtcttggagaataattatgttttgagtgctaactattgctaagcattatgctcaacactttaaataaatgacttcac

SEQ ID NO: 1032940 - DNA, 120 bp, Artificial Sequence
  ENSG00000287373_19 (sequence is synthesized)
ttaatccctacaataatcttacaaagctgatacgatcttgattttgcaggtgagagaattgacatttgggcttaagaaattttgttaaaagctggaattcaaacacaggtctgtgtgagt

SEQ ID NO: 1032941 - DNA, 120 bp, Artificial Sequence
  ENSG00000287373_20 (sequence is synthesized)
tcaaaacccatgccttcaaccatatcatcatcaaccttagtttctagaaatacaaaatctgcactctttcctctgctgcagcctgaggtaatttcttagcagctaaggctgtcacaaaga

SEQ ID NO: 1032942 - DNA, 120 bp, Artificial Sequence
  ENSG00000287373_21 (sequence is synthesized)
acctctgcaggactgtggcagtggatttggtcactttttatagctcttgggattcattatgatatataattttcttattaaatttctataaacctatattgcttcaagataaagttgttt

SEQ ID NO: 1032943 - DNA, 120 bp, Artificial Sequence
  ENSG00000287373_22 (sequence is synthesized)
tcccctgttctgacccatcttatgtatcattgccagaggagtctcataaagtatagctcatcttgtcacttctctgctcagaaacctcccaaagctcctggttgtccctggggccacagt

SEQ ID NO: 1032944 - DNA, 120 bp, Artificial Sequence
  ENSG00000287373_23 (sequence is synthesized)
tactcttggatatgcaaagcaggctgcaccctgcctttccaggatgactttctattctctggttttcaaccctggggattaaaccaggctttgtgaatttctagtgcaaccaggatttta

SEQ ID NO: 1032945 - DNA, 120 bp, Artificial Sequence
  ENSG00000287373_24 (sequence is synthesized)
gactagagctctgttctaagcacagtgtgggtcactgcagaatctcacttcaagaagggtcctgtggtttcataaagattggaaagcacttctctaactcgaccatattacaattcattc

SEQ ID NO: 1032946 - DNA, 120 bp, Artificial Sequence
  ENSG00000287373_25 (sequence is synthesized)
gacaatcccctgcctacacctctgcttaaattcatccttcacgtaaattgatcttccttacaacacagtcttctgatatctcatccatccttcaaggcctggttggaacgctactgtctc

SEQ ID NO: 1032947 - DNA, 120 bp, Artificial Sequence
  ENSG00000287373_26 (sequence is synthesized)
catgaagccttcctcagtaacccagacagaaatcctttccctctgctttatgtacttccacagctcttttcttaatattactcctgtaggacttgccacactaaaccttgtagcatggat

SEQ ID NO: 1032948 - DNA, 120 bp, Artificial Sequence
  ENSG00000287373_27 (sequence is synthesized)
atttgtgcccatctcatctcatctgacccacttgacttcagtgtcgtgtcctggggttgagcaggcagagatcatatgtcttcattatgtctgtgtgttaccctagcatctaacactatg

SEQ ID NO: 1032949 - DNA, 120 bp, Artificial Sequence
  ENSG00000287373_28 (sequence is synthesized)
tcttgatcatgccaggaatttaataaatatgcattgatataaactgaattaatattgattattgggcatcatttcaaaaaatggctttggtaagttgtctgcttggtgaacaccatcttt

SEQ ID NO: 1032950 - DNA, 120 bp, Artificial Sequence
  ENSG00000234705_0 (sequence is synthesized)
agattaaaaggagcccaagccccatctcatcctagcacaccctcctccactgtcctggcagtagcagtccctgcactaggtcagacaatcccctttggggtacaggaaacaaagcaggag

SEQ ID NO: 1032951 - DNA, 120 bp, Artificial Sequence
  ENSG00000234705_1 (sequence is synthesized)
tgtcaaggagggggtggccattgtttgtcccagcctggggctccccctctggtttcctatttgtagttactagaatgaaaaaaaaacatgatagataaataaataatccactggcagaga

SEQ ID NO: 1032952 - DNA, 120 bp, Artificial Sequence
  ENSG00000287370_0 (sequence is synthesized)
agtggcgtggctacaccgtggcctcaaggagccagtcctgcccggatggggctcgccggatcggtttcggttttcacgcactcccatttctgtggccgctgtgcattcgcggagtgttct

SEQ ID NO: 1032953 - DNA, 120 bp, Artificial Sequence
  ENSG00000287370_1 (sequence is synthesized)
agtgttctctgctgcttctgggtcctgacagtcttgaaaagatccagctgctgaactgcactatttgcaatagaaaagacatggaaccaacacagatgcccatcaatgatagactggata

SEQ ID NO: 1032954 - DNA, 120 bp, Artificial Sequence
  ENSG00000287370_2 (sequence is synthesized)
ttgaacagtgagaacatatggacacggggagggggacaacacacactggggcctgctgggaggtagggggcaaggggagggagagaatgaggacaaatatctaatgcttgtggggtttca

SEQ ID NO: 1032955 - DNA, 83 bp, Artificial Sequence
  ENSG00000287370_3 (sequence is synthesized)
gagagaatgaggacaaatatctaatgcttgtggggtttcaaacctagataatgggttgataggtgcagcaaaccatcatggca

SEQ ID NO: 1032956 - DNA, 120 bp, Artificial Sequence
  ENSG00000264514_0 (sequence is synthesized)
tcgtagaaaaggaaaagaaagtttttattttttgccttgttgtgcattcattctttcaaaagctgtttagaggaaaaaacattttctatcttctcatagtagtaagtagcaactcaggtg

SEQ ID NO: 1032957 - DNA, 120 bp, Artificial Sequence
  ENSG00000264514_1 (sequence is synthesized)
gcaactcaggtgcctgaagaccccatcatattttactaaaactctccactccaaaagagcatcagttgtgtgtaggtgaatagaaagctggtgtgtaggccgggcacggtggctcacacc

SEQ ID NO: 1032958 - DNA, 120 bp, Artificial Sequence
  ENSG00000264514_2 (sequence is synthesized)
cccatctttctagcatctctgcctttggctgatgtgacgccatacgttcctgacagttaatgttggctctgtagggatctgatgccaagtacagtcatagctcagccatgacacagggcc

SEQ ID NO: 1032959 - DNA, 120 bp, Artificial Sequence
  ENSG00000264514_3 (sequence is synthesized)
ttccagataggccagattcagtgcccttcccaacagatgcctctccatcccccacacctcccgactccaccaaaatgaagtggaagcacgtcttgagttgcccatttcttctgtgtctgg

SEQ ID NO: 1032960 - DNA, 120 bp, Artificial Sequence
  ENSG00000261743_0 (sequence is synthesized)
cacataaaatgtgatttttgcgtacattctactgttgatgattatatatgagtagtttccaattttgataattataaatagtgctactatgaacactctagtatatctgttttggtaaac

SEQ ID NO: 1032961 - DNA, 120 bp, Artificial Sequence
  ENSG00000261743_1 (sequence is synthesized)
atatgtatgagcttgcattgagtgcttatgtaagagtgggattgctgggcttttgaatttgtatatttccagttattgaatatgtttacgttcttgtttagtactgagactattatttta

SEQ ID NO: 1032962 - DNA, 120 bp, Artificial Sequence
  ENSG00000261743_2 (sequence is synthesized)
ataaatatatgattataatattatctgtgtaatacataatattatctgtggtggagaagaaagaatggtctttactttggggataagagtaagtagctgctcagggagaatgaggtggag

SEQ ID NO: 1032963 - DNA, 120 bp, Artificial Sequence
  ENSG00000261743_3 (sequence is synthesized)
gagacgatctagaaatctggagccaaactctgaagtgtattcaacataggatctatctcttagaaactgtcaggaaaagaacggatatagttgagtgcatagttaacttttgggatttca

SEQ ID NO: 1032964 - DNA, 120 bp, Artificial Sequence
  ENSG00000264513_0 (sequence is synthesized)
aaagttaatgtgctttgtttttggattcctgaaaaacaaaatgtttattatccagggattttagtggtgtctttgcatatcaagatgaggaaactgaagcacagagaagttatacaactt

SEQ ID NO: 1032965 - DNA, 120 bp, Artificial Sequence
  ENSG00000264513_1 (sequence is synthesized)
aactttaccttcccagcctcaggcgattctcctacctaaacctcccaagcagctgggaccagaggagtaacaaggaaggctagcagtgcagcccaggtccagagctgatgaatggtgcag

SEQ ID NO: 1032966 - DNA, 120 bp, Artificial Sequence
  ENSG00000264513_2 (sequence is synthesized)
tgctgctgttgtcatagcaaccaagaggaaaaaagcagcaccatataaggatctgtgacatggattctgggaacaatttatattaaaaagctgtaagctcctcatgccttaaagctgtaa

SEQ ID NO: 1032967 - DNA, 120 bp, Artificial Sequence
  ENSG00000176840_0 (sequence is synthesized)
gggacacctgcatctgccaacaagactggaagcagaaagggacagagacggcgaagtttgacggtctggaaagcagagaccagcagggctgactgcttgggagcaccaaatatccggaca

SEQ ID NO: 1032968 - DNA, 120 bp, Artificial Sequence
  ENSG00000176840_1 (sequence is synthesized)
gcgcctctcgggaggtccgagaagagaaccgcgatctgtttcagcaccggggctcaggacagttcccagcgggctccgtttcgtctccagaaccctggacagctcctccagagacggggt

SEQ ID NO: 1032969 - DNA, 64 bp, Artificial Sequence
  ENSG00000176840_2 (sequence is synthesized)
ttcatccccaagtccggaattttcaacagcttggaatgcactccctccacctccaaccagagct

SEQ ID NO: 1032970 - DNA, 120 bp, Artificial Sequence
  ENSG00000176840_3 (sequence is synthesized)
cctccacctccaaccagagctccccacaactgaccctgccttcttctgcaagctccatttcatcaagggaaacgatccttattgcctcaccatttcccacgtgaagtctgtattgacatt

SEQ ID NO: 1032971 - DNA, 120 bp, Artificial Sequence
  ENSG00000176840_4 (sequence is synthesized)
ctcatagacctgggatattgtgtctgcagcacatagtccaattattttcatgttatctactgacaggtctatttgtctccctgttacactgtgagctccgtgagggcagaaacaatgtta

SEQ ID NO: 1032972 - DNA, 120 bp, Artificial Sequence
  ENSG00000176840_5 (sequence is synthesized)
gtattttcactgctgtgtccccagcgcctggtccggggcccggcacacagcaggcatataataagcatgtgttgaatcaataaaggcatcaaagaataaaccaatacatcaatcaataaa

SEQ ID NO: 1032973 - DNA, 120 bp, Artificial Sequence
  ENSG00000176840_6 (sequence is synthesized)
acaggacatgggtgttactgtgcccatgtgacatttggggaacccaaggccctgagaaaggcagaaaaataacccacgcagggactctcagcccacaagtgaagctcttggaatgcactc

SEQ ID NO: 1032974 - DNA, 120 bp, Artificial Sequence
  ENSG00000176840_7 (sequence is synthesized)
acgggacacctgcatctgccaacaagactggaagcaggttggcgcatggacattttcccagaaagggacagagacggcgaagtttgacggtctggaaagcagagaccagcagggctgact

SEQ ID NO: 1032975 - DNA, 120 bp, Artificial Sequence
  ENSG00000176840_8 (sequence is synthesized)
aagctgagaaccgggaatggaaaacagggaggcagcacagaggcaggaaactcaggtgtcatagcttggctcagcctcagggcttttgcctctgctgttcctgcagcttggaatgcactc

SEQ ID NO: 1032976 - DNA, 120 bp, Artificial Sequence
  ENSG00000176840_9 (sequence is synthesized)
acgggacacctgcatctgccaacaagactggaagcaggtgaggcacacagagggggaggcccgcagctgcgtgggaggaggggtggtctgagggacgtgggatgccgggaatgaggctgg

SEQ ID NO: 1032977 - DNA, 120 bp, Artificial Sequence
  ENSG00000176840_10 (sequence is synthesized)
gatgtggcagaagtgacactatgacttctgaggctgcgtgataagaggtgatacgatacagcttatgcctggttctctctctggatgcttgctcctgggacccagcagccatcttgtgag

SEQ ID NO: 1032978 - DNA, 120 bp, Artificial Sequence
  ENSG00000176840_11 (sequence is synthesized)
gaagctcaagctacatggaggtgttcctgccggcagtcccagttgaggtccttcaagatgactccaaccccagcctccttctgacttgaaccacatacgaactgcccccagtgagaactg

SEQ ID NO: 1032979 - DNA, 120 bp, Artificial Sequence
  ENSG00000176840_12 (sequence is synthesized)
tctagcagagtccactctcagaaccatgacaactcagctccggaatcggtgcagacacgcaatatcctctcagtagatatttatggaataaataaatctgtctcatctttggcattgcta

SEQ ID NO: 1032980 - DNA, 120 bp, Artificial Sequence
  ENSG00000176840_13 (sequence is synthesized)
gaggcggaatcccattggccagttggggaagcccctcccaggattcctggcgctccgccttccctgaagcctataaaagcgcaggtccccgcctcggcagccacgggacacctgcatctg

SEQ ID NO: 1032981 - DNA, 120 bp, Artificial Sequence
  ENSG00000176840_14 (sequence is synthesized)
caggtgtcatagcttggctcagacatggtctcctgcctcagcctctcaaagtgccaagattacaggtgtgagccaccgaacccagcctaaggatacttttcaataaaagttccagaagtg

SEQ ID NO: 1032982 - DNA, 120 bp, Artificial Sequence
  ENSG00000176840_15 (sequence is synthesized)
cctttgaccctgattttgcagggggaggacgagagagggtggtctgaggtgcctggcatttctggagacctgcacctcatgtaatggatttttaaacaaagtattttccagataagcaca

SEQ ID NO: 1032983 - DNA, 60 bp, Artificial Sequence
  ENSG00000176840_16 (sequence is synthesized)
gtaatggatttttaaacaaagtattttccagataagcacacacagaagtctgcaattttc

SEQ ID NO: 1032984 - DNA, 120 bp, Artificial Sequence
  ENSG00000176840_17 (sequence is synthesized)
gggtgaggagcaggtatcagtgctagttgcgacccctctgtgtctcccccccgccaccccattgccattctgaagctccccaggaagaagctaggaggggaaataaattgagtgggggtg

SEQ ID NO: 1032985 - DNA, 120 bp, Artificial Sequence
  ENSG00000176840_18 (sequence is synthesized)
gggtttcccaagaatcggaggaaccgagaacgaagaggggtgggggaacggggaaagagagaggaaaatcaagttttcttcagcacgagggacagctctccaccgaccgaaggaggagaa

SEQ ID NO: 1032986 - DNA, 120 bp, Artificial Sequence
  ENSG00000269939_0 (sequence is synthesized)
aaaaattttcccattgctggttttcccattttctttttgaccttcccacctaccagtctttgttcccccatccttgaccctcttctccatgtggataccgttgatacacttttaggtttg

SEQ ID NO: 1032987 - DNA, 120 bp, Artificial Sequence
  ENSG00000269939_1 (sequence is synthesized)
aatatcaccttccttttagaatgttccatacctttaagcatttgataaaagctatggtggtttccccagaaaaatgttcaacaggaagttttgcctacatttttggattcacagacctca

SEQ ID NO: 1032988 - DNA, 120 bp, Artificial Sequence
  ENSG00000269939_2 (sequence is synthesized)
gttcctatggcagtgttcatatacgtaagttcagctgttacgtgtttacaactcaaatccaatggctaccagttttcccactggacctctctggatttagcaatctctaaaattgtattc

SEQ ID NO: 1032989 - DNA, 120 bp, Artificial Sequence
  ENSG00000269939_3 (sequence is synthesized)
acttgattcttaaaaaaataaaaaagcttaaatgcagataggatgtcaccctgtttaaaatttctagtggctgctctggtcatcagtttaataaaaattccttagcatgaccaagaaggc

SEQ ID NO: 1032990 - DNA, 84 bp, Artificial Sequence
  ENSG00000269939_4 (sequence is synthesized)
aggatcacttgagcccaggaattcgaaaccagcctggactacgtagtgagactccatttctactaaaaaaattaatggctcatc

SEQ ID NO: 1032991 - DNA, 120 bp, Artificial Sequence
  ENSG00000269939_5 (sequence is synthesized)
agtgagactccatttctactaaaaaaattaatggctcatcataatctattcaaaactactgagttttaaccataagaagtcaatttttgaaaacacaaaagtattttaagcctttacatt

SEQ ID NO: 1032992 - DNA, 120 bp, Artificial Sequence
  ENSG00000269939_6 (sequence is synthesized)
accacttttgtagaatcttccttagccaccttccagtagtttggtgtgcttatttctatcctaacaatcaatttgggggtatcttttaaaattgcagaaattgtatggaattagaggaaa

SEQ ID NO: 1032993 - DNA, 120 bp, Artificial Sequence
  ENSG00000269939_7 (sequence is synthesized)
caaagccacgttcaaattcttataaaaattttaaagtgagtggcttaatttcatctgtaaagtggggacaccatctaccatgtagttattagatgtgaataccagagaaaatacatgtag

SEQ ID NO: 1032994 - DNA, 120 bp, Artificial Sequence
  ENSG00000269939_8 (sequence is synthesized)
aaagtgctagtgcctgccacatactatgtgctcaataaaactcagtgttttatatgcctatctccaataaatggcagaaaagactaacctgtctcagagtgcctggctcatagcaagtac

SEQ ID NO: 1032995 - DNA, 120 bp, Artificial Sequence
  ENSG00000269939_9 (sequence is synthesized)
catgttcatgtttcaaaaaacagatgaaagacaacaagaaagtcacattctaaagcttttcaagaaataaagaagtacaaacaaagtttcttcatcattctatttattacatgtatgaat

SEQ ID NO: 1032996 - DNA, 120 bp, Artificial Sequence
  ENSG00000269939_10 (sequence is synthesized)
attaacatctcatggtgtccatctaagtcaaaaccaacaaaagaaaaaagttaaccatatctcaagcaaacattcttacagattcccgttacttaaaatagaaatatgttcatctgcatt

SEQ ID NO: 1032997 - DNA, 120 bp, Artificial Sequence
  ENSG00000269939_11 (sequence is synthesized)
aaatcatttgacaatttgaaaaagtctttaaaaaaaaaatcacctttagtacttaaatatatttgttaattgtttgatggcatcagtgtccaagttcaagaataaaactttgcatcatta

SEQ ID NO: 1032998 - DNA, 120 bp, Artificial Sequence
  ENSG00000269938_0 (sequence is synthesized)
ctgtatgcatgaagggaaaagagacgaatatcaagtttttctggccaaccaagaaataaaactttaaaagtgtttattttttcaggaaaaaaaatcacagatactacttaaatattatta

SEQ ID NO: 1032999 - DNA, 120 bp, Artificial Sequence
  ENSG00000269938_1 (sequence is synthesized)
ccaggacaacaaattagcaaataaggcaagttagaaagcagcattttcaaggttaaaggttgcactttaaagctttaaccatgacttctgaagggatcacacaaacatctttaaagactt

SEQ ID NO: 1033000 - DNA, 120 bp, Artificial Sequence
  ENSG00000269938_2 (sequence is synthesized)
tcccaatttactgctttatcagaaagaactttactacgaagcaagaagtgtctactcttctgtgaaggagtaagttttctccttgtttctgaaattctttattctagctgaattctcaag

SEQ ID NO: 1033001 - DNA, 120 bp, Artificial Sequence
  ENSG00000269938_3 (sequence is synthesized)
actgagcagtgaacttccattggttagcaccaaatagagcaagcctgagtaagctgcttataaaaaggggaaaaaaacgacagaagaaaacttttaataaatggaatatgaggcacataa

SEQ ID NO: 1033002 - DNA, 120 bp, Artificial Sequence
  ENSG00000269935_0 (sequence is synthesized)
ggtgaggcctgcagagcaggacctgccagctgagcgcccctaccctcgcccctgcccgcccccgcgcctcgcccctcccgccgggctcggatctgccccgcctgcccctgactcgactga

SEQ ID NO: 1033003 - DNA, 120 bp, Artificial Sequence
  ENSG00000269935_1 (sequence is synthesized)
ccgggctcggatctgccccgcctgcccctgactcgactgaggccctttgcaaaccacaggtggttttctccggtgacaaacaatgcttccttcttccttccgggcagcttgggtccaaga

SEQ ID NO: 1033004 - DNA, 120 bp, Artificial Sequence
  ENSG00000269935_2 (sequence is synthesized)
gtggggggaggggggcttaccccagaaaacagggatttggcgagtccctctcccctataaattgagtgagagtcgggacacacgcgtgtatcttggagcaaagtcacccgaattccgtgc

SEQ ID NO: 1033005 - DNA, 120 bp, Artificial Sequence
  ENSG00000269935_3 (sequence is synthesized)
gccctgcgccctggccaacaggtagcgcccccccactcggggaacggtcgcgcttttggggagcaaagtgggaccgccattcgggcgtttctaggtctctctccagacatactctcaccc

SEQ ID NO: 1033006 - DNA, 120 bp, Artificial Sequence
  ENSG00000269935_4 (sequence is synthesized)
tccgcccctcttcccacgcacaagagagagtctgattcttggatccgagcatcctgggatccatttaaaatgcatttcctggaccataaatcctcaggcagaagccggcgtccccagccc

SEQ ID NO: 1033007 - DNA, 120 bp, Artificial Sequence
  ENSG00000269935_5 (sequence is synthesized)
tcctgaaatgcgtgcgggaaatggcagcagaccggtgcagtgggctgatgggggtgtggaggctgcccagggtcctcgctcctgggagtgtgggccggtgaccgcagcgcggtgagccag

SEQ ID NO: 1033008 - DNA, 120 bp, Artificial Sequence
  ENSG00000269935_6 (sequence is synthesized)
gaatcaggatggtccccactcttggctcacggggctctcagaaaaatcagcccctcctgggagtcccagagttcaacctcagtctcttgccttgggcaccaaagctccctccccagagta

SEQ ID NO: 1033009 - DNA, 120 bp, Artificial Sequence
  ENSG00000269935_7 (sequence is synthesized)
ccagcagccaggaggacagtcacctcctcatacacccactgtcaatgaggaacatttagggcggtcggctttgttttgttttgtgcagttacagtgattcattgagctttctagcgctgt

SEQ ID NO: 1033010 - DNA, 120 bp, Artificial Sequence
  ENSG00000269935_8 (sequence is synthesized)
ctccctgtgcccctctacagaagttctctaaatgtctgcggtggcatcattggaccagctacgtcttggactttattggaagctgccaaattgctttccaaacacctggagcaactgacc

SEQ ID NO: 1033011 - DNA, 120 bp, Artificial Sequence
  ENSG00000269935_9 (sequence is synthesized)
tctcacccttcagtgtgcctgggtttgtggttctctatttcctggccagcactggtgtcctcaaacttctgattttctttccatttattttactttgttcatctaaatgggtatgaaata

SEQ ID NO: 1033012 - DNA, 120 bp, Artificial Sequence
  ENSG00000269935_10 (sequence is synthesized)
atatctctgggctgtttcatgtccatggaaatttctctgttgtaaatgtgtgggccaaaggaactgcaccttgtcctcaagagattcgggtcgaaaccttggctccggggcccaccagca

SEQ ID NO: 1033013 - DNA, 120 bp, Artificial Sequence
  ENSG00000269935_11 (sequence is synthesized)
gtatggctttgggcagtcacctaatgtccctgagctcagttttctcatctgtaaaatggagatggcagagttcccatagggttaccgtgggaattcaaaagctaggcgcccagcactcag

SEQ ID NO: 1033014 - DNA, 120 bp, Artificial Sequence
  ENSG00000269935_12 (sequence is synthesized)
taagcgctcgggaagtgggaagtaatgttattggaagccagccccccagggagggtcatggattcctgcatggagacacccagccctctgcctgttgaaataaacattgccaccactcgt

SEQ ID NO: 1033015 - DNA, 120 bp, Artificial Sequence
  ENSG00000269934_0 (sequence is synthesized)
gcctctctgcctcaggccacccgtcaactccgcagaagggagagccctcacatggggccagatgaggccgtgcagggactgcaggagtatccccgagggagggacgtctggcttaccgcc

SEQ ID NO: 1033016 - DNA, 120 bp, Artificial Sequence
  ENSG00000269934_1 (sequence is synthesized)
atctcatgcattagataggaccagagtcctggacacctcgggacatcggtagtttggagaaggtactgggaaaatgtgacccagcatgtctgcacagaaacaccacccaacatggacaag

SEQ ID NO: 1033017 - DNA, 120 bp, Artificial Sequence
  ENSG00000269934_2 (sequence is synthesized)
gagggccctgacccttccgttcactcccttccccactaagcagcccagctccaccacaggcataaaaataggaggtgagaggatgggagaagttgagggatggagtctaatggaaagccc

SEQ ID NO: 1033018 - DNA, 120 bp, Artificial Sequence
  ENSG00000269934_3 (sequence is synthesized)
actgggtcagcagtggttctactccagtcacagcagcagctacaaacagggctcactcagcatccccaaagcactgacctgccacctgcaggcggaaggagagctgctgaccccctgcct

SEQ ID NO: 1033019 - DNA, 120 bp, Artificial Sequence
  ENSG00000269934_4 (sequence is synthesized)
cgcagctgtactccccggcctctgcctggcccgcctgctgcaccaccagcctccgtgtgcagcccacggcctccacgcgcactttcgagctggaactcagcttcttcccatccttgtacc

SEQ ID NO: 1033020 - DNA, 120 bp, Artificial Sequence
  ENSG00000269934_5 (sequence is synthesized)
acgtcacctctgtctgggcctgggccacctcgcagctcagcgtggcactggcccccgcctcagcctgcacctccctgtgtgctggctgctccttggcaaacaccaccttgggctctgggg

SEQ ID NO: 1033021 - DNA, 120 bp, Artificial Sequence
  ENSG00000269934_6 (sequence is synthesized)
atggacaaggagggacacacgaggtcaaagatactgcccaggtcaggaagaccaccctagggtaggagggcctagacaagaaagtaggagaaacagaaccttcccaagcttggcactggc

SEQ ID NO: 1033022 - DNA, 120 bp, Artificial Sequence
  ENSG00000269934_7 (sequence is synthesized)
catgtagctgggagaagccccaccacctcccagcacaagaatcacagtttctccatccactgtgcagtgccatgggctattccaggcggggcagttgtgacaaaccctccgtgcacgagc

SEQ ID NO: 1033023 - DNA, 120 bp, Artificial Sequence
  ENSG00000269934_8 (sequence is synthesized)
tcctccagtgcagggactgggttcctaatgcttacacagctcccttcaaggatatgctagggtctccccatgggactgggcagggcgtgtcctcactgcagggccccagagtactgaggc

SEQ ID NO: 1033024 - DNA, 120 bp, Artificial Sequence
  ENSG00000269934_9 (sequence is synthesized)
ttccagtcctgccactgtcaggagggtcagcgttggcctctgcggggaaggcctgggctttgtcatgcattgcctggtgacatgcaaggtggagccctttccaccacttctggccattac

SEQ ID NO: 1033025 - DNA, 120 bp, Artificial Sequence
  ENSG00000269934_10 (sequence is synthesized)
gtcagctcttctggggtgtcgctcttcaggcttctgtccaattttcagtagccttttctgtcttttccttccttatttttaggaactctttatatattttaaatgctagcaaatgataac

SEQ ID NO: 1033026 - DNA, 120 bp, Artificial Sequence
  ENSG00000269934_11 (sequence is synthesized)
tagttttaagaaatctttcctttccctgaagtttttagcaatctatgttagcatctagaggctttatggttttaccttttatactctgtggcctctaaccttcctggaactcacttttca

SEQ ID NO: 1033027 - DNA, 120 bp, Artificial Sequence
  ENSG00000269934_12 (sequence is synthesized)
gtgtgaaataagttactagtctaaatttttgtaaggttaaacaatcaaagaactattttttttttagaagatcatcctttctccactgcctgtgcaggtgtgaaggttaaaaaaaaaaca

SEQ ID NO: 1033028 - DNA, 120 bp, Artificial Sequence
  ENSG00000269934_13 (sequence is synthesized)
cacaaaacacacacacacaaaaaaaacaagaagcaataaaagggagaatccatgtatttgggtctgatcatgagctcacgattctgtccctttggtctgacaactgtccttgtgttgtgc

SEQ ID NO: 1033029 - DNA, 120 bp, Artificial Sequence
  ENSG00000269934_14 (sequence is synthesized)
ctggctgtctccattcctgcagctgaatgttcttgatatctggtagacaaatgctcacaagtggctcttcaagagtgtgttactccacttggccttcagaatctgcttctcaacgttcac

SEQ ID NO: 1033030 - DNA, 120 bp, Artificial Sequence
  ENSG00000269934_15 (sequence is synthesized)
ctccccaaagagaaacatttgcttgggttttgactgggcattaacatatttgagtcttccatgggtttctatttatttaggtcttcttactgtctgtcaaaaatgtttcacaatggccag

SEQ ID NO: 1033031 - DNA, 73 bp, Artificial Sequence
  ENSG00000269934_16 (sequence is synthesized)
gcgaaatagtgagaccctgtcgctaccaaaaaaattccttaaaaaattagctaggcatggtggtgcacgcctg

SEQ ID NO: 1033032 - DNA, 120 bp, Artificial Sequence
  ENSG00000269934_17 (sequence is synthesized)
atagtgagaccctgtcgctaccaaaaaaattccttaaaaaattagctaggcatggtggtgcacgcctgtattctcatcaagtcaggaggccgaggtgggaggatctcttgagcccaggag

SEQ ID NO: 1033033 - DNA, 120 bp, Artificial Sequence
  ENSG00000269934_18 (sequence is synthesized)
cgactgaactccactctgggtgacagagtgagatcctgactcaacaacaaaaatatctgacaattttcctccactgaggtatcagacatctttactatacttgatgcttttcacgctctt

SEQ ID NO: 1033034 - DNA, 120 bp, Artificial Sequence
  ENSG00000269934_19 (sequence is synthesized)
gtaaatcttttaaaatttcattttacaactgtgttgctagtgtgtgtgtgtatgcgtatatacatacatacatatatatgtgtattctgcatgttgaatttctatgtgatgtttctcaac

SEQ ID NO: 1033035 - DNA, 120 bp, Artificial Sequence
  ENSG00000269934_20 (sequence is synthesized)
tctcatattatttgttataacttattatttatcttattatttatctatcttttggattttctgaattgatactcatataatctgtgaatcccacttatgtttttctccaagtgttatacc

SEQ ID NO: 1033036 - DNA, 120 bp, Artificial Sequence
  ENSG00000269934_21 (sequence is synthesized)
ttttcttttcttttcctcctttctctgctgtacagtgctgaatggaagttgggatggttggcttctacgtgctgattcctatctcaaaggcaaagctttcaaggttctctttaaatatgc

SEQ ID NO: 1033037 - DNA, 120 bp, Artificial Sequence
  ENSG00000269934_22 (sequence is synthesized)
agttacctggtgttttctgcagtaccactgaccagattaaagaacgatactttataatttgttaagaatttcatggcatgaattgatgctgaattttatcaaatattacctctgaacttt

SEQ ID NO: 1033038 - DNA, 120 bp, Artificial Sequence
  ENSG00000269934_23 (sequence is synthesized)
actcctcctcgatgccccgcccttcccgcccgcggctcactctccacggtgagtttggcctgtgtcttgtcatccggcgtctcgcagccaaagaagccacggtcggcaaaacctacgttg

SEQ ID NO: 1033039 - DNA, 120 bp, Artificial Sequence
  ENSG00000269934_24 (sequence is synthesized)
tgcagaaccaggcggtggcgggcgccctcggcgtggatctccacgttctttcccggcgccagggccgtcgcgttccgtgtccacctcagctccggccacggccgcgtcagctccacctcc

SEQ ID NO: 1033040 - DNA, 120 bp, Artificial Sequence
  ENSG00000269934_25 (sequence is synthesized)
agggtcaccgagctccgctcctccaccgtctgcggctccagcttctttttgaacagcacaggcgcctctggggtcgcaggagaggggaggtcacggcggccctcgccctcctccacggac

SEQ ID NO: 1033041 - DNA, 120 bp, Artificial Sequence
  ENSG00000269934_26 (sequence is synthesized)
aagccaaggtacagagggcccgcacagccccggcgcctgccctgagccgggcccaggcagagctgccggcaccgcgccccgggatcccaatccaaacagcgcggccctggccacacgcgg

SEQ ID NO: 1033042 - DNA, 120 bp, Artificial Sequence
  ENSG00000269934_27 (sequence is synthesized)
gccgcagctgcgcaccctcccgggtgcgactttaagcgaggaaaccaggaagcttccttaagccccgctcccacctccagctcccctgctctgaacaagacgccaggcccttgtgcctcg

SEQ ID NO: 1033043 - DNA, 120 bp, Artificial Sequence
  ENSG00000269934_28 (sequence is synthesized)
aaatcctagacgtgatccccactagtagcactggcaggaactgcagaggggggaagacagagcttccccaggcgcaacggcggtttagcaaagcccaggactcctgcgcaggttaaggaa

SEQ ID NO: 1033044 - DNA, 120 bp, Artificial Sequence
  ENSG00000269934_29 (sequence is synthesized)
gaggcgctggcgggcctctctgcctcaggccacccgtcaactccgcagaaggtgaatctgctgcatcactcccttactctagaacctgccatgactcccacttcccttcagggcaagttc

SEQ ID NO: 1033045 - DNA, 120 bp, Artificial Sequence
  ENSG00000269934_30 (sequence is synthesized)
tggcttctggcttcagcagcatgggaagcccatgtcactgcttgcactggtgctaaccccactctctcttccctgccatccatcaggctaagtatgcacccacctactccagaaagcctc

SEQ ID NO: 1033046 - DNA, 120 bp, Artificial Sequence
  ENSG00000269934_31 (sequence is synthesized)
cctggattgcctcagcctccccccattccccaccaggtgcaactgcaggattgtatcttctctataccaagagaaggcacctggcccatccagcctaccggagtctcctctctgcagccc

SEQ ID NO: 1033047 - DNA, 120 bp, Artificial Sequence
  ENSG00000269934_32 (sequence is synthesized)
acacaccccgtgtctcctgaggtcagccggaccagccgtaacaggacagcagttccaggtgcccactcagaaccagcccacaggggaggtgcctgtgcaaggagccctggccagccaggc

SEQ ID NO: 1033048 - DNA, 120 bp, Artificial Sequence
  ENSG00000269934_33 (sequence is synthesized)
aaatcctgctgccccccacactcacctcggaccctcagggcagcagaggatgaggcgccctcagcctccacggtgatctggcccgcgtcctccagcaccaggtctgagatggtcaggctg

SEQ ID NO: 1033049 - DNA, 120 bp, Artificial Sequence
  ENSG00000269934_34 (sequence is synthesized)
tggctggcgccactctgtgatatggcaaacttctcgctgggctgaagcagggcaccgtcccggaaccacacgactgccacatcactgggggacaccacgcactggaaggtggcctcgccg

SEQ ID NO: 1033050 - DNA, 120 bp, Artificial Sequence
  ENSG00000269934_35 (sequence is synthesized)
ccctcctctgcgaccacggtgctcagcccagacataaacttcaccactcggggcactgcagacaggagcactgcttaagaggcgggcgcacaggactggcagagcccttacgctgcagga

SEQ ID NO: 1033051 - DNA, 120 bp, Artificial Sequence
  ENSG00000269934_36 (sequence is synthesized)
gtaccaaaggccgcctcctccaggaggctgccctggatagggacactcgaccccttacataccactgacggtgagctgcgcactggtgtggtcatcacggctctcacacacgtactcccc

SEQ ID NO: 1033052 - DNA, 120 bp, Artificial Sequence
  ENSG00000269934_37 (sequence is synthesized)
tgcgtcctctgcgcgcagccccaacacagtgagtgagcgcacgggcccctcggccaccatctggaagcgcttgcccacccgaagctgcgtgttgccgcagcgccacaccacctctgcaca

SEQ ID NO: 1033053 - DNA, 120 bp, Artificial Sequence
  ENSG00000269934_38 (sequence is synthesized)
cgctgggcttagctcgcaggccagtgtcaccgtgccacccagctcgccgcacacaggctccagcagccggcagaacttggcggccacctctgtgggcacaaaggggacatcagccgggct

SEQ ID NO: 1033054 - DNA, 120 bp, Artificial Sequence
  ENSG00000269934_39 (sequence is synthesized)
cttaacagaccagacttgagccccagcttcgcccctgtccagctctgggacagaggtgtctggaggagtccccgccccacgccccatgcccggctcaccttccacctgcactgggaagtc

SEQ ID NO: 1033055 - DNA, 120 bp, Artificial Sequence
  ENSG00000269934_40 (sequence is synthesized)
ctgcccctctgcgcccacacggcagctgtagatggcgctgtccagaacctgggcgccatgcacggtcagggtgtgggtgtccccctggctggctgtctcatgccgcttgctgcggcgaat

SEQ ID NO: 1033056 - DNA, 120 bp, Artificial Sequence
  ENSG00000269934_41 (sequence is synthesized)
ctccacaccatccttgagccaggtcaccgtggccgcagagggtgtggccagtgtggcggtcaggatgatgtcttcatgctccttgaccaccagaggctccctgcggcagggtctctctga

SEQ ID NO: 1033057 - DNA, 120 bp, Artificial Sequence
  ENSG00000269934_42 (sequence is synthesized)
cctgatacccattgctcttcaaggatggcccagtgcagtcctgagcaccatcaactaccatccagaatcccagggaccatacagtgtggccatcagcttcaggcgaggtggattcaccca

SEQ ID NO: 1033058 - DNA, 120 bp, Artificial Sequence
  ENSG00000269934_43 (sequence is synthesized)
aagcactgacctgccacgtgcaggcggaaggacagccgttggccccccgcctcacagctgtactccccagcatccgcctggcccgcctgctgcactaccagcctccgtgtgtagccgctg

SEQ ID NO: 1033059 - DNA, 120 bp, Artificial Sequence
  ENSG00000269934_44 (sequence is synthesized)
gcctccatgtgcacttttgagctggagctcagcttcttcccgtccttgtaccatgtcacctccatctggccctgggccacctcacagctcagcgtggcactggcccccgcctccgcctgc

SEQ ID NO: 1033060 - DNA, 120 bp, Artificial Sequence
  ENSG00000269934_45 (sequence is synthesized)
acctccctgcatgccggctgctccttggcaaacaccaccttgggctctgggatggacaaggagggatgcagggtcagaggctccagagcagacacagcccatgtgtcagcccagtgacag

SEQ ID NO: 1033061 - DNA, 120 bp, Artificial Sequence
  ENSG00000269934_46 (sequence is synthesized)
ccaggcagggctgtccatcattaagcagtgcacggtgacgcacagagctccccccggcactaccagagccaaaggtctaaggctgcatgttggcagcaccatcatcatgtcccttgggaa

SEQ ID NO: 1033062 - DNA, 120 bp, Artificial Sequence
  ENSG00000269934_47 (sequence is synthesized)
caggatgcggccccttccctgcctcggtcttccagggccctggggccctcacctgtcgccagccctccccaccacgcagggccacaggcagtaggacgtgaagggtcaggagagatggac

SEQ ID NO: 1033063 - DNA, 120 bp, Artificial Sequence
  ENSG00000269934_48 (sequence is synthesized)
cagcaacctgggccagcccagaggcagcggagtgttggcagggccattggaaagagggtgccaagctgagtgtggtctgttgtccccagctcagggacagggtggaagggagatggatat

SEQ ID NO: 1033064 - DNA, 120 bp, Artificial Sequence
  ENSG00000269934_49 (sequence is synthesized)
cagaaagacaggtggacacatggtgatgaccaaggggcccagcacaggcttacagagatctagggcccagagcacagagacaagcccccaccacccagtacacgctctccagtcactgcc

SEQ ID NO: 1033065 - DNA, 120 bp, Artificial Sequence
  ENSG00000269934_50 (sequence is synthesized)
gggccctcccatggcccagcacccacagaggagtcagcagatcacattagaccagacccagacccccaccccaaggacatcacaccactgtccccaccacccagacagaaatcatcacat

SEQ ID NO: 1033066 - DNA, 120 bp, Artificial Sequence
  ENSG00000269934_51 (sequence is synthesized)
ctgaccagacccggaccccagacccccgaggacatcacgctactgtccctaccacccagacaggggtcctcacatgagaccggacccagaccccagacccacaccccaaggacatcatgc

SEQ ID NO: 1033067 - DNA, 120 bp, Artificial Sequence
  ENSG00000269934_52 (sequence is synthesized)
agagctggggacacagattctgaggcctacatagagggaaggtgccagggcccacagcaccttgggccgcccaaacatgcccttgtagtttcacacccgacactcagcatcacctccatt

SEQ ID NO: 1033068 - DNA, 120 bp, Artificial Sequence
  ENSG00000269934_53 (sequence is synthesized)
ttgcctaaccctggcacccaccagccacatgcagatggaaggagagccgctggcccccagcctcgcagctgtactccccggcgtccgcctggcctgcctcctgcaccaccagcctccgtg

SEQ ID NO: 1033069 - DNA, 120 bp, Artificial Sequence
  ENSG00000269934_54 (sequence is synthesized)
tgcagcccacggcctccacacgcattttcgagctggagctcagcttcttcccgtccttgtaccacataacctccgtctgggcttgggccacctcgcagctcagcatggtgctggtccctg

SEQ ID NO: 1033070 - DNA, 120 bp, Artificial Sequence
  ENSG00000269934_55 (sequence is synthesized)
cctcagcctgcacctccctgtgcaccggctgatccttggcaaacaccacctgctccttggcaaacaccgccttgggctctggggatggacaaggaaggacatacgaggtcaaagatacag

SEQ ID NO: 1033071 - DNA, 120 bp, Artificial Sequence
  ENSG00000269934_56 (sequence is synthesized)
cctaggtcaggaagaccaccctaggataggagggcctggatgaggaagtaggagaaacagaaccttccccaggctctgcactggctgcgtggccaggagaagtcctgccacctcccagcg

SEQ ID NO: 1033072 - DNA, 120 bp, Artificial Sequence
  ENSG00000269934_57 (sequence is synthesized)
caagaatcacagtttgtctatccactgtgcacggcgccatgggctatcacaggtggggcagctatgacaaaccctccatgcatgagctcctccagggcagggactagggtacctgcacat

SEQ ID NO: 1033073 - DNA, 120 bp, Artificial Sequence
  ENSG00000269934_58 (sequence is synthesized)
gcggctcttcttcaagcatgtatggagctttaaatccacttgtcatttttcaaccttgcatcccccaaaaccacatttgtttggattttgattgagactgaacgtctttcattcttccat

SEQ ID NO: 1033074 - DNA, 120 bp, Artificial Sequence
  ENSG00000269934_59 (sequence is synthesized)
ggcttctatccactttagatctttactgtctctcaaaagtgtttcatagcttcccccacagaacctctcgacatcttttattagactgggatcataaacatgatgcctttgaggcgtctg

SEQ ID NO: 1033075 - DNA, 120 bp, Artificial Sequence
  ENSG00000269934_60 (sequence is synthesized)
tcaatcttttacgttttcattttccaactgcttgctgctagtctacatgtacggaagtttcttcacacagatcttgcaagggttgatctttctcaactctctaataatttatcttctagg

SEQ ID NO: 1033076 - DNA, 120 bp, Artificial Sequence
  ENSG00000269934_61 (sequence is synthesized)
taaaccgtatattctgtcaattcacttttttctaacttttacacctttcgttttactttcctcctaactgtgccatccaatgctggatggaagtgttgaccactggcttcctcatgctgt

SEQ ID NO: 1033077 - DNA, 120 bp, Artificial Sequence
  ENSG00000269934_62 (sequence is synthesized)
cccctggctcagaggcaaagcttacaaagtctccctttgtgatttttgtgtaataccctgtgtcaaattaggaaaaaaaaacttttatttatactttgttaagaattttatggcatgatg

SEQ ID NO: 1033078 - DNA, 120 bp, Artificial Sequence
  ENSG00000269934_63 (sequence is synthesized)
gatgctaaattttgccagacatttcttctgaatatatgaggttaaatttttatcaaatatggtactttattctgagtttaagataattacattgttttcaaatttcaatcacatatcatg

SEQ ID NO: 1033079 - DNA, 120 bp, Artificial Sequence
  ENSG00000269934_64 (sequence is synthesized)
attttctaatgtttttaacatgaaagcagccctcattcctagactatgaatttcatcatcctgtatgattgtcttgatgtattgctgaattcagtttactaatgttttgtttaaaaaatt

SEQ ID NO: 1033080 - DNA, 120 bp, Artificial Sequence
  ENSG00000269934_65 (sequence is synthesized)
ggccatgatatccataattctttgatctacaatgtgcaaacttcctatcttctggccagattttagtcatggcattaagctatctgcatataatgagttagagggtatatcttccttttt

SEQ ID NO: 1033081 - DNA, 120 bp, Artificial Sequence
  ENSG00000269934_66 (sequence is synthesized)
ccattctccagaagaatttccatgaacatggaagaatttctggccagaacgtttggaagaatttctcagtagggccacatgtttgatgagaagatttttcgctaccggttctagttttta

SEQ ID NO: 1033082 - DNA, 120 bp, Artificial Sequence
  ENSG00000269934_67 (sequence is synthesized)
ctaggttgtagtaactgagataacttcagtaacagtagataactgcatataggttatctatttcttaagtctgtttttggtttctagaaattatataatttgttaacacttttcaaattt

SEQ ID NO: 1033083 - DNA, 120 bp, Artificial Sequence
  ENSG00000269934_68 (sequence is synthesized)
gtcttcaaaacgatcactaaaagagctgctgtgtttttaaaccaagttgactaagtgttaccgcctcactgagcatgctgaggagtcccagagccgaacctctgcagccagatgttctca

SEQ ID NO: 1033084 - DNA, 120 bp, Artificial Sequence
  ENSG00000269934_69 (sequence is synthesized)
gggacccgggtatggattcaggcactgcgaggatcttgcaaggacccacacagcagcctgtcagcaacgtgtcttcagcagcggtgctagcactgggcatgtggcagaccagcatcccgc

SEQ ID NO: 1033085 - DNA, 120 bp, Artificial Sequence
  ENSG00000269934_70 (sequence is synthesized)
atgagcacctctaagcatgagcacagatgcaaatccagtcacacagccgcagcatactcaaccagctgggcagctacatctgctgctcattccatggccctcgaatctgcctgatcacca

SEQ ID NO: 1033086 - DNA, 120 bp, Artificial Sequence
  ENSG00000269934_71 (sequence is synthesized)
agggagggcttccccaagctctttgacatttgttatgtttgctttagagaaggactcacaaagtactttcagggaaactgtgtctctttgatatgcacttcacaaaatcactcacaatca

SEQ ID NO: 1033087 - DNA, 120 bp, Artificial Sequence
  ENSG00000269934_72 (sequence is synthesized)
cactgcatgtggatgtgtttgagaatgggaatgtgttttaatatgtgtatgtaatatgtatgagcaagtgtgtatgtttaagtgtgttttcatgtgtatgtgtatcatgcatgtatttgt

SEQ ID NO: 1033088 - DNA, 120 bp, Artificial Sequence
  ENSG00000269934_73 (sequence is synthesized)
gtgtatgagatgaagcatgtgtatgcacatgtgtgtacgtttgtgtatatgtgtttaaatgtgtatatgtatgtgtgcaagtgtacatgtgtttgaatgtatgtatatggtataagtgtg

SEQ ID NO: 1033089 - DNA, 120 bp, Artificial Sequence
  ENSG00000269934_74 (sequence is synthesized)
tatgggggtatatgtgtatataggtgtatgtgggagtgaggtgtctgtgcgtgtatatatgtaggtgagtgcatatgtaggtattgtgtgtgtattatgtttaggtttgtgtgtgtctat

SEQ ID NO: 1033090 - DNA, 120 bp, Artificial Sequence
  ENSG00000269934_75 (sequence is synthesized)
gtatgtgtgtgtatatatgtcttgtgtgttgtttgtgtgtatttaaatgtatttatgcatatgtaaatgtgttgttgggatatgtatgcatgtatgtgcaagtgtgtgtgtgtgagttta

SEQ ID NO: 1033091 - DNA, 120 bp, Artificial Sequence
  ENSG00000269934_76 (sequence is synthesized)
tatgtgtgtgtgttcatgtgtgggtggtgtatgtgtgagtgcatgtgtatgttgtgcaagtgtgtgtaggtgcatgtgagtgcacgtgtgcatgtgtgtacattcatacgtgtgagtgca

SEQ ID NO: 1033092 - DNA, 120 bp, Artificial Sequence
  ENSG00000269934_77 (sequence is synthesized)
tgtgtgtgtaggtgtgcatgttagaatgtgtgtgtgcatatgagtgcattgtgagcatgtgtgtgcacatgtatgtgtaggcgtgtgtgagagtatgtgtgtgtaagtgcactgtatgca

SEQ ID NO: 1033093 - DNA, 120 bp, Artificial Sequence
  ENSG00000269934_78 (sequence is synthesized)
tgcatgtgtgtgtgagtgcacaggtgactgcctgcctgcagctgcactagggaggaggcatgcagcagtctcggtggcccctcagtgcagctaagccactgaatcaggtccccagctacc

SEQ ID NO: 1033094 - DNA, 120 bp, Artificial Sequence
  ENSG00000269934_79 (sequence is synthesized)
tacctggtggtttacctgcgacattcgcctgaatgagatacaaataccctcgcaaggatgcttagacttgtctcacgcaagaaatgccaaggtctgggttcatttgcatatttataataa

SEQ ID NO: 1033095 - DNA, 120 bp, Artificial Sequence
  ENSG00000269937_0 (sequence is synthesized)
acggcctcagtgaaagggaaccgctggtgacagggcctacagaccccgaccaaaaagcgcatataactcacgtgcaggcttcgatgcacaaagaccccgggggccggcggagcagggtcg

SEQ ID NO: 1033096 - DNA, 120 bp, Artificial Sequence
  ENSG00000269937_1 (sequence is synthesized)
gagagcgcgacagcccctgccctgagaccccggctttatgtgctacgcatccacgcgtggcactgccccttccatgcagtctccttccgtggataaagtgacacattttgttttgttttt

SEQ ID NO: 1033097 - DNA, 82 bp, Artificial Sequence
  ENSG00000269937_2 (sequence is synthesized)
ttgttttttttttttaagatgtacctcggctcgctgcaacctccgcctcccggagtcaagcaattctcctgcctcagcctcc

SEQ ID NO: 1033098 - DNA, 90 bp, Artificial Sequence
  ENSG00000269937_3 (sequence is synthesized)
actacaagcacgcgccaccatgcccccctagcccaggttggccaggatagtctccatctcttatcctcgtgatctgcccgccttggcctc

SEQ ID NO: 1033099 - DNA, 120 bp, Artificial Sequence
  ENSG00000269937_4 (sequence is synthesized)
acaggcgtgagccaccgcacctggccgagtgacacactttgtaagacaaaagccatctcatgaacttctacacccatgaagtgtgtctgggaggccccctcctctgggcaccactgccct

SEQ ID NO: 1033100 - DNA, 120 bp, Artificial Sequence
  ENSG00000269937_5 (sequence is synthesized)
cctctgggcaccactgccctacgatggctccatctgtagcctccttttccaagaggacttaagaccgacaataaatggatcccagatacagattcccctgcaagcggcaaacgtccatcc

SEQ ID NO: 1033101 - DNA, 120 bp, Artificial Sequence
  ENSG00000269937_6 (sequence is synthesized)
ccattaccggaaacctccagatacttcacacttactggcagcccaggacacggggacccaaatccttgcctgccctgagcagtggctctcgaggccaggaaggggggctcgtgctcagag

SEQ ID NO: 1033102 - DNA, 120 bp, Artificial Sequence
  ENSG00000269937_7 (sequence is synthesized)
ccaggctggcctgcctgctcacttctgtttgccagggcaccatcatctcccaccaaggatgaacctgaagcttcagggcaacgaagagaaacccagaagcgaagggacttgcaaccaagg

SEQ ID NO: 1033103 - DNA, 120 bp, Artificial Sequence
  ENSG00000269937_8 (sequence is synthesized)
ctgcccaaagtggcccctgtccaggcccatctctaaatacaacccacaccgaggatgcctggtggggcagaagtccctgggtctcgttcccgtcaggggcgagtgaaccttcacaacctc

SEQ ID NO: 1033104 - DNA, 120 bp, Artificial Sequence
  ENSG00000269937_9 (sequence is synthesized)
ccggggctttggaatttgacttaatgatgaagggcaacatggaccactggacaaagacctggagttcccactacctgcaccgctctggccaatcccatttggaaatcagtcagcaagatt

SEQ ID NO: 1033105 - DNA, 120 bp, Artificial Sequence
  ENSG00000269937_10 (sequence is synthesized)
cactctcctctggactctgagcccccgggaggagaggatgggagaggtcaagcgtgtgcaattctgttgcagcctcacaaccaacaagcagccgtgttccgacggctctgcgggaagccc

SEQ ID NO: 1033106 - DNA, 120 bp, Artificial Sequence
  ENSG00000269937_11 (sequence is synthesized)
agagggactcccgtggctcatacgggggcagagacgtgcagggccccggggaacgtgaaggtgagagacagaacataccgtgaagaagccactgagagtgggagacagaggcaggaacag

SEQ ID NO: 1033107 - DNA, 120 bp, Artificial Sequence
  ENSG00000269937_12 (sequence is synthesized)
ggatgacactggaggacagcaggcctgcctggaggccagcattctctacaaccttccacaaaccaacagcaaagcccgctccgggccacgtgcctggcagctgctcggccactgccccgc

SEQ ID NO: 1033108 - DNA, 120 bp, Artificial Sequence
  ENSG00000269937_13 (sequence is synthesized)
tcctccctaggcaaaatcccagggaagcaccttgcgtcgtttccatttcctcacctcttactcttccttgaacagtccccccaagaaactgcctacccaccatcaacaactggcacaggg

SEQ ID NO: 1033109 - DNA, 120 bp, Artificial Sequence
  ENSG00000269937_14 (sequence is synthesized)
cagatccacgggtcaggctgtgtgcacctgaccgcttcataacccctgcgtgggcagccagcaccctccatcagaaatcgtttgatcccgtggcctctgggtctccatcattcgagctcg

SEQ ID NO: 1033110 - DNA, 120 bp, Artificial Sequence
  ENSG00000269937_15 (sequence is synthesized)
ctcctcggtgggcccctcctcgtgttcacccctgcactggggggaacccaggctccactcacagaggagccaacctctgggcagcctgccagctcgctgtgaaagtcctcacggccctga

SEQ ID NO: 1033111 - DNA, 120 bp, Artificial Sequence
  ENSG00000269937_16 (sequence is synthesized)
ctcctcctggagctctgctggcagcacctaagtgcccactcagacctgaatggtggcaccagcggatgcatgaaatgccagcccagcacccgccccggtctctcccagctcagcagcaga

SEQ ID NO: 1033112 - DNA, 120 bp, Artificial Sequence
  ENSG00000269937_17 (sequence is synthesized)
caccgctgtgcactaggcttgagggccacctcccaggagccgcccctgactccattctcttgaccggtctgttcatcagacctcgaccacggcccctgcccctgctctcctgcccgttct

SEQ ID NO: 1033113 - DNA, 120 bp, Artificial Sequence
  ENSG00000269937_18 (sequence is synthesized)
cccgcctggcctaggagaagccacagcaaaccccacgttccccgccacaaagagaaggaagtccagagtcagtgccaggctgccacggctcaggggcccagcccaccacagcctttcatg

SEQ ID NO: 1033114 - DNA, 120 bp, Artificial Sequence
  ENSG00000269937_19 (sequence is synthesized)
cccccccacacactcctgcccaggagctgaaagagccccacactgccgccagcccctacccagccctaagactcttggcagcgcatcttgctgccgggaagcctctgacacggatcgtca

SEQ ID NO: 1033115 - DNA, 120 bp, Artificial Sequence
  ENSG00000269937_20 (sequence is synthesized)
gtgcacgtccagctcctccaccaaaatcgaagcttctcgtgggcagagacgccacccggcatagcagcgcatccccatcacccatcaacctgcacttggcaagcacctccaaacagagag

SEQ ID NO: 1033116 - DNA, 120 bp, Artificial Sequence
  ENSG00000269937_21 (sequence is synthesized)
agcacacacactccgccggcagccgaaggagctgcaggatggtgctgagagtgggagcaggccagaacgaagctctaacacagaagagccgggtgctggggagagacggggaggacaggt

SEQ ID NO: 1033117 - DNA, 120 bp, Artificial Sequence
  ENSG00000269937_22 (sequence is synthesized)
gggaggactcaggcccctccccaggcaggatggggaggccacgacacttgggccagcttggagggtggcgggggaggagaagagcagatgcagactgcacctgctgggggtgacgacggt

SEQ ID NO: 1033118 - DNA, 120 bp, Artificial Sequence
  ENSG00000269937_23 (sequence is synthesized)
gtggcgtggccagcccagccactggcaggcccacaggtcagctggatggggcagaggtggggcccaccccaacttccaccgggccttgcctcccagattcctgagccaaggtttaataac

SEQ ID NO: 1033119 - DNA, 120 bp, Artificial Sequence
  ENSG00000269937_24 (sequence is synthesized)
agaaaagatggcgctctaggggagcaagggacgccgaccaagcaagccgcagcagagaggactgtgctggagccacatcggtggcttctccgggaggtaacgtcctgtgcagactcccag

SEQ ID NO: 1033120 - DNA, 120 bp, Artificial Sequence
  ENSG00000269937_25 (sequence is synthesized)
ccacaccctggcgctgcctcggctgcctccctgaatgtcagcggcctgagggaccccactcggcagggagcgggggctgcttgtgggaacacacagggtctgattccaagtgagaggggt

SEQ ID NO: 1033121 - DNA, 120 bp, Artificial Sequence
  ENSG00000269937_26 (sequence is synthesized)
gactggtgtggcttcagacggcaccaaccacgcaaaggatacacagcttctcgtcgtcctgaaatgtgaagtaaagcttaacaaagaaggggtgatccaggcgcgacatgacatcccgct

SEQ ID NO: 1033122 - DNA, 120 bp, Artificial Sequence
  ENSG00000269937_27 (sequence is synthesized)
ctctggttacataggggaccttgttctcttttatgatatgtcgcttctccagaattttaacttcaggtgagagagaagtgagttactatcagaaacaacaaaaaacactaaagacatgac

SEQ ID NO: 1033123 - DNA, 120 bp, Artificial Sequence
  ENSG00000269937_28 (sequence is synthesized)
tcacaaaggtaactggtacaaattaaagtctttcaaacattgtacacaacagcctggtggtctctaaagccaacagtgtcctgtaccctgaaatcagcacagaaacaccggccctgccac

SEQ ID NO: 1033124 - DNA, 120 bp, Artificial Sequence
  ENSG00000269937_29 (sequence is synthesized)
cccagccgccctgcacggagccgcttgccctgctcccggacgcacagctccctgcagcccatactcactcgcatattctctggaggttgccagttctcgagccaggacaacctggttggg

SEQ ID NO: 1033125 - DNA, 120 bp, Artificial Sequence
  ENSG00000269931_0 (sequence is synthesized)
gccagggagtgatcccagcagagagaggctgggcatgaagggatggggtgatgatatgtcaattaggcttcagctcctgctccagggccctttcatggaggcttatttcctaggtcctct

SEQ ID NO: 1033126 - DNA, 120 bp, Artificial Sequence
  ENSG00000269931_1 (sequence is synthesized)
cccaaggacaccctctccatgctctcaaccgcatcctcccctgagtctcacggtcagactacagtctatggcctacatcttccctctccccgagtcccaaccccagctttctcagttcct

SEQ ID NO: 1033127 - DNA, 120 bp, Artificial Sequence
  ENSG00000269931_2 (sequence is synthesized)
ggctgcaatggtcctaggccctccactcaatttccaaaccttttgcctggtgccaccttctctacccagaactttggcctacctgtcagtcctgccctgcgtgtcacctcagcctggaag

SEQ ID NO: 1033128 - DNA, 120 bp, Artificial Sequence
  ENSG00000269931_3 (sequence is synthesized)
ctattagatctaacaaagcttcacagaaaggttgttttgaagttgacactgaggaagatataagtgctctaggatcagtatgtgaggctgccacaaacatgctatagtctgcacattctt

SEQ ID NO: 1033129 - DNA, 120 bp, Artificial Sequence
  ENSG00000269931_4 (sequence is synthesized)
gcagagaggttgcagagtctgcttgggagagaagcctcaaaaacatggctggtgtcttggcagagtttgctctggcccccaggagggtgtacaaacagccttcatgagaaggtgacttgc

SEQ ID NO: 1033130 - DNA, 120 bp, Artificial Sequence
  ENSG00000269931_5 (sequence is synthesized)
tggccactcttaaccactagaagaaactgatgccatggaactttgaaaaatcagaaagcaattccacaaaagaagaacctctgaagatagtagagcccaatgaagataaatgacatcgcc

SEQ ID NO: 1033131 - DNA, 120 bp, Artificial Sequence
  ENSG00000269931_6 (sequence is synthesized)
cataggagggaacagtggtatcaacctaaaggggctcactgccctatgtgctggaggccaatactatgacaatgggtttttgagaaaataaaagctttgcattgagattcaacccctaaa

SEQ ID NO: 1033132 - DNA, 120 bp, Artificial Sequence
  ENSG00000269931_7 (sequence is synthesized)
gtcatcagcacaacattttcacagactgctgggcagaatttagacagcttgaggaagtgatgacaatggctggaagaagagtagaaagggagagacacaggctgctcttccctaaatcca

SEQ ID NO: 1033133 - DNA, 120 bp, Artificial Sequence
  ENSG00000269931_8 (sequence is synthesized)
agcctcgccgctcacctgggggctccattcctccctgtttctgctcatcacagctgcacatctgggctgtcagcccctgagcagccaacaagatcaggagtggggtgaacacagcacatg

SEQ ID NO: 1033134 - DNA, 120 bp, Artificial Sequence
  ENSG00000269930_0 (sequence is synthesized)
tattgactgaaataccactctttgtgtaggtatttgtcatatatttaagaaaaagctaaaaagaatggaaattgtatgacaataactcaagtctttctccaaagtgcatgcagtcttttg

SEQ ID NO: 1033135 - DNA, 120 bp, Artificial Sequence
  ENSG00000269930_1 (sequence is synthesized)
tgacaataactcaagtctttctccaaagtgcatgcagtcttttgcgatacctcattcagccgagtatttgtgctcttcctcattcagtataaggcagctttcagtttgcttagaaggcaa

SEQ ID NO: 1033136 - DNA, 120 bp, Artificial Sequence
  ENSG00000269930_2 (sequence is synthesized)
aaacatagaattttaaactgtgagttccactgaatacattttaatttctgtaggaagaatcaaaacacctatttaaagatggcaatatataataatcattttaaaagtatttgattaaac

SEQ ID NO: 1033137 - DNA, 120 bp, Artificial Sequence
  ENSG00000269930_3 (sequence is synthesized)
atgtaactgctatcttaatgttctgaaataatttaaaacattttaaaatatgaatactgtagtataaaagaaagaaatggtgggaacgaaaagcagagaaagaaatgccaattccagtcc

SEQ ID NO: 1033138 - DNA, 120 bp, Artificial Sequence
  ENSG00000269933_0 (sequence is synthesized)
gcagccaaaataagaattgtccttgctcatagtacaaccctttaattgacttgtgcctgagttttggtgtgagctgagtattggtggttatgaatactgggatccccagctatttgttca

SEQ ID NO: 1033139 - DNA, 120 bp, Artificial Sequence
  ENSG00000269933_1 (sequence is synthesized)
tgtacttattgaggtcactattggtcttccttcttcaatgaagggagaagctctgtcaaatgtagactgcaaagtcaagctcattaaaagtatccctctttcttcgtgagaaaagatatc

SEQ ID NO: 1033140 - DNA, 120 bp, Artificial Sequence
  ENSG00000269933_2 (sequence is synthesized)
ggaccagatcttattgtctctacaatcttgattctttagtatttcaggataggcagagttttgttaaagtatacaaaaatcatagctagataagagagataacagaaataagttccagtg

SEQ ID NO: 1033141 - DNA, 120 bp, Artificial Sequence
  ENSG00000269933_3 (sequence is synthesized)
agagagataacagaaataagttccagtgttctatactcctgtaggatgactacagttaatgctaatatacagttacaaatagctagaaggaggctattgaatgttcccaacacaaagaaa

SEQ ID NO: 1033142 - DNA, 120 bp, Artificial Sequence
  ENSG00000269933_4 (sequence is synthesized)
aattaccctcatctgaccagtatacattatatgtatcgaaacatcgctctgtgccctgcgaatatgtacaattgtgattattaaaataaatacataaataaaatttaaaagtcattatga

SEQ ID NO: 1033143 - DNA, 120 bp, Artificial Sequence
  ENSG00000265008_0 (sequence is synthesized)
aggccccggggcaaatggagggcggcgtgcgctgtgcttatcggcccctaacggggccggagccgaggctcatggtgcagggagattcgcccgccgccgccagcagctctgtcttggcat

SEQ ID NO: 1033144 - DNA, 120 bp, Artificial Sequence
  ENSG00000265008_1 (sequence is synthesized)
accggcgcacggcgccttccgcgggttgtgacctttgaagagaaatgccgtagaagcatggacgtggcttttcaccaaggttattcactaatttaagtgttttttttaattttattttat

SEQ ID NO: 1033145 - DNA, 120 bp, Artificial Sequence
  ENSG00000265008_2 (sequence is synthesized)
tttattttattttttgagacaggtactcactctgtctcccaggccggagtgcaattatctgtacaattgataatctataagatggtccaacctgcgtaacagagtgagattccgtctcaa

SEQ ID NO: 1033146 - DNA, 120 bp, Artificial Sequence
  ENSG00000262052_0 (sequence is synthesized)
cagaagtctggcactttgtggctgagttctcttcccagggtatcacaatgctcagagaaacatcccataaattggttccagattgagaaggtatggtggataaagcgatgctgccttggg

SEQ ID NO: 1033147 - DNA, 120 bp, Artificial Sequence
  ENSG00000262052_1 (sequence is synthesized)
aaaatatccaaatgtaactcaaagaaccacaagaccctataactctcaatttgaagatggcgtgataattttataccctgaacctgttctctgcttgggacacagaacaaggatagatac

SEQ ID NO: 1033148 - DNA, 120 bp, Artificial Sequence
  ENSG00000262052_2 (sequence is synthesized)
caaataatccacatcaaaatagaattaacaaaaaataatataagttagttggtctacaatcaaaaacaatattcccatggttatagacaggaggagccctcttccatccgccgctgcctc

SEQ ID NO: 1033149 - DNA, 120 bp, Artificial Sequence
  ENSG00000262052_3 (sequence is synthesized)
tatgaaattccagcatcatttttctggttttcatttggaaacaaagccactgaagagtattttgaagagtctgaaatccataaaacagagagcaaataaactgaaaatagaaccggaaaa

SEQ ID NO: 1033150 - DNA, 120 bp, Artificial Sequence
  ENSG00000262050_0 (sequence is synthesized)
cagaacgggctccctacccgcgtcctcgacccatgggtcctcacctccaggctggtgtcctcattttacagtggaggaggccgagaccaaggggcttggcggggacggaacggtgaggtc

SEQ ID NO: 1033151 - DNA, 120 bp, Artificial Sequence
  ENSG00000262050_1 (sequence is synthesized)
ctggccaggccgcagggggcctttgggaagcacccgaggcctataaccttcggagcgtttgtcaagctctaatgagaactggaaagcttcagcttcccgaggtgggctgggagggcctta

SEQ ID NO: 1033152 - DNA, 120 bp, Artificial Sequence
  ENSG00000262050_2 (sequence is synthesized)
ggtagggcctcgcacaaattgcgaaggaaagccgaccttgttctggagagcacgtggtgaggaaagccagcgacttgatgtgagcatttaaacgggaggaaggaagatgagaactggtaa

SEQ ID NO: 1033153 - DNA, 120 bp, Artificial Sequence
  ENSG00000265000_0 (sequence is synthesized)
gtgggcagagaagagatgcccaaggaggaggcggttggctttgtctgggtgcccaagcccagacccagatatccaggcctctgctcccttccctgaaagggtgctgtgcttcataaaaaa

SEQ ID NO: 1033154 - DNA, 120 bp, Artificial Sequence
  ENSG00000265000_1 (sequence is synthesized)
tgagattagaaaacgagagaggaaaatatttttaatggaatcagggaatgtgaaaagcggtacatgcgaagaggaaaagatactgcagtcctggagttcgacctctgcagaggacatctg

SEQ ID NO: 1033155 - DNA, 120 bp, Artificial Sequence
  ENSG00000265000_2 (sequence is synthesized)
gaatgctctggtccaacacgaaaaagaagaaataagcgatgaagccaggcacccagtcagtggcagaaccgacattagagcccaggcctcttcgtaatcagtcgtcttcaccccctttcc

SEQ ID NO: 1033156 - DNA, 120 bp, Artificial Sequence
  ENSG00000265000_3 (sequence is synthesized)
aaggagagaggtgcttagaggcctagaccaggccctacagctttggagccagggcaccagaaccgctactaccctcaccttctctgtgccagacttggagttgaaaaaggtagcaacctg

SEQ ID NO: 1033157 - DNA, 120 bp, Artificial Sequence
  ENSG00000265000_4 (sequence is synthesized)
gaaatgccaacaggagtagtcgaaaaagcccaaccaaagcctgctgtctttagccaaagaaccatggaagaggcagcctagcaagatagagaagttttaaacatcactatggattgcatt

SEQ ID NO: 1033158 - DNA, 120 bp, Artificial Sequence
  ENSG00000265000_5 (sequence is synthesized)
gtgtctccccaaaattcatgtcgaagccttaactcccagtgtaattgtatttggagatggggcctttgggagataattagggttagatgaagtaatgagaataaggccctcatgatggaa

SEQ ID NO: 1033159 - DNA, 89 bp, Artificial Sequence
  ENSG00000265000_6 (sequence is synthesized)
ggttagatgaagtaatgagaataaggccctcatgatggaatcagcagctttataagaagaatgatggggttgctttggaaggccgaggt

SEQ ID NO: 1033160 - DNA, 89 bp, Artificial Sequence
  ENSG00000265000_7 (sequence is synthesized)
agttgggatgaggttgaggcatgagaatcgcttgaacacaggaggtgaaggttacagtgagccaagattgtggcctgctgcactccagc

SEQ ID NO: 1033161 - DNA, 120 bp, Artificial Sequence
  ENSG00000265000_8 (sequence is synthesized)
cagcctgggagacagaatgagaccctatcaagaaaaaaaaaaaaagaggagtggagagagatcattctctctgccatgtgaagacacagtaagaagctgatcatctgcaacccagaaaga

SEQ ID NO: 1033162 - DNA, 120 bp, Artificial Sequence
  ENSG00000265000_9 (sequence is synthesized)
cacagtaagaagctgatcatctgcaacccagaaagagagcccttgccaggaaccaaattggttagcatcttgaccttagactccctaacttccaaaactgagaaacataaatgtctgttg

SEQ ID NO: 1033163 - DNA, 120 bp, Artificial Sequence
  ENSG00000265000_10 (sequence is synthesized)
ttgaagccaccagtctatattttgttgtagcagcctgagaagactaatacagacaataactgctctactcagccaaacaccacagcaaacgctttggcccccacccatgccaacaaaggc

SEQ ID NO: 1033164 - DNA, 120 bp, Artificial Sequence
  ENSG00000265000_11 (sequence is synthesized)
tgagtggggagcctacgattccacccttatgaggctataatgcggcacctcacccaccagggttgtgtcagagaaggccaagtagagagtcaataataagtccactctccacctggcccc

SEQ ID NO: 1033165 - DNA, 120 bp, Artificial Sequence
  ENSG00000265000_12 (sequence is synthesized)
catggtatcagtggagaccatgtgggaagcctacacttgcacccccaaaaggcagtaatgaagtgctcctcttcattcctgctcagtggtatcagagtaggactagcggagagtctagac

SEQ ID NO: 1033166 - DNA, 120 bp, Artificial Sequence
  ENSG00000265000_13 (sequence is synthesized)
ttttaccatcatccaatggtaataaggcaacccccatctcagtgtcagtggagaccacctggggagccagaatgccaacatctgcccagccataatgagaagtgtaactaagatgccaac

SEQ ID NO: 1033167 - DNA, 120 bp, Artificial Sequence
  ENSG00000265000_14 (sequence is synthesized)
agaggctgagtgaacctagtcttctacctgcacctgtcagtaatgggttggtgtctttcctcctctgctggagtaatgtcaaaaaaagccagctaaaataaagagttaacgtaaaattaa

SEQ ID NO: 1033168 - DNA, 120 bp, Artificial Sequence
  ENSG00000227297_0 (sequence is synthesized)
ctcaagagcacatttttcaagaccaggcagagggaggaggctgcgtagggtggaaatggtgctctaggcaggccacagctggagtaaagccatgaagatcagaaccagctgagttattca

SEQ ID NO: 1033169 - DNA, 120 bp, Artificial Sequence
  ENSG00000227297_1 (sequence is synthesized)
gagaaccaccgtggtttgggtattgccggagagcccagcacaaagaagagtggagggaggctggctgcggaggcaggtggggaccagaccatggccgcttgggagtttggaccagacact

SEQ ID NO: 1033170 - DNA, 120 bp, Artificial Sequence
  ENSG00000227297_2 (sequence is synthesized)
gctgtacaagccagcccacagggaggactgggcagacctaggcaacaagctgctctcctcctctctgggtgaccccagacaggactcctcacttgtgagattttaccaggcaaccaaaat

SEQ ID NO: 1033171 - DNA, 120 bp, Artificial Sequence
  ENSG00000227297_3 (sequence is synthesized)
tatttgctcatgcaactggggaatcaagggacactcatgttcaggaatggttggatccagaggctcaagccttcctttcaggcttctttctctccagctctctgctctctgatgagtctc

SEQ ID NO: 1033172 - DNA, 120 bp, Artificial Sequence
  ENSG00000227297_4 (sequence is synthesized)
aaaaaaaaaaaaaaacaaaacaaaaccctgcatggggagttgtgagaatctgaagcctgatactgcacagaaaacctatgaagccactgggtctggcctggaatggaaggctgagtgaat

SEQ ID NO: 1033173 - DNA, 120 bp, Artificial Sequence
  ENSG00000227297_5 (sequence is synthesized)
gggtctggcctggaatggaaggctgagtgaatgtgggaaaaaattttcaagtgggaaaaatgaaaccaataagatttttaaaaatacagtcggttatgtatgtgtgggttctgaggatcg

SEQ ID NO: 1033174 - DNA, 120 bp, Artificial Sequence
  ENSG00000227294_0 (sequence is synthesized)
aaagcttccaatacatcttgagggagactgtactggagcagataaagacactagaaagcaagggctgctttttggtgctggtgtatgcttaaaaagaaagccagccctgcaagggctgct

SEQ ID NO: 1033175 - DNA, 120 bp, Artificial Sequence
  ENSG00000227294_1 (sequence is synthesized)
ttttggtgctggtgtatgcttaaaaagaaagccagtccttaagcagagattctgcatgtaatgttgaagaaagaaagaaagtcagccctgacttcgacgcagccttacatactgctgccg

SEQ ID NO: 1033176 - DNA, 120 bp, Artificial Sequence
  ENSG00000227294_2 (sequence is synthesized)
atagcccctgaggatgggtgagatggagagaccaccaatgccaccagctgccagggctcttatgttctataaccacacaccgtgcttcaccaaacttgaactatgaatgcaacgtaaatc

SEQ ID NO: 1033177 - DNA, 120 bp, Artificial Sequence
  ENSG00000227294_3 (sequence is synthesized)
tacatctcacttcgttcaacttgacagcccgacttgcccaagttctctgaatgctgggctggaaggtcctggatgaaaacaagcctcatgcccaaggacttctgctgagctgagatctgg

SEQ ID NO: 1033178 - DNA, 120 bp, Artificial Sequence
  ENSG00000260744_0 (sequence is synthesized)
cctatttcttttgctctgttctctcttctccttctgatactctaattttccttatcgtctgctcttgcagtttgtttgcttacaatgctccactattatattgagccctggggtgtggtg

SEQ ID NO: 1033179 - DNA, 120 bp, Artificial Sequence
  ENSG00000260744_1 (sequence is synthesized)
gtaaagtgctgaggtggggggaagcattctaaaattttatgattttagaataatcagtcttgaaaaccaaaaataaaatcccaagccccgcaaccaactgaactgagccctcctgggcca

SEQ ID NO: 1033180 - DNA, 120 bp, Artificial Sequence
  ENSG00000260744_2 (sequence is synthesized)
caggaaacctgaaaactgaattcccattcaagattggaagggaggttgcccacgctttgctgtactccctcccttttggagtttaggcacaactgatcagcattaacattaaaataggga

SEQ ID NO: 1033181 - DNA, 120 bp, Artificial Sequence
  ENSG00000260744_3 (sequence is synthesized)
gggaggctgaacgctaagaagtaaatagtactccctgtcacatgtttatatgaggctattgttattcttttatgttgaactagataatagtagacattcattctttaataaatactttat

SEQ ID NO: 1033182 - DNA, 120 bp, Artificial Sequence
  ENSG00000260744_4 (sequence is synthesized)
aatttcttttagtgatatccgaataaaagttgagatgagatggctacttattattaaggggtaaattatctctttcacctagcaaggtaccatttaatacactcaagtagtttaggaaag

SEQ ID NO: 1033183 - DNA, 120 bp, Artificial Sequence
  ENSG00000260744_5 (sequence is synthesized)
gagaaactagtggtctgaagaatttaacgtcgaaagaaaattatgccacaaccttgataaactcaggattggttttcagattagaaaactaaatattagaaacaaagatggcatagacaa

SEQ ID NO: 1033184 - DNA, 120 bp, Artificial Sequence
  ENSG00000260741_0 (sequence is synthesized)
cttctacaacggagagagaaagcgtgggcctgagggtgcctgagaggctagggccagcctcccgcctcaggctccccaacttgtcccccagcctccacaagagaccctgctcattcatgt

SEQ ID NO: 1033185 - DNA, 120 bp, Artificial Sequence
  ENSG00000260741_1 (sequence is synthesized)
atgggctgaggtcctttgaaaattggacctcaggccaggtcactccctgaaacctgaaactcttcagtggcatctcactggatatatgggaatgccacagaataaacctggctgcatcta

SEQ ID NO: 1033186 - DNA, 120 bp, Artificial Sequence
  ENSG00000260741_2 (sequence is synthesized)
caagtttcctaacagcagagaagacatctatcttttcactgctgtgtccctggtacgtagaagagggcctggcaaacaggagaaactccatgcttgaggaaaggccatctgaggacatgg

SEQ ID NO: 1033187 - DNA, 120 bp, Artificial Sequence
  ENSG00000260741_3 (sequence is synthesized)
agagaagacagccagccttctgcaacccaaagagagaagcctcaccagaaccgagtctgcctgtgccttgatcttagactttctagtctccaaaactgtgataaataaatgtctactgtc

SEQ ID NO: 1033188 - DNA, 120 bp, Artificial Sequence
  ENSG00000260740_0 (sequence is synthesized)
accgttgggcatgagcttcacgacgagccgcgggtaggcgatgttggagcagcccacctccgtgccgcacacgcgcctgcacacctcaggcaccacgcacgccacctcgtctgccagaga

SEQ ID NO: 1033189 - DNA, 120 bp, Artificial Sequence
  ENSG00000260740_1 (sequence is synthesized)
gaggccaccgcgccgttaggacggggcctggtctgggaatcccaggaggcgcagccctatacccgcacctggtcgctgcaccagtaccagcccgagacgattgtgagtccgaggagcagc

SEQ ID NO: 1033190 - DNA, 120 bp, Artificial Sequence
  ENSG00000260740_2 (sequence is synthesized)
atcctcggacaccgtcagcgaagtcgctgctcccaggtatttgtcgaagagacccgaatacccgcccacctcgtggaaggctgccgggcaaggccgtcaggggaccctccttaggaccct

SEQ ID NO: 1033191 - DNA, 120 bp, Artificial Sequence
  ENSG00000260740_3 (sequence is synthesized)
cagaccggagacgcgcaacggccccgcgcgcaggccgagagctccgcgaccatgccctccgcgcccctccctggtaggcgagcccctaccgtaacccatgaggatgcaggcgccccccag

SEQ ID NO: 1033192 - DNA, 120 bp, Artificial Sequence
  ENSG00000260743_0 (sequence is synthesized)
gctggaatttgctttgtactagtgatttgaaaaataattttctggataacgaatttccatactaaagcatcagtcaccaccaattccttattaagttaattctccttagtaactttggtg

SEQ ID NO: 1033193 - DNA, 120 bp, Artificial Sequence
  ENSG00000260743_1 (sequence is synthesized)
ttaaagtggtaactatctgaacccaaaataaatttgtgaagagtaatttattcattctaaaaagaaattttcttacattgctagaaaagaatagtatctactaatcttattcccatactt

SEQ ID NO: 1033194 - DNA, 120 bp, Artificial Sequence
  ENSG00000260743_2 (sequence is synthesized)
tatgaagggtgattatttagagagttttaaaagaaattaacagaacatttaaaagtgtgttctttgttgtttgtttttaaataggcaaatgaatctaacctgacatcttttttccccttg

SEQ ID NO: 1033195 - DNA, 120 bp, Artificial Sequence
  ENSG00000260743_3 (sequence is synthesized)
ctagaaatattgagctgaatgaattacattccaaaaatgtaatgaatagtacacattttgaatgaaaactcaaagttttctagtttttaatatcttgtctggagagtgtatccactactt

SEQ ID NO: 1033196 - DNA, 120 bp, Artificial Sequence
  ENSG00000260743_4 (sequence is synthesized)
gaaaaatactgcagttgaattattgatattttcacctttactcttcaaagtaaagctgaaatcagaaattggaatcatattcagcaaatgtaatttctggtgggtaattttcttttttct

SEQ ID NO: 1033197 - DNA, 120 bp, Artificial Sequence
  ENSG00000260743_5 (sequence is synthesized)
ttttaaggctattcaccatgctcttctgaattttggttggctaaaatttgagaatacagaattcccacgtttcctgcctaccctgttcattcttggttatgtccagagtggcattatttg

SEQ ID NO: 1033198 - DNA, 120 bp, Artificial Sequence
  ENSG00000260743_6 (sequence is synthesized)
tcattcttggttatgtccagagtggcattatttgtctttttctgtttttcattttcttttataagagaggcccaggcagatctcaaactcctgggctcaagtaatccacctgcctcagcc

SEQ ID NO: 1033199 - DNA, 120 bp, Artificial Sequence
  ENSG00000260743_7 (sequence is synthesized)
ggccttattcatctttttttaaatacattatttctgaaattatattctatggctgattactgttatctttacaactcatcttatttgggttttcagaaagtttcaaaagattaaagtttt

SEQ ID NO: 1033200 - DNA, 120 bp, Artificial Sequence
  ENSG00000260743_8 (sequence is synthesized)
cccaactaacaaggtaagttgccatgaactaaacatgtccccctcaaaattcatatgttcaaatcctaatccccagtgtgatgatatcagaagatggggcctttggtatatgattaggtc

SEQ ID NO: 1033201 - DNA, 120 bp, Artificial Sequence
  ENSG00000260743_9 (sequence is synthesized)
aggaaagtggagccctcatgaatgggattagtgccgttagaaaagggatcccagagagcgctcacctgttttccatgtgaggatacaatgagaagtcagcagtctgcaacctggaagaga

SEQ ID NO: 1033202 - DNA, 120 bp, Artificial Sequence
  ENSG00000260743_10 (sequence is synthesized)
acttccagcctccagaactgtgagaaatttctgttgtttataagccactcagtctatggtacattgttatagtagcctatattgactaagatagagtagatttgttttgattcttccttc

SEQ ID NO: 1033203 - DNA, 120 bp, Artificial Sequence
  ENSG00000260743_11 (sequence is synthesized)
attgactaagatagagtagatttgttttgattcttccttccgtctgttctccaaactcttaaaataagttactcccttcatgccatatcccacatcacttgcttgtataccgtgtaaata

SEQ ID NO: 1033204 - DNA, 120 bp, Artificial Sequence
  ENSG00000260743_12 (sequence is synthesized)
ttttatatatacctgcctggcatcagtttgtgctgattttgtaaattttgaatgtgtttgttttagattttaagcataacattatggcacatatcttaataactttttatggttacaata

SEQ ID NO: 1033205 - DNA, 120 bp, Artificial Sequence
  ENSG00000260742_0 (sequence is synthesized)
ggggcgcgcccggcgcgacgcggagcaggccagcccccgactactgcccgcggaatgggcaagattagtttgttaataatctttcctcctctcctcctcctcctccctcacctaaaaata

SEQ ID NO: 1033206 - DNA, 120 bp, Artificial Sequence
  ENSG00000260742_1 (sequence is synthesized)
gaacgtaagtggggaggccaagtctcacaaaacatcccccgcgagaaaacaagtgtctgcttgggcaccctgaaacatacacttgaaagagtcgcctgaatatagactctttagtgtcca

SEQ ID NO: 1033207 - DNA, 120 bp, Artificial Sequence
  ENSG00000260742_2 (sequence is synthesized)
aggaattggggtaaggacggaaagaggtgcttgattggtgttgccaaaatgtaaaaactgcaaaagactaagcttcctggagtgctactttcatacttaaagttatttatcgtgtttatg

SEQ ID NO: 1033208 - DNA, 120 bp, Artificial Sequence
  ENSG00000260742_3 (sequence is synthesized)
ttatgaatgaaaatgaattgtgaaaggatatttaatctggaaatttcacattgaagttggactttggtgagggagaatagaggaaacaattgggacaatgtggagatagttgcttggatt

SEQ ID NO: 1033209 - DNA, 120 bp, Artificial Sequence
  ENSG00000260742_4 (sequence is synthesized)
ttggtgagacagcatgatacaagaaacaaatgatgtcagggttcaaaactttttaaagccagctttggcattccgttttgttatgtttaaattctcattagcaaaaatactcaaattcta

SEQ ID NO: 1033210 - DNA, 120 bp, Artificial Sequence
  ENSG00000260742_5 (sequence is synthesized)
tccaaaaccagacacaatgtgacagacctatcaagcagcattgttcccctaaatgttacatctgaactatacatataagtaaggcttccaatattttattgtacttggctatgctctgaa

SEQ ID NO: 1033211 - DNA, 120 bp, Artificial Sequence
  ENSG00000260742_6 (sequence is synthesized)
gaacaagttagaacactttttaaaatcttaacgtgattgaaaagaatattttgcgtagacaaaatattttaaggaaggaattatttttcatttgaaattaaaatccagagcatagtaaaa

SEQ ID NO: 1033212 - DNA, 120 bp, Artificial Sequence
  ENSG00000260742_7 (sequence is synthesized)
ttcctaatggaagcattcgaattacaaggtaattaagtgcattgtcattgatagctacaggaaaccataacttttggagaatttggaatgaagaatgctctggagatgaaatagtgccta

SEQ ID NO: 1033213 - DNA, 120 bp, Artificial Sequence
  ENSG00000260742_8 (sequence is synthesized)
gtttttgtccaggcatttacacataagtcatagactactaaaatagcacactgattttcctgccttcattctttcctatctcctttctagcgcattgctctagatttacaattccaagac

SEQ ID NO: 1033214 - DNA, 120 bp, Artificial Sequence
  ENSG00000260742_9 (sequence is synthesized)
atcttctaatggtttactaatatccccaagatcaaatccaaaatccagactagctttccagaaccatcataatattctcctgagtctcatctatgtactgccaaatgtcaggggagttag

SEQ ID NO: 1033215 - DNA, 120 bp, Artificial Sequence
  ENSG00000260742_10 (sequence is synthesized)
aacagtgatattaatatctctatggcttgaaatttcactactagaaaatcttttctttgaacctataagactttctcagccttcaagggtcctgtagtaggatgcagctaacagtttaat

SEQ ID NO: 1033216 - DNA, 120 bp, Artificial Sequence
  ENSG00000260742_11 (sequence is synthesized)
ggctctccaaaataggtcagagtctcgctgcctgtgtggaagatgaaaaagagaatgaataaagaaggtacctaagaagaagcattgaaagggctggtcaagtgccacaaaatatgctgc

SEQ ID NO: 1033217 - DNA, 120 bp, Artificial Sequence
  ENSG00000260742_12 (sequence is synthesized)
cttcaaagttttatccagggttcttacgtatccaccctgttcctctgctgctcccagcttcaattctatcatatctaagtgctgttgcctactctgtctttgctaattaattcattcctg

SEQ ID NO: 1033218 - DNA, 120 bp, Artificial Sequence
  ENSG00000260742_13 (sequence is synthesized)
ttctttctgtccactaccttcatgactttcaaaatctagctaagccagaactttttgactccaccattccaccactcctgatcacacccctcccacagggatctgatatacaacagcatg

SEQ ID NO: 1033219 - DNA, 120 bp, Artificial Sequence
  ENSG00000260742_14 (sequence is synthesized)
tctatgtcatttatttggggactggattgtagagtaaataatatgactggccctggaaggtatgtttggcttactagccagattgtaaattgtgagagatgatagaacattcttcagtat

SEQ ID NO: 1033220 - DNA, 120 bp, Artificial Sequence
  ENSG00000260742_15 (sequence is synthesized)
cctaaattgattattttaaaatttgcttcatgttatttctataatgcttatattttatttaggtttgcagttgtttaaatacactttcagatgacaacaacaaagaattcttgtgaaagg

SEQ ID NO: 1033221 - DNA, 120 bp, Artificial Sequence
  ENSG00000260742_16 (sequence is synthesized)
caataattaaccatagtttaaaaaaaaatcaaacaaccagagtcaagtaataagggggaaaaattaccagcaggtaacaaagtagaatatatacattattcagtttccggtagcacaaat

SEQ ID NO: 1033222 - DNA, 120 bp, Artificial Sequence
  ENSG00000260742_17 (sequence is synthesized)
gtgtgctttcttctacatggcattttttaatgaaatatgttgagggtatagaagtaatagagaaggaaatccttgaagtagtatgctattgccttgaaaagtaaggttttttcattgtat

SEQ ID NO: 1033223 - DNA, 120 bp, Artificial Sequence
  ENSG00000260742_18 (sequence is synthesized)
tctcaacttttacagatgttttaaaatgcccaaggtatttcatttattcgataatgaatactacacatgaagaaagtctgcatgtttgcttcttcgaggattttctcccaaacaagtact

SEQ ID NO: 1033224 - DNA, 120 bp, Artificial Sequence
  ENSG00000260742_19 (sequence is synthesized)
catgtttgcttcttcgaggattttctcccaaacaagtactatcttgtacaccaactgcaaatatacattgcgaagctctacataaagagtattgtctgggccaggcatggtggctcacac

SEQ ID NO: 1033225 - DNA, 67 bp, Artificial Sequence
  ENSG00000260742_20 (sequence is synthesized)
gctgtctcaaaaaaaaaaaaaaaaaagagtattgtctgaatcaatgatgtttgcaaggtggaaaaag

SEQ ID NO: 1033226 - DNA, 120 bp, Artificial Sequence
  ENSG00000260742_21 (sequence is synthesized)
agtattgtctgaatcaatgatgtttgcaaggtggaaaaagaaagaaatgtatattaaatgtggataattccatccagcatgacatagtggaagcaacgtggtctttggtgttagactgaa

SEQ ID NO: 1033227 - DNA, 120 bp, Artificial Sequence
  ENSG00000260742_22 (sequence is synthesized)
gtttgaaatgtttccctctttttctagctgtatggtataaggcaagacagctaatatcccaaggccatgacttttctcatctttgaaatagcaatcatgataactaccttcccaaattga

SEQ ID NO: 1033228 - DNA, 120 bp, Artificial Sequence
  ENSG00000260742_23 (sequence is synthesized)
tgtgaatctcacaagaaataatgtaggtgctcagtatagctattagaatgattatattgcagaaagcaaaaaataaatcaatttcatatgggggaataattctcatattagcaaatggca

SEQ ID NO: 1033229 - DNA, 120 bp, Artificial Sequence
  ENSG00000260742_24 (sequence is synthesized)
tctatcatcatgcttatgcagctgtattttaaaattggcataagttcaggcaaagatagaaaacgtatactttggttaaatcaggcagttttatatgggaaagcatgaatcataagggaa

SEQ ID NO: 1033230 - DNA, 120 bp, Artificial Sequence
  ENSG00000260742_25 (sequence is synthesized)
acattgttcttggtttaattagatatttaaaattgcaaaacaagatttactattgggtaggctaagccattttggttgtagttatggtattgtttctttaataatatttatatgctcaaa

SEQ ID NO: 1033231 - DNA, 120 bp, Artificial Sequence
  ENSG00000260742_26 (sequence is synthesized)
aattgtattttgtgcatcaaaatcttaattatttagaatctgattagagagtggtagagttgcagttatttcttcaaattctcatcttttgttaagacaaaaggggcctcagaggtataa

SEQ ID NO: 1033232 - DNA, 120 bp, Artificial Sequence
  ENSG00000260742_27 (sequence is synthesized)
ggttaagtagaatatcaggttaaatgaacaaagtagcattttatattttgatagtattgcctggagaaaaaaattctatataaaataagaatggaaaacactgcatattataccccctcc

SEQ ID NO: 1033233 - DNA, 120 bp, Artificial Sequence
  ENSG00000260742_28 (sequence is synthesized)
tcttcctccaccccagcccagtcacaatgaatgttaaagacttgagacgtcttcaaaacttgttttttaaaactttaattttttaaacccaatagttataaaatttatttcaacagtaaa

SEQ ID NO: 1033234 - DNA, 120 bp, Artificial Sequence
  ENSG00000260742_29 (sequence is synthesized)
tctttttggcccctcaatgtatccattaacatttccagggataccagtgaaataatttgcaatagcataaaagagaataaaagaaaaaatattaataaataagagtaaacacttcaaaaa

SEQ ID NO: 1033235 - DNA, 120 bp, Artificial Sequence
  ENSG00000260807_0 (sequence is synthesized)
ccggcgccgcaccacgtgggccaggcgccccacgcctggagctcccctctctggagccccgggaaaggaagcggggcagggaggccgggtgggagcaggggggtctccggcgcttcctct

SEQ ID NO: 1033236 - DNA, 120 bp, Artificial Sequence
  ENSG00000260807_1 (sequence is synthesized)
ctccggcgcttcctctcctctgcgggcgccgcgcggctcctgagagtccgccccccgtcctgacgctcagctaggaagcgggtcctcgggcccctcccccgacacacacacacacacaca

SEQ ID NO: 1033237 - DNA, 85 bp, Artificial Sequence
  ENSG00000260807_2 (sequence is synthesized)
cccgtctcgcgcctgaggtctcgcccgcaggccggtggcgcggggtcagctgctgcctgcggtccaggacagggtcggttccgcc

SEQ ID NO: 1033238 - DNA, 120 bp, Artificial Sequence
  ENSG00000260807_3 (sequence is synthesized)
tcagctgctgcctgcggtccaggacagggtcggttccgccgcgcagcgcccaggcccagctcgtccagagtctgcggacagcgcacgtccaggtaacgcgcttcaaggggccgcggctcg

SEQ ID NO: 1033239 - DNA, 80 bp, Artificial Sequence
  ENSG00000260807_4 (sequence is synthesized)
ctcggagctgggggaccccgggccgccctgcccatacgagtgcgagcgtggagagcgcgggcgggggcgcggtcccgggg

SEQ ID NO: 1033240 - DNA, 80 bp, Artificial Sequence
  ENSG00000260807_5 (sequence is synthesized)
tgacctagggctcgggggcggggaggcccctccggcggggcggccctgggtggtccggcagaggcggaggccgctccgag

SEQ ID NO: 1033241 - DNA, 120 bp, Artificial Sequence
  ENSG00000260807_6 (sequence is synthesized)
ggtggtccggcagaggcggaggccgctccgagcctgtgagccctgggcgcctgcggaggcggggagagggcggggtgtgccgccctggtggggaccgcggggtcggagaggggacattgc

SEQ ID NO: 1033242 - DNA, 120 bp, Artificial Sequence
  ENSG00000260807_7 (sequence is synthesized)
gacattgccccccccgaggcgaacgtccaaccgcgggtccgggtccccgcccaaggccgccccgcgaggtggcctcggcccggccgtccccgagggtggctcggatcctttcaaccagcg

SEQ ID NO: 1033243 - DNA, 120 bp, Artificial Sequence
  ENSG00000260807_8 (sequence is synthesized)
ggaggcgaaggggctgcgccattccgggtcaggcagccaacgcgggacacgcgcgtctccgagcttgcggcccgcgaaacccgggtgacctaccgcgccggtgccctcaaagcccccacg

SEQ ID NO: 1033244 - DNA, 120 bp, Artificial Sequence
  ENSG00000260807_9 (sequence is synthesized)
cccgggccggtggccgctgcagccactgagccacgcggtctccccggcccggtcggcagaaggagctggtccgttactagaaaagtccagatgcaaagtcgggggtcgtgctgccgcttc

SEQ ID NO: 1033245 - DNA, 120 bp, Artificial Sequence
  ENSG00000260807_10 (sequence is synthesized)
gtcgtgctgccgcttcctgccagcgcaccgcacccacctggggccgccaccgaccgcacaggacgcgcctcctaccccctgttctggcccggccgagagctggtgcccccagcggccgcc

SEQ ID NO: 1033246 - DNA, 120 bp, Artificial Sequence
  ENSG00000260807_11 (sequence is synthesized)
ccccggggcccttgctgctttgcattgggaacaaccggagccaggcccggagctgagggggccagggcctttggaggaagcattggcctccaggctgaagagcaagggccgtgtcacctg

SEQ ID NO: 1033247 - DNA, 120 bp, Artificial Sequence
  ENSG00000260807_12 (sequence is synthesized)
cccggagggcggtctcatctctgcagccaggtcagaggaagcagcggtggggagacggagtgcgcgagttgggaggctccacgcatcgtaggtggagagctggctgccagcctggcctgc

SEQ ID NO: 1033248 - DNA, 120 bp, Artificial Sequence
  ENSG00000260807_13 (sequence is synthesized)
cctctcttccccgtcccaccatctcgcttggctccggcacctgcctgggaagacccacacctccgtctgcagtgcctcttccccctggaggccctgccctccgctcggggtccccgcatc

SEQ ID NO: 1033249 - DNA, 120 bp, Artificial Sequence
  ENSG00000260807_14 (sequence is synthesized)
cttccgtggccctcagagcatcgcctggggcgcccgcggaactcatctgttaggcctgggatgcaggcaggcagaagtgggggtttaagtggaagcagtgagggtgggggtccggtccaa

SEQ ID NO: 1033250 - DNA, 120 bp, Artificial Sequence
  ENSG00000260807_15 (sequence is synthesized)
ccaccttccaccccctgcccctgggagagcagacatcgcccactcgggctcacagtgccatccgggtgaggacctccgtggagagctctctttgccaaagaaaagcagttgcattaggtc

SEQ ID NO: 1033251 - DNA, 120 bp, Artificial Sequence
  ENSG00000260807_16 (sequence is synthesized)
tgcgagcaggcagggtggcctcttcctggctccccatccaccaaggaagcttcaagtccctgggacacaggtggggaactccagcacccctggaggaagggagactgaggttggggagtg

SEQ ID NO: 1033252 - DNA, 120 bp, Artificial Sequence
  ENSG00000260807_17 (sequence is synthesized)
gcatccaggccctgactctggggcacggtggtctgtgcaactgagaccctgcctcaggctccaacagcgcctgctcctttccccaggttgcagtgatcaccaggggaggtgctgggcgtg

SEQ ID NO: 1033253 - DNA, 120 bp, Artificial Sequence
  ENSG00000260807_18 (sequence is synthesized)
caggctgccacaggaggggtggggaggtggggagtctctgtggcggggtggtgggggcctaggccagtcagctgaggacgtgttggtgcactcccgggagggcggtatgtgggtgaggat

SEQ ID NO: 1033254 - DNA, 120 bp, Artificial Sequence
  ENSG00000260807_19 (sequence is synthesized)
ccccatgcagagtggtgcccacaaaccccccttccagagtcatctctggtccaccttgaagtccccaggaaaatgacctcgtcctccgcgggtgtgagccactaggcctgagaggacgcc

SEQ ID NO: 1033255 - DNA, 120 bp, Artificial Sequence
  ENSG00000260807_20 (sequence is synthesized)
gggacggagctttcagagagggaggtgtcgggatggcttgagggtcaccagcccagacgtcctcctggtcctcctgatgcccccgacctccacggaggacgagcatttccagcccagccc

SEQ ID NO: 1033256 - DNA, 120 bp, Artificial Sequence
  ENSG00000260807_21 (sequence is synthesized)
tccccatcttcacctcgcactcccctgacacactgggagcctcctgatccgtgaacccgcgctggcgggagtagctactgaccgctggggacccctgcccaggctgttcgcatgtggaaa

SEQ ID NO: 1033257 - DNA, 120 bp, Artificial Sequence
  ENSG00000260807_22 (sequence is synthesized)
ggattcagggagcaggcgatgcccaaagcgtggagaccagcactgctctctccccagtgacaggtgcacgcccagatcacggatgtgtcgggaacagctgtgctcctgctgctcagcgtc

SEQ ID NO: 1033258 - DNA, 120 bp, Artificial Sequence
  ENSG00000260807_23 (sequence is synthesized)
cgtcactccaggctgggagcgggtccccaagcttctggctgggcctatccgtctccactctcagtgtgggggtggggggcgccaacagcacgcatttgctctctgcacttctcgtctgat

SEQ ID NO: 1033259 - DNA, 120 bp, Artificial Sequence
  ENSG00000260807_24 (sequence is synthesized)
aatgggcagagggtccttctgcagccccaaaacatccctaggcaggagccctggggccccaagcagccagggaggtgagcaccaaggacctcccagagagcgtcaccttccgtcgaggga

SEQ ID NO: 1033260 - DNA, 120 bp, Artificial Sequence
  ENSG00000260807_25 (sequence is synthesized)
ggcccagcctgggggcggtgtctgagacttggaatcaacgcttccgttggtggcagtaaatcctgtccctaaccctgcagtacagctgtgccgtgtacaggagggtgctgtctgacgcca

SEQ ID NO: 1033261 - DNA, 120 bp, Artificial Sequence
  ENSG00000260807_26 (sequence is synthesized)
gacacctggactacagatcgcagcctgattcctggtcattgctccactgaaccccagaccccagcctcgttctgggccctcatcccctagatccagggaccccagccccatttcagccct

SEQ ID NO: 1033262 - DNA, 120 bp, Artificial Sequence
  ENSG00000260807_27 (sequence is synthesized)
tgggcccttgtaggatgcgaggccctgggccccagcccccagcccatccgtggcccaggcactggggggctgaggtcctctgagaagggacacagggcctggggggctctctcagcccat

SEQ ID NO: 1033263 - DNA, 120 bp, Artificial Sequence
  ENSG00000260807_28 (sequence is synthesized)
cagcaggagaggactgactccagaaaaatcagcgtttgtacccactcaggctgccaagacctgtgtccgtccttccaagctcaaccttcagagttcatgaggccccttgcccagaatgtc

SEQ ID NO: 1033264 - DNA, 120 bp, Artificial Sequence
  ENSG00000260807_29 (sequence is synthesized)
cacagagttcatgaggccccttgcccggaatgtccacatttgaaacctcccaacaccgagccccatttcaagtataaccaggagggaaaatggtgcttgaaataagcatgccacaaagga

SEQ ID NO: 1033265 - DNA, 120 bp, Artificial Sequence
  ENSG00000260807_30 (sequence is synthesized)
aaacctgctttctcgaaatgggccctggccgcccaggccctgacctccccggccaggatggaacgttccagagacccattagtgccaaaggcaaatgaaaacacaccctgtgaaaatgtc

SEQ ID NO: 1033266 - DNA, 120 bp, Artificial Sequence
  ENSG00000260807_31 (sequence is synthesized)
caccctcacagctcctgccctgcagacgctggccttgtggagggaggcaggcagcaggagcagtgctttctgggcctctgtagccagagctggccctgctgcagcttacgtctgcctgca

SEQ ID NO: 1033267 - DNA, 120 bp, Artificial Sequence
  ENSG00000260807_32 (sequence is synthesized)
ggagccaggcccggagctgagggggccagggcctttggaggaagcattggcctccaggctgaagagcaagggccgtgtcacctgcccggagggcggtctcatctctgcagccaggcactt

SEQ ID NO: 1033268 - DNA, 61 bp, Artificial Sequence
  ENSG00000226249_0 (sequence is synthesized)
ccgttgaggagtaaatggactggattaaagttaaaccataaccccaaattcaggttcttac

SEQ ID NO: 1033269 - DNA, 120 bp, Artificial Sequence
  ENSG00000226249_1 (sequence is synthesized)
ggattaaagttaaaccataaccccaaattcaggttcttactaaacctcttcaaagaaatggcagcatgatgagctttgaaaatgtgaaagaaaagagcagagaaggagggccccatgcac

SEQ ID NO: 1033270 - DNA, 120 bp, Artificial Sequence
  ENSG00000226249_2 (sequence is synthesized)
cacccgaagaagaattgtgtttcgtggtaacacactaccctcaggttcagaccacactcaacctgtttttccatatattcaaggttcttactcaaccactttcccttctgtggggttgtg

SEQ ID NO: 1033271 - DNA, 120 bp, Artificial Sequence
  ENSG00000226249_3 (sequence is synthesized)
atcagaagcctcgtactgttcctacccttggaaacggcgcatgggatacctgccaacaacacatacgcacttcatcatggacagcaaacacactcgtcattcaaaaccagcattcacggg

SEQ ID NO: 1033272 - DNA, 120 bp, Artificial Sequence
  ENSG00000226249_4 (sequence is synthesized)
aaagcactgtttctgtttgcctttttatgttaatccgcatgcaacatattttgaaaacagatacacttcaacagttcagaatatgctagtactaataaaaccaacatgttacatgctgaa

SEQ ID NO: 1033273 - DNA, 120 bp, Artificial Sequence
  ENSG00000260804_0 (sequence is synthesized)
caagtatgcaatctctgtaaacccgctagaaccagtcatggtcggtgggctccttaccaggagaaaattaccgaaatcactcttgtccaatcaaagctgtagttatggctggtggagttc

SEQ ID NO: 1033274 - DNA, 120 bp, Artificial Sequence
  ENSG00000260804_1 (sequence is synthesized)
agttagtcagcatctggtggagctgcaagtgttttagtattgtttatttagaggccagtgcttatttagctgctagagaaaaggaaaacttgtggcagttagaacatagtttattctttt

SEQ ID NO: 1033275 - DNA, 120 bp, Artificial Sequence
  ENSG00000260804_2 (sequence is synthesized)
aagtgtagggctgcatgacttaacccttgtttggcatggccttaggtcctgtttgtaatttggtatcttgttgccacaaagagtgtgtttggtcagtcttatgacctctattttgacatt

SEQ ID NO: 1033276 - DNA, 120 bp, Artificial Sequence
  ENSG00000260804_3 (sequence is synthesized)
aatgctggttggttgtgtctaaaccataaaagggaggggagtataatgaggtgtgtctgacctcttgtcctgtcatggctgggaactcagtttctaaggtttttctggggtcctctttgc

SEQ ID NO: 1033277 - DNA, 120 bp, Artificial Sequence
  ENSG00000260804_4 (sequence is synthesized)
caagagcgtttctattcagttggtggaggggacttaggattttatttttagtttgcagccagggtcagtacatttcagtcacccccgcccagccctcctgatcctcctgtcattcctcac

SEQ ID NO: 1033278 - DNA, 120 bp, Artificial Sequence
  ENSG00000260804_5 (sequence is synthesized)
atcctgtcattgtcagagattttacagatatagagctgaatcatttcctgccatctcttttaacacacaggcctcccagatctttctaacccaggacctacttggaaaggcatgctgggt

SEQ ID NO: 1033279 - DNA, 120 bp, Artificial Sequence
  ENSG00000260804_6 (sequence is synthesized)
ctcttccacagactttaagctctccctacaccagaatttaggtgagtgctttgaggacatgaagctattcctcccaccaccagtagccttgggctggcccacgccaactgtggagctgga

SEQ ID NO: 1033280 - DNA, 120 bp, Artificial Sequence
  ENSG00000260804_7 (sequence is synthesized)
gcgggagggaggagtacagacatggaattttaattctgtaatccagggcttcagttatgtacaacatccatgccatttgatgattccaccactccttttccatctcccagaagcctgctt

SEQ ID NO: 1033281 - DNA, 120 bp, Artificial Sequence
  ENSG00000260804_8 (sequence is synthesized)
tttaatgcccgcttaatattatcagagccgagcctggaatcaaactgcctctttcaaaacctgccactatatcctggctttgtgacctcagccaagttgcttgactattctcagtctcag

SEQ ID NO: 1033282 - DNA, 120 bp, Artificial Sequence
  ENSG00000260804_9 (sequence is synthesized)
tttctgcacctgtcaaatagggtttatgttaacctaactttcagggctgtcaggattaaatgagcatgaaccacataaaatgtttggtgtatagtaagtgtacagtaaatacttccatta

SEQ ID NO: 1033283 - DNA, 120 bp, Artificial Sequence
  ENSG00000260804_10 (sequence is synthesized)
tcagtccctgcaattctatttttcttccttctctacacagcccctgtctggctttaaaatgtcctgccctgctttttatgagtggatacccccagccctatgtggattagcaagttaagt

SEQ ID NO: 1033284 - DNA, 120 bp, Artificial Sequence
  ENSG00000260804_11 (sequence is synthesized)
aatgacactcagagacagttccatctttgtccataacttgctctgtgatccagtgtgcatcactcaaacagactatctcttttctcctacaaaacagacagctgcctctcagataatgtt

SEQ ID NO: 1033285 - DNA, 120 bp, Artificial Sequence
  ENSG00000260804_12 (sequence is synthesized)
gggggcataggaggaatgggaagcccgctaagagaacagaagtcaaaaacagttgggttctagatgggaggaggtgtgcgtgcacatgtatgtttgtgtttcaggtcttggaatctcagc

SEQ ID NO: 1033286 - DNA, 120 bp, Artificial Sequence
  ENSG00000260804_13 (sequence is synthesized)
cacctggctccctcttttaaagattttccttccctctttccaactccctgggtcctggatcctccaacagtgtcagggttagatgccttttatgggccacttgcattagtgtcctgatag

SEQ ID NO: 1033287 - DNA, 120 bp, Artificial Sequence
  ENSG00000260804_14 (sequence is synthesized)
aggcttaatcactgctcagaaactgccttctgcccactggcaaagggaggcaggggaaatacatgattctaattaatggtccaggcagagaggacactcagaatttcaggactgaagagt

SEQ ID NO: 1033288 - DNA, 120 bp, Artificial Sequence
  ENSG00000260804_15 (sequence is synthesized)
atacatgtgtgtgatggtaaatgggcaaaaatcatcccttggcttctcatgcataatgcatgggcacacagactcaaaccctctctcacacacatacacatatacattgttattccacac

SEQ ID NO: 1033289 - DNA, 120 bp, Artificial Sequence
  ENSG00000260804_16 (sequence is synthesized)
acaaggcataatcccagtgtccagtgcacatgcatacacgcacacattcccttcctaggccactgtattgctttcctagggcatcttcttataagacaccagtcgtataaggagcccacc

SEQ ID NO: 1033290 - DNA, 120 bp, Artificial Sequence
  ENSG00000260804_17 (sequence is synthesized)
ccactcatctgagcttatcaaccaattacattaggaaagactgtatttcctagtaaggtcacattcagtagtactgagggttgggacttcaacacagctttttgggggatcataattcaa

SEQ ID NO: 1033291 - DNA, 120 bp, Artificial Sequence
  ENSG00000260804_18 (sequence is synthesized)
cccatgacagccactgagattattatatctccagagaataaatgtgtggagttaaaaggaagatacatgtggtacaaggggtggtaaggcaagggtaaaaggggagggaggggattgaac

SEQ ID NO: 1033292 - DNA, 120 bp, Artificial Sequence
  ENSG00000260804_19 (sequence is synthesized)
tagacacagacacatgagcaggactttggggagtgtgttttatatctgtcagatgcctagaacagcacctgaaatatgggactcaatcattttagtccccttctttctataagtgtgtgt

SEQ ID NO: 1033293 - DNA, 120 bp, Artificial Sequence
  ENSG00000260804_20 (sequence is synthesized)
gtgcggatatgtgtgctagatgttcttgctgtgttaggaggtgataaacatttgtccatgttatataggtggaaagggtcagactactaaattgtgaagacatcatctgtctgcatttat

SEQ ID NO: 1033294 - DNA, 120 bp, Artificial Sequence
  ENSG00000260804_21 (sequence is synthesized)
tgagaatgtgaatatgaaacaagctgcaagtattctataaatgttcactgttattagatattgtatgtctttgtgtccttttattcatgaattcttgcacattatgaagaaagagtccat

SEQ ID NO: 1033295 - DNA, 120 bp, Artificial Sequence
  ENSG00000260804_22 (sequence is synthesized)
gtggtcagtgtcttacccggtgtagggtaaatgcacctgatagcaataacttaagcacacctttataatgaccctatatggcagatgctcctgaatgtgtgtttcgagctagaaaatccg

SEQ ID NO: 1033296 - DNA, 120 bp, Artificial Sequence
  ENSG00000260804_23 (sequence is synthesized)
ggagtggccaatcggagattcgtttcttatctataatagacatctgagcccctggcccatcccatgaaacccaggctgtagagaggattgaggccttaagttttgggttaaatgacagtt

SEQ ID NO: 1033297 - DNA, 120 bp, Artificial Sequence
  ENSG00000260804_24 (sequence is synthesized)
gccaggtgtcgctcattagggaaaggggttaagtgaaaatgctgtataaactgcatgatgtttgcaggcagttgtggttttcctgcccagcctgccaccaccgggccatgcggatatgtt

SEQ ID NO: 1033298 - DNA, 120 bp, Artificial Sequence
  ENSG00000260804_25 (sequence is synthesized)
gtccagcccaacaccacaggaccatttctgtatgtaagacaattctatccagcccgccacctctggactccctcccctgtatgtaagccctcaataaaaccccacgtctcttttgctggc

SEQ ID NO: 1033299 - DNA, 120 bp, Artificial Sequence
  ENSG00000260805_0 (sequence is synthesized)
tgagttccctgtgaggccctgatgttgtttacgatcacgtgttggccagggatcctggcctctggaaacttccattggcaacattagcacagtaggagggtttggagatcagtccacgaa

SEQ ID NO: 1033300 - DNA, 120 bp, Artificial Sequence
  ENSG00000260805_1 (sequence is synthesized)
tttaccacccagcgaaattaactggtttctagtcacaccactaatgacagtttagacacagtcaaaacggtgataaatggacctagttggcccaagctgatggattcataaataaatatt

SEQ ID NO: 1033301 - DNA, 120 bp, Artificial Sequence
  ENSG00000260805_2 (sequence is synthesized)
taaaccacagcctttctctgacagcagaggcatcagagagcagagacgctataagcaaagagttaaggagtcaagggccatagaaaactcttcctgacacttggttcaggctcagagggc

SEQ ID NO: 1033302 - DNA, 120 bp, Artificial Sequence
  ENSG00000260805_3 (sequence is synthesized)
aactgagatgtccatctggttaaccaaagagggcttccaggaggaggttctgggacttcaaagagcctccaactaggctcagttgttcttccgttttcatcatcatctcaacagtcaact

SEQ ID NO: 1033303 - DNA, 120 bp, Artificial Sequence
  ENSG00000260805_4 (sequence is synthesized)
ctcttaaagtataacacggtacaagatgggctctcagtctgcaggtgagtgagtggagtcgtttccccagatgtttcacgatcccaggcctggtccctttaaggcatcgaaactcagaac

SEQ ID NO: 1033304 - DNA, 120 bp, Artificial Sequence
  ENSG00000260805_5 (sequence is synthesized)
attctatcagctgcctcggcctccccgtggcgcgcttacgtcacccttcggggaagcggctgacgtcagcgcgttcttggcgagtggggcggggccggtgactcacccggaccgcgcccc

SEQ ID NO: 1033305 - DNA, 120 bp, Artificial Sequence
  ENSG00000260805_6 (sequence is synthesized)
ttgctccccgcccccgccgggccgcgcgcacgtgagcgcgcgctgcgcgggttgctaattttagctccggcggcttccctggggtcccgtgaggtgaaggggagtggaggggacgaggcg

SEQ ID NO: 1033306 - DNA, 120 bp, Artificial Sequence
  ENSG00000260805_7 (sequence is synthesized)
ggtgctggaacgcgggcgcttaccgaggcgagaacctagggggtctccccgcgtggaaaccccgcccctccctcggccttggacacagtcggcgctcaataaatgaatcgaagtttcttc

SEQ ID NO: 1033307 - DNA, 120 bp, Artificial Sequence
  ENSG00000260805_8 (sequence is synthesized)
ctggacggcgaccctgggctttcgggagaaagccagaggggcagggttctggaaggttccctggcggctggggtgcggtgcgggctgaaatccgagcaggagctgggcgcggccctcggg

SEQ ID NO: 1033308 - DNA, 120 bp, Artificial Sequence
  ENSG00000260805_9 (sequence is synthesized)
gaccgactatgggggacggcgccgcgggagtggggcaagtgcgggcctggacccttggggccaccgcgtcagcagtcggcggggccgtgggagggacggtgcccgcccgctgtgaagggc

SEQ ID NO: 1033309 - DNA, 120 bp, Artificial Sequence
  ENSG00000260805_10 (sequence is synthesized)
ggtggcccttctagggtcaggccaagcgcagaggcctgaaggtcaccgggtgaggagccagcgcgggtgcctcagaagccaagcgccccgtcccgagccctgcgcgaaccagtatgacct

SEQ ID NO: 1033310 - DNA, 120 bp, Artificial Sequence
  ENSG00000260805_11 (sequence is synthesized)
tccaggaaccagatgagagctgcgttttcaagaagcagtgccagacaccttgggaaatcgacactctcctgtccttgggtgggggtgggggtcctggaaagaagctccgtcagcgtaaag

SEQ ID NO: 1033311 - DNA, 120 bp, Artificial Sequence
  ENSG00000260805_12 (sequence is synthesized)
tgaactcttagctttgactttgcagagggatccgttgtgtcacagtgacccgcattcctgtcattggtgtggtgtgtttcacagccattgcctccctaggtagattgtaaaacggcgttc

SEQ ID NO: 1033312 - DNA, 120 bp, Artificial Sequence
  ENSG00000260805_13 (sequence is synthesized)
gtagagcctttgacctcataatattatgttggaaattacacgatagtaaacataatgataaatggggaatgttaaatggtagtatgggaacattttctaatggttgcatccttaaaattt

SEQ ID NO: 1033313 - DNA, 120 bp, Artificial Sequence
  ENSG00000260805_14 (sequence is synthesized)
tctgtttcaagtttttaaaggctatagccttaaaaaaagctgactgtaggaaaatggtggaaagagtcgtggaataaaggtagctttggggattatgacgtgaataaatgacagaaatta

SEQ ID NO: 1033314 - DNA, 120 bp, Artificial Sequence
  ENSG00000258602_0 (sequence is synthesized)
actgagactaaggtagaaaaagacacttccaaagggtgtcaatgacaagagagaaatagacatagagtggtcacttcatttaccaaccctggaaccgcagacctctgggcttcctggctc

SEQ ID NO: 1033315 - DNA, 120 bp, Artificial Sequence
  ENSG00000258602_1 (sequence is synthesized)
taggaatgcagtgcaagacaggcaaggttcttgctcatacagagcttctagaaacctgggatacagagatgcaatcaagtgataaaacacatggatgaaggctctgccattgaacacatg

SEQ ID NO: 1033316 - DNA, 120 bp, Artificial Sequence
  ENSG00000258602_2 (sequence is synthesized)
ttgaagtcagccatgagcaaggaagagattttccaggccaagcgaacagcctataaagaaaatgggtacggccaagaccatagacctagtgattgtcagatgaacaattagacccacaga

SEQ ID NO: 1033317 - DNA, 120 bp, Artificial Sequence
  ENSG00000258602_3 (sequence is synthesized)
accatccaagctacagaggacgcattctgccttcccttggatcctgtggtttgaggatggaggtctaggaccgtggcaggctttttgtcccatgagggaaggccatggagctgaggaagg

SEQ ID NO: 1033318 - DNA, 120 bp, Artificial Sequence
  ENSG00000229775_0 (sequence is synthesized)
aagagaaagtgttccacacatagaacagggggagacttgaatcctagagaaaacaaaacaaaacctaacaaaacagaaatgaacccttgatgaacctcttgctctggactggtgccctga

SEQ ID NO: 1033319 - DNA, 120 bp, Artificial Sequence
  ENSG00000229775_1 (sequence is synthesized)
aaatgaatgaaattgttttaaagattaccaagaagatataaaatatcaaatgcggcattaatgtaagaatcccctgaaaacatgctggtatttgaaaatcctgcattcccaggaagggtg

SEQ ID NO: 1033320 - DNA, 120 bp, Artificial Sequence
  ENSG00000229775_2 (sequence is synthesized)
tgcacatggaggatcctgacggtacctgactgtgtgcagatgcagcagcccaaactctgactctgaccctacttctgtatcttaagcccggtagatcccttgcaactatatgattcctct

SEQ ID NO: 1033321 - DNA, 120 bp, Artificial Sequence
  ENSG00000229775_3 (sequence is synthesized)
gtcatcagttggtgataatggtgccagagagggcagaattgtttcagaattcagagagaggatggcatgttaaaactggaagaaatattctagatcaagacccttattcagtagatgagg

SEQ ID NO: 1033322 - DNA, 120 bp, Artificial Sequence
  ENSG00000229775_4 (sequence is synthesized)
acaacgaaagtagagaaacagtgtgcccgacccaggtctggcttactgaaattcctggttgatgtctctgtgccccctattcctgcccacctctcccacttcccgagaatgtttagtcat

SEQ ID NO: 1033323 - DNA, 120 bp, Artificial Sequence
  ENSG00000229775_5 (sequence is synthesized)
gacccactttggtgaaaggagatgattctgtatcattaactgattaaataaaacaaattccaatacaacatttacttttctgtctgccaccccttggaggaaaatttcaagaagaaacaa

SEQ ID NO: 1033324 - DNA, 120 bp, Artificial Sequence
  ENSG00000229775_6 (sequence is synthesized)
aactaactagcaaactacatgttaagcattccaatattctgtttttaacaaaatattttagcattttaagaaaaagaatatgaggactttaacaaagaaaaactggacccccattgtatt

SEQ ID NO: 1033325 - DNA, 120 bp, Artificial Sequence
  ENSG00000229775_7 (sequence is synthesized)
ttaattttaacttttgatgagccacattgttctagctatattaatttgaatccatctggcttacacagagagacatttcaaatgctttccataatagcgggaaggaatgatctcatgagg

SEQ ID NO: 1033326 - DNA, 120 bp, Artificial Sequence
  ENSG00000229775_8 (sequence is synthesized)
aaaggattttttcatgctgctggattcttggaggcttttgctgagaatcatcatgtagggtgaggtggagcatcatgcatttatttaacaaatatgtattgagtaggtgacgtgccaggt

SEQ ID NO: 1033327 - DNA, 120 bp, Artificial Sequence
  ENSG00000229775_9 (sequence is synthesized)
accgtgtcagctactaggtttatgaaaatgagattcggaccttattctcaaggagcatagtatctagtaggaaatactagtatgttaattaattactaataaaagtcacagtaaatgtaa

SEQ ID NO: 1033328 - DNA, 120 bp, Artificial Sequence
  ENSG00000229775_10 (sequence is synthesized)
gggtgtacctgaaaaagagaagagaaaggagcagaaaaaaatattttaagaataatgagtgaaaactaaaaattgatgaaaaaatgatctgcacatcaaagaagcccattgaaccccaag

SEQ ID NO: 1033329 - DNA, 120 bp, Artificial Sequence
  ENSG00000229775_11 (sequence is synthesized)
taggatgaatgcaaaaagatctacccaggtatatcagagtaagaatgctgaaatctaaagacagaaaatactgcaagcagcaagtggaaaatgactttgcttggacacaggaaacttagt

SEQ ID NO: 1033330 - DNA, 120 bp, Artificial Sequence
  ENSG00000229775_12 (sequence is synthesized)
actgaaagaagaaataaaaaacaaaaaaaagctgtcaaccaagaattatacatccagcaaaactatctgtaaaaatgaagatgaaataaatatattctcagataacagaagcactgagaa

SEQ ID NO: 1033331 - DNA, 120 bp, Artificial Sequence
  ENSG00000229775_13 (sequence is synthesized)
aatatattcttagcagactcatcttacaaaaatacttagaaatttcgtcaggctgaaaatccaagcaaagtctatgttgccttcaccagtgttcagatacacctggctgctttctgaaaa

SEQ ID NO: 1033332 - DNA, 120 bp, Artificial Sequence
  ENSG00000229775_14 (sequence is synthesized)
gatggagaccatttttacccaacagcatcagctcagattcttgtgattataacacagcatgattgctgcttcatgccttctgccatgtgaggacacagtgagaagatggacaactatgaa

SEQ ID NO: 1033333 - DNA, 120 bp, Artificial Sequence
  ENSG00000229775_15 (sequence is synthesized)
agaaatgccacccctcatcctgaactccatgcactgaaacattcatcaccaccctcgccatcttttctatcagcctgttcaaaagttccagatggctcttcaatgactctgtcttcacat

SEQ ID NO: 1033334 - DNA, 120 bp, Artificial Sequence
  ENSG00000229775_16 (sequence is synthesized)
aatgaatgaaattgttttaaagattaccaagaagatataaaatatcaaatgcggcattaatgtatgtcaaaaagaggaaaaggtgaagatcaggaggcacaacattccaaggatataaaa

SEQ ID NO: 1033335 - DNA, 120 bp, Artificial Sequence
  ENSG00000261834_0 (sequence is synthesized)
atggaatttgggctgagctgggtttttcttgctgctattttaaaaggtaattcatggagaactaaggatattgagtgtgaggggacatgagatgtctctgtgtttgcaggtgtgcagtgt

SEQ ID NO: 1033336 - DNA, 120 bp, Artificial Sequence
  ENSG00000261834_1 (sequence is synthesized)
agactctcctgtgcagcctctgtattcaccttcagtaacagtgacataaactgggtcctctaggctccaggaaaggggctggagtgggtctcgggtattagttggaatggcggtaagacg

SEQ ID NO: 1033337 - DNA, 120 bp, Artificial Sequence
  ENSG00000261834_2 (sequence is synthesized)
cactatgtggactccgtgaagggccaattttccatctccagagacaattccagcaagtccctgtatctgcaaaagaacagacagagagccaaggacatggccgtgtattactgtgtgaga

SEQ ID NO: 1033338 - DNA, 120 bp, Artificial Sequence
  ENSG00000261837_0 (sequence is synthesized)
cctcatgtatcactgaaacaaccaactgaaaaccattgagaggctcatggtgaaagaagacagacagtgtaatttccctggaaactcaattttgattcagacgtccacagcatctcattt

SEQ ID NO: 1033339 - DNA, 120 bp, Artificial Sequence
  ENSG00000261837_1 (sequence is synthesized)
ctgcctttaaaaaatttcaagagtgacattttggcatgactggactcacaggtggagaagtgttgtcttttccctgcattgagatagcattgcatggagatccttgtactcttcgaacag

SEQ ID NO: 1033340 - DNA, 120 bp, Artificial Sequence
  ENSG00000261837_2 (sequence is synthesized)
ggtctctggaaacgccctctgtctgagtccgggagatggatgatatgggtaatgacttgctgctttatcttctctccatctccttacagcagctccaactactgacttttattgtgtggc

SEQ ID NO: 1033341 - DNA, 120 bp, Artificial Sequence
  ENSG00000261837_3 (sequence is synthesized)
agctaattgtaggattctatttctgtaaagagaaggcaagagaggaatgcagtgtccaccatccctgcagccctttggcgccttccccctcccattaccttgaagtagagggaaagggga

SEQ ID NO: 1033342 - DNA, 120 bp, Artificial Sequence
  ENSG00000261837_4 (sequence is synthesized)
cgacagaagaacccttagaagtaagactttttctgtctctgatgccacggacctttgaaatatttttttgaaaagaaggcctcccttggctgataccttctgactgttagtgaataaagg

SEQ ID NO: 1033343 - DNA, 120 bp, Artificial Sequence
  ENSG00000250723_0 (sequence is synthesized)
acactgataaactctccctttcccaaactcatcttcaacccccttgcactgcctgtttaattcagcgtcatcagaaaataaccccaaatgtcttgcactcctggcttctgctgatagagg

SEQ ID NO: 1033344 - DNA, 120 bp, Artificial Sequence
  ENSG00000250723_1 (sequence is synthesized)
agaaagggcttaagaccctgaaaaaaaaaatttataggaaaatttccccaaaaggtaagcacaataaaaagtcaaaaggaggtacgggctgaagaatgacttcctgcaatgtgtaatttc

SEQ ID NO: 1033345 - DNA, 120 bp, Artificial Sequence
  ENSG00000250723_2 (sequence is synthesized)
aaggccttggcaaccacctttctactttccaattctataatttttaaccactttagatacttcattattcctgtatcctggagaaggcagcactcgagccaccatcttggaagtgaagat

SEQ ID NO: 1033346 - DNA, 120 bp, Artificial Sequence
  ENSG00000250723_3 (sequence is synthesized)
tgccatgatcttggatttttcaacctgcaggactattcaatgaaattccaatgaaaatctcaagttattatgtgaatattgaaaaacgaaccctaaagtttatatggagagccaaaaaat

SEQ ID NO: 1033347 - DNA, 120 bp, Artificial Sequence
  ENSG00000250723_4 (sequence is synthesized)
gcaaaagagccagcacatattgaaagagaagaacaaagtcagaagattgacactacctgacttcaagacttatgataaagcttcagtaataaagacagtgtggtatggacaaactaatag

SEQ ID NO: 1033348 - DNA, 120 bp, Artificial Sequence
  ENSG00000250723_5 (sequence is synthesized)
aaatacagatcaatggaacagaacagagaacccagaaatagattcacataaatatattgtcaactgacctttgacaaataagaaaaagcaatacagtagagcaaaaatagccttttcact

SEQ ID NO: 1033349 - DNA, 120 bp, Artificial Sequence
  ENSG00000250723_6 (sequence is synthesized)
aaacaaatgaacatccacattcaaaaaaaaaaaatgaatctagatggagacttacatgcttcacaaaaattaactcaaaatgaataataaacctaaatgtaaaacacaaaacaataaaaa

SEQ ID NO: 1033350 - DNA, 120 bp, Artificial Sequence
  ENSG00000250723_7 (sequence is synthesized)
agcataattcttgaagggttaatttacaaatggatgccttagggttggggtagagataccacaaaggatagtgaagtaacctgtcacttcctagcagccatttccttaccacaagcacat

SEQ ID NO: 1033351 - DNA, 120 bp, Artificial Sequence
  ENSG00000250723_8 (sequence is synthesized)
ctgaaggagatcaaaatcagaagcaaaacatcctgtacggtctgtgctttgtttgaatcagtggttaaagatgtagctactcacagggaagaagcaagatgaattagtatattggtctaa

SEQ ID NO: 1033352 - DNA, 120 bp, Artificial Sequence
  ENSG00000250723_9 (sequence is synthesized)
atgatgtaaacttgcaccttaaagaggagtagaatttgaacatacagacacaggataaatattttaagttgaaaaaatgttatgcagaaaattatagttataagaaagtattaggctcat

SEQ ID NO: 1033353 - DNA, 120 bp, Artificial Sequence
  ENSG00000250723_10 (sequence is synthesized)
gttaaagagtttagacattatttagagtatggatttcaatggatttctttttcaaccaagaatgaatgctacatgagacctgtgtatcaagtgttatccccttttgggtgttttccctgg

SEQ ID NO: 1033354 - DNA, 120 bp, Artificial Sequence
  ENSG00000250723_11 (sequence is synthesized)
tctttctttcttcaaggtaaacttaagttaaatttttaggtttattttagcagtatatacttctatctatcataacatttacccatgatactataattatctgtttgcctacgagattct

SEQ ID NO: 1033355 - DNA, 120 bp, Artificial Sequence
  ENSG00000250723_12 (sequence is synthesized)
accactgctaaaaagcaaagattaatctttacttatctctaatttccaagtattgtgtgcagcactcagtatattgcagaattcaatatattttaattaaattgagaatctatctatata

SEQ ID NO: 1033356 - DNA, 120 bp, Artificial Sequence
  ENSG00000250723_13 (sequence is synthesized)
taagatgattattaaaaacaacagaagtgtgaaagaattggggtgagaagaaaaagtttcatccctagatggtgacttttactattctctagtctaccagtgtggacagtggtagctgaa

SEQ ID NO: 1033357 - DNA, 120 bp, Artificial Sequence
  ENSG00000250723_14 (sequence is synthesized)
gtgagccaggaaaatactcatgcaggaaagaaataaggatgaccaaattcagatataaagaagttgaaaagagagtgacttggtcaggatagtttgctatacaaattaaaaaaaaaaaaa

SEQ ID NO: 1033358 - DNA, 90 bp, Artificial Sequence
  ENSG00000250723_15 (sequence is synthesized)
gaggctgaggtgggaggatcacttgagcagggaagtggaggtcgcagggagaagagattgtgccactgcactccaacctctacaaacaaa

SEQ ID NO: 1033359 - DNA, 120 bp, Artificial Sequence
  ENSG00000250723_16 (sequence is synthesized)
gtgagaccttgtctcaaaaacaaacaaacagagcaaaaattggcttgcaagagtggattcattgatctttcacttcttccatgtgaggaacagtattcctgtatcctggagaaggcagca

SEQ ID NO: 1033360 - DNA, 120 bp, Artificial Sequence
  ENSG00000250723_17 (sequence is synthesized)
cctatacatcttcttgggagagaactgtgcaacttaaaggctaccttattttgtactgtgaatgtctctggagctccttgggaaaaaagttatctgatttagctactatgtgccttttga

SEQ ID NO: 1033361 - DNA, 120 bp, Artificial Sequence
  ENSG00000250723_18 (sequence is synthesized)
aagaaaagggctatgtaagaagacagcagtctcacactgtgccagaaaaacactccaaactgaaaatgaaaacaaagtttcacttttggctctagtgatacttgttgtacttgctataga

SEQ ID NO: 1033362 - DNA, 120 bp, Artificial Sequence
  ENSG00000250723_19 (sequence is synthesized)
tccttcgcagctcctgttaaaggctcaccattagctgaggccatttagaagtcagaggacccagaagacataatggacgttaaaaaaggttcttgccaggccattaaattttgagttcca

SEQ ID NO: 1033363 - DNA, 120 bp, Artificial Sequence
  ENSG00000250723_20 (sequence is synthesized)
gagtgtgaatgtcctacaaggtttatgagaaagttcagaaggaaagtaaagaaagactaagcagcaagacttttagtattcctgtatcctggagaaggcagcactcgagccaccatcttg

SEQ ID NO: 1033364 - DNA, 120 bp, Artificial Sequence
  ENSG00000250723_21 (sequence is synthesized)
ctttagatacttcatgtaagtgaaagcatacagtattgttcttttgtgactggcttagttcacttagcataatgtccttgaggtttatttttgtggcagcctgtgcttcttttgaagtct

SEQ ID NO: 1033365 - DNA, 120 bp, Artificial Sequence
  ENSG00000250723_22 (sequence is synthesized)
gcgagattctccattgtatgtatataccacattttctttatccagtcattggtcaatgaacattttggttgcttttacctctcggctattgtgaataatgctgcaagaacatggatcttc

SEQ ID NO: 1033366 - DNA, 120 bp, Artificial Sequence
  ENSG00000250723_23 (sequence is synthesized)
aaatatgacttcaagattctgctctgaattctttttgatatagacacaaaagtcggattgctcggtcatattgttaataccattttaattttttgtggaacctccattctgtttccctta

SEQ ID NO: 1033367 - DNA, 120 bp, Artificial Sequence
  ENSG00000250723_24 (sequence is synthesized)
atggctgtatcattttacattcccatcagtggtgctcatgggttccaatttctctgtatccttgctaatacttgctacattctgttactttgataatggccctcctaagtaaggtgtgtg

SEQ ID NO: 1033368 - DNA, 120 bp, Artificial Sequence
  ENSG00000250723_25 (sequence is synthesized)
atttttatatgcttggtgactatttgtagatcttctttggagaataacatattcaagtcttttgcccaattttaaaactggatagcttatgacatttttatctaagaaaaaattggcagt

SEQ ID NO: 1033369 - DNA, 120 bp, Artificial Sequence
  ENSG00000250723_26 (sequence is synthesized)
tgtgccaaaggccgattctcatggggaatgaagtcactttctgaaaggaagtttgtagagcatatgcggcagctgttccctcctcttgctacctcactctctataaattcaaaaggcatc

SEQ ID NO: 1033370 - DNA, 120 bp, Artificial Sequence
  ENSG00000250723_27 (sequence is synthesized)
tagaatttctgcagcaaattttttgaaggatagctaagacttttgaaggactggttatgaacgagccacaaaagtgtcttgtgaatgttcaaattatcctagtcttaccttcagactcgg

SEQ ID NO: 1033371 - DNA, 74 bp, Artificial Sequence
  ENSG00000250723_28 (sequence is synthesized)
gtgaatgttcaaattatcctagtcttaccttcagactcgggcaaactgctatataaaattaacttgtttttctg

SEQ ID NO: 1033372 - DNA, 67 bp, Artificial Sequence
  ENSG00000250723_29 (sequence is synthesized)
actaccgcgccgggccttttctgtttattttaatgtaaaacatgcaaaatgcattctaacagccacc

SEQ ID NO: 1033373 - DNA, 120 bp, Artificial Sequence
  ENSG00000250723_30 (sequence is synthesized)
ttttaatgtaaaacatgcaaaatgcattctaacagccacctctgccattggcaattattacttcaattgtatttcaaaatatcaaacctataaatataccattagaaatgaagaatctta

SEQ ID NO: 1033374 - DNA, 120 bp, Artificial Sequence
  ENSG00000250723_31 (sequence is synthesized)
taaactggacttcaatgaaattaaaatttctgttctgcataagacaatgtctagataacaagaaaacaaggcacagactgggaaggcatatttggaaaagacacatatgatagaggacag

SEQ ID NO: 1033375 - DNA, 120 bp, Artificial Sequence
  ENSG00000250723_32 (sequence is synthesized)
ttatctaaaatatatcatgcacccttaaagttcaacaataatcaaacaatctgactgacaaatgggctgaagaccttaagagacactttacttaaagaagattatacagatgggaaataa

SEQ ID NO: 1033376 - DNA, 120 bp, Artificial Sequence
  ENSG00000250723_33 (sequence is synthesized)
tgtggaccaggaaatttcatctacaaaaaggtattccagaaagaaaatgcagtcaccatgttgggaagaagtctttcaagtgctactgatcactcgtttggctatcagagattaaaacaa

SEQ ID NO: 1033377 - DNA, 120 bp, Artificial Sequence
  ENSG00000250723_34 (sequence is synthesized)
aataaaacaaaaaccaaaaccaaaacaaaagagaaacagctcagctggagtcatgcttcccacgtggagacagcacccggggaagacttgactgtggttctcacaaggccttgaaattta

SEQ ID NO: 1033378 - DNA, 120 bp, Artificial Sequence
  ENSG00000250723_35 (sequence is synthesized)
agttttcaagagtaactgagcttcgtattgaattcagataaagaggtaatctagagaacatattacattttagatggtcttgctgtcttatttccagtaggtttattttgactactttaa

SEQ ID NO: 1033379 - DNA, 120 bp, Artificial Sequence
  ENSG00000250723_36 (sequence is synthesized)
gaattatattttactaggaatcaaaagttatttgctacatgaccttttctttctgtactcccagtaatggttctcacaatcccctttccagttagctcaaattgtcctcccagcagaaac

SEQ ID NO: 1033380 - DNA, 120 bp, Artificial Sequence
  ENSG00000250723_37 (sequence is synthesized)
aggacctggaattgtataaccaacagttttattattgaaagagtaaaggtgagaccatcttcattataattgttgataacaaaataaaactaatatgcatccaagtactcaagcctggct

SEQ ID NO: 1033381 - DNA, 120 bp, Artificial Sequence
  ENSG00000250723_38 (sequence is synthesized)
gtggtttgaatgtgtccccaaattccatgtgtcagaaatttaattcccaaatttatgtgttgttgctatttggaggtagggcctttgggatgtagtgatagatgatgtcataagagtagg

SEQ ID NO: 1033382 - DNA, 120 bp, Artificial Sequence
  ENSG00000250723_39 (sequence is synthesized)
gcccccgtgatgagattagtggccttataagaaagggaggagaaatatgagccatatggtgctttctgccatgttatgatgacctcaccagcacgatgacttcaccagatgtagctcctc

SEQ ID NO: 1033383 - DNA, 120 bp, Artificial Sequence
  ENSG00000250723_40 (sequence is synthesized)
aaccttagacttctcagtccccagaaatgtaagaaatagttttcttcataaattaccccatcttagtattctgctatctcaacacacaatggactaagacaagtcctacttgtaaaacaa

SEQ ID NO: 1033384 - DNA, 120 bp, Artificial Sequence
  ENSG00000250723_41 (sequence is synthesized)
acaaaaacaattaattggcttaatcgaaaacataaacattccagctaatagaaaaatagaaacttggcattgtaagatagagactacaaaaaacaggtctactgttacttagttaacttt

SEQ ID NO: 1033385 - DNA, 120 bp, Artificial Sequence
  ENSG00000250723_42 (sequence is synthesized)
taaattgatacatgaaactgaatttctatcattcatgaatattttgttgactattataacatagagctattggtttagatcccattctggaaaaaaaaattacgcataggctaggtttgt

SEQ ID NO: 1033386 - DNA, 120 bp, Artificial Sequence
  ENSG00000250723_43 (sequence is synthesized)
cttcaagacttaaaataataatagttatatacattaaaccctcaaagtttaatctgtgcctttcagtttgtaccttataataagactttttgtttgtttgtttttgtttttgagacagag

SEQ ID NO: 1033387 - DNA, 120 bp, Artificial Sequence
  ENSG00000250723_44 (sequence is synthesized)
gggattacatgcatgagccactgcgcccggccaagacttttatattagatgatgaccatggatgttactgaattgcaaaactgagaaaagctatttaggaagattgaataattactaaaa

SEQ ID NO: 1033388 - DNA, 120 bp, Artificial Sequence
  ENSG00000250723_45 (sequence is synthesized)
ggcctatgtagtcatgtgctgcatcacaacattttgttcaacaatggatcatattacaatggtggtctcataagattataatgtatttttcatgtactttttctatatttagatatggtt

SEQ ID NO: 1033389 - DNA, 120 bp, Artificial Sequence
  ENSG00000250723_46 (sequence is synthesized)
atttttcatgtactttttctatatttagatatggttagatacacaaataccattgtgttatagttgcctacagtatctggtaacatgtacagctttgtagcctaggagcaataggctata

SEQ ID NO: 1033390 - DNA, 120 bp, Artificial Sequence
  ENSG00000250723_47 (sequence is synthesized)
atgtaagtacattacatcctatgacgatctcacaacaatgaaaaggtgtatgtaatcggttgtgtctgtttggctatataaaagggtgagattcctttctgtctgcattctctttagtgg

SEQ ID NO: 1033391 - DNA, 120 bp, Artificial Sequence
  ENSG00000250723_48 (sequence is synthesized)
attgcctgtgatgtgcatcacatcctggtttcatgcttattcaataataaaattgctttttttctcttttacccctgtagagaggttttcagggttggaataagactgttttaattatat

SEQ ID NO: 1033392 - DNA, 120 bp, Artificial Sequence
  ENSG00000250723_49 (sequence is synthesized)
tttctcaacaaaacctaagttgctttaggataacaaaggtagctttctgatgttcacccatccttgatattgggaagttagatattttatgttctactcaaaaatatttgcaaatctaaa

SEQ ID NO: 1033393 - DNA, 120 bp, Artificial Sequence
  ENSG00000250723_50 (sequence is synthesized)
aacgtactatagagtgatatagagtgaataccttatgctctatgaatataaatatgaatatgaaagaatgtttttattattgaagatgatatttctcaaagccaaaatgtaatttttcct

SEQ ID NO: 1033394 - DNA, 120 bp, Artificial Sequence
  ENSG00000250723_51 (sequence is synthesized)
ttattaaaggattttaaaattactaaaatgtactaccagtatgcttcctattttcaacaaattaaattatggaaggacatagttgattgtaaacttggaaaaagattcatttgaattgaa

SEQ ID NO: 1033395 - DNA, 90 bp, Artificial Sequence
  ENSG00000261838_0 (sequence is synthesized)
gcaggtggatcacgaccggtcacaggaacctcaagtatttcacagaatgatgccaaggagcgcagtttctacaccatccctcccgatcag

SEQ ID NO: 1033396 - DNA, 120 bp, Artificial Sequence
  ENSG00000261838_1 (sequence is synthesized)
ccatccctcccgatcagaccacatctattccaatctcagtctcaaactcttcccctttttcaactcacattaatgaattcactaagtacctagcactgagaataaaaagctaaagcagca

SEQ ID NO: 1033397 - DNA, 120 bp, Artificial Sequence
  ENSG00000261838_2 (sequence is synthesized)
gtgaataggtaacgtcctccttcagttctctcttctcctcccacaatgaccctgggggtcagatgttgagttagcggcaccacagaatggaagaagcctagattttgactcacagctttg

SEQ ID NO: 1033398 - DNA, 120 bp, Artificial Sequence
  ENSG00000261838_3 (sequence is synthesized)
acttaatgactccagccatgagatctgaggaactgcttgttgctacaccagtctgtcctatacaggtcacaggaacctcaagtatttcacagaatgatgccaaggagcgcagtttctaca

SEQ ID NO: 1033399 - DNA, 120 bp, Artificial Sequence
  ENSG00000261839_0 (sequence is synthesized)
agaggtcgcgagagaactgaaaaaggggaccggcctttcccggctgcctaagcacttgggttccggcctggaaggaggcccagggctcccacaaagagaaataagggacctatttggatg

SEQ ID NO: 1033400 - DNA, 120 bp, Artificial Sequence
  ENSG00000261839_1 (sequence is synthesized)
gatcccaagaaacactgtctggcatctgatttgaacgaggctcggcgcagccgggcccttttcgcaaagtaggcccactgcagacctgtgggaacctccgggatgcctggggacccgcat

SEQ ID NO: 1033401 - DNA, 120 bp, Artificial Sequence
  ENSG00000261839_2 (sequence is synthesized)
ctgccgctacccgcaatttcctatcccgaccctctctgcagttgtcgaccccggccggcggctttgagcgtggggtcccgcagaccctggcacctagggggccgaagccgagggatcttg

SEQ ID NO: 1033402 - DNA, 120 bp, Artificial Sequence
  ENSG00000261839_3 (sequence is synthesized)
gggtagaagagcggtcctacagagctgccgcttcgaaagagcccccaatcgaccgctgatggggaatggaggattttgctgttttattgcagcccgcccccggagaaaggcgggctcgga

SEQ ID NO: 1033403 - DNA, 120 bp, Artificial Sequence
  ENSG00000261839_4 (sequence is synthesized)
cgttcttgactttaggatagactggggaggggtgccgaggagcgttcttccctttacgtctcgcggtcgcagactgtatttgctggtgccctgctcactgtgatctcgcaggaccttgcg

SEQ ID NO: 1033404 - DNA, 120 bp, Artificial Sequence
  ENSG00000261839_5 (sequence is synthesized)
gacttacggagacgaaaagtggcctactttgagcttctctgatccttaggggaaatgagtgtccaaagagaaataggtgcagagtgccggcactagaattctttaaacctggattcaaat

SEQ ID NO: 1033405 - DNA, 120 bp, Artificial Sequence
  ENSG00000261839_6 (sequence is synthesized)
tctgactccaccactctccagttaggactgagggcaatttatttttaacttctccaagcctctgtttactcgtttatgtaactcaggctaataacgtagtgtctatttcatagggtggct

SEQ ID NO: 1033406 - DNA, 120 bp, Artificial Sequence
  ENSG00000261839_7 (sequence is synthesized)
ttgactattaagtgtgagagtgcatgtaagaacagtctaagggaatttccctgcctttccccttgtctgctgtcactctcatccgtgttagacaaatggaattaattaaccaacttccgc

SEQ ID NO: 1033407 - DNA, 120 bp, Artificial Sequence
  ENSG00000261839_8 (sequence is synthesized)
ttttctgaagcacgggtaaagagtgaagtgcaggacttgggtaaaggaaaaaccaagaaggatgcaaaagatggatggtcattgtgagatccacagaggtgctcatcccagcactttcac

SEQ ID NO: 1033408 - DNA, 120 bp, Artificial Sequence
  ENSG00000261839_9 (sequence is synthesized)
ctcacttggcatctgtcacatggtgggtgcttgataagtacatgggtgaatgaggacctacctaagcagaaggaattattgaataagactagaattgcagggagaggatgaatcagattg

SEQ ID NO: 1033409 - DNA, 120 bp, Artificial Sequence
  ENSG00000261839_10 (sequence is synthesized)
attagctacttgacaaaaaaaggcaaaccactcttcctgtcagaaatgtatggcacatctgcatatttcaagggctgccacttactgcaactgggaaggagatctcagaaccgacacctc

SEQ ID NO: 1033410 - DNA, 120 bp, Artificial Sequence
  ENSG00000261839_11 (sequence is synthesized)
tgcaaaatcgaataataaagtcttgagagggggttattagaataatagacgagtgtttagattgagtagtgagcaatgagataagtcctttgacttgggggtacaggggaattatgacca

SEQ ID NO: 1033411 - DNA, 120 bp, Artificial Sequence
  ENSG00000261839_12 (sequence is synthesized)
ggggtatgggatagggagaaggtcattctggaaggcaataaaaggcagacaggacgctagtggtagaaaaaaaggaaaacacttgtttatcaatgtaaatcaatggcggaagaattacat

SEQ ID NO: 1033412 - DNA, 120 bp, Artificial Sequence
  ENSG00000261839_13 (sequence is synthesized)
atgacatatgctattgaggaatacctttcaaccgttcaaatgacaaaaggagtgtcagaacaatatatattccatttttgttgaaaaaatttgtttatatagatataatttgtggggtat

SEQ ID NO: 1033413 - DNA, 120 bp, Artificial Sequence
  ENSG00000261839_14 (sequence is synthesized)
ttgtacaagaaaaggatgcactccaaacttaacagtgattaccccatattgaaaattgtgaaacttttaccctacttgcaagctaacaatttaacttgccacagttttatggatactaac

SEQ ID NO: 1033414 - DNA, 120 bp, Artificial Sequence
  ENSG00000261839_15 (sequence is synthesized)
agaagacactggactcctgcgtcagagacagaagactttattacttaataacacaggcatcataagctttatattcccttgttcccaaagcttatgttcccaaagcccacagaggggcct

SEQ ID NO: 1033415 - DNA, 120 bp, Artificial Sequence
  ENSG00000261839_16 (sequence is synthesized)
aagcttggcattcccctgctaggatggaacagtgggtttgcaacctagcagaggaatgccaagcttaggaagcccaacctttgctcagccttgccccagaatgagccattatctttatta

SEQ ID NO: 1033416 - DNA, 120 bp, Artificial Sequence
  ENSG00000261839_17 (sequence is synthesized)
tcctggtcaggaaacaactgtgatctagaaggagatacaaacatccttgaaaacctaacctcaaagaaaaatctaccataagactaggagtaatttgagaagccattaaagaattatctc

SEQ ID NO: 1033417 - DNA, 120 bp, Artificial Sequence
  ENSG00000261839_18 (sequence is synthesized)
ccaacattctaggtaaatactatttgagggtggagatgtcagcttttaagaattttatataatattaatctttatcatgtttcatttatttttaaaaatacaaaaaataaaaggcaagca

SEQ ID NO: 1033418 - DNA, 120 bp, Artificial Sequence
  ENSG00000261839_19 (sequence is synthesized)
tagaagtttaaattttacttagagataaggaaccactcagggtcagtgattggaagaatgataatgatatttaaggaccacgtcttgtatagttaggaaggctatctcaaggctgttgca

SEQ ID NO: 1033419 - DNA, 120 bp, Artificial Sequence
  ENSG00000261839_20 (sequence is synthesized)
gtcacataggtgtgaagtaattagaactgaggatggtggttatattaatggagaaaagtaacacttcaaaggagaaatctggctctgataatttctcctttatctccatgtttcattgag

SEQ ID NO: 1033420 - DNA, 120 bp, Artificial Sequence
  ENSG00000261839_21 (sequence is synthesized)
taaactaaggaagcctctcaagcctgaataacttagaaattggcgatattatcaaccattctaacggatatgtggtggtaactcattgaggttttaactttgcatttccctgatgaataa

SEQ ID NO: 1033421 - DNA, 120 bp, Artificial Sequence
  ENSG00000261839_22 (sequence is synthesized)
tggttactttttagtgtgcatactggccattcttttatcttttgtaaagaaagtgtttaaatcttttgcctattggtgttgaattatcttattcattaaattgtgagagttctttatata

SEQ ID NO: 1033422 - DNA, 120 bp, Artificial Sequence
  ENSG00000258535_0 (sequence is synthesized)
gatatttccgttgaaccgtttggagtttaagctgaaaatattaacgaatgtatctaaagttcactttgccttgactttatgcatccatcacatagagatcacgcagcgggcacccactat

SEQ ID NO: 1033423 - DNA, 120 bp, Artificial Sequence
  ENSG00000258535_1 (sequence is synthesized)
gggtttcatcatcgctcacttcccttggatcaactagaaatcaactcagatgagagtgctgagtctcagaggatggacgtctcactccttgccatacagataagtagaaagggtggtatt

SEQ ID NO: 1033424 - DNA, 120 bp, Artificial Sequence
  ENSG00000258535_2 (sequence is synthesized)
gaaattaatggccagactctaagtcccgggcactatacttgatggtctcccaaccctcaaaatgttgtgggttcttttttgtttttgagacggagtctcattctgtttcccaggctggag

SEQ ID NO: 1033425 - DNA, 82 bp, Artificial Sequence
  ENSG00000258535_3 (sequence is synthesized)
gccgagtagctgagatttcaggcgcccgccactacgcctggcttatttttttctctttttaggagagacggggtttcaccgt

SEQ ID NO: 1033426 - DNA, 120 bp, Artificial Sequence
  ENSG00000258535_4 (sequence is synthesized)
gcccagcttcaaaagttttcaacagagctcagaggtcttaaccacaggcacatccgaggagcatttttgaaatggtttccagcttcctcaataggaatggaagccaaacccggaactgat

SEQ ID NO: 1033427 - DNA, 89 bp, Artificial Sequence
  ENSG00000258535_5 (sequence is synthesized)
tcccgaatgatcctgtgccaattctttctggaatctttgatgtgatctccgctgccctttccatacttgacacagtgattgtggcaccc

SEQ ID NO: 1033428 - DNA, 120 bp, Artificial Sequence
  ENSG00000258535_6 (sequence is synthesized)
ggactggccaaatgccatgtgtctggcttagactaccttgttcaaattgggcttcaccatttttgacttcgtgatctggtacaagttatatgaaaatgtgttgctccttttctagtctgt

SEQ ID NO: 1033429 - DNA, 120 bp, Artificial Sequence
  ENSG00000258535_7 (sequence is synthesized)
tgtgttgctccttttctagtctgtaaaatcataaggaaatgtgcactaataactgggagactatgcagatgaaatgaaacaagctgcatagaacacagagctcagagcctggcctttagg

SEQ ID NO: 1033430 - DNA, 120 bp, Artificial Sequence
  ENSG00000258535_8 (sequence is synthesized)
cctctttatcctcatcatcaccttcatcatctttttgttgttctgagggcatactttagagggactcattccctgctctcatgggtgagatgtctatgaagaggacaaccagtgggggag

SEQ ID NO: 1033431 - DNA, 120 bp, Artificial Sequence
  ENSG00000258535_9 (sequence is synthesized)
atgggtgagatgtctatgaagaggacaaccagtgggggagggaagcaaaattttgaagaagattcctgagagagatcccccaccacaaccaagaacagaaactccacagtctgctgagct

SEQ ID NO: 1033432 - DNA, 120 bp, Artificial Sequence
  ENSG00000258535_10 (sequence is synthesized)
gacagtttgcacattggtctcctcccatctgcccacggcactctcccgtttgtcctgaagatgaggaaacaaacaaggctcccgaccgtccctcagcactcactgaacggcccttcccct

SEQ ID NO: 1033433 - DNA, 75 bp, Artificial Sequence
  ENSG00000258535_11 (sequence is synthesized)
acggagaacaggtccactgtcctccctgagtggtgcacatgggaggctcagactccgtcctcaaggctggtgtgg

SEQ ID NO: 1033434 - DNA, 88 bp, Artificial Sequence
  ENSG00000258535_12 (sequence is synthesized)
ctattctatggcctggggggctcaaggcacagagctcctcattagccagagtcgcccatgttccccatgctctaaggatttcctcatc

SEQ ID NO: 1033435 - DNA, 120 bp, Artificial Sequence
  ENSG00000258535_13 (sequence is synthesized)
gagtcgcccatgttccccatgctctaaggatttcctcatcatcatgcaagaagaagaatagaaaaaaggaagaggaagaaacaaaaggaacttctctcttagatttaattctgacctacc

SEQ ID NO: 1033436 - DNA, 120 bp, Artificial Sequence
  ENSG00000258535_14 (sequence is synthesized)
aggaagaactggattgttgaagcagaagtactggagtctctggagctaaaaccaaggataagaacattaagattatcctgctggagagagaggccatgcggaagaaccctggaaaatgag

SEQ ID NO: 1033437 - DNA, 120 bp, Artificial Sequence
  ENSG00000258535_15 (sequence is synthesized)
acagctcacagagcaagaggccatgtggagaaggcctagaagtaaaatgcctcatggaacaagaggccacatgcagaaggcctggaggatgagacgccctgtgaagtgagaggccacgtg

SEQ ID NO: 1033438 - DNA, 120 bp, Artificial Sequence
  ENSG00000258535_16 (sequence is synthesized)
gagaaggcctagaggaggagacaccttatggagcaagaggccgaatggagaagccccagagggttagacaccttgtggagcaagaggtcacacgcagaagtcctgggagtgagatgcctc

SEQ ID NO: 1033439 - DNA, 120 bp, Artificial Sequence
  ENSG00000258535_17 (sequence is synthesized)
acgaagcgagatgcctcgtgaagcgagatgcctcgtggagtgagaggccatgtggaagaaccctggaactcagcggctgataacacaaagatcccatggtgtgagagaggccttcatgaa

SEQ ID NO: 1033440 - DNA, 120 bp, Artificial Sequence
  ENSG00000258535_18 (sequence is synthesized)
cttcccgtccagcccagctagagccaaatggagccatatgtgtgaccgcaagtgacatctacaaaagaacgacccagtcaccctgagaattgttagaaatgcaaagcactaagttttggg

SEQ ID NO: 1033441 - DNA, 120 bp, Artificial Sequence
  ENSG00000258535_19 (sequence is synthesized)
gtagtttgttacacagcaatagctaactgatacagatggtttgaattacttgactttaaagttccttcttaccctgaaagtttatggcttagtaaagtgaattaagcacatttgactgaa

SEQ ID NO: 1033442 - DNA, 120 bp, Artificial Sequence
  ENSG00000258535_20 (sequence is synthesized)
acagagagatggtgtaggaaaagatcagaaggtaagggcagggcaaggtgaggaaggctttccgtgccacgataaggaatttgagctttaactggtaggttctgaagctgtcccaggagg

SEQ ID NO: 1033443 - DNA, 120 bp, Artificial Sequence
  ENSG00000258535_21 (sequence is synthesized)
aagtgacatgagaagatagttttttaggaagacccacactgcagcagcatgtagatcagacacgtgggcacacagagcagatgtgagagagaaggaggcatggagacctgattgctgagg

SEQ ID NO: 1033444 - DNA, 120 bp, Artificial Sequence
  ENSG00000258535_22 (sequence is synthesized)
cttctctgtatcaactcttcattttttccaactatgatgtttttactttcaaaaatccatgggagaatacatggtatgtcgttaaaagcctgggatttgaaataagaaagccttagcttt

SEQ ID NO: 1033445 - DNA, 120 bp, Artificial Sequence
  ENSG00000258535_23 (sequence is synthesized)
aaaccccttctctcaccttctagctgtgtaactctgggcaagttactgaaccttgctgtatcgcagcttcttcatttgtaaaatggatataatgatatttgtctcacaggagtaatgcaa

SEQ ID NO: 1033446 - DNA, 120 bp, Artificial Sequence
  ENSG00000258535_24 (sequence is synthesized)
agataaaaacggattatgtctcatgcatttacttttactaaatggctaaatgctcaagcaacacaaatacatgattatttctctttcacgtaacagtccaggttgggagtgtcaggttga

SEQ ID NO: 1033447 - DNA, 120 bp, Artificial Sequence
  ENSG00000258535_25 (sequence is synthesized)
ggggtggatctttttcacatcttcttgaaagaattcgtggtaaaagctgtcttcagtttatgccttccaaggttcttttggccatcgccattccagaaagaagaggagaagagagcatga

SEQ ID NO: 1033448 - DNA, 120 bp, Artificial Sequence
  ENSG00000258535_26 (sequence is synthesized)
aggagcccgcctaacatgttttatctggcttctcagaaatggcacatgcttctacttgcattccattggcaagaacacacggcacaccagctgcccacggggatagggaatcccagctag

SEQ ID NO: 1033449 - DNA, 120 bp, Artificial Sequence
  ENSG00000258535_27 (sequence is synthesized)
aattccatccaatagaagacagaggggagagaagagcagggtattgatattttagatctgcagttgattgactccacaaatgtgaaactggtggaaacagggccagctgttttcgacaga

SEQ ID NO: 1033450 - DNA, 120 bp, Artificial Sequence
  ENSG00000258535_28 (sequence is synthesized)
tatcctctctttgaggaaaaatggcttgatcttttgtccaaggaagttagaaaactgtatccacgcaattcatccatttattcctcaagcatgtgttaagcgtttggcgatgcttcacga

SEQ ID NO: 1033451 - DNA, 120 bp, Artificial Sequence
  ENSG00000258535_29 (sequence is synthesized)
tgttggactctggacattcacagaagatgaacacatctcacaaaagtgacctcagacaggctgctccaagtctccctggaccacctgcgtagttcagccatattctacagtgagcactta

SEQ ID NO: 1033452 - DNA, 120 bp, Artificial Sequence
  ENSG00000258535_30 (sequence is synthesized)
ggacatgcaggggctacacaggcatcaaggctggctgattccacagagcaagaatgtcaacaaggatccagcttatttttgcctcttcaccccaccatcttttatgtcagcctcgtcctc

SEQ ID NO: 1033453 - DNA, 120 bp, Artificial Sequence
  ENSG00000258535_31 (sequence is synthesized)
agggaagtaggatgcaacagttccagctggacacgacaatactcacaggaagacgaaagagactcttattgctgctgtatcgtgggaaccttgtccccgatgcccatcagggtcaactat

SEQ ID NO: 1033454 - DNA, 120 bp, Artificial Sequence
  ENSG00000258535_32 (sequence is synthesized)
ttacatgggaaggaaaaacataccccgcaactacaacctgatgtcagtaccaagagcagtatgcaaacgactattacgggcgctcagaagcatcacaatggaagggaagttgcagctgcc

SEQ ID NO: 1033455 - DNA, 120 bp, Artificial Sequence
  ENSG00000258535_33 (sequence is synthesized)
tatacccacacccacatcttgtctacctgcctgctgcgtcacagcctggctgcattactgggctcacttcagttccaagaaagcttccagaaatcatggcaggcacacctgcagtgagca

SEQ ID NO: 1033456 - DNA, 120 bp, Artificial Sequence
  ENSG00000258535_34 (sequence is synthesized)
gatctgtgtctacttgtcctttaagtggacaccacttttctgttcagagcacagatcaatgtgtcagacagagctcttggatgacaatattgtcctggcagggatccagagcggctgggg

SEQ ID NO: 1033457 - DNA, 120 bp, Artificial Sequence
  ENSG00000258535_35 (sequence is synthesized)
atagagaatattaaatgggtctggtgcagaacagttgaggtgtgactggatgtgacagaggacagcacctctttgacaatgacattatgtgagtttgggtgggctctcagctcaggtttc

SEQ ID NO: 1033458 - DNA, 120 bp, Artificial Sequence
  ENSG00000258535_36 (sequence is synthesized)
agatggccaggcatctgttgctggccgccattctgttgacattttacattttgtgaccataaattaactttggaagaagttgatagacaagtaggtcattatttgggtgttcctgtgttt

SEQ ID NO: 1033459 - DNA, 120 bp, Artificial Sequence
  ENSG00000258535_37 (sequence is synthesized)
ctcataacattttaaattcagtcagggcagaaaatatatatgtctttcctttataccattaccctaatccctggcacatggtgggtttcctcttgactttagtggaacgtgcctggacct

SEQ ID NO: 1033460 - DNA, 120 bp, Artificial Sequence
  ENSG00000258535_38 (sequence is synthesized)
taacaatcccaacaccccaccttccccgcaaccctgtcttcttccccatctctccagctggcttcctgccttgttttctcctcacatagatttaacagatgctctgagccccgcagtgca

SEQ ID NO: 1033461 - DNA, 120 bp, Artificial Sequence
  ENSG00000258535_39 (sequence is synthesized)
cttcagttctattctctgcactcgccatggcacttggcaccattaactgcagctctctctgccttgacatctgcaccccactctcccctgtgtgttttttctttgggggtttcttatcag

SEQ ID NO: 1033462 - DNA, 120 bp, Artificial Sequence
  ENSG00000258535_40 (sequence is synthesized)
gcgcctcttctttaaatgcttgttttcctttgagccctgtccaaagctctaggttccattttccactttctacgttctatctggtccttcattcaaatttacagctcacatctctgcttt

SEQ ID NO: 1033463 - DNA, 120 bp, Artificial Sequence
  ENSG00000258535_41 (sequence is synthesized)
ctctctctctctctctctctctgtctttcaaaccttacacaacttgagacatcttcactcacatatcctgcaggtacaccgaactcaacatggtcaatacaggagacagtctctcacccc

SEQ ID NO: 1033464 - DNA, 120 bp, Artificial Sequence
  ENSG00000258535_42 (sequence is synthesized)
gtcaatacaggagacagtctctcaccccaaaatggaatttctctctttttaaaggaaaccagcattcataagccagaagccaatctggattttgtctggaaactcaagtataagacctag

SEQ ID NO: 1033465 - DNA, 120 bp, Artificial Sequence
  ENSG00000258535_43 (sequence is synthesized)
caccacttgccaaggacctctgctttgctttggtaggccaagggtctggctctgttacccaggctggattgcagtggtgcaatctcggctcctgtaaccttcacctcctgtaaccttcac

SEQ ID NO: 1033466 - DNA, 120 bp, Artificial Sequence
  ENSG00000258535_44 (sequence is synthesized)
ctcctgtaaccttcacctcctgggctcaacccatcctctggcctcagcctcctgaggaactgggacttacaggtgtgccaccacacacagcaattttttttttttttgtatttttggtag

SEQ ID NO: 1033467 - DNA, 65 bp, Artificial Sequence
  ENSG00000258535_45 (sequence is synthesized)
agccctactttgtattttgaatagaagcaacagcagtgatgggattcgtactccaaacctcagcg

SEQ ID NO: 1033468 - DNA, 120 bp, Artificial Sequence
  ENSG00000258535_46 (sequence is synthesized)
agcaacagcagtgatgggattcgtactccaaacctcagcgtcacacaacattcccatgcagcaaatctgcacatgtatcctctgtatctaaaataaaagttgaaatgtttttaaaaagaa

SEQ ID NO: 1033469 - DNA, 120 bp, Artificial Sequence
  ENSG00000258534_0 (sequence is synthesized)
agttcctgcccaaagcaggaggggaaaggcttttccaccaagggaaagctaaatattgtctaaatccggcacccaggacgacacacaggcttcccattgtctgccacacagcaggtctcg

SEQ ID NO: 1033470 - DNA, 120 bp, Artificial Sequence
  ENSG00000258534_1 (sequence is synthesized)
gccacggcccaggttgcacccgtgtgaggttgatgttggaccgtatttacattcagtgtttggggctgaccgggaagaaatctgaaagtggaagagaagggaaggcaccggtaacctcgt

SEQ ID NO: 1033471 - DNA, 120 bp, Artificial Sequence
  ENSG00000258534_2 (sequence is synthesized)
gaagccagaaaggtttcaggatggatgggctgatcagatttgagtttcaacaggccactgtagacaggctctccttatgtttcccaggctggtctttaactcctgtcctcaagtgatcct

SEQ ID NO: 1033472 - DNA, 70 bp, Artificial Sequence
  ENSG00000258534_3 (sequence is synthesized)
cccactcggacttattgttaaaaatacacttaccagcatttgtgttcttgtctatcgtcttcttgcctgg

SEQ ID NO: 1033473 - DNA, 120 bp, Artificial Sequence
  ENSG00000258537_0 (sequence is synthesized)
agactctgaggacccaggagcctccatgggtacactcagaggccacactagatgcaaaaagaaccatttacagagaagtgagaggttctcaaaggctcaaccaaatgcctctgccaggag

SEQ ID NO: 1033474 - DNA, 120 bp, Artificial Sequence
  ENSG00000258537_1 (sequence is synthesized)
aatctttcagagtgtcctggaacattggaaataggcttaaagcttaaatgatgaatcagaagagttatgctgtattctaatgctgccactagggccacacagggtgccaacatccaatct

SEQ ID NO: 1033475 - DNA, 120 bp, Artificial Sequence
  ENSG00000258537_2 (sequence is synthesized)
atggccacaagattatttagtatgacatatttaatggtgaagataaagggtctttaatggcttcagaagtgccctgggctgaaacttgatctgagaaggttattatcagaactgtgttcc

SEQ ID NO: 1033476 - DNA, 120 bp, Artificial Sequence
  ENSG00000258537_3 (sequence is synthesized)
aagagaaagcagtgtgctagctctacatgtatacatgagttgccatcaacatgaattcaattacaatgaagataatttggagtagacaattgtattttggttgcatgacatccattttat

SEQ ID NO: 1033477 - DNA, 120 bp, Artificial Sequence
  ENSG00000258537_4 (sequence is synthesized)
tcacagctccaaagactctgggttttggagtaagagctgtaactgctcaagaagaattcgtgaacaaaagcacatctttctgaggaggcagaatatcacaggcctatgacaccagactgc

SEQ ID NO: 1033478 - DNA, 120 bp, Artificial Sequence
  ENSG00000258537_5 (sequence is synthesized)
tggaagaggcactagaggttgacaatagattccaacatctcataaaccaggaagcagcctcaggaaggttggcagctgccaaacccataggctaagcagtggtgggactgtgattcaaac

SEQ ID NO: 1033479 - DNA, 120 bp, Artificial Sequence
  ENSG00000229771_0 (sequence is synthesized)
gaagaccccaaatgacatagaaggtcttggagaagagtccaacagagacatatattcacagacacgtgtacatctttatgcccacacagaagggtaacagcagccttgcttcagaggcca

SEQ ID NO: 1033480 - DNA, 120 bp, Artificial Sequence
  ENSG00000229771_1 (sequence is synthesized)
caccttccaggaaacccttcagcctgccgtgtcttagctgatccctctgccatccccttgcagaaggagcttggagtctctcagctcagctggactagatgaatcttctcagggtcgtct

SEQ ID NO: 1033481 - DNA, 120 bp, Artificial Sequence
  ENSG00000229771_2 (sequence is synthesized)
tctcccacctctggctcccagttccttcccccagtctctccctccctgctctgtgtgatcagggaagctgcaaacccaacccttacatcaaaagggaacttgaaaaatacttggagcaaa

SEQ ID NO: 1033482 - DNA, 120 bp, Artificial Sequence
  ENSG00000229771_3 (sequence is synthesized)
aactgctaactgtgcatccttgctgtatgctggcgctgatattaaatcaggaaatggcactgaacagccgctccgaacacagaaacaggggttgtcaacacagcaaccaaaagcaatctc

SEQ ID NO: 1033483 - DNA, 120 bp, Artificial Sequence
  ENSG00000229771_4 (sequence is synthesized)
taacgggcagaggtgaaagggacctggcacagggccaggaggggggctgcaacccaggaaagaattcctgagctgagtgtgtctgtgccacctctccagtgtccagaatgaagcctggat

SEQ ID NO: 1033484 - DNA, 120 bp, Artificial Sequence
  ENSG00000229771_5 (sequence is synthesized)
ctcagtccctggcatggaatgcaccttgtctctctccatgagggatgaaagataattagataattaagcatgttgcttaaatacctttgaaattctcctttttatttccatacatgttta

SEQ ID NO: 1033485 - DNA, 120 bp, Artificial Sequence
  ENSG00000229771_6 (sequence is synthesized)
ggtccttcgagtgttggctcctgcagaagctttcatctctgtttccagcctccctgaaatagctccccaagggcacgaggcagtacctttgctccatgcctttgcttggactagtcctac

SEQ ID NO: 1033486 - DNA, 120 bp, Artificial Sequence
  ENSG00000229771_7 (sequence is synthesized)
caccagcaattcctgcatttctgtgtttggcaagtttctgctcagcctccaaagccttaaccaagtgtcaccttttctctgcagcattttctgccaccctccccatttcttccaatagaa

SEQ ID NO: 1033487 - DNA, 120 bp, Artificial Sequence
  ENSG00000229771_8 (sequence is synthesized)
ccagggatcttttacttgggatccagaagcactgtggacatattgccatcacaacacctttcatgtcacaatggcaaggtttgcactgtcttggaggagaggaaggaagccatattcatc

SEQ ID NO: 1033488 - DNA, 120 bp, Artificial Sequence
  ENSG00000229771_9 (sequence is synthesized)
cctgaaccctcatctcccagcactggttgtaaaactgaaacaaaaatggaaaaccttgatgaaattcattgttggtgtggctatggggaaacagattttccatttctgatagtaaatgaa

SEQ ID NO: 1033489 - DNA, 120 bp, Artificial Sequence
  ENSG00000229771_10 (sequence is synthesized)
ataggcaccatcttgttagaggctaatttgacattattaacactgaaaatgcacacatctttcaacccagcaattttatttcttgctttctagaggaatgtttgcccatgtgcagaaagg

SEQ ID NO: 1033490 - DNA, 120 bp, Artificial Sequence
  ENSG00000229771_11 (sequence is synthesized)
cgcatgtaaaaagctgagttgcagcattgtttgcaatagtaaaagatttgaaattgcttaaatgtcggtcaatatggcctggataaaaaactatagggcatccattggatagaatgctat

SEQ ID NO: 1033491 - DNA, 120 bp, Artificial Sequence
  ENSG00000229771_12 (sequence is synthesized)
gcattagttaaaaagaagtagatttccatgtattgaccaagcatttgctgagtaaaaatcaaaagcaagctgtagctctagacatagatgttaaaattacattgctgcattttttcacaa

SEQ ID NO: 1033492 - DNA, 120 bp, Artificial Sequence
  ENSG00000258532_0 (sequence is synthesized)
gattctgtcagttttgggagctttaaaaccatttgtgactgacacattattgctttccaggaagtggtagggatgacaaaaaagcatattccaacagggctttggagaggataaagtcca

SEQ ID NO: 1033493 - DNA, 120 bp, Artificial Sequence
  ENSG00000258532_1 (sequence is synthesized)
agaagtactgaaaccaagagtcacttaaatttttaagaatcttcattttaaagataagtagtagtccacataggaatgcatggtattcaatgatgatttcctacatttattcaagggata

SEQ ID NO: 1033494 - DNA, 120 bp, Artificial Sequence
  ENSG00000258532_2 (sequence is synthesized)
ggaacatgctattgtgatcagaaagaaaaatcaaacaaaaagaagaggccaaaggaaaggatatggtcagaaaaaaaaatcaaacaaaaagaagaaggtgataaaggaaaacagacgata

SEQ ID NO: 1033495 - DNA, 120 bp, Artificial Sequence
  ENSG00000258532_3 (sequence is synthesized)
tgaaggacttcttgttctaatttatctggctgtgtcttcactgagcggaagtatgctgactgttttacatgtggtagctacaaaaatctcataaaatgtagagcaggatgcctagaggaa

SEQ ID NO: 1033496 - DNA, 120 bp, Artificial Sequence
  ENSG00000258532_4 (sequence is synthesized)
actgaggctgagaaagatgcaataacttgctgaatatcacagaaacaatacgtgattcaaagactcacatacagccctcttcatgattgcagaatctcaactttcaactatactgattct

SEQ ID NO: 1033497 - DNA, 120 bp, Artificial Sequence
  ENSG00000258532_5 (sequence is synthesized)
ccacaatgatgcatttctcgttgtaatttaatataactctacaaggagaacatggaatgggaaaaatctgaccaacattgcataatatgataaaaataactcatgattaccttaaaagaa

SEQ ID NO: 1033498 - DNA, 120 bp, Artificial Sequence
  ENSG00000258532_6 (sequence is synthesized)
gttgaagttacaaggactccttgttgtaaccaggagccgatcttgatcaatggagctacataaagcatgttgaaatgcaaagaaagatagaaggagcctgtggtactgaaaacattgagg

SEQ ID NO: 1033499 - DNA, 120 bp, Artificial Sequence
  ENSG00000258532_7 (sequence is synthesized)
attctctgaaccagccttggctaccccaccatttaacttgagaaaaaatatttctttcctctttaagctcttcttctaccaaatgtatcaggaaataaaaatatattaaattaaaacaaa

SEQ ID NO: 1033500 - DNA, 120 bp, Artificial Sequence
  ENSG00000258538_0 (sequence is synthesized)
gttcagatccgtagagccaggcaaatttggttttgaccaaaatgatacttaggagttggataagttacttacgctgccagtcttggctccaaatgacttccgcttcctgaacaaattaaa

SEQ ID NO: 1033501 - DNA, 120 bp, Artificial Sequence
  ENSG00000258538_1 (sequence is synthesized)
catgaatgtcataagtgagtgcaagcttgaagaagcacctatcctgtgctcaggacaaaatatctgtggtccagagcagagctcccaacccagctactatgaaccacgctaggccccaga

SEQ ID NO: 1033502 - DNA, 120 bp, Artificial Sequence
  ENSG00000258538_2 (sequence is synthesized)
aaagaaaggaaaacagaagagacattggattggatcttccagaaggtctttgttgcaatttttctccatcattgaaaaaaaaattacatcatcaaataaagacaatagcagcacagctta

SEQ ID NO: 1033503 - DNA, 120 bp, Artificial Sequence
  ENSG00000258538_3 (sequence is synthesized)
aagtggtgaagaactttattttctgtagatcatcatgacatcagtttcaagacccacccaactgggagcatgtgaaattttttcttagaaggtcatccaaaatttgagatatttcacatg

SEQ ID NO: 1033504 - DNA, 120 bp, Artificial Sequence
  ENSG00000263096_0 (sequence is synthesized)
acacgagagctgggggactgggcacccagacagtggctgtttccacattggcaaaacaggagttggtaacccagaagccatgctgcggggttaacatcagggaaccgattcgtcccaacc

SEQ ID NO: 1033505 - DNA, 120 bp, Artificial Sequence
  ENSG00000263096_1 (sequence is synthesized)
cagaaggaagagaaaggtcaggctacatacccaaaaataccttttgccacaggcttgggactactatcctgtgaatgtcagcaagcctgtcctctacagggatccgtggagaagataaac

SEQ ID NO: 1033506 - DNA, 120 bp, Artificial Sequence
  ENSG00000263096_2 (sequence is synthesized)
tctacaagaaacagaaaaatgtctacctgtctccagaaccatgcagactccctccccttcaggatctcctagcccctgatgaatgaacagcacttccaagatgcttgagacaccgggcac

SEQ ID NO: 1033507 - DNA, 120 bp, Artificial Sequence
  ENSG00000263096_3 (sequence is synthesized)
agctactatcagtcatggcgctcccaacctgcagacattatcagtctgctggactggaaagatacacgaactgcacgcccttaagcggagcttcacctcataatattgggaaaagtaaga

SEQ ID NO: 1033508 - DNA, 120 bp, Artificial Sequence
  ENSG00000263096_4 (sequence is synthesized)
gaatcctctgaccttccataaacccagaatcacctgcacagaacttccctccatcattactcagattcccaggccagcgttttccttccatacccaaaccttctcacaaggaaggtcggc

SEQ ID NO: 1033509 - DNA, 120 bp, Artificial Sequence
  ENSG00000263096_5 (sequence is synthesized)
agaaacagaatacaaactccatattgcaaaggtacaatgggttctcccccacccccgctccttttgtgccacccacttatgccatccttttcccacacacaaccacatggaagggttttc

SEQ ID NO: 1033510 - DNA, 120 bp, Artificial Sequence
  ENSG00000263096_6 (sequence is synthesized)
actttactctgtaaccagccttcatcataacccagtctccgtgctcagaactagaaagacagccttcttaattctcagcggaatatgggcctaacagtggtaggacaccccccagctatt

SEQ ID NO: 1033511 - DNA, 120 bp, Artificial Sequence
  ENSG00000263096_7 (sequence is synthesized)
aataactctgcctttgtctgctatagatgactttccctaaagggatggctgtccttaaagcaatcgctcaattctcatggcaaacagattcttctttttccagtacccagcacatattcg

SEQ ID NO: 1033512 - DNA, 120 bp, Artificial Sequence
  ENSG00000263096_8 (sequence is synthesized)
tccctccaggagagcacccccacatcccacctctgacagtatctaaaatgcaaacattgaagtcatcagaatgactcctgtcatctctgctggcctaggaacattcaggacactgcacct

SEQ ID NO: 1033513 - DNA, 120 bp, Artificial Sequence
  ENSG00000263096_9 (sequence is synthesized)
tggatgaccgaggagcccctgcagttagctctggcctccaagaaccactactcttcccttcattaagatgtcagcccagaaagcttggtgatcccacaatagccacaacaggttttaatg

SEQ ID NO: 1033514 - DNA, 120 bp, Artificial Sequence
  ENSG00000263096_10 (sequence is synthesized)
aatccctggattgtttcttgaaagaaaactggatttcttcagatatttgattcattctttgatcagacagttagaggaatagggatggggtgctcaagataagaaaggggttggggcagt

SEQ ID NO: 1033515 - DNA, 76 bp, Artificial Sequence
  ENSG00000263096_11 (sequence is synthesized)
agggatggggtgctcaagataagaaaggggttggggcagtcatggtaaatagtatgagaattcacaaaaatgggcc

SEQ ID NO: 1033516 - DNA, 75 bp, Artificial Sequence
  ENSG00000263096_12 (sequence is synthesized)
acaaaaattagccgagcaggaaaatagcttggaccccggaggtggaggttgcagcgagccaagattgtgtcactg

SEQ ID NO: 1033517 - DNA, 83 bp, Artificial Sequence
  ENSG00000263096_13 (sequence is synthesized)
ccggaggtggaggttgcagctggagctagactccatctcaaaaataaataaacaaataagtaaataaataaataaatattcac

SEQ ID NO: 1033518 - DNA, 120 bp, Artificial Sequence
  ENSG00000263098_0 (sequence is synthesized)
agaagacaagacacttcacagagaagctgtcactgcagccggctggccagctcagtggggaacagagtttgccagacggacaatcaagggtccctcacccaccaccttggtaggcttcca

SEQ ID NO: 1033519 - DNA, 120 bp, Artificial Sequence
  ENSG00000263098_1 (sequence is synthesized)
ctgcaccccaccctgcgaggccacagaatcgatccacgcaagagtgcggctgtcactgatgccaccagctgtggagtacgttgttccacaacaaatgaacctgcgagcggctgaaatctc

SEQ ID NO: 1033520 - DNA, 120 bp, Artificial Sequence
  ENSG00000263098_2 (sequence is synthesized)
atcctacaggcaaagagcaccaccgtatcacctgcagccatggccacatgaccagattccaacagcagctggatggagaacctggggatgaacagtgaagtgctcaacaacgaagaccgc

SEQ ID NO: 1033521 - DNA, 120 bp, Artificial Sequence
  ENSG00000233360_0 (sequence is synthesized)
agcttaggcgagctggttgctgggagaaaaacagatgttaaatgaactgcctttgggtcgaatctcattgccccctgaatcgtggacgctccagttcagagcgaagtcccaagaaacgtg

SEQ ID NO: 1033522 - DNA, 120 bp, Artificial Sequence
  ENSG00000233360_1 (sequence is synthesized)
tgtctgctgaagccaaggctggggccggagctggagctggagccggagccggagccggggtggtggctggggtgggcacggcagtggacggaagttcctcagaggccagcctgtcactga

SEQ ID NO: 1033523 - DNA, 120 bp, Artificial Sequence
  ENSG00000233360_2 (sequence is synthesized)
ctgtgtcctggagggtaacagctgagaagaggcctgacacgttgaagttgatgtctggagacagaaggagcggagacggctctcagagaccgcgccaggctcctcactccactggccggg

SEQ ID NO: 1033524 - DNA, 120 bp, Artificial Sequence
  ENSG00000233360_3 (sequence is synthesized)
accgtttccccttcccctgaacccatctggaccatgttcagcttccccactcccgtgtgagcctcaccaccaccccacaaagcaggcagaccatccccgttgtaaaaatgagaaactgag

SEQ ID NO: 1033525 - DNA, 120 bp, Artificial Sequence
  ENSG00000233360_4 (sequence is synthesized)
gctcagacttcctcctggacttatgttgtgatctggacagcctctaccaagcaaatgcaatcagcacgtgggaggaaatcttgccatctgtggccaggtggccacagcaagttgggtccc

SEQ ID NO: 1033526 - DNA, 120 bp, Artificial Sequence
  ENSG00000233360_5 (sequence is synthesized)
aggactatggcgatgttgctgggtgtcatcttgttcacctcctgctcctcggccagccgtgccaggaacttcatcagctcctcctcctcctccttcagcgtctccaccttgttggccatg

SEQ ID NO: 1033527 - DNA, 120 bp, Artificial Sequence
  ENSG00000233360_6 (sequence is synthesized)
gtcgtatggctgtgactacccgggctgcctcctaggccttgactgctgcctgaattcttggttgcctgactgagcctggagatgatcccaagggtcatctcaaactcggccaggatgcgg

SEQ ID NO: 1033528 - DNA, 120 bp, Artificial Sequence
  ENSG00000233360_7 (sequence is synthesized)
gccagctgattctggatggcacagctcatctccaaggccttcctgtggacacggcaccccatgggtccaggcgcccgctgccctcacctccactggaaacacttggtggggcctctcctc

SEQ ID NO: 1033529 - DNA, 120 bp, Artificial Sequence
  ENSG00000233360_8 (sequence is synthesized)
tccttcatctctgctaagctgaacaccctcccaggcctggccaccctcactgacctgggaactgtccccagcctggtcattcttctgatgtggatgccctcaccacctggaccccctccc

SEQ ID NO: 1033530 - DNA, 120 bp, Artificial Sequence
  ENSG00000233360_9 (sequence is synthesized)
agctgagatcacgtcttggtatccccaggtgagggctgggccccgtctgtgctcaccccatgctggaatcagggtccagctccttgaagctctcagccatcgtggtggacagagccatga

SEQ ID NO: 1033531 - DNA, 120 bp, Artificial Sequence
  ENSG00000233360_10 (sequence is synthesized)
ggggaagcttcttctgcagggagggtggggccggcgatgagtgtccgtgcctccctccaccctgcctgagcaccaggccagccccttggggcaggggaggagggaacccaggagggccac

SEQ ID NO: 1033532 - DNA, 120 bp, Artificial Sequence
  ENSG00000233360_11 (sequence is synthesized)
agtcccagatgagagtggaaacaagatgacaaggcgtggtgggggtgacatttccctgagagcatggatggagcccctctccatctggcgtgccctttcctcttcccagaagccacttga

SEQ ID NO: 1033533 - DNA, 120 bp, Artificial Sequence
  ENSG00000233360_12 (sequence is synthesized)
ctgggcaggaaggaatgaccaagtcctactgcagactgggaaactaagatgcagggagggcagggagcttgccccaggtcacacaggtggagggagaatgggagcgggagctctttcccc

SEQ ID NO: 1033534 - DNA, 120 bp, Artificial Sequence
  ENSG00000233360_13 (sequence is synthesized)
tgtcccagggtatatatggctgacctagccaccgctgagttcaaacgctctatggctcccaatttccttgccttggccacactgaattgtcaactgattccaaaacatggccccacactc

SEQ ID NO: 1033535 - DNA, 120 bp, Artificial Sequence
  ENSG00000233360_14 (sequence is synthesized)
ccaccccatctggagttacggggaatgcctgctctgggatcagagaccagggttcaaacctcagttctgccacttactagctatgtgaccttggacaagtgactttatctctgagcctcc

SEQ ID NO: 1033536 - DNA, 120 bp, Artificial Sequence
  ENSG00000233360_15 (sequence is synthesized)
agttcctcatgtgtaaagcaatgcctgcccctagggttgtgccagtgttccatgagacagtgcactcatatgttagtaacaagctggcggttatcagccaataaacgctgcctcttgatt

SEQ ID NO: 1033537 - DNA, 120 bp, Artificial Sequence
  ENSG00000250092_0 (sequence is synthesized)
tattgtcagagaatatgacacatagcaaaggtaatattcaaagtcatctgacaagcattgggcaggatgatgtccaacattaatgctctgctactcatctagccactgaccctggtcact

SEQ ID NO: 1033538 - DNA, 120 bp, Artificial Sequence
  ENSG00000250092_1 (sequence is synthesized)
caatattcaagacttaatgaatggaaagtggaagatgcattttgccttccttttgcttttgaggtgagactccgagttctcaaagaaaatcaaggcatatggctgggcatctcttttagc

SEQ ID NO: 1033539 - DNA, 120 bp, Artificial Sequence
  ENSG00000250092_2 (sequence is synthesized)
atccttgaacagtctgtaatggcccaaatgtacttcaagaatgcagcaattgaaaacaagtcacccggagcacacagactagagtctctgtgggccaccatgcatgaggacattcaagca

SEQ ID NO: 1033540 - DNA, 120 bp, Artificial Sequence
  ENSG00000250092_3 (sequence is synthesized)
ccttatggagcagtttacatggagaaaaactaaggcctcctgccaacagccagcaccaactggccatataaatgaactaccttgatcatgaatgcagactctctaaagcctttacatgga

SEQ ID NO: 1033541 - DNA, 120 bp, Artificial Sequence
  ENSG00000250092_4 (sequence is synthesized)
tgcaacctcatgagagacccctgtccagaagaacacaattaagctcctgaattcctgacccacagaagagctgtgagatactaaatgcctattgttgttttaagccactaaattttgagg

SEQ ID NO: 1033542 - DNA, 120 bp, Artificial Sequence
  ENSG00000250092_5 (sequence is synthesized)
taatttattatgtggtaatagataactaagacatgagtatacactaaccctaaaataatctcaaaatcccttcatgttgtccaggtagtaccattaaatgtgacctgcatgttctcataa

SEQ ID NO: 1033543 - DNA, 120 bp, Artificial Sequence
  ENSG00000227110_0 (sequence is synthesized)
agctgagcgccggctgccctgacgtcagcatggccgcggcccctgactacccagctcccttctatccctcgagcggcaggaatccgtccccacgcccttttcctttaaagggcaacgggc

SEQ ID NO: 1033544 - DNA, 120 bp, Artificial Sequence
  ENSG00000227110_1 (sequence is synthesized)
cgaaggtggggcgggcggcgcggctcccgcgatccattcaggtcaaaagggagagtgatcaaacaggagagccgaggggacctatattcagagacttaaccggacacctggacagaccat

SEQ ID NO: 1033545 - DNA, 120 bp, Artificial Sequence
  ENSG00000227110_2 (sequence is synthesized)
tacaacttgggacttttcaggagaatgagggaaatgtagttattgcacctgagcctcactccagctctgaggtcctcttcacttctctttggaagaaaattggatatcttttcctagttg

SEQ ID NO: 1033546 - DNA, 120 bp, Artificial Sequence
  ENSG00000227110_3 (sequence is synthesized)
aaagagtagagatctgatttctccaaggatcatcgctttttgacacgggattattagaagcattcattcatctatcaaggagttttgggatacttgccataagccaagccctctgatagg

SEQ ID NO: 1033547 - DNA, 120 bp, Artificial Sequence
  ENSG00000227110_4 (sequence is synthesized)
tgctggaaacatcaagctctgtgcccaggaagttcatccttggactgcacgcatgaacgagtttgctgtcttcccattggattcagccagtccgcggtcctggtaggaaatcaggggaag

SEQ ID NO: 1033548 - DNA, 120 bp, Artificial Sequence
  ENSG00000227110_5 (sequence is synthesized)
aagaaatactttcccagacaaataaaagctgaggaatatcatcaacatcagacctgtcttacaaaaaatgctaaagggagttcttcaatccaaaagaaaaagatgttaatgagcaaaaat

SEQ ID NO: 1033549 - DNA, 120 bp, Artificial Sequence
  ENSG00000227110_6 (sequence is synthesized)
aaatcatctgaaggtgcaaaacttgctggtaattgctgcctgagcaattgtgtctggttcgtgaagtgacttcccattttcatccaattggccctgatctcacatcccaagcccatggat

SEQ ID NO: 1033550 - DNA, 120 bp, Artificial Sequence
  ENSG00000227110_7 (sequence is synthesized)
cataccacattgttctttctgcaaaacagttgagaattaccagtaattgggactgtttacattcaatgccatcatgacagaagcagctttattatattgcagaggaatgattaatacatg

SEQ ID NO: 1033551 - DNA, 120 bp, Artificial Sequence
  ENSG00000227110_8 (sequence is synthesized)
agattaataattttagatttccactgtagcaagaacgggaaaaaagcgtcatctgaaatgccaacttcaagcaattgcagtgatttcctggaaccctacgtgacaagtccagattcagtg

SEQ ID NO: 1033552 - DNA, 120 bp, Artificial Sequence
  ENSG00000227110_9 (sequence is synthesized)
ggaaagactgtgaggatccgttagcaatgtttacgatgggcaagtcttgtgatggggttaccctccttgcattagaatttgcagtcttctattaggccattagtctttgagagcaaaaac

SEQ ID NO: 1033553 - DNA, 120 bp, Artificial Sequence
  ENSG00000227110_10 (sequence is synthesized)
tgtatgtatctcatttttgtagccccagtgccaggcacacagtagctgctccaaaagcaaaggacatcgagtctgaatcaagctgcttgggtttaatggctgtctttgtcgcttactagc

SEQ ID NO: 1033554 - DNA, 120 bp, Artificial Sequence
  ENSG00000227110_11 (sequence is synthesized)
tgagtggactcgtcatatttataacttaattgtggttcagtttccttctctacagaaaaggcatgagttcctcattcatagagttataataagggttaaataaagtcatgcatatccaaa

SEQ ID NO: 1033555 - DNA, 120 bp, Artificial Sequence
  ENSG00000227110_12 (sequence is synthesized)
gcttagcatagtacctgagacatagcaaatacttgaggaatgcaggtataaattaacataggagtgaataacattgcaaggaaacagagaaaaggatcctaaacagtcctgctggtatat

SEQ ID NO: 1033556 - DNA, 120 bp, Artificial Sequence
  ENSG00000227110_13 (sequence is synthesized)
tcatttatgattcaaaaatcctcaattgttaaaatttgggtcagaaccttattattccaggttgttggtaaatgtgaggacccttctgggtttggaagtagaacaataaattgagaggcc

SEQ ID NO: 1033557 - DNA, 120 bp, Artificial Sequence
  ENSG00000227110_14 (sequence is synthesized)
aaagaagctgcaaataaaaattggcttctctgggaaaatgattttcacatttatacctacctgccttttgtcctcccatgcatttctccagatgtgataccaatgtgatacaattgttgt

SEQ ID NO: 1033558 - DNA, 120 bp, Artificial Sequence
  ENSG00000227110_15 (sequence is synthesized)
ttattccttctctgacaatagcaaggtagagtgagccttccagtgagggcttaaaatatagctccagagacattcaccactacttcctgcctccatggttacacattccctttcacaaat

SEQ ID NO: 1033559 - DNA, 120 bp, Artificial Sequence
  ENSG00000227110_16 (sequence is synthesized)
gctgttcctattcggccatcttggctgctcccccacttccttgcttttttaagggatcccttcagatgaggagacggaagtccagagggtttcaatcgcttgcccaaagtcacagagtcg

SEQ ID NO: 1033560 - DNA, 120 bp, Artificial Sequence
  ENSG00000227110_17 (sequence is synthesized)
ggtgcccagggcacaaatgtgcagaccagctgacagcaacagcaggctccccttttctccatcaggaactgtcagaggaggctggatgtggaggaaagctgggattccttttctcatttg

SEQ ID NO: 1033561 - DNA, 120 bp, Artificial Sequence
  ENSG00000227110_18 (sequence is synthesized)
aaaaatgttgaaacagatggatataaaaaaagcaaaatgtcttgttccacgtttccaaaagaggaagtatgaaaggcgtaattgaaattcaaaacgtttggtctgaaaatcctacatcct

SEQ ID NO: 1033562 - DNA, 120 bp, Artificial Sequence
  ENSG00000227110_19 (sequence is synthesized)
tgacacataagaactggtggagaattacctgcagaatagatgctgaatctttgtgcctctctgctctccaagaagatggcatgctccttgatgacaagagccacctctgatctcccccat

SEQ ID NO: 1033563 - DNA, 120 bp, Artificial Sequence
  ENSG00000227110_20 (sequence is synthesized)
ccagtcaaaatcttccagaaaacagaccatcaatatggatttgcagcatgtattgtgattgtttaacataattttccaacagccaattatgtgtggccactatacgtagatatttcttta

SEQ ID NO: 1033564 - DNA, 120 bp, Artificial Sequence
  ENSG00000227110_21 (sequence is synthesized)
gctcatattttaatacctgtcctgtcattctacattacatatgtggaagacctttaacccagtttagtttatatataataagtacaaaagggaaaaaagaaagcttccttttttcacctc

SEQ ID NO: 1033565 - DNA, 120 bp, Artificial Sequence
  ENSG00000227110_22 (sequence is synthesized)
tttggggacttcttcagtctttttccagatgtggaatccagatcgtgttattttctttccagactgggcctaggagcaatacgttaagagtcagcaaagcctcaagaatcatccagctct

SEQ ID NO: 1033566 - DNA, 120 bp, Artificial Sequence
  ENSG00000227110_23 (sequence is synthesized)
tcagcaaagcctcaagaatcatccagctcttttctcctcttcaaagttgcccttcttttctctgaacattaatgtatctctctgtatcacttatccattgctgtgcagcaaactacctca

SEQ ID NO: 1033567 - DNA, 120 bp, Artificial Sequence
  ENSG00000227110_24 (sequence is synthesized)
atggggctgcagtggaggtgcagaatctgacggggctgacgattcacttccaagctcacctcactggtgcggctgttttcaggacaactcagctccctgccacatgggcctctccataga

SEQ ID NO: 1033568 - DNA, 120 bp, Artificial Sequence
  ENSG00000227110_25 (sequence is synthesized)
caactcagctccctgccacatgggcctctccatagaaagcttataacacagcagctggcttcccccagagtaagtgattcaagagagcaagccaccaaggctgggtgcggtggctcacac

SEQ ID NO: 1033569 - DNA, 86 bp, Artificial Sequence
  ENSG00000227110_26 (sequence is synthesized)
agcgaaaccctgtctctgggaaaaatacaaaaattagccaggcatgatgtgatggtgggcgcctgtgatcccagctactctggagg

SEQ ID NO: 1033570 - DNA, 120 bp, Artificial Sequence
  ENSG00000227110_27 (sequence is synthesized)
ggggcagaggttgcagtgagctgagataaaaaagagagagcaagccaccaaatgggagccacacacccttttataatctggtctctgaagtcatccattgtatcctattctgtagaagta

SEQ ID NO: 1033571 - DNA, 120 bp, Artificial Sequence
  ENSG00000227110_28 (sequence is synthesized)
ctgaagtcatccattgtatcctattctgtagaagtaaatcactaagtccagtcccggaagggcaattagactctatctcttgaaggaagaagtatgaatttttgcatggacagtcatgca

SEQ ID NO: 1033572 - DNA, 120 bp, Artificial Sequence
  ENSG00000227110_29 (sequence is synthesized)
ctgcctaatgacgttttgtcaatgatggaccacatatgtaacggtggtcccattagataataatggaactgaacagttcctgctgcctaatgacactgaggccaccataacatcatggtg

SEQ ID NO: 1033573 - DNA, 120 bp, Artificial Sequence
  ENSG00000227110_30 (sequence is synthesized)
caagacattccttatgtgtttgtggtgatgccggtggaaacaaacctactgtgctgccagttgtacaaatgtctaggccatacaattatgtacagtgcgtaatacttgaacataataaca

SEQ ID NO: 1033574 - DNA, 120 bp, Artificial Sequence
  ENSG00000227110_31 (sequence is synthesized)
aatgactatgctactagtttgtgtgtttactatattatatttttatcattattttagagtgtactccttctatttatttttaaggaaaagttaactgtgaaacagcgtcaagcaggtctt

SEQ ID NO: 1033575 - DNA, 120 bp, Artificial Sequence
  ENSG00000227110_32 (sequence is synthesized)
taagaggttttccagaagaaggcattgttatcttaggagatgacagctccatgcatgttattgccccaaagaccttcccgtgagataagatgtgggggtggaagacagtaatattgatga

SEQ ID NO: 1033576 - DNA, 120 bp, Artificial Sequence
  ENSG00000227110_33 (sequence is synthesized)
gtaggcctaggctaatgtgtgtgtttatgtgttagcttttagcaaaaatgtttaagatgtaaaaaataaataaaactttttaaaaggagaaaaaaagcttacagattaaggatataaaaa

SEQ ID NO: 1033577 - DNA, 120 bp, Artificial Sequence
  ENSG00000227110_34 (sequence is synthesized)
aggatataaaaaagagaatatttttgtacggctgtacaatctgtcttttaggttaagtgttataagaaaaaaagtcagaagttaaaagatttttaaatttataaaataaaaaagttacaa

SEQ ID NO: 1033578 - DNA, 120 bp, Artificial Sequence
  ENSG00000227110_35 (sequence is synthesized)
ggaaacatcaaggtaaataaaagagttcttctccttggagaacatattggtctaataactacttctggggctccctggttgacagagccctaatcttacttgaactccaagacaactagt

SEQ ID NO: 1033579 - DNA, 120 bp, Artificial Sequence
  ENSG00000227110_36 (sequence is synthesized)
ctcagagaaaacagaaatcccaaacagtcccagggctgtatcaaaggtcatacagctggcaagtggcagagctgaaatttaaattcagagtttttaacttcagattgcaccctttcacct

SEQ ID NO: 1033580 - DNA, 120 bp, Artificial Sequence
  ENSG00000227110_37 (sequence is synthesized)
atactgcactgcttccataatgattgcagatggttgattataagcaaaacaggaagcacttggattaagatgctgctgttgttgtcatcattatcactgggcttgtcctaactgggattt

SEQ ID NO: 1033581 - DNA, 120 bp, Artificial Sequence
  ENSG00000227110_38 (sequence is synthesized)
ttgactctgagtctcgtattctttttaccattcatgaacaaattaattaaagaaacaaatattgaattgggaaatactatggattaggccctgagctgaggatgcaacagtgaataagac

SEQ ID NO: 1033582 - DNA, 120 bp, Artificial Sequence
  ENSG00000227110_39 (sequence is synthesized)
aggaaatgtccctcccctcatatagcttctattctaatgtgtgtaggggagacaggcattaaacaagtggatagatatttagataaggtaattaaggatggcagtgagtgcctaggagga

SEQ ID NO: 1033583 - DNA, 120 bp, Artificial Sequence
  ENSG00000227110_40 (sequence is synthesized)
ccaggaaggtctggctgagcaggtggtgtgtgaactaagccccagtgaaggagaatgagtcagctgtgagtacagtccccatggagagaacattccaggaggatggggtcatgagagcag

SEQ ID NO: 1033584 - DNA, 120 bp, Artificial Sequence
  ENSG00000227110_41 (sequence is synthesized)
agaccctgagatgagtgcgagtgtggcatgtctgagggatcatgaggtcagtgtagtgggtcagggagaatggtatgaggagcctcaggtgaggcatgcaggagctggctcatgtgggcc

SEQ ID NO: 1033585 - DNA, 120 bp, Artificial Sequence
  ENSG00000227110_42 (sequence is synthesized)
ccataaaccatgctaaggagtttatgttctctcctggaaatggcaggaggttagacatcagtgctttcccactggaacacaatgcaggccatgtatgtaatttaacaatttctaatagtc

SEQ ID NO: 1033586 - DNA, 120 bp, Artificial Sequence
  ENSG00000227110_43 (sequence is synthesized)
agtcatatttaaaaaaaatcaaaaagaaaaaggtgaaatagctattatatattttattaaactcaatataactaaaatgtcattcccacctgtgattaatataaaaattattgcgatggt

SEQ ID NO: 1033587 - DNA, 120 bp, Artificial Sequence
  ENSG00000227110_44 (sequence is synthesized)
actcttttttatgtgtgtgcttcattttgaaatctggtgtgtgttttacccttacagcacatctctcttcagattagccatgtcacaaatactcaataagcacatctggctggtggctac

SEQ ID NO: 1033588 - DNA, 120 bp, Artificial Sequence
  ENSG00000227110_45 (sequence is synthesized)
catctagctaccatcaaccacatctggctggtggctaccatattgagcagagcagttatagagagtcttaagcaggggaatgacaatgtctgatttactgtgttactcacagcaaggaca

SEQ ID NO: 1033589 - DNA, 120 bp, Artificial Sequence
  ENSG00000227110_46 (sequence is synthesized)
ccaaaagtactaatggaaagctatcagtaactcgcaacgtctcactctcaggtggagaagctgagcaattagaagctggtaattgattggtgcagtgtggtctactatgtgttctaaata

SEQ ID NO: 1033590 - DNA, 120 bp, Artificial Sequence
  ENSG00000227110_47 (sequence is synthesized)
ctgcattgggaggcacaagtgattttctcagagtcacaaagctagaaaggggcagaactagaaagaccttgaacccagttcttttggtttcatgccaacaccttcataaatccccaataa

SEQ ID NO: 1033591 - DNA, 120 bp, Artificial Sequence
  ENSG00000227110_48 (sequence is synthesized)
tcatggctcacaatgatgttttcactgttacaatgtagcaagcagggcccaagttatttcaatgtgaaaacatgaataatatgttgtttgtatcattaaatagtacactagttaaattaa

SEQ ID NO: 1033592 - DNA, 120 bp, Artificial Sequence
  ENSG00000227110_49 (sequence is synthesized)
tgcaaaacttgctggtaattgtaagtacaaagaaaacacagaatattataacactgtaacttacatgctgtggtgtgtaaactactcatatgttaagtaaaaagactaaaatataaatca

SEQ ID NO: 1033593 - DNA, 120 bp, Artificial Sequence
  ENSG00000227110_50 (sequence is synthesized)
attaaaataataattgcaacaacttttcaagacatagacagtacaataagatacaaataggaacaacaaaatgttaaaaagcaggttgacacagttaaggtgtaaaggttttattagttt

SEQ ID NO: 1033594 - DNA, 120 bp, Artificial Sequence
  ENSG00000227110_51 (sequence is synthesized)
tccctttgcttctttgtttatgcaatcagtgtttagttgtcaacagtttaaaataatggttataagatattgtttgcaaatctcatggtgacctcaaatcaaaaacatacaacagataca

SEQ ID NO: 1033595 - DNA, 120 bp, Artificial Sequence
  ENSG00000227110_52 (sequence is synthesized)
aatcaaaaacatacaacagatacatgaaaaataaaaaggaagaaattaaaacataccactggagaaaatcacctttactaacagaaagacaggaaggaaggaaagaaggaagagaagacc

SEQ ID NO: 1033596 - DNA, 120 bp, Artificial Sequence
  ENSG00000227110_53 (sequence is synthesized)
gtggcctacaagaaacacacttcacctataaaaacacatatagattaaaaataaagggatagagaaagatattccatggaaacagaaacgaaaaagaagcaggagtatctatacttgtgt

SEQ ID NO: 1033597 - DNA, 120 bp, Artificial Sequence
  ENSG00000227110_54 (sequence is synthesized)
cagacaaaatagatttcaagacaaaaactgttaaaaaagataagaaagctcattatataatgataaagtagtcaattcctcaaggaggcataacaattgtaaatatatatgcatccaaca

SEQ ID NO: 1033598 - DNA, 120 bp, Artificial Sequence
  ENSG00000227110_55 (sequence is synthesized)
ctggaacacccagatatataaagcaaatattattaaagaaagagatagacctcagtataataatacctggacatccagtataataatacatccagtatatatatatgcatccaacactgg

SEQ ID NO: 1033599 - DNA, 120 bp, Artificial Sequence
  ENSG00000227110_56 (sequence is synthesized)
aacaccccagatcatccagatctaaaatcaagaaataaacattggacttaatcagcattatggatgaaatggacctaaaagatatttatagaacatttcatccaacagctgcaacatata

SEQ ID NO: 1033600 - DNA, 120 bp, Artificial Sequence
  ENSG00000227110_57 (sequence is synthesized)
cattcctttcctcagcacataaatccttctcaataatagacaatatgtttggctacaaaataagttgcaaagatttaaaaaatgaaattatattagaatcttttcttactacaatggagt

SEQ ID NO: 1033601 - DNA, 120 bp, Artificial Sequence
  ENSG00000227110_58 (sequence is synthesized)
aaaactagaaatcaataaccagagaaattttggaaactatacaaacactttaaataatatgctctggaataaccagtgggtcaataaagaaattaagaaggagatttaaacatttcttga

SEQ ID NO: 1033602 - DNA, 120 bp, Artificial Sequence
  ENSG00000227110_59 (sequence is synthesized)
gacaaataataatggtaacaaaacatacaaaaatgtatgggatatagtaaaaatagtactaagaggaatgtttatagctataaacatctacatcagaaaagtagaaaaacttcaagtaga

SEQ ID NO: 1033603 - DNA, 120 bp, Artificial Sequence
  ENSG00000227110_60 (sequence is synthesized)
caacctaacaatggatcttaaagaaatagaaaaccaagagcaaaccaaacccaaaattaatggaggaaaacaaataataaatatcaaagcagatataaatgaaattgaaacaaaggaaac

SEQ ID NO: 1033604 - DNA, 120 bp, Artificial Sequence
  ENSG00000227110_61 (sequence is synthesized)
aacccgaataatcaacaaaatgaaaagttttttacaaagataataaaaatccacaaaactttagtcagactaattaagaaaaaaagagacaagacccaaataaataaaatcagagatttt

SEQ ID NO: 1033605 - DNA, 85 bp, Artificial Sequence
  ENSG00000227110_62 (sequence is synthesized)
aaaaagagacaagacccaaataaataaaatcagagattttaaaaaaaggagacacattactacggatactgccaaaattcaaagt

SEQ ID NO: 1033606 - DNA, 120 bp, Artificial Sequence
  ENSG00000227110_63 (sequence is synthesized)
ccatgggcgtaggaccctccaagccagatgaggagacggaagtccagagggtttcaatcgcttgcccaaagtcacagagtcgggaagtgcagagccaggccactgcctggttttaaattc

SEQ ID NO: 1033607 - DNA, 120 bp, Artificial Sequence
  ENSG00000227110_64 (sequence is synthesized)
cgggaagtgcagagccaggccactgcctggttttaaattctgggtggaaatgcaacgtgccggtcaacatggtgtgctgatgtttctgccctctggggccaattccaccactccctggaa

SEQ ID NO: 1033608 - DNA, 120 bp, Artificial Sequence
  ENSG00000227110_65 (sequence is synthesized)
catggtaatcttcctttacaaatagagaaactgaggcctaagatggggagcaatttccctttaaaaaccttttattgtcaaggtccaaatggctgatgattcatgccatagacatcccaa

SEQ ID NO: 1033609 - DNA, 120 bp, Artificial Sequence
  ENSG00000227110_66 (sequence is synthesized)
ttacctgttaaagttccctgtgcactattttttaaaatctagagatagataataaataggttaagttacattttaaattagcccaagagcatttgagaacagaatcatttttagaatctt

SEQ ID NO: 1033610 - DNA, 120 bp, Artificial Sequence
  ENSG00000227110_67 (sequence is synthesized)
aattctgagattcactgttgggcttaagtcactgcttctgtgatggttagttttgggtgtgaacttgactgtattaagggatacttacctgggaaagcattatttactctccatgcttca

SEQ ID NO: 1033611 - DNA, 120 bp, Artificial Sequence
  ENSG00000227110_68 (sequence is synthesized)
gtagatactgagcccttcccttttctgctgaaagggaaacccaggtggcttggcgtttgattagaataattgggctgccccaggtgtgtccgtgagggtgcctctgagggaaactgggac

SEQ ID NO: 1033612 - DNA, 120 bp, Artificial Sequence
  ENSG00000227110_69 (sequence is synthesized)
taaatgaagaagatctgccctccatatgggcaggcactattccaattggctgggggccccagatagaacaaaaaggcagataaagggcagtctccctggagaagagacctgcctgtagac

SEQ ID NO: 1033613 - DNA, 120 bp, Artificial Sequence
  ENSG00000227110_70 (sequence is synthesized)
agacatcagaactccaggttctccagcctttgggctccaggactcacaccaatgcgccaccgggctctctgaccttcagctttggactgagaattacaccatagaatgccctggttctga

SEQ ID NO: 1033614 - DNA, 120 bp, Artificial Sequence
  ENSG00000227110_71 (sequence is synthesized)
ggccttcaaactcagactgagccacgctacaggctttccggattgtccagcatacagaaggtctgttgtgggatttctcagcctccatgagtaagtaagaaaattgcctctaataaatcc

SEQ ID NO: 1033615 - DNA, 120 bp, Artificial Sequence
  ENSG00000227110_72 (sequence is synthesized)
tttttcatatgtctctctagacatctgtaggttctgtctctggggagaaccctaactaaaacccattcttgaaggtaacatgcataagaattgcctggggcagggggatggagtcttgct

SEQ ID NO: 1033616 - DNA, 120 bp, Artificial Sequence
  ENSG00000227110_73 (sequence is synthesized)
aacatgcacattgattcagaagaggtagggcctaggattttctgtagttctgaaacacttccaggtgatgttgatgctgatggacaaggagcacactatcagttttcagtcaggcttcca

SEQ ID NO: 1033617 - DNA, 120 bp, Artificial Sequence
  ENSG00000227110_74 (sequence is synthesized)
caaagtgctttctgcaggtgtcttgcatcagaatatgcaaacatgaagagagtctgctttagttggttagtgggtctcaggtgggtctggagagaccaggggaagctgcctgtttaaaat

SEQ ID NO: 1033618 - DNA, 120 bp, Artificial Sequence
  ENSG00000227110_75 (sequence is synthesized)
gcattcaggtgattcagctacatattaacaaagcattgtgacattaatgaaagtgttttccaaacttgctccatcattagaaccacctgctagttaaaaggcactgatttcccaggcttt

SEQ ID NO: 1033619 - DNA, 120 bp, Artificial Sequence
  ENSG00000227110_76 (sequence is synthesized)
cccccttacagactcagttttaaagatctggcttatctcattttgatctatgcaattcctgataatagcttagtgaggttatggaacttgtccaaaatcaaaagtagtgaatagtagtct

SEQ ID NO: 1033620 - DNA, 120 bp, Artificial Sequence
  ENSG00000227110_77 (sequence is synthesized)
caggtatatgtgtagactaatggagaagtgtcagaggagaagaaatagtaaatgagacacaaacagggaattagagacttcatcgagagacatttgcatgagtggacctagagtactcag

SEQ ID NO: 1033621 - DNA, 120 bp, Artificial Sequence
  ENSG00000227110_78 (sequence is synthesized)
tgccactgggctagctttggaggaccagctcacccagcagagttgggcagtggctcctccacagtgtgcctgggcttcaggaaggcaagaagcaggacttgtgttcagactggtgcaggc

SEQ ID NO: 1033622 - DNA, 120 bp, Artificial Sequence
  ENSG00000227110_79 (sequence is synthesized)
taagcttgagacaagacagccacatggactcataactgcatggagaacttcagtgaaggaacttctagtctgtaccatactggtaacacctgccttgtttgtttatttatttatttattt

SEQ ID NO: 1033623 - DNA, 120 bp, Artificial Sequence
  ENSG00000227110_80 (sequence is synthesized)
atttatttatttatttatttatttttggtaaaaataacctgcacaaacataacgggaaatcatgttctaaaaatataactttcctagtaatcctctacccttccgtatcaacttaagtca

SEQ ID NO: 1033624 - DNA, 120 bp, Artificial Sequence
  ENSG00000227110_81 (sequence is synthesized)
gtcaattataatccttttcgtcccccagtttttacacacacaaattttctaatgttggcaagactgttatttcagagaggggtgaggcttattaaaggtatcttaagggtctaaactagt

SEQ ID NO: 1033625 - DNA, 120 bp, Artificial Sequence
  ENSG00000227110_82 (sequence is synthesized)
agcgatatatagaagttagtggaggacagatttctgtggacagagtaagggagaatggtttaaaatactcgcataataattagaccagagagagcaaaaatattttatcttttattgcta

SEQ ID NO: 1033626 - DNA, 120 bp, Artificial Sequence
  ENSG00000227110_83 (sequence is synthesized)
gccccaatctattattgagcatctagggaactgtgtagggaagtattctaagctgatacctaatcagtgtttttaaaagatcttggtagccaagtcttttgtgtattatatctagtaaga

SEQ ID NO: 1033627 - DNA, 120 bp, Artificial Sequence
  ENSG00000227110_84 (sequence is synthesized)
attgtttcacagttgttttctaattgtactctgggtgaatatgcgctagagtctgggtgaatgtgtatcactatgcctggggacttggtgaggaggaaccagaaattcctcctttgttat

SEQ ID NO: 1033628 - DNA, 120 bp, Artificial Sequence
  ENSG00000227110_85 (sequence is synthesized)
ataggtaattatgtcttcatactatgggacacttccctcagatgcatcctctaaactggaaagagttaatttcccaaagcttaaactggttggcttaggattgggctcaggggaagagaa

SEQ ID NO: 1033629 - DNA, 120 bp, Artificial Sequence
  ENSG00000227110_86 (sequence is synthesized)
cccagaaactcaacatgctgacaaaagggtgaagttttttaccagtcggatttttggcctccctctctctgtgaaaaacagtaaaaggtctcagtatttttaaattttcctcacccctcc

SEQ ID NO: 1033630 - DNA, 120 bp, Artificial Sequence
  ENSG00000227110_87 (sequence is synthesized)
cagtgtttcattttgatacgttttctaataacccagtgtgtcttttcttgccttcaagccatcaaactccaaacggtcatgcaactggagcctccggcgatggtcccttttgccagggac

SEQ ID NO: 1033631 - DNA, 120 bp, Artificial Sequence
  ENSG00000267579_0 (sequence is synthesized)
gtgatacaagagacacagtggagaccgtccaatgagtggcatggctgccaggatgccaactgggacactaaagccctggcagtgggggctgcccagcagggctggccactagaaataaga

SEQ ID NO: 1033632 - DNA, 120 bp, Artificial Sequence
  ENSG00000267579_1 (sequence is synthesized)
gttacagagactaaaacccaccttattgccaagtgaccctcctctcaccagcctcccctgctgccacccaaattcctgccactgaactactcctcaaaataaaacacagctgtaaaatgc

SEQ ID NO: 1033633 - DNA, 120 bp, Artificial Sequence
  ENSG00000250091_0 (sequence is synthesized)
cacctctggaaggaccggcatccacacacacatacagccgcgccttttccaggaagcagctatccgtagcttttatcacggctccaagactctccccagcccataaagcttaggcacccc

SEQ ID NO: 1033634 - DNA, 120 bp, Artificial Sequence
  ENSG00000250091_1 (sequence is synthesized)
tgttttaaaaagtaggactgttggaaaccacctcagccataactacagtcagaagaggaagggccctggtgtcagagaggaggggctgggaccttcacctgcagcttgaggcgatgggct

SEQ ID NO: 1033635 - DNA, 120 bp, Artificial Sequence
  ENSG00000250091_2 (sequence is synthesized)
tcaatggggatgatcttcaggatcggcaggtccacaaccagcaccttgggtttgctcttgataagacatcctttttctatatcccagtcagcaccttccaggtacagtcctgagacaaag

SEQ ID NO: 1033636 - DNA, 120 bp, Artificial Sequence
  ENSG00000250091_3 (sequence is synthesized)
catcctagggacacaaggcagagactggatacaactggagcatgcacagcctgccacggagtggctctatcaggcgcacacacagcgacacacaggccactggctggcctcctccccagc

SEQ ID NO: 1033637 - DNA, 120 bp, Artificial Sequence
  ENSG00000250091_4 (sequence is synthesized)
gcattggggacagcccaggcccttctccagcatttctgtcctgcccaccttccctctgtggaggagcagcccagacaggagaccctgtggccctgccccatggcccagagaaatgggtgt

SEQ ID NO: 1033638 - DNA, 120 bp, Artificial Sequence
  ENSG00000250091_5 (sequence is synthesized)
ggggcggtggcctctcccccaggaatcctcattcctggggcatcaaggcccacggacttagaccaccctgggcccccaggctagaaagatgcatggtcccagagtcagaatgggcaccat

SEQ ID NO: 1033639 - DNA, 120 bp, Artificial Sequence
  ENSG00000250091_6 (sequence is synthesized)
ggcaaccccagctaccctgtgagccgaagtggctggggagcaggaagtcgaagcctcacagagaaagtggtctccggggaggaggacccagcagatgtgcaaagagaggaacacactcct

SEQ ID NO: 1033640 - DNA, 120 bp, Artificial Sequence
  ENSG00000250091_7 (sequence is synthesized)
gtggccccagagagagtggtggcccggacacctgccacctcccctgccactgagacctggagagtccctgcatctttaccggattttgtagtccacttccttgttccggaagaagtggaa

SEQ ID NO: 1033641 - DNA, 120 bp, Artificial Sequence
  ENSG00000250091_8 (sequence is synthesized)
tggctggaaagtatcaaaaatgaagtcccccaggtactcatccatgtagatggtcaggatgcggcgatcaaagctgtcgatggcccgtcctccatacatgacctgaaattagagggcctg

SEQ ID NO: 1033642 - DNA, 120 bp, Artificial Sequence
  ENSG00000250091_9 (sequence is synthesized)
agagccagccaggagctcagaacctactgtgtgcaccctgggggcccggggccagaggctcacccagggtcaagagactccagcagcctggctgctgcaaggcttgaacctgttgacttg

SEQ ID NO: 1033643 - DNA, 120 bp, Artificial Sequence
  ENSG00000250091_10 (sequence is synthesized)
cataacctttcgggccactgttcacacaattgatctgtggctttgctggcttcccaagggatagggcccaaagcagtaagaagccctcaggaagtgttgggagctcctgtgcagcaggca

SEQ ID NO: 1033644 - DNA, 120 bp, Artificial Sequence
  ENSG00000250091_11 (sequence is synthesized)
aagtcccccaaacacatcaaacaaacagctgaagaagccagcagctgcttctgtctttggaattgatgtcactgcctgagccgtgtgcagaccaccggggatgcttcctgtgagctctgt

SEQ ID NO: 1033645 - DNA, 120 bp, Artificial Sequence
  ENSG00000250091_12 (sequence is synthesized)
atacagcaacagctgaggcaaggggctagaggatgccttgcctggatccccagccatggatccagctcagggaacctccatgtgaacagagctcacttaggacaaagaacaaccaggtga

SEQ ID NO: 1033646 - DNA, 120 bp, Artificial Sequence
  ENSG00000250091_13 (sequence is synthesized)
gagcagagagaattgtcacagaaacccaaggggaacacaggggcagaagaggctggttctgagggctcagaggaaaataggggcacgaggccacagctctgtagccccagaggcacctgc

SEQ ID NO: 1033647 - DNA, 120 bp, Artificial Sequence
  ENSG00000250091_14 (sequence is synthesized)
ggaaggatccccggtcacccctacctctccaattaggtacttgaggctgccccacgggatccttgggtcccgttgctggaaggctttcgttaagtacgtgttcagaatttccatgcagac

SEQ ID NO: 1033648 - DNA, 120 bp, Artificial Sequence
  ENSG00000250091_15 (sequence is synthesized)
cttgaaagaagagaacacgctcagttatactgaaacccaccaagctgttcacattctgatacttttctgaaaaggctgctgggaacggtgcaaccctgctgtggttgaacccggaggaaa

SEQ ID NO: 1033649 - DNA, 120 bp, Artificial Sequence
  ENSG00000250091_16 (sequence is synthesized)
gtcgggaggaagtgggccgcctaaggaagccatttccaaggagaagcagccactgtcacctggaagtcagactcattgaagtcatagtacacgttccagccaatcttcccaaacttcctt

SEQ ID NO: 1033650 - DNA, 120 bp, Artificial Sequence
  ENSG00000250091_17 (sequence is synthesized)
ctctcctgcaccacagcatgaaagaacgccagcacgtagaccagcggcttgaaggcagggtgcgggcactggtccagcatttcgtgagagatcttgaagtaagttgccctcatgttgagt

SEQ ID NO: 1033651 - DNA, 120 bp, Artificial Sequence
  ENSG00000250091_18 (sequence is synthesized)
ttcagcccattgggtggctcggtgacaaccttcagaagagaagaaaacacacagtgatggagaccgcaggcccacaagcttggaagagtgtgcacaatgcaggcactgcgctttccttcc

SEQ ID NO: 1033652 - DNA, 120 bp, Artificial Sequence
  ENSG00000250091_19 (sequence is synthesized)
tctctacggagccatctgtctgagacctccaatagctaaagtctcttgtccagggcccaggctgagaagttaaaggactagatgttctggctctcagggtcaagggtcaagagtctttga

SEQ ID NO: 1033653 - DNA, 120 bp, Artificial Sequence
  ENSG00000250091_20 (sequence is synthesized)
ccttcctctgaaccatgagatcctttactatatataaaatgaaagtaaagtcttccctccacctccccagagagagagagagagacagagaatgacaaaacctttccaaaagaatttccc

SEQ ID NO: 1033654 - DNA, 120 bp, Artificial Sequence
  ENSG00000250091_21 (sequence is synthesized)
ggagaataaattaaatggggcatgtaaaccacgcgaaactcctgcagtcagcactagcgaactgcaggctgtgtgtgggggggggggccgtgaagtttatgaaaagtagcgtagatattg

SEQ ID NO: 1033655 - DNA, 120 bp, Artificial Sequence
  ENSG00000250091_22 (sequence is synthesized)
ttagggacacatgcagaattggtagagataggcctgggagtcacaaacacccaacccaggacagcggctccctctaaagagagaggtgggattgagaagggtttcaaccgcaaggtttca

SEQ ID NO: 1033656 - DNA, 120 bp, Artificial Sequence
  ENSG00000250091_23 (sequence is synthesized)
cctgcagcctaaggtttatttctacacagacaaaggcacaccccggccccagagcagcatgcaggtgttctgagaagctgcgtgctggcatgttgatgtccatcctgaagccagaccttt

SEQ ID NO: 1033657 - DNA, 120 bp, Artificial Sequence
  ENSG00000250091_24 (sequence is synthesized)
agggacttctgcagaatcccaatggggaagcccttggtggggtccgtggtgagccacaggcggaagtctgggtggggcttggtgatcctctccagggacttctccagatctttcagccac

SEQ ID NO: 1033658 - DNA, 120 bp, Artificial Sequence
  ENSG00000250091_25 (sequence is synthesized)
accaggaggtggcagttctgcagcatcagccactgcccccgagccaccgccgtctccagcagctgcagggccacctgcgccgggggagagggaagaggagaggggttggcatccaaaccc

SEQ ID NO: 1033659 - DNA, 120 bp, Artificial Sequence
  ENSG00000250091_26 (sequence is synthesized)
aaccccgtgctctccagagacccactccacacccacagaagggcgatggcagctccagcagaagccaaaagcaagccgaggatccaggagctacaggtggagccttcaaataaaccatct

SEQ ID NO: 1033660 - DNA, 120 bp, Artificial Sequence
  ENSG00000250091_27 (sequence is synthesized)
ttgagaaaccccatgggccccgtgggtgcactgagctggtcacacccagcctggaagatgggtgagcattttgcactcatctgcctccctggccctggaagtcccagctcctcccacaca

SEQ ID NO: 1033661 - DNA, 120 bp, Artificial Sequence
  ENSG00000250091_28 (sequence is synthesized)
gtcgctcctgtcccctgaggactcctgagcagggctgcaagagaccagctaaagcccaccaggaagtcgggactgtcctggccactgtaagatcttcagggccctaggcctggaaaacaa

SEQ ID NO: 1033662 - DNA, 120 bp, Artificial Sequence
  ENSG00000250091_29 (sequence is synthesized)
tcaccatgtcccctcccaaatgtaattcaaagcacaaacaagctaaacacccaaatcaagccttgctttctgaaatggcttaaaacacatgagtgctggcgttacaatagcttatttcag

SEQ ID NO: 1033663 - DNA, 120 bp, Artificial Sequence
  ENSG00000250091_30 (sequence is synthesized)
tgttgtggttgagagagctggcccgccttgctggtgcccagggcttgcctcctgggccatccagcatgggtattgccatcctcatctcacccaggggctttcagcagtagaggggcttac

SEQ ID NO: 1033664 - DNA, 120 bp, Artificial Sequence
  ENSG00000250091_31 (sequence is synthesized)
ccaaagcctcacagttcatagcaaagccaggactggcagtcagctccctctgaccccaacacgcatgcctgcaaccatcacacttactgacgcacagacttttcctgcaagctttgtccc

SEQ ID NO: 1033665 - DNA, 120 bp, Artificial Sequence
  ENSG00000250091_32 (sequence is synthesized)
acattgtactgaacttgtgtagcaagttctagcagggagcactgtgatgcagagaggcaagacctcagcaaagaaagctcactggctcagaaaggtaggaggatttgcaccacagttctg

SEQ ID NO: 1033666 - DNA, 120 bp, Artificial Sequence
  ENSG00000250091_33 (sequence is synthesized)
tcctgaatggtcctgggctcagcctctctccacccactcccttggccatgcaattggggccataataatcctgatccacaatgaggctgttcagggactaaggaaggtaaggactgtgtg

SEQ ID NO: 1033667 - DNA, 90 bp, Artificial Sequence
  ENSG00000250091_34 (sequence is synthesized)
atgaggctgttcagggactaaggaaggtaaggactgtgtgtgaaagggctttgaaaacagcacagcctgagcatcgtgtctcatagtgga

SEQ ID NO: 1033668 - DNA, 120 bp, Artificial Sequence
  ENSG00000250091_35 (sequence is synthesized)
taccaaaaaaattagccaggcatggtgacgcatgcctgtagtctcagctgctactggggaggctgaggcaggacgatcacttcacaatcaggaggtcgaggctgcagtgagctatgttcg

SEQ ID NO: 1033669 - DNA, 73 bp, Artificial Sequence
  ENSG00000250091_36 (sequence is synthesized)
cagctgctactggggaggctgaggcaggacgatcacttcacaatcaggaggtcgaggctgcagtgagctatgt

SEQ ID NO: 1033670 - DNA, 120 bp, Artificial Sequence
  ENSG00000250091_37 (sequence is synthesized)
caccatgatcacaacatgaggttgtgaaatcataactattattgtcatcttcccagtgtttcattactgcttcttagctcggaaatgcatccaactgatttgtggcgtggcactcagctt

SEQ ID NO: 1033671 - DNA, 120 bp, Artificial Sequence
  ENSG00000250091_38 (sequence is synthesized)
aaacccaggttagctccttcttagcagacaccagggacctcccctaaacgtagagcttgttcctttcagccacaaattaccttttcttgaccttgacccattgcaaggaatttgaggcga

SEQ ID NO: 1033672 - DNA, 120 bp, Artificial Sequence
  ENSG00000250091_39 (sequence is synthesized)
tttcctccaaaaccacttcgctctgctaatttcataagatcagtggcagggtcggagccaggactcaggataaacacaatgggcgaatgtggagtgctctgctcaaaaatagcttcaaag

SEQ ID NO: 1033673 - DNA, 120 bp, Artificial Sequence
  ENSG00000250091_40 (sequence is synthesized)
ctgatcattgggggctgcacatacctggtgaaagaaacacagtcagaaaactctcccgcgaggacagctccagaccaggggctggtctgtctgatcagcgctgcctcctccggtgtccag

SEQ ID NO: 1033674 - DNA, 120 bp, Artificial Sequence
  ENSG00000250091_41 (sequence is synthesized)
aaccttctgaccactcctctgggatagctcgttgcagtcttccctgttttagattctagtttctatgcacgtctcccaccctgatggggaactcctgagtggcagggacttctctgtacc

SEQ ID NO: 1033675 - DNA, 120 bp, Artificial Sequence
  ENSG00000250091_42 (sequence is synthesized)
ccctcacactcgattcagttggtttgtgctgagctgggcacctcagcttgccctctaggtgggcctgcccatggcacaaaaccctgaggttccacaggcgtgtcctgaatggtccacatc

SEQ ID NO: 1033676 - DNA, 79 bp, Artificial Sequence
  ENSG00000250091_43 (sequence is synthesized)
accctgaggttccacaggcgtgtcctgaatggtccacatcttgagttttgagttttgtgttttgtgtgaaatatataat

SEQ ID NO: 1033677 - DNA, 86 bp, Artificial Sequence
  ENSG00000250091_44 (sequence is synthesized)
tcccacctcagcttccttagtagcttcttttttattttttattttttagaggcagtatctcactatgttgcccaggctgggtctcg

SEQ ID NO: 1033678 - DNA, 87 bp, Artificial Sequence
  ENSG00000250091_45 (sequence is synthesized)
accaccacgcctggctaattcttttttattttttattttttagaggcagtatctcactatgttgcccaggctgacatcagcttcctg

SEQ ID NO: 1033679 - DNA, 120 bp, Artificial Sequence
  ENSG00000250091_46 (sequence is synthesized)
agatgtgcgttttaaaattcattgcaaacacaaagatattgggatatttcaggaaaaaatctgaagtcctagcttctttcagagtcagaggatccagccactgtgggttcccaatggcac

SEQ ID NO: 1033680 - DNA, 120 bp, Artificial Sequence
  ENSG00000250091_47 (sequence is synthesized)
ctggtatcagtcagcaggagctaagggcagctgcccagggaccaggaccccacccagcctcatcactcactgccatggcctgctggctacaagggcacatctgagctgcagccccacacg

SEQ ID NO: 1033681 - DNA, 120 bp, Artificial Sequence
  ENSG00000250091_48 (sequence is synthesized)
ctccgcctggcttcgtaccccatgctagagctacattgtccagtgcgatggccgtgaggcacagcacttaaaatgtggctagccccaattgagatgtgctgtaagtgtgaattcacacag

SEQ ID NO: 1033682 - DNA, 120 bp, Artificial Sequence
  ENSG00000250091_49 (sequence is synthesized)
tcacacaggattttgtagacttaataccagaaaaaagcatgtaaaatgtctcaatcatgttcatattgattatacattcaaatgataattttaatatattcatttaaataaaatgttatt

SEQ ID NO: 1033683 - DNA, 120 bp, Artificial Sequence
  ENSG00000227115_0 (sequence is synthesized)
agggtcggggaagctgtgatggcaatgagaagtcaacacactgaggatggagagaaagaagatgagtctgggagagaaagagaatgattcttctggccgagggaaagcaagaatatctgt

SEQ ID NO: 1033684 - DNA, 120 bp, Artificial Sequence
  ENSG00000227115_1 (sequence is synthesized)
tcctgcaactgcactgattctagaaacactctctattcgaactctcatgagggatacaatagctctccttcccttccaccatgactaaaatcttcctgggcctcagcagaagccgagcag

SEQ ID NO: 1033685 - DNA, 120 bp, Artificial Sequence
  ENSG00000227115_2 (sequence is synthesized)
ctgtgagccaaataaacctcttttcttgatagattacccagcatcaggtattcctttttatcacagtgtgaatggactcacacaatacatacaatggaatatcattcagccttaaaaatt

SEQ ID NO: 1033686 - DNA, 120 bp, Artificial Sequence
  ENSG00000227115_3 (sequence is synthesized)
atacaatggaatatcattcagccttaaaaattaggaaattctgacacatgctacaacataaatgaacgttgaggacattatgctaagtgaaacaagccaatcacaaaaagcaaatattat

SEQ ID NO: 1033687 - DNA, 120 bp, Artificial Sequence
  ENSG00000227115_4 (sequence is synthesized)
tcaaattcatagagacagaaagtagaccagtggtttccaggggctgggaaagtagggagtttttgtttttgttttttgagatggagtcctgatctgtcgcccaggctggggtgcattggc

SEQ ID NO: 1033688 - DNA, 120 bp, Artificial Sequence
  ENSG00000227115_5 (sequence is synthesized)
atccacccacctcagcctcccaaagagctaggattataagtgtgaaccaccgcgtccggcccaggagttcttgtttaacaggtaaagagttgcagttgggatgacgaaaaagttctggaa

SEQ ID NO: 1033689 - DNA, 120 bp, Artificial Sequence
  ENSG00000227115_6 (sequence is synthesized)
gttgcagttgggatgacgaaaaagttctggaaatagacagtggtgatgcttgcacaacctgtaaatgtacttaatgctgaaatgtggtacttaaaaatggttaaaattgtaaattttaag

SEQ ID NO: 1033690 - DNA, 120 bp, Artificial Sequence
  ENSG00000227115_7 (sequence is synthesized)
ttatatatatttagcacaataaaatgtaaaaaaactataaaggatgtacattaggggaaaaaaggcaaccacaaagtttaggggctgtgtatcagagatgaacactgtcatattacaggg

SEQ ID NO: 1033691 - DNA, 120 bp, Artificial Sequence
  ENSG00000227115_8 (sequence is synthesized)
aggctttgagaggcagaagttcctaggtcattgagaatgaatgcaaatagagattggatagaaattaaaactgacagtataaaaatgtagctcagaaaaattaaaaaaaaagctgaaaaa

SEQ ID NO: 1033692 - DNA, 120 bp, Artificial Sequence
  ENSG00000227115_9 (sequence is synthesized)
taataccagcactttgggaggccaagggaggaggatcacttgaacccaggtgtttgagaccagcctgagaaaaacaggaagaactcatctctacaaaaaaattatctagtgctgacctgc

SEQ ID NO: 1033693 - DNA, 120 bp, Artificial Sequence
  ENSG00000227115_10 (sequence is synthesized)
attatctagtgctgacctgcttggtgaatgctgggatctctggaagagggaggcagacatcacacaccagctggcaagtgggagctggcatgcaacatgccccaataccactcccctcct

SEQ ID NO: 1033694 - DNA, 120 bp, Artificial Sequence
  ENSG00000227115_11 (sequence is synthesized)
gccatccctatctcctaatggtgcctccttttggccaaacccacctttggctggagggcaacagagcccattgacgtggtccccttgcatctgctacctggggagaaaagcaggatggac

SEQ ID NO: 1033695 - DNA, 120 bp, Artificial Sequence
  ENSG00000227115_12 (sequence is synthesized)
actgaatctagagaaatgaagaaacccatccagaagaatactgcttctttatgtttttgtaggtgtacaaatcaggcctccccatgatattctaaactccttgaggaaagaagtggagtc

SEQ ID NO: 1033696 - DNA, 120 bp, Artificial Sequence
  ENSG00000227115_13 (sequence is synthesized)
ctgggcttctgatgtagcctccacagtgctcaggggatagcgacactggcaccctatagatatttaattacatgtggactggaagagaccaaacagcttcctggtatttcaatcaaaccc

SEQ ID NO: 1033697 - DNA, 120 bp, Artificial Sequence
  ENSG00000227115_14 (sequence is synthesized)
ggtgctctagacctgtggctcactctgagcaaactataatgagttgaacttgaatctgattcctgctaagaaaggtttcattttaataggcagtaaggctatgagctaacaccagaattc

SEQ ID NO: 1033698 - DNA, 120 bp, Artificial Sequence
  ENSG00000227115_15 (sequence is synthesized)
attcgagttactagactcactgaaactcctcacaggatccatctttcatgttttctagattttggtattcttatctaaactgcagacccagaaaccctatggaccctacctttccaatta

SEQ ID NO: 1033699 - DNA, 120 bp, Artificial Sequence
  ENSG00000227115_16 (sequence is synthesized)
tatttctgggaagagtcattctctgcagagctgaagcatgtaacagaaagttctcaacctgaaaaatataccttctgcgcccaagccccactttctgccactatttggtaatctcaagtg

SEQ ID NO: 1033700 - DNA, 120 bp, Artificial Sequence
  ENSG00000227115_17 (sequence is synthesized)
ggtgaggtggtctctgaacttcagcgctctcatggtcagagccacaaggggttactgggaggctaaagggaagtggcaaacgtggctgagattcagaaagaaaagcagcaagtgtagaga

SEQ ID NO: 1033701 - DNA, 120 bp, Artificial Sequence
  ENSG00000227115_18 (sequence is synthesized)
ggcaaggacttttccatcttttaaattccttaaaggaagccaaagttcattttccagtctccttcagatgcctctccaatccttcacagcagcgcacacataccgcagaaggaactcacc

SEQ ID NO: 1033702 - DNA, 120 bp, Artificial Sequence
  ENSG00000227115_19 (sequence is synthesized)
atcacaaaaagatgacagagcactgggggctggggtgccacttgtgttggctgagagcctggatgcatgtgaggtcaagcctgaccttgggaaagctgctctctggacattacttgctgt

SEQ ID NO: 1033703 - DNA, 120 bp, Artificial Sequence
  ENSG00000227115_20 (sequence is synthesized)
gccacatacacagcttgggtttctgaggaaacaacacaggctctaaggaggaactggaacggggcccagggtatatcttttacagcccgtacttttgaggaaaatagaagacaaaaggtt

SEQ ID NO: 1033704 - DNA, 120 bp, Artificial Sequence
  ENSG00000227115_21 (sequence is synthesized)
tttaaaaaacacaaagtgtatacacgtatacacaaagtttacaagtttgtgtgttttaacatctactctccttaagaacaagtagacaggaaagatattacctgatatgggttaaattgt

SEQ ID NO: 1033705 - DNA, 120 bp, Artificial Sequence
  ENSG00000227115_22 (sequence is synthesized)
aaacatgttttgaagtgctaacctttggtacctgtggatatgaccttacttggaaataggtttttgcagacgtaaccaagttaagatgaggtcatatttgattaggctgaaccctgaatc

SEQ ID NO: 1033706 - DNA, 120 bp, Artificial Sequence
  ENSG00000227115_23 (sequence is synthesized)
cagtatgactggggtccttatataaacaagagagacacacgcagagtgaagatgatgtgttgaaacacaggaacagtgtcatgggatgctggggacagcagttggagtgatgcatctatg

SEQ ID NO: 1033707 - DNA, 120 bp, Artificial Sequence
  ENSG00000227115_24 (sequence is synthesized)
ggccaagggaatgccaaggattgccagccatcaccaggacagaagcatgggtactgatgccctcacagagcccttgaagagagtcaaccctgctgacaccttgatttcagacttccagcc

SEQ ID NO: 1033708 - DNA, 120 bp, Artificial Sequence
  ENSG00000227115_25 (sequence is synthesized)
tccagaactaagttcctcacaggaagtgtttggcaggcagctcaggcccctgctgagatggagaatctagcaaacctgtcccgctgattgattaaacactgaggaggctccaagacccaa

SEQ ID NO: 1033709 - DNA, 120 bp, Artificial Sequence
  ENSG00000227115_26 (sequence is synthesized)
gcgtgaaattccttggctctgattgtgctaagggtagagctcactaatgaatggagtctgattacagcccagcctctccagtgcctcctgttgccccaatttgggggattcttctgcttc

SEQ ID NO: 1033710 - DNA, 120 bp, Artificial Sequence
  ENSG00000227115_27 (sequence is synthesized)
gagtacatcatggaaagcagcacagagttctcagcaggatctgcgatgtctgatccaagaaagatttttgttgttgtcgtcattgttgttttttaatcctgatcattgctctcaaaccct

SEQ ID NO: 1033711 - DNA, 120 bp, Artificial Sequence
  ENSG00000227115_28 (sequence is synthesized)
tctctacacagcttggcgtggggggtagttgatttccagtgaaaccgggtggaagcagtgccactgccacctgtgaggaggaaatgggcaacagtcggcttcatccgtcctgaacgctca

SEQ ID NO: 1033712 - DNA, 120 bp, Artificial Sequence
  ENSG00000227115_29 (sequence is synthesized)
ggcctgaatgttccaaactgatgctaaactgagactctctgaaggcccatggggaagcctggcattgtgtagccatttcttccagcaaggctctcccctcacattcacagcctgccactt

SEQ ID NO: 1033713 - DNA, 120 bp, Artificial Sequence
  ENSG00000227115_30 (sequence is synthesized)
aaagctttgggagacaatgtagttgacctgtagttcttcctgtatgtggctcctggtcagtcactgggcaaggaggaggctgcaggcattgtgctatccccttatctctctctctgtctg

SEQ ID NO: 1033714 - DNA, 120 bp, Artificial Sequence
  ENSG00000227115_31 (sequence is synthesized)
tctcttatctagttcaaatcagcaaatggagcttggtccttcgtttgtaaagtaagggggtggaaaattatccctaagttacctcctggtttagaaaagtcttaatgctgttttataata

SEQ ID NO: 1033715 - DNA, 120 bp, Artificial Sequence
  ENSG00000227115_32 (sequence is synthesized)
actcacccacctctcctcttccatgagctcagagcggcccagcccttggaatgtgtttctgccacgacaaggaatacaggaggagttgaacaggaaacctgcctcctatcagattcacct

SEQ ID NO: 1033716 - DNA, 120 bp, Artificial Sequence
  ENSG00000227115_33 (sequence is synthesized)
gaggacgtgggttgtcacgagctccccaaacaataaagcactttacgacataggaggcattattattaagctgttttcagtccctgatacctgcatgttgtaggaccatggtgcatgaag

SEQ ID NO: 1033717 - DNA, 120 bp, Artificial Sequence
  ENSG00000227115_34 (sequence is synthesized)
gattttaaggaggcacttttgaaatgtgaaagggacatagactgtacatctggagcacaaaggcaggtttaaccagctttgtcctgctcggcgccagttggaagagagcatctggctttg

SEQ ID NO: 1033718 - DNA, 81 bp, Artificial Sequence
  ENSG00000227115_35 (sequence is synthesized)
gtcctgctcggcgccagttggaagagagcatctggctttgaagtgtctaaagccaggcgtgacgctggattctacagctgg

SEQ ID NO: 1033719 - DNA, 84 bp, Artificial Sequence
  ENSG00000227115_36 (sequence is synthesized)
tggagctcagtgcagccttcaatccctgggctcaaggaatcctctcacctcagcctcccaaatagctaggactaaaacctctgc

SEQ ID NO: 1033720 - DNA, 120 bp, Artificial Sequence
  ENSG00000227115_37 (sequence is synthesized)
tgtgtttccttagactttctgagggaaagagaaaggagtgagaagggaatgtggaactaattcccacattaattgaagacaataaggagacagcagaatacttgcttcagtcatgaggcc

SEQ ID NO: 1033721 - DNA, 120 bp, Artificial Sequence
  ENSG00000227115_38 (sequence is synthesized)
cctggaacagaagaactatgtcacataccaaaggacagcataacccacaataagcccccacctcaaaacccacagactattaccccatactgtggcataaacttgagatgcataattgta

SEQ ID NO: 1033722 - DNA, 120 bp, Artificial Sequence
  ENSG00000227115_39 (sequence is synthesized)
gtaagatagttttaggcaccacctgcttctatacaagttttatgatctctcctcctaatactgcagaaattatgggttttaccatcttagtatatagcataatatatccagcacacgtta

SEQ ID NO: 1033723 - DNA, 120 bp, Artificial Sequence
  ENSG00000227115_40 (sequence is synthesized)
tatatttagcactttattagagtaccccggtttgctcttctgaaaaactgtgaggctggatttgatgctttctaaggcttttttttccctatgtattctctgatcagaataccctgctca

SEQ ID NO: 1033724 - DNA, 120 bp, Artificial Sequence
  ENSG00000227115_41 (sequence is synthesized)
acgaagccgctggtaatgaagctcattaaaaatgaaatcacttaggtagggagttggagagtgactcatttaaaacattgcctcctggaaactgaaattcattgaacacaaaagcttttg

SEQ ID NO: 1033725 - DNA, 120 bp, Artificial Sequence
  ENSG00000227115_42 (sequence is synthesized)
gagggactcagattggtagggactctgcagtctgacaaaagggtctggtgacagggggcatctgatcccatctagggagggtagggagagggagtccggagagggatgcataaacaagcc

SEQ ID NO: 1033726 - DNA, 120 bp, Artificial Sequence
  ENSG00000227115_43 (sequence is synthesized)
ttcttcagacatgctacctatgcctctcccatggctcctgcatgcttggatgttacgcttctttaaagagcaggtgacaggttgcccctgggacgctcagagccaggcaaggtgggactt

SEQ ID NO: 1033727 - DNA, 120 bp, Artificial Sequence
  ENSG00000227115_44 (sequence is synthesized)
ggccctgctcccccttcttctatctgaaaagttgcccttagtcccacggggccccttcctgtcacaccgacacagcttgctggtttttgttttctttcactgtcctttttcttttttcag

SEQ ID NO: 1033728 - DNA, 120 bp, Artificial Sequence
  ENSG00000227115_45 (sequence is synthesized)
caggtgagatcggcactggctccaaggaagaggttttccatgcagatgtggaaactgccaaaagaccttggatgtgagctgccacctgctgctggaaagatgtggagagaacttggattc

SEQ ID NO: 1033729 - DNA, 120 bp, Artificial Sequence
  ENSG00000227115_46 (sequence is synthesized)
aggaagagagctgcttcttccctcctcccatatcccagtttcttgccgtgctttccattggcataccctaactgaaagccactggcaagagacttgcagaaattaactttccagagtctc

SEQ ID NO: 1033730 - DNA, 120 bp, Artificial Sequence
  ENSG00000227115_47 (sequence is synthesized)
aggccctctagattacagagaagaggacggaagagagggaatggggcctgagacaaataccttcatagtgttcttcctaaaatgtaaaaccaataattgaaaactaaactctacataaga

SEQ ID NO: 1033731 - DNA, 120 bp, Artificial Sequence
  ENSG00000227115_48 (sequence is synthesized)
gaggaatcattgtgtcccaggaattgctatagtggtgatggggcatgaatcttaagatggaccgaaaatgctgacgccaatgccaaggaaaaaagtgtcttgaaaaagcagccgtggacg

SEQ ID NO: 1033732 - DNA, 120 bp, Artificial Sequence
  ENSG00000227115_49 (sequence is synthesized)
tggagttaccaaatcatccgaagtggctcctggaccgggtggaggagccaggctgcagaaatgcagttcatcgcaggagttttcctgaacagagaaaagtctccacagaatagcaaaaat

SEQ ID NO: 1033733 - DNA, 120 bp, Artificial Sequence
  ENSG00000227115_50 (sequence is synthesized)
agcaaaaactcgaagtcaagggtcttgaggtctaaattttctgtgtgaccccagggaaatcgtttcatctttctaggtcttcacatcctcacctgaaaaataaagtgcttggctaagaaa

SEQ ID NO: 1033734 - DNA, 120 bp, Artificial Sequence
  ENSG00000227115_51 (sequence is synthesized)
gctgacgtctactctgctgggaaaaatggcacactgagtctggagatagtgaagtgccttttgtattcactcccatccctctaactgctctgttctcctgcccagttgcttactcaatat

SEQ ID NO: 1033735 - DNA, 120 bp, Artificial Sequence
  ENSG00000227115_52 (sequence is synthesized)
gaggagcatagcagcgctaggctctggaagagagtaggcaaatatggcaatagaaaatgctaacagcagcagatggcaggacaagtttcctttagattcacatgagcagttgtttttttc

SEQ ID NO: 1033736 - DNA, 120 bp, Artificial Sequence
  ENSG00000227115_53 (sequence is synthesized)
tggtgggcttttattattaaatttattttcatcatttggctagataagcctatctttgtacttagttatggtgtgccggaatcatcttgcttttaatatttgaaaaaaagagctgtatat

SEQ ID NO: 1033737 - DNA, 120 bp, Artificial Sequence
  ENSG00000227115_54 (sequence is synthesized)
cataccaattataaatacaactacatggcctcatgtgtaattgtcaactcagttacatggattgtagcctttgtgtttggagggagtgaatgctcactttatcctaaagagttgatagaa

SEQ ID NO: 1033738 - DNA, 120 bp, Artificial Sequence
  ENSG00000227115_55 (sequence is synthesized)
gcctaaaagcttagaaacttacaagaaataatcacttgtatggcttttcttcaggggccaaaaaatattggaactttacttgatttcaaacatattatccttatctaaggcctggaggtc

SEQ ID NO: 1033739 - DNA, 120 bp, Artificial Sequence
  ENSG00000227115_56 (sequence is synthesized)
ctggatctaagccctattttacaagtattcaaagctggcactcttttcttaatgccatcacttctacccttgcagatttttaattttttatttctaactttcaataagaggaagcaaagg

SEQ ID NO: 1033740 - DNA, 120 bp, Artificial Sequence
  ENSG00000227115_57 (sequence is synthesized)
tcagcaggttctttggaaattaaatttaaatgattattacaccttaaacctgccctcctgcccccccaaggaagaattcttcacccccatgttagcagcagcagcagcagcatctccatt

SEQ ID NO: 1033741 - DNA, 120 bp, Artificial Sequence
  ENSG00000227115_58 (sequence is synthesized)
attgctcatcttccttctctgtagctcttgccatcagtgttgattaatttcataagtagcagaaatgacataatacaatatatttctgacaattccagaccaggaatcctagactcataa

SEQ ID NO: 1033742 - DNA, 120 bp, Artificial Sequence
  ENSG00000227115_59 (sequence is synthesized)
aattccaaggatacaaaggaacaccaggaggtcatctaacccaatcctctgctttccaggaaagaagtgttcaaaccatacagaatgaatttattttccagcaaaatatcctttgtgatg

SEQ ID NO: 1033743 - DNA, 120 bp, Artificial Sequence
  ENSG00000227115_60 (sequence is synthesized)
agagggatagtgaaagaataatggacataaacaggaagttaaaatgaaatgactcttctcttttcacaggatctctagttagtagtaaaggaccatgagtgctggggaaaaaggccatca

SEQ ID NO: 1033744 - DNA, 120 bp, Artificial Sequence
  ENSG00000227115_61 (sequence is synthesized)
tagataattttgtgaacccagtgataatctttctattgaagagagatgtgccgtgaacctgattatttttcaaagaactgtcattttcccaagagctggcattttcagcctcttgaagag

SEQ ID NO: 1033745 - DNA, 120 bp, Artificial Sequence
  ENSG00000227115_62 (sequence is synthesized)
caccaaccactgttatcacagctcaaacttgagcaatcaatcaggggtttgaaacattaaactggaatatataatttcaacagggataattttagcaaaattcatcctgagctaaaacag

SEQ ID NO: 1033746 - DNA, 120 bp, Artificial Sequence
  ENSG00000227115_63 (sequence is synthesized)
ccagaggaaaggacacagcaggccatgggtttataataagatttggaggggctgagcttggctgatttaccaggaggtaggttgatgcccaagacggtgcccactgggaagctgcaagtt

SEQ ID NO: 1033747 - DNA, 120 bp, Artificial Sequence
  ENSG00000227115_64 (sequence is synthesized)
gtgagtagggggataacagcttgagaagtaccattaaatgtcttcccatacatttgcccacagtagaatttttcttccacagaaaacactttgacattctattggaatggaaagcaagag

SEQ ID NO: 1033748 - DNA, 120 bp, Artificial Sequence
  ENSG00000227115_65 (sequence is synthesized)
tttataagcattttacaatgtcaggatttttactagtcaatctacaaataggtagcattttgcctctttgctcttccctctcctgcttgcacactatgttcctgaggacttttcctctct

SEQ ID NO: 1033749 - DNA, 120 bp, Artificial Sequence
  ENSG00000227115_66 (sequence is synthesized)
ctggcaagaggctaccaaagaagctggctcagcccctcccaatactccagattcaacaggcagctgtagtcagactcagtcaaaccaaagaacttgcttaattggtgatttctgctgatg

SEQ ID NO: 1033750 - DNA, 120 bp, Artificial Sequence
  ENSG00000227115_67 (sequence is synthesized)
tcagtggtggtggtgataaggataatattgggaataatgatgatgctagatgacaaaggtcatgggtttgaaggaagagtggtgtttttgctggttttaaagtttctacacacttaatta

SEQ ID NO: 1033751 - DNA, 120 bp, Artificial Sequence
  ENSG00000227115_68 (sequence is synthesized)
caatttaggattttcatgctgagtgtgaatcagggttcagttaaacaaatcaggattgttaggtaatgacaggagacaatgggtagaagtcatctgaagcaccttgagagaaagagggct

SEQ ID NO: 1033752 - DNA, 120 bp, Artificial Sequence
  ENSG00000227115_69 (sequence is synthesized)
gaggaagtaaagcagtttatgcaatatccactatgcgccaagcttgcttattcttgctctctccctctcaccactctgtatagggttatataggcaaaaggcagtaaaaagacacctaaa

SEQ ID NO: 1033753 - DNA, 120 bp, Artificial Sequence
  ENSG00000227115_70 (sequence is synthesized)
gacatagagcctttaatgacactatttaggctgttgattaaatgctctgaaactcactgtgtctttgggctattacatgagttaaatatcccctgtgtattttaacccaaaggtcatatt

SEQ ID NO: 1033754 - DNA, 120 bp, Artificial Sequence
  ENSG00000227115_71 (sequence is synthesized)
ttataaatgataaaaactgagattttttaagccaggtctttgacttcgggatgcaatccctttttatgagagcaaacgctctcctaagtgattaaaatagttaaattttatgtacaatgc

SEQ ID NO: 1033755 - DNA, 120 bp, Artificial Sequence
  ENSG00000227115_72 (sequence is synthesized)
aatacacagacacacacacatatatatgtagatcactgcatttaatcatttcattatcataataagtttagaactggtatcatttttattttacatacaataagtgtgaacaagagaagt

SEQ ID NO: 1033756 - DNA, 120 bp, Artificial Sequence
  ENSG00000227115_73 (sequence is synthesized)
taattaatttgaaatgattgttagttgcagggccaagcacttacaaggattgaacactagtgtcagggttggtccttgaaagatccatgccagtcaggacatgcccttcaccttagtgac

SEQ ID NO: 1033757 - DNA, 120 bp, Artificial Sequence
  ENSG00000227115_74 (sequence is synthesized)
tgattttggtgacccagatctaaggcactcatggcattccccttggcctcagagagtggttcaagaataggcaaatggtccatttaagcaggaaaaaccacagagagaggcctgtttggg

SEQ ID NO: 1033758 - DNA, 120 bp, Artificial Sequence
  ENSG00000227115_75 (sequence is synthesized)
aggttctcagaaagaagcatctccatttctctgcaatactcaggtgtgatatgcagatgtgaagcctgaaactaatgcagccatttgatcttataagataaacccaactggcaatgaaac

SEQ ID NO: 1033759 - DNA, 120 bp, Artificial Sequence
  ENSG00000227115_76 (sequence is synthesized)
tgacactgcagaaggcagagaaacgagacctaaagacatagagcctttaatgacaccatttaggctcttgattaaatgctctgattctcactgtgtctctggattttccattacatgaat

SEQ ID NO: 1033760 - DNA, 120 bp, Artificial Sequence
  ENSG00000227115_77 (sequence is synthesized)
taaatatctcctgtatagtttaacccaaaggtcataaaacttgtaaatggtaaaactgagattctaagccatgtctttgacttcaggatccaatcacttttctatgactgcaaatgctct

SEQ ID NO: 1033761 - DNA, 120 bp, Artificial Sequence
  ENSG00000227115_78 (sequence is synthesized)
cctaagcgattaaaataattaaattttatgcacaatgcgatagaaaattaacttcagctcctcagcagggaagtaatctgatcaaaacaatgggtgagacagatggccctgatttgggtg

SEQ ID NO: 1033762 - DNA, 120 bp, Artificial Sequence
  ENSG00000227115_79 (sequence is synthesized)
ttcagagttaactggggaaggacaggaaggaaggtagaggaattatcttaaagtcattgttgcagtgttctggggatttgctacaacaaattcatgtgtgtcttcaataagtatttgagc

SEQ ID NO: 1033763 - DNA, 120 bp, Artificial Sequence
  ENSG00000227115_80 (sequence is synthesized)
acttaccctgtgctagatactaagaatatagtgtgacaaaatagacatgctccctgcttatatgaagttatagtcagtctggagcagtggttgtcaaaccatgacccttgagccaaatac

SEQ ID NO: 1033764 - DNA, 120 bp, Artificial Sequence
  ENSG00000227115_81 (sequence is synthesized)
aggcatgagttggaggaggctcagagacagacattgtgtgatactgaaaatctccttcaactcttacccttctcctcaactcccagaatctctctttctttagggtttgttacataggta

SEQ ID NO: 1033765 - DNA, 120 bp, Artificial Sequence
  ENSG00000227115_82 (sequence is synthesized)
cacccatcaacccatcatctacatcagagaaccttgtcttgggctattggtagcctgtagataaattacccttggatcaagtgaccatccctgtacaataagagttggctgaggaagagg

SEQ ID NO: 1033766 - DNA, 120 bp, Artificial Sequence
  ENSG00000227115_83 (sequence is synthesized)
ggagcctcagtcccaaagagtcagtattgggtggtaactgcacttttcagtgagactctcatgttccacactaggcccccaaggatgcttctgcaggtaatccatgctgagaaaatctgc

SEQ ID NO: 1033767 - DNA, 120 bp, Artificial Sequence
  ENSG00000227115_84 (sequence is synthesized)
aaagtctttccagcctggtccagtccacacttgttttgccctttccaactctagactattgattcctggaggacgaagaactatttttagccttctttttctgcactgagtctcaggcag

SEQ ID NO: 1033768 - DNA, 120 bp, Artificial Sequence
  ENSG00000227115_85 (sequence is synthesized)
tgtcagacttacttattttaggaaatctttattgagacctcctggatgccaggtattggggtcacaaagacaaaagttcccttaaggattactgtccaattggaaggacatacatgcaaa

SEQ ID NO: 1033769 - DNA, 120 bp, Artificial Sequence
  ENSG00000227115_86 (sequence is synthesized)
tgaatatatgcctggaaatttgttgattgattaaatgggcatttaatatatttttttcaaacccagagacctaaatatttactgatctttccctaccatcccattaaataacagttctcc

SEQ ID NO: 1033770 - DNA, 120 bp, Artificial Sequence
  ENSG00000227115_87 (sequence is synthesized)
aggatctttgaaggaatataagctcatggaagggcagagatcatatcagtcattctcatccttttataggtacttttgttaagagtcaactgtggcacagatcattactttacctagatc

SEQ ID NO: 1033771 - DNA, 120 bp, Artificial Sequence
  ENSG00000227115_88 (sequence is synthesized)
ttaatcctaacaacaatatttttatggagaaggaaactgaggctcagtgaggctaagccatctggccaaggtcatacaataagaggcagagctcagagtggaacccagtgtgatatatca

SEQ ID NO: 1033772 - DNA, 120 bp, Artificial Sequence
  ENSG00000227115_89 (sequence is synthesized)
aaatacagtctacacatctttcttccaaagcatttttcctgtagcaattaagtgtgcctgtaacttttcagctaacctccagaaagttaagatggctgtgtcttttataagatgtaatta

SEQ ID NO: 1033773 - DNA, 120 bp, Artificial Sequence
  ENSG00000227115_90 (sequence is synthesized)
tttgagaaacaagtgactaaaacttgcaaaatctgcagggaagaacttctaggctctttggagtttttttgccctgcaccaacatcctctcaaaggcaaggaacagcaattatgataaaa

SEQ ID NO: 1033774 - DNA, 120 bp, Artificial Sequence
  ENSG00000227115_91 (sequence is synthesized)
ttgataatgacctctaatcttcccaggggaattttgagcatgtatcttatcttaaaacatttttttgaactttggcacttttattgcctttacaagaacagctatgattaagggatgact

SEQ ID NO: 1033775 - DNA, 120 bp, Artificial Sequence
  ENSG00000227115_92 (sequence is synthesized)
ctcttagttgcaatggatgaaacaattaaatgtgtttacctgctgacattccaaaccacttcttgataggaaacaaaggtgtgaaacagctctggtgtttatgtgaacataatttttttc

SEQ ID NO: 1033776 - DNA, 120 bp, Artificial Sequence
  ENSG00000227115_93 (sequence is synthesized)
taaatattattttttttttgttttgcaccctgcttagaatgtacttttgattttcttgagtttagatgaagttgacaatcatgatgtaaagccagatcgaaatagaattcctgttgccat

SEQ ID NO: 1033777 - DNA, 120 bp, Artificial Sequence
  ENSG00000227115_94 (sequence is synthesized)
tttaagtttataatgtttaactacctaataatggctggaaattaagtctggaatcacacccaagttatactacatattcaatcaggctgaatttgacgttaatgatatgactaggaggag

SEQ ID NO: 1033778 - DNA, 120 bp, Artificial Sequence
  ENSG00000227115_95 (sequence is synthesized)
ttttttttttttttttctcatttcatgaggcaccctataccagcagtaaaatgtttcttaaatcagaggaaagaattgaccttacagtttccttttttttctgagatggagtctcactct

SEQ ID NO: 1033779 - DNA, 77 bp, Artificial Sequence
  ENSG00000227115_96 (sequence is synthesized)
ctcccaagtagctgggattacatgtgtgtgccaccacagccagctactgctggtctcaaactcccaacctcaggtga

SEQ ID NO: 1033780 - DNA, 120 bp, Artificial Sequence
  ENSG00000227115_97 (sequence is synthesized)
tgctggcattacaggtatgagccactgcgcccggccagttacttttaaaacttgatctagaacgctcttgattttggaattataatgcttaatattttcctcaattatgactgcccagat

SEQ ID NO: 1033781 - DNA, 120 bp, Artificial Sequence
  ENSG00000227115_98 (sequence is synthesized)
gactgcccagatttagccaagggcaattagaagaggaaagactgacttcatcttgacccctggggccagagctactatagcaaggccaacttcaacccgtatggaagatgtggctgctga

SEQ ID NO: 1033782 - DNA, 120 bp, Artificial Sequence
  ENSG00000227115_99 (sequence is synthesized)
gagcttcctatagagcccctgacataggataaagggaaaatatgtctgttttaaatcatactaacattgtgataaagtaatattatgtcctttgaaggacctaaaatagtgctaaattgt

SEQ ID NO: 1033783 - DNA, 120 bp, Artificial Sequence
  ENSG00000227115_100 (sequence is synthesized)
atcatgaccaagaaacatttgtttagcatttactctgtgccaggcactaaactaggtatgaaggatataaaactaaataaggtgtaatgtttgtcttcaaagagtttctttatcctgcaa

SEQ ID NO: 1033784 - DNA, 120 bp, Artificial Sequence
  ENSG00000227115_101 (sequence is synthesized)
gaaattagagatggctaaatttaaaaaaatttttattaatgtatttttaattttttttttaattcataaaatccagatcctgcacaagatagctggacttctctaaggaatcagaattac

SEQ ID NO: 1033785 - DNA, 120 bp, Artificial Sequence
  ENSG00000227115_102 (sequence is synthesized)
aaggaaaacatattgattttatccctttgttagtgaaaataatacattcagatttgaaatggtcaattgttcacagtgatttttggctgttatgaataaagctgttatgaacatatgtgt

SEQ ID NO: 1033786 - DNA, 120 bp, Artificial Sequence
  ENSG00000227115_103 (sequence is synthesized)
taagccggtgtcttctgtgacttgtgcttgacccctgcctaacctccaggtaaaggaaaagtgagagccatggctccatgactaactcccttccctctgccctgttggattccctggcaa

SEQ ID NO: 1033787 - DNA, 120 bp, Artificial Sequence
  ENSG00000227115_104 (sequence is synthesized)
tctgcaggagtgttctgagacagaggctgcagtggtctctgggccactccagaggaatagtgaccctgagtatggtgtcaaggttggataagggggcttagagcacctcactaaaagcct

SEQ ID NO: 1033788 - DNA, 120 bp, Artificial Sequence
  ENSG00000227115_105 (sequence is synthesized)
tcctttcctgtctgattgcatacagccagggcaaagctggtggggtagggctaaggacctttcatacctaaaagacctctgtagttcatcttggttacaacatatttcttccacttcctt

SEQ ID NO: 1033789 - DNA, 120 bp, Artificial Sequence
  ENSG00000227115_106 (sequence is synthesized)
tcctaccccaaatgaaaattccaccttcctggactcattctcaggagcatttatttacattttattttaagataattgtagcttgacatgtaatcgtgagagataaaacagagagaccct

SEQ ID NO: 1033790 - DNA, 120 bp, Artificial Sequence
  ENSG00000227115_107 (sequence is synthesized)
agaaggctgggaattgtagaggagctcatggactacatggtgaccaccaactatttctgtcacagccacttgtgtatcaatcatctgggaagtctttacttgatacacatatcaagtaaa

SEQ ID NO: 1033791 - DNA, 120 bp, Artificial Sequence
  ENSG00000227115_108 (sequence is synthesized)
ataccatattgtctgaaactttccttaatataccataaagaaaaaagagtgtggagcactgaaagataaaagaagattgggaaactgttaattgttgtagctgggtgatgagtacctggg

SEQ ID NO: 1033792 - DNA, 120 bp, Artificial Sequence
  ENSG00000227115_109 (sequence is synthesized)
aattcatgatattattctctctacctttgcgtatctttgaaaatttccattataaaaatttaagcaataaaggaaaaactctcatccagggaacttttatttagtatatctgaggtgagg

SEQ ID NO: 1033793 - DNA, 120 bp, Artificial Sequence
  ENSG00000227115_110 (sequence is synthesized)
cttgggtatgaatattttgcaaaatcttcccagcttatttccaaggggatttaaccctatcactcatcaagtttcatattcataccatggtcatgtattatttaaaaaaaaaaaaaaaaa

SEQ ID NO: 1033794 - DNA, 120 bp, Artificial Sequence
  ENSG00000227115_111 (sequence is synthesized)
ccctccttctccatgcaaacttgccaagtcacaatgacattacttacctcagtactctatttacaattatagtaattttttgaagttattttctttcatttaagaggagtgatttctatg

SEQ ID NO: 1033795 - DNA, 120 bp, Artificial Sequence
  ENSG00000227115_112 (sequence is synthesized)
gttgcacactcattcattcattcattcatttatttcattccacaaatattaagtgcctatgagttatcagtcaatatgatggcttgggagatacagtgatgggtacatctatgaggcttc

SEQ ID NO: 1033796 - DNA, 120 bp, Artificial Sequence
  ENSG00000227115_113 (sequence is synthesized)
tgctttcatggactttgggatttggatgggagacaaaggtcaaaatattgccatgcaaatgtctgattgcaatggtacgaagtactaagaagagaaagcatcaggagctgtgctaataaa

SEQ ID NO: 1033797 - DNA, 120 bp, Artificial Sequence
  ENSG00000227115_114 (sequence is synthesized)
catctacatcagccatgatgtgcttactatgtggcaggcactgctcttggtgctgtgacaaaaacaggacatctagagcctctgtcttcatggatctcatattctattgggtggagagac

SEQ ID NO: 1033798 - DNA, 120 bp, Artificial Sequence
  ENSG00000227115_115 (sequence is synthesized)
ttacagatttctgataactttggagattgtgacagcagaatagagggaaaactttctgtaatcatggagagccgaaatattcatgaatatcaagcacaacaggaattaactgcatagact

SEQ ID NO: 1033799 - DNA, 120 bp, Artificial Sequence
  ENSG00000227115_116 (sequence is synthesized)
gaactagtagaagactgaagtaatccttttgactttttgcttaaaatgtggctgatcctttgtttcatttttctgagtcaaggaaacttttcttttgaggtattgacaggttttaataat

SEQ ID NO: 1033800 - DNA, 120 bp, Artificial Sequence
  ENSG00000227115_117 (sequence is synthesized)
taaatacactgtacttctatgaaagaaatttggagcatatttgtttctctctatctgatttcttcagaatttagaaaatatgtgtgagtgttcttaacttatggaaatacagttatttac

SEQ ID NO: 1033801 - DNA, 120 bp, Artificial Sequence
  ENSG00000227115_118 (sequence is synthesized)
aataagaatctgttttcatttgtaacagacacaattagagaaactaattattttaccaaggctttcactggaatagtgtgctttcctttaaggaatcaaactttacttacagagccaatg

SEQ ID NO: 1033802 - DNA, 120 bp, Artificial Sequence
  ENSG00000227115_119 (sequence is synthesized)
agccaatgaaagccccttgggaaaactggcctcataccttgttttcactgtcctggtacagggttcctgacatgggataagtaaagaatatcactttctgacaggccaaggagccccaag

SEQ ID NO: 1033803 - DNA, 120 bp, Artificial Sequence
  ENSG00000227115_120 (sequence is synthesized)
tcatcttgtgacctcaagaagaaaggaattcacccaacttataggtatttgatggtacaaatccacggctgggctcagctttaaaaaagtcttatctgagactccttctatagaacaaag

SEQ ID NO: 1033804 - DNA, 120 bp, Artificial Sequence
  ENSG00000227115_121 (sequence is synthesized)
ttccatcaaaaccaatttaaaaagcccatgtgaaaaataattattctttctgcaccttatagaagtaatctagccaagtataataaagcaaattggtactaccataatttgactttaaaa

SEQ ID NO: 1033805 - DNA, 120 bp, Artificial Sequence
  ENSG00000227115_122 (sequence is synthesized)
tgggaaattggagagaaaaaaatatgtttcaaaactacagtataccttttgttgattctagtcttgcctaatatttttcaatttttattattttctgtagtttggattgaactctaattt

SEQ ID NO: 1033806 - DNA, 120 bp, Artificial Sequence
  ENSG00000227115_123 (sequence is synthesized)
tccctggctacaagtctccaaaataatgttttcaatttttttcttcctttttcttcttttccttttcccctcaatttttcctaatttgaaatcactgaaaactaagttgtgttttcttaa

SEQ ID NO: 1033807 - DNA, 120 bp, Artificial Sequence
  ENSG00000227115_124 (sequence is synthesized)
agttgtgttttcttaaagccatgtgaactgaaactagacaacttagcttcagaagacaataatagcaacctgtttacatacataagccaactctcatacctgcctactgatgtatggact

SEQ ID NO: 1033808 - DNA, 120 bp, Artificial Sequence
  ENSG00000227115_125 (sequence is synthesized)
gaatcctctcacctcagcctcccaaatagctaggactacaggtacacactaccacacctagctaactttaaactttttttgtagagatggggccttgctctgttgcccaggctggtcttg

SEQ ID NO: 1033809 - DNA, 120 bp, Artificial Sequence
  ENSG00000227115_126 (sequence is synthesized)
tacaggcatgagccaccatgcccagcctacctcatttgttgatagcactgattcctaacagggttattttcattcctggcttaaaaaaaataacttaccctatttgcacactggaatgga

SEQ ID NO: 1033810 - DNA, 120 bp, Artificial Sequence
  ENSG00000227115_127 (sequence is synthesized)
aaaaaataacttaccctatttgcacactggaatggaagtaatgcattcagtaatttcagaacctgagtgttggctgacatcaagcaactgagatacactgcagctgctgttggagaagga

SEQ ID NO: 1033811 - DNA, 120 bp, Artificial Sequence
  ENSG00000227115_128 (sequence is synthesized)
ggctggaggctgactcatgttatgttggctggcaggagtttgagaccagcctgggtggcatagcgatatccctgtcctgtctctagaaaactaaaaacattttaaaaaatactggctgga

SEQ ID NO: 1033812 - DNA, 120 bp, Artificial Sequence
  ENSG00000227115_129 (sequence is synthesized)
ttttctagcctgccagactaatcttcttgaaagatttagacataaataatttattttagcctttgtcattattactgttatgatagtaaaataatgaatcttttaagtattttttgaatg

SEQ ID NO: 1033813 - DNA, 120 bp, Artificial Sequence
  ENSG00000227115_130 (sequence is synthesized)
gtgtatatgagagggcactccgctgggtggcggctgctgtggtttgaatcatatgccttagtattggtatttgacaataagagttgtcaacctgaatttctagttggatgtatagccaag

SEQ ID NO: 1033814 - DNA, 120 bp, Artificial Sequence
  ENSG00000227115_131 (sequence is synthesized)
aaaataagaagttctgagggagcggggaactttgaggggtggagtggtccctccatgtacccctatattacagattgcaggttcatactgaggattttaccttgagcttctgggctccac

SEQ ID NO: 1033815 - DNA, 120 bp, Artificial Sequence
  ENSG00000227115_132 (sequence is synthesized)
agaacacttgcgtgtttccataagggcctagaagaagtgtcttctattcccatggacacaatgccagaatgtgattccctggttttattttaagctctttcttccacccagaaacacaac

SEQ ID NO: 1033816 - DNA, 120 bp, Artificial Sequence
  ENSG00000227115_133 (sequence is synthesized)
ccaccacccctgagaaaagatgggaaataagtggattaaaccaaacattcagaagctgctcaatacatttccttgtgcgctaaagaggaggtacagtgctggggtcaagaaagcagggaa

SEQ ID NO: 1033817 - DNA, 120 bp, Artificial Sequence
  ENSG00000227115_134 (sequence is synthesized)
ggagtcagggcatgggcacccaaaccacttattggccatgtgttctgagacaggcttccttcctgggccctgtctaaaaacaatgggcataatgacaacacctaccttatatggttattg

SEQ ID NO: 1033818 - DNA, 120 bp, Artificial Sequence
  ENSG00000227115_135 (sequence is synthesized)
agaagaagaggagttaacgtatgtaaagggcatgaacaggtgttcggcttatatatggtaagtggtcagtaagtgtagtttttctctcaaagacagttctccaggcagagcaagtgagga

SEQ ID NO: 1033819 - DNA, 120 bp, Artificial Sequence
  ENSG00000227115_136 (sequence is synthesized)
ggccttttttccacccctcagccgttcagaactggaaagcagttgtatttgcccatgcatggagatacttcagctttcccagaactgagcccatttgctaacactaccttttccctaagc

SEQ ID NO: 1033820 - DNA, 120 bp, Artificial Sequence
  ENSG00000227115_137 (sequence is synthesized)
ttccccttgagtacccctctctccatccagctgtgaagctctgaaatgaactagatccccaaatggctggtggaagctgttggaatagaggtgttagaggagaaggcagagaaatgtgac

SEQ ID NO: 1033821 - DNA, 120 bp, Artificial Sequence
  ENSG00000227115_138 (sequence is synthesized)
aggaatccagcaggatgtaggagtagcctgaatatgcaagggaaaaccttgaggtcttggccagtttactgtttctagggctaaatgtaccacatcaaagaagggaaagggaagttgttc

SEQ ID NO: 1033822 - DNA, 120 bp, Artificial Sequence
  ENSG00000227115_139 (sequence is synthesized)
acccaagatcttcagttttcttccccatggcctcattatagtgccttgtttctctcttgggacttctgttttctctgccttgtattgtcattgtgttcttaatgttaacattttttctac

SEQ ID NO: 1033823 - DNA, 120 bp, Artificial Sequence
  ENSG00000227115_140 (sequence is synthesized)
aattgcagtcttaatggagaatatgttaaagaacatgtagagatactaagatcagacaaatttctccaatttccttgtgcttaaaaaatgtgttaagtgtttactatctcttctttctat

SEQ ID NO: 1033824 - DNA, 120 bp, Artificial Sequence
  ENSG00000227115_141 (sequence is synthesized)
tgccttcgaaagagaaagacacatttgttgggcaaggcattgatgtgcttccaggggtagtggggtgagaagtctagtggaaggaggtagttttggtgggtgaaggaggtagttttggtg

SEQ ID NO: 1033825 - DNA, 120 bp, Artificial Sequence
  ENSG00000227115_142 (sequence is synthesized)
ggcaaaggaggtggagtgagagagaggaaaggtgaggtaagaaagagaacttgcaaaagttgaagcttttacaaagcagggaggagatgaacttgtatcagctgtggtgatgtggctttg

SEQ ID NO: 1033826 - DNA, 120 bp, Artificial Sequence
  ENSG00000227115_143 (sequence is synthesized)
ggcgagatgcggaaagagacgagaaaagaacttcaaaggaaggtattgttatgcattgggtagtgcgggtctctcttcactttgtcctcccttttaaaatgaaaaggtcttcattaaaga

SEQ ID NO: 1033827 - DNA, 120 bp, Artificial Sequence
  ENSG00000227117_0 (sequence is synthesized)
aaacccgctcctcggctcatgaatagtcaacgaggcctttctgggcgggaccagaggtttcctcatgaataattcatgacccgtccacggctagcctgggcgaccggcctcgctagactt

SEQ ID NO: 1033828 - DNA, 120 bp, Artificial Sequence
  ENSG00000227117_1 (sequence is synthesized)
catgaatatgcaaagcaggggcgaacggcggctagccggcccctagcccgcccggcccctcagcagccgcctctcagccacgggctgcacactgacccgacgcgaccttcggtcaggggc

SEQ ID NO: 1033829 - DNA, 120 bp, Artificial Sequence
  ENSG00000227117_2 (sequence is synthesized)
cgccagcctgggccacctatacaacgacagcctgctccggggcttcctgaggaggtgcctgccccgccgaggttcaacagctttggagagcaggacatcttttcctctcagcctggccct

SEQ ID NO: 1033830 - DNA, 120 bp, Artificial Sequence
  ENSG00000227117_3 (sequence is synthesized)
ggaggccataaataggccagtagtggaagctacagaacacgtgagcatggcaggggctgagctccatttcaaggcttgtaaggacccttgtgatgacattggtcctacccagactaccta

SEQ ID NO: 1033831 - DNA, 120 bp, Artificial Sequence
  ENSG00000227117_4 (sequence is synthesized)
ggataatctcccatctcaaagtcctcatcttaatcccatctgcaaggtcccttttgcaatttaagataacatattcaacaggttccgggaatgagaacatggatgtctttggagagccat

SEQ ID NO: 1033832 - DNA, 120 bp, Artificial Sequence
  ENSG00000227117_5 (sequence is synthesized)
tattctgcctaccacagatataacctggctgttaccaccaagggttggaatgaggatcattctgggactgctgcaagaggctggaaactggaaccaagtgctaccttcatggtaagaagc

SEQ ID NO: 1033833 - DNA, 120 bp, Artificial Sequence
  ENSG00000227117_6 (sequence is synthesized)
aagaggagggatgctgttgccttggagctgccaggctgcatggcagacaagcaggattcctgctgcctcccatggagactatactggaacgcaggtcttgccctgtcatccaggctggag

SEQ ID NO: 1033834 - DNA, 120 bp, Artificial Sequence
  ENSG00000227117_7 (sequence is synthesized)
acctcccaagtagctgggactacagttcaaggaaagaagcaaacttattatttaagagcaatgcaaaatgaaagccaaggccaaggacttactttcccggatctggcatctgagtgcaca

SEQ ID NO: 1033835 - DNA, 120 bp, Artificial Sequence
  ENSG00000227117_8 (sequence is synthesized)
gcaaccgcagagactgaaaactcctccgaatagaatgaatgtttgccatccccataaacacaacttcacagtttgggtaatactctggagagagtaacaataaagagaacacaaatacgt

SEQ ID NO: 1033836 - DNA, 120 bp, Artificial Sequence
  ENSG00000227117_9 (sequence is synthesized)
tgaacttaaagcccacatggccaaatttaaaagcaaactggctataaaacaaacccactgcagcttctgattaacgaaactgaaatgttttgaaatgcttaactattagcccaatccttt

SEQ ID NO: 1033837 - DNA, 120 bp, Artificial Sequence
  ENSG00000227117_10 (sequence is synthesized)
ataataagaggaacacactgaattttagctatcttttcaaaaagcgtgaaaagggaaggttagatttgtaaagaagatactgacataaaataaaagctattattttttaaaagaaaggcc

SEQ ID NO: 1033838 - DNA, 120 bp, Artificial Sequence
  ENSG00000227117_11 (sequence is synthesized)
agcatggcaggggctgagctccatttcaaggtcttgccctgtcatccaggctggagtgcaatggatcttggatcactgcaacctccaccttccaggctcaagtgatcctcctgcctcaac

SEQ ID NO: 1033839 - DNA, 120 bp, Artificial Sequence
  ENSG00000250095_0 (sequence is synthesized)
ctttcctaaaggatatagatttctctcttctttggctccaataatttgtgcccaaacttcagaccagtaattccccagatgagcctgctgctaccctacttgcgtcttacttttgcaagc

SEQ ID NO: 1033840 - DNA, 120 bp, Artificial Sequence
  ENSG00000250095_1 (sequence is synthesized)
tgtttccattcttattaggctaataactgaagacaggatcaagatatctttctaacctatccaaaatacctgaatattctgtcacattcaacaatttacagtgaagaagaagaatcaagt

SEQ ID NO: 1033841 - DNA, 120 bp, Artificial Sequence
  ENSG00000250095_2 (sequence is synthesized)
atctgaattactgcattcaaagaaaaattaccactgctagccactctacaagaatagcacaggattggtggaagcacggtgacattagaacgcatcataaacatatctgtagcatgggac

SEQ ID NO: 1033842 - DNA, 120 bp, Artificial Sequence
  ENSG00000250095_3 (sequence is synthesized)
aattgacctgcctagaagacgactgggccaggagcatgacataatttcaagtcagttgaagaaaatagaaaaggaactgctgagtagacgtactggtccaagaacagtgaaagacatgta

SEQ ID NO: 1033843 - DNA, 120 bp, Artificial Sequence
  ENSG00000250095_4 (sequence is synthesized)
aagcagatgtaaccccaaacaacagctgaagaagagttgcccaactccgccagcctagatcaaactgcagtcaaatgtacacccttgagcatgggaataaattcatgtttttgtaaatca

SEQ ID NO: 1033844 - DNA, 120 bp, Artificial Sequence
  ENSG00000250095_5 (sequence is synthesized)
ggttgtattaatagacatacagtagccataataaagaagataaacgttcccccatcttctataacctaaatgagaaaggaattggtgatggttagcctggagaaagaagggattggtgga

SEQ ID NO: 1033845 - DNA, 120 bp, Artificial Sequence
  ENSG00000250095_6 (sequence is synthesized)
aagtcacctaacttgaagacttggtgaccaaaactcatccagcaaagataaataacaaagaacaatattgctgattaatctcttcctaggatgtacaaagagaaaacacaaggaaaaaca

SEQ ID NO: 1033846 - DNA, 120 bp, Artificial Sequence
  ENSG00000250098_0 (sequence is synthesized)
ggatcttatggtgaataatccctgtaaaagatgtttcataattaggaaacttttatatcactagtgtgttgacaaactggttgtcacactctgtttaggtaacatttattgttcctacat

SEQ ID NO: 1033847 - DNA, 120 bp, Artificial Sequence
  ENSG00000250098_1 (sequence is synthesized)
attctaaattctggcagtattttcttcttgcatggttttggaaagtaggcgttgttacctcaggagaatcgcttgaactggggaagcagaagttgcagtgagccgagactgcaccactgc

SEQ ID NO: 1033848 - DNA, 120 bp, Artificial Sequence
  ENSG00000267577_0 (sequence is synthesized)
actgagtgggaatgattagaataaaattgaggactctagcagcggacttagaatggtatcagcgggttctcatcctacaacctgactttggaagttggagataaggggtgtctaggggtt

SEQ ID NO: 1033849 - DNA, 120 bp, Artificial Sequence
  ENSG00000267577_1 (sequence is synthesized)
gggtcagactccagttttggagtctgactcacagttgggcggagccaaggccccctgaggctgagccagaacctctgagagtgaacctggagactcagagggcagctggcagggctcaca

SEQ ID NO: 1033850 - DNA, 120 bp, Artificial Sequence
  ENSG00000267577_2 (sequence is synthesized)
gtgtggggtcccaccctgcagaggctgggtcaggccctcaagggctgggttgctggcttcaagaggctgggccaggatgtcaaggggcggagttccgggttccacagctgggacagtgtt

SEQ ID NO: 1033851 - DNA, 120 bp, Artificial Sequence
  ENSG00000267577_3 (sequence is synthesized)
gcccagagctgattcctgggacttgcagaaacgtgcgaagctgctcctgccgcacgtccaccaggtacctgcagatgggaagcgccctgtcagggacccagattttgatccccagccagg

SEQ ID NO: 1033852 - DNA, 120 bp, Artificial Sequence
  ENSG00000267577_4 (sequence is synthesized)
atgttccccaccctccaccccactgactcaccgggctaattccacaatcaagttccctccgggtgccacacaggccccaagctcagggatgagaagatggaccatactgcagagaggacg

SEQ ID NO: 1033853 - DNA, 120 bp, Artificial Sequence
  ENSG00000267577_5 (sequence is synthesized)
gaggacaggctgagattcagctccaaatccggagggaggatggggctctgggatcccagacaatgagggaggaggggtggcaaaactggagtctgggtcctggggaaagaagggagcagg

SEQ ID NO: 1033854 - DNA, 120 bp, Artificial Sequence
  ENSG00000267577_6 (sequence is synthesized)
tctgagggaggaggggctgggggcctgatcctgggtctttgtgagcacagctgcctccccgcttacccacaggccacatagaggagctggaatcggccgttgtagcagctcttgtggtgg

SEQ ID NO: 1033855 - DNA, 120 bp, Artificial Sequence
  ENSG00000267577_7 (sequence is synthesized)
tgtggtggagagtctgagcagaattgagcggcaggaagtggacgtcccagcctcgccgcgcaccttgactggctggccgttgctcgtccgcaggaggctctcgtcgtccgcttcgatgcc

SEQ ID NO: 1033856 - DNA, 120 bp, Artificial Sequence
  ENSG00000267577_8 (sequence is synthesized)
gaaggccacgaagggccccgtggcgatgtccccccagtacccgcgcgctgccacgcgctccccacgctggaaaaggagggagagaggaggcaggtaatctagagatgatttgcggtgtat

SEQ ID NO: 1033857 - DNA, 120 bp, Artificial Sequence
  ENSG00000267577_9 (sequence is synthesized)
gggaccatgtgtacaggctatttgctgctgctgcactggcctcgtccctggatccctcgccgcagatctgtcctacacagggttccagaggagtcatcctaacaccatctgaccctgtcc

SEQ ID NO: 1033858 - DNA, 120 bp, Artificial Sequence
  ENSG00000267577_10 (sequence is synthesized)
ctctcatgctcaaaacatatttgtagccttcatcaccttcatgacatggatactgctgagttctccagacacttcactccagagtgcagctattgtgagaaatgactctttgttccccaa

SEQ ID NO: 1033859 - DNA, 120 bp, Artificial Sequence
  ENSG00000267577_11 (sequence is synthesized)
ataagcctcagaatctggatatggggcctgaatctggatatggggcctcaacacatgctccaacttggactagaatgtccttctctctggtctcagttaactctgtccctcaggtctcag

SEQ ID NO: 1033860 - DNA, 120 bp, Artificial Sequence
  ENSG00000267577_12 (sequence is synthesized)
tgcagaagtcacctccaccacgaagcctcctctgtctgaccctctgttttaaactttttcctactgtaaatatgtcccattttctgaaaaaaatcagcatattttaaagtattctggcac

SEQ ID NO: 1033861 - DNA, 120 bp, Artificial Sequence
  ENSG00000267576_0 (sequence is synthesized)
catccaggatagaaaggaccagccagagctcgttcagtagtgtatttcagaatcatcagggaggagccggtagcagaattatcccgttaacactgagaccacatttcacctgttacttat

SEQ ID NO: 1033862 - DNA, 120 bp, Artificial Sequence
  ENSG00000267576_1 (sequence is synthesized)
ttttctaaatggagtaggagagaaagatgctaaaatgtgatcttgggaggagtcccccagtcccccgaaaaagaagaagaaaaaaaaaaagcagaactccaaacccctgtggtcatggca

SEQ ID NO: 1033863 - DNA, 120 bp, Artificial Sequence
  ENSG00000267576_2 (sequence is synthesized)
atttcccatcaaaactgcccatgtaaaataaacacaagctgctaaaagtgaatgttaagaaggaaggcactggttagtgggtggtcctgaccaatcccctggagctggagaggggttttc

SEQ ID NO: 1033864 - DNA, 120 bp, Artificial Sequence
  ENSG00000267576_3 (sequence is synthesized)
aaacatcagttttcagtccccagagaccatttccaattaaacctcaccccccaaatcattcaatgtaacatttgccttatttttagaagaaacaaatgttcccatattattcccagtttt

SEQ ID NO: 1033865 - DNA, 120 bp, Artificial Sequence
  ENSG00000267576_4 (sequence is synthesized)
tgagagaatcctgaggcagctctctcggctgctacttgaagttgaattcttgaaaaatcttatgtaaacagaaagcttaggccaggtcaggagtaaaatgcagtcaaagctgtttctcat

SEQ ID NO: 1033866 - DNA, 120 bp, Artificial Sequence
  ENSG00000267576_5 (sequence is synthesized)
cacacaggtgattacaggttagctctgccctattcaagacaatctgatccattcctttttttgacagcagtttagagacaattggccaacaaaaccagcctggccaacaaggtgaaaccg

SEQ ID NO: 1033867 - DNA, 120 bp, Artificial Sequence
  ENSG00000267576_6 (sequence is synthesized)
tcgctactaaaaatgcaaaacttagatgggcgtggtggcagcaagttactcaatcctacctcctcaccccttccgcccaacccccagcatcccttagaagtgacccctagtttgaggctg

SEQ ID NO: 1033868 - DNA, 120 bp, Artificial Sequence
  ENSG00000267575_0 (sequence is synthesized)
gggagcagtagcatcttagctgcttccggccgctggtcgcagggctgcgggactacaatcttcgcatgaaatggaagagagggtggtgcggatagcttgaggaagttccgtttccctcca

SEQ ID NO: 1033869 - DNA, 120 bp, Artificial Sequence
  ENSG00000267575_1 (sequence is synthesized)
gagcatcaagcctcctcccgcccagggggcctcctgctttcctaagctgctgtggaatcggcctgaggtcccagacgctgtccattgtgctgctgctctctgctttctccagccagagtg

SEQ ID NO: 1033870 - DNA, 120 bp, Artificial Sequence
  ENSG00000267575_2 (sequence is synthesized)
ccagttcatccgcttttgggagaactccgccgcctggcctgcccgcggaaaaggaacactacaaggcctgttagagaagaaagggtagaatcccgagaatgttttccccacagtgctgat

SEQ ID NO: 1033871 - DNA, 120 bp, Artificial Sequence
  ENSG00000267575_3 (sequence is synthesized)
tcccatctactgctacagctctggagacagagctctcccacctgtcatatagaacacaaggaccaatctgcagagaaagagcatccaaacctgatccagtggacactggggaaaaactca

SEQ ID NO: 1033872 - DNA, 120 bp, Artificial Sequence
  ENSG00000267575_4 (sequence is synthesized)
ccacagctgagtgtggaaaaacaaggccaacacacacatctctgcacagatacatctcccataaagaaactaaagtgttaatttacagggcactgttgcagacccacttcagctggaagc

SEQ ID NO: 1033873 - DNA, 120 bp, Artificial Sequence
  ENSG00000267575_5 (sequence is synthesized)
taggaacatggacaaggagcctctctaccaccaagggagagagaggaatgtgctcttgtcctggcattgcatccacaggaggggcaggaaattctttgaaggtcagtaaccccatacccc

SEQ ID NO: 1033874 - DNA, 120 bp, Artificial Sequence
  ENSG00000267575_6 (sequence is synthesized)
ccccaattaacagtgcttaagtgtgaggctccctcagaacatcagagatatcctcactccctcacccctgccaccaggctaagaagcatggagcaaaaaaaaaaaaaaaaaaaacagaac

SEQ ID NO: 1033875 - DNA, 120 bp, Artificial Sequence
  ENSG00000267575_7 (sequence is synthesized)
tccaatggcaactctgccaaggcgcctatgagagcctcttggcttttacctggtctgcgagaaatcaaactttgggcacaagtcatgaagccgacaagcccgggagacacagtgtcagaa

SEQ ID NO: 1033876 - DNA, 120 bp, Artificial Sequence
  ENSG00000267575_8 (sequence is synthesized)
gggagcagtagcatcttagctgcttccggccgctggtcgcagggctgcgggactacaatcttcgcatgaaatggaagagagggtggtgcggatagcttgaggaaggaacactacaaggcc

SEQ ID NO: 1033877 - DNA, 120 bp, Artificial Sequence
  ENSG00000267575_9 (sequence is synthesized)
atgaactggatgtgtttgaagacaagctgaagagctacgttacctctgtgaacaaagtggggatgctggctccattaaccctgcaggtgaaaaagctgatcaaccccaggtcatattttg

SEQ ID NO: 1033878 - DNA, 120 bp, Artificial Sequence
  ENSG00000267575_10 (sequence is synthesized)
taaacatgtttaaggctaaattaaaatttgaacatgctctaagaattttttttcaatagcctgtttatttttaatgcctattggaaaaattgaaatgaatatttaatttcaaatttggac

SEQ ID NO: 1033879 - DNA, 120 bp, Artificial Sequence
  ENSG00000267575_11 (sequence is synthesized)
tggaagctttctttgaaaactacatattctagctcactgacattgaatggaaagctattaactattccccaatgaggaaggatcttctaaaatggggctaaaatacatgaaataaatggt

SEQ ID NO: 1033880 - DNA, 120 bp, Artificial Sequence
  ENSG00000267575_12 (sequence is synthesized)
ttccaatagctcctgcagctttgccaagtccatgtcaaaaaattacatgtatgggtttatttcctgacttttaattctattccattaatgtgtttgtattgatcttggatcctacaactt

SEQ ID NO: 1033881 - DNA, 120 bp, Artificial Sequence
  ENSG00000267575_13 (sequence is synthesized)
gttaacagttctattgttattaattaggattttaattttatgtataaaattataacatctatatatagaaataagcttttttcttttccaattggagtgtttctgtttttgtgttgccca

SEQ ID NO: 1033882 - DNA, 120 bp, Artificial Sequence
  ENSG00000267575_14 (sequence is synthesized)
ttctgtttttgtgttgcccaattattctggccagatttctattacaatgttgatcagaagtgaggaatgcaggtatccttgccttgttcccgattttagggggaaagcttttaatctttc

SEQ ID NO: 1033883 - DNA, 120 bp, Artificial Sequence
  ENSG00000267575_15 (sequence is synthesized)
atcactgcatataatggtagttttgagttttttatacgtgccttttattatgttgaggaagttttagtctatatctagtttactaagtgctcttatcataaaagagttttggattatgcc

SEQ ID NO: 1033884 - DNA, 120 bp, Artificial Sequence
  ENSG00000267575_16 (sequence is synthesized)
aaattttttctctatcaattgacataatcatgttttttgtaaaattcattctattgagttggtatattgcactgattgattgcaatttttaaagaatttgagaaaaattgtagttacagc

SEQ ID NO: 1033885 - DNA, 120 bp, Artificial Sequence
  ENSG00000267575_17 (sequence is synthesized)
ttttaatgtttaaaacaatttatcagtggagccatctggttccagacttttctttgttagtatgttagtatgtttttgataacttatgcggtcttttacttattacaaatggtattagag

SEQ ID NO: 1033886 - DNA, 120 bp, Artificial Sequence
  ENSG00000267575_18 (sequence is synthesized)
ttattcagagaaatagaagcaatagaataaatatctacatctatactatatctttgtgtgtgtgttcatctatgtatatgtgttaatatatgagacagagccctttagagttgtcttggt

SEQ ID NO: 1033887 - DNA, 120 bp, Artificial Sequence
  ENSG00000267575_19 (sequence is synthesized)
ggtgtctgggcaggggtccttcatcagccatctctgggctggtttggagaaccctctgttcttccactcacctcatttcaatgctggccctttttggcagcagcaagcttctggccttca

SEQ ID NO: 1033888 - DNA, 120 bp, Artificial Sequence
  ENSG00000267575_20 (sequence is synthesized)
agagagtaaacatggttaccccactaacacctttttgccagtctcctgtgtggagctctgcaaagacagtaactggtagacagacctggaagcctcagagctattcctggccatcactgc

SEQ ID NO: 1033889 - DNA, 120 bp, Artificial Sequence
  ENSG00000267575_21 (sequence is synthesized)
tgctcctcataccccactcaaccttctgctccccagattaggcatagacttacgtctacacagaacttcagccttggaaagcaccagacgacagctccagggctcagaacaatctttgca

SEQ ID NO: 1033890 - DNA, 120 bp, Artificial Sequence
  ENSG00000267575_22 (sequence is synthesized)
ccagcacttgcctccctactttgccagccatgaccaggtgtgtaaacatgatgagccaccaggattctaacctcccaacaatctcttcctgttcaggatgagccagccccacatgacatt

SEQ ID NO: 1033891 - DNA, 120 bp, Artificial Sequence
  ENSG00000267575_23 (sequence is synthesized)
cccctacacaccatatttgacattaaatatttatccttttgtatttggcttattttacatagtataacatcttcaatgttcatccatgtagcattctttttttgagatggagtctctctt

SEQ ID NO: 1033892 - DNA, 120 bp, Artificial Sequence
  ENSG00000267575_24 (sequence is synthesized)
gagggacacaccatcaagtccagtaaatttttgtattttttgtagagctgggatttgctatgttgcacaagctggtctcaaactcctagactcaagagattctctcatctttgcctccca

SEQ ID NO: 1033893 - DNA, 120 bp, Artificial Sequence
  ENSG00000267575_25 (sequence is synthesized)
aagtttggggattataagcataagccaccacactcatgagcagtgcactcattttaaggttaaataatattccattgtacgtatataccatattttctgtatctgtttatttcttagaag

SEQ ID NO: 1033894 - DNA, 120 bp, Artificial Sequence
  ENSG00000267575_26 (sequence is synthesized)
atatctgggtttgtttttacatttagtactataaatgatgcttctataaaaattggtgtgaaagtatcagtgcataagtgaataaaattttaaaacctgaacacatctctgcatgcagtt

SEQ ID NO: 1033895 - DNA, 68 bp, Artificial Sequence
  ENSG00000267575_27 (sequence is synthesized)
aataaaattttaaaacctgaacacatctctgcatgcagttcttagattgaataacagatgggcagatc

SEQ ID NO: 1033896 - DNA, 120 bp, Artificial Sequence
  ENSG00000267575_28 (sequence is synthesized)
aggaattccgtctctactataagtacaaaaatttgctgggcatggtggtacatgctgatagtcccagctattcgggagacggaggcacaagaattgcttaagccctggaggcagaggttg

SEQ ID NO: 1033897 - DNA, 120 bp, Artificial Sequence
  ENSG00000267575_29 (sequence is synthesized)
cagcttaagtccctacttttaattattttggagatacacctgtaatggagttgctggaacatacggtaattctatgtagaactttctgataaactgccaaactatttttcacagtcaata

SEQ ID NO: 1033898 - DNA, 120 bp, Artificial Sequence
  ENSG00000267575_30 (sequence is synthesized)
aaccattttatattctcaccagcaatacaccagggtttcacttcctccacatcctagctaatacttgttctttttcatttctgttgttttgttttttatatagtcaccctaatatgcgta

SEQ ID NO: 1033899 - DNA, 120 bp, Artificial Sequence
  ENSG00000267575_31 (sequence is synthesized)
aagtgatatgtcattgtggttttgcatactaagaaggcaacctactttatcatgatggattatctttttgacgtgctgctggattcagtttgcaagtattttggtgagaggttttgcatt

SEQ ID NO: 1033900 - DNA, 120 bp, Artificial Sequence
  ENSG00000267575_32 (sequence is synthesized)
aattttcatcaaggacattggcctaaagttttctattttcattgtgtctctgccagggtttggtgtcaagatgatgctggcctcatggaatgagttggggaggagactctcctcaatttt

SEQ ID NO: 1033901 - DNA, 120 bp, Artificial Sequence
  ENSG00000267575_33 (sequence is synthesized)
tggggatagtttctgtaggaattgtaccagctcttctttatacatttggtagaatttggctgcaaatccataaggtccggggctttttttgattggcaagctacttattactgatgcaat

SEQ ID NO: 1033902 - DNA, 120 bp, Artificial Sequence
  ENSG00000267575_34 (sequence is synthesized)
ttcagagcgtggtattggtctgttcatggaatcaatgtcttcctggctctgtcttgggagggcatgtgtgtccaggaatttatctatctcttctaagtttcctagtttgtgtgtatagag

SEQ ID NO: 1033903 - DNA, 120 bp, Artificial Sequence
  ENSG00000267575_35 (sequence is synthesized)
gtgttcacagtagtagtactgaccctacagaaataaaaacaaccatcagaaaccaataaagttttaacatcaattattttcatgtcttgaatccatttttatttaatttttgtacatgga

SEQ ID NO: 1033904 - DNA, 120 bp, Artificial Sequence
  ENSG00000267575_36 (sequence is synthesized)
tcttgaatccatttttatttaatttttgtacatggaatgtgataaagattcaattttacttttttgttgttttgagacagagtttcgcatcacccaagctggagtgcaatggtgtgatct

SEQ ID NO: 1033905 - DNA, 83 bp, Artificial Sequence
  ENSG00000267575_37 (sequence is synthesized)
actttactgttttaaatgtgggcttgttttccgagaatcacttgttgaacagagtgtctttctttacaaaatggtttaggcac

SEQ ID NO: 1033906 - DNA, 120 bp, Artificial Sequence
  ENSG00000267575_38 (sequence is synthesized)
gttgaacagagtgtctttctttacaaaatggtttaggcacccttgtcaaaaggcaaccaataatttatgcaaggttttttcttctgagttatctattctatttctttggtctctatcctt

SEQ ID NO: 1033907 - DNA, 120 bp, Artificial Sequence
  ENSG00000267575_39 (sequence is synthesized)
gttcttataccaatatcaaactgttttaattacagtagctttgtgtgttctgaaatttaaaattgtgagcctttcactttggtcttttcaagattattttggccattcagagtaccctca

SEQ ID NO: 1033908 - DNA, 120 bp, Artificial Sequence
  ENSG00000267575_40 (sequence is synthesized)
aattccatataaattttagaatgggctattccatttacgcagaaaaaagttggaaaaaataaaaagttgggattacatttgtacactactttgggtaatattgtcatcttaacattatta

SEQ ID NO: 1033909 - DNA, 120 bp, Artificial Sequence
  ENSG00000267575_41 (sequence is synthesized)
agtcttccagtccatgaacatggaattccttgacacttatttaagtctatttccgaaatattcccatcctgtagtcttcattgcacaggtttttacttcctttttaaatttatcgctaag

SEQ ID NO: 1033910 - DNA, 120 bp, Artificial Sequence
  ENSG00000267575_42 (sequence is synthesized)
tattatattattttaatgttgttgcaaacaattgttttcttaatttcctttcaaatagttccttgttggtatatggaaatgcagtttatatttccgtgtagtaaaaataattattttgtc

SEQ ID NO: 1033911 - DNA, 120 bp, Artificial Sequence
  ENSG00000267575_43 (sequence is synthesized)
tttcaaatctagattagcgattcactcagaataaatatgctgtatacattggtagtcatttaactttttccaataagctaaccaatttcagcatgttctaaatatgtaaaaatgttaaat

SEQ ID NO: 1033912 - DNA, 120 bp, Artificial Sequence
  ENSG00000267575_44 (sequence is synthesized)
ccgcctggcctgcccgcggaaaaggtcacagctttgcagggggtgacatgggctatggcttcctggaaatgtcaccctcactagcgccttttagatagatgtgaattttgagacatgagg

SEQ ID NO: 1033913 - DNA, 120 bp, Artificial Sequence
  ENSG00000267575_45 (sequence is synthesized)
agctgcttccggccgctggtcgcagggctgcgggactacaatcttcgcatgaaatggaagagagggtggtgcggatagcttgaggaaggtacggataccttgagggaggaacactacaag

SEQ ID NO: 1033914 - DNA, 120 bp, Artificial Sequence
  ENSG00000267575_46 (sequence is synthesized)
acccagcgaccagcgggttcatgagtttgttggggctgtccactcggtaccagctgcgcagggatgtcaggacaaagaaacaagttgcctggttccagccctgcttcagcacggggcctg

SEQ ID NO: 1033915 - DNA, 120 bp, Artificial Sequence
  ENSG00000267575_47 (sequence is synthesized)
tcccgcacaatctcctaaccctgtggaagaatcccctgtacttggatttggagaggtctggccatggattaacttcaccttgatggtctccatgggacataggaccaccacggcctcggc

SEQ ID NO: 1033916 - DNA, 120 bp, Artificial Sequence
  ENSG00000267575_48 (sequence is synthesized)
cacgctagctcactggccgcaccgctgcccgccttgctgttcaccagtccctgggcatcccgcatctggttgctgaggaacgcctgacgccgccttgtggatgaagccgcagagcaggga

SEQ ID NO: 1033917 - DNA, 120 bp, Artificial Sequence
  ENSG00000267575_49 (sequence is synthesized)
gctgaggctgcggcccaggcccaggctgccttggctgcgactgtgtgcctgcaggccccatgcccggtatccggtggatgcgagtgctagtccagctgcagctgcatcttcacgaactcg

SEQ ID NO: 1033918 - DNA, 90 bp, Artificial Sequence
  ENSG00000267575_50 (sequence is synthesized)
cgagtgctagtccagctgcagctgcatcttcacgaactcggtggggaacgggatgcagatttttttaacttccttccttccttccccttt

SEQ ID NO: 1033919 - DNA, 81 bp, Artificial Sequence
  ENSG00000267575_51 (sequence is synthesized)
agctgggattacaggcatgtgccaccattcccggctaatttttttgtctttttagtagagacggttcagatgatccgcccg

SEQ ID NO: 1033920 - DNA, 120 bp, Artificial Sequence
  ENSG00000267575_52 (sequence is synthesized)
aggcttgaaccaccgcgcctggccctgtgatgtagattttgatgctgccagccaggctgcctgccgggatcgcctgccctggagcaggagcatcagccgtgcgttccaggacgcaggcat

SEQ ID NO: 1033921 - DNA, 120 bp, Artificial Sequence
  ENSG00000267575_53 (sequence is synthesized)
ggcatgaccggcaggaggcggagtgcccggcgtctcttgggatcggagcctcctgaattccacgctgggaccttaatttggttttaacacaaataaagatctcacataaagataaaaggg

SEQ ID NO: 1033922 - DNA, 120 bp, Artificial Sequence
  ENSG00000267575_54 (sequence is synthesized)
aggtgagatcagccgcccggccaagctatcttctcgctagcagatgaagctgctttggtggaaggtgctaaaaagctgggctttgtacagtgagaacaccatattcggtcatcatagaag

SEQ ID NO: 1033923 - DNA, 120 bp, Artificial Sequence
  ENSG00000267575_55 (sequence is synthesized)
caatagagctttggagccaaacccttctgatgatccaagggcaagcacagtcttcttgcaaaaatctcaaacagatggtatctactaagcattttactaaaaagtacagctcgtgttcaa

SEQ ID NO: 1033924 - DNA, 120 bp, Artificial Sequence
  ENSG00000267575_56 (sequence is synthesized)
agctaattgactataacgtcgaagtttctggaagtgtttatgccaagtactattttgatcttcgatccttggcaaaggacaatagcttgcattttccagtttatcttctcaacaaagaaa

SEQ ID NO: 1033925 - DNA, 120 bp, Artificial Sequence
  ENSG00000267575_57 (sequence is synthesized)
gggcacagaacctggaagctatttcaaggatggaagacgccaaaatcttttatagtgaaggtccttcagcgctgataatttcattaatcttcagcgctctaaagccattaactcttgaag

SEQ ID NO: 1033926 - DNA, 120 bp, Artificial Sequence
  ENSG00000267575_58 (sequence is synthesized)
gaagaaatgaggggctatatcatgtgaacccctcatcaaaaaagttcggaaaatattacctctcatgctcaacaactagaaaagttagtattttcaaaagaagaaaaatctcaaagttga

SEQ ID NO: 1033927 - DNA, 120 bp, Artificial Sequence
  ENSG00000267575_59 (sequence is synthesized)
gaggcttgtgggcaactaggattgcactccacaggaaaaaaatgggatcgttgcagtgcaacaactctcgtacactcttctgtctttttaaacgtaaacaggtataaaaactactccaaa

SEQ ID NO: 1033928 - DNA, 120 bp, Artificial Sequence
  ENSG00000267575_60 (sequence is synthesized)
tcatgactactttattttggagttgccagactcagcaaataaaaatacacgacacacagttaagtttaatattcagaaagaaaactgttgtggcaagtcagggaccccaaacggagggac

SEQ ID NO: 1033929 - DNA, 89 bp, Artificial Sequence
  ENSG00000267575_61 (sequence is synthesized)
tgtaataattgcattaactgcacaaattatacagcgtttgaaaaaagaacaagataacagcagtgtttaggaaacaagatagatagcct

SEQ ID NO: 1033930 - DNA, 120 bp, Artificial Sequence
  ENSG00000267575_62 (sequence is synthesized)
tgtttaaacaatatgaaatctgggcactttgaaaaaagaacaagataacagcagtgtttaggaaacaagatagatagccttaaactctgactgctggtgagccgggcagaacagagccat

SEQ ID NO: 1033931 - DNA, 120 bp, Artificial Sequence
  ENSG00000267575_63 (sequence is synthesized)
aattctttctcatgatggaacatccctgagaaagagaatgtgtgcctgcgggtaggtctctgaactggcccccctgggcatagcctgtctcttatggtcgaggctgccgagatgaaatag

SEQ ID NO: 1033932 - DNA, 120 bp, Artificial Sequence
  ENSG00000267575_64 (sequence is synthesized)
tgtctgtcacccacacctagtcgcacactccctcctcttttgaaaatctctagtaaaaacttgctggtttttgtggtttgtgggccatcacagatcctaccaacgtgtgatgtctccccc

SEQ ID NO: 1033933 - DNA, 72 bp, Artificial Sequence
  ENSG00000267575_65 (sequence is synthesized)
agctttaaaatggaaaaatagaaaaaaacctacgtgattatcggggcaggttccccaatagaaaacaaataa

SEQ ID NO: 1033934 - DNA, 120 bp, Artificial Sequence
  ENSG00000267575_66 (sequence is synthesized)
cctaagcccccagtgccgccagagagcagcctactgccctgatttgtgtggaatccccttcgtgctgctgggccttagcgtcagggacagcccagtcaggtgaaggtggggatgacccat

SEQ ID NO: 1033935 - DNA, 120 bp, Artificial Sequence
  ENSG00000267575_67 (sequence is synthesized)
gggcttctggaagtgggttggtggtcctgggagggccagcccatccccccttggagagggtctttgtgctgaaggatgcccacagaggcctgggtaccaggaacactgctctaggcaagg

SEQ ID NO: 1033936 - DNA, 120 bp, Artificial Sequence
  ENSG00000267575_68 (sequence is synthesized)
tgcctttcttccagatttggctgaaaggaaggaagacttggtcagcttttccacccagccatctggcccttacagggctgctccccatggacctgggtttgtagagtcctccagggcttt

SEQ ID NO: 1033937 - DNA, 120 bp, Artificial Sequence
  ENSG00000267575_69 (sequence is synthesized)
gctgctccagggacggtaccccagtgttcaacttggcttggggccccctgcctcatgcccttactccagggctgcttggcctgggcttgagccatggtccagaactcaggtggccccatt

SEQ ID NO: 1033938 - DNA, 120 bp, Artificial Sequence
  ENSG00000267575_70 (sequence is synthesized)
gccacctaatataagggcctgtctccacagtgggtgagacgcccctgggcactgggctcttcagtcatccagggctatccactccatggcatgagttcccacattcagctgaactctgtc

SEQ ID NO: 1033939 - DNA, 120 bp, Artificial Sequence
  ENSG00000267575_71 (sequence is synthesized)
tggctctggactggggtccctcctgtgccctttccctgaatcctctctgggtccgagacactgatcctcttcactctctggcttaaggcttgttctcctgacctccttggaggggtgctc

SEQ ID NO: 1033940 - DNA, 120 bp, Artificial Sequence
  ENSG00000267575_72 (sequence is synthesized)
aggattgaggacccctgctgttctctggggctgttggtactcggaggtgtgggtgttggcttgcactgagaagtccaaccccttcagtgcccttcaggggtcctttaagagcaggagtga

SEQ ID NO: 1033941 - DNA, 120 bp, Artificial Sequence
  ENSG00000267575_73 (sequence is synthesized)
tagggtgtgggggagtgccttagaggggtcttgccctcatcccctgccctgtctctgagacgtgtccagtaaacctgaggtcagcacctcaggaatgaaataatgtcttttgcagcaact

SEQ ID NO: 1033942 - DNA, 120 bp, Artificial Sequence
  ENSG00000267575_74 (sequence is synthesized)
tgaatgaagctggaggccattattccaagtgaaataactcaggaattaaaaatcaaatgccatatgttctcacttataagttggagctaagccatgcgtatgcaaaggcatgcggggtga

SEQ ID NO: 1033943 - DNA, 120 bp, Artificial Sequence
  ENSG00000267575_75 (sequence is synthesized)
cataatggactttggagactcagacatgagggtggcaggtggatgaaggatgaaaaaactacctgttgagtacaatatatactactcaggtgacaagtgcactaaaatctcagaatccaa

SEQ ID NO: 1033944 - DNA, 120 bp, Artificial Sequence
  ENSG00000267575_76 (sequence is synthesized)
gaatccaacactatataattcattcatgtaaccaaaaaccacttgtacccaaatgatattgacattaaaaaaaatttaaaactaacaaaatttataataaaagctttttaaaaaataaaa

SEQ ID NO: 1033945 - DNA, 120 bp, Artificial Sequence
  ENSG00000267575_77 (sequence is synthesized)
aaagtggctcacacagctgtgtcagcctcatctgaacagtctccccaaagtcccgtcaatacttctggttacacccaattgtcttgaatgttttctagtcattattagcttcaatagggg

SEQ ID NO: 1033946 - DNA, 120 bp, Artificial Sequence
  ENSG00000267575_78 (sequence is synthesized)
tcaggaactataaccattgtgtatggtaagttgctgtttgaataaaactgaatctctgtctttaagaatgaaagaaaaataaaaactatggcaataaccagtgctctttttctgcactaa

SEQ ID NO: 1033947 - DNA, 120 bp, Artificial Sequence
  ENSG00000267575_79 (sequence is synthesized)
tcagatgggaaaaagtcttggttctgacaagcactctttttatgaccaaaggttagttaagcttaacttaactctcttcttgacttagtcaaccttggcttgttgccctgctcctggtct

SEQ ID NO: 1033948 - DNA, 120 bp, Artificial Sequence
  ENSG00000267575_80 (sequence is synthesized)
gagaagcttattttcagaaatgctgctaagattgcttagtaaaaatccacatattttttacatctactaaaatcctcattccccttccctgatatttaagtccttagcctgcctgtaaac

SEQ ID NO: 1033949 - DNA, 120 bp, Artificial Sequence
  ENSG00000267575_81 (sequence is synthesized)
agaattctgttacaaaaaaaaattcctcctcctttggtattttatcaaatttatttcagtaattttttatccactgatttatttgcttattgattataaatcctgagttgtctgtgttca

SEQ ID NO: 1033950 - DNA, 120 bp, Artificial Sequence
  ENSG00000267575_82 (sequence is synthesized)
gagttatgatcgatttctgaaccgtattacaatggccataacatctactgcaatagtgttaaagtctttcttccgaatttttaacaaatgtcataatttttttaatttgacagtttccca

SEQ ID NO: 1033951 - DNA, 120 bp, Artificial Sequence
  ENSG00000267575_83 (sequence is synthesized)
acaggatgtttgagtataaaaccagttttcagttccttcccaaaaatgatgtcaaccactgtgtagttgtatctgcctgacccttgcgtgtctaaaaaagtatgttcttatttaaagggg

SEQ ID NO: 1033952 - DNA, 120 bp, Artificial Sequence
  ENSG00000267575_84 (sequence is synthesized)
tgagggtggaagattatagagctaacatttttctaaaatgctgagtcataattgaaaccatacaaataaaagaggtagaatgcttggattccaacatttttaaccctgaggatacttcaa

SEQ ID NO: 1033953 - DNA, 120 bp, Artificial Sequence
  ENSG00000267575_85 (sequence is synthesized)
tgtccatgatccatattactgtgaagataatgcacaaaaaagaaaactgatgattaaaattgaacatgatacaacgtatcattgactaaaaactaacataagagaaaaatattctcaaaa

SEQ ID NO: 1033954 - DNA, 120 bp, Artificial Sequence
  ENSG00000267575_86 (sequence is synthesized)
acatttgggtatccacagtttgacccaggaaagttgactgggtagatataatggtccatatagaaaatttatagaagcagaatctgtaaattatgatgtgaaaaagtcagataattttta

SEQ ID NO: 1033955 - DNA, 120 bp, Artificial Sequence
  ENSG00000267575_87 (sequence is synthesized)
agtagcatcttagctgcttccggccgctggtcgcagggctgcgggactacaatcttcgcatgaaatggaagagagggtggtgcggatagcttgaggaagcctcccttgctgcccacctct

SEQ ID NO: 1033956 - DNA, 120 bp, Artificial Sequence
  ENSG00000267575_88 (sequence is synthesized)
agttcctactgagcctcttccctcctggatggtataaaacagtgccacatggagtcttaggtccagcatcacatgtattgagccaatattcactaaacgaatacttctgagcatctacta

SEQ ID NO: 1033957 - DNA, 120 bp, Artificial Sequence
  ENSG00000267575_89 (sequence is synthesized)
ggactaaaaccaagatcctccccttcatggagcacagatccagagtggaggagagtcagaccatgagtgaggaaaacaagctcatgaacaaaatgagataagtgtcactgggacaacaga

SEQ ID NO: 1033958 - DNA, 120 bp, Artificial Sequence
  ENSG00000267575_90 (sequence is synthesized)
acaaaaacagataaagaacagaagcgtacctgggagagctggctgaaaccaggacacggtgggaccattggaaaggactctaaaccacagcagcagaaggagagctagacttgcagggac

SEQ ID NO: 1033959 - DNA, 120 bp, Artificial Sequence
  ENSG00000267575_91 (sequence is synthesized)
ttttccaccaagaagacgactgaaaactctctgtcataatgagtgtattatagaaagcatttagagaaacttacattggtttaaaattttcaacttttcatatattcacttgtcctattt

SEQ ID NO: 1033960 - DNA, 120 bp, Artificial Sequence
  ENSG00000267575_92 (sequence is synthesized)
atgtgtgaaatacttctctttagttgttactgtgtgagtgaaaacatgtaaactttctgtttatacattttgctaccttttggcaacaccatttgtcatgtgatttaagagtagtcatag

SEQ ID NO: 1033961 - DNA, 120 bp, Artificial Sequence
  ENSG00000267575_93 (sequence is synthesized)
atttatctttattcataattttttattcatattttttgtctttcgccctttttcccttgctccaaagagttcattttaatgatgaatgatagaatttaggcttcagcttgatctttattt

SEQ ID NO: 1033962 - DNA, 120 bp, Artificial Sequence
  ENSG00000267575_94 (sequence is synthesized)
aaacaaataaaaaaaccatttgttcatcaatggggattgaatttgtgatttcagcctcctcttatacagtgctttaaccatatgagcttatcacatccaagtttatgctactcaaaactt

SEQ ID NO: 1033963 - DNA, 120 bp, Artificial Sequence
  ENSG00000267575_95 (sequence is synthesized)
ttaagctattaaacttttcctgctaatgtaatataaatttaaacatccagtactcctgcttatattttaaatgttatggtaaatcctagtttatttgattaaaaagccatatacaaccaa

SEQ ID NO: 1033964 - DNA, 120 bp, Artificial Sequence
  ENSG00000267575_96 (sequence is synthesized)
gtgtttctcctgagtgccacatggcaacagattttaactgagctgagggcccaaatgtgcattgttgagaactatcaattgcttggttctggaagttgaaataaatatgtccctttatta

SEQ ID NO: 1033965 - DNA, 120 bp, Artificial Sequence
  ENSG00000267575_97 (sequence is synthesized)
gtgtcttaggcggttccagccgttagtcacagggcggccggactacaatcccagcatacaacgggagtggaggtggtgaccttgagagagggcctgtgctgtgcgcgcctcgcggggcat

SEQ ID NO: 1033966 - DNA, 120 bp, Artificial Sequence
  ENSG00000267575_98 (sequence is synthesized)
agtagcatcttagctgcttccggccgctggtcgcagggctgcgggactacaatcttcgcatgaaatggaagagagggtggtgcggatagcttgaggaaggtacggataccttgagggagg

SEQ ID NO: 1033967 - DNA, 120 bp, Artificial Sequence
  ENSG00000267575_99 (sequence is synthesized)
tatggatacgttgagggaggtacggatacgttgagggaggttacggatacgttaagggaggtacagcagcggtgcgcgccttgcagggcatgctgagaggaacagttttttaactgcttc

SEQ ID NO: 1033968 - DNA, 120 bp, Artificial Sequence
  ENSG00000267575_100 (sequence is synthesized)
tggctgttggtggcagagctgcgggactacaatcccagtatgctacgggagtggggatgatgctggtcccttgaggggggggggcagcgcggtgccctcctgccgggcatgctggtaata

SEQ ID NO: 1033969 - DNA, 120 bp, Artificial Sequence
  ENSG00000267575_101 (sequence is synthesized)
gtgtcttagctgcttccggccgttggtcgcagggctatgggactacagtctcagcatgcgcagggttcaagggtgttgcgcagccccgcagggaggggcagggcggtgttgacctctgtt

SEQ ID NO: 1033970 - DNA, 120 bp, Artificial Sequence
  ENSG00000267575_102 (sequence is synthesized)
tccaaacccatgctggctactgaatctgtgccacccctggctaaggggagtgagtccatagagggacttgaagggcaggtctgggctgggcagtgaggagagtatgatactgcaaagtgc

SEQ ID NO: 1033971 - DNA, 120 bp, Artificial Sequence
  ENSG00000267575_103 (sequence is synthesized)
tataggatagtgtattgggatcaacaggtttttggggttttttttcagcccactgacattgaaagggataaacagttttttggttattagtgagcagttttctctcaggccatagtgtag

SEQ ID NO: 1033972 - DNA, 120 bp, Artificial Sequence
  ENSG00000267575_104 (sequence is synthesized)
gggtttgtggtcatgtagatgagagataggctgggattaaaatttgttatggcagtaataagagcaacagagctagactctgtcaaaaaaaaaaaaaacatagttagtagaagaaaaaaa

SEQ ID NO: 1033973 - DNA, 120 bp, Artificial Sequence
  ENSG00000267575_105 (sequence is synthesized)
ggtcgcagggctgcgggactacaatcttcgcatgaaatggaagagagggtggtgcggatagcttgaggaaggtctcgcatctggggctcgatctcgtgcagaggagcatttccgaagaca

SEQ ID NO: 1033974 - DNA, 120 bp, Artificial Sequence
  ENSG00000267574_0 (sequence is synthesized)
tatggtcgttaccaaaaccccagtcatcttcttgaaggagccttagtataggaaaccagagagtcaagacccaggtaagctggcccgtgaggcgtggttcccatcgccaggagacaacag

SEQ ID NO: 1033975 - DNA, 120 bp, Artificial Sequence
  ENSG00000267574_1 (sequence is synthesized)
cagctgctggcaatttcttcggtcaccctgcctctcaacttccaaagccccatggttttcgggtttacccacatatgacccttatgtaaatttgcttgtcccaagaacccttaactcata

SEQ ID NO: 1033976 - DNA, 120 bp, Artificial Sequence
  ENSG00000196741_0 (sequence is synthesized)
ggcaaacatcctccgagactcaaagggcaaggccatgggcgctttattccggctgctgctccaggaacgtgggaaagcagcggagttttattctaggggaaggaaacaaaggcggccgag

SEQ ID NO: 1033977 - DNA, 120 bp, Artificial Sequence
  ENSG00000196741_1 (sequence is synthesized)
tgccagctgcacgtttggtgggatttggtcatcaggggtggacatgctgcccaatggagctgtcggcagtttgacccagcttggtccgtcgcgtcctgttctaggaatcgattattcaaa

SEQ ID NO: 1033978 - DNA, 120 bp, Artificial Sequence
  ENSG00000196741_2 (sequence is synthesized)
gaaggaatttagagggactgcagaaaatgttacaggtcttaacaccattttgcatttccgcaaacgaacaagaagttaatccctgtgttagtgatttctaagcccatttgccttgtggcc

SEQ ID NO: 1033979 - DNA, 120 bp, Artificial Sequence
  ENSG00000196741_3 (sequence is synthesized)
caagaacgttgagtttgaaatttgatgaaacttgccttaaggctcaagtacgaggccagctttcaaaaatggttttgtgccttgattgaaaacactgtatcttctagttgttggatttat

SEQ ID NO: 1033980 - DNA, 120 bp, Artificial Sequence
  ENSG00000196741_4 (sequence is synthesized)
cgtactctgcggctctattggttcaagcttgtgcgttgggccttttaaaatgtgtgtttcctgataattcccttcagcttgtcaactgggggtgatgtggcagggagaaagagagagagg

SEQ ID NO: 1033981 - DNA, 120 bp, Artificial Sequence
  ENSG00000196741_5 (sequence is synthesized)
ttcaatttttgcttcctatgttttgaagttttattattaactgcaggtttcattactgaatagatatagccaaattccttcccccaaaagattataaagtttcctagtcctaccagcaaa

SEQ ID NO: 1033982 - DNA, 120 bp, Artificial Sequence
  ENSG00000196741_6 (sequence is synthesized)
atcattaagttcattaaggcaaatcccctccagcgctggatgttgatgctgtctttaattttgtatttttctgactactttgtgcaattgaggattgttttggtctattggccatttggc

SEQ ID NO: 1033983 - DNA, 120 bp, Artificial Sequence
  ENSG00000196741_7 (sequence is synthesized)
ttttctcttttgcaaatgttcatatcctttgtccagttttctttagggtgatttttccttttcgtatcaatttgtaaacagtgtacaaattacattgtacattagggatattaacagtct

SEQ ID NO: 1033984 - DNA, 120 bp, Artificial Sequence
  ENSG00000196741_8 (sequence is synthesized)
gtcagttacactgtacattagggatattacattagagatattaacatctttgtccattaaggatattaaccatctgtcagttacattgcagtatttttccctaaactctttttgtctttt

SEQ ID NO: 1033985 - DNA, 120 bp, Artificial Sequence
  ENSG00000196741_9 (sequence is synthesized)
gcattttatgtttttttaaatgtgcaattagaaaaattttatatgggctgggcacagtaatcccagcacccatctctactaaaaataaaaaaaaaaatagccaggcgtggtatctcaact

SEQ ID NO: 1033986 - DNA, 120 bp, Artificial Sequence
  ENSG00000266268_0 (sequence is synthesized)
gttttggatttcttcatggttcaatctagatgcagctgccactgggagccctgtgccttagccatggtcaacccaccatgttctttgacatcgccatcaacgttggtgtctccctctgtc

SEQ ID NO: 1033987 - DNA, 79 bp, Artificial Sequence
  ENSG00000266268_1 (sequence is synthesized)
atctcggctcagtgcaacctctacctcccacattacaggtgccatgcccaactatggggattcaccatgttggccaggc

SEQ ID NO: 1033988 - DNA, 120 bp, Artificial Sequence
  ENSG00000266268_2 (sequence is synthesized)
gcttcccaaagtcctgggattataggcatgagccactgctccaagctgagatgtagctgcagtgatggcttcacatcaatgatccctatgctggattcatttttcttgaaatggtggaca

SEQ ID NO: 1033989 - DNA, 85 bp, Artificial Sequence
  ENSG00000286457_0 (sequence is synthesized)
tggcccacttttttaccttctcaaaaccccaactctcctgtaattcctgaagcccagcctcaactgaatagcagagagattttgg

SEQ ID NO: 1033990 - DNA, 120 bp, Artificial Sequence
  ENSG00000286457_1 (sequence is synthesized)
cctgaagcccagcctcaactgaatagcagagagattttggctttcattccagaatgatgtctcacagaaagtcaactcgtgttccagggcacgagtaaagatatcaacccatctatctgt

SEQ ID NO: 1033991 - DNA, 120 bp, Artificial Sequence
  ENSG00000286457_2 (sequence is synthesized)
agaaaattgccagaaactgtcacaaaataaaaaatgagagaaggcctgaattacgacagtcctggtggggttctacaagaataacacttaaaagccatcgaagcttcaacgggaccagtg

SEQ ID NO: 1033992 - DNA, 120 bp, Artificial Sequence
  ENSG00000286457_3 (sequence is synthesized)
tctccccgtttcgtggggtgtagagcaaggtgtgggaggagcgtttggcatgtcaagtctctgctctacagtggatctccacgtcccggcttccagtggacagccctgtgagatggggaa

SEQ ID NO: 1033993 - DNA, 120 bp, Artificial Sequence
  ENSG00000286457_4 (sequence is synthesized)
aatttccttccgctcagatactgtcaaggccaatgtgcctttcaggagattgtctgagagatttcgaacattgaaactgtaaaaaaaattgagctggacagatccttgccaccacttttt

SEQ ID NO: 1033994 - DNA, 120 bp, Artificial Sequence
  ENSG00000286457_5 (sequence is synthesized)
ctgctaaatatagaaaagttgtcatcgggttgcacaagcaatttccagctacagcacctcaggaggggaggcgggctcctgtctctcatagttaaagtgcatagagctgagccgaccctg

SEQ ID NO: 1033995 - DNA, 120 bp, Artificial Sequence
  ENSG00000286457_6 (sequence is synthesized)
actcacgggttgtgaggaacatgggaaggtggtagaagagtaatgagagaaaggcgtccttgttttggttaaatataatgacatgggaagatgtgcagttgatgatggtatttgcttaca

SEQ ID NO: 1033996 - DNA, 120 bp, Artificial Sequence
  ENSG00000286457_7 (sequence is synthesized)
ccctatcattgctttggaaaacactgttgtatcgtggagggagactgtgagatatggagccaaacaggcatgggttggcatcccagctttatcacttaccctttgtttgatttggagtta

SEQ ID NO: 1033997 - DNA, 120 bp, Artificial Sequence
  ENSG00000286457_8 (sequence is synthesized)
attacttaacttctctgagcctgagagtcctcatatagaagatgtgggtaaaataatattcctctcgcagcatcactaggattcatgtgaggagtaaagtacatggcactactaagtgct

SEQ ID NO: 1033998 - DNA, 120 bp, Artificial Sequence
  ENSG00000286457_9 (sequence is synthesized)
cagcatttgttggcgcccttccccttctccccttttaggcaaatcatttaagccccctggacatcagttgcatctctcttagcaagtcctattggttctacctccggaatatatttagaa

SEQ ID NO: 1033999 - DNA, 120 bp, Artificial Sequence
  ENSG00000286457_10 (sequence is synthesized)
tttatccacttctctctattgtcattgctgccatgtcagtccaacgtgtaggccgttgcgatgccttcctaactggttttcctccttctgtttttaaacccagtgcaatccatctccaca

SEQ ID NO: 1034000 - DNA, 120 bp, Artificial Sequence
  ENSG00000286457_11 (sequence is synthesized)
tagcaggcagagagggcattttaaaaatgtaaatcacatcatgcccctaccctgcctaaaaccctcccgtggctgaacttagagtaaaatccaagctcctcaccacagccttcaaaggcc

SEQ ID NO: 1034001 - DNA, 120 bp, Artificial Sequence
  ENSG00000286457_12 (sequence is synthesized)
catgtgatcaagcccctgcctaccgctttccttttagactccacttgctactgcttttttcttctataaaattttttttttccggttgtactggcccttttcagtttccagaacactcca

SEQ ID NO: 1034002 - DNA, 120 bp, Artificial Sequence
  ENSG00000286457_13 (sequence is synthesized)
agtttatttctaccgcagggccttttaatttgctgtttccatggcttggaagatgcttcttctagattctcctgtgcttgaaaccttctcctaggtcaaatgttccctcctaaaatttgt

SEQ ID NO: 1034003 - DNA, 120 bp, Artificial Sequence
  ENSG00000286457_14 (sequence is synthesized)
catccttgacctagtcactctctatcacagccctaatttattttcttcatagcacttgtcactatgtgaaagtatcttaaatactgtttatctgtttattttctgttttcccccatgaga

SEQ ID NO: 1034004 - DNA, 120 bp, Artificial Sequence
  ENSG00000286456_0 (sequence is synthesized)
agaaagcagtgtgatatattcccgggcccagcaaacagtccacaggtgggttattgacactcagaccaagattcagtacacctgaaagactgtgactccactaagaaaacagtctgtgag

SEQ ID NO: 1034005 - DNA, 120 bp, Artificial Sequence
  ENSG00000286456_1 (sequence is synthesized)
aggaattgaggctctcgtccatggatctagtccactgttgagattgtgaatcatgtacttaggcccaacataaaagaggtgttgattctcatacctggaacctggacatgtgcaggattg

SEQ ID NO: 1034006 - DNA, 120 bp, Artificial Sequence
  ENSG00000286456_2 (sequence is synthesized)
ttaatctcatttatgaacattcctgcagctgtgattgtgacatatgcctctgcccagcacctgagtgattgaattcttctgcctgggctcagcccacagattggattgtgaaacattgct

SEQ ID NO: 1034007 - DNA, 120 bp, Artificial Sequence
  ENSG00000286456_3 (sequence is synthesized)
gaacccaggacctaactaatgtaaatctattctcctgccttggcactgcccactgggaaccctgtgacatattgctgcacccaacacccaggttatgtggctctcctgccagtgccttgc

SEQ ID NO: 1034008 - DNA, 120 bp, Artificial Sequence
  ENSG00000286456_4 (sequence is synthesized)
ccacacgggctgttgtgacatattgctgggtccacacccaggtgatataattctcttgcctaggccctgcttacagagagcattgtgacatatctttctgctcatcacacagttaataag

SEQ ID NO: 1034009 - DNA, 120 bp, Artificial Sequence
  ENSG00000286456_5 (sequence is synthesized)
tttgcccacaaggaacattgtgacatatcactgggcccaacagcaaggtgatgttgcccttttgctttggccttgctctcagaaagcattgtgacatattgctgaacccagcaccaaggt

SEQ ID NO: 1034010 - DNA, 120 bp, Artificial Sequence
  ENSG00000286456_6 (sequence is synthesized)
gatgtgagttggtatgcctggaccctgctaacaagaggcattgtgacatacttctgggaccatcatctatttgatgtgactctccttttacctgggcttctgttgtaaaagagattgtga

SEQ ID NO: 1034011 - DNA, 120 bp, Artificial Sequence
  ENSG00000286456_7 (sequence is synthesized)
cataactctgggcctaacagctagacttgtctgcagcgcagattgctacatattgcttggcccagctcctatgtgatgtgactctcctgtcatacctgagtgctccccactgcggtaatt

SEQ ID NO: 1034012 - DNA, 120 bp, Artificial Sequence
  ENSG00000286456_8 (sequence is synthesized)
gtgacatatagctgggctctggccctagtttatgtaacttttcttcctgactgctactcacctgggggcattgtgacatatctctgaacctctcacctaagtgatgtgaatctcctgctt

SEQ ID NO: 1034013 - DNA, 120 bp, Artificial Sequence
  ENSG00000286456_9 (sequence is synthesized)
gagcccacttctcagggagtattattatatattgtcacacacagcaactaggtgatatgactctctctacagcttggactctgcccaataaaaaactgtgatgtatcactggacccagca

SEQ ID NO: 1034014 - DNA, 120 bp, Artificial Sequence
  ENSG00000286459_0 (sequence is synthesized)
agtactggttgtagtagctgaagagcgactcgaacatggcggccggctcgcgcaggatggtgacatagacggtgctgggcggcatgaggcgctccagctccgcacggtcgaagcgcaggt

SEQ ID NO: 1034015 - DNA, 120 bp, Artificial Sequence
  ENSG00000286459_1 (sequence is synthesized)
ggctggccagcacgtgcggcggccgcgtggccgggtgcacgaagtgcgccgagaagttgcgggggtagcagaactggtgctcgcagctcgggtgcggcagggccaccgtcaggttgtggc

SEQ ID NO: 1034016 - DNA, 120 bp, Artificial Sequence
  ENSG00000286459_2 (sequence is synthesized)
gctcggcaaagcgaaacaggatgttctgcaccgtcgtgcctgccgtcttgtgagtcttcaggaaggccacagtcatgtgcttggggcgcggcggcgagttccgcagaggagggcagctca

SEQ ID NO: 1034017 - DNA, 120 bp, Artificial Sequence
  ENSG00000286459_3 (sequence is synthesized)
aggggaacagcttggggtacctgccaggcccagggagtgtgcggagaggagggtgtgagggggctgccgcttgacccctgcccttacccaaggactgtgggatgccccacagcgcggccc

SEQ ID NO: 1034018 - DNA, 120 bp, Artificial Sequence
  ENSG00000286459_4 (sequence is synthesized)
tgggctgcactcatggaaaggtcgagggcggtgcttggtagcctctaagatgccctctatgatccctgctgccctcctggtattcatgcccttgagtattcccctcacctgagttaggct

SEQ ID NO: 1034019 - DNA, 120 bp, Artificial Sequence
  ENSG00000286459_5 (sequence is synthesized)
ggacttatcattgcatctaaagaagagaagagggcagaaatgatgggatgtcacttcttaaatttcatcatagaaagactgtggctggctagtatcttggtgtctttcactcaatctggg

SEQ ID NO: 1034020 - DNA, 120 bp, Artificial Sequence
  ENSG00000286459_6 (sequence is synthesized)
atgacagatgatgggggaagcaagctgccatatagtgggcagccctatagggagctaccactaagtgggaaaagcccacaaggacctaaggccctcagtccaccagccggcttgaagacc

SEQ ID NO: 1034021 - DNA, 120 bp, Artificial Sequence
  ENSG00000286459_7 (sequence is synthesized)
tgaagcctgtcaaaaccacgtgagtgagcttggaagctgatcccttccaatcaagccttcggatgagactgcatcaccagcaaacaccttggttgcaaccccatgaaagaccttggtcca

SEQ ID NO: 1034022 - DNA, 120 bp, Artificial Sequence
  ENSG00000286459_8 (sequence is synthesized)
gaagttcccagtaagccacacctggcttcctgacccaaaataacagatgtttgtgttttcagctgctaagctttaagataatttgtttatgtagaaataaataagggacaaagacccctg

SEQ ID NO: 1034023 - DNA, 120 bp, Artificial Sequence
  ENSG00000278396_0 (sequence is synthesized)
agtgtccacctcttgttccacacttttatacttccccaaaggcgtaagtgaaccttatctaaattcaagccatttactgttattttccatcattttacctttgtcttaatttgctaaata

SEQ ID NO: 1034024 - DNA, 120 bp, Artificial Sequence
  ENSG00000278396_1 (sequence is synthesized)
cagttaacacttgaacaacacgggtttgaactgtgcggatcgatcaatgcaacctggtacatgggattctaaacaccgtattgagagggccgacttttcttatactcacattccacagga

SEQ ID NO: 1034025 - DNA, 120 bp, Artificial Sequence
  ENSG00000278396_2 (sequence is synthesized)
tggaaccaatcccacgtatatagtatatgggggatgactgtattgcattaactgaaagagctatgattagcaaactaaaaagcggtgtgtaaacactgcttctttataatttatggaaat

SEQ ID NO: 1034026 - DNA, 120 bp, Artificial Sequence
  ENSG00000278396_3 (sequence is synthesized)
gttaaataagatcagtccccactgtttacacttattactaacctttattacttgactttgcttctatttcctagccacaatttaaaaaacaaaattaaaatggtatcaacaacaatagaa

SEQ ID NO: 1034027 - DNA, 120 bp, Artificial Sequence
  ENSG00000237937_0 (sequence is synthesized)
ccatggacaaaatgggccctcagtgactatccgatgcagggccaggcactgaatgcagatgcatatactggagctcagaggatttcagtgagttaccccggccacagccagtgagcagcg

SEQ ID NO: 1034028 - DNA, 120 bp, Artificial Sequence
  ENSG00000237937_1 (sequence is synthesized)
atgtcaagatgtcttgaatcctgggcctcagctgcaaagccgtaaccagtcctctgtgttcccatgggccagtgctttacaaaggtccttgcagagaatcatgccaggttaggctggtgg

SEQ ID NO: 1034029 - DNA, 120 bp, Artificial Sequence
  ENSG00000237937_2 (sequence is synthesized)
atacatagacacacgaaccagataaatggttttgttatttgccactgagaaatggttcatccctagaagattgtggtatttctggccatacgcaggaaaggtgccacagatgctcaagta

SEQ ID NO: 1034030 - DNA, 120 bp, Artificial Sequence
  ENSG00000237937_3 (sequence is synthesized)
taggcatcagctaccaccccatctgctggtggtgctcatacttctccgggatacctcccctccagtctcctccacccctacagggtcagcactgctcttaagccttgaagtgtcacatct

SEQ ID NO: 1034031 - DNA, 120 bp, Artificial Sequence
  ENSG00000237937_4 (sequence is synthesized)
gcatggcagctgccagcaaaagggagaaaaatctctgtatcccttcaggtgacactagttgctgtatggataaacacctaaatctcacttggctgaacacaataaaagtttatctggtgc

SEQ ID NO: 1034032 - DNA, 120 bp, Artificial Sequence
  ENSG00000237937_5 (sequence is synthesized)
tcccagtcctgagcaccaggcataggaaggaagtgtcttcagaagagaaaggagaaggagtgggcgaatttgccagtccagattaggctagaaagagtttacattccatattcaacatgt

SEQ ID NO: 1034033 - DNA, 120 bp, Artificial Sequence
  ENSG00000237937_6 (sequence is synthesized)
ctgtgccagggcttgcgggctcagagatacaagaacacacggatgagaggctttcatttccgtgggagctgtctaaagccaggggagctttggcagaggtctgcttgggccctccaggaa

SEQ ID NO: 1034034 - DNA, 120 bp, Artificial Sequence
  ENSG00000278238_0 (sequence is synthesized)
gagtctgcaggtttcaaacctaaacagcgctcttcatcctggacgtgcgatgggggaggagtcggcctgctcagtccccacgacatagcaggactaggttgacaaacaaccgagatggga

SEQ ID NO: 1034035 - DNA, 120 bp, Artificial Sequence
  ENSG00000278238_1 (sequence is synthesized)
cacatcttgagaccctcacagtccttggaggaaggcagacgagaaaaagacaagaaaagtgttgattggctgcccttcttattaaacatcgacgcgttcactgacgaggacgtaaacacc

SEQ ID NO: 1034036 - DNA, 120 bp, Artificial Sequence
  ENSG00000278238_2 (sequence is synthesized)
cgttatcaccactttttccactgagaggtgacaggttcagaggttgtttgtccacgtttgcacagcgtgtgaaggggaactgaaattgggatctactttccatacctttattctaagcaa

SEQ ID NO: 1034037 - DNA, 120 bp, Artificial Sequence
  ENSG00000278238_3 (sequence is synthesized)
ttatcaaatgcaaaaaagggaggagaggaggagaaacagaaaaaaatgaagataaacctcatcccctcctcaaggttatatataattctcctttgaagataaaatagcatttgttacaga

SEQ ID NO: 1034038 - DNA, 120 bp, Artificial Sequence
  ENSG00000258390_0 (sequence is synthesized)
agacgaagggcatataccagttaaactccgccattttgcctctcagtgttcaagcttgagcccacgcatccaactcctgagatcttactgggaagctgctgatcatcagtttcagtcagc

SEQ ID NO: 1034039 - DNA, 120 bp, Artificial Sequence
  ENSG00000258390_1 (sequence is synthesized)
atggatcagccttacgttcatggcctccaggccctattctcctgcctcacagggaccggccaggatctctatccttacagcacgttggaatgtatatgctcctctccccacatcgcctta

SEQ ID NO: 1034040 - DNA, 120 bp, Artificial Sequence
  ENSG00000258390_2 (sequence is synthesized)
gggagcaggcaggtgtcaggggcagcacaaggacggccaacaggacaggtgcataagtaagactgatacaatttgagggctcagctctgagaatactctaaacaggatccaaataacatt

SEQ ID NO: 1034041 - DNA, 120 bp, Artificial Sequence
  ENSG00000258390_3 (sequence is synthesized)
gttgcctcctaaccagcaggtgggagctcaagagaaagactagacttgttccacattaaataagtaatagtattttttcccttgaacatcttgatcataatatcaattaaatgtgtggcc

SEQ ID NO: 1034042 - DNA, 120 bp, Artificial Sequence
  ENSG00000258390_4 (sequence is synthesized)
ctgattcaatagctaccatttattgagcatctattttgtgccagacttgctgctggtatttgatagtgcagtgcctgacaagtagacacactggcttaaatgtcattgttactggtatta

SEQ ID NO: 1034043 - DNA, 120 bp, Artificial Sequence
  ENSG00000258390_5 (sequence is synthesized)
ataaagatcataagatgttcactttacttatttccttgtccttttcttcctccgtgcatgcttgcttgcacgagggaagtcactagtaattgattaacttcctaccctaacccccagggc

SEQ ID NO: 1034044 - DNA, 120 bp, Artificial Sequence
  ENSG00000258390_6 (sequence is synthesized)
tgcctgcaagattgatgaactgtttttctttcaaagaacaatgatccttaggtcatgcagacctccttgatagcatctaggagtttgtttgggccgaggaactcaaacagttttgagtat

SEQ ID NO: 1034045 - DNA, 120 bp, Artificial Sequence
  ENSG00000258390_7 (sequence is synthesized)
tgggggaatccatctcctgcatacctgctttgctcataaaagcccccagttatgttaaaaggcagattggatttgagaggctgcttctcctgccttcttgctttagccgagtcaaataaa

SEQ ID NO: 1034046 - DNA, 120 bp, Artificial Sequence
  ENSG00000258390_8 (sequence is synthesized)
ccttcctctgcttctaagtgctgatgtgtcggtgttaggtttgctgtatatcaggtacatgaacccaaaatttggggtttgataacactaacagctctgcacagtaaatattgtcatcca

SEQ ID NO: 1034047 - DNA, 120 bp, Artificial Sequence
  ENSG00000258390_9 (sequence is synthesized)
gtcttactaatggggaaaacatgtgcacaggacttgcccaaggtcacacatttaatcagtggcaaagtcagagttaaaaatatttatgtacttttttttgtttttataattcaaggatgt

SEQ ID NO: 1034048 - DNA, 120 bp, Artificial Sequence
  ENSG00000258390_10 (sequence is synthesized)
atcactattttatgtaccacgaagaaagaaaaacagctaactattaaactataatacagtatttccttcgcatttagaatttttgttgtaaactcattataaagagctcttttaaactca

SEQ ID NO: 1034049 - DNA, 120 bp, Artificial Sequence
  ENSG00000258390_11 (sequence is synthesized)
ctagacgaagggcatataccagttaaactccgccattttgcctctcagtgttcaagcttgagcccacgcatccaactcctgagatcttactgggaagctgctgatcatcagtttcaggaa

SEQ ID NO: 1034050 - DNA, 120 bp, Artificial Sequence
  ENSG00000258390_12 (sequence is synthesized)
aggctccaggtggaattctaatgggaccagcctccagtccctggaccttagccgtggaaggagagaagaggacatctgcacctcctctcagagaaagcctgatgcctactaaaggacttg

SEQ ID NO: 1034051 - DNA, 120 bp, Artificial Sequence
  ENSG00000258390_13 (sequence is synthesized)
ggtggtggacgcagtgaccctcagtctggagcttgttcactgaacattggagactatcatttgcgcagatggtcttgggcctctatgagcagcaggctgcaccccacagtgacctcctca

SEQ ID NO: 1034052 - DNA, 120 bp, Artificial Sequence
  ENSG00000258390_14 (sequence is synthesized)
catcttcatgaaagcagatgtccattgaaaagcacccaagtgcagtctcagctgatgaacttcagaggcgattgagacaaaggctctcggtcccctctgcccttggatggtgcctctggt

SEQ ID NO: 1034053 - DNA, 120 bp, Artificial Sequence
  ENSG00000258390_15 (sequence is synthesized)
atgcacttggcctctgtgtctttatttagactggtcacttcacaacccatcatgtcaccccacccctaaccgtgcccactctgggtcctcccctcaactgcctgacttcccactttgagc

SEQ ID NO: 1034054 - DNA, 120 bp, Artificial Sequence
  ENSG00000258390_16 (sequence is synthesized)
tcagcaaaggcaatagatgttttgtctgcttcgataccctaaatgcatggcgtggaagctggcacacagtgggcccttgaaatttgggagtgaatatgtatatatattatattccaacct

SEQ ID NO: 1034055 - DNA, 120 bp, Artificial Sequence
  ENSG00000258390_17 (sequence is synthesized)
caactttcctcactgctcctcatagtaggaatggattgtaaaacttcccagaatgttcaagaggagaaaggagagaaaacagcctggaatttgagctaaggggcccacagcccagccacc

SEQ ID NO: 1034056 - DNA, 120 bp, Artificial Sequence
  ENSG00000258390_18 (sequence is synthesized)
aagccatctgtaaaatggggtgggaatatgacatgagccacaggggtgctatgagggttaatgaggtcaccgtgcgatgtaccatgccaacatgaataaccagacctcttgatatcatca

SEQ ID NO: 1034057 - DNA, 120 bp, Artificial Sequence
  ENSG00000258390_19 (sequence is synthesized)
agcaggcaggtgtcaggggcagcacaaggacggccaacaggacagacgggttgaagatccgagaggctgagtcacttccacaaagtaacacagctgattttaaatgcctgcattcagcat

SEQ ID NO: 1034058 - DNA, 120 bp, Artificial Sequence
  ENSG00000258390_20 (sequence is synthesized)
ccacctgaccatcacctgacggtcagctgacattcctggtcgggaggagccctctcctgccctgcttatgtctgcctgactacctactgtaatggacgcagccagctggaacatcggctt

SEQ ID NO: 1034059 - DNA, 120 bp, Artificial Sequence
  ENSG00000258390_21 (sequence is synthesized)
aggagaagcaaacacgtccttcttcacatgtcgtcgtcatcaaggagaagtgctgagccaaagggggaaaagcccttgagaaaaccatcaagtcttaagacgggttgaagatccgagagg

SEQ ID NO: 1034060 - DNA, 120 bp, Artificial Sequence
  ENSG00000258390_22 (sequence is synthesized)
cacaaggacggccaacaggacagaagacgggttgaagatccgagaggctgagtcacttccacaaagtaacacagctgactagaacacttgaggacttcaatctactgacatttagattgc

SEQ ID NO: 1034061 - DNA, 120 bp, Artificial Sequence
  ENSG00000258393_0 (sequence is synthesized)
catgcagcagaaataattgttctcggttgggataaaccaggagggcttcccaggggaggtgacatgtgagggagatcagaatggaggcgtcccaggacataacttttctaactaacttag

SEQ ID NO: 1034062 - DNA, 120 bp, Artificial Sequence
  ENSG00000258393_1 (sequence is synthesized)
ctagagtggggaccacaggggatccagagtatgttattgtctcactttgctgatttttctcatctcagtaaatgcagaggacagttgcagagccatgacaccctgttgacttgggagatg

SEQ ID NO: 1034063 - DNA, 120 bp, Artificial Sequence
  ENSG00000258393_2 (sequence is synthesized)
aaggtgaccttgcagccccagcaaccagataccggactcccaggctcccaaagggacattgtccataggagcttaaaaagtgaagtcatcagtttcctagcttcaaaattcaaaagcctc

SEQ ID NO: 1034064 - DNA, 120 bp, Artificial Sequence
  ENSG00000258393_3 (sequence is synthesized)
attccaggcacagatgggctggaagaagttacactcagagcccagtctgcaatttcaaacctacggcagaagaattgcacttgaccatgtgatgacaacaattgagccacccagcttaga

SEQ ID NO: 1034065 - DNA, 120 bp, Artificial Sequence
  ENSG00000258393_4 (sequence is synthesized)
gccagagatggggagcctcacatcgaggatggcagagacatctcaccagcttgggcactccagggagagatgcagagctccctcctgctctggactgcgatgtatcttgcatgagcacct

SEQ ID NO: 1034066 - DNA, 120 bp, Artificial Sequence
  ENSG00000258393_5 (sequence is synthesized)
ctcattgaagaacctactgtgtaaccccgctggtcacagaggctgagaaatgcagcatccacatttccagtctctgcagtagaggagatggtacagaaaagagcaagagattgtctagca

SEQ ID NO: 1034067 - DNA, 120 bp, Artificial Sequence
  ENSG00000258393_6 (sequence is synthesized)
cacattgtctactctggatgccacattgacatttctcccagcgttttcatataaaattagttgagctgacttagaaatgaccacactggtgagtttcaatgtaagttgcacatacataaa

SEQ ID NO: 1034068 - DNA, 120 bp, Artificial Sequence
  ENSG00000258394_0 (sequence is synthesized)
agcactgggattacagagatttgaagaagcaaactgggctattgtcagcatctgtgtggagaggttcagatgacaaggaactgaggactgcctctgatcaacagcccggaagaaagagat

SEQ ID NO: 1034069 - DNA, 120 bp, Artificial Sequence
  ENSG00000258394_1 (sequence is synthesized)
atcttttctcagcaagtagcagttcttttctacagtcaagcctcaggagctaagcagcctgacacttgtgagttatctggcatgaagtaattattttctcagaagatcttatcattgctg

SEQ ID NO: 1034070 - DNA, 120 bp, Artificial Sequence
  ENSG00000258394_2 (sequence is synthesized)
ccggcatgtgttcatatttcactgaagaatacctaaaaaaccctggtatctgcaaatgtaatttgcaaagttgacaccttatttttccccagttagcattttctttagcttctgcaacat

SEQ ID NO: 1034071 - DNA, 120 bp, Artificial Sequence
  ENSG00000258394_3 (sequence is synthesized)
ttaggtttatagaagtgtatctaatatctaaactttatagtacatgcaccagaaatgttttgtttctctttcatgcttttaaaaaatatatgttattaaatagagtgaaggtttaactgt

SEQ ID NO: 1034072 - DNA, 120 bp, Artificial Sequence
  ENSG00000282936_0 (sequence is synthesized)
gatgggtgaggggctcggagggagaaaggctgcaaggccggagcggagtgtgtgagtgcgtgtgtggagcagcttagggagcgaggtgctaagacatcccccagggccgcggtagggagg

SEQ ID NO: 1034073 - DNA, 120 bp, Artificial Sequence
  ENSG00000282936_1 (sequence is synthesized)
aagggaactgccctggagctatgagccgggagactcgccgtggggccttgcccaggctgcgccggggagagcaggcggctaagatgccgggtcgctgcgtggggcccagcaggtcggggc

SEQ ID NO: 1034074 - DNA, 120 bp, Artificial Sequence
  ENSG00000282936_2 (sequence is synthesized)
ggggggttcggcggccgtgggggaagagacggggcgcagggacgtcccgaggccgtggagcaaggcgccgggcgaagccctcggagtgggagacgcgctgtgtgagtgcagaaaggccac

SEQ ID NO: 1034075 - DNA, 120 bp, Artificial Sequence
  ENSG00000282936_3 (sequence is synthesized)
agggccgtcagcggccatgggggacgagacaagcggcggagacagccgacgccgccggggcgaatgaggctttgggagctcctgggaccccaggctccatcgaggctgcaagggaccctg

SEQ ID NO: 1034076 - DNA, 120 bp, Artificial Sequence
  ENSG00000282936_4 (sequence is synthesized)
gggctgtgtgggtgaacggggctgtgggggagcccgaggtggtggggcttgccggggctgtgtgggtgaccgggtctggggaggaggagaccgaagatagaagtccccggggctgcgaga

SEQ ID NO: 1034077 - DNA, 120 bp, Artificial Sequence
  ENSG00000282936_5 (sequence is synthesized)
gaaaaggtcgcccgggatctctgggccatgagagcattctgcacctgtggctgaaggtgcaggctatgagggccgcctcgggatgtggggaaggaagtagagtcgagctccatcccgtgc

SEQ ID NO: 1034078 - DNA, 120 bp, Artificial Sequence
  ENSG00000282936_6 (sequence is synthesized)
ctgcaggagagggacctgtcgaaaggggtgttcctggccgagcttcctgggtagagacaagccgcggcggtcttacagggccctgggtgaaggaacaggcaagggggatccctcgggccc

SEQ ID NO: 1034079 - DNA, 120 bp, Artificial Sequence
  ENSG00000282936_7 (sequence is synthesized)
cctcagggcccacagctctgggcttaggggcagcttacgagagagccttaggcttctgtggacagggacaggctgggagggtgcctcctgcgagtgtgcctggggctttggcgtcaagtt

SEQ ID NO: 1034080 - DNA, 120 bp, Artificial Sequence
  ENSG00000282936_8 (sequence is synthesized)
ctgaaatggccccgcacctgtggaggggagaagctgtgggggttcctgagactggggaggagataggctatgggtttgtctcaggcccttgtgaaaaagaacagactatgggcgagcctg

SEQ ID NO: 1034081 - DNA, 120 bp, Artificial Sequence
  ENSG00000282936_9 (sequence is synthesized)
ggaccgtggggtggactggggctgtgggagcgcccagagccatggagggagagctcggctgtggcggtgctgcaggtctgtgggggagaggacagtccccgcagattcctggggctctga

SEQ ID NO: 1034082 - DNA, 120 bp, Artificial Sequence
  ENSG00000282936_10 (sequence is synthesized)
cacatgaagcagtctgtggggccacccctggcgtatgggggaggggacaggctgtgggggtgtccgatgctgtggaggaggagcctacttctgtgggtgccgcaggtgtgtgttacagga

SEQ ID NO: 1034083 - DNA, 120 bp, Artificial Sequence
  ENSG00000282936_11 (sequence is synthesized)
gacaggctgtggaggagacagactctgtgggtatgcccggcccgtggggcacaggatactctgttggggtgccctgtgctgctgaagaggaaactagatgtggaggtgacccagggttca

SEQ ID NO: 1034084 - DNA, 120 bp, Artificial Sequence
  ENSG00000282936_12 (sequence is synthesized)
gggaaaggggacagcctgtgtgggtggagacaggctctgggggtgatccagggtcacggggagctgcgcagactgcagagtcatcatgtcctggggagcaggcagcaggttctgggggtg

SEQ ID NO: 1034085 - DNA, 120 bp, Artificial Sequence
  ENSG00000282936_13 (sequence is synthesized)
ccccaggcctgtgggggatacaacaggctacaggggtacccagggccttggggaaggacacgggctgtgtgagtgtcccagggctgtggggagcgggacagatggtaagggtgccccagg

SEQ ID NO: 1034086 - DNA, 120 bp, Artificial Sequence
  ENSG00000282936_14 (sequence is synthesized)
ctgtggtggtacctggagccctgggagaagagctgagccacagcgggggcctgggcctgtgggacggacagcaagctcttggggggcccccagccgaggcagtgcctgggcttggagagg

SEQ ID NO: 1034087 - DNA, 120 bp, Artificial Sequence
  ENSG00000282936_15 (sequence is synthesized)
agacctgtagtgggaatgttctgagcccgtgggaaaggaggcaggctgtgggggagccagagagtctggggcctccagctttaggggtccctgggtcagtggatcaggaggctggctgtg

SEQ ID NO: 1034088 - DNA, 120 bp, Artificial Sequence
  ENSG00000282936_16 (sequence is synthesized)
gagatgttgcatgtcagtgtgggaggaggcaggctgtgggggtgtctgagacggtgggcatacccagggcagcagatgtgccccggcaggggtgtgccgcagcaggggtcctcatggcaa

SEQ ID NO: 1034089 - DNA, 120 bp, Artificial Sequence
  ENSG00000282936_17 (sequence is synthesized)
tgggtgtgcccggctctggaaaggtgcctgccagagtgcctgctgctgtgtgggcgtctggtcctgtgtgtcaggaaggcagctctagagacattttgaacctgtgggaaaggactcggg

SEQ ID NO: 1034090 - DNA, 120 bp, Artificial Sequence
  ENSG00000282936_18 (sequence is synthesized)
ctgccagaatatctgtggcttcggggggacccgtggctcgggaggagctgtggtctggcggggaggaatccgtggcttcagggggacccgtggctcaggaggagctgtggtcaggcgggg

SEQ ID NO: 1034091 - DNA, 120 bp, Artificial Sequence
  ENSG00000282936_19 (sequence is synthesized)
aggaatccgtggcttcagggggacacgtggctcgggagaagctgtggtctggcggggaggattgtggttctggggccttcccgggcccatgggggaggagacagactattggggttcctg

SEQ ID NO: 1034092 - DNA, 120 bp, Artificial Sequence
  ENSG00000282936_20 (sequence is synthesized)
gggtatcccaagaccctggggacagagacagagggtcagggctcctgtggccaccgaagtccttctggctcctagggtgcctggttctgtggagctggagcctggtgatggaggcttttc

SEQ ID NO: 1034093 - DNA, 120 bp, Artificial Sequence
  ENSG00000282936_21 (sequence is synthesized)
aggcttgtcagggaggcagcaaactgcaggaatgcctggcactgtggggctgtctgcagctagtggggtgcccgtggctcccagggtgcctaggcctgtgcaagaggaaactggctcaga

SEQ ID NO: 1034094 - DNA, 120 bp, Artificial Sequence
  ENSG00000282936_22 (sequence is synthesized)
attgtggggtgaaagagagacagtgggcggacctgcagatgccaagggtcccacaaggatggaggtgcccacctcgaccaggatgcctgggcccatggcggagaagactggctctggggg

SEQ ID NO: 1034095 - DNA, 120 bp, Artificial Sequence
  ENSG00000282936_23 (sequence is synthesized)
tgtctcaggtttgttgggaggcagacagactacaggagtgtccatggctgtggggctgctggggtctgtgggggaggggaccatctttgagcatgtctctggcctgtctggaagaaggca

SEQ ID NO: 1034096 - DNA, 120 bp, Artificial Sequence
  ENSG00000282936_24 (sequence is synthesized)
gactgctgggaggcctgtggctgctagaggttccatggccgtgggagtgcccacagctcccgggcttccagggccaatggtaggggatacgggctctggggatgacggctcaggcatatg

SEQ ID NO: 1034097 - DNA, 120 bp, Artificial Sequence
  ENSG00000282936_25 (sequence is synthesized)
gggaaggagactggccactgaggggcccacagctgccagggttcctggacctgtggagggggagacaggctctgaaggtgtctcaggcctgtggagaaggagacacggtggagccattcc

SEQ ID NO: 1034098 - DNA, 120 bp, Artificial Sequence
  ENSG00000282936_26 (sequence is synthesized)
cgaggccgggagggtgcctctgcctctgggggtgcttgcagctgtaggagctcccatggcagggcgtgcgcctgctgcggtgtgggtgactgggtcctcaggagcagaagcggacgtggg

SEQ ID NO: 1034099 - DNA, 120 bp, Artificial Sequence
  ENSG00000282936_27 (sequence is synthesized)
tgtctcaggtctgaccgtgctgaggagacagtccacagggggagtgggggcttcagaggatgagacaggaggtgggaatattttgggactggccgggggcagccaggctgtggggacatc

SEQ ID NO: 1034100 - DNA, 120 bp, Artificial Sequence
  ENSG00000282936_28 (sequence is synthesized)
tcacacctgtgtgcctggggccaggttatggagctgtccaaggtctttgggggaagaaacagcctatgagaatgctctaggcatgtcagggacaagaacagctgtgggggtaccctcagt

SEQ ID NO: 1034101 - DNA, 120 bp, Artificial Sequence
  ENSG00000282936_29 (sequence is synthesized)
ttcaagggaggaaataggccttggccatttcagagaccacctacagccaagtgggaggaggctggctggaggagtgtctgcagtcagagtgagagggagcaatttgggagagagttatgt

SEQ ID NO: 1034102 - DNA, 120 bp, Artificial Sequence
  ENSG00000282936_30 (sequence is synthesized)
gggggaggctagattgaggggggcgttccagtagtgtgtgtagggaagaagttggggctgtgtgggagggaacaggttcggggtaggtttgtcatgggttgcggatgaaggcactggctg

SEQ ID NO: 1034103 - DNA, 120 bp, Artificial Sequence
  ENSG00000282936_31 (sequence is synthesized)
taagggcatctcagcatgggggagagagggttttcgtggagatgccccagggtatgtagagggacaaattgggacgtttcctggagcagtgggaaagggccagattgcaaggagagtccc

SEQ ID NO: 1034104 - DNA, 120 bp, Artificial Sequence
  ENSG00000282936_32 (sequence is synthesized)
agaactttgtacagggggacagtttaggggtgggtgtccctggactttgtgcgtgtgtgtgtatgtgtgtgtgtagcatcacttgaggcatgctggaactgtggggatcacctagttttt

SEQ ID NO: 1034105 - DNA, 120 bp, Artificial Sequence
  ENSG00000282936_33 (sequence is synthesized)
ttctagtggagaatggactatttggcccttggcacctagaagcagccaggagggaagtactgaccatttaaaagtggcagatctccgggccccatttctgcagccttcattctgcaactc

SEQ ID NO: 1034106 - DNA, 120 bp, Artificial Sequence
  ENSG00000282936_34 (sequence is synthesized)
cagccacccacctgtgccaacgtcaagccagttgggattgccttgctcatgtgcctcctcccatctgcttttttcatgtgtgctacagccttagaaataaggactcttagacagctgtct

SEQ ID NO: 1034107 - DNA, 120 bp, Artificial Sequence
  ENSG00000282936_35 (sequence is synthesized)
ttatgttcccaagaagtatctgtctttaagcaaatctagtctgcaaattttggatttattcaaaagcttaaattagggttttttttaaaaaaaccttgaatttcccaattgatttactgt

SEQ ID NO: 1034108 - DNA, 120 bp, Artificial Sequence
  ENSG00000282936_36 (sequence is synthesized)
aggattttttgagagaacaaattccccagagatttaaaactagtcagttcacagaaaatcagcttaactcaacaaatgctaaattgtgtactatgctcagagcactttgtaatgggaaat

SEQ ID NO: 1034109 - DNA, 120 bp, Artificial Sequence
  ENSG00000282936_37 (sequence is synthesized)
agaagagcaagacaaggcccttcccctcaagtcgccttgtctggctgggaagatgagacatgtacatgtgaaataggaatggttttagggaagactgttgccggatgacaaggctgtcac

SEQ ID NO: 1034110 - DNA, 120 bp, Artificial Sequence
  ENSG00000282936_38 (sequence is synthesized)
tattgttctgtactacctgacattatgggaccaggccagccagcttcaacctgtgttcatctagcacctaggacccaacttgatgggaggagcgaccccaaagtacttcagacccagaac

SEQ ID NO: 1034111 - DNA, 120 bp, Artificial Sequence
  ENSG00000282936_39 (sequence is synthesized)
cagctgcagtttaataggaatgttcctacacattcaagcaacttggcgatccgatattcttgcccacatgccattagaattgaaaaactgaagcactcatacaatgaatcataccattgt

SEQ ID NO: 1034112 - DNA, 120 bp, Artificial Sequence
  ENSG00000285068_0 (sequence is synthesized)
ctacaggcgacgttgccgcctcgccgccgtcaccggccgggaccttgcgaactgtactgaggaagtccaggtcaaataaggaaggaggtagagcccagggatgcagctgtcagaccttgg

SEQ ID NO: 1034113 - DNA, 120 bp, Artificial Sequence
  ENSG00000285068_1 (sequence is synthesized)
agaaggagcacttggagactagagtgcacaagatggctcaaaagggattaaggatgaatggagagatgggagattttgaccagaaactaaaatactggagtttaaatggctcaaggcatt

SEQ ID NO: 1034114 - DNA, 120 bp, Artificial Sequence
  ENSG00000285068_2 (sequence is synthesized)
cttaatctactcaaagtgacacctaagattaaccatcacaaatggggatgaagtctggattagcgagagtctggaaagaccaagatcaggatgtcatcatggttggattctgctgagggc

SEQ ID NO: 1034115 - DNA, 120 bp, Artificial Sequence
  ENSG00000285068_3 (sequence is synthesized)
ccacctctggattcatagaatggcaccttcttgctgtgtcctcacatggtctaagggactaaaagccctcatggcctgaccacctcccagtggtcacacctcctaataccatcactttgg

SEQ ID NO: 1034116 - DNA, 120 bp, Artificial Sequence
  ENSG00000262877_0 (sequence is synthesized)
agcagggagccaggttgggggtgtgggaaggcagaagtcccagggatcctgggggaggctcaggttgtacctgaaggccacagtctcctcgacagacctcggacgaggttgtaagtgttt

SEQ ID NO: 1034117 - DNA, 120 bp, Artificial Sequence
  ENSG00000262877_1 (sequence is synthesized)
ctcggcgtcccctccagcgagggggtctccattgctgcagttgccggttttgtccaaccagcatttatagccctccagtgagttattcctcggagttctcacagagcagcatgcgcctgc

SEQ ID NO: 1034118 - DNA, 120 bp, Artificial Sequence
  ENSG00000262877_2 (sequence is synthesized)
ggcaaagccctcacctccagcccctggaccacctgactgctgcctcccgcctggcgccaaacacggccaccgcctcttttgttaacaggacagttgatccattaaattaaaaatcattca

SEQ ID NO: 1034119 - DNA, 120 bp, Artificial Sequence
  ENSG00000262877_3 (sequence is synthesized)
tcgtccccagcgcctgccccctcccgaccaggcctgggctgaggcccagggtaagggggctgaggcaggccacagaggagcaagacttgtcaggggccagacctgggtaggaggattgtc

SEQ ID NO: 1034120 - DNA, 120 bp, Artificial Sequence
  ENSG00000262877_4 (sequence is synthesized)
agagaaagcccagatcagacagatgggggttgggagggcctagtggctgaaactgccctgcttggggacaatgctcaggcaggaccaatccaaacgagggcactgcttatgtggtccttc

SEQ ID NO: 1034121 - DNA, 120 bp, Artificial Sequence
  ENSG00000262877_5 (sequence is synthesized)
cggagcatcctccaaggcagagcctggcttcgggccctccctgcaaggacacctgcctccactccctgccagaccaggcctggctgcagaggcggaggggcggcagggctgcctgtctcc

SEQ ID NO: 1034122 - DNA, 120 bp, Artificial Sequence
  ENSG00000262877_6 (sequence is synthesized)
actgtttggcggtgtttacacgtgtcgctgtcagggtgtctggacagtgggggtcgggggcctcccgggcccagacttccccaggcctattctcacactggtgagagggccctaggggaa

SEQ ID NO: 1034123 - DNA, 120 bp, Artificial Sequence
  ENSG00000262877_7 (sequence is synthesized)
gggtgtgggctgggtggcggggccaggccagctgagacctacaggaccgtggagcatttaggtctcccacccaactccacccggtcctctgagcatcagttacagagcccaggcagcagg

SEQ ID NO: 1034124 - DNA, 120 bp, Artificial Sequence
  ENSG00000262877_8 (sequence is synthesized)
gaaggcagcttccaccaggggttcccttagcccccaccctccaaaagccccagaccctgccaggcctcaccctgccagcatcgtggccccagctgacggctcccaagggcaggtgctggc

SEQ ID NO: 1034125 - DNA, 120 bp, Artificial Sequence
  ENSG00000262877_9 (sequence is synthesized)
aacacaagcaggagccctcggggcatcccgcagggcacacaccaggtcgccctgggctccccaagcacctcccagacccagcccttgggtgggtcctggcccacaaacccccacgccctg

SEQ ID NO: 1034126 - DNA, 120 bp, Artificial Sequence
  ENSG00000262877_10 (sequence is synthesized)
cccctgagatgagccccaccgcccacctgccctccagccctggagacctttctcccccttggccatggctcccatggggaggctgcaggccctccctgggctggaccagaggggacagac

SEQ ID NO: 1034127 - DNA, 87 bp, Artificial Sequence
  ENSG00000262873_0 (sequence is synthesized)
ctctcccggctgccttgtgctcagacctgccatggcaggaaaacttggggtttgcagattcttaaatgttttgtgttataagccggg

SEQ ID NO: 1034128 - DNA, 120 bp, Artificial Sequence
  ENSG00000262873_1 (sequence is synthesized)
tcaaaaaaaaaaaaagttttgtgttatatggattccagttctcagctgaaaaatctccaccttttcatctactttctcccttgcttcctccatctaaacaaaaacgcacagagttcgaac

SEQ ID NO: 1034129 - DNA, 120 bp, Artificial Sequence
  ENSG00000262873_2 (sequence is synthesized)
tctaaacaaaaactcacagagagttcaggggttctctgctgcgacttccactctctggctttgtgtgcatccgtttccacgggctatttttcctcttgatttttggccctgtggtctctg

SEQ ID NO: 1034130 - DNA, 120 bp, Artificial Sequence
  ENSG00000262873_3 (sequence is synthesized)
caaactgcagcggggggcagccgcctgcttttgtgaacgcagcgtattgaaacacacccatgcccatttgttcacagatgctctgtggctgcgtgtgccctacagcagcacggttcagta

SEQ ID NO: 1034131 - DNA, 120 bp, Artificial Sequence
  ENSG00000262873_4 (sequence is synthesized)
ggcagaggccacttctactacccggctaaggaaaagatgggcagagcctgctctggatgacgctgtgttccagccggcggagagggtcccccatttcctcggaactaatcctccaggaaa

SEQ ID NO: 1034132 - DNA, 120 bp, Artificial Sequence
  ENSG00000262873_5 (sequence is synthesized)
ttaacagacagtttgctgtggacaactagagccctccccttccttagccctgagcgaggtaaacaattctgctctgccttccggaagtttcaaattagctcttcaaccagcgttttcacg

SEQ ID NO: 1034133 - DNA, 120 bp, Artificial Sequence
  ENSG00000262873_6 (sequence is synthesized)
cagcttccagtcctgccacagtcttgaagaagagatcagctttcgcgtcttcattcttgccaagattagctgcccttcgaatctcccgtgtgtcattaatcccagcacgaacaagcactt

SEQ ID NO: 1034134 - DNA, 120 bp, Artificial Sequence
  ENSG00000262873_7 (sequence is synthesized)
gggaactgcgggctgcagatggtctgcttatcctacggaaccctcctcttttgaggcttaacccctttagtctttgttgcttctgtagctttctgatgccattaaagagatgatttttat

SEQ ID NO: 1034135 - DNA, 120 bp, Artificial Sequence
  ENSG00000262873_8 (sequence is synthesized)
ggggagtctgaggctgccctgccgtctcctgtctggggtcgtgatgcagtggggcctgtcatgagtggtccagacgtgtacccccggaggtggaacagtgacagcctcaggtgccctggt

SEQ ID NO: 1034136 - DNA, 120 bp, Artificial Sequence
  ENSG00000262873_9 (sequence is synthesized)
gcctcctccttcccggctcttcctggcactctgcttccttctcctaacctgagagccacacgctatttcttcttgtccatctagaaaccaaggacatctggaaggggtcttccaccttag

SEQ ID NO: 1034137 - DNA, 120 bp, Artificial Sequence
  ENSG00000262873_10 (sequence is synthesized)
accctaacaggggaagtgcaacgcagctttctggccgcgctgacccgacagggctgctccgatggggaagcgtggccactcgcacagatgttcatttgcacagcatcagaccacacagca

SEQ ID NO: 1034138 - DNA, 120 bp, Artificial Sequence
  ENSG00000262873_11 (sequence is synthesized)
ggcagtgcgggggtgagcaccggggcgcaagtgagtctcagagtttcgctccgtgctcctcccccccttgctatatgtcagcgtcatccggagcctgccagcccggtcacccacttgctt

SEQ ID NO: 1034139 - DNA, 120 bp, Artificial Sequence
  ENSG00000262873_12 (sequence is synthesized)
attagaatacattagctgacaatgtggatttaaataactcgggcaggtgacagcctgaagcgcacccagcgtagctgggctctcctgcactggcccagatgctctgtggctgcgtgtgcc

SEQ ID NO: 1034140 - DNA, 120 bp, Artificial Sequence
  ENSG00000262873_13 (sequence is synthesized)
ctagcccccatgtcttgtcaactttgagctcctgaatctgtctacccacctccgggccccggacccctccaccccggacctgggaaaaggccccttacctgatccccagaagcccttggc

SEQ ID NO: 1034141 - DNA, 120 bp, Artificial Sequence
  ENSG00000262873_14 (sequence is synthesized)
ctgtccaaacccgtctccatactcagtgaggttttccaagtacagatctgactgaagtcccctgcggcagccctgtgctgacatccattgccccaaggataaagacctgggtcctcagtc

SEQ ID NO: 1034142 - DNA, 120 bp, Artificial Sequence
  ENSG00000262873_15 (sequence is synthesized)
cctccacagcagcctgcacccaagtcccctcgctgagctccagccactggccccgctgggcagaagtgaccatgtgatacagagctcccgcctccccggagtgggatgctctgtggctgc

SEQ ID NO: 1034143 - DNA, 120 bp, Artificial Sequence
  ENSG00000228358_0 (sequence is synthesized)
gcgcatgtgtgagccctctcatccgactcctgagatcttatcaggaagctgctgatcaccagcttcaggtgtttctatttattgggagactgtctttccctggcaccagctgcaaccaat

SEQ ID NO: 1034144 - DNA, 120 bp, Artificial Sequence
  ENSG00000228358_1 (sequence is synthesized)
caactgcctgaccatcacctgatggtcatctgacattcccaggactccagataagagcccaggccaaaggacaccttgattttgaccttgtcagacctggagttgaaaaaccagctgcac

SEQ ID NO: 1034145 - DNA, 120 bp, Artificial Sequence
  ENSG00000228358_2 (sequence is synthesized)
ctggagttgaaaaaccagctgcacccttctagaattcttacttacaaaactcctcgtgaggcagtcaactttgctactggcagccaggagtctcctaggagcttcaatagctcaatacat

SEQ ID NO: 1034146 - DNA, 120 bp, Artificial Sequence
  ENSG00000228358_3 (sequence is synthesized)
ggagaaagagtggcagggaggagaggttagagagagagagggaagtttctgaatcaaagagcagagggagatgttacaagacaagatgatttcactggaagctgagttttgccagctttg

SEQ ID NO: 1034147 - DNA, 120 bp, Artificial Sequence
  ENSG00000228358_4 (sequence is synthesized)
gggaaatgctgatgcagaacatcatttatttaaggctgatactcatggatagaagagtcaaagtgcgaatatatgcacccttctatacggattctgcagaaagatatgcttgggtcatga

SEQ ID NO: 1034148 - DNA, 120 bp, Artificial Sequence
  ENSG00000228358_5 (sequence is synthesized)
ctcagggtatatttcttcctcttaaagtgtaccttccctggagcttcagcctaatgcctgaggtcctcagtgaggtccctccattcttcctatctaagctgaaacttcaacatcttcagg

SEQ ID NO: 1034149 - DNA, 120 bp, Artificial Sequence
  ENSG00000228358_6 (sequence is synthesized)
agtgtgtgacacctggtatgtctgctcagttctgagctctgtagtgactccactgttgtgttttggaaaacttgtcatgtgcacatgaataatttaatcttagattattaaattattgac

SEQ ID NO: 1034150 - DNA, 120 bp, Artificial Sequence
  ENSG00000228358_7 (sequence is synthesized)
agaatgttgaaggcatatttcactcctcttctttcttccttgtcgagaagcctcaggttctgcaccttctccgctttcttgcacagccatgttggatgcaggagatgttacaagacaaga

SEQ ID NO: 1034151 - DNA, 120 bp, Artificial Sequence
  ENSG00000228358_8 (sequence is synthesized)
tgcttaactaagataattaacatcagaatatcatctaagatttgtcttcttaaaaatcaagttttaccagaatcttaatatgaattataaaattaatgattttattgggacagttttaga

SEQ ID NO: 1034152 - DNA, 120 bp, Artificial Sequence
  ENSG00000228358_9 (sequence is synthesized)
tgatacttatttgtaatttgcaaatattctaagatgttggtcattagagaacatatatgaataagtgcatgtggtagttaggagagtggaaatgaatacaaactattaatgggttgttgc

SEQ ID NO: 1034153 - DNA, 120 bp, Artificial Sequence
  ENSG00000228358_10 (sequence is synthesized)
agaatattctgaccttactgaataaacacacaatacatatgcgcacacattcatagaatcagaaagtcatgaaaaggctgaatgtaaaacaaagagcatgagagacccatgttcttaaat

SEQ ID NO: 1034154 - DNA, 120 bp, Artificial Sequence
  ENSG00000228358_11 (sequence is synthesized)
tctattagtactaaaacttccagttaacattgtagaaacatatatattagagaattatgaataaacacagtccttgacgtatgcacaatctgagttgatcaaaggacactggcagaaaca

SEQ ID NO: 1034155 - DNA, 120 bp, Artificial Sequence
  ENSG00000228358_12 (sequence is synthesized)
ttaaaaaactgtgtaagatatttcactgcaattttataaatttcttcagtatagtagtagtgttttcctactcattacaggatctggggccatctgcttttaaaataataccttgcacat

SEQ ID NO: 1034156 - DNA, 120 bp, Artificial Sequence
  ENSG00000228358_13 (sequence is synthesized)
aatgggagatctttacataaagtttgaataaattaaggaagaattaattagcaagtccattcctgctatgtcatttaagcaattttttattcatcaaaacatactacttcaagctaatat

SEQ ID NO: 1034157 - DNA, 120 bp, Artificial Sequence
  ENSG00000228358_14 (sequence is synthesized)
taaatggtttatattcatgaaaccatgggctattacttaattcctagaatttacctgcaaaaaatcattgatttatacactatacaaggtaatattctggttcattctctggaacaaatt

SEQ ID NO: 1034158 - DNA, 120 bp, Artificial Sequence
  ENSG00000228358_15 (sequence is synthesized)
gcaacttaattgaaaatagtatgaaagctagtaagtataattcaagtgaaaagccttaaattccataagaattaagaacctttggtaattaatataccaaacttttggtatttgaaagtg

SEQ ID NO: 1034159 - DNA, 120 bp, Artificial Sequence
  ENSG00000228358_16 (sequence is synthesized)
aaaagatgtattcctttaagaaaaataataaagttgtcaagatgaggaagaattaaacgtacgtaatattgggccctaatagatgagtgatgataacagaaagtaacgtcaatcaagaca

SEQ ID NO: 1034160 - DNA, 120 bp, Artificial Sequence
  ENSG00000228358_17 (sequence is synthesized)
acagaacagtatggggtgttttcagggagtattatttaatcaacctggcgttctaatgatagtgactatgaattagcaaccttactttgccctaatgtgagtggcttattagaagaggct

SEQ ID NO: 1034161 - DNA, 120 bp, Artificial Sequence
  ENSG00000228358_18 (sequence is synthesized)
gaagtgggatactagtgagcaagctgctgctagaggtaatgaggcaagaaacaggattttaacaacattagagatctcgttaattcaaactaatggaaaaaattgcagtaacataaaatg

SEQ ID NO: 1034162 - DNA, 120 bp, Artificial Sequence
  ENSG00000228358_19 (sequence is synthesized)
taaatctctccaacttttaaatttataattggcagagaaggagaagctattgaagatcttgatgctttgaaactgtatgagaggtgttgttatcaaaagaactagctaggagaaaaaaga

SEQ ID NO: 1034163 - DNA, 120 bp, Artificial Sequence
  ENSG00000228358_20 (sequence is synthesized)
aaatatacgttgatggtagctgttggatttagttctggtttaaagtatttagacatgaatctgatcctggatttcaaaaggacctttattgaaaatgtcaagtgacaagagatattaaga

SEQ ID NO: 1034164 - DNA, 120 bp, Artificial Sequence
  ENSG00000228358_21 (sequence is synthesized)
tgcataagattgaacactacagcatcttctttcaataatttgatttactcacccttatttaaagaattgaatctttctgttctcaagcctccttttcaccaattaatttgattcaggaca

SEQ ID NO: 1034165 - DNA, 120 bp, Artificial Sequence
  ENSG00000228358_22 (sequence is synthesized)
aaaagtggtgtttgatattttcaactttaaaataagtcaattttcctgcacgcttaaatattctgttatcttgaattctaatgaaggacctataactatgtatttaatatttggtaaatt

SEQ ID NO: 1034166 - DNA, 120 bp, Artificial Sequence
  ENSG00000228358_23 (sequence is synthesized)
cagatgtaacatattattgaaataagattgtataaactaaacaagaaaatagactgaaaatattgtctcaaaaagaacaattcttgctatgcttttcttgtatttatattttattcatgt

SEQ ID NO: 1034167 - DNA, 120 bp, Artificial Sequence
  ENSG00000228358_24 (sequence is synthesized)
atgtaagctgttttctatcctggaaatatcatcctcctactctccaccttcttttcacccttcactcttgtctttcaatgctcagctaaaattaaactcctcaaacaggctttcaaagct

SEQ ID NO: 1034168 - DNA, 120 bp, Artificial Sequence
  ENSG00000228358_25 (sequence is synthesized)
cagtgtagaatcatctgttatttcctgcttcctcagtattaactttttatatattatatgtcttgttatatgtataaatgtttatttcctaaatcaccagtacactgtaaactctatgaa

SEQ ID NO: 1034169 - DNA, 120 bp, Artificial Sequence
  ENSG00000228358_26 (sequence is synthesized)
gttagaaatgtaaaatcaacacctaatttggtatttattcataatgagaatttaacatatttttgcattgataaatgaatgtaggttagcaaaccagtaaaatacacatttcacatgctg

SEQ ID NO: 1034170 - DNA, 120 bp, Artificial Sequence
  ENSG00000228358_27 (sequence is synthesized)
ccaagtgatttattgatcacataccaattctaatactggagcatcttatttcaaagaatatgaagcatttgtggtaattattcacaaatttgttagtatattttaattcttattttatag

SEQ ID NO: 1034171 - DNA, 120 bp, Artificial Sequence
  ENSG00000228358_28 (sequence is synthesized)
ctcagttttatttttgataaatatacaaaactctcaaaatctgaatactccatttgcaagctgctcttatctaataatcttaccttcatttcctttttacatcttctaccttacccatta

SEQ ID NO: 1034172 - DNA, 120 bp, Artificial Sequence
  ENSG00000228358_29 (sequence is synthesized)
attttgctatttttaattggcacagccacattttgcatcattctagtttgtgcctatcatatggaaaagcagaagtgttatctgtgactgtttggattttataattaatttgaactactt

SEQ ID NO: 1034173 - DNA, 120 bp, Artificial Sequence
  ENSG00000228358_30 (sequence is synthesized)
gaagtgtgatttgttcatggagtcattggagaggcataatattattaaaagccagatgttggcacattttgcatgcttaacaggcacaaaaccatttcctagtggaaacattttaaaaat

SEQ ID NO: 1034174 - DNA, 120 bp, Artificial Sequence
  ENSG00000228358_31 (sequence is synthesized)
ggttttggttcccctatacggattatcaattcaaataatctcacttacttttcttttcttactttacatggggcaagtatattgatatctgaaactgcatttgaaaaatttgggaaaaca

SEQ ID NO: 1034175 - DNA, 120 bp, Artificial Sequence
  ENSG00000228358_32 (sequence is synthesized)
ttgatctttctggcaaatagactttactaattaaacataccttcaatatcttaatgggaaattgaaacatatctcaattttactgcttgaaaaccagcaatgccaagttatatttctcaa

SEQ ID NO: 1034176 - DNA, 120 bp, Artificial Sequence
  ENSG00000228358_33 (sequence is synthesized)
gaattccctgaaacattcactgtacaactctactttcttgaatacttactataattaaagttcatttctgatttacataaagaccaatgagcatgctagagaatttctgcttcaggtagt

SEQ ID NO: 1034177 - DNA, 120 bp, Artificial Sequence
  ENSG00000228358_34 (sequence is synthesized)
tattcaagaaaacagtactatggaagctttaccatcttcactttgtggatttcatatctatttctacctggaaaagaagagaaagatagagtacaaaattgcaaaaggggtttttatagg

SEQ ID NO: 1034178 - DNA, 120 bp, Artificial Sequence
  ENSG00000228358_35 (sequence is synthesized)
caatgacttcaagtgtagcatattacttctacctgcattccattgtctggatgtggaattcactcatatgtgtacatttaacagcaagaaagatagagctagttcccttaagaaaagaga

SEQ ID NO: 1034179 - DNA, 120 bp, Artificial Sequence
  ENSG00000228358_36 (sequence is synthesized)
gacatttccttggagcatagtaacagtttcttactcactcaacataatttccataatgcaaatgaaaaaaaaactggtaaatataggttatagtgttacttgttaaaagtgttttccaca

SEQ ID NO: 1034180 - DNA, 120 bp, Artificial Sequence
  ENSG00000228358_37 (sequence is synthesized)
tacaaaattttatttgcatatggtgtcctttgaaaaagaagcacttaagattttttaatctcttaaagttaggcatttaaatctagttaaattcaaattgtgatatattttgtataacat

SEQ ID NO: 1034181 - DNA, 120 bp, Artificial Sequence
  ENSG00000228358_38 (sequence is synthesized)
cttcaaaatttatatcagtataaaacaagttcagttaaaaatctactgcatacacaccaccttaggtctactgtatacaagaaatgacacaaaaaattcttctagagtttgaaactgtct

SEQ ID NO: 1034182 - DNA, 120 bp, Artificial Sequence
  ENSG00000228358_39 (sequence is synthesized)
gaaagatttttgttttcaatcacacgcagagggtttaaataatgaaaaaaccatgctgtaattttttataatgtttctgaaacaataacagcaaaaacacaatttaagaagaaaaaagat

SEQ ID NO: 1034183 - DNA, 120 bp, Artificial Sequence
  ENSG00000228358_40 (sequence is synthesized)
gagaaaaaattattaacaattaacaataacaaataagaaattaagaaatacattcatttaaaaattagttatttggagtgcttaacacaaactatagttcatgaacttttacctacctag

SEQ ID NO: 1034184 - DNA, 120 bp, Artificial Sequence
  ENSG00000228358_41 (sequence is synthesized)
acatggtttataatattctttaattatcaaaatatgtttcaaaaatgtattacttatacaaatatgagctatcatttgatgagtaagacagacacttgtagctaaaaaaattcatgtaaa

SEQ ID NO: 1034185 - DNA, 120 bp, Artificial Sequence
  ENSG00000228358_42 (sequence is synthesized)
gagcatatgcatttccatatattaaacagtgaaaggcgtaacagaggaactttgccactttacatgaaacattttgtttctaaacttttgaaaagattgaattggcagatacaattcaag

SEQ ID NO: 1034186 - DNA, 120 bp, Artificial Sequence
  ENSG00000228358_43 (sequence is synthesized)
ttgagatttggttggggacacggccaaaccatatcaataactttatgtaaattatttatattgatcattcttttgtatccaaatatataaacacataagtaatatatgttctgtccaggt

SEQ ID NO: 1034187 - DNA, 120 bp, Artificial Sequence
  ENSG00000228358_44 (sequence is synthesized)
ggatttataatgagagattttctagttgtttttggttctcctcctcctcctcctccttttcctccttctcttccttcttttcttcctccttttcttctaaaacctctaatctcttattcc

SEQ ID NO: 1034188 - DNA, 120 bp, Artificial Sequence
  ENSG00000228358_45 (sequence is synthesized)
ctctaatgtctgaccaaagtactgctgtctgagacattggaggcatactgtgctcctcttcttccctccctgtggagaagccttaagttacatgccttcatccagtcttgcagagttgtg

SEQ ID NO: 1034189 - DNA, 120 bp, Artificial Sequence
  ENSG00000228358_46 (sequence is synthesized)
tctaatgcagcaagatgcctgcctgttttctttgttcctagctgtctccaggcatccaaactatgcctgttccatcagtactaagggtgagggagatgttacaagacaagatgatttcac

SEQ ID NO: 1034190 - DNA, 74 bp, Artificial Sequence
  ENSG00000228358_47 (sequence is synthesized)
ttcaaatatacttgattcacacaacaatgatgccacaagctccatacccaaacatcagtgatgaaagtgactgg

SEQ ID NO: 1034191 - DNA, 120 bp, Artificial Sequence
  ENSG00000228358_48 (sequence is synthesized)
acaagctccatacccaaacatcagtgatgaaagtgactggacctgagaaagactttgcctaaggaaacaatgactgagtgctgctatggtttgaacgtcgccttcaaaactcttgttgaa

SEQ ID NO: 1034192 - DNA, 120 bp, Artificial Sequence
  ENSG00000228358_49 (sequence is synthesized)
acttaatccccattgtgaaaatattcagacattgggccttaagaagtcattgaaatcgattaatccattcttgaattaatggattaatgcttaaatatggatgggcttgaaactagtggt

SEQ ID NO: 1034193 - DNA, 120 bp, Artificial Sequence
  ENSG00000228358_50 (sequence is synthesized)
tttataagaagagaaaaacagacataagctggcatgttagcatgctcagcactttccaccacgtgatgccctggtgccacctcaggactcttcaagaatacccaccagcaataagtctct

SEQ ID NO: 1034194 - DNA, 120 bp, Artificial Sequence
  ENSG00000228358_51 (sequence is synthesized)
caccagatcagcccctagaccttagacttatcagcttccacaactgtaataaattttttttatttatagatattcagtttcaggtattctgttataaaaataaagcagactaagacagct

SEQ ID NO: 1034195 - DNA, 120 bp, Artificial Sequence
  ENSG00000228358_52 (sequence is synthesized)
tcataatggactcatgcaatttagaagatataatgatttaccttggcttatcaattaaaagtatatgtctagtcttatagtcaaataagtcattcatttctattatgccttagagacagt

SEQ ID NO: 1034196 - DNA, 120 bp, Artificial Sequence
  ENSG00000228358_53 (sequence is synthesized)
atagaatatagaaagtatttgatgtaaatattttaaatatctaattaacaacttgtgattgtaagatacttgcttacataacacatacacacacagacatctggaaatcaaggattatag

SEQ ID NO: 1034197 - DNA, 120 bp, Artificial Sequence
  ENSG00000228358_54 (sequence is synthesized)
accttaatttgttgatcaaataactaaatattaaaaattaaagactaaagcttttaaaatgcatttgaaagatagtttgatgtttactttcaatttgttctgatgtgaacttggcttagt

SEQ ID NO: 1034198 - DNA, 120 bp, Artificial Sequence
  ENSG00000228358_55 (sequence is synthesized)
atcatacagtaggatttaatcctgagtaggactaatttcatgggtgatgaattacctgaaaagcatttaagtggacagtagctcatatgattttatctttaattaaaattgcatattttc

SEQ ID NO: 1034199 - DNA, 120 bp, Artificial Sequence
  ENSG00000228358_56 (sequence is synthesized)
ttgattgtgaaaatttgtggttaattgcaattagcagcatcttcagaatacacaatgagaaacacaaagtgattccaatgctacatgtaggtaattttgaggtaaattcacaggtcttta

SEQ ID NO: 1034200 - DNA, 120 bp, Artificial Sequence
  ENSG00000228358_57 (sequence is synthesized)
tggctcttatgcagcctaccataggctccaaacttcagtcttttacttttgttttagctcttgctttagtctgaatgttggtgtcccaccaaaagttcacatattggaatttagcctcta

SEQ ID NO: 1034201 - DNA, 120 bp, Artificial Sequence
  ENSG00000228358_58 (sequence is synthesized)
aaatgatggtattaagaagtggaacctttggaaagtgattaggtcatgataattctcattcatcaaaatcactcatcaaagtgattctcatgaatgggataaatgcccttttaaaatcac

SEQ ID NO: 1034202 - DNA, 120 bp, Artificial Sequence
  ENSG00000228358_59 (sequence is synthesized)
ttgaaaaagtctgattatcctttctgccctgcccctttagccctgtgaggtcattgtgggaaagcactgtctatgaggagtgatccctcaccaaataccaaatctgccagtggctttatt

SEQ ID NO: 1034203 - DNA, 120 bp, Artificial Sequence
  ENSG00000228358_60 (sequence is synthesized)
ttggacttgccaacctctagaactgtgagaaataaatgcccagtgtttataaaatgtcctgtgtaaggtaatttgttatagcagcaagaatggactaagacatccttcttccatagtgac

SEQ ID NO: 1034204 - DNA, 120 bp, Artificial Sequence
  ENSG00000228358_61 (sequence is synthesized)
caatataattggcagaaagtatccccattgactggatcattttgtagaatagccacagatgattgccctggttaaaaatttgagtaaaaatgagtctatgatcctttattagctctatag

SEQ ID NO: 1034205 - DNA, 120 bp, Artificial Sequence
  ENSG00000228358_62 (sequence is synthesized)
cccatctgctttactctgtcagctatatttttcaggattctttgtcattagtcttctggttgagttcagccaatgaaagtcactggcaggagaaaacgggaagccagtgtatttttgaca

SEQ ID NO: 1034206 - DNA, 120 bp, Artificial Sequence
  ENSG00000228358_63 (sequence is synthesized)
ctcatgatctcttagtggcaatagttgttacctgaaatccaaatttaactaggagtcctgcttgtaatttagcccaggatctcacctgcagactagcttgcttctctgtctgtcttctct

SEQ ID NO: 1034207 - DNA, 120 bp, Artificial Sequence
  ENSG00000228358_64 (sequence is synthesized)
gtatcttcaggtagcaatacctcctctctttaccccattagcctagtggtggcaacagcttctagtgttgccacctctagggcacctcattatagctttcattatttctgtattcctgat

SEQ ID NO: 1034208 - DNA, 120 bp, Artificial Sequence
  ENSG00000228358_65 (sequence is synthesized)
ttggtaaagcatcccattcttggctgttccatatatatatatatggtaagtttgggagtggccttgctagtaaagaataaattatttacttggttctagctatttacaaagttgctggtg

SEQ ID NO: 1034209 - DNA, 120 bp, Artificial Sequence
  ENSG00000228358_66 (sequence is synthesized)
actaattgctggaaagaagctgggacgttctgtggcccctccattttatatcccctccctttggttctctaggaaattgagttcaggaaagctaccaggaataaaactcttactttttat

SEQ ID NO: 1034210 - DNA, 120 bp, Artificial Sequence
  ENSG00000228358_67 (sequence is synthesized)
gcatgtgtattttttttccagacaatttggagagaattccctgaaacattcactgtacaactctactttcttgaatacttactataattaaagttcatttctgatttacataaagaccaa

SEQ ID NO: 1034211 - DNA, 120 bp, Artificial Sequence
  ENSG00000228358_68 (sequence is synthesized)
gaggcaaaatggcagactttaactgttgacatgacctccttggaacattcagactggtaagagaaaagaattaaacatcaaatcttccctcagggactccagataagagcccaggccaaa

SEQ ID NO: 1034212 - DNA, 120 bp, Artificial Sequence
  ENSG00000228358_69 (sequence is synthesized)
taataaatcacccaaacaaatggaaaaaaaaacatcctatgctcatggattagaagaatcattattaaaatgaccacactacccaaagcaatttacagattaaacacaattcttatcaaa

SEQ ID NO: 1034213 - DNA, 120 bp, Artificial Sequence
  ENSG00000228358_70 (sequence is synthesized)
cttcttaccaatttcaatgtagctgttattaattttgtggttgtccaggctactgcaacttcttaacaaaattctggacttcttaaaagggtattttggtttgtatattatttttaaatc

SEQ ID NO: 1034214 - DNA, 120 bp, Artificial Sequence
  ENSG00000228358_71 (sequence is synthesized)
atcagcactccagatgaggcaagacagaagccagtccctccctcgggcagactatgaaaagcctggatacattagatgcatacttccctctctctttttccttcagggagatgttacaag

SEQ ID NO: 1034215 - DNA, 70 bp, Artificial Sequence
  ENSG00000228358_72 (sequence is synthesized)
aaataaaattatctcttattttactttggccatttattactttacttcattacaatacaccttcggcgtg

SEQ ID NO: 1034216 - DNA, 120 bp, Artificial Sequence
  ENSG00000228358_73 (sequence is synthesized)
ttcacgccattctcctgccctcagcctcctcagtagaaccacatttgtaatcttcatttttaactgtacatttgcttaaatgtaccatagttgctacacatgaacaaaaaaatcaaatgt

SEQ ID NO: 1034217 - DNA, 120 bp, Artificial Sequence
  ENSG00000228358_74 (sequence is synthesized)
tctaagttgctatcgaatgcaattctaaaattagcttacttcaaagagtgcactaatttggctaaatcatagaaatgtctctttttaacaaaatataccacattggggaaaacatgattt

SEQ ID NO: 1034218 - DNA, 120 bp, Artificial Sequence
  ENSG00000228358_75 (sequence is synthesized)
ttagaatattattataagtgttgtagatatgttctgagagaaaggctatttcttcaataaaaaatattaaaaatactactcagcattaagaaaaggaataaactgttgtttcacactaca

SEQ ID NO: 1034219 - DNA, 120 bp, Artificial Sequence
  ENSG00000228358_76 (sequence is synthesized)
attgtgataaatctcaaaataattatactagatgaaagaaaccaggcaaccaagagtacatactgcatgaaatcatttatataaaactctagaaaatgcaaactactctatataatgaaa

SEQ ID NO: 1034220 - DNA, 120 bp, Artificial Sequence
  ENSG00000228358_77 (sequence is synthesized)
gaaaacatatcagtggttacatgagaaggagagctttgggagggagacaggcatttaaaaaggtcttgttgaagaactaggcatgttcactattttaattgtgctgatggaatcatgagt

SEQ ID NO: 1034221 - DNA, 120 bp, Artificial Sequence
  ENSG00000228358_78 (sequence is synthesized)
atatccacaagccaaaatgtatcaaattctacacttaaaatatgtacagatttattatatttcaacaataacaatagagctgttgaaataatagattgaaaactaccactattaatcaat

SEQ ID NO: 1034222 - DNA, 120 bp, Artificial Sequence
  ENSG00000228358_79 (sequence is synthesized)
taaaaattttaaacttccaactaaagagatttccaagaccaaatagcttcacgcatgaattctattatgcattaaatgaagaagaaataagaatcttaaatgaattcttaagatgataaa

SEQ ID NO: 1034223 - DNA, 120 bp, Artificial Sequence
  ENSG00000228358_80 (sequence is synthesized)
aagatgaaatattagccacttactatatgtggtgagcacaaacttgatagcaaatattaaccatgatgtgaagattaccaaaaattgaagttcaggtatgagcacagatgcagaaatcct

SEQ ID NO: 1034224 - DNA, 120 bp, Artificial Sequence
  ENSG00000228358_81 (sequence is synthesized)
aaacataaacaaaataataaacaccctgaatataataaaataatacatcaagaccaatctgtattttctcaattaatacaagtttggttcaaaattttaaaatcaatcaaggtaatctca

SEQ ID NO: 1034225 - DNA, 120 bp, Artificial Sequence
  ENSG00000228358_82 (sequence is synthesized)
gtagatacagaaaaatagtttgttaagatttaacacccattaaaaaattttaaagtcttatcaaactgagaatgcaatggatcttttgaatgtaatcatgggtagagaaagacaaacaaa

SEQ ID NO: 1034226 - DNA, 120 bp, Artificial Sequence
  ENSG00000228358_83 (sequence is synthesized)
agcaagtgcaacaatgcaaaaaaagagttttaaaatttagatgaaagatcacatacatagaaaattaaaaagatcatcaatgatgttgggcaccttttcatatgcctgcttgccatttgt

SEQ ID NO: 1034227 - DNA, 120 bp, Artificial Sequence
  ENSG00000228358_84 (sequence is synthesized)
atgtctcttcattatttttttttatttcttctaaaaaaaatgggacacgtgcagaacgtacaggtttgttacatagttgtacatgtgccatggggaaatgcaaatcaaaactactcggag

SEQ ID NO: 1034228 - DNA, 120 bp, Artificial Sequence
  ENSG00000228358_85 (sequence is synthesized)
atatcatctcatcccagttaaaattgcttttatccaaatctcttgtataaaagataggcaataacaaatgctagcaaggatgtggagaaaaggaaacccttgtacaccattggttggaat

SEQ ID NO: 1034229 - DNA, 120 bp, Artificial Sequence
  ENSG00000228358_86 (sequence is synthesized)
gtgaattagtacaaccactatagagaacaattttgaagttcctcaaaaaactaaaaactgagctaccacatgcaccagcaatcccactgctggatatatccaaaagaaagggcatcagta

SEQ ID NO: 1034230 - DNA, 120 bp, Artificial Sequence
  ENSG00000228358_87 (sequence is synthesized)
atcccactgctggatatatccaaaagaaagggcatcagtatattgaagagatatctgtactcctatgttatttgcaacactgtttacaatagataagatttggaagcaacctaagtgtcc

SEQ ID NO: 1034231 - DNA, 120 bp, Artificial Sequence
  ENSG00000228358_88 (sequence is synthesized)
aatgtggtaattatacacaatggagtactattctgccataaaaagaatgagatctagtcattcgcaacaacatagatggaattgaagatcatactgttaagtgaaataagccaggcacag

SEQ ID NO: 1034232 - DNA, 120 bp, Artificial Sequence
  ENSG00000228358_89 (sequence is synthesized)
tattctcacttatttgtaggaactaaaaatcaaaacgattgaactcgtggacacacagagtagaaggatggttaccagagactggaaagagtagttgggggtttggggggaggtggaaat

SEQ ID NO: 1034233 - DNA, 120 bp, Artificial Sequence
  ENSG00000228358_90 (sequence is synthesized)
ggttaatgggtacaaaaatatagttagaaagaatgagtaagacccactattggtagaacaacagggtgactataagcaataataacaattgtacattttaaaataatttaaaaagcgtaa

SEQ ID NO: 1034234 - DNA, 120 bp, Artificial Sequence
  ENSG00000228358_91 (sequence is synthesized)
ttggattgtttgcaactcaaaggataaatgcttgaatggatggataccccattctccatgaagtgcttattcccattgcatttctgtattaaaacatctcatctaccccgtaaacgtatg

SEQ ID NO: 1034235 - DNA, 120 bp, Artificial Sequence
  ENSG00000228358_92 (sequence is synthesized)
ctcaggcacggggttctttggacattgctgctctggtatgttgtgattatctgtattcacctcttgctgtctccaatttagaggacagctgtttgacctgtcacctcactgctcttatgg

SEQ ID NO: 1034236 - DNA, 120 bp, Artificial Sequence
  ENSG00000228358_93 (sequence is synthesized)
tctaagaaaactcattaatttatcaatgtcttcagttttttactttttggacagaatgatgacttccatgcttcttacatgctggactgaaaactgaaagccatatgtatgttttcagag

SEQ ID NO: 1034237 - DNA, 120 bp, Artificial Sequence
  ENSG00000228358_94 (sequence is synthesized)
gataactctttgtgaaattatttaacaagtacgacctactgtctgtgtaaatatcgcatgtatttactttatacagtcttccttactcacagtgaaaatctaaaatatttatggtgctct

SEQ ID NO: 1034238 - DNA, 120 bp, Artificial Sequence
  ENSG00000228358_95 (sequence is synthesized)
catcacttctgtcagtaagagagaaagtgagaaagagagagaaatgaagacacataggcacgcacacacacacacgcactcacactcacagaaatagttagaaaggttgagaaatggtaa

SEQ ID NO: 1034239 - DNA, 120 bp, Artificial Sequence
  ENSG00000228358_96 (sequence is synthesized)
ggttgagaaatggtaaatgtatctaaaacccagtacatttgaccagtttctaggaaataaagataaaaaattaaacttacaaacaatttctatatatacatatatgtgtgtgtgtgtgtg

SEQ ID NO: 1034240 - DNA, 120 bp, Artificial Sequence
  ENSG00000228358_97 (sequence is synthesized)
tatatatatatatatatgtacatatatgtttaaaagtatacccggttacataatataaatacctaatagattccactgcatttctttttggggacagaaacagtgatcttcctaaaaatt

SEQ ID NO: 1034241 - DNA, 120 bp, Artificial Sequence
  ENSG00000228358_98 (sequence is synthesized)
ggatatattatacccattgaaaatttgactctaacttatacctcaacctcaatttttttttttttactcctcacacaaaattctacagagaatttctcaccattacccaaaattgcaata

SEQ ID NO: 1034242 - DNA, 120 bp, Artificial Sequence
  ENSG00000228358_99 (sequence is synthesized)
cccttctataattacgtagcttagaaaacattcttttaacttttacagtaacctccaatccctcatttttcttgcaaactcctactcacctctccaggccaagatcatttgtcattcctt

SEQ ID NO: 1034243 - DNA, 120 bp, Artificial Sequence
  ENSG00000228358_100 (sequence is synthesized)
tctcataatcagcttccacaaccatgctttaatttacctcgtttttaacccttaacaaattgttaaaacacggtgtattaaacacattgcttaataaactcaagttgtaatctttaacac

SEQ ID NO: 1034244 - DNA, 120 bp, Artificial Sequence
  ENSG00000228358_101 (sequence is synthesized)
gggctcacacatgcgcactaagaggcaaaatggcagactttaactgttgacatgacctccttggaacattcagactgggagatgttacaagacaagatgatttcactggaagctgagttt

SEQ ID NO: 1034245 - DNA, 120 bp, Artificial Sequence
  ENSG00000228358_102 (sequence is synthesized)
ctcctcttctttcttccttgtcgagaagcctcaggttctgcaccttctccgctttcttgcacagccatgttggatgcagtaagccacccactcctttcctctctccttagctgttattgg

SEQ ID NO: 1034246 - DNA, 120 bp, Artificial Sequence
  ENSG00000228352_0 (sequence is synthesized)
ataccagcaactgaaaagcagaacaaaaacacttggatcgtaggctaactcctaaaagattgatccctggtgctgatacagaaaccatccaagaagccttggaaaagtgtcagattcccg

SEQ ID NO: 1034247 - DNA, 120 bp, Artificial Sequence
  ENSG00000228352_1 (sequence is synthesized)
atgatgctcaagatgcttttggccgaagaccataagtgctgagaacttccttgcttcctctcaactcactctgggatcatctttcataactctaagcttttctccatcatatgtttccaa

SEQ ID NO: 1034248 - DNA, 120 bp, Artificial Sequence
  ENSG00000228352_2 (sequence is synthesized)
aatctataaagaaatacttaaatgcattgttgaggaggactgctagtcaaaggagcctctcaggaagcttatgcaataggaaagaatcaccctgtcttactctttaaaagactttcctgc

SEQ ID NO: 1034249 - DNA, 120 bp, Artificial Sequence
  ENSG00000228352_3 (sequence is synthesized)
aagagaggcacaccagactcaaaatttcatgtactgtgcaaaaacatgcccaggcctttggagaactggtcttttaaacaagaattgagaccaggtgcaatggttcatgcctgaatgccc

SEQ ID NO: 1034250 - DNA, 90 bp, Artificial Sequence
  ENSG00000228352_4 (sequence is synthesized)
agaattgagaccaggtgcaatggttcatgcctgaatgcccagcacttcgggagaccaaggtgggaggatcggaaacatagtgagactctg

SEQ ID NO: 1034251 - DNA, 120 bp, Artificial Sequence
  ENSG00000228353_0 (sequence is synthesized)
aatggccctggtgacttcttacctgattcatcccacaccagtcagaaggggctgtgaaggcagcagcgaaggagccacacatggacgtggaatgggcacgctgaccatcatggtcacgac

SEQ ID NO: 1034252 - DNA, 120 bp, Artificial Sequence
  ENSG00000228353_1 (sequence is synthesized)
actgccctgtgcaaccctgggtcatctcaggggagagccattcccaggttcacagcaagcactcttttactcagatgggccacctgcatcaggccccaaggaagcacttattagtagaag

SEQ ID NO: 1034253 - DNA, 120 bp, Artificial Sequence
  ENSG00000228350_0 (sequence is synthesized)
atttgaggctgctgggcggcagatggagcgatcagaagaccaggagacgggagctggagtgcagtggctgttcacaagcgtgaaagcaaagattaaaaaatttgtttttatattaaaaaa

SEQ ID NO: 1034254 - DNA, 73 bp, Artificial Sequence
  ENSG00000228351_0 (sequence is synthesized)
atttcttcgcttctatgcttgaaataacacacattaggtacagctgtcactgtccaccatgtaagaggtgctg

SEQ ID NO: 1034255 - DNA, 120 bp, Artificial Sequence
  ENSG00000228351_1 (sequence is synthesized)
agaaaacatagaaatgtaaatgcactttctacatgtgaactgtgctaaggacctttgaagctgtgctccttcttcccaatatgacatctgggttaaggagaagcttactttatatggcaa

SEQ ID NO: 1034256 - DNA, 120 bp, Artificial Sequence
  ENSG00000228351_2 (sequence is synthesized)
aaggatgttgctcaagaagggacaggagtgaagtgtccaggctcatcaacagtctgtgtgcaaagttacagaaaatttcttctcacagcctttgagagagaaaattctatggccttcaga

SEQ ID NO: 1034257 - DNA, 120 bp, Artificial Sequence
  ENSG00000228351_3 (sequence is synthesized)
cttggattagaactacaccaccggctctccaggatctgcagcttgtagatggcagattgtggacattctcagccttcataatcatggctcgtcccaagtggatctttcagaaagcccttc

SEQ ID NO: 1034258 - DNA, 77 bp, Artificial Sequence
  ENSG00000228351_4 (sequence is synthesized)
tcactaagaacaccctctctcagaagccagctgccatgtcccaaggagaagtcacatgaagaatggaggtggtctgt

SEQ ID NO: 1034259 - DNA, 120 bp, Artificial Sequence
  ENSG00000228351_5 (sequence is synthesized)
gtcccaaggagaagtcacatgaagaatggaggtggtctgttcaacagacccccagagcttcaagctgacagcagcatcaactctaggaatgcaaggggactatccagaacattccaaacc

SEQ ID NO: 1034260 - DNA, 120 bp, Artificial Sequence
  ENSG00000228351_6 (sequence is synthesized)
tagtgccaccgctgcccaccccgtggtgtgctagactcgtccaacttagaatcaccactactccctgcaagtgtgtccatggtgctaaacatccccaagtatttgtatatagtgctttgt

SEQ ID NO: 1034261 - DNA, 120 bp, Artificial Sequence
  ENSG00000228351_7 (sequence is synthesized)
acagggtgatttatgtgcattcatgtgatggttcagaatctcaacgagaggacgatgtttgccactgctgtacagaaaaaggtgatccagcagctgcagatgattagaagtgaatggcaa

SEQ ID NO: 1034262 - DNA, 120 bp, Artificial Sequence
  ENSG00000228351_8 (sequence is synthesized)
agcaatgtcaagagattctacatccacaaaacaagagtttcaaccacagaagggcacaaggagacaaactcagactccaagaataccacagacttggtaatatataaaggaaaaaaacgt

SEQ ID NO: 1034263 - DNA, 120 bp, Artificial Sequence
  ENSG00000228351_9 (sequence is synthesized)
tatttatcttatgattctggaagtccaagaccatggcatggcatctggtgaaggccttcttgccgcatcacaacatgactgacagagggaatcacacgagtctcgctctatcactcaggc

SEQ ID NO: 1034264 - DNA, 120 bp, Artificial Sequence
  ENSG00000228355_0 (sequence is synthesized)
gggcgggcccagcagatgccagaatcaaggcagagaggaagaatcacaaagagcctggggctggctggaattttctcccgtgcagtcgtccagcctcccgtggcagggagcggcatctca

SEQ ID NO: 1034265 - DNA, 120 bp, Artificial Sequence
  ENSG00000228355_1 (sequence is synthesized)
ggatctgtcagcatgaaggtggggatggatgtccaaggctgtgaatgtggctcctgggggcgggcccagcagatgccagaatcaaggcagagtctttagaggaagaatcacaaagagcct

SEQ ID NO: 1034266 - DNA, 120 bp, Artificial Sequence
  ENSG00000228355_2 (sequence is synthesized)
tgtatacttccctggaatgtggcttttattttgtaacaaagcaaatgttttactgctggttttcctttaacaaataaatattggctccaacacatgtcagagaaagtcgacaacaataaa

SEQ ID NO: 1034267 - DNA, 120 bp, Artificial Sequence
  ENSG00000280395_0 (sequence is synthesized)
ttatatatccattattttcttgctttttcaacaatttaatggttatcaccaaagtaacatcaataatatacaaatttatactcttaggagcagaatgagagactgcacttaatttgcact

SEQ ID NO: 1034268 - DNA, 82 bp, Artificial Sequence
  ENSG00000280395_1 (sequence is synthesized)
ctcttaggagcagaatgagagactgcacttaatttgcacttaagccttaagtatggtaacgagacggagtctctgtcgccca

SEQ ID NO: 1034269 - DNA, 60 bp, Artificial Sequence
  ENSG00000280395_2 (sequence is synthesized)
gttttttctatgaattatttttgggtcctttgtccacatttttgttgagttcagcttttt

SEQ ID NO: 1034270 - DNA, 120 bp, Artificial Sequence
  ENSG00000280395_3 (sequence is synthesized)
ttgggtcctttgtccacatttttgttgagttcagctttttcttttgttaaagcttatatattagggaaatcagagctttttaaggaaaattattatatgaaagtgttaggaatattttcc

SEQ ID NO: 1034271 - DNA, 120 bp, Artificial Sequence
  ENSG00000280395_4 (sequence is synthesized)
ccaggatcatctttgactgtgttttatagtttcattttttgtagttaagtgtgcctcttttccatgtagcttttggatgctgtaagaagccttagggaggcttattccacttcttattcc

SEQ ID NO: 1034272 - DNA, 120 bp, Artificial Sequence
  ENSG00000280395_5 (sequence is synthesized)
taatattcaaattttactctgaaaattgtttattgacaattagaatttttttttcaatttttgagacagagctttgcgctgtcgcccaggctggagtatagtagtgcgattatagttcac

SEQ ID NO: 1034273 - DNA, 90 bp, Artificial Sequence
  ENSG00000280395_6 (sequence is synthesized)
tacaccatcatacctgactaatttttaaaatttttttgtagaaatggcgtctcactgtgttgcgtaggctgatctgaaactcctggcctc

SEQ ID NO: 1034274 - DNA, 90 bp, Artificial Sequence
  ENSG00000280395_7 (sequence is synthesized)
tacctgactaatttttaaaatttttttgtagaaatggcgtctcactgtgttgcgtaggctgatctgaaactcctggcctcgagtggtcct

SEQ ID NO: 1034275 - DNA, 120 bp, Artificial Sequence
  ENSG00000280395_8 (sequence is synthesized)
taaatatttgacctgcctggaatttatttgggtgcacagactgagagaaggaaccagacattgctttcctaatggctagccagtcatctgagtagctcactttttccctgctgatttgga

SEQ ID NO: 1034276 - DNA, 120 bp, Artificial Sequence
  ENSG00000280395_9 (sequence is synthesized)
aaattccttaatcatgtatcagaatcccacctgcatgtgatgtggtcctgatgcttgtaagggggccccatggcatggttgctgtgataggtggtgagcaggtttcccttctttgctctt

SEQ ID NO: 1034277 - DNA, 120 bp, Artificial Sequence
  ENSG00000280395_10 (sequence is synthesized)
attagcatatggtatttttctggctcttcacatgttctggatgagtttggaatcttgtttctccccctctgcccagatttgctttggatggcactgagtttatgcatttcatttagaata

SEQ ID NO: 1034278 - DNA, 120 bp, Artificial Sequence
  ENSG00000280395_11 (sequence is synthesized)
attgatatttgggtcatatggagtcttttccatatgtctgtccatttatttaagccttcctttgtattctttttatagttcaatagttttcttcttttaggtcctgtaaatttcttacta

SEQ ID NO: 1034279 - DNA, 120 bp, Artificial Sequence
  ENSG00000280395_12 (sequence is synthesized)
aatttattttcaggagtttttatgtgttctattaacatcattttccatcgtattttcaaattaatctttttcttcctgtatgggaaagctttcaattttttttttttttttttgagacgg

SEQ ID NO: 1034280 - DNA, 120 bp, Artificial Sequence
  ENSG00000280395_13 (sequence is synthesized)
ttacaggcatgagccaccatgcccagcgatttttaaatgtaatttggaatctggcaaacgtattgagctattaactactttttaaaaatacttgagatgtactttattatactattatag

SEQ ID NO: 1034281 - DNA, 120 bp, Artificial Sequence
  ENSG00000280395_14 (sequence is synthesized)
tacttgagatgtactttattatactattatagttagtaccatctaatgcttagtatcatctttctcaaattaaaaaaaaagcatacccaataaaataattcaaagtctagaattccatca

SEQ ID NO: 1034282 - DNA, 120 bp, Artificial Sequence
  ENSG00000280395_15 (sequence is synthesized)
ttcaatatggtagccaccactcatgtgcagcagtttcgatttattaaaactaaatgcaacttacagccaggcgcggtggcataaacctggagtcccagcactcgggaggctgaggcggga

SEQ ID NO: 1034283 - DNA, 120 bp, Artificial Sequence
  ENSG00000280395_16 (sequence is synthesized)
gttcgagaccagcctgggcacatagagaccctgtctcttaaaaataaataaataaaagtgtttcctcagtttccctggccacatttcaagtgctaactgaagcctagtgactaccaaatt

SEQ ID NO: 1034284 - DNA, 120 bp, Artificial Sequence
  ENSG00000280395_17 (sequence is synthesized)
gggcagcacacatagagaacatttctgtcagctctggcttagagactgtgaatgcaaagtagaagagcctccctccacgttccccacctgcactttcatgctgcagacctgatgctcttc

SEQ ID NO: 1034285 - DNA, 120 bp, Artificial Sequence
  ENSG00000280395_18 (sequence is synthesized)
tgggtttctgtttctaccttatctggtagatagttgagtcacttaaacaatatgcttgtatcttttattaattcaccaatgttagtatttatggacttccatcatcagagatgtacaact

SEQ ID NO: 1034286 - DNA, 120 bp, Artificial Sequence
  ENSG00000280395_19 (sequence is synthesized)
ggctcattcacactaccctcttttcctctcccaattatttaattatattttttcctccaaagatttccttttgaacttgaaattatacgatagtcctcatgtttttgtgtgtatttaaag

SEQ ID NO: 1034287 - DNA, 120 bp, Artificial Sequence
  ENSG00000280395_20 (sequence is synthesized)
gagtactctgggttcagaatctttgaaagaggatctggaacccagaacctgtagagatgatgtttacctcattctctgagctgtggtcgtgtactcacacgcggccttccaaagcaggtt

SEQ ID NO: 1034288 - DNA, 120 bp, Artificial Sequence
  ENSG00000280395_21 (sequence is synthesized)
ctcataccaaattcccgttgattttaagatacaccattaatttgataatgaaaatttaaaatggaaacgtaggttgtgagactcattctgatctcagaaatgtgacaatgtggaaaaact

SEQ ID NO: 1034289 - DNA, 120 bp, Artificial Sequence
  ENSG00000280395_22 (sequence is synthesized)
ggcccctgggtgtccagcaaatcccagccctcttggtggtcagctgcccttcacttgttccatcttgtaaggaatgcaggaccttttttgttatggtgaagagggttcatctctactcac

SEQ ID NO: 1034290 - DNA, 120 bp, Artificial Sequence
  ENSG00000280395_23 (sequence is synthesized)
aatcttgcttttataaattagtaatggatttttcaagtacttttcagtatcttccaaatgatcccatagtttctgtccctttgctattaatatggtggaaaatacagtttctgtgttgtg

SEQ ID NO: 1034291 - DNA, 120 bp, Artificial Sequence
  ENSG00000280395_24 (sequence is synthesized)
agccgttctcacttgatgggaatgatccccatttggtataaacctgaatgtacttctggatttattttttatttagatatttttcttgtggtaaaatatgcgtaatataccattttaacc

SEQ ID NO: 1034292 - DNA, 120 bp, Artificial Sequence
  ENSG00000280395_25 (sequence is synthesized)
atattgaaatgtacggttcagtggcattaagcacgttcacattgttgcgcagccatcaccacaatctgtcttcagcactttttcagcatcccagtagacactctgtacccattaaacagt

SEQ ID NO: 1034293 - DNA, 120 bp, Artificial Sequence
  ENSG00000280395_26 (sequence is synthesized)
tattcagtgttctactttatgtctctatgaatttgcccattctaaatacctcatataagcggaatcatgtgtctggctatttgacttctgttttcaagatttgcccatgtagcatgtatc

SEQ ID NO: 1034294 - DNA, 120 bp, Artificial Sequence
  ENSG00000280395_27 (sequence is synthesized)
aaaagttaattccttttttatggctgaatattccattgtgtgaataaatcacattttgtttctccattcatctgttgatggacacttgggttgtttctactttttggttgttgtgaattg

SEQ ID NO: 1034295 - DNA, 120 bp, Artificial Sequence
  ENSG00000203593_0 (sequence is synthesized)
gccctctgcatcccgtttctttctccaagagctgtttttctacgcgctcgagcctttgagctgtgtgtgcgggagaaaaagatgttaagaaagaggaagtagaggtcgggcacggtggct

SEQ ID NO: 1034296 - DNA, 120 bp, Artificial Sequence
  ENSG00000203593_1 (sequence is synthesized)
aaaaaaaaaaaaaaaagaaagggaaaaaggaggaagtagaaactgcagaagacaaatctctgttttattctcagtgtaccatggaaaggacaatggaagttgctggccatgcctctgaaa

SEQ ID NO: 1034297 - DNA, 120 bp, Artificial Sequence
  ENSG00000203593_2 (sequence is synthesized)
gaaaacacaggcagctctgtgtcacattattgaggaagatgatattggatgtggctgatttcacatacaggagccttgtcctgggacatggaggagtgttgagggtggtcaccagattgc

SEQ ID NO: 1034298 - DNA, 87 bp, Artificial Sequence
  ENSG00000205853_0 (sequence is synthesized)
accacagggctccccatgaggtgatgtcatcgaattttcctggctgaagagtcgtcctttgtgtacacacatgggagtttatttttt

SEQ ID NO: 1034299 - DNA, 120 bp, Artificial Sequence
  ENSG00000205853_1 (sequence is synthesized)
agagtcgtcctttgtgtacacacatgggagtttattttttcatctgcatatggacgcattcctgagacttcagaaacattctatggagaattgagaagagagtattttttgagccagaaa

SEQ ID NO: 1034300 - DNA, 120 bp, Artificial Sequence
  ENSG00000205853_2 (sequence is synthesized)
tgtgaagtttgtatatattctggtctttcttatggggaacctgagttcctgcattaaagttcccccagaagatcaatggaaggtggattccaaagagtgggcaagtgaggaccccttctc

SEQ ID NO: 1034301 - DNA, 120 bp, Artificial Sequence
  ENSG00000205853_3 (sequence is synthesized)
tgttaccaaggtgaccccaaggaacacagtaaatgaaattttaagaagatatagcctctacaccaagaggcacatgacacaacctggactctgggcaaaccaccgggtgcactcacatga

SEQ ID NO: 1034302 - DNA, 120 bp, Artificial Sequence
  ENSG00000205853_4 (sequence is synthesized)
agtagtgcctgagttcatcaaaggacagatgctcaagacaccttgatcaccattaggtggaattgaaggagccaaaaatgggcgcagtggctcctcagcagagacgctcctgaatgtata

SEQ ID NO: 1034303 - DNA, 120 bp, Artificial Sequence
  ENSG00000205853_5 (sequence is synthesized)
gacatgggaaccactttcagcatcaaaaaaggaaacgttctgcatgcccatatccagaaaaatccccactcgctgtaacttgcggtctactaagaggaaagtcagcggcaccgtgctggc

SEQ ID NO: 1034304 - DNA, 120 bp, Artificial Sequence
  ENSG00000205853_6 (sequence is synthesized)
gcagtgaacagattctctgcagactcccaggtcccattctgtgcttgttcccacgtccacctcccagtagtggcggccacaggtaaagcgaggggagcccaggatgcaaacggacacgtc

SEQ ID NO: 1034305 - DNA, 120 bp, Artificial Sequence
  ENSG00000205853_7 (sequence is synthesized)
aaatctctcggcaaggtcttgccgattctgtgtgatgagcccacttcggacgctcctgaggtcgtcagaaatgaggaggaagttgttggctgtgtcggcatccaaggtcatatccactgt

SEQ ID NO: 1034306 - DNA, 120 bp, Artificial Sequence
  ENSG00000205853_8 (sequence is synthesized)
gaaaaggaaaacaagttgctcagcaagtggacagaagccaaccccatgcctctcttctacttcaaaggcccaaatatctcctgactttagtttctttaattctgtttcttcctccaaaat

SEQ ID NO: 1034307 - DNA, 120 bp, Artificial Sequence
  ENSG00000205853_9 (sequence is synthesized)
caaaacttttcatgaggaaacttccctatttcaaattttcataggtatgctttgtggcaatacgtgactcttattcacagtagcaattcttattttactttacgtcacgtgtttgcttca

SEQ ID NO: 1034308 - DNA, 120 bp, Artificial Sequence
  ENSG00000205853_10 (sequence is synthesized)
ctgaacttttcttcatttagagtggagggtctctgaaggcagacaccatgcccccctttctaccaccttgatgtgtgaacaaataaatgataattaagacaatgcaagtggtcaatatta

SEQ ID NO: 1034309 - DNA, 120 bp, Artificial Sequence
  ENSG00000205853_11 (sequence is synthesized)
ataccccagatgttaaatgttacagcagcagatgggggtctgtggaggttgaaagggagttggtcaatatcaaggagtcagtggcagttctgctggactttaaaatgggctgagggagtg

SEQ ID NO: 1034310 - DNA, 120 bp, Artificial Sequence
  ENSG00000205853_12 (sequence is synthesized)
acaggactctgtggttgaattctagcatgcattttagtagttgctcatttgaagtttgagtatttcgtgtcgctttcatctgctattacctggaaagacaaaggctctatttctcatttc

SEQ ID NO: 1034311 - DNA, 120 bp, Artificial Sequence
  ENSG00000205853_13 (sequence is synthesized)
ctttctgcccgtctctctgccttccttggtccatagaagaggatggcccaggagaagctcaattcatgcttgttaaccaaccacatccataagttctagccctttgttcatgtcaccacc

SEQ ID NO: 1034312 - DNA, 120 bp, Artificial Sequence
  ENSG00000205853_14 (sequence is synthesized)
ttcagtgtcccatatgttagaagaagctatagaggaggttaagccatatgtttaaatgtgccaaaatttttatttgcctaatcaagaggtattgctgaaatcacaaaattaaatatacat

SEQ ID NO: 1034313 - DNA, 120 bp, Artificial Sequence
  ENSG00000205853_15 (sequence is synthesized)
tgctggtgcacctgctgcccattcttagccacacctttttccaggtggctcagatcagcagtcaaggagaaagtgggggtggcagactaaattcattaaaccaccaaagcaccagcccag

SEQ ID NO: 1034314 - DNA, 120 bp, Artificial Sequence
  ENSG00000205853_16 (sequence is synthesized)
atggcctctttttcagttaattcgcattagctacttattcaggtttgataagtgggagagaagttgttacttgcagaagcatcttgtgatagatgttttgcattgttctaaggcctgagc

SEQ ID NO: 1034315 - DNA, 120 bp, Artificial Sequence
  ENSG00000205853_17 (sequence is synthesized)
agtcttggagacaggcagacactggtcgctcactgtgatcactggaggaaacagttactgagaggcagctgacagggtgaagggagtgggggaggaaggccacgcatttgtgcttcccaa

SEQ ID NO: 1034316 - DNA, 120 bp, Artificial Sequence
  ENSG00000205853_18 (sequence is synthesized)
ggtcccacaggtgacatcctttaaaggaaactgtgtcatacttggggtggaagatttgaaaggcagaggaaaagaatgctttataattagggacctgtcttcatctcaggcgactcttcc

SEQ ID NO: 1034317 - DNA, 120 bp, Artificial Sequence
  ENSG00000205853_19 (sequence is synthesized)
cgagcacgaactctgtctttccacacaccttgggaataaaagtattggagaaagagagtgaaagggtccctttgatcagtggtccagggcacgatatagaggtctcagttgttcaggaat

SEQ ID NO: 1034318 - DNA, 120 bp, Artificial Sequence
  ENSG00000205853_20 (sequence is synthesized)
ctctgtctctagggaaccaaatttattccaacccccagatccttcactcattagaatgggattctgcaaatctctcaccatctctaagtgatactcagcccctcctgtgcccaccctgcc

SEQ ID NO: 1034319 - DNA, 120 bp, Artificial Sequence
  ENSG00000205853_21 (sequence is synthesized)
gagccacccaagcagcctctctgtgttcagccactactaagtctccggcttattccttctggcatttagtaaacccttacacatcactactgaagttctgattctctttcttaatattct

SEQ ID NO: 1034320 - DNA, 120 bp, Artificial Sequence
  ENSG00000205853_22 (sequence is synthesized)
cctgcatttagtgatttttctagccccatactgtgagattaataagtaggccctatgaaaagtttaacatgacagcgcagagatctgagggccgagggattacatgaccttcccaggtct

SEQ ID NO: 1034321 - DNA, 120 bp, Artificial Sequence
  ENSG00000205853_23 (sequence is synthesized)
acgtggctctagtgggattggggtgcaggtccctcactacaccagccctctgcctttctgtatcgtctcacctatgtgaagccatcgcccacgcagtctttctaatccatgtataaagtg

SEQ ID NO: 1034322 - DNA, 120 bp, Artificial Sequence
  ENSG00000205853_24 (sequence is synthesized)
ctcactgaactccacgatcttcctgagacctaactttgattcagatggctctgcttggaagccagtaaacaatgggatcagaagttagaaccaattatcacaattctccctctggtcttc

SEQ ID NO: 1034323 - DNA, 120 bp, Artificial Sequence
  ENSG00000205853_25 (sequence is synthesized)
taccacattttctttatccagtatgtcattgatgggcatttgggtctttgctattatgaatagcgctgctgtgaacatatgtgtggatgtctttagggtacaatgatttatatttctttg

SEQ ID NO: 1034324 - DNA, 86 bp, Artificial Sequence
  ENSG00000205853_26 (sequence is synthesized)
actttccacaatggttgaactaatttacacagtctctaagagtatataagtgctcccttttctctgcaactttgccagtatctgct

SEQ ID NO: 1034325 - DNA, 120 bp, Artificial Sequence
  ENSG00000205853_27 (sequence is synthesized)
taagtgctcccttttctctgcaactttgccagtatctgctgttttttgactttttagtaatagccgttctgactggtgtgaaatggtatctcattttgtcccaccagtttttttaactgt

SEQ ID NO: 1034326 - DNA, 120 bp, Artificial Sequence
  ENSG00000205853_28 (sequence is synthesized)
taagttcaggggtgcatgtgcaggtttgttacataggtcaacttgtgtcatggggatttcttgtgcagattatcttgtcacctgggttttaagcctagcgcccattagttatttttcctg

SEQ ID NO: 1034327 - DNA, 120 bp, Artificial Sequence
  ENSG00000205853_29 (sequence is synthesized)
atcctccctcctcccaccgtcccccatccgatagccccgtgtgtgttgttcagctctgtgtgtccctgtgagattggtcatttttaggtcaaattttacatagtatgttctttatgtgct

SEQ ID NO: 1034328 - DNA, 120 bp, Artificial Sequence
  ENSG00000205853_30 (sequence is synthesized)
ttcttctagaactttctatgttttattaactaggcaactgttgctaaaatctctactaaaagtgggcacatctttataataacaaatagaagcttgtaaagttgtgataccttaaatttt

SEQ ID NO: 1034329 - DNA, 120 bp, Artificial Sequence
  ENSG00000205853_31 (sequence is synthesized)
gccaagttatgagggctttgcctgagacctggatgacagagttgtgtaagaatgtgggttcctctgaagactgttgaattttctgagaataaagatcttatttgtttctattacataggg

SEQ ID NO: 1034330 - DNA, 120 bp, Artificial Sequence
  ENSG00000205853_32 (sequence is synthesized)
ttaaagcagggacacggtggtctctaaggcacataggaggctctgagaacggaaaatgagatctttccaaacagtaatgcaaatctccatttctgtatttaggatccctctgagagcaag

SEQ ID NO: 1034331 - DNA, 120 bp, Artificial Sequence
  ENSG00000205853_33 (sequence is synthesized)
caggggttcacagaaggatatagctcactaagagaaacaaataatgggaaacacaggtttatagcatttagaagaaaataccaagatgaacatattaatatctaaagtgagttttgatga

SEQ ID NO: 1034332 - DNA, 120 bp, Artificial Sequence
  ENSG00000205853_34 (sequence is synthesized)
aaacaatataaaaatttttaaaactcaaaatgtaaatatcaggaccatgtgacttacttttatttctaccaaataataaagactggcaatcctgggcacacacttccagagaatacacag

SEQ ID NO: 1034333 - DNA, 120 bp, Artificial Sequence
  ENSG00000205853_35 (sequence is synthesized)
caaacacagccatagtgctttatcattttaggagaatcttgattccactcctgcaataatagacttgactggaaagtggaaggacagaaacattcctctgaatgtggaacccaaaatctg

SEQ ID NO: 1034334 - DNA, 120 bp, Artificial Sequence
  ENSG00000205853_36 (sequence is synthesized)
aaaacaaatgttagtgatctagaggtggacttaaaaaaataggatgaagagtggtattttatgagaagactttcagagggctcacgagagagaatcagtggcattttcactggtgaagga

SEQ ID NO: 1034335 - DNA, 120 bp, Artificial Sequence
  ENSG00000205853_37 (sequence is synthesized)
ttgggagaagaggcagagccattgggttaatggaagggacatctggagtcagagggaaagggggatcagagtgaaccttgaatgagagtcctggggcagagtcctggggcagaggtttcc

SEQ ID NO: 1034336 - DNA, 75 bp, Artificial Sequence
  ENSG00000205853_38 (sequence is synthesized)
ggggtctttctgacaggagataggactgtcccctgccacggcaaggtcaagaaatggatgtggagtttgtaaaat

SEQ ID NO: 1034337 - DNA, 120 bp, Artificial Sequence
  ENSG00000205853_39 (sequence is synthesized)
tgagacgttgatgatgctcctatcaccatggttatgtgattgggtatatcttgccctcggtcctaactgccactgtctgtgctgagtttttcaaagttcatagcaggttgaacatgcttg

SEQ ID NO: 1034338 - DNA, 120 bp, Artificial Sequence
  ENSG00000205853_40 (sequence is synthesized)
gtttttagtatgtctttcctctctcctttttcatgaaatgtgtattcagtttagtaaatttggaatatgtcatttatattcacatattaactttttgaaaagaagtaagaatgtgtattg

SEQ ID NO: 1034339 - DNA, 120 bp, Artificial Sequence
  ENSG00000205853_41 (sequence is synthesized)
tctatgtgtcagtgtgtgaaacaaaacacacttatttttatgattggggtttatccaaaatgatagagataacaattatagtcaatcacccaaaccacttacctttccaaaggtaaatat

SEQ ID NO: 1034340 - DNA, 120 bp, Artificial Sequence
  ENSG00000205853_42 (sequence is synthesized)
aatcaagtgtaatcattttttctcatccagagagtagttcatatttcaacatacaaagatagagaagtgaaatgaatcggtaaacactattaaccaagaacatacagatttactcacacc

SEQ ID NO: 1034341 - DNA, 120 bp, Artificial Sequence
  ENSG00000205853_43 (sequence is synthesized)
aggaaacacgtaggtcacatacatatatgtaaagatacatttaaaaataataagatgataattgtacaagtttgcatataaagtgtaactttgaaaaactgttaatactgtttctgatgg

SEQ ID NO: 1034342 - DNA, 120 bp, Artificial Sequence
  ENSG00000205853_44 (sequence is synthesized)
attgtgtgacttagttctcctgacctatccttcagagttctttctaaggaggttgttcgttccatgacttggaaacaatcgaaagttagaggcacttacatgtgttaagaataaataagg

SEQ ID NO: 1034343 - DNA, 120 bp, Artificial Sequence
  ENSG00000205853_45 (sequence is synthesized)
cacacctgtaattccagctactcaggtggctaaggcacaagaatcacagaacacaggataccacttcacaattagcctcaggtgtcacccttgtggcaactctcctgtacagctgggtta

SEQ ID NO: 1034344 - DNA, 120 bp, Artificial Sequence
  ENSG00000205853_46 (sequence is synthesized)
ccttgtggcaactctcctgtacagctgggttaaagagcctcggtgctcacatggggtcatctcctcactctgccttccttcactgtgggtagcttgggctgaaactagacctcatatggc

SEQ ID NO: 1034345 - DNA, 120 bp, Artificial Sequence
  ENSG00000205853_47 (sequence is synthesized)
taggtgaactagacctggctgaaactaggccccctcatgcaatgattgcaaacacaagggataggaagggaagactaaaaggaagatctttgatttacagtggatattttaacatgtatt

SEQ ID NO: 1034346 - DNA, 120 bp, Artificial Sequence
  ENSG00000205853_48 (sequence is synthesized)
tcagtattttccagtttttaataattgatttataacaaagaattgagtaaatataattagccctggtacctgatattgaatttagttcctcaataaaaatttacacataaacaggggctg

SEQ ID NO: 1034347 - DNA, 120 bp, Artificial Sequence
  ENSG00000229401_0 (sequence is synthesized)
aagaggaagtgaacagctctgtcaaacgctgctgctgggtggagctccctgaagacagagagtgaacccttggttttcgccatgtagaggtctgctgtgctgagactcatggcaaacccc

SEQ ID NO: 1034348 - DNA, 120 bp, Artificial Sequence
  ENSG00000229401_1 (sequence is synthesized)
tccaaggagcatttcctctgaaagccaggccaagtgcccgctctccagcgtgagtcaagcagtgccatgcctcccacaccccttgcatcacatctctgggaatgcacagaccttgctgtt

SEQ ID NO: 1034349 - DNA, 120 bp, Artificial Sequence
  ENSG00000229401_2 (sequence is synthesized)
acgctctctcttcccaccctttatgggtgttttctttaagtggcagaaggaagtgggcatgggttgggagaggaccatgaattctagtttctgccatactgcaggtggatttggggaaga

SEQ ID NO: 1034350 - DNA, 120 bp, Artificial Sequence
  ENSG00000229401_3 (sequence is synthesized)
ctggcaatggacaggggtgaattgcatcctgtactgtttacagccttatctccaacttttgcagagtcaagaatttaaaagcagcagggcttggtggcccatgcctgtaatcccaatatt

SEQ ID NO: 1034351 - DNA, 120 bp, Artificial Sequence
  ENSG00000229401_4 (sequence is synthesized)
gatcacttgaggccaggagttccagacctccctgggcaacatgatgagaccacatctctacagaaaaattagctgggcatgctggcatgtgcctgtagtcccagctcctcaagaggctga

SEQ ID NO: 1034352 - DNA, 120 bp, Artificial Sequence
  ENSG00000229400_0 (sequence is synthesized)
aagctgtctatttgggtgacatcatcactggagagcaggctgccctggcagaaaagacgaaggatataccagtcccagtctgacttacctccagaagtgatagaaaagtagagggacatt

SEQ ID NO: 1034353 - DNA, 120 bp, Artificial Sequence
  ENSG00000229400_1 (sequence is synthesized)
cagccccagcgtgagccactcttgcgcacacaggaacataatgcagaagaggctatggatggagtattctggcagcaccagctgaagagggagcagagacacggccctgagttagaggag

SEQ ID NO: 1034354 - DNA, 120 bp, Artificial Sequence
  ENSG00000229400_2 (sequence is synthesized)
gaaaacgccactcctgcttctatggcagctgacttctgcctggacactgcctctcacagacggttgacacaaaggccctccctgcagcaacgtagagccactgccccaacacagatccat

SEQ ID NO: 1034355 - DNA, 120 bp, Artificial Sequence
  ENSG00000229400_3 (sequence is synthesized)
gagagaccgacagctgaacactggaccatgccgcagccagcactcacacactgactgaagctctagcgctggctggtcccttacaggtgagtacagttggtcacaaagggtgtggacaaa

SEQ ID NO: 1034356 - DNA, 120 bp, Artificial Sequence
  ENSG00000229400_4 (sequence is synthesized)
gaagaatccatggaaattcaaactcaactcaactctccaggctttgagcacccaatgccctggattaaatatggcaggaggcccagcaaagaccttacaatagatcgggagagataaacc

SEQ ID NO: 1034357 - DNA, 120 bp, Artificial Sequence
  ENSG00000229400_5 (sequence is synthesized)
gaaaacctaagtgactatataatccaaggctgaatatagggagaagcaaaatagaaggataagcataatagggtcaaaggaggagggaggcagatcagccaacactagcccttgctggga

SEQ ID NO: 1034358 - DNA, 120 bp, Artificial Sequence
  ENSG00000229403_0 (sequence is synthesized)
agtcgtttctgagtcattgctggacagcagaagcagacagctgaatcacagctcagaaaaccgtaatgagctgagcagcattacagcttgtttcgcttaatatttattcttaaaacatga

SEQ ID NO: 1034359 - DNA, 120 bp, Artificial Sequence
  ENSG00000229403_1 (sequence is synthesized)
cttcatttgtgatggctatacttggagatccagatacaagtccagcgtgtttgctgtaacaagttaatgcgatgaaatatggaaaaacctatttgcctctgtcttcaaaatttgcacaaa

SEQ ID NO: 1034360 - DNA, 120 bp, Artificial Sequence
  ENSG00000229403_2 (sequence is synthesized)
ccagtgggctgcataagagaccgggcacagtggagacacatacaaagggtctgtgaagtgctacggtgaggaccccccggcagcctctgctctcaacatatcctccgtgaatcagttccg

SEQ ID NO: 1034361 - DNA, 120 bp, Artificial Sequence
  ENSG00000229403_3 (sequence is synthesized)
cccttccctgattgcggctgtctgaaaataaatccctctctgaaagcgctcgttggtgataatcattttactggacattttatcaggaggcagagccaattgatgtggtgtaacacagag

SEQ ID NO: 1034362 - DNA, 120 bp, Artificial Sequence
  ENSG00000229402_0 (sequence is synthesized)
atatcttatttagtcatctccctacaggagggaggttctgttattatccacattttacagatgagaaaactgaggcacagaatggaaactgagacacagataggaagaggctgaaagggg

SEQ ID NO: 1034363 - DNA, 120 bp, Artificial Sequence
  ENSG00000229402_1 (sequence is synthesized)
ttccgaaccagaaacataaactcttcagagcccatccttgctcgttacctcatcgatcctcccaaagatgctgtggagatgtcttgtccaccataatttgcagagaaagagacaggaagt

SEQ ID NO: 1034364 - DNA, 120 bp, Artificial Sequence
  ENSG00000229402_2 (sequence is synthesized)
actgcaccaccaccacctctggccggagccctgagtctgcgggctcttcctgcctctcagtctgtcgcctgtcagcctccctgggagtgaagcctcaagaagagtggtagacagggagcc

SEQ ID NO: 1034365 - DNA, 120 bp, Artificial Sequence
  ENSG00000229402_3 (sequence is synthesized)
aggaggccccagctgcctgggcgcaggcagagaagcagccctgggacccccgcagagcttcctgcatgtggcccagaaaacccctgaatcagacctctcaggagttgtgttgaaaatcca

SEQ ID NO: 1034366 - DNA, 87 bp, Artificial Sequence
  ENSG00000229404_0 (sequence is synthesized)
ttaggcttggccacaagagacaaattgcaaggcatggagacatttttctaacacttgaaaattctatgcaagagcaccaggcagctc

SEQ ID NO: 1034367 - DNA, 120 bp, Artificial Sequence
  ENSG00000229404_1 (sequence is synthesized)
ctaacacttgaaaattctatgcaagagcaccaggcagctcagtcaccttgtcacttatctactgggtcaccttgttggcatgggatgccagccaggcttgcagctgctccatcctcccct

SEQ ID NO: 1034368 - DNA, 120 bp, Artificial Sequence
  ENSG00000229404_2 (sequence is synthesized)
gaatttgtacttcagcttctccactcatggcctgccctgaggacttcatggttcagcatcagatatgaagacgacagccctatagagactatttaaccagcttctaaggtggttaaatat

SEQ ID NO: 1034369 - DNA, 120 bp, Artificial Sequence
  ENSG00000229404_3 (sequence is synthesized)
cttaccagcctatgatgaagaaagggaaactcacttcaggtcaatagagattgtcatttgggaccccttcaagacaaccaattatatgactgtctctaaaatattgctatccagccccca

SEQ ID NO: 1034370 - DNA, 120 bp, Artificial Sequence
  ENSG00000229404_4 (sequence is synthesized)
ttcctcacttttgtcctactggtaataagacattcatcgtgtatctttcagaagtccagataccacagtctgagtagttctttaatctgcttatctggtgattccatcacaaatggttca

SEQ ID NO: 1034371 - DNA, 120 bp, Artificial Sequence
  ENSG00000229404_5 (sequence is synthesized)
ggtgatgctgatgtcttcatacctcctcttcacccttcagaagaggtcctcttgcttctagaaagagaatacaaatagctacattcctactcagtgggagaaagtgagactgttccagaa

SEQ ID NO: 1034372 - DNA, 120 bp, Artificial Sequence
  ENSG00000229404_6 (sequence is synthesized)
gatgaggacttaggctggtaatgtcctgaggaaatgactatgccaacctagagatccccttgtgtgtgtgatgcaggcctctgaaggaaaaggtgcacattttcaacaataaaagagaga

SEQ ID NO: 1034373 - DNA, 120 bp, Artificial Sequence
  ENSG00000229404_7 (sequence is synthesized)
gggagctggaatgacatgacggacttggcctcagggccccaagccttccctgttgcagtcttcatgacactcctcagaagcagcaactccagccatgtctggaaccattccttaccagac

SEQ ID NO: 1034374 - DNA, 120 bp, Artificial Sequence
  ENSG00000229404_8 (sequence is synthesized)
aggaggatatcatggcctcaactcatgatctgtaccaagccaaacctcttttggggtacccaccaagcctcaggcctcaccttctctgccctgttgtccctgcccatctgtcctggtttt

SEQ ID NO: 1034375 - DNA, 120 bp, Artificial Sequence
  ENSG00000229404_9 (sequence is synthesized)
ctactagtttccactactggacacttgtctgaggctgggtccccacctggatcttgtggcctcttgcccagggcttggagggaagctgctcccacacttgaagatgacagctgagcatgg

SEQ ID NO: 1034376 - DNA, 120 bp, Artificial Sequence
  ENSG00000229404_10 (sequence is synthesized)
tcctttgtgggcgtgctgtcaggaagatgacagtgcaatctgtttaatgtgccagttgtctctgtgagtccctcatccggatgagcacttgtcacacccctgcagagccccagctggttc

SEQ ID NO: 1034377 - DNA, 120 bp, Artificial Sequence
  ENSG00000229404_11 (sequence is synthesized)
ttagagaggtgctccagctctgtgattacctaatctggcttcccaatctatcccacaatgtgtcattgctgaggtccctgtgggtcttgcagataaacttgctacagtcatcctacacaa

SEQ ID NO: 1034378 - DNA, 120 bp, Artificial Sequence
  ENSG00000229404_12 (sequence is synthesized)
aaaagaagctcgttatcatgaaaccggcctgctttttagctcctgggccctaactcaccccagattgctgccagctcttttgttttcccacttagaccaaagggattgagaagctttccc

SEQ ID NO: 1034379 - DNA, 120 bp, Artificial Sequence
  ENSG00000229404_13 (sequence is synthesized)
attccttggagctgccaccctccattctaaggcagtctcccccttcaccctgcttgctgcaccccagatgctgcaaggcccatgtgctgtttttgacttcagtacttcagattgctgtgg

SEQ ID NO: 1034380 - DNA, 120 bp, Artificial Sequence
  ENSG00000229404_14 (sequence is synthesized)
gaacacaggaggcagcagccagatgagaaattgagtctgactctggagtattataaagtccttatagttactggcattaggtatagggtctgtattattaaagagaaattattcaccaaa

SEQ ID NO: 1034381 - DNA, 120 bp, Artificial Sequence
  ENSG00000229404_15 (sequence is synthesized)
ctgtgatcaggccaattgggatagaggcatcatctgcccttatcttctcagagccaaagaaactaacttaattttccgtatcagcttcattttcccctttactcaatgcccagagattaa

SEQ ID NO: 1034382 - DNA, 120 bp, Artificial Sequence
  ENSG00000229404_16 (sequence is synthesized)
cagagagacacaaagatggcttgtgcaaaccaagcaaaaaagacacaagaggaatttattctggttaataagctgagagcaaacatgtagaggctaattgtatggtgagtacaagaagag

SEQ ID NO: 1034383 - DNA, 120 bp, Artificial Sequence
  ENSG00000229404_17 (sequence is synthesized)
tttcttatctggggagtgtataatgttggggtagacactgtcatttgttttcttatccaatagccatcattcttcattgcttagaaaaaaaaactttgtgctacagctgtcaggcaagtg

SEQ ID NO: 1034384 - DNA, 120 bp, Artificial Sequence
  ENSG00000229404_18 (sequence is synthesized)
gcatgggatttaggagaaaattatttgctgtcagccctgaaggatgaaggaatcacaatttctctgtacaatcatggtagtcagctttcaagattcctccaatgattctcatctcctgct

SEQ ID NO: 1034385 - DNA, 120 bp, Artificial Sequence
  ENSG00000229404_19 (sequence is synthesized)
attcatgcccttgtgtagttatctcttgcacagaatagggctgatgtgtgaccagtaggatattatggaaatggcagaatttgatgttcataaaagatgttgcagcttttacctcgctct

SEQ ID NO: 1034386 - DNA, 120 bp, Artificial Sequence
  ENSG00000229404_20 (sequence is synthesized)
ctcagattattcaccctggagaaggctgttgtttatcttttcacattgtgaaaacattcaagtggccctctgtgaagtccatgtgattgggacttgaggcttcctgacaatagccaccac

SEQ ID NO: 1034387 - DNA, 120 bp, Artificial Sequence
  ENSG00000229404_21 (sequence is synthesized)
gaatttgccgaccatgtgagtggcacaactttgttcaggtgactggaggcccagctggcattttgcctgctatttcataagagactccaagccagaaccatccaacagagccaactaagt

SEQ ID NO: 1034388 - DNA, 120 bp, Artificial Sequence
  ENSG00000229404_22 (sequence is synthesized)
ctcttccaaattcctggcccaaagaaactctgagagataatacatatttattgttatttaagccactgaatttcagagtaatttgttatgcagaaataaataacaccaattgtgttgaat

SEQ ID NO: 1034389 - DNA, 120 bp, Artificial Sequence
  ENSG00000229404_23 (sequence is synthesized)
gatgctactatttccaaaatgtcaacaacactttggactatcaacctgtctaaagagtatttgaagcagtgatgcaggcctctgaaggaaaaggtgcacattttcaacaataaaagagag

SEQ ID NO: 1034390 - DNA, 120 bp, Artificial Sequence
  ENSG00000229404_24 (sequence is synthesized)
ttaaaaatggcaagacagtttatttaagagcattgcaataggtaagtgctatggtctcaatgtttgtgtctccctcaaattcataagttgaaacttcacttccaagatgaaggaattagg

SEQ ID NO: 1034391 - DNA, 120 bp, Artificial Sequence
  ENSG00000229404_25 (sequence is synthesized)
aggtgggcactttaagggatgattatgtcataggccagagccctcatgaacgagatcagtgcccttctaaaagaggcattgggagagacccctcaccttttccatcatatgaggacacag

SEQ ID NO: 1034392 - DNA, 120 bp, Artificial Sequence
  ENSG00000229404_26 (sequence is synthesized)
ccaggaagcatcatccacgaaccagaaaattggcccttaccagacactgaatctgctgatgtcctgaccatggacttctgagccttctgaactgtgagagataaatttctgttgtttata

SEQ ID NO: 1034393 - DNA, 120 bp, Artificial Sequence
  ENSG00000229404_27 (sequence is synthesized)
tgacaattaatctaattaataagaaatgctacattcaaagcattttatcccagactcagctatctcagttataagaaacatatgttttctatttgagaacccttggatttatgcacattc

SEQ ID NO: 1034394 - DNA, 120 bp, Artificial Sequence
  ENSG00000229404_28 (sequence is synthesized)
aatttggaggttagaaggaataaggatgagagttcgtagtgtctgctttatccaagcctttttacaaggtgaagatgtgttaactagttactattttgagctcttcatactaaagttttg

SEQ ID NO: 1034395 - DNA, 120 bp, Artificial Sequence
  ENSG00000229404_29 (sequence is synthesized)
agtgaaaaacacaatctgctaagtcaaggcaacaatatttttctttttttgaacttactgcaccatttaaattatgaagaaatcaaatgttaataatcataaacactttgtgttgtaaaa

SEQ ID NO: 1034396 - DNA, 120 bp, Artificial Sequence
  ENSG00000229404_30 (sequence is synthesized)
atggcatttcctgttgccgcacagctgttgggtgttcaccattcaacaacaattcaacaaatatttattgagcctaactttaggcttggccacaagagacaaattgcaaggcatggagac

SEQ ID NO: 1034397 - DNA, 120 bp, Artificial Sequence
  ENSG00000229404_31 (sequence is synthesized)
accacagtctgagtagttctttaatctgcttatctggtgattccatcacaaatggttcagttgggcaaaaggctccagtgaagagctgtgaggcttatgtatggggactcaccaggggcc

SEQ ID NO: 1034398 - DNA, 120 bp, Artificial Sequence
  ENSG00000229404_32 (sequence is synthesized)
agcccaggctgcccacaagaccatgagccaccctgtgactgaatgaagtggagagaagggaaagtagttaagaaatcaagaaaagtgtctttcagcaccatggccagaagttgtgccaca

SEQ ID NO: 1034399 - DNA, 120 bp, Artificial Sequence
  ENSG00000229404_33 (sequence is synthesized)
gaattggaacagggaaacccagagagccagtgctgtcctagtcctagtgctgaatgatcccattggtgtccttagaagggctctgacttcagcccaccagcagcatgtggacttataagc

SEQ ID NO: 1034400 - DNA, 120 bp, Artificial Sequence
  ENSG00000229404_34 (sequence is synthesized)
tttctagcagagttggagatccccaggaaaaagaaatctcttaaaatgaaatgaaacttcaatcaaccaaggctttctagcctgatgtgagttgtctttacacacatatacctttttaac

SEQ ID NO: 1034401 - DNA, 120 bp, Artificial Sequence
  ENSG00000229404_35 (sequence is synthesized)
aaagaagaagaaaagaatggacattgatagaacttgcattctgtgttcatcaccaggatagttgctttataaatatcattttgtttttagtcacaacccaatgcagcattttccttactg

SEQ ID NO: 1034402 - DNA, 120 bp, Artificial Sequence
  ENSG00000229404_36 (sequence is synthesized)
acaaagaacctgaggcatggagaatttaagcaactccctgaaggccacccagctaatcagcagtgggaaaagaatttaattctagatctttcattctaaagcccagctccttacacacgt

SEQ ID NO: 1034403 - DNA, 120 bp, Artificial Sequence
  ENSG00000229407_0 (sequence is synthesized)
gcactgatggaggcattttccaaagaacagtgacaaggacggccagcacctctcttgcattcctcagtctgactcaagctgctcttccaccctcctccccagctggagctgaggctgaag

SEQ ID NO: 1034404 - DNA, 120 bp, Artificial Sequence
  ENSG00000229407_1 (sequence is synthesized)
gcagttgagggccaccagggagaagagctgggtcagggccgtgacttgccagcaagcatgaggccaagcagatgtgccgggcaggacgtacgaatgatgttatttctggcaaggaggaca

SEQ ID NO: 1034405 - DNA, 120 bp, Artificial Sequence
  ENSG00000229407_2 (sequence is synthesized)
tgccaggcccagcagctcatcaggagcttgcacttggcccagttagggctggccgtgggacgggcttgttgaagctgctgccgccataagctgcccctctgcaccaggagacagatccca

SEQ ID NO: 1034406 - DNA, 120 bp, Artificial Sequence
  ENSG00000229407_3 (sequence is synthesized)
ttaccccacctacagctgcttcctggtacaagagaagagttaccatttgaaatgactccacaggagagtctgacaaacatgtttgcttttcactgacaattaaaattgttttgctgctaa

SEQ ID NO: 1034407 - DNA, 120 bp, Artificial Sequence
  ENSG00000229407_4 (sequence is synthesized)
ttcagagaagtgattttaccctgagctacacaggcaggaagaccaccagcctggaaggcaggacgtacgaatgatgttatttctggcaaggaggacacggctgctgtggttgattggctg

SEQ ID NO: 1034408 - DNA, 120 bp, Artificial Sequence
  ENSG00000261063_0 (sequence is synthesized)
cctcccaagtagctgggatttcaggcctttatcattcagatactttttctgtgcaacatacacagggctatacccccctccatttttgtttcaatcccaactggcttgtctctaataaaa

SEQ ID NO: 1034409 - DNA, 120 bp, Artificial Sequence
  ENSG00000261063_1 (sequence is synthesized)
catttttgtttcaatcccaactggcttgtctctaataaaaatacgatctcttttggagctccttgtgtgtcaataataatcctatcaacttataatttaattttaatacatttaaattag

SEQ ID NO: 1034410 - DNA, 120 bp, Artificial Sequence
  ENSG00000261063_2 (sequence is synthesized)
cataaacctagacttagcaatttctgtgactacttcttgtgttgtgcctacatcaacactccagtgaccattcctggtccatacacttacgtattctcctttgattacatcgcatggtca

SEQ ID NO: 1034411 - DNA, 120 bp, Artificial Sequence
  ENSG00000261063_3 (sequence is synthesized)
ctgccgaagtggaagagcattttagatgctaaaaatactctgccgactgcctctagcaaagcctttactttgagtcagctctcttccctgaggcaggaaaaggcctgtttctctacaagg

SEQ ID NO: 1034412 - DNA, 120 bp, Artificial Sequence
  ENSG00000261061_0 (sequence is synthesized)
gctcacgcctataatcccagcactttcagaggccaaggcaggtgggtcacaaggtcaagagtttgagactagccttagcaacatggtgaaggtgaaccccgactctactaaaaatacaaa

SEQ ID NO: 1034413 - DNA, 120 bp, Artificial Sequence
  ENSG00000261061_1 (sequence is synthesized)
aaaaaggactccctacatgacctgcaacttgaaaaaaaattaaaagctccaaaaaaaaaacaatacaggagcttaccttgaacctttgaattgggccaaattgcgatgaccactgcatcc

SEQ ID NO: 1034414 - DNA, 120 bp, Artificial Sequence
  ENSG00000261061_2 (sequence is synthesized)
tggaaaattttatttcaccagcactacaactcctcaacagcaccaaccaataaactatggatttttgtactaagccagttgcctctttcaaaacaacttgtcaacttgtctaatcaccct

SEQ ID NO: 1034415 - DNA, 120 bp, Artificial Sequence
  ENSG00000261061_3 (sequence is synthesized)
cagctttttttaaaaacccctcctctaccctctctcttcagaacacaagtggcttctagctgaatctgtctcccaaattgcaattcctaagacctcaataaaaacaccttgtcttgctgc

SEQ ID NO: 1034416 - DNA, 120 bp, Artificial Sequence
  ENSG00000261060_0 (sequence is synthesized)
cttgttaaaattgagaaaaaatagacacattggaatatattagaaagggaaaagaaggaatgtgatttcttctgattgaaagcatgatttagatcagatacagtttttgctaaccaagac

SEQ ID NO: 1034417 - DNA, 120 bp, Artificial Sequence
  ENSG00000261060_1 (sequence is synthesized)
caaggggctctggcaagacagggtggttttccgaatgccagaccgaggtgccttacgaaggcagctgccgatggttctgtggcacagactggctcctgagaacccagacgaccttgaccc

SEQ ID NO: 1034418 - DNA, 120 bp, Artificial Sequence
  ENSG00000261060_2 (sequence is synthesized)
aaacatagtcagccaaaccatggcatcccttaggttaaaagaaaacggggcagctttgcccagagcctgttggcactgtgggcgggggagagggttgggggagagagaagggttgtcacg

SEQ ID NO: 1034419 - DNA, 120 bp, Artificial Sequence
  ENSG00000261060_3 (sequence is synthesized)
atggaagatgaggacactagtctcatgtagcacagaaacacgaagtcacatgcgctggcagcctccggggtgctccttgctgtcatatattaaaccttacattttataagaaaaaaaaaa

SEQ ID NO: 1034420 - DNA, 120 bp, Artificial Sequence
  ENSG00000261060_4 (sequence is synthesized)
gaaggaagataaggtcattgtgtgtgcttaagcctctttgttgattcaaattctttggttattttggtttgtcttgtttctttaattagactgtacattttaaggtacaagtctttatat

SEQ ID NO: 1034421 - DNA, 120 bp, Artificial Sequence
  ENSG00000261060_5 (sequence is synthesized)
tatacaatgcccctccctattctatatctcttaaactactgttttctggttttcaaggactttataaatctggctcattctaccaaaccaactatacatccaaataaatctctagtggca

SEQ ID NO: 1034422 - DNA, 86 bp, Artificial Sequence
  ENSG00000261066_0 (sequence is synthesized)
gaattcaactttacttctcatctacatgaggctgtacaagaagcacagcagcttctgcttctggggagcagcccgaactctcatct

SEQ ID NO: 1034423 - DNA, 120 bp, Artificial Sequence
  ENSG00000261065_0 (sequence is synthesized)
tccggaaatgagcattttaatgcagaaagaaaaccatgataatttacaaatgaatcactttctgggccagagccaggaaggccccaggagctgtgagggtagaaagggaggtggctgctg

SEQ ID NO: 1034424 - DNA, 120 bp, Artificial Sequence
  ENSG00000261065_1 (sequence is synthesized)
tggagctcagcacctcccacatggggcatgcagggggagacggactggaggctcagggcactggaggtagaaaggagccctccccgcctccttccccaggccaggaaggggtaaacacac

SEQ ID NO: 1034425 - DNA, 120 bp, Artificial Sequence
  ENSG00000261065_2 (sequence is synthesized)
atataaggcagccccaattccagcagggcctgaggctgggaatgatgtgtttcccaggggtggttatggttcaggacctggctgcaggcacttcctcccaagcctggtggggtgaagggg

SEQ ID NO: 1034426 - DNA, 120 bp, Artificial Sequence
  ENSG00000261069_0 (sequence is synthesized)
ctgaacaaaatgagtgaaaactctatactgtcatcctcgtcgaactgaggtccagcacattactccaacaggggctagacagagaaggccaacatccgtttgttgacatgggttatatca

SEQ ID NO: 1034427 - DNA, 120 bp, Artificial Sequence
  ENSG00000261069_1 (sequence is synthesized)
agagaaggccaacatccgtttgttgacatgggttatatcaaggcgtctgttcaggcttagaatgtggtctcttatgggtgatgggggtcacaggagagtggtggctcccatgtataggaa

SEQ ID NO: 1034428 - DNA, 120 bp, Artificial Sequence
  ENSG00000261069_2 (sequence is synthesized)
atttcttgtttgaaggactgtcagtgagggtgggtaacacatgcattgtctgcaggactaggtgaatgtccatgtggcctagcaagagttagctggtagcccgcctctggttgccaattt

SEQ ID NO: 1034429 - DNA, 120 bp, Artificial Sequence
  ENSG00000261069_3 (sequence is synthesized)
gttcttgagtccttgttctgggttctcaggtcccacggaggaaaacagatctgtgtggttgagaggtgggtacaaggccgcatctttgtcatttgttggctaactttgtccttggttgag

SEQ ID NO: 1034430 - DNA, 120 bp, Artificial Sequence
  ENSG00000261069_4 (sequence is synthesized)
gacattagagttttggtcaccaggcatagcctatgtgcctttgtgcccgtgttgtatcccacgtgttttgaggacatgtattttgcacgtaaaggtgagctcctgctccaagctggttct

SEQ ID NO: 1034431 - DNA, 120 bp, Artificial Sequence
  ENSG00000261069_5 (sequence is synthesized)
ggtaggttaaagccttcctccttaggggttcagggccgcaaggcttttgtgagtggcattgcaggcgttgaagcagtgatgttgagagggatggtcaatgtcagtgctctttagcaggat

SEQ ID NO: 1034432 - DNA, 120 bp, Artificial Sequence
  ENSG00000261069_6 (sequence is synthesized)
ggtgtactgcaggggcccccagccccgagacgagcatccctgcatccatgcatttctgcctccatgaacaggggaggccagagacaggcagatagtagataaattgcaggggactggatg

SEQ ID NO: 1034433 - DNA, 120 bp, Artificial Sequence
  ENSG00000261069_7 (sequence is synthesized)
acatggccctcgtgacctgtgcacctgtctgtctttctgaagcacgcctgtgttaactctgcacctcccaggtagcactggcatggagggcaggcacatgttggtgagggacaattgtta

SEQ ID NO: 1034434 - DNA, 120 bp, Artificial Sequence
  ENSG00000261069_8 (sequence is synthesized)
ccttgtgtgagctgcggagataccaggaagcccctggacacaaatggcaaaggctccttcggaagttgttggatcccttctgaatgtaagcacttctttcccagagcactctgagtttcc

SEQ ID NO: 1034435 - DNA, 120 bp, Artificial Sequence
  ENSG00000261069_9 (sequence is synthesized)
tgaatgtaagcacttctttcccagagcactctgagtttcctcatttgcagggacaaatactgtgcgtggatcgatgatgacttccacatatacattccttggaaagctgaacaaaatgag

SEQ ID NO: 1034436 - DNA, 120 bp, Artificial Sequence
  ENSG00000261068_0 (sequence is synthesized)
cctgaccctctccctttccaggactgaagctttcacacccccagccagcagctggcagtccctccccaggaactgtccttcccgggagagccacctcacccaaggtcacgcccacaccct

SEQ ID NO: 1034437 - DNA, 120 bp, Artificial Sequence
  ENSG00000261068_1 (sequence is synthesized)
agaggcagctcacattcactaagtccctcccctcaatgcgggacaactctgaaggtccttgcagaccagggcgcccctccattgcaagtgcaggcagcccagcttttccctgtgctcact

SEQ ID NO: 1034438 - DNA, 120 bp, Artificial Sequence
  ENSG00000261068_2 (sequence is synthesized)
tctccctctcccatgccagtgtgcttcttgagggcactcccagcaaacttgctgcacacaaacctcagtctcctggggagcctgtcctgcaacagcttattaggtaccaggcacgatcct

SEQ ID NO: 1034439 - DNA, 120 bp, Artificial Sequence
  ENSG00000261068_3 (sequence is synthesized)
aggcactttacgcatattatttcatactatcctcccaacaaccccaagaggcaggcacttttattatcaaaggctatgtaacttgtccaaggtcacagagctagcaagccagagagccag

SEQ ID NO: 1034440 - DNA, 120 bp, Artificial Sequence
  ENSG00000261068_4 (sequence is synthesized)
ggttgtcatgcagggagttgggctccggggctctgaaatgttacaacactgtcttaattcctatagtctagcttgaggaaattagacagaagaaacagtgaagatgtattctgatttgag

SEQ ID NO: 1034441 - DNA, 120 bp, Artificial Sequence
  ENSG00000261068_5 (sequence is synthesized)
catgcctataatcccagcactttgggaagttgaggcgggtggatcatttgaagtcaggagtagaaactagccccatttctactaaaaatacaaaagaaaaaattagccgcgtgtggtggt

SEQ ID NO: 1034442 - DNA, 67 bp, Artificial Sequence
  ENSG00000261068_6 (sequence is synthesized)
acagaggttgcagtgagtcgagatcgcgacactgcactccagcctaggggacagaacaagactccgt

SEQ ID NO: 1034443 - DNA, 120 bp, Artificial Sequence
  ENSG00000261068_7 (sequence is synthesized)
gactccgtctcaaaaaaaaaaaaaaatctctgttgccccagttttctaccagtctcactttagtttctgaatatgcagccccctggtgtcttagttgactttaatggttcttatccaggg

SEQ ID NO: 1034444 - DNA, 120 bp, Artificial Sequence
  ENSG00000261068_8 (sequence is synthesized)
gatagtaagggcattcagcaggtagaggccaagggtgctactaaatgtcctacaatgtacagggcagcctcccacaacaaatctagctaaatgtcggtagtactgaggttgagaaaccct

SEQ ID NO: 1034445 - DNA, 120 bp, Artificial Sequence
  ENSG00000261068_9 (sequence is synthesized)
gtgctctagctggaagcctggtgtcctggctggttttaccctgaaggagtcccagtgtgatgactgcttgggagtggactttggtgaaggtggtgagagatacttgagcatgggagtgga

SEQ ID NO: 1034446 - DNA, 120 bp, Artificial Sequence
  ENSG00000261068_10 (sequence is synthesized)
gagaaggtttggagggcaaacctccaaggatttcatgatccttgaaggacaaatattatcccaagttagttcaagggaagatcacacagagcttctggttaatagcagtggctgagctct

SEQ ID NO: 1034447 - DNA, 120 bp, Artificial Sequence
  ENSG00000261068_11 (sequence is synthesized)
gaaggcaccccttttcctcgaccaggaagctcctagggtaatgtagtggaccaggcatttcctaccctcctcccaactcccctgtaaacgtgtacactgatggccgggcacatctgtaat

SEQ ID NO: 1034448 - DNA, 63 bp, Artificial Sequence
  ENSG00000261068_12 (sequence is synthesized)
gaggctgaggcaggcgaatcacttgaggccaggaattggagaccggccttgtgcacgcctgta

SEQ ID NO: 1034449 - DNA, 120 bp, Artificial Sequence
  ENSG00000261068_13 (sequence is synthesized)
cactccagcctgggtgacagagcgagatactgtctctaaaaaaaaaagaaaaaaaattaaataacctagaatgggcagggggttgtgggggatcctcctccctaagcgcttatcttggtg

SEQ ID NO: 1034450 - DNA, 120 bp, Artificial Sequence
  ENSG00000261068_14 (sequence is synthesized)
cttccagctcagtctggccaattccacctctatgagataaggagggttcagagaacccagtcactttgctgtttttctgcccacaagtttctctaataaatcttattctatgtctacaca

SEQ ID NO: 1034451 - DNA, 120 bp, Artificial Sequence
  ENSG00000225181_0 (sequence is synthesized)
agaaatccaataagaggagttttaacgagagggtaacccatgtaggcaactgaggctcagattttttctgaggactcatataggacattcttaaaacagtgccaatgagggactgagata

SEQ ID NO: 1034452 - DNA, 120 bp, Artificial Sequence
  ENSG00000225181_1 (sequence is synthesized)
ccagattatttattcagtgaatcttctcccatattgattaagggatgcccttggaggcattaaattcttgtcacttctaggctgctattcaccagaactgagtaaaactaccatggcact

SEQ ID NO: 1034453 - DNA, 120 bp, Artificial Sequence
  ENSG00000225181_2 (sequence is synthesized)
cggaataatgagagattttcaagaaatcaggattctctgaggaccagatctagtttggtgatgactaaaagggccatggacaggaaaagatcatttaaagatttcagaatggtcaagaaa

SEQ ID NO: 1034454 - DNA, 120 bp, Artificial Sequence
  ENSG00000225181_3 (sequence is synthesized)
actaaagaaagactgtgaacatctatgcacgtttacaagctgtcaataaacaagctgaagaatacaccaaaggcccagatgctacttctggcaaggcagtgataattcctctgtcttcca

SEQ ID NO: 1034455 - DNA, 120 bp, Artificial Sequence
  ENSG00000225187_0 (sequence is synthesized)
agcatagctgccgggccatgttcagatgctcttggttctcgggggggagtggaaacctggtgccaagccccaaagactcattgcagtaaagccactccgtcctctctgagtccacagggg

SEQ ID NO: 1034456 - DNA, 120 bp, Artificial Sequence
  ENSG00000225187_1 (sequence is synthesized)
aagctggccaaggtcacagaccctagctgccttgtggacaggacaagagtgcacacagtgcaaggcccagcctgaccttagctacggggagggcagcctgctttgcgggggagaatgagc

SEQ ID NO: 1034457 - DNA, 120 bp, Artificial Sequence
  ENSG00000225187_2 (sequence is synthesized)
tgagggacgagggagataccttgggtaatctgtgcccgttggggcagaggctctgtggtggcaggctccggggaggccctgacctaccgccatgccggttcagcatctgttttctgactt

SEQ ID NO: 1034458 - DNA, 120 bp, Artificial Sequence
  ENSG00000225187_3 (sequence is synthesized)
agcagctgaggaatgacactcagtgcctggcattttggaggtgccctgacactgggtggggctcagtgcacaaacagcagggtaccgggttcctggggccagtggcctctgctgcttatg

SEQ ID NO: 1034459 - DNA, 120 bp, Artificial Sequence
  ENSG00000225187_4 (sequence is synthesized)
ccccatgtctcagggtccaggacgcaccaccagctctaggcttctttctctgtgttcatttccggagctgtggcaggtggcttagaggggtctaggccatgagaggacatggaatcttgc

SEQ ID NO: 1034460 - DNA, 120 bp, Artificial Sequence
  ENSG00000225187_5 (sequence is synthesized)
ttctgcttggcaggaaagttcaataggagcgtcttggctctgtgacctctgatgagatgattttattgtgagctttctgttcacccctcgccagtgctgcctgaggtcacattccctgat

SEQ ID NO: 1034461 - DNA, 120 bp, Artificial Sequence
  ENSG00000225187_6 (sequence is synthesized)
gggaaagtagaggagacgaaagtagagggttctgcagggcagagtaggtgagacctcgcatcttcctggggctgtgtcttgcccagttgtcaggcagcaaacagcgctgagttgctacca

SEQ ID NO: 1034462 - DNA, 120 bp, Artificial Sequence
  ENSG00000251259_0 (sequence is synthesized)
aaatatttctgaattctcttgtgataggtcaaaaaattgaggaagacataattagcagctgaagaatgactcagatcatcagtagtgaataagaatgattagggggaaatagagacagtt

SEQ ID NO: 1034463 - DNA, 120 bp, Artificial Sequence
  ENSG00000251259_1 (sequence is synthesized)
taatcagtccgtgaccaaaatcaaacagagtaaactgtgtcatcatggagatctgcccaggaaatccccaaaatacagaaggatcagaagtagatggaaataatgtcatagaacgtctct

SEQ ID NO: 1034464 - DNA, 63 bp, Artificial Sequence
  ENSG00000251259_2 (sequence is synthesized)
cacccatgctttgattgctaaatgtaatagtcagatcgtgacgctgaataaatgtctttttct

SEQ ID NO: 1034465 - DNA, 120 bp, Artificial Sequence
  ENSG00000251257_0 (sequence is synthesized)
gtcacttccacgggacccaccagcttaaatgccggcagccctgggacttctggcctcacaatggttgagaatgcaagaccatcaaggcaaggatgttaattttcttcaatgaggtatctc

SEQ ID NO: 1034466 - DNA, 120 bp, Artificial Sequence
  ENSG00000251257_1 (sequence is synthesized)
atctcccgagattattgtggagatcagatgttatgcgtacaaagcacagggcatgatacctgatacacatcttgctctataaagactggtagaggagtgtgttgttattgttatcaatat

SEQ ID NO: 1034467 - DNA, 120 bp, Artificial Sequence
  ENSG00000251257_2 (sequence is synthesized)
cattatcatttttatccataaaatgaagattataaaacctaagttgctgtgaatattgagacaaagtatgaaaagtacctggcaactggagatgtttaataaactggaatttattttctc

SEQ ID NO: 1034468 - DNA, 120 bp, Artificial Sequence
  ENSG00000251257_3 (sequence is synthesized)
acctgtaagctggaacttccttacggcagcctgtcacttccacgggacccaccagcttaaatgccggcagccctgggacttctggcctcacaatggttgaggagaagggcatgctcaggc

SEQ ID NO: 1034469 - DNA, 120 bp, Artificial Sequence
  ENSG00000251257_4 (sequence is synthesized)
acgtgtgagcaagtccaacggacaccggaagatccacctagtcaagcccaaccaagactggcagagctgccaagctgaccacttaaggcgcatgaggaataaacactcgttgctgcatgc

SEQ ID NO: 1034470 - DNA, 120 bp, Artificial Sequence
  ENSG00000251256_0 (sequence is synthesized)
cagaagatggatggatgtcaagacagatggtggaaaagttgtgagatgcaaagcctcatggtacagcagtcaccttgcaatcatgaagataaaagccacaaagaatggtagctcagaagg

SEQ ID NO: 1034471 - DNA, 120 bp, Artificial Sequence
  ENSG00000251256_1 (sequence is synthesized)
tatgccaatcttctcgagttccttgctacttgcagctgagtccactcttgactgatatcacctaatctcagtcgctatcagattaaacaacagcattactttcagagggccaccaagaaa

SEQ ID NO: 1034472 - DNA, 120 bp, Artificial Sequence
  ENSG00000251256_2 (sequence is synthesized)
aaattgcctgggagaagagtaaggagcctgaagatctgactaactttctctgtagccctttaccgaatagcagattagctgagctcatatgatcgtatcaactagtcatcaccttgatta

SEQ ID NO: 1034473 - DNA, 86 bp, Artificial Sequence
  ENSG00000203335_0 (sequence is synthesized)
cccccctaggggctggctctcagtccctgcctcgcgggggggtgcctccccaaccctgcgatgggggtactaacagccaggggcgg

SEQ ID NO: 1034474 - DNA, 120 bp, Artificial Sequence
  ENSG00000203335_1 (sequence is synthesized)
tccccaaccctgcgatgggggtactaacagccaggggcggaaaaggggatagctctcagtccccactctcgtggggggtgcctccccccctgcgatgggggtactaacagccaggggcgg

SEQ ID NO: 1034475 - DNA, 120 bp, Artificial Sequence
  ENSG00000203335_2 (sequence is synthesized)
aagaggggatagctctcagtccccactctcgtggggggtgcctccccctcctgtgatggggttcctcagagccagggggggaagagggactggctctcagtaattccacgtaaggtacct

SEQ ID NO: 1034476 - DNA, 120 bp, Artificial Sequence
  ENSG00000203335_3 (sequence is synthesized)
gccgtcggaagatttgaaatttctacctggacaactaacacccacagtcctccagctgcgttcggacccgtcggatcgtaaatcccacataaggtacctgccgtcagaagatttgaactc

SEQ ID NO: 1034477 - DNA, 120 bp, Artificial Sequence
  ENSG00000203335_4 (sequence is synthesized)
ggacacctaatacccacagtcctccagctgcgttcggacccctgtcgtattgtaaatcccacgcaaggtacctgccgtcggaagatttgagctttcttcttgaacacctcatacccacag

SEQ ID NO: 1034478 - DNA, 120 bp, Artificial Sequence
  ENSG00000203335_5 (sequence is synthesized)
acccacagtcctccagacagaaggacaacaggtacaaagtcctaaggattataaaggtatgctgcttgccatcatcttagtgaccaaggcagcgaagctgtttctgtaccttggaacagt

SEQ ID NO: 1034479 - DNA, 120 bp, Artificial Sequence
  ENSG00000203335_6 (sequence is synthesized)
cttccctgacaagccagagaacagcgataaagccaccagccttgggatcaggactgaaaaggcaagagtgatggagatttctcctgcgctaagccaagagaaggtttcagcacctcagac

SEQ ID NO: 1034480 - DNA, 120 bp, Artificial Sequence
  ENSG00000203335_7 (sequence is synthesized)
agctcccaccgaagtagcggcgctcccagctgcttgcagatgtggaaaaggaaagcctcggtttgtcttgaggttgtcagcagttgcaagacacgtaataaaatgcaatgtgttcctaat

SEQ ID NO: 1034481 - DNA, 90 bp, Artificial Sequence
  ENSG00000203335_8 (sequence is synthesized)
agctgcgttcggacccgtcggatcgtaaatcccatgtaaggtacctgccgtcggaagatttgatctttctacttggacacctaataccca

SEQ ID NO: 1034482 - DNA, 78 bp, Artificial Sequence
  ENSG00000203335_9 (sequence is synthesized)
cagtcctccgagctgcgttcggacccctgtcgtattgtaaatcccacgcaaggtacctgccgtcggaagatttgagct

SEQ ID NO: 1034483 - DNA, 120 bp, Artificial Sequence
  ENSG00000203335_10 (sequence is synthesized)
cagccttgccttggcaagtatctgtacctaaaaagcagtttttctacctaatctctttttttgtttttgtttttcaatacactttaagcaaattgaagcttttgttcctggaggaaaagt

SEQ ID NO: 1034484 - DNA, 120 bp, Artificial Sequence
  ENSG00000203335_11 (sequence is synthesized)
ggtttgatatgttcatctatcttttagtaaatttgggggcataacttttcctattctgaggaacttttctaagaagagtgcataaaagtttgttgttgtttttaaaggatgcaacattca

SEQ ID NO: 1034485 - DNA, 78 bp, Artificial Sequence
  ENSG00000203335_12 (sequence is synthesized)
accctgtgatgggggtcacaagagccagagggggaagaggggctggctctcaaccaccacgaaatttgcttcttgtac

SEQ ID NO: 1034486 - DNA, 120 bp, Artificial Sequence
  ENSG00000203335_13 (sequence is synthesized)
cagttgctgccaaggccctcaaacagggtggccatcctttagaaacagtaatattattagtaacagcagcagcatgtattcactgggcacttctcagtacctggcctcatggctcccact

SEQ ID NO: 1034487 - DNA, 77 bp, Artificial Sequence
  ENSG00000203335_14 (sequence is synthesized)
aggggggccattctttagcaaccctgtctagttgtttagagacgtaggctaccggcctcagccagggccccacagtt

SEQ ID NO: 1034488 - DNA, 85 bp, Artificial Sequence
  ENSG00000203335_15 (sequence is synthesized)
ttttcttataactaatgaaagacttgctgttgtcgggatccccatttcaaaggttccgggtccccgccccctttgtgacctcata

SEQ ID NO: 1034489 - DNA, 68 bp, Artificial Sequence
  ENSG00000203335_16 (sequence is synthesized)
aactaatgaaagacttgctgttgtcgggatccccatttcaaaggttccgtttgggatccacagcctac

SEQ ID NO: 1034490 - DNA, 87 bp, Artificial Sequence
  ENSG00000203335_17 (sequence is synthesized)
agaggctggctctcagtccctgcctcgcgggggggtgcctcccccaccctgcgatgggggtactaacagccaggggcggaagagggg

SEQ ID NO: 1034491 - DNA, 77 bp, Artificial Sequence
  ENSG00000203335_18 (sequence is synthesized)
cgatgggggtacctcgtagggggtgcctccccacctgcgatgggggtactaacagccaggggcggaagaggggatag

SEQ ID NO: 1034492 - DNA, 120 bp, Artificial Sequence
  ENSG00000203335_19 (sequence is synthesized)
atagctctcagtccccactgtcgtggggggtgcctccccctcctgtgatggggttcctcagagccgggggggaagagggactggctctcagtaatcccacgtaaggtacctgccgtcgga

SEQ ID NO: 1034493 - DNA, 80 bp, Artificial Sequence
  ENSG00000203335_20 (sequence is synthesized)
gccttctgcccttaattagctgcgttcggacccgtcggatcgtaaatcccacataaggtacctgccgtcagaagatttga

SEQ ID NO: 1034494 - DNA, 120 bp, Artificial Sequence
  ENSG00000203335_21 (sequence is synthesized)
atggggggtgcgtccccctcctgtgatgggcgtcctaagagccagggggggaagagggactggctctcagtccctgcctcgcggggggtgcctccccccctgcgatgggggtactaacag

SEQ ID NO: 1034495 - DNA, 120 bp, Artificial Sequence
  ENSG00000203335_22 (sequence is synthesized)
gggcggaagaggggatagctctcagtcgccactctcgtggggggtgcctccccctcctgcgatgggggtcctcagagccaggggggggaagagggactggctctcagtaatcccacgtaa

SEQ ID NO: 1034496 - DNA, 120 bp, Artificial Sequence
  ENSG00000203335_23 (sequence is synthesized)
gggaagagggtctggctctcagtccccgcctcaaggggggtgcctcccccctctgcgatgggtgtcctaagagccagtgggggaacaggggcaggctctcagtccctacctcgcgggggg

SEQ ID NO: 1034497 - DNA, 89 bp, Artificial Sequence
  ENSG00000203335_24 (sequence is synthesized)
ctcgtggggggtgccacaccctcctgcgatggggttcctaagagccagagggggaagagggactggctctcagtccccgcctcgtgggg

SEQ ID NO: 1034498 - DNA, 81 bp, Artificial Sequence
  ENSG00000203335_25 (sequence is synthesized)
ggatcaacgatgtgggtcctaagctggggggggaagagggtctggctctcagtccccgcctcgcggggggtgcgtcccccc

SEQ ID NO: 1034499 - DNA, 120 bp, Artificial Sequence
  ENSG00000203335_26 (sequence is synthesized)
ccccctacgatgggggtaccaacagccaggtgcggaagagaggatagctctcagtccccaccctcgcggggttgcctccccctcctgcgatgggggtcctcagagccagggggggaagag

SEQ ID NO: 1034500 - DNA, 120 bp, Artificial Sequence
  ENSG00000203335_27 (sequence is synthesized)
gggggaagaggggctcgctctcagtccccgcatcacgaggggtgcctccccccctgcgatgggggtgcaaagagccaggggaggaaagggggaggttcgcagtccccgcctcgcggggat

SEQ ID NO: 1034501 - DNA, 120 bp, Artificial Sequence
  ENSG00000203335_28 (sequence is synthesized)
tgcctccccccctgcgatggtggtcccaagagccaggggggggaagaggggttggctctgagtccccgcctcatgggggatgcctccctccacccgcaatgggagtcccaagagtcaggg

SEQ ID NO: 1034502 - DNA, 120 bp, Artificial Sequence
  ENSG00000203334_0 (sequence is synthesized)
ctacctgcactttccttctactgtcacaatatcaatatactcagctacagcttagtctccccatttaacagataaggccactgaggcttagtgagtttcaatgacctgcctgaagtcatg

SEQ ID NO: 1034503 - DNA, 120 bp, Artificial Sequence
  ENSG00000203334_1 (sequence is synthesized)
gagcagggtgtgacaaaagtgggaaaactggaatcagaatcacttcacccacccctaacctcaccagaacagtgttttcaattctagctacacattaaaatcactggagaggttttaaaa

SEQ ID NO: 1034504 - DNA, 120 bp, Artificial Sequence
  ENSG00000203334_2 (sequence is synthesized)
atactgaaacccaggctctgtacacagtgattccatttaactggtctgaggtggggcctaggcactggtatgttttaaaggttttcttggtattttttttttccagttactttctttaaa

SEQ ID NO: 1034505 - DNA, 120 bp, Artificial Sequence
  ENSG00000203334_3 (sequence is synthesized)
aaatttttttttaacttttcatttgaaataatttcagacttccaaaaaaagatgtgaaatagtacaaagcagtcctgtgtatccttcccccggtttttccaaatgttaacatcttacata

SEQ ID NO: 1034506 - DNA, 120 bp, Artificial Sequence
  ENSG00000203334_4 (sequence is synthesized)
accacagcgcagctatcaaagccaggatattaacattgatacaataccattcactaatccacagaccttattcaaacggtatcaatggagcttggtggatagttctaaatcattctggag

SEQ ID NO: 1034507 - DNA, 120 bp, Artificial Sequence
  ENSG00000203334_5 (sequence is synthesized)
acctcattatttttagttattccatccctttagtgtacttgaatctttcctaggtgatcttaatgtgcagccagggctgagaactgctgggtgtggacggtggagcctggagttagtatt

SEQ ID NO: 1034508 - DNA, 120 bp, Artificial Sequence
  ENSG00000203334_6 (sequence is synthesized)
ctacgagtagacttaattggctttacggtgcatttttttctccccgttctctgacatgtaagagctatgtctgaaaatctagtatatttctaagctattgttatgctgctgatgggatga

SEQ ID NO: 1034509 - DNA, 120 bp, Artificial Sequence
  ENSG00000203334_7 (sequence is synthesized)
atcatttgaagatttctgactatttttatgaagtgacagttatatctgctgggaggagaaatgagccctagttatattcatagcaaggttactgccacctaggtgaaaaatggaaaatgg

SEQ ID NO: 1034510 - DNA, 120 bp, Artificial Sequence
  ENSG00000203334_8 (sequence is synthesized)
atgaactcacaagtcagtgggctaggtcttcgcagaactcaatgccattctttggatgtgagtctggaatacagtttagattttaattagagatgtgctggaccttaatgtaaatgtatt

SEQ ID NO: 1034511 - DNA, 120 bp, Artificial Sequence
  ENSG00000203334_9 (sequence is synthesized)
tagatagggaagccaaagacactaaactgaaaaccttgcatttcctacagatggtttattaaattgaaatatgtctcttaacctctggtcttgaccctgctgttgcaaagatgagtcatt

SEQ ID NO: 1034512 - DNA, 120 bp, Artificial Sequence
  ENSG00000203334_10 (sequence is synthesized)
gaaacatcagcctgtctgttatcctgaatgactggctggagtggcccggctggaggcaccacttggtaacacatgaaactggttagttcatgaggatttttacttttattttcgcctaca

SEQ ID NO: 1034513 - DNA, 120 bp, Artificial Sequence
  ENSG00000203334_11 (sequence is synthesized)
gtcaaactacctttatccaattagaattttcaccctcatctatttattatctcctgctctgggtaaaaacaaacctgagtgtctctgccgtgtgcaaattagcctggctcagggccgcag

SEQ ID NO: 1034514 - DNA, 120 bp, Artificial Sequence
  ENSG00000203334_12 (sequence is synthesized)
ggctgaatagaaactatcctcgagtgaataaaaatgttattaaatttaaaaccacagccccatcaccagcactggattcctttatgccacagatgttgactgtttgcaagtgtttcctct

SEQ ID NO: 1034515 - DNA, 120 bp, Artificial Sequence
  ENSG00000203334_13 (sequence is synthesized)
gtgaggcactggcttggaagcatttgaacctaatagcattatatgtgtgtttatatcagaaatcatatgcacagatacattgccagccttcaaattcatagagaaaacaattggctcccg

SEQ ID NO: 1034516 - DNA, 120 bp, Artificial Sequence
  ENSG00000203334_14 (sequence is synthesized)
tggtgttaggtagcagccagggctgtggccttgtgggtcccagcacaggagactctttcataaccccctgggctttggaacatgctgctgcctctgccaagtacacccttgtctcccacc

SEQ ID NO: 1034517 - DNA, 120 bp, Artificial Sequence
  ENSG00000203334_15 (sequence is synthesized)
acccctcttttcctggctcactgctgccacctcctcttggaagccttccttgatttcctcccccaacctgagttagaagtcttttccatatatttgcacaatactcagtgcttctatgtg

SEQ ID NO: 1034518 - DNA, 120 bp, Artificial Sequence
  ENSG00000203334_16 (sequence is synthesized)
ctgcagtaaaagtaattgtttatttgtctgatttcttcacatgctagcacctagcccagtgcctgccacatagaaagtgcctatgataatgtgtgtgtgtgaataaatgaatgataaatg

SEQ ID NO: 1034519 - DNA, 120 bp, Artificial Sequence
  ENSG00000227960_0 (sequence is synthesized)
atcaaaagcttgagcacaaacagatacctcagcccggagtttctgttcctgttcttgaagagacagactggtgagcatgcaaaattacaggaaatgcagagaacaaaatgggcagagcaa

SEQ ID NO: 1034520 - DNA, 120 bp, Artificial Sequence
  ENSG00000227960_1 (sequence is synthesized)
caccttttaaagaccaagagaggccgcctcattaaatattaagaacttggaggaaagaggtggatttacactgataaaaggttcatttaaaattccatgaggtcaataaattaccactta

SEQ ID NO: 1034521 - DNA, 120 bp, Artificial Sequence
  ENSG00000227963_0 (sequence is synthesized)
ggacaaaaagtctgccctgtaacggtacttcttgctcagtgacagcagcaacccacctccttatccctttcattggcttataaacccgtcctttaaaccactatttgggaggtcgggcca

SEQ ID NO: 1034522 - DNA, 120 bp, Artificial Sequence
  ENSG00000227963_1 (sequence is synthesized)
ctatttgggaggtcgggccatcagtttcggcgttttttccagagaggcaggctcacagcgatatcgcgagagacgggaattgctctgtcacgcaagctggagtgcagtggtgccatctcg

SEQ ID NO: 1034523 - DNA, 120 bp, Artificial Sequence
  ENSG00000227963_2 (sequence is synthesized)
ggctcaagccatcctcccacctcagcccttcaagtagctgggattacaggtcaccatcctctcactcgcctctgacttttcgcacaggagagagctggtcgaatagtacaattccccgat

SEQ ID NO: 1034524 - DNA, 120 bp, Artificial Sequence
  ENSG00000227963_3 (sequence is synthesized)
cgatgtgaatggggagaagctggggaaaggaagaatgatcttcaggcagtaagggcccctactccagtatgattggtgtccttataaaaaggagaaattggacacagacaccctaccaag

SEQ ID NO: 1034525 - DNA, 120 bp, Artificial Sequence
  ENSG00000227963_4 (sequence is synthesized)
aagaacactatgtgaagatgaaggcagagatcagggtgatgcctctacttgctgagaaactcctacagttgccagcccaccactagaagcaaaggaagaagcacagccctcagaaggaac

SEQ ID NO: 1034526 - DNA, 120 bp, Artificial Sequence
  ENSG00000227963_5 (sequence is synthesized)
caaccctgctaatgccttggtcttggacttgcagcctccagaacagcgagccaatacattcctgtggtttaagccactgactgtggcactttattacagcagcactaggaaactcataca

SEQ ID NO: 1034527 - DNA, 120 bp, Artificial Sequence
  ENSG00000227963_6 (sequence is synthesized)
ggaggtgacagtgctcagatgaaacaggaccttccacttccatggcaaagccctcatctttcgtgcccatgcgccatttgatctgcacacaaatcactgagcaggttcctcagctattat

SEQ ID NO: 1034528 - DNA, 120 bp, Artificial Sequence
  ENSG00000227963_7 (sequence is synthesized)
tatccccacctttcagatggaaagaactgaagctcaagagggccaaagaaatttggctatggctttctttattttctttttcatgggcagaagtagatttcagttttggtccctttccac

SEQ ID NO: 1034529 - DNA, 120 bp, Artificial Sequence
  ENSG00000227963_8 (sequence is synthesized)
taccatatcaggttgccttaaggcaactttgaaaagtctaaaatattaaacagtttgtgaagttattatcattattcataaaggacagcgcgaggttagtcttaccctagagagccccat

SEQ ID NO: 1034530 - DNA, 120 bp, Artificial Sequence
  ENSG00000227963_9 (sequence is synthesized)
tgttggcccaaagcatcttgccaggagccctataggaccatgttttcaaggcccccaaagagcacagggctattggtccatcccagctcctggaatggctcattgtacccaccctgcctc

SEQ ID NO: 1034531 - DNA, 120 bp, Artificial Sequence
  ENSG00000227963_10 (sequence is synthesized)
cttccctctcctcaagagaattctggggaccaaccagctcaggcctgctgttggcctcagggtcacatctcacccagacacccccaccattccctcaggtctagggatgctgctccccta

SEQ ID NO: 1034532 - DNA, 120 bp, Artificial Sequence
  ENSG00000227963_11 (sequence is synthesized)
attccctcaggtctagggatgctgctcccctaccatgggatcttctttttatttttatttatttatattttccttatgcctagtgtaaagggatttcttttcttttttgtttttgttttt

SEQ ID NO: 1034533 - DNA, 64 bp, Artificial Sequence
  ENSG00000227963_12 (sequence is synthesized)
agctgggattacaggtgtgccaccacatttggctaatttttttacttttagtagagatggggtt

SEQ ID NO: 1034534 - DNA, 120 bp, Artificial Sequence
  ENSG00000227963_13 (sequence is synthesized)
agccaccgctcccagccaggatcttctttttaaagctatcaccacccactctcattccccaggactctcctcacccctccggctgcaaaggcagctggtgtccctactggctccttcctt

SEQ ID NO: 1034535 - DNA, 120 bp, Artificial Sequence
  ENSG00000227963_14 (sequence is synthesized)
tctgcccctaaagacaggcacacaggtgattttccttttaagtgtttttctgtggattactgcggggaaattgacaggggctacaggggctgataaaaggaataatctttgatattcttt

SEQ ID NO: 1034536 - DNA, 120 bp, Artificial Sequence
  ENSG00000227963_15 (sequence is synthesized)
cagttgggtcgctgattttcttgctgggctgacaagagcaatcttccctacttggaatcttggttttattccttagcatgggccttatcaaacctactttttaatgaagggagaatgaag

SEQ ID NO: 1034537 - DNA, 120 bp, Artificial Sequence
  ENSG00000227963_16 (sequence is synthesized)
aagccattgaagcagacctctagctgccagtcaggtctgctctgaaggctgcctatctgcggggacatgtgacttctggggctttccagattaagtaatgctcaccccacatgtctgaaa

SEQ ID NO: 1034538 - DNA, 120 bp, Artificial Sequence
  ENSG00000227963_17 (sequence is synthesized)
ttctccaaacactattccggccctgctgtgattcttagagcagaggttctttgcctttttagtgtaatggatccctcagcaacttggtgagcccttctcagaataaagtttctaatgcag

SEQ ID NO: 1034539 - DNA, 120 bp, Artificial Sequence
  ENSG00000227963_18 (sequence is synthesized)
aaagtaaaacacatgggataataagggaagtcatgtcctttgaaatccttatcaaaaatatttttcaaattttgtgatataataagtttggttgctattatatagcataatataacttca

SEQ ID NO: 1034540 - DNA, 120 bp, Artificial Sequence
  ENSG00000227963_19 (sequence is synthesized)
tatctaatagctattgttattttgaagtagtggtgaatatatatgctattttgagatgtctaaaacaactgtaatgtgttacaaaaatatccatgatttctatcggtgacaaagtcaaaa

SEQ ID NO: 1034541 - DNA, 120 bp, Artificial Sequence
  ENSG00000227964_0 (sequence is synthesized)
tttctgctggctggatggggatgtggaggagaggacccttggaccatggggatgggagcaacgtgccaggcatggcagcgcaatagagggtggaacatcttttgaagagctcagaccctg

SEQ ID NO: 1034542 - DNA, 120 bp, Artificial Sequence
  ENSG00000227964_1 (sequence is synthesized)
gacccctgatcttaatgagctttgcagccttcagtgacacaacctggatttaaactcatggatgtcggcctctgctctgcgttgaattgtatcctcccaaaaaggagatgttggagctct

SEQ ID NO: 1034543 - DNA, 120 bp, Artificial Sequence
  ENSG00000227964_2 (sequence is synthesized)
gagacccagcacctcagaatgtgtttctacttggaaatagggtctttaccaagaccctattccaataggactggtgacctgtgggagaaatgtggacacagagacagacagacatagagg

SEQ ID NO: 1034544 - DNA, 120 bp, Artificial Sequence
  ENSG00000227964_3 (sequence is synthesized)
gaagatgacggcagagtcacagggagaagacggtcatctacgagccaaggagagaggcctggcacagatccttccctcacagcacccagagagccttcagacaatacatctgtgctgtgt

SEQ ID NO: 1034545 - DNA, 120 bp, Artificial Sequence
  ENSG00000227964_4 (sequence is synthesized)
aagccgctccgtctgtggctctctgttacagcagccccagaaaacaaatagagactcttaattgccaagccatgttcctcccatagtacgatttctcatcagatagtctatcttcgctgc

SEQ ID NO: 1034546 - DNA, 120 bp, Artificial Sequence
  ENSG00000227964_5 (sequence is synthesized)
taaaacaggtatttctggatggtagaggtcatgtgtagcttgcatatttagtatgaggtatgtgaaagtcacctcatagatattaaattatttggctacagctttgagcttggcctctct

SEQ ID NO: 1034547 - DNA, 120 bp, Artificial Sequence
  ENSG00000227964_6 (sequence is synthesized)
cttaaggattaccttgccatagggacaggaagccatcgtgatataaaggctgaagtttctgtaagattttgatttttaatctaacatgatattaacaactgtgcccgttgggcgtgatgg

SEQ ID NO: 1034548 - DNA, 120 bp, Artificial Sequence
  ENSG00000227964_7 (sequence is synthesized)
ataataactgtacctatacaaggtccccaagataattaaaaggctcacttgagcagagtaactgaggagagtcttttggggttctttgttttttttttttagagacagtctcactctgtc

SEQ ID NO: 1034549 - DNA, 90 bp, Artificial Sequence
  ENSG00000227964_8 (sequence is synthesized)
aacctccgcctcccaggttcaagagatcctcctgcctcggcctctcaaagtcggctgaggaatgtttaataaaaggggtatttaccaaga

SEQ ID NO: 1034550 - DNA, 120 bp, Artificial Sequence
  ENSG00000227964_9 (sequence is synthesized)
ccggctgaggaatgtttaataaaaggggtatttaccaagatataagcaaggtatagagaaatcagcagggttgatgaagcaccccggggctaccaacaaccaaaagcccttccctctcca

SEQ ID NO: 1034551 - DNA, 120 bp, Artificial Sequence
  ENSG00000227964_10 (sequence is synthesized)
aggcctccaaaggcagcaggagggagtggttatcagaaaatggcaagatccataggaaaaaggccaccccatgggagctgtgggtttcagtagagggacacagccactgccagaccatgg

SEQ ID NO: 1034552 - DNA, 120 bp, Artificial Sequence
  ENSG00000227964_11 (sequence is synthesized)
ccagccagggagttaatagcccagccccaccttggccctcccatctcccactcctccttattggctgaacccagcaagaaaccagatgtcacagaaccaggagatgtggtccccactgcc

SEQ ID NO: 1034553 - DNA, 120 bp, Artificial Sequence
  ENSG00000227964_12 (sequence is synthesized)
cggcctcttgggcacagaggagggaagagaaaatggagagtggatctggaggggcaaatgaagtattaatattctgtacactcagaatgtccacagagtgaacactggcttgccggctga

SEQ ID NO: 1034554 - DNA, 120 bp, Artificial Sequence
  ENSG00000227964_13 (sequence is synthesized)
ccccatttcttgaaaatcatcctatccctgcaggttatttatgttgttacccttttgcaagaaccacataaaatattttacatgcttttaaaactcataaatgtaatgaagccaagatgt

SEQ ID NO: 1034555 - DNA, 120 bp, Artificial Sequence
  ENSG00000227964_14 (sequence is synthesized)
ttcagcaaatgtgctcaatgggcaaatccttccaaagatctgctctcagctgacgtcaggacaaaaggcacatctcacgacctgcagagcgtctgacgttaaagccaataaattcatccc

SEQ ID NO: 1034556 - DNA, 120 bp, Artificial Sequence
  ENSG00000227964_15 (sequence is synthesized)
cctgacccacatggcttccagaatgtacaagctgtcagtggatcttaaaaatgtatctattccttcattcacttcctgccgttcgtctcttgcaagtatttactgctctttaaaaactga

SEQ ID NO: 1034557 - DNA, 120 bp, Artificial Sequence
  ENSG00000227964_16 (sequence is synthesized)
actccaccagctggaaatgcattagtgcagggagatggctgtactttgttccggcaggaattgtgcatgcaacttccaatctgacttttctgagacattaataaaaacacatgcgtcctg

SEQ ID NO: 1034558 - DNA, 120 bp, Artificial Sequence
  ENSG00000287420_0 (sequence is synthesized)
gggcgcgatgtttcaggtaactcgggcaaagcacgcatgctgctgtggctctgtggtcagcccatgacgagagcctcgtccacgttccgtgaaatctgtgagtgctgcccgagtcgagct

SEQ ID NO: 1034559 - DNA, 120 bp, Artificial Sequence
  ENSG00000287420_1 (sequence is synthesized)
accgttgctcaccaccgccacttcctgtcttcctacccagcgccgcggctctcggaggctgccagtggctgggtgcgcctggcctgagtcctccacccgaagaaaataaggaacctggcc

SEQ ID NO: 1034560 - DNA, 120 bp, Artificial Sequence
  ENSG00000287420_2 (sequence is synthesized)
agagagaggcaaaaggaagagtctgctcctcatgttccttcttgctgtggttttaccctcgccacttatttcgtggtcattcattgaagtaaggaagaaggaattgcatgacttccagga

SEQ ID NO: 1034561 - DNA, 120 bp, Artificial Sequence
  ENSG00000287420_3 (sequence is synthesized)
tccagcttggtgagggcgtggacggcagagccctgagatgggatcacgtgaagacgagcagggaacgtcaacaagggaggagaccttggcaatgcctgcacagcccgctcagccgcgtag

SEQ ID NO: 1034562 - DNA, 120 bp, Artificial Sequence
  ENSG00000287420_4 (sequence is synthesized)
aaagctggttaaattcatctaactgcaatttgccttccatgtctagtctccttttggccatgaggaagataatccagccggctaggtatagctgaaatgtgacataatcaattacaaatt

SEQ ID NO: 1034563 - DNA, 120 bp, Artificial Sequence
  ENSG00000287420_5 (sequence is synthesized)
tgttgatttagagcaagtgatagatacacagcccagagtaaatttcccagaggctcttaccactgtggggaggacaaagtctcacttcctgatcagcagtggccaagggaggcttttctc

SEQ ID NO: 1034564 - DNA, 120 bp, Artificial Sequence
  ENSG00000287420_6 (sequence is synthesized)
tgcatttgtgaggctgtgatatctttcatgcactcctttgaaagtgctcaccagcacgatggaacacattagcttaaatatttctcttcacaggttgctgtgtcttttaacgtaggcaac

SEQ ID NO: 1034565 - DNA, 120 bp, Artificial Sequence
  ENSG00000287420_7 (sequence is synthesized)
tcttcatgtaaatgctagttagaaaagaggttttgttttgtttttcaagaaaagttgctttaattaaataaaggacaggaagttccttcctgaatggttacaaccccgtggattatacaa

SEQ ID NO: 1034566 - DNA, 120 bp, Artificial Sequence
  ENSG00000185837_0 (sequence is synthesized)
cgggcgcctatggaactcgacccgcaggccaaaggggctccgttgcaaggaagaagtgcggggtcccgccgcctcctagaccgagatcgcggtgagctggccgcggcgcacaatgggcac

SEQ ID NO: 1034567 - DNA, 120 bp, Artificial Sequence
  ENSG00000185837_1 (sequence is synthesized)
agggctgggctttatacctgtgccaaggacaccaacggcagcatcagcaagtccgtgttgtctcccaaataagtggtgttctccaacaagcttttagcagtaataaagctgacattttta

SEQ ID NO: 1034568 - DNA, 120 bp, Artificial Sequence
  ENSG00000185837_2 (sequence is synthesized)
gtccgtactatcgccctgtgcctgcggatcccggtaacattgcgcggcaggccccaggccggcctccctcagcttcgcggactgtctgggccgggggtctcaaccttgacttcagggccg

SEQ ID NO: 1034569 - DNA, 120 bp, Artificial Sequence
  ENSG00000185837_3 (sequence is synthesized)
ccttagtgatgttcaggtcctctgggcccctgccagtcaagggacgctcgtcgcgcgccaattgttaagtctttcattgtttctgtaaacctgctgacgccctcccagcgcatagggaga

SEQ ID NO: 1034570 - DNA, 120 bp, Artificial Sequence
  ENSG00000225233_0 (sequence is synthesized)
tccttggacaatggctgcccgtttagggttgtgacccaggagtcgctgtggttatcaactgcgagagctcaaacggacacatgagaagcagctttgtttagcgtccttgacataactaac

SEQ ID NO: 1034571 - DNA, 120 bp, Artificial Sequence
  ENSG00000225233_1 (sequence is synthesized)
cacatattaacaacagagccttgtggtatagaggctcctgtttgttcagaatcttaataggtgggctttgtgcacatggatttctaatactgcttaccctgtattttaagtcaaagaggg

SEQ ID NO: 1034572 - DNA, 120 bp, Artificial Sequence
  ENSG00000225233_2 (sequence is synthesized)
tctttgtgtgaaggattctccacctccttttccctttctacgaaggaggcacaaagctgatcattcagtggagtccattctcaccatgagaagaacattctactgtcagcaggcagagtg

SEQ ID NO: 1034573 - DNA, 120 bp, Artificial Sequence
  ENSG00000225233_3 (sequence is synthesized)
actgtggacttttgagttaatgctgatatgagttaagactttgggggacttaggaagtcccatgttgggaaggcatgattggttttgatatgagaggacataatatttgggagggaccag

SEQ ID NO: 1034574 - DNA, 120 bp, Artificial Sequence
  ENSG00000225233_4 (sequence is synthesized)
ttgatatgagaggacataatatttgggagggaccaggggtggaatgatatgatttggctgtgttcctacacaaatctcatcttgaattgtagatcccataatccccatgtgtcgtgggag

SEQ ID NO: 1034575 - DNA, 120 bp, Artificial Sequence
  ENSG00000225233_5 (sequence is synthesized)
ggaccctggtgggaggtaattgacttatgggggtgtttttcctgtgctgttcttatgatagtgaataaggctcacatgatctgatggttttataaattacactttccctgaacataatct

SEQ ID NO: 1034576 - DNA, 120 bp, Artificial Sequence
  ENSG00000225233_6 (sequence is synthesized)
cttgcctgctgccatgtaagctgtgcttttgctcctcctttgccttccaccatgactgtgaggccttcctaagccatgtggaactttgaatccattaaacctctttatctttataaatta

SEQ ID NO: 1034577 - DNA, 120 bp, Artificial Sequence
  ENSG00000225230_0 (sequence is synthesized)
aaattcaacatcgtatactttgtgacactccctccaggacgactaacgtcttcaatgactgcacctcttatttccataatcattatctttttgtactaactgcattatttttacttgaac

SEQ ID NO: 1034578 - DNA, 120 bp, Artificial Sequence
  ENSG00000225230_1 (sequence is synthesized)
aaaaaggttgtaattcccgcctcacggttccgagtcatgatacaactgatctcctgtttccctagcatgcaaccttccggaaaccgctttgtttccctatttgtcggacactgacttcag

SEQ ID NO: 1034579 - DNA, 120 bp, Artificial Sequence
  ENSG00000225230_2 (sequence is synthesized)
ggaggcccggtcggcctctttggtgagcacggtgttgagctgatcactggtgcgcccttaataacgccggcgggactcaccccaatccgaaacccaccatcccgacgtgcttttgagtgg

SEQ ID NO: 1034580 - DNA, 120 bp, Artificial Sequence
  ENSG00000225230_3 (sequence is synthesized)
aagtacttgtatgaactatgaaaataaaccctggcttggcttttctgaggaagttcaagcacctaattaacccctggtggagaaaaagccacgcactctcacgcgattggagatcagagt

SEQ ID NO: 1034581 - DNA, 120 bp, Artificial Sequence
  ENSG00000225230_4 (sequence is synthesized)
tggagcctgagggtgaaagcctcatgctgagaagagtggagcgggaagataaagcatggcaacattgatgacaccctaggcctaatacaccagccctgacctgcttaccttctctcattt

SEQ ID NO: 1034582 - DNA, 120 bp, Artificial Sequence
  ENSG00000225230_5 (sequence is synthesized)
gtaggctatgtagtccagtcacttttacgtgcagctgagtacaaccctaaatgatatatcaatcgcttcagtgaccatttatatgtcaatagcttgcacatttattatttgcaaccaaag

SEQ ID NO: 1034583 - DNA, 120 bp, Artificial Sequence
  ENSG00000225230_6 (sequence is synthesized)
tatctctggaggtactcatgtgcatatacagtattactggaaacttctacttggatatcctccaggcaactcgaatattttaacatggccaaagcacatcttgtcctccaacctactccc

SEQ ID NO: 1034584 - DNA, 120 bp, Artificial Sequence
  ENSG00000241220_0 (sequence is synthesized)
gatatctgagagcaaccttctgccaggatttgccctgcccacaggcgttagcatggacttgatgactgcggtgtggcttttactttctcaattttccagagctcatactcctcaaactcc

SEQ ID NO: 1034585 - DNA, 120 bp, Artificial Sequence
  ENSG00000241220_1 (sequence is synthesized)
agaggaataagatggccagcagtcaggaaggagatttgaatgtggagcacagcagagtgagcacgagctgaaaccctccaagcatattttcatcactgtattgcctgtgaacatcttcag

SEQ ID NO: 1034586 - DNA, 120 bp, Artificial Sequence
  ENSG00000241220_2 (sequence is synthesized)
tgagttcctcttttggcagctctaactctaaccttacaggaaaggggaatatagaaaacacagttcccagaaagaactagttccaaccagtcgattgaaccactcagcacagcttctaaa

SEQ ID NO: 1034587 - DNA, 120 bp, Artificial Sequence
  ENSG00000241220_3 (sequence is synthesized)
agaggactccctggactgttagggtcttggaaaccatgtcacacaaaaattgtctcatgtaactgaagataatcattctggagagcagaggattaaaaagaggcatgccattaaatatta

SEQ ID NO: 1034588 - DNA, 120 bp, Artificial Sequence
  ENSG00000241220_4 (sequence is synthesized)
gaaacacttctgtgtcgaagacaaaaattgacttacacctataaattcttcagattttctctcctaaattctatggaaatgtatcaatattttcactgattaaaatttttttcccacctg

SEQ ID NO: 1034589 - DNA, 120 bp, Artificial Sequence
  ENSG00000225234_0 (sequence is synthesized)
ggagcaggatcggggaggacacacaggtgggcgtctcaagaactgtggtgtacacagctgagcccctgcagctctgctttgccgggcctcaccctcggtgctgggtgcaagacgtgacaa

SEQ ID NO: 1034590 - DNA, 120 bp, Artificial Sequence
  ENSG00000225234_1 (sequence is synthesized)
gatggcatgggaagcttcccggggaacgctggaactgggtgtttgaaggaggacctcatggcggcagctccagcccaagtactgcaactgtggggccgtgccaggagcaggtgctgcgga

SEQ ID NO: 1034591 - DNA, 120 bp, Artificial Sequence
  ENSG00000225234_2 (sequence is synthesized)
gcctgtgtgggtccaggacaagaggagcaccagaagctcctggagggcggtgcagacgacactgtcgggccggcccagcccaggccccagcagttgactcctctgtgatcagaggatgtg

SEQ ID NO: 1034592 - DNA, 120 bp, Artificial Sequence
  ENSG00000225234_3 (sequence is synthesized)
gaggaccactgatctaacactgcccctcgtggcaaacgcggaatgactcaagattcagctggatggatcattcagggagcaaatccacccttgccgcctggcacaccctggccattcggt

SEQ ID NO: 1034593 - DNA, 120 bp, Artificial Sequence
  ENSG00000225234_4 (sequence is synthesized)
aacgatgccatcagggttactggcttcttcattctccactgtgcattccagggtgggcatttccacagttgtgagcccatcatcaactcagcgagttcccattttccagttagaaaataa

SEQ ID NO: 1034594 - DNA, 120 bp, Artificial Sequence
  ENSG00000225234_5 (sequence is synthesized)
gctttctgatcgttagccattcacttcaattggctctagaaaagatttctgggatgtataatttatttttaacataaagaaaagctaagtgtaaactagataagctacaattgtcccaga

SEQ ID NO: 1034595 - DNA, 120 bp, Artificial Sequence
  ENSG00000225234_6 (sequence is synthesized)
cgttatagacactcacagcaccgttttcctcttctagcaaaacaaaacaaaaaattctgcaatcatacaggcagtaggaaaaaaaaattagctggacaccatggctcacacctgtaaccc

SEQ ID NO: 1034596 - DNA, 120 bp, Artificial Sequence
  ENSG00000226522_0 (sequence is synthesized)
cctaggttgtcagattcttcatcaatctcagaaaagataataaaaaagaagacatcaagttcatgtttggctatagggagagcaagtaactttcagggaaaaaaaaaattataccagtac

SEQ ID NO: 1034597 - DNA, 120 bp, Artificial Sequence
  ENSG00000226522_1 (sequence is synthesized)
agaaagaatagcgatgacgactgaagacatcaattcttcaaatagatacttcgtgtctgtagaacgcaggtctcctatttcctagtttgtgtttcttccaataaactccttgaaagctca

SEQ ID NO: 1034598 - DNA, 120 bp, Artificial Sequence
  ENSG00000242094_0 (sequence is synthesized)
aaatgttaaggaggcttatttaaatattcagggcttcaactaaagatctaaccactaagatcaaaagagttatttaaataaaagttgttgagacattttttcatctgtattaataatgtg

SEQ ID NO: 1034599 - DNA, 120 bp, Artificial Sequence
  ENSG00000242094_1 (sequence is synthesized)
gcttttgaagttacccggtaataatgtgtccataatgcccacacctaatttttaatttccattttggctttaggtgtggctttattttaatagctgccaaaaagttggcaattgttttta

SEQ ID NO: 1034600 - DNA, 120 bp, Artificial Sequence
  ENSG00000242094_2 (sequence is synthesized)
cgtttagaacttcacagtttgcttttctgtaggtttaggtagcattggggatattcgtctaataaaaacttttaaaatttctgttctgaccctgaggcacttaaaaaaaactcttatggg

SEQ ID NO: 1034601 - DNA, 120 bp, Artificial Sequence
  ENSG00000242094_3 (sequence is synthesized)
ccaaattttaaaagtagagtgtctctactactgcataaagaatttctataaaagatgaaacatggagctgattgaaagaatagacggcgcaatggtagaggacacatagttaccactgtc

SEQ ID NO: 1034602 - DNA, 120 bp, Artificial Sequence
  ENSG00000242094_4 (sequence is synthesized)
actggtaatctacagcttgatgcgaagtcattccgccttgtttgttgaaatgttaatcatttcattaagaaaggttaagtaattaactgatatttcattagggaatcaatgacagacctt

SEQ ID NO: 1034603 - DNA, 120 bp, Artificial Sequence
  ENSG00000242094_5 (sequence is synthesized)
tttttagtgatgtatggtagatattttctaatagaaagtttgccccatttaattatttggaaagaagctagttgattgagccttgggaaggaggggtggggcatcttcagataacatcta

SEQ ID NO: 1034604 - DNA, 120 bp, Artificial Sequence
  ENSG00000242094_6 (sequence is synthesized)
tgtccataagcaactttaaataattttggagaaaatggtctattagaatagaaaatcgttcagtccccagttttcttttatgggctccatcaggcatgttgttgcagacctgctgttgtt

SEQ ID NO: 1034605 - DNA, 120 bp, Artificial Sequence
  ENSG00000242094_7 (sequence is synthesized)
ttgcatgccttctctgggtttaagaagggttcagctgcttaaatgtgttcatcttattttctaaataatggcttttgttgcagtgtgatgcatgttgacagtaaacgcgcagccgtaact

SEQ ID NO: 1034606 - DNA, 120 bp, Artificial Sequence
  ENSG00000242094_8 (sequence is synthesized)
ttggcacaaaaaaggaacaaagagtaaatcagtgagcacccatgtacctgtagcccggcttaagagagaagacgctgctggttcaggtaggagaggctcctggaatatcccatcctcatc

SEQ ID NO: 1034607 - DNA, 120 bp, Artificial Sequence
  ENSG00000242094_9 (sequence is synthesized)
ttacctctgtccttctttcctagaggttactttaccactgttcgcagctgggtggttttcatcttgtgtagttcttcatatttttaatatgtatgcatgtacaggattcctcaaaataca

SEQ ID NO: 1034608 - DNA, 120 bp, Artificial Sequence
  ENSG00000242094_10 (sequence is synthesized)
ggattttgttttgcacgttcaaggtttgttctgatagcatcctactatatatgttttttagtaacttgcttttttaaaaaataaacaacagtaaaattcatccatgtggatacatgtagc

SEQ ID NO: 1034609 - DNA, 120 bp, Artificial Sequence
  ENSG00000242094_11 (sequence is synthesized)
tatagcttattgatttttccatgtgaaccttttgaaatactggatattaattcaagacaagttctttaaatttgagcctaaaacccagtagcactctgtacattgaaaatttcagattca

SEQ ID NO: 1034610 - DNA, 120 bp, Artificial Sequence
  ENSG00000242094_12 (sequence is synthesized)
taagaaaccatcagtcctgactggaacttcataatttgttcatttgtctgtgttttgggggaaaaaactttaaaacctcaaccatttatcagggaatttgattaaaaaaaataatctatc

SEQ ID NO: 1034611 - DNA, 120 bp, Artificial Sequence
  ENSG00000242094_13 (sequence is synthesized)
aagtggctgatctcttacattaagggaaaaaacaggcaaagcattcatttgaaggagcctagccattttctctttcttatttaaagacttggcttggaacttagcagttacatatgcagg

SEQ ID NO: 1034612 - DNA, 120 bp, Artificial Sequence
  ENSG00000242094_14 (sequence is synthesized)
atgatatagcaccttgttcttcagtgtagaaagtgatttctgcatattttaaaggactggcatctttatggtaagaaagccatataaataaagatatacttagatgaaaatcggaacatg

SEQ ID NO: 1034613 - DNA, 120 bp, Artificial Sequence
  ENSG00000242094_15 (sequence is synthesized)
tttttaaaatagtgtgtgtctactttcatctctgttatcaaacttgctgcataagccagagttgatgctctgtgattatgctaatgaccaaaagaatcgatgatgcgagactagatgaaa

SEQ ID NO: 1034614 - DNA, 120 bp, Artificial Sequence
  ENSG00000242094_16 (sequence is synthesized)
tcagtggtataatcggggaaagttatcagtttttttgtcattaagtattagtgataaataatacactgttcatttcgagtggatagaacatatttaattctgatgtacagagtttcattt

SEQ ID NO: 1034615 - DNA, 120 bp, Artificial Sequence
  ENSG00000242094_17 (sequence is synthesized)
tagtcaggctcattgctgagtaaaatgatcatcttttgtaatttaagaggaaagagaaaaggcatttttgtcagcctggctaactgacttgggccatctagaaatgtttaccttgaccag

SEQ ID NO: 1034616 - DNA, 120 bp, Artificial Sequence
  ENSG00000242094_18 (sequence is synthesized)
ccagggaagattggaaaaacttaattttttttcctcctagacaacttgcttatttgtactgacattttattaagaatatcagatactcagtaaatagcataaatgactagagatgttaaa

SEQ ID NO: 1034617 - DNA, 120 bp, Artificial Sequence
  ENSG00000242094_19 (sequence is synthesized)
caaaatgagtataaaggtagatagtgtttccctgaagaatggggaaaatgataacaaaggggcaatgtttggataatgctctttttaaatgactagtctgcattaaccaggggctattaa

SEQ ID NO: 1034618 - DNA, 120 bp, Artificial Sequence
  ENSG00000242094_20 (sequence is synthesized)
agtcggtatcacccattagacagcagttttaattttttttaattgagtttttcatatcaaataagatcatacttagtaatggtttacttaaagagaagtaatacttgtaacttagaatct

SEQ ID NO: 1034619 - DNA, 120 bp, Artificial Sequence
  ENSG00000242094_21 (sequence is synthesized)
tttcctgggttactaaaaccttaagggaaaacactgattctaccttccttgtcaacaaagcgtttctaacacaattctctgtaacagacatttctctgtggatagagtttagcacttgtt

SEQ ID NO: 1034620 - DNA, 120 bp, Artificial Sequence
  ENSG00000242094_22 (sequence is synthesized)
ttactactgtatgacagtacctggtgacaagagagaaaataaaagaataattagcaatgttctgtaggacatgaaaagtgattgaagtctacgagagaaggaaatcagatcgatgttatt

SEQ ID NO: 1034621 - DNA, 120 bp, Artificial Sequence
  ENSG00000242094_23 (sequence is synthesized)
ttaaaaaaatgcatcacaaaaatgattctcttcaaagcaaagcctcctacccaggctggggccagctgtgctctgccatttccctgccacagccctgtccgtccacgttggctcttacca

SEQ ID NO: 1034622 - DNA, 120 bp, Artificial Sequence
  ENSG00000242094_24 (sequence is synthesized)
gcagtaccatctgctgctccagcagtggccttctctatggtaaggcaggccaattgggtcaaatcttgtgatatggcagatgtccactgagagctaagattgggccaggctcatttttat

SEQ ID NO: 1034623 - DNA, 120 bp, Artificial Sequence
  ENSG00000242094_25 (sequence is synthesized)
gtgtgtccaaagccaagatttcaacttggtgaaaggctgtggaatttatttccccaagtgttgcccaaactctgttcttttcttcaactgcctccttgggctgagatgattgcttaatgc

SEQ ID NO: 1034624 - DNA, 120 bp, Artificial Sequence
  ENSG00000242094_26 (sequence is synthesized)
tcttaattatgctggatccctctgtattttcgaacacctgtgggtaattcagatcatgagtggtcacagaggctggctcgacaaacggcttccctttccgaatgggaaaatcccagggag

SEQ ID NO: 1034625 - DNA, 120 bp, Artificial Sequence
  ENSG00000242094_27 (sequence is synthesized)
ctggaccatgcaccgtgtgtcagggagctgagtggaggctgaaagaggatggaacacttcccttgaacttgaactggcattgtgttgtgtccaagtatccttcacccttggattggggag

SEQ ID NO: 1034626 - DNA, 120 bp, Artificial Sequence
  ENSG00000242094_28 (sequence is synthesized)
agtcttacaatgaataactcagaaaaaagttttcaaaataatcctagattgtaagatatctacgaccattatccatagccatatctttaaaaaaaaaaaaagaaaagtagaaaacaagaa

SEQ ID NO: 1034627 - DNA, 120 bp, Artificial Sequence
  ENSG00000268518_0 (sequence is synthesized)
gtttccaggtcctgaccaggaggcaggagtccataccgaggcccaaacaggctagccctgagcagggcccccaagcctgaggcccaggagtggacagacctttgtgacacccattctctc

SEQ ID NO: 1034628 - DNA, 120 bp, Artificial Sequence
  ENSG00000268518_1 (sequence is synthesized)
ttccttttccatctgtccggaactctggacactgcctggaggaatcaggcctgccgtaggcccaggaaggcggaaacaaagacgacgctcagagacaggaagcaacttgcctaaagatac

SEQ ID NO: 1034629 - DNA, 120 bp, Artificial Sequence
  ENSG00000268518_2 (sequence is synthesized)
caatgtttctgaagaccagcaactgctaagacagagacttcgagggaacccgaccttgcctgaaggaccaacagcgccccctgcaggacacttccctccattgagagaagccacaggcgc

SEQ ID NO: 1034630 - DNA, 120 bp, Artificial Sequence
  ENSG00000268518_3 (sequence is synthesized)
cggcctgaggcattctgagtgcgtggaatcctctattaccacctcctggcaaagaacggagctgcaacccagctatatgagacaccgagaatgatctcaacaaaaaggaacagtgaccag

SEQ ID NO: 1034631 - DNA, 120 bp, Artificial Sequence
  ENSG00000268518_4 (sequence is synthesized)
aatgcctgggggaggaacaggggatactgggtggaaggaggggagagggagaagttgtaatattttgtaaaaatgaacatttttactcctaatcaatatacaaacatcatgctcagcaaa

SEQ ID NO: 1034632 - DNA, 120 bp, Artificial Sequence
  ENSG00000268516_0 (sequence is synthesized)
aggctggtgggggcggtgttgctcggggctgcgatgccccttaggttgcgggcaaccagaggcctcactcgtgggcaggaagcaagggcggaccccgagagatgactgattgtgggggtg

SEQ ID NO: 1034633 - DNA, 120 bp, Artificial Sequence
  ENSG00000268516_1 (sequence is synthesized)
gggaccgtctgctcctcctaatggctggggaccgtgcacgtctgcgcgggccggacctgctcttctcgggaacttgcgcgggaggaggcccggagctgcgccgctttaccctctgctccc

SEQ ID NO: 1034634 - DNA, 120 bp, Artificial Sequence
  ENSG00000268516_2 (sequence is synthesized)
cggtgcctaaaacgcacacgcatcaaagtcacaggacgagttagaggagaaaggcagagggagatttgaaacacagaggaggtgatgagaagacacagcagaagatatctgaagactgga

SEQ ID NO: 1034635 - DNA, 120 bp, Artificial Sequence
  ENSG00000268516_3 (sequence is synthesized)
aagaatgctgcaaccaacaggagaaggaaaagacagaaatgtgttttccatttggagcatccagagggagcacaaccatatcaacaccttgattttgatccagtgacattgattttggac

SEQ ID NO: 1034636 - DNA, 120 bp, Artificial Sequence
  ENSG00000268516_4 (sequence is synthesized)
ttgtggcctccagaacttttagagaataaatttgcattgttttaagccaacaggttggtggaaattttttacagcagccacaggaagcaaacacagactcctaactggtgcttagtccta

SEQ ID NO: 1034637 - DNA, 120 bp, Artificial Sequence
  ENSG00000268516_5 (sequence is synthesized)
gaatatcagtttctgttccacttctggatctcataattgcatctcagacatcaacactgacttcatattcttaatgcaccaattctaccatttcttcaggctgcaaacagagaaaaactt

SEQ ID NO: 1034638 - DNA, 120 bp, Artificial Sequence
  ENSG00000268516_6 (sequence is synthesized)
atttaagcattccagaattgacccaatagaagactctccagaaaagactgcatggtctctgaagcagcatgatcagcatgactggctgcatctgggctccaccgtttgccacttcagaca

SEQ ID NO: 1034639 - DNA, 120 bp, Artificial Sequence
  ENSG00000268516_7 (sequence is synthesized)
ggtccttagcctcttagaggttcattttccttgctgtagcccggagtaagaatgtttagcctacaagatttattttgaggcatcaatgaatcactatgtgagcctcacacagtgtctggc

SEQ ID NO: 1034640 - DNA, 120 bp, Artificial Sequence
  ENSG00000268516_8 (sequence is synthesized)
actgatattacaaaatatggttgatcttgccatccttgttattgtcctggtggggattcctctctgttgaagatacggagcctctaaaaatgagtggcagaggctcccagctcaggatcc

SEQ ID NO: 1034641 - DNA, 120 bp, Artificial Sequence
  ENSG00000268516_9 (sequence is synthesized)
ttgtccaggtcctaaagatcctccactctgcttgtcactctgttcattatgtttgcatggccaccacggtcaacactactgcggcctacctcaagttctcatgcctcactctctgagctc

SEQ ID NO: 1034642 - DNA, 120 bp, Artificial Sequence
  ENSG00000268516_10 (sequence is synthesized)
atgaggacacaaggatcctttggcaacacattaactacactctgtggccatcccttgacttctgagaggatgtttccctcctctcaatcaaaagctctcttccctcctgggcaagatcct

SEQ ID NO: 1034643 - DNA, 88 bp, Artificial Sequence
  ENSG00000268516_11 (sequence is synthesized)
tcacacccagcaccctcacacctggtgctcgcacccagcaccctcacacctggtgccctcgcacccagcaccctcacacctggtgccc

SEQ ID NO: 1034644 - DNA, 120 bp, Artificial Sequence
  ENSG00000268516_12 (sequence is synthesized)
cctggtgccctcgcacccagcaccctcacacctggtgccctcgcaaccagcaccctcacacctggtgccctcacacccagtgccctcacacccagcactctcacacttgcactgtcctca

SEQ ID NO: 1034645 - DNA, 120 bp, Artificial Sequence
  ENSG00000268516_13 (sequence is synthesized)
tcccaactctgtggttcctctggggaatcactgtggaatccctcatgggaggatgttttcaaaagaaacaacagcccaatgaagggtatttgaggatgagaagcaggaaagaagtcagtg

SEQ ID NO: 1034646 - DNA, 120 bp, Artificial Sequence
  ENSG00000268516_14 (sequence is synthesized)
ggtggctgagttgtgtccaggttttgcgtggccatggaaaatcaggtgaaggacattaaatatcttgcagtggcttctccattaggagcatgaaatgaggaaaggggctgtcctcacagg

SEQ ID NO: 1034647 - DNA, 120 bp, Artificial Sequence
  ENSG00000268516_15 (sequence is synthesized)
ccagccaagagggatgcctatgccaaacagaaagactgacagtaaacagaatccaggatgacatgactgaggtatggtgtgcagggcatggcccagggaggagggtagataagtaagcct

SEQ ID NO: 1034648 - DNA, 120 bp, Artificial Sequence
  ENSG00000268516_16 (sequence is synthesized)
gggtgcaccttcagaggaagaaataacagaggctgcaggcgagagagttacaaggaaggaggagcaggaagacacgagaaaaattcagataaactcaacatctccagcctgggggaaacg

SEQ ID NO: 1034649 - DNA, 120 bp, Artificial Sequence
  ENSG00000268516_17 (sequence is synthesized)
tgagagggtggtatgaagatacacacgatgcatgttgcttagtgaaagcagccagtcggaaaaggctacgtagtgaatgaccccaactatgacattctgaaaaaggcaaaactatggaga

SEQ ID NO: 1034650 - DNA, 120 bp, Artificial Sequence
  ENSG00000268516_18 (sequence is synthesized)
caggataaagatcagtggttgccagtgaggcaggagaatagggtctgggggcagggagcctaaggctgattcatgctgacttcatgaacggaatcaaaaggaaaaccctaaatttccatg

SEQ ID NO: 1034651 - DNA, 120 bp, Artificial Sequence
  ENSG00000268516_19 (sequence is synthesized)
cccacgtaacaaaaggatcagaggctactccctttgcaactccccccaactttctgtgttgcagatgaaaaatggaaagtgcctcggattggtcccctcctgcaaccagtcagacatctg

SEQ ID NO: 1034652 - DNA, 120 bp, Artificial Sequence
  ENSG00000268516_20 (sequence is synthesized)
catagagcgtaactttgtaacttcacttcagcctctgcttggtcaccttccacaaccaatcagactggtcatgggccactatttcatagggtgtaaaccaagtgaccaatgggaaacatc

SEQ ID NO: 1034653 - DNA, 90 bp, Artificial Sequence
  ENSG00000268516_21 (sequence is synthesized)
cgaccagtgcttttgagccttgcttgggcctgctcccactctgtgaagtgcatttttgtttcaatacagctatgcttttgttgcttcttt

SEQ ID NO: 1034654 - DNA, 88 bp, Artificial Sequence
  ENSG00000228437_0 (sequence is synthesized)
agaaattaactctcacagtggaggacctttgcaagagggtccgagacatttgcatcatcattcagtgagacctgtaaacacagcatct

SEQ ID NO: 1034655 - DNA, 120 bp, Artificial Sequence
  ENSG00000228437_1 (sequence is synthesized)
tttgcatcatcattcagtgagacctgtaaacacagcatctgcctttgaccacatccatctggaagaacctgagagataatccattttatgaaattttccctaccctgaaatgggagaatg

SEQ ID NO: 1034656 - DNA, 120 bp, Artificial Sequence
  ENSG00000228437_2 (sequence is synthesized)
ccaagttctggagaagctcctgggctgctagaactgggtgctggagaaaccaggtatgctgaaggaggttgatgaaacaaacacactgtaatcagaaagagaatccccttcctcctgcag

SEQ ID NO: 1034657 - DNA, 120 bp, Artificial Sequence
  ENSG00000228437_3 (sequence is synthesized)
tattccaccaataacttctactgacaaagcttaacattatgtcagctgacttagaagaaatatttgcagggtccagctgcattatccacagaatagtgaatgaaggatggagttggagct

SEQ ID NO: 1034658 - DNA, 120 bp, Artificial Sequence
  ENSG00000228437_4 (sequence is synthesized)
atacatatttacacttctgtgcaacaatgaaacaactctatatttcacctaaaaagatacagctgtcttaaaatgtaaagaagtcctcagctttgctttacagtgaggagatgcacagtc

SEQ ID NO: 1034659 - DNA, 120 bp, Artificial Sequence
  ENSG00000228437_5 (sequence is synthesized)
tcagttgtcattattttcatcattggctatatattaaatatttctaaaatcctgtcacagtctctgttacctaaaaataaatttataaaattaacccacaagaacttatatgtaaaataa

SEQ ID NO: 1034660 - DNA, 120 bp, Artificial Sequence
  ENSG00000228437_6 (sequence is synthesized)
aaataagaagaagaaaatgttagcttatatgaggggtcttcaaaaagttcacggaaaatgtgtattttttatatatataaaaatagatgtgtggatttcaaacattttcggcacaaaagt

SEQ ID NO: 1034661 - DNA, 120 bp, Artificial Sequence
  ENSG00000228437_7 (sequence is synthesized)
aaactcgtgctaacttgttataacatgcctgaacagaatctaatttgaagcactgagaaggataaggcatccatttgaaaaggactcctatattgcaacatgaattctgctaaaattgaa

SEQ ID NO: 1034662 - DNA, 120 bp, Artificial Sequence
  ENSG00000228437_8 (sequence is synthesized)
gcaagaacaaacatcaaatttatgatgaagtttgggtagaagaacgatgaaattagtgacgctttataaaaagtttattgggacaataccccaaatgaatcagcagtttaaaaatggata

SEQ ID NO: 1034663 - DNA, 120 bp, Artificial Sequence
  ENSG00000228436_0 (sequence is synthesized)
tttcatggcgaccaggacgctctgcatccccagtagcaggctgagccgagggaggctgcgtatgcccgcccctctggctgtcggagccgcacctcttcctcttccggcccccgtagcaat

SEQ ID NO: 1034664 - DNA, 120 bp, Artificial Sequence
  ENSG00000228436_1 (sequence is synthesized)
ccagaacaagcattcgaaatatgaacaggatggtgagccagatctttccaatcatggtggagtggatgtgaacttcctccagagtatctccaaggagattccagtcccccatgtttattt

SEQ ID NO: 1034665 - DNA, 120 bp, Artificial Sequence
  ENSG00000228436_2 (sequence is synthesized)
agtcagccatcttagctctgatccacatcaaataagaggcagataaattcttccattctgaagggagcactatttcttaaagcaaacctatggtgaaaatataacaatatgtcacttcta

SEQ ID NO: 1034666 - DNA, 120 bp, Artificial Sequence
  ENSG00000228436_3 (sequence is synthesized)
ctcagccctccgccccggcccgcatacaacgctgtctgcaccgctcccctgccttcttccgggctcccagagcaccgctatggagatgctctcccggcatttgaggaagaattgattgtc

SEQ ID NO: 1034667 - DNA, 120 bp, Artificial Sequence
  ENSG00000228436_4 (sequence is synthesized)
ctcatcctgcaactgtacttgcccaaccgatatttattgatgcctgcagtgtcctgggtgcctaccaaggggcacagaactggatccgacgcagaccctgcctgccttcaggttgcttga

SEQ ID NO: 1034668 - DNA, 120 bp, Artificial Sequence
  ENSG00000228436_5 (sequence is synthesized)
agatgaacagagagatcggacctctgcagagaagaaaggcttcctgtctctcatctctgggactggcagtggctgcaccagcgacagccagcagcagtggctggcagatccacaccagca

SEQ ID NO: 1034669 - DNA, 120 bp, Artificial Sequence
  ENSG00000228436_6 (sequence is synthesized)
gagacgaagctgagcaacagctctggagtgatggcaagaagacccaaggcactgtggtacctgttgtcaacactcagattctgtaacctgtatcagaggaagatggagtgacctctggtg

SEQ ID NO: 1034670 - DNA, 120 bp, Artificial Sequence
  ENSG00000228436_7 (sequence is synthesized)
ggtttgtcaggaaaaggtggctggcagggggaacagttgctactacctcgttgttctgcctttgctctgtgatcctttgacactcatggcattcagttatacctctctttttctaccttt

SEQ ID NO: 1034671 - DNA, 120 bp, Artificial Sequence
  ENSG00000228436_8 (sequence is synthesized)
ctacctttaatttgtcatcctctgccaactctctattcacgctccctcaaaagtaacacagtatattggctaagttcatggactccaaagttggactttttttttttttttgagacagag

SEQ ID NO: 1034672 - DNA, 90 bp, Artificial Sequence
  ENSG00000228436_9 (sequence is synthesized)
aacttggacttttttaatcctcaccccattccttactactgtatagtcttggatgaattacagaaactccccattccttagttttctctt

SEQ ID NO: 1034673 - DNA, 120 bp, Artificial Sequence
  ENSG00000228436_10 (sequence is synthesized)
ctctgcatgaagccagactgctcatcattccagacatcttcagctgctacacccagaacaagcattcgaaatatgaacaggatgagcactctctatgttgcccaggctggtctcagactc

SEQ ID NO: 1034674 - DNA, 120 bp, Artificial Sequence
  ENSG00000228436_11 (sequence is synthesized)
agtagctgggactgcagattcatgctctccatctccagatcatgaacagcagccattgtcctgggtcctccctcctccccagaaggacatgaatcccagggaacagcaggtggccctagg

SEQ ID NO: 1034675 - DNA, 120 bp, Artificial Sequence
  ENSG00000228436_12 (sequence is synthesized)
tcctcaggctgccgctcttccctgggctgtctggcgcaacgactgctttccaaggcctttcctgtatgtgaagagaagacagctgaagatgatcaaaatgatctaaacctcctaaatggc

SEQ ID NO: 1034676 - DNA, 120 bp, Artificial Sequence
  ENSG00000228434_0 (sequence is synthesized)
aagcctggatctggaaaaacaaacgccctttgagaagacggggactcgccaggatacccctctctcccctcatccagcctccagcccacccaattcctccccacctcctccacctcccca

SEQ ID NO: 1034677 - DNA, 120 bp, Artificial Sequence
  ENSG00000228434_1 (sequence is synthesized)
attcctccccacctcctccacctccccaggccccactcacctcctccaactcctctggggaaacccaagccctgcagctcatggaacagaagaagtggaaccgacgtttctggaacagga

SEQ ID NO: 1034678 - DNA, 120 bp, Artificial Sequence
  ENSG00000228434_2 (sequence is synthesized)
ctatctgagagcggttcttcctggccctcgggttcatgcaacggcgtaactggaaccgacgcttacggaccaagggaagtggaagatgttttgtttggagtcctcgtcgtcctcctccat

SEQ ID NO: 1034679 - DNA, 66 bp, Artificial Sequence
  ENSG00000228434_3 (sequence is synthesized)
ggaagatgttttgtttggagtcctcgtcgtcctcctccatgtcattggccaggtagctgaggacag

SEQ ID NO: 1034680 - DNA, 81 bp, Artificial Sequence
  ENSG00000228434_4 (sequence is synthesized)
tcacagagccaggaagaaatgaaggcgttggtattgccaggaggggaagccggctcggctgaaatacgctatgaccatagc

SEQ ID NO: 1034681 - DNA, 78 bp, Artificial Sequence
  ENSG00000228434_5 (sequence is synthesized)
gggacctcagtgttggggtgactgtactcatttggaaattgcggggaggaagggttttgggtgatgctcccaggatgg

SEQ ID NO: 1034682 - DNA, 85 bp, Artificial Sequence
  ENSG00000228434_6 (sequence is synthesized)
tttgtgtgccaggcagagaactgtcccgaagagctgagagtagaggggccaggagcttcagggctgcggccagactgtggcccag

SEQ ID NO: 1034683 - DNA, 76 bp, Artificial Sequence
  ENSG00000228434_7 (sequence is synthesized)
actctgcaagagaccagcagaatcctgagggagatgctgacaaatcataaaaagaccaagaatagccgggagtggc

SEQ ID NO: 1034684 - DNA, 84 bp, Artificial Sequence
  ENSG00000228434_8 (sequence is synthesized)
acaggaggatcatgtgagcccaacagttcgagaacaacctgggcaacatagtgagaccctgtttccacaaacatttcaaaaatt

SEQ ID NO: 1034685 - DNA, 82 bp, Artificial Sequence
  ENSG00000228434_9 (sequence is synthesized)
atgtgcctagtcccagctcctcaggaggctgaggaaagaagattgcttgagcccaggaattatcctggggagcagagctaga

SEQ ID NO: 1034686 - DNA, 120 bp, Artificial Sequence
  ENSG00000228434_10 (sequence is synthesized)
ggggagcagagctagattctgtctcacaaaaaaaaaatttgtgggtgccaagactcaagaccatgggagctggtcgggcacagtggctgacgtctataatctcagcactttgggaggcca

SEQ ID NO: 1034687 - DNA, 76 bp, Artificial Sequence
  ENSG00000228434_11 (sequence is synthesized)
ggtggttcatgtctgtaatcccagctcggctgcagtgagtgaagatcgagacactgccctccagcctgggcaacag

SEQ ID NO: 1034688 - DNA, 120 bp, Artificial Sequence
  ENSG00000279342_0 (sequence is synthesized)
atcacaagatttctttaaatgctaaggtctgaaataaggtctttatttttttcattattcatcaacagatagtgcctactgcagtaggtctgagagttacggtagtataccatcaccttc

SEQ ID NO: 1034689 - DNA, 120 bp, Artificial Sequence
  ENSG00000279342_1 (sequence is synthesized)
aagatgtccatcttgtaataaaggagtcagattactaaggaaccaattacaatattgtgaacaaggtcttgtgtgtcatgttaatgttatgcttatggtgctacaggagcacacacatcc

SEQ ID NO: 1034690 - DNA, 120 bp, Artificial Sequence
  ENSG00000279342_2 (sequence is synthesized)
taggctttcaaaaggtggatcctgaagggtgaaggtggactcaaaggtagatgaatagttagtgtaaaagctcagaggcagcataacctagaatagtgccaactgcaaatataatgagat

SEQ ID NO: 1034691 - DNA, 120 bp, Artificial Sequence
  ENSG00000279342_3 (sequence is synthesized)
atacttaccaaagaatgcaaaactggaagcatccaaacagtgttcagctgtttaaaaagtcatgctttttaattgaagaataatttgccagtagtgcatggcatgtggtgaaagagtgat

SEQ ID NO: 1034692 - DNA, 120 bp, Artificial Sequence
  ENSG00000279342_4 (sequence is synthesized)
gtgggagccgtaaatgatgccttagtggtgtcataatcacgtagaatggtggagccagtagttttgggatgacattatagtgaacataccaattccaggtcatttatatgttgtgatgag

SEQ ID NO: 1034693 - DNA, 120 bp, Artificial Sequence
  ENSG00000279342_5 (sequence is synthesized)
taacaacttttttatggtgttgaattgcagttgcgcaaatatccattacatatctcatttcttaatttgtatactggaaagtaaaaccaaaacagtgcatctttttttgaccacaactca

SEQ ID NO: 1034694 - DNA, 120 bp, Artificial Sequence
  ENSG00000279342_6 (sequence is synthesized)
caggaagaagaaatatattttaccctgggacctagtagtttcatgacatatatgtataactgaaacagatttcacaaaacagtgattatagccaacacatagtattttctatgtgccatg

SEQ ID NO: 1034695 - DNA, 120 bp, Artificial Sequence
  ENSG00000279342_7 (sequence is synthesized)
cactattctaagtgctttgtaaatattaacttaatccacataatgacactatactgaactacatgtaatatactctgatatgttctgttctaattgaaggcagacactccagctgtagag

SEQ ID NO: 1034696 - DNA, 120 bp, Artificial Sequence
  ENSG00000279342_8 (sequence is synthesized)
cctctttcataacagtatacacagtgaatgcacctaacacaatacctgcccctggcgggggatctttctctgccccacatcctcctcctccccagtgcttgtcagcattggctccccttt

SEQ ID NO: 1034697 - DNA, 120 bp, Artificial Sequence
  ENSG00000279342_9 (sequence is synthesized)
tcaccccagtctctgtggtacctctcatctttccccttccccagccacagccttgcctgtctccagaaatgccctcaccaaatgctggtgcaaagaaagtctggaaggatggaagctgcc

SEQ ID NO: 1034698 - DNA, 120 bp, Artificial Sequence
  ENSG00000279342_10 (sequence is synthesized)
gatcccactgatattgggcagcgggcttactcctcggagactggcagctcagggtcacattggtgacccttctgtctgcacccttctgtcgtttcatttatcccttctccaactcttgcc

SEQ ID NO: 1034699 - DNA, 120 bp, Artificial Sequence
  ENSG00000279342_11 (sequence is synthesized)
ctcagccatttaggagagtgactcgcctgacctcccagtgcaggtggggaggggtccggaagtctgtgcttctcactcaccctgtacactgagttctaaggttttgatgatgtagcccgt

SEQ ID NO: 1034700 - DNA, 120 bp, Artificial Sequence
  ENSG00000279342_12 (sequence is synthesized)
aatgatgccttgtttgtcttgcacattcacggagcagctgtaggggccagagtctctctcctggagaccctccagccacagggacagttctaggagggcatggagtagaccaaggatact

SEQ ID NO: 1034701 - DNA, 120 bp, Artificial Sequence
  ENSG00000279342_13 (sequence is synthesized)
ccaggtttgcttgttgtgaccccattgatggtcaatgatggcattctccaaatgtccctcacatgcacccattcttccaacctgaaaccagctcccattcaccttttgtccctagccccc

SEQ ID NO: 1034702 - DNA, 120 bp, Artificial Sequence
  ENSG00000279342_14 (sequence is synthesized)
acttgctaaaattaattgtacaacccactaatgggccataacctacagttaaataaaagaggactagaagataatacagtgagatcaagattttttcattcattgtgttcttttagactg

SEQ ID NO: 1034703 - DNA, 120 bp, Artificial Sequence
  ENSG00000279342_15 (sequence is synthesized)
aacctattgaaactccagaaacattaatttgcaacatctgtcccagatattctggtgaaattatattacatagttttagatagcttgagcctaagctttgagataaagggtgaagcaggg

SEQ ID NO: 1034704 - DNA, 120 bp, Artificial Sequence
  ENSG00000279342_16 (sequence is synthesized)
gagtgggaagtagtaagaaatgagactggagacttaaacaagaggtcaggtgatacgctaaggcgtttggactttattctaatcatcaaaggattttaagccaggcaatgacatggttag

SEQ ID NO: 1034705 - DNA, 120 bp, Artificial Sequence
  ENSG00000279342_17 (sequence is synthesized)
tcttaaattttaaaacagtccctggctgtaatatggagaatcaaaagagtaagactggaagcacaaagattatttagaggcttcttgcagtaagctagatggaaagtgaaataaagcagt

SEQ ID NO: 1034706 - DNA, 120 bp, Artificial Sequence
  ENSG00000279342_18 (sequence is synthesized)
ggtaacgaagatggagacacaagaataaatttcatatacatcaaaaccgaggacctgtttcgaagaatctgggaattttaatttccagaatttgttagatcctaacctgtgagacaactc

SEQ ID NO: 1034707 - DNA, 120 bp, Artificial Sequence
  ENSG00000279342_19 (sequence is synthesized)
actatctacttctctaccagcttacacagagggttcttgactgcagtcaaagaccataacagtatttcatagctgaagttttcaggcttgatttctaagaacccaaggaaaaccaactga

SEQ ID NO: 1034708 - DNA, 120 bp, Artificial Sequence
  ENSG00000279342_20 (sequence is synthesized)
aataccaaatgaagacagtcctgtctgtatttcctctaccatatactctctgcagactcttcagttctgcttcccagtcttcagaagtgattatcctgctttcccccccgactttttcac

SEQ ID NO: 1034709 - DNA, 120 bp, Artificial Sequence
  ENSG00000279342_21 (sequence is synthesized)
aatattaccagagagtaagaactaaaattcagatccagtatttcaaatgttaagtgtcatgtagctagatacctagatttgtgctcctagtgttacgttaacgtagaaccagcagttgtt

SEQ ID NO: 1034710 - DNA, 120 bp, Artificial Sequence
  ENSG00000279342_22 (sequence is synthesized)
ttctatggaaaattgtatctgtgtaatgttaaaacaaacgaaataaaatagaaggaaaaactttctgagtttcaaaaacaacagactagtactctaaagaactctttaaaacaattaact

SEQ ID NO: 1034711 - DNA, 120 bp, Artificial Sequence
  ENSG00000279342_23 (sequence is synthesized)
gttaggattgcagttatgattggatattatttaattctgtttctgatgtggggttcctccactgtgttctgtgtgctattaatatttaccattgcagaagcttcattcagtgttgaaaat

SEQ ID NO: 1034712 - DNA, 120 bp, Artificial Sequence
  ENSG00000279342_24 (sequence is synthesized)
gaatgcttagtggatctgtgcctcttatgcatatgttacaaattatctggagttcctaatcaatgcagagttcccctcccctccgattgttctaaataattgaaagatgtctgctgtgga

SEQ ID NO: 1034713 - DNA, 120 bp, Artificial Sequence
  ENSG00000279342_25 (sequence is synthesized)
aaaaggcatgtatttaaatctgtatgattctcaaccatctttagttgggaaaggtccttgaaagccaatggaaatactttttttttttcttggcactaatcaagtgagtgttaccttttc

SEQ ID NO: 1034714 - DNA, 120 bp, Artificial Sequence
  ENSG00000279342_26 (sequence is synthesized)
acttagtaggatgtgttgttacgctagtaaaatagaaacctgtgtttattctcaggtattttagaaacaacagccatcattttattttatgtgtgtgttcttggctgtattcataaatta

SEQ ID NO: 1034715 - DNA, 120 bp, Artificial Sequence
  ENSG00000279342_27 (sequence is synthesized)
tatattttgggctatcaaatattacttcattcaatataaataacaatagtagaagttgtttacttagatatgctttctagttgcattttctcagcctatgtaagactactttgttgtaat

SEQ ID NO: 1034716 - DNA, 120 bp, Artificial Sequence
  ENSG00000279342_28 (sequence is synthesized)
agcctttgaaatttacagtactgtctctctactatcttcagattacttgattcaaataaaccaattatgtttgtaattgatattaataaaaccagaataaaagttcatatctacccaaaa

SEQ ID NO: 1034717 - DNA, 120 bp, Artificial Sequence
  ENSG00000279345_0 (sequence is synthesized)
ccaagggcagtctgcatgctcaggacaccaaacgcctgcccacgaagcacagccctccaaggacagccaacggaaggaagccagaggctggagagggcatcggcaggtgcactgggacgc

SEQ ID NO: 1034718 - DNA, 120 bp, Artificial Sequence
  ENSG00000279345_1 (sequence is synthesized)
tgggctctgatcacagccccacagggctcctcctctgcaggctgggctgggctggacctggtcacctcatggcctgctgttttgggagcagtctgtttttaccacttgggactgaggcaa

SEQ ID NO: 1034719 - DNA, 88 bp, Artificial Sequence
  ENSG00000279345_2 (sequence is synthesized)
tttgggagcagtctgtttttaccacttgggactgaggcaaaccatgtgcagtcaatagcacaacacttaactcttctggttcagtgag

SEQ ID NO: 1034720 - DNA, 120 bp, Artificial Sequence
  ENSG00000279345_3 (sequence is synthesized)
ggctggtctcaaaactcctgacctcaggtttctgtccacctcggcgtcccaagtgctgggatgacaggcataagccaccgctcccggcccacacccagctaatttttatgttttcagtga

SEQ ID NO: 1034721 - DNA, 68 bp, Artificial Sequence
  ENSG00000279345_4 (sequence is synthesized)
atgacaggcataagccaccgctcccggcccacacccagctaatttttatgttttcagtgcctcccgaa

SEQ ID NO: 1034722 - DNA, 120 bp, Artificial Sequence
  ENSG00000279345_5 (sequence is synthesized)
cctatctcttaaaaaagaaagaaagaaagattctgtttgtttttatttcttctgacccatgagatgtgagaaaaaattctgacctcatcacaacaagccaccatcttctccagagtcagg

SEQ ID NO: 1034723 - DNA, 120 bp, Artificial Sequence
  ENSG00000279345_6 (sequence is synthesized)
gatgcagaggtgtgcgtctgtgaccccaactacttgggaggctgagggagctcatgtgagcaagaggctgaaaaccccaaaattagagtgaggaagagcatggaagagcagcttcccagc

SEQ ID NO: 1034724 - DNA, 120 bp, Artificial Sequence
  ENSG00000279345_7 (sequence is synthesized)
tgaggcgatgagcacccccactcaactcggacagaagagttaaggggaaacagacctcagataagaaaactaagcaaagacatacatatgacaaccacagaaagcagtccctgagggctg

SEQ ID NO: 1034725 - DNA, 120 bp, Artificial Sequence
  ENSG00000279345_8 (sequence is synthesized)
ggtggactgagatgccggcaatacgggcaagatgaaggaggcctgggggcagcagccgcaatgcccacctcagggatgactgcagacaagtcagaacccacactaggagccgggcgcggt

SEQ ID NO: 1034726 - DNA, 120 bp, Artificial Sequence
  ENSG00000279345_9 (sequence is synthesized)
actttgtctcaaaaaaaaaaaaaaaagaacccacaccagggaaaagaaccccggaaatgagggaggtcaccagagttccaacatcaagtattccttggatttttgttaagcccagtctac

SEQ ID NO: 1034727 - DNA, 120 bp, Artificial Sequence
  ENSG00000279345_10 (sequence is synthesized)
ttttgttaagcccagtctacatgctgacacataaatactttaccatgggacccactaaatgcactagggaacgtatggataggaagaccaatattgttaagatgtcaataccaccgaaag

SEQ ID NO: 1034728 - DNA, 120 bp, Artificial Sequence
  ENSG00000226762_0 (sequence is synthesized)
agaaaatggtcttctgagagatagagactcacaatcattgtttttaagaagaagacaggaaagagcagcagtgaggttctggggctaagcagagagcttctcagtgctggggcacggcac

SEQ ID NO: 1034729 - DNA, 120 bp, Artificial Sequence
  ENSG00000226762_1 (sequence is synthesized)
gttgctcagatcagctttcccggtgagagtaacagaacgcggaaggaactctaagaagcctatttaaaaatgactgactagcggatgtgatagagagcgattatcagggtagaccataag

SEQ ID NO: 1034730 - DNA, 120 bp, Artificial Sequence
  ENSG00000226762_2 (sequence is synthesized)
cctgtaacacagagggggtggccaagcacagcccagctttcgtcccaaggatgccagctaaaccaaggaaaggtgaactggaatttcatgatctcttaaagtttggagacatgggaatgt

SEQ ID NO: 1034731 - DNA, 120 bp, Artificial Sequence
  ENSG00000226762_3 (sequence is synthesized)
gggggcttcaacaggaagtcctgctctcctaaagccgggatcagaaaaggccacactctcagcagaagagtaaaaccccaccctgaaacacaggatggatccacgtgctccggataaaag

SEQ ID NO: 1034732 - DNA, 120 bp, Artificial Sequence
  ENSG00000226762_4 (sequence is synthesized)
ggaaggtcgaaaagctaacagagttcggatacaaaacagaacaaagacgaaacaaaaagctgcagccgaaccctacctgctgctccatgttgaaatctgcctcctcaagtcgggagcgag

SEQ ID NO: 1034733 - DNA, 120 bp, Artificial Sequence
  ENSG00000226762_5 (sequence is synthesized)
accagaaggaacacccgagactccgacatcagcgtcagctgcaggggctcccggaaggacaagcctgtccctggatgctcataagcagagtggctacagtgcagcaaggaaaccttccag

SEQ ID NO: 1034734 - DNA, 120 bp, Artificial Sequence
  ENSG00000226762_6 (sequence is synthesized)
caaacactgcacttggcacagccgcaggtcacgtccctgcccaccaggacctctctgtgataagggccaacgatgtttccattcctgttcatgaaatcacttggcgatgagtgaaatctg

SEQ ID NO: 1034735 - DNA, 120 bp, Artificial Sequence
  ENSG00000226762_7 (sequence is synthesized)
tgtgcgttgtaacaacaaatgactgcaacagaaaatcaccagatttccatcataactcaaatgccagccaggcttggtggatgggctcctcgctgaaatctccatagctgcataatcatt

SEQ ID NO: 1034736 - DNA, 120 bp, Artificial Sequence
  ENSG00000226762_8 (sequence is synthesized)
agcagtgagaacagtcacctacacgtgaaagaatgactagaggaaaacaattcactccacttaagcaaagtgatgctccctttggctaatctaaataccttggggttttgctaggtcttc

SEQ ID NO: 1034737 - DNA, 120 bp, Artificial Sequence
  ENSG00000226762_9 (sequence is synthesized)
agatgatggaactttgaaagccagcgtgggagagcattacatggctggatgaaaactctgctgggtttacagtgagctggctcattattcagtgaaacctccatccttattcagccttga

SEQ ID NO: 1034738 - DNA, 120 bp, Artificial Sequence
  ENSG00000226762_10 (sequence is synthesized)
atatttaaatccatacagatcggaactgtactccggagcctgggaacaccgtgcaatgcgctctaaatccctgctttcatgcgcatgaaagacccgtcatttttacccctcctaccagcc

SEQ ID NO: 1034739 - DNA, 120 bp, Artificial Sequence
  ENSG00000226762_11 (sequence is synthesized)
taattgaccgcatttccgtgaacactcgcttgctggttcctagcaatgaagactgtggggtcctttctttccaaggttgtgctggaaagtggagaaggtaaaggggaaagcaacaggcag

SEQ ID NO: 1034740 - DNA, 120 bp, Artificial Sequence
  ENSG00000226762_12 (sequence is synthesized)
gcaaggggaatccgggagaagggactcatctgcagcagtcatgcctctcatggaatcacaggccaggctatgaggaagaaacgcgggctttgctctcggtcacctaatgacgctttgtca

SEQ ID NO: 1034741 - DNA, 120 bp, Artificial Sequence
  ENSG00000226762_13 (sequence is synthesized)
tttttaaagggcattgcactgtgattgccatggatacatgaaaagataatgtgctatttttagcatgaagcataaaataaaatccaaagttgggcaatatgaccctcacgcctccagaga

SEQ ID NO: 1034742 - DNA, 120 bp, Artificial Sequence
  ENSG00000226762_14 (sequence is synthesized)
gcctcattaaaatgagatgtttcccttcagaggtgaactcagtaagtaacgtttaaatttcttaatcaggccacacagagttcccaaataaaaaatagttctgaaaacaaatccttctgt

SEQ ID NO: 1034743 - DNA, 120 bp, Artificial Sequence
  ENSG00000226762_15 (sequence is synthesized)
cagagcccggggcttgcaccatggcagcaaaatccttctgacttaaagtggagggaggaggtggtctctgaatgaaagacatttcaaattttcagtgttctaattgaggaataaaatggt

SEQ ID NO: 1034744 - DNA, 120 bp, Artificial Sequence
  ENSG00000226762_16 (sequence is synthesized)
atatattcagctagaaagtaaccattggatcaaattatacagtcttttgagtaagccaatgtcagcttaataatattttagcatataataaagtcgtgtgtatcaattctcattttgaac

SEQ ID NO: 1034745 - DNA, 120 bp, Artificial Sequence
  ENSG00000226762_17 (sequence is synthesized)
ccaggttgaatgttactgcttcaaacagtaaataaaaactgagattctgagaataaggccagctttgaattagtcaaaattgtttttattactagcaaacaggcaaacctgtgataaaac

SEQ ID NO: 1034746 - DNA, 120 bp, Artificial Sequence
  ENSG00000226762_18 (sequence is synthesized)
agcattcattttccccatgctatttcaatatcctatgtaatttttcactgttgaaagcactcccagagtaccctcatgaataatccctgaaaccccaaataaataaaaaccgttctctga

SEQ ID NO: 1034747 - DNA, 120 bp, Artificial Sequence
  ENSG00000226762_19 (sequence is synthesized)
acacatttcatcacctctcagaaggggttaacatcacagaattccaagtctgagggtggagccctgatcctgagaaggttttgttgagttcgggacagtatttctttacccatccttcat

SEQ ID NO: 1034748 - DNA, 120 bp, Artificial Sequence
  ENSG00000226762_20 (sequence is synthesized)
gaagataaaaaatgaggcaaaatagacactaaaatggtctctgacatctcctcatgccaccagacaaggagtaaccatggtaacaagaagcctagaaaaattggggaatgaggaagacca

SEQ ID NO: 1034749 - DNA, 120 bp, Artificial Sequence
  ENSG00000226762_21 (sequence is synthesized)
ggaatgagagctcccctcagccctggggggacctgagtgtccacagctgagccttctctgcttcccttttctcttctggattctgatggaggatattttcatcttcctcccaaaatcatc

SEQ ID NO: 1034750 - DNA, 120 bp, Artificial Sequence
  ENSG00000226762_22 (sequence is synthesized)
cccaaaatcatcagaaagcataaggacatatataaaccgctttgcaaaaagagagtgtatggaataaaagagaaaatgaagaagaggagaaaggctggagtgcaatggtgtgatctcagc

SEQ ID NO: 1034751 - DNA, 120 bp, Artificial Sequence
  ENSG00000226762_23 (sequence is synthesized)
caacctccctggctcaggtgattctcccacctcagcttcctgattaactgggattacagtaatggtgaaattgccggtaatcgctaagtaaaaaccactgaagaacaggacagaagccaa

SEQ ID NO: 1034752 - DNA, 120 bp, Artificial Sequence
  ENSG00000226762_24 (sequence is synthesized)
tgaccacctcacctccaccgagtgccctgcagaaaaaggaaatggaaatccttcctgttattctccgcgtcccttcgtagaaggctgcctgagaggtcagcacaggagtcctctaagtgc

SEQ ID NO: 1034753 - DNA, 120 bp, Artificial Sequence
  ENSG00000226762_25 (sequence is synthesized)
cctgcagagaacacgggtctcggagccggacaaacctaaattttgaaacccactttgagtttgaacttggctgtgggaaagttacacaatcgctctaagcctctgttttctcatcagtaa

SEQ ID NO: 1034754 - DNA, 120 bp, Artificial Sequence
  ENSG00000226762_26 (sequence is synthesized)
aacagagaggggttgcttgtgtgagaagtggccgctgccaatcatctgcgtgtccttcactctcccaggggccatgggtctgtattctacacatgtgggatcttcctctggacccttcgg

SEQ ID NO: 1034755 - DNA, 120 bp, Artificial Sequence
  ENSG00000226762_27 (sequence is synthesized)
acatggtccacacgctgccctcaggatctgctggggtctgcatggggggtgagacgtgaaccccaaccacgttcaccacagagaggaaactggggggatggagggggggacaaggccagg

SEQ ID NO: 1034756 - DNA, 120 bp, Artificial Sequence
  ENSG00000226762_28 (sequence is synthesized)
tcaccttcaggtgccgcccgccagcaaggcggtttgcacccggctgaatgagctttaaaaaagacagttttttctgtagtttagaatcatggtttcactaaatggtgaaataattttatg

SEQ ID NO: 1034757 - DNA, 120 bp, Artificial Sequence
  ENSG00000226762_29 (sequence is synthesized)
ccacttcccctactaattaccatctcattgttattagaaaggatggtttccttgaagtctagaaaattttgttccagtccatttcaacggtgcaggagaaacgtggcttccattccgagg

SEQ ID NO: 1034758 - DNA, 120 bp, Artificial Sequence
  ENSG00000226762_30 (sequence is synthesized)
aagacggcgacacctagtgaccgttccctcgcggtgcgatggcctcacacctgtgcggcgggtcgtccggggcgtagggtgctgcggccttgcggtcttccctgcgctgcaaggcagggc

SEQ ID NO: 1034759 - DNA, 120 bp, Artificial Sequence
  ENSG00000226762_31 (sequence is synthesized)
atggtggcagattaacacctggatgaacacgggcaggtcaggagacaaataaaacccagaggtctttgaaacttcaaaatcccgtagggtgtgtgaccccagtgagccccacgctacatc

SEQ ID NO: 1034760 - DNA, 120 bp, Artificial Sequence
  ENSG00000226762_32 (sequence is synthesized)
agaacacaccgggagttactgcctctttctcatcccgagtcctcctgactttccccagcacccatcgtggctgcagccaggacacaggtaaatgtaatttccctccccttccatcctcgc

SEQ ID NO: 1034761 - DNA, 120 bp, Artificial Sequence
  ENSG00000226762_33 (sequence is synthesized)
tttcacatcggtgtgattgactgagggcctgcagactctctccacgtgcgggtgccctgcagcctgacacacaaatgcgttcatccttcccctttatcctgaccccgaactaatgacgca

SEQ ID NO: 1034762 - DNA, 120 bp, Artificial Sequence
  ENSG00000226762_34 (sequence is synthesized)
gcttcctgagacacagaggatgcttctcctcgtcccccctcgcgctctgaagtgggaaaagatgtgttccatctgttctggaattttcactgtaaagaagagaatgaattttaactgtgt

SEQ ID NO: 1034763 - DNA, 120 bp, Artificial Sequence
  ENSG00000226762_35 (sequence is synthesized)
ttttgacatatccctaaacaagaagtggtttatagagtgaaaccattttcccttcatctaaaatttaaaaaaaaaaaaaaagagagagaaaagtgcaagactgaagatgtgtgttgagcg

SEQ ID NO: 1034764 - DNA, 120 bp, Artificial Sequence
  ENSG00000226762_36 (sequence is synthesized)
gggtgaggaagcgtgggggactcggcgctggaggagccccgggtgtgtttagggtttgtggtcaggggccctgggcaccaggtccagtctgaagcacccggggggatggacgatgtttgt

SEQ ID NO: 1034765 - DNA, 120 bp, Artificial Sequence
  ENSG00000226762_37 (sequence is synthesized)
gtaagagagggacaaagggatggcagggtggccaagcagagacgcgattccctctgtgcccttcctggaccagctttgtattctaacagcaacgtctctgttcttgggaagagctcctcg

SEQ ID NO: 1034766 - DNA, 120 bp, Artificial Sequence
  ENSG00000226762_38 (sequence is synthesized)
gtgattacctgcccgccccttgtctcctcttattcccgctgccacagggcagggccgcccagctccagctcagacacacacctgctccaactgctgtgctggtcacaggcccagagcacc

SEQ ID NO: 1034767 - DNA, 120 bp, Artificial Sequence
  ENSG00000226762_39 (sequence is synthesized)
acgtgtcctctggggtctgtgtggtcggcgccgtgcgtgggaccactgtgagtgaccctcctcttgtgtcacagagccactgtacccgtgtgcacctgtgctctgagacctggatacccc

SEQ ID NO: 1034768 - DNA, 120 bp, Artificial Sequence
  ENSG00000226762_40 (sequence is synthesized)
tggaaggacagacaccgaggacccgagtgcactggagtcccgctcccacagatcctgctgctgggagaactgtcagccaggaacgggactgcggtggggaattccttctgtcaacacact

SEQ ID NO: 1034769 - DNA, 120 bp, Artificial Sequence
  ENSG00000226762_41 (sequence is synthesized)
ttctaatctaagctccagactccacttccagactagcacaggctttttcccccacatctccttctctgcagccggggctcctgccgggtctgcggagcccagagccatgctctctgccga

SEQ ID NO: 1034770 - DNA, 120 bp, Artificial Sequence
  ENSG00000226762_42 (sequence is synthesized)
ctccatctccagatgcctgccccggcacccacgctgttgccaggacaccagtgaacccagacagggagctgggagatgggaacatcactagaccacgagccggaattgctgcaggaggat

SEQ ID NO: 1034771 - DNA, 120 bp, Artificial Sequence
  ENSG00000226762_43 (sequence is synthesized)
tcccacactctgggcctccgtgggcaccacgaggactggacgtgcgaccccagctctctgggtctcagtttcgtctcctgcagagcatctgagctagaccgtctctaaaatttcatcaag

SEQ ID NO: 1034772 - DNA, 120 bp, Artificial Sequence
  ENSG00000226762_44 (sequence is synthesized)
ctcctgtattccattctattctgagatgcccaattcttatgcctgctaaaaaccacagtgagaaataataacctatgtccacatttttgtttcctaggagaaatatcaacatgcgtctgc

SEQ ID NO: 1034773 - DNA, 120 bp, Artificial Sequence
  ENSG00000226762_45 (sequence is synthesized)
ttagggtgaatctccgttaatcactgaacgggaagagctagcttacagaagttaggagctaaaacagaacttgggaggaccacaccaacgaaagggacagagggaggactatagtctgat

SEQ ID NO: 1034774 - DNA, 120 bp, Artificial Sequence
  ENSG00000226762_46 (sequence is synthesized)
gaggatgctggtgtccacggctcctctgcacggttggtgttatttctcactggtagactctgataagctgaaggatgtcctgccctgtgatgccggaaatgcctggaggctgagaacccc

SEQ ID NO: 1034775 - DNA, 120 bp, Artificial Sequence
  ENSG00000226762_47 (sequence is synthesized)
tccagtgtatatgtggatgctcagaacaagacgtcaccggtttttcctcgattccttcccaagagctgctatcactgggagaaaaatgtacatctttaggcccagcccactgggtgcctg

SEQ ID NO: 1034776 - DNA, 120 bp, Artificial Sequence
  ENSG00000226762_48 (sequence is synthesized)
catttttccagcagccctcgagtcctgtggtgttgctagttattttaattgagtgacacacaaggtgggtatgaatgaattttacagccaattagggctaagcatggattgtacaggaaa

SEQ ID NO: 1034777 - DNA, 120 bp, Artificial Sequence
  ENSG00000226762_49 (sequence is synthesized)
gagagtctttttagtgcaaatttatggtccactcaagacacataacttatgacaggactagtaaccgcagctgagcaggcttctttccggagcctcttgtcctctaaacgggtttttctg

SEQ ID NO: 1034778 - DNA, 120 bp, Artificial Sequence
  ENSG00000226762_50 (sequence is synthesized)
gacacttgcagtaggtaaggaggctgtcgactatggaactgagcgaagacaggttcggggctcacccttaccgatccgctccgcaaacctcgggaatccctctgcctctctgttctgttg

SEQ ID NO: 1034779 - DNA, 120 bp, Artificial Sequence
  ENSG00000226762_51 (sequence is synthesized)
ttcttacctaaacaataagctatcggcctcagctgtctccgggaaactttgaactctaagagggcaggttttacttgttctcctcgaaatgcatttcagactgggagtggagtgtgggag

SEQ ID NO: 1034780 - DNA, 120 bp, Artificial Sequence
  ENSG00000226762_52 (sequence is synthesized)
cgggaacattaagttagagcaggctgcaaaccctccacctggaaatgtgtctgcactgctgtcaccagcctgtctgggtctcggctctgtccttcccttggtgtgtcctggggtaggcgt

SEQ ID NO: 1034781 - DNA, 120 bp, Artificial Sequence
  ENSG00000226762_53 (sequence is synthesized)
tgaatgagaaaaccatggttgcagaggcaacacatcctttccttgaacagtgtgcacttgaggaacgaattaagacccgtaaacaaggatgaaagcccccgccccgcagacttcagctcc

SEQ ID NO: 1034782 - DNA, 120 bp, Artificial Sequence
  ENSG00000226762_54 (sequence is synthesized)
cgtcacagtttcactcatgccggtctcttcctgtgcacattcaatgttaacattattctggcaaaagccttgctgcagatagtctctccggtccctcctacatctctttccagaagacag

SEQ ID NO: 1034783 - DNA, 120 bp, Artificial Sequence
  ENSG00000226762_55 (sequence is synthesized)
ggataaaataaaaagtcctgggcacccaagcgcatgatcctggtgtatgcgtgctttgaagaacagcagaagtccagtagaagttggacttcgcatacaaatgtgcaagaaacgcaggag

SEQ ID NO: 1034784 - DNA, 120 bp, Artificial Sequence
  ENSG00000226762_56 (sequence is synthesized)
aaagaaaatggaatcagtacagaccgttcctgatttatggtggttcaacttacaactacatcaatgaatgacttgagacgttcaacaccttattataaagcacgctgtgtgttagatgac

SEQ ID NO: 1034785 - DNA, 120 bp, Artificial Sequence
  ENSG00000226762_57 (sequence is synthesized)
tgtacccaaccgtatgctaatctaaataagccctggccccgagatgagcaatgtcgcagcagttagagctcaccaaccatcagacaccgcccaacggaaccccattccagcagccaccac

SEQ ID NO: 1034786 - DNA, 120 bp, Artificial Sequence
  ENSG00000226762_58 (sequence is synthesized)
tgctttacagaggctgagcacttgagtgcctctgtgtcctgaaaagaacatttgatgtatatggcccaactgtaactcatttaaatgttgggtttacaccccaaggtgaacttgggtcat

SEQ ID NO: 1034787 - DNA, 120 bp, Artificial Sequence
  ENSG00000226762_59 (sequence is synthesized)
atgtaacaggcatgtttgtgcattatgcatgtgccagcccccttcatgaatattcatagctgctcctataatctgttgaatatgcatgcttggccaatccattcagcatggacccctgtt

SEQ ID NO: 1034788 - DNA, 120 bp, Artificial Sequence
  ENSG00000226762_60 (sequence is synthesized)
ccattctcctctccctcgcaggtgactgcctcccaggctccaggctgggcaatgcttcccagcctgttgggatggccaccttgcagcctgtaaccctttggaaggtagtttcctttctaa

SEQ ID NO: 1034789 - DNA, 120 bp, Artificial Sequence
  ENSG00000226762_61 (sequence is synthesized)
gggaggaatgcccggctggcccatgtcttgaaatcagtctcattgaacaatccgggaaagagatgacctagcctattctaaggctatcgatgtgaattggattcttccatttcccctgaa

SEQ ID NO: 1034790 - DNA, 89 bp, Artificial Sequence
  ENSG00000226764_0 (sequence is synthesized)
gctcacaggaagaagggcccagatgagactttgggggcttccccctttgctgggcactcattcttctccttcctgctgccatgtgaaga

SEQ ID NO: 1034791 - DNA, 120 bp, Artificial Sequence
  ENSG00000226764_1 (sequence is synthesized)
aggatgtgtttgcttctccctctgccatgattgtgctgctgctgagccgggagaatagaagcgtccaagtcagtgccttcagagatccagctgacttcaagagggctgaggtccacccag

SEQ ID NO: 1034792 - DNA, 120 bp, Artificial Sequence
  ENSG00000226764_2 (sequence is synthesized)
actccacccgctatgtgctgggaggcattggctgactccaaagcacacagcaatttcggcttggcccacggcagcaaacagctgtgccaatgcccatcctaacgagaataacgcaaggct

SEQ ID NO: 1034793 - DNA, 120 bp, Artificial Sequence
  ENSG00000226764_3 (sequence is synthesized)
tagcctgtaatccacccctctgcagaaaccaatcattcctcctcattaccgagcgaagaaatgcctctcaaggctccttttcctccttacaaacaaaataaaacaaatccttcctatgga

SEQ ID NO: 1034794 - DNA, 120 bp, Artificial Sequence
  ENSG00000283607_0 (sequence is synthesized)
tcacagaccctctccctcacctgcactgtctctggattccccatcataaccagtgtttccttctagaattgtatctgcttgcccctagaagatggacaggagtggatcaggtgcatgggt

SEQ ID NO: 1034795 - DNA, 120 bp, Artificial Sequence
  ENSG00000283607_1 (sequence is synthesized)
ttacaacccacttctcaagagtccatatccggatccaagaaacagttcttacagctgagctctgtgcccagtgaacacacaactacgcattttgaagcaaaagatgcaatgaagggcctt

SEQ ID NO: 1034796 - DNA, 120 bp, Artificial Sequence
  ENSG00000283608_0 (sequence is synthesized)
ccggttattggactttttaccaaaggcccacttctaccttcaagggaaatggctccctagcatttgctcctaaaagcaaatggtctgttcaggcctaaaatttcaaattgtgttcaatag

SEQ ID NO: 1034797 - DNA, 120 bp, Artificial Sequence
  ENSG00000283608_1 (sequence is synthesized)
gctactttttacaggactctgttttccctagaagactgcatgaaacaatttccagaaaatgtaaactccagtcttcatggataatttcctccacctacctaatttgcaccatcgaaacaa

SEQ ID NO: 1034798 - DNA, 120 bp, Artificial Sequence
  ENSG00000283608_2 (sequence is synthesized)
agctttttctaaaaccgctaatcagaaggtcttatgttgttttctattcgaccatagccttttaaaataacagttgaaatgtcaaagaaatcccaagttcaccgcaggtgttcctggact

SEQ ID NO: 1034799 - DNA, 120 bp, Artificial Sequence
  ENSG00000283608_3 (sequence is synthesized)
gggctgttaagtcgtgacagtcaacatgagagggccaaggaaggcgggaacctagggctcaggcggaggggccaggtcagattcagaagagctgggcgctcttttttgtatgagcctggg

SEQ ID NO: 1034800 - DNA, 120 bp, Artificial Sequence
  ENSG00000283608_4 (sequence is synthesized)
tggcacaatcacggctcactgcagcctcggactcctgagctcaagccctcctcccagctcagcctcctgagtggctgggactacagatgcaccaccacactcggctaagttgctcttttg

SEQ ID NO: 1034801 - DNA, 120 bp, Artificial Sequence
  ENSG00000283608_5 (sequence is synthesized)
gttgctcttttgatttcctctctgcaatattgaagccgttttcatctgaaattgattctgtttgtcaaggaagactaaaaccaaacagaaagtgcctgagttctgcttcctccaagcctc

SEQ ID NO: 1034802 - DNA, 120 bp, Artificial Sequence
  ENSG00000283608_6 (sequence is synthesized)
ttgccacagcagtccctgttcagcagtcagggcccactctcagttccttatccccaaccttttgctgctgctctgccctcaccacccagccgcctcccttgcagtttcaacagctcctgc

SEQ ID NO: 1034803 - DNA, 120 bp, Artificial Sequence
  ENSG00000283608_7 (sequence is synthesized)
tcagaaatggattacacacaccaacataccaacaaaccaacaacaattatttcagcctggctggttcgtgagaggacatagcaagaagtctgcaagccaggaagaggccctcaccaggag

SEQ ID NO: 1034804 - DNA, 82 bp, Artificial Sequence
  ENSG00000283608_8 (sequence is synthesized)
gcaagaagtctgcaagccaggaagaggccctcaccaggagatgaatctgcctgcatcttgatcttgaaccattaaggaaaca

SEQ ID NO: 1034805 - DNA, 120 bp, Artificial Sequence
  ENSG00000259327_0 (sequence is synthesized)
ttgtgttgggaatgtgaaagttgttagaattcaaatagagtcactagtgttttaaaaaaacaaaccatgacaaatagagctggggaggccatgaagaggggattctcatgcttgtatgcc

SEQ ID NO: 1034806 - DNA, 120 bp, Artificial Sequence
  ENSG00000259327_1 (sequence is synthesized)
taataccaaaaatgatcacaaaagattctgcaaaaattacaaccttgcacataggctgctgcaacctcacacaaaaattacttctgcaaagacatctgcctagcaactgcctgtccaacc

SEQ ID NO: 1034807 - DNA, 120 bp, Artificial Sequence
  ENSG00000259327_2 (sequence is synthesized)
tcggactggtgtgacctttgttattgatatttgtagccaaggataattatttcaaaaccattatgtaatcctcctcattttttcctttaaaaacctttgtttttctttttttttttcttt

SEQ ID NO: 1034808 - DNA, 120 bp, Artificial Sequence
  ENSG00000259327_3 (sequence is synthesized)
atgaatataatttatatggacaagattcactttaacctaagtgtttccactaattctactaataggtttttaaataagtttactatcttgtgttcccacacagaagacttttctttgctc

SEQ ID NO: 1034809 - DNA, 120 bp, Artificial Sequence
  ENSG00000259327_4 (sequence is synthesized)
tcagaagcatttgtttacaaacaccattggctttcccttcaattcagagaaaacgccctgtccaagtggcacagtgacatcatcatcatccatgagtcaaaccacctgtcctttttaggc

SEQ ID NO: 1034810 - DNA, 120 bp, Artificial Sequence
  ENSG00000245213_0 (sequence is synthesized)
agacagttccctaggcagagactgggcttgaaacagttcctctaaagaagagggtagagactagaactgaatgagatggacatagagatggccaagaaaagcatcgtcctctgccaagtc

SEQ ID NO: 1034811 - DNA, 120 bp, Artificial Sequence
  ENSG00000245213_1 (sequence is synthesized)
atggggtcatgtgtggtggatggtgacatggtgtcctcagctcagagtccagctgggggctcagaagcaaggtcatcaagaccatggcttccatcgtaggcagtcacactctttctctct

SEQ ID NO: 1034812 - DNA, 120 bp, Artificial Sequence
  ENSG00000245213_2 (sequence is synthesized)
tggatcatttgctgtggggaagcaaactgtcatatgagaggacactcaaacagcctctggagtctcatttgctaaggaactgaggactccagcctgagaactcaggcaagtaactgaggc

SEQ ID NO: 1034813 - DNA, 120 bp, Artificial Sequence
  ENSG00000245213_3 (sequence is synthesized)
ctgccaacaaccatggagaaagcctggaagtggatcctccctcagccttcagtcgagacaacagctgcaatgacagccaagccagcgccacccagcttagccacccccagagaactaact

SEQ ID NO: 1034814 - DNA, 120 bp, Artificial Sequence
  ENSG00000245213_4 (sequence is synthesized)
atgggtcagtaatgagtaaattagataattagacaaattttgacatttctgtttctatgttaattatttttcttcagaaaaattctctacgggtaaaatatgttaagagtggttaccaac

SEQ ID NO: 1034815 - DNA, 120 bp, Artificial Sequence
  ENSG00000245213_5 (sequence is synthesized)
aagagtggttaccaacggacattttaaaattaataatcagtttgggaggccaaggcggttggattgctttaactcaggagtttgaggccaacctgggcaacatgacaaaaccctgtctct

SEQ ID NO: 1034816 - DNA, 120 bp, Artificial Sequence
  ENSG00000245213_6 (sequence is synthesized)
ctacttgggaagctgaggtgggaggatcaattgagcctgggaggccaggctgcagtgagtcaaaatcataccatctcaatccagcctgagcaacagagtgagaccctatctaaaatatat

SEQ ID NO: 1034817 - DNA, 120 bp, Artificial Sequence
  ENSG00000245213_7 (sequence is synthesized)
cctgagcaacagagtgagaccctatctaaaatatatacatgtatattaacaattatctcttgaaactaaagtataatcacagtactagtgtactattttccattttattaaatgcactaa

SEQ ID NO: 1034818 - DNA, 120 bp, Artificial Sequence
  ENSG00000245213_8 (sequence is synthesized)
gcgggcttgggtcgtccggccgcggggtcagggaagaccagaggaccactagccccaggaagcttcccaccaccagcaaactgcgtggtgaatttgtaaccgaaaggcccaggtgagatg

SEQ ID NO: 1034819 - DNA, 120 bp, Artificial Sequence
  ENSG00000245213_9 (sequence is synthesized)
tgcaaatatcactggattggaggagctcacttggaaagccagtattcctcctgagctaatgaaaagaaaggctgtcgtcttatgccaaaagcaataccaaccttgttcacgggctgagat

SEQ ID NO: 1034820 - DNA, 120 bp, Artificial Sequence
  ENSG00000245213_10 (sequence is synthesized)
ctagagtgtgtaattcacgaagtatgaatctgctgggtaatgtgatatgaaaagcgaatgcaccatttcttggtgatgattcaggtcagcgttgggacccaggaatctcctgttaatcag

SEQ ID NO: 1034821 - DNA, 120 bp, Artificial Sequence
  ENSG00000245213_11 (sequence is synthesized)
taccctggtgattttgatccagagacggggtctattatctggtcctgttgtcaaggctggtctcaaactcctggcctccagcgatcctccctttttggcctcccaagatgctggtattac

SEQ ID NO: 1034822 - DNA, 120 bp, Artificial Sequence
  ENSG00000245213_12 (sequence is synthesized)
aggcatgagccaccatggtccacccggactccttttcataggagacagttccctaggcagagactgggcttgaaacaggtaacttacaaggcatcctgtgatcataagagaataattcca

SEQ ID NO: 1034823 - DNA, 120 bp, Artificial Sequence
  ENSG00000245213_13 (sequence is synthesized)
tttgaaatcagcagctgaagtccacctgaataattaagtctttcacttgtgttattttcacaggggagacagttttttattcttaagaaggtaggaagctttatttttactgttatgagc

SEQ ID NO: 1034824 - DNA, 120 bp, Artificial Sequence
  ENSG00000245213_14 (sequence is synthesized)
atagctgggcaagtatgcaaatggaaagtgatacctatcatcaaagtattgaggatggtcctttgaaggccctagtattctgagaacatcctgccaccactaccaccccccaactttagt

SEQ ID NO: 1034825 - DNA, 120 bp, Artificial Sequence
  ENSG00000245213_15 (sequence is synthesized)
tttacacagagaacttaaaatatgtgtgaaagagtatatagttatacagttgtatattgatgaataggtatatagttgtaaaagtttatgtttctctgagtcttaataacttttaaaaga

SEQ ID NO: 1034826 - DNA, 74 bp, Artificial Sequence
  ENSG00000245213_16 (sequence is synthesized)
aaagtttatgtttctctgagtcttaataacttttaaaagaaactgcaagtaaactaacacaggaacagaaaacg

SEQ ID NO: 1034827 - DNA, 86 bp, Artificial Sequence
  ENSG00000245213_17 (sequence is synthesized)
cccccataacacaagtttacctatgtactaaaaaaagtgcaaatataccttaaaacatatgcccattgcagtatttgctgggaggc

SEQ ID NO: 1034828 - DNA, 120 bp, Artificial Sequence
  ENSG00000245213_18 (sequence is synthesized)
accttaaaacatatgcccattgcagtatttgctgggaggcagcctttgtagggttgacagaactcgtttagaaaatgaggagctacattcaaagcttcagtcaagataaatcacgtacct

SEQ ID NO: 1034829 - DNA, 120 bp, Artificial Sequence
  ENSG00000245213_19 (sequence is synthesized)
ctctgaacctagggcttttatctgccaaatagtgattacaatactcaaccttatgatgttctcaaaaggaataattgagatcaagtacatatacaaatataaagtacaattagtgtaatg

SEQ ID NO: 1034830 - DNA, 120 bp, Artificial Sequence
  ENSG00000245213_20 (sequence is synthesized)
gtgtgtgtaagatgcttcacatttattatttcacctaacctctacacaacctgttgtgggtattactggtctcaagctgggattcaaagcaggtttttccaacctcagaattcttgccag

SEQ ID NO: 1034831 - DNA, 120 bp, Artificial Sequence
  ENSG00000245213_21 (sequence is synthesized)
actgattagccttctgcatctggaacataaatgttttcaggcagcataatgtgcaagaggtcagagcctaaagctttgttattttttaatttctccaccatgtcaactctgttacaggga

SEQ ID NO: 1034832 - DNA, 120 bp, Artificial Sequence
  ENSG00000245213_22 (sequence is synthesized)
agcccagcagagggaattgtatccattttggggctacactaccccaatgctatgctgcagccaagctgaacttctaagtttctaaatgtaactcacttaccttcaggcctttgtacgggg

SEQ ID NO: 1034833 - DNA, 120 bp, Artificial Sequence
  ENSG00000245213_23 (sequence is synthesized)
agttctttttgcctgaaataccttctgacatcttaacattacgcttagatgtcagttacaaaaaagctttttctagactctctcacatgtcccactccacacccctatatctcttcccac

SEQ ID NO: 1034834 - DNA, 120 bp, Artificial Sequence
  ENSG00000245213_24 (sequence is synthesized)
caatgtactagggtaggtatcctgctaggtacttccactgcaccctctacttttcttccctaatgattaccactatattgtaattgcttaatttctttttcctatacccagataaaaatg

SEQ ID NO: 1034835 - DNA, 120 bp, Artificial Sequence
  ENSG00000245213_25 (sequence is synthesized)
cggggctcggcaccccctcggcccgcgctgcgccagcaccacctgcggagctgcggtgcccacgccgtgccgcgaccccgccgcccctgctccctccacacgcgggcaaacaaaacaagt

SEQ ID NO: 1034836 - DNA, 120 bp, Artificial Sequence
  ENSG00000245213_26 (sequence is synthesized)
taaaaaatattttggaaatctttgggagaaaagctacttcaaattagtctgaaaactatcatttccttctagcaatgtgtaataatgtaatgactgcttagaatttcctgagagggactg

SEQ ID NO: 1034837 - DNA, 120 bp, Artificial Sequence
  ENSG00000245213_27 (sequence is synthesized)
taacatatattttaagcataatattgtaaacaaacaagttcttttgcagtacttgaagatctttttttgtgactatcccccttatatattatgaagatacattttttgtgactatcctct

SEQ ID NO: 1034838 - DNA, 120 bp, Artificial Sequence
  ENSG00000245213_28 (sequence is synthesized)
ttatatgtattgtgaagataaggttttttatagtgaatatcctcctaatgctactagtattgtttgcaatctgtcattattcttagtgtaaaattaaacttcaacagagtacctgtgtga

SEQ ID NO: 1034839 - DNA, 120 bp, Artificial Sequence
  ENSG00000245213_29 (sequence is synthesized)
actcttaacaatttttgaattagtgaagccccaaattaatgatgctttactagatataagggaactggaaaggctgaaatctcaaggtagagtcaaggcagtaattcctagcagcctgtg

SEQ ID NO: 1034840 - DNA, 120 bp, Artificial Sequence
  ENSG00000245213_30 (sequence is synthesized)
tttctcggtgttcttcatgcttcacagaggttggaattcagcttctggtttaagttgtcttaatcttgaccacagtggtaattttactttcccactcttttttcctcaactagaatgact

SEQ ID NO: 1034841 - DNA, 120 bp, Artificial Sequence
  ENSG00000245213_31 (sequence is synthesized)
cggagagttgagctaacagaggtagaatattgattcgtgagataggttcttagagatataagtgtgcgcatggaagaaggaggaatggcgtggaagagcaggtggagacggccacagcag

SEQ ID NO: 1034842 - DNA, 120 bp, Artificial Sequence
  ENSG00000245213_32 (sequence is synthesized)
ggcttagaaattccctctatccaaagcctggttgtgaggaatttgatagaaaggattgtgtgggctaagacatcagtttttatggtaatatttgagggagaaaattgagatcttggaatg

SEQ ID NO: 1034843 - DNA, 120 bp, Artificial Sequence
  ENSG00000245213_33 (sequence is synthesized)
catttgaaaaaaagattagttttaatacaattatcactttacctgagaccacatctcaaaatcaaaatcagtgataatgtctttgcattaatgttggaaagacttatgctacttctgcat

SEQ ID NO: 1034844 - DNA, 120 bp, Artificial Sequence
  ENSG00000245213_34 (sequence is synthesized)
aattttctggtaaattatgtaatgagtggtcagtataatagcatggttattgtgaagggtaagatagtatgtcatttttttccctcttaacatgtaaaggctattttccatattatacat

SEQ ID NO: 1034845 - DNA, 120 bp, Artificial Sequence
  ENSG00000245213_35 (sequence is synthesized)
tcgaactcctgagctcaggcaatctgcctcgtactcccaaagtgctaggattacagctgtgagccaccacacctaggctatcctaagttttaagatggtaacagctgattcttttttctc

SEQ ID NO: 1034846 - DNA, 120 bp, Artificial Sequence
  ENSG00000245213_36 (sequence is synthesized)
tttttctcgtactgtctcacatctgcaagttttttgctttaaaacaaagctcagttatgtaaagttttacagtgaaacaatttcaattatcaagatagataaagaattataccaaactac

SEQ ID NO: 1034847 - DNA, 120 bp, Artificial Sequence
  ENSG00000245213_37 (sequence is synthesized)
cttcatgtgctttttggcttggcttacaatagctagtatatcagggagttctgtagatgccataatttcaaaatttccacaaaatatctgaagtgatatcctcatgaacagcatggttcc

SEQ ID NO: 1034848 - DNA, 120 bp, Artificial Sequence
  ENSG00000245213_38 (sequence is synthesized)
ggaaatgtagaatggattgtagttaggtgtattattggttggctgaaggactgtacatcatattgtataaaagtccactatatagagtacctggaagagggactgtcaagtgttaaacac

SEQ ID NO: 1034849 - DNA, 120 bp, Artificial Sequence
  ENSG00000245213_39 (sequence is synthesized)
atctcacaacctgttactactcagctaaatttaagggaatattttccactcagattggactacccattgttccttggctctgcttgcattttcgaagtcattggttttgttgctctgtag

SEQ ID NO: 1034850 - DNA, 120 bp, Artificial Sequence
  ENSG00000245213_40 (sequence is synthesized)
gccaggagtgtcttctctcaacttagtctgagtcaaactctcaaactcctatgcatcctctgaagctcagttctggtgccaccttttcttctccttcaggagatcttccttatatcttcc

SEQ ID NO: 1034851 - DNA, 120 bp, Artificial Sequence
  ENSG00000245213_41 (sequence is synthesized)
ttcatcctccccagtacacgcttatcccgctgctctcacattttaccgtgctcttattacattttggcttgtcattcatttgactcatagcacatgcagcttgtactgttatcatgtatg

SEQ ID NO: 1034852 - DNA, 120 bp, Artificial Sequence
  ENSG00000245213_42 (sequence is synthesized)
atcttagtaagaccttataattcctactcaattataacttccttgagggaagagattgaaatatgtgatactctctctgacatcaccacttagatgtgtcttaaggcaagtgaagttaat

SEQ ID NO: 1034853 - DNA, 120 bp, Artificial Sequence
  ENSG00000245213_43 (sequence is synthesized)
ttgcctgtgtttttgtttttccatctgcttcatggagacagtcatgcccttcctatctatctcacttcctttttgaagataaaatacataaggtgtttgcatttcacagagctactacaa

SEQ ID NO: 1034854 - DNA, 120 bp, Artificial Sequence
  ENSG00000245213_44 (sequence is synthesized)
ccatctgcaagtcaggaagagacctatcatcagaaaccaaccatgctggcaccttgatcttggactttgagtctccagaactgtgagaaataaagttgttgtttaagccacctagtctct

SEQ ID NO: 1034855 - DNA, 120 bp, Artificial Sequence
  ENSG00000245213_45 (sequence is synthesized)
gatattctgctacagcagtttgagcagagtaatatagttggctatccagttaaacgccctatcacctacagccccatcctcattgcctacttccttctagagagtgagctcccatagatc

SEQ ID NO: 1034856 - DNA, 120 bp, Artificial Sequence
  ENSG00000245213_46 (sequence is synthesized)
tggctaagtgagtagcaaggaagcaatgtaatcttgcgacctgagaacagccatttatcccagctgttcacacttgatctaagtttgtccaacagattcactctagggggaatttaaagc

SEQ ID NO: 1034857 - DNA, 120 bp, Artificial Sequence
  ENSG00000245213_47 (sequence is synthesized)
agggacttagaaattctagttagtttctgtgagatgccttaaaagagaaagtatttgaagcctgggctgtggaaccatgtgcatgaatatttttggggagaagaaaaagaataaagtaga

SEQ ID NO: 1034858 - DNA, 120 bp, Artificial Sequence
  ENSG00000245213_48 (sequence is synthesized)
tatgcaaatgtgtgaagagaggaagagatgctaatccatgagagtagcctaagagagactggaggagggaccttggctgtgaactctgaagtgctgacttccagtctcttaagagtcccc

SEQ ID NO: 1034859 - DNA, 120 bp, Artificial Sequence
  ENSG00000245213_49 (sequence is synthesized)
aatatttatatgtgaatgaacaaatagaaatatcatcaagtaaaactgaaggagttgatttgggttatttcttgtgtgaaacggatgaaaagaaaaatattagaaaatttgattacgtta

SEQ ID NO: 1034860 - DNA, 80 bp, Artificial Sequence
  ENSG00000245213_50 (sequence is synthesized)
gcaccccggctccccgccgccggagttgagggggaggcgcgctctccgtaagagccggaggcggggcgccatcgccctcc

SEQ ID NO: 1034861 - DNA, 120 bp, Artificial Sequence
  ENSG00000245213_51 (sequence is synthesized)
ggccgggggagcccggggctgcgaacacccccagacgggcggctgcgggaggggaggctggaccaaggggcctggtccaccggaccagcggtggcggcatcggcatctcgcctccttcag

SEQ ID NO: 1034862 - DNA, 120 bp, Artificial Sequence
  ENSG00000245213_52 (sequence is synthesized)
cggtggcggcatcggcatctcgcctccttcaggcctgcacgcgccacaggccgcagcctggaccaaccccgcgtccccgggccgtgagcgctgcggtcccggccccccagagcgggacgc

SEQ ID NO: 1034863 - DNA, 80 bp, Artificial Sequence
  ENSG00000245213_53 (sequence is synthesized)
gagagcggccgcccgagccgctgccgcggcagcgcgggtgtcggcgacggagcccggggcggggaagagcggaggaaggg

SEQ ID NO: 1034864 - DNA, 120 bp, Artificial Sequence
  ENSG00000245213_54 (sequence is synthesized)
gtggagccttgtctatctagttcgttattgttatccgtgtctgattgttcatgttggaaggcatactttctgaactcttctcaagtgatgataaaatggactagttgataaatctttctg

SEQ ID NO: 1034865 - DNA, 120 bp, Artificial Sequence
  ENSG00000245213_55 (sequence is synthesized)
gtacaggttttcaaaacttccatctatccactgtgctttcatgttaaagaaagaatggaaacatcatctctaaaacaagataaacagctctggggctgaggaggccagcctgctactggg

SEQ ID NO: 1034866 - DNA, 120 bp, Artificial Sequence
  ENSG00000245213_56 (sequence is synthesized)
tagttttgatatcagaagtatttcaaaacctctcccttgtggaggatgagttatatacccaccctggggcatcaacatgaagctgctgcccagtgtgccattgacggaacgctgcaggtc

SEQ ID NO: 1034867 - DNA, 120 bp, Artificial Sequence
  ENSG00000245213_57 (sequence is synthesized)
ggacaggccgctcctgctaaagtgtaacttaagttattctcacagaagtaccatcccacagaacccacccgggggactgtggttctacactgactcagtgatcagagtggggacattttc

SEQ ID NO: 1034868 - DNA, 120 bp, Artificial Sequence
  ENSG00000245213_58 (sequence is synthesized)
ttatccttccagagactgacaagagaggggacctgaaggtaccttgatctcacagctgcatcctgatacatatatttttaatactgtgatgggaataaattactctgaggctcccaataa

SEQ ID NO: 1034869 - DNA, 120 bp, Artificial Sequence
  ENSG00000186615_0 (sequence is synthesized)
gcgcctgcccacgcgctccggtactcgctgctcgcggctggccggctcgggattccgggctttcttcccgagaccgcgtcccccagctgggccgaaggtggacgctcaggggctggaggc

SEQ ID NO: 1034870 - DNA, 120 bp, Artificial Sequence
  ENSG00000186615_1 (sequence is synthesized)
tcagcggaatcccctgcgttcagtagccccgctctcccctgtcccgaaggattactctgcccctcagcggttccagtgccctcaaagcaatctgtctctgaagtactggctatcttctga

SEQ ID NO: 1034871 - DNA, 120 bp, Artificial Sequence
  ENSG00000186615_2 (sequence is synthesized)
gcgtgtgccagaagatccagctttgttgaaaagcgaagccgttagtcccttaatacaaaggagacaaattgatttatgcctggggcaccatcaccaaaagaagaggaaatggatgcaagc

SEQ ID NO: 1034872 - DNA, 120 bp, Artificial Sequence
  ENSG00000186615_3 (sequence is synthesized)
cttcccagaacaacagggcagatccgggccccttctccaaccctgcttgcctttctggagtgctgcatcctccagagatggaagggccggccatcgtatgtcagtctgatttctgcactt

SEQ ID NO: 1034873 - DNA, 120 bp, Artificial Sequence
  ENSG00000186615_4 (sequence is synthesized)
cagtgagagaacactgtggaatggagggaataaatgactctcagctgcagttttcgagttttctgtctctctggaaatcagccggctcccgcttgctccatttactgtgtaccagccaat

SEQ ID NO: 1034874 - DNA, 120 bp, Artificial Sequence
  ENSG00000186615_5 (sequence is synthesized)
acaaaatgaaatgctcatgtcgtaatttaaattacgcgtatcccagaggagccccatgcaaagcgcacatcggtgtttaacaatctgcgagcccgatctcggagacagtttagaataatc

SEQ ID NO: 1034875 - DNA, 120 bp, Artificial Sequence
  ENSG00000186615_6 (sequence is synthesized)
cactcctcactgctcaaaggctgcaggccttctccaagtcagagcttgtcaactgaggacatgaaagagctgcagcgcagcagaacagcagatcacattcggtgagctgccccacttgca

SEQ ID NO: 1034876 - DNA, 120 bp, Artificial Sequence
  ENSG00000186615_7 (sequence is synthesized)
ctcttatttgtgcattacaggatcggagaggcggcatgccacagtgggtgcaggggcagtctcgctacacggactgggtttgatttggcttcaccactcactagctgtgtgacccttggc

SEQ ID NO: 1034877 - DNA, 120 bp, Artificial Sequence
  ENSG00000186615_8 (sequence is synthesized)
aagtcacctgacctttctctgtctccatttccttagctgtaaattggagaacataacagaagctgactcattactggtgttggaaggattacaggaatatatacaaagcacttaggaaac

SEQ ID NO: 1034878 - DNA, 120 bp, Artificial Sequence
  ENSG00000186615_9 (sequence is synthesized)
tccagatgtatataatgtaattttagaggtcttttactgtggtgaaatatatatcaaatttaacattttaagcctactattcagtggcattaagtgcattcataccattctgcagccacc

SEQ ID NO: 1034879 - DNA, 120 bp, Artificial Sequence
  ENSG00000186615_10 (sequence is synthesized)
accactatccatctccgaaactttttcattatctctttttttttttttcattatctcaaactgaaactgttcacatgtattcctcctcattgtcccctgcgcccagcacctggtaatcac

SEQ ID NO: 1034880 - DNA, 120 bp, Artificial Sequence
  ENSG00000186615_11 (sequence is synthesized)
tgctctactttctgtccctatgaagaaagacatctgattattctaggtaccttatataagtggaatcatacagtatttgtcctttgtaactggcttttcacttagcataatatctttaag

SEQ ID NO: 1034881 - DNA, 120 bp, Artificial Sequence
  ENSG00000186615_12 (sequence is synthesized)
gttcatccatgttgtagcatgtttcagaattttattccttaaggctgaatactatttctttgtatgtttacatcccatttcatttattcattcatctttccatgggcattagggttgatt

SEQ ID NO: 1034882 - DNA, 120 bp, Artificial Sequence
  ENSG00000186615_13 (sequence is synthesized)
acacatttttgctactgtgaataatgccactatgaacattggtacacaagtatctgtttgtggtggaccagatgaggcaaatgtggtgcatatataccatagaacactatgcagccataa

SEQ ID NO: 1034883 - DNA, 120 bp, Artificial Sequence
  ENSG00000186615_14 (sequence is synthesized)
agaacactatgcagccataaaaaagaatgaagtcacgtcctttgcagcaacatggctgcagctagaggccattatcctaagtgaactcatgccggaacagaaaaccaaataccatatgtt

SEQ ID NO: 1034884 - DNA, 120 bp, Artificial Sequence
  ENSG00000186615_15 (sequence is synthesized)
aaacattgagcacacatgaacacaaacatggaacaatagacgctggggactacttgacggggagggcatggtgggggattgaaaaactacctgttggctattatgcacactacttgggtg

SEQ ID NO: 1034885 - DNA, 120 bp, Artificial Sequence
  ENSG00000186615_16 (sequence is synthesized)
acagaatcattcatacgccaaacctcagggataggcaatttacccatgtaacaaatctgcacatgtaaacccctgaacctaaaataaaagttaagctgggcgcagtagctcatgcctgta

SEQ ID NO: 1034886 - DNA, 74 bp, Artificial Sequence
  ENSG00000186615_17 (sequence is synthesized)
atcccagcacttttggaggccaaggtggccgaaaccctatctctacacaaaatacaaaaattagctgtgcgtag

SEQ ID NO: 1034887 - DNA, 120 bp, Artificial Sequence
  ENSG00000186615_18 (sequence is synthesized)
atttatgaagccggggtaaaaatctagaaactgctgcgcgaggagggatgggcccggatctctccttattcgtttgctctttgctgaaaggatggcagcgatcctccccgtccactggca

SEQ ID NO: 1034888 - DNA, 120 bp, Artificial Sequence
  ENSG00000186615_19 (sequence is synthesized)
tcagccaaaaaacttgcattttaaagaaagttttccagaactgggcttgttccattcaataagtagattgagttacaactatgcacttagcttcatgtgacactgaagggaatatgaaga

SEQ ID NO: 1034889 - DNA, 120 bp, Artificial Sequence
  ENSG00000186615_20 (sequence is synthesized)
agaaagaagacaaattctgcttatactctgataggacgacctctgctattttccttctgaagctttgcagagagcagtgaattgtaatgaaaggagatttgggagtaaagactccgtgag

SEQ ID NO: 1034890 - DNA, 120 bp, Artificial Sequence
  ENSG00000186615_21 (sequence is synthesized)
gtattgaagtctctaggggaacctcattatagcattcctcttcccagcctggattctgaacaatttgagaaataaaaagcaaatgtgaagcacactgaggccaaagtatcacctttagaa

SEQ ID NO: 1034891 - DNA, 120 bp, Artificial Sequence
  ENSG00000186615_22 (sequence is synthesized)
gaagaggaaggagataaagctgaagcaagcaagccagggcaagtcactttgacaccccagggacagaaagggaccaggagtatggtcagctgcaactaggaactggggaaagatgttccc

SEQ ID NO: 1034892 - DNA, 120 bp, Artificial Sequence
  ENSG00000186615_23 (sequence is synthesized)
gcatcactggttttttccgctcctcagatgcgtgacgttggatgagtccattaatccctctatccattatcatcttttctaaaccaaaggattttactagatcatctctgaaatttcttc

SEQ ID NO: 1034893 - DNA, 120 bp, Artificial Sequence
  ENSG00000186615_24 (sequence is synthesized)
caggtctacagtggtatgattatataaattactagacccatagtaaatcatctaagagctcatatgaccttatttagaaaggaaattacaaatcttttacacttggatctggaattgctt

SEQ ID NO: 1034894 - DNA, 120 bp, Artificial Sequence
  ENSG00000186615_25 (sequence is synthesized)
ttgtaaatgtgaagctactatgagttgaattacacttttgtttcagagattgactttatgaagatccttaggaagttttaaagttgaataagattcttcttcttacctttaatcatcact

SEQ ID NO: 1034895 - DNA, 120 bp, Artificial Sequence
  ENSG00000186615_26 (sequence is synthesized)
tttacatctcatttgtggagaatcaaaagtcactggaatcaaaagtcactgacccacaaagtgtcttcctcttgcaagatgggcaaatggatccacaacaacataaaacccagcatcaca

SEQ ID NO: 1034896 - DNA, 120 bp, Artificial Sequence
  ENSG00000186615_27 (sequence is synthesized)
ctgacggttacagatctgtttctgccgggttgagtctcctggccaccagaatcccagagctctcacccaggctgagatgcaaaagccacaagcacagtggggagagaggaaaataagaga

SEQ ID NO: 1034897 - DNA, 120 bp, Artificial Sequence
  ENSG00000186615_28 (sequence is synthesized)
aggagcccatgactttgagatgtgaaataaaggagaaccaacaatactctgtgcctactcatgagcacctcggtgtactccagaactttcatttcaaaaagttaaataggaacctttgtc

SEQ ID NO: 1034898 - DNA, 120 bp, Artificial Sequence
  ENSG00000186615_29 (sequence is synthesized)
cagagattggctcagatgttctcattagatcttagcttgaagcctcttctgccagttcctccctgtttttatagtaagtctcataaggcatggtcctggacccacagccctgtatcatat

SEQ ID NO: 1034899 - DNA, 120 bp, Artificial Sequence
  ENSG00000186615_30 (sequence is synthesized)
tgcacttatgagcctggatcttcagacacagagctgtgcctccttcacactctcttttcccttccctccatctagaatccatatacttttatcatattatgcagataatgacaatgcaga

SEQ ID NO: 1034900 - DNA, 120 bp, Artificial Sequence
  ENSG00000186615_31 (sequence is synthesized)
gctacggtttagaaataacctgggttgttgaataacaagagaacagagctgccctgctggccaggattatttatatcttagctgttgtgaaaggggtggggagagagagagagagacaga

SEQ ID NO: 1034901 - DNA, 120 bp, Artificial Sequence
  ENSG00000186615_32 (sequence is synthesized)
cagagacagagagcatctttttcctttaaaccactgcattttggattttgggactctgttatactagctaggcattaccctaactaatgcatatgaaaatggatgtaggtactgcaatgg

SEQ ID NO: 1034902 - DNA, 120 bp, Artificial Sequence
  ENSG00000186615_33 (sequence is synthesized)
tgatggaggggtgcggtgggtggaagtaaaaatgcttaaagaggagttttagagaaacttgcttatgtgatatataatgcaatagtcttattttttcctgagtaacctctagtcataagt

SEQ ID NO: 1034903 - DNA, 120 bp, Artificial Sequence
  ENSG00000186615_34 (sequence is synthesized)
cttcattacttctcattgcagattctggcttttatttttcccaaaaatgtcaataggctgagctcaatcttatataagcatacggtaatttaacaaggtctacttgcatgtgggttacag

SEQ ID NO: 1034904 - DNA, 120 bp, Artificial Sequence
  ENSG00000186615_35 (sequence is synthesized)
aattattactccatttttagacaggaaactgaagttatatagcaaataactgatgaaaacagtatttcaatcctgacttatcagactccaaagccatttcccacctaaatagttattagg

SEQ ID NO: 1034905 - DNA, 120 bp, Artificial Sequence
  ENSG00000186615_36 (sequence is synthesized)
tttatttttcccttgaaacatgtgagtatagtagagattttattctctgtgttgtcatctttagagtagggaaaccccactccatccaatggcaggtgatggtccacagggatgcagtac

SEQ ID NO: 1034906 - DNA, 120 bp, Artificial Sequence
  ENSG00000186615_37 (sequence is synthesized)
agaatgtggccaagactcttaagactaatgttctctttggagaaagacaagtgagaaacttcagccaagtcatcctcttgccaaaattactccttggatgaaattatgactcatttggaa

SEQ ID NO: 1034907 - DNA, 120 bp, Artificial Sequence
  ENSG00000186615_38 (sequence is synthesized)
ggaatgaaaacaggtttaaaattggcaaaacactgcagcattctcggactggccccaggggcttcatttctggccaaaattgtaacacaattaacagtatttgcatatccctttgaaaaa

SEQ ID NO: 1034908 - DNA, 74 bp, Artificial Sequence
  ENSG00000186615_39 (sequence is synthesized)
cactgacggaggttgcagtgagccgagatcctgcaactgcactgcagcctggataacagagcgagactcagtct

SEQ ID NO: 1034909 - DNA, 120 bp, Artificial Sequence
  ENSG00000186615_40 (sequence is synthesized)
aactgcactgcagcctggataacagagcgagactcagtctaaacaaacaaacaaacaaaaaaatatatatatatatacactcacacacaaacacaaatgattctatttaaaaaatatcat

SEQ ID NO: 1034910 - DNA, 120 bp, Artificial Sequence
  ENSG00000186615_41 (sequence is synthesized)
tttataactgtattacttggctgagattttagtacttcataattttctgcaactgagcagaaaggggaaaaatctaatgcttggcactacattttgctttccagtttcaaataacagttt

SEQ ID NO: 1034911 - DNA, 120 bp, Artificial Sequence
  ENSG00000186615_42 (sequence is synthesized)
taaatctcagagctaaacagcaacagattaaaaaagaaatttatatatataattaactgtataactgattacacttacctgagtatacacttgattagtctagtattcttcaagtataat

SEQ ID NO: 1034912 - DNA, 120 bp, Artificial Sequence
  ENSG00000186615_43 (sequence is synthesized)
tttccaaataataatacatttggcgaattgaaaaagaaataaataatgatacgaaatttattgacagctaaattaaaatacgattttgcaaacagcttcatataattcaaatatattccc

SEQ ID NO: 1034913 - DNA, 120 bp, Artificial Sequence
  ENSG00000186615_44 (sequence is synthesized)
agaagtaatttttttgtatatttcatgcaaaatatttcaagtaataatgctgccagaattatttctcataggcaaatactgaagttagtattgacaaaaacttgaagctgggtgaagcct

SEQ ID NO: 1034914 - DNA, 120 bp, Artificial Sequence
  ENSG00000186615_45 (sequence is synthesized)
tgcacagtatctagtccatcttatcatattaatgacaaagaaactgaaacccaggaaaaattattaataagtctgttaaagcaaactaaatatggcctgagaagaactccgtacttttat

SEQ ID NO: 1034915 - DNA, 120 bp, Artificial Sequence
  ENSG00000186615_46 (sequence is synthesized)
atttgagtccttgtagacaaagagtaacctagcttaataggcagacgagattgaaaacccaatttagcagtatatgcttgtaaagatacctgagtcttggccaatcccagcagccgtact

SEQ ID NO: 1034916 - DNA, 120 bp, Artificial Sequence
  ENSG00000186615_47 (sequence is synthesized)
gttcaaactgtgttcaaataaggcaaacgccaacctgtaaacaatccagctatttctgtacctcatttccgatttttgtcagtttcctttttttttatctataaatttgttccgaccacg

SEQ ID NO: 1034917 - DNA, 120 bp, Artificial Sequence
  ENSG00000186615_48 (sequence is synthesized)
atctataaatttgttccgaccacgaggcatccctggtgtctctctaaatctgctgtgattctgggggctgcccgattcgcaaattgtttgttgctcaatcaaactcctttaaatttaatt

SEQ ID NO: 1034918 - DNA, 120 bp, Artificial Sequence
  ENSG00000186615_49 (sequence is synthesized)
caactgaagtttcttttaacaagtacaagatcatcattattttttgccaacccttataattgatccctctatctttagtccttttatttattttcttactcaattactgaaataaagagg

SEQ ID NO: 1034919 - DNA, 120 bp, Artificial Sequence
  ENSG00000186615_50 (sequence is synthesized)
atcccctgcgttcagtagccccgctctcccctgtcccgaagatcagggatagcagaaatgaaagtataatggaagcagctggaggattccaggtccactttcacccaagtaatggagacg

SEQ ID NO: 1034920 - DNA, 120 bp, Artificial Sequence
  ENSG00000186615_51 (sequence is synthesized)
gaaggttcatcgaaacttcttcagctgcagatctagaagtcattagctattctagcaaagtatctgtcacagaaaggtgcttcataaaggtctgcactgtgctcttttgacctgtgtctt

SEQ ID NO: 1034921 - DNA, 120 bp, Artificial Sequence
  ENSG00000186615_52 (sequence is synthesized)
caagcatgtgctgtcataacagattaaagatgactgaaaattatctgccactcattgcgtgaaaggtgggatctgtagacctccctcttgaatttgggagggttctgtgactgctgtgac

SEQ ID NO: 1034922 - DNA, 120 bp, Artificial Sequence
  ENSG00000186615_53 (sequence is synthesized)
caatgaatatggcagaagtgacgctttgccaacttctgggtccaggctatacgagacaggcagttccactcactgtctcttagatccatgtaaaaagttcatctaccctgctggaaaaac

SEQ ID NO: 1034923 - DNA, 120 bp, Artificial Sequence
  ENSG00000186615_54 (sequence is synthesized)
agaggggctcagctgcaccatcttccaactgtccccatcaagatgacagaaatataaatgaagccttcttgaactccagaccatccatgctacaagctaaatgccaccaagcgaccccag

SEQ ID NO: 1034924 - DNA, 120 bp, Artificial Sequence
  ENSG00000186615_55 (sequence is synthesized)
ttaataccatgtggagcaaaaatatcacttaaccaagcactgcctgagtttctgaccccacagaattctgaccccatacaaataaaataatttttgtaattttttataattcgtcatgta

SEQ ID NO: 1034925 - DNA, 120 bp, Artificial Sequence
  ENSG00000186615_56 (sequence is synthesized)
atagataaatggaacagccttcttccagtcttttaaatagctgcaagaaatcttattcaagcagaaggaagtttctactttgttcatacagtctcaagacatccctggagcctttcaagg

SEQ ID NO: 1034926 - DNA, 120 bp, Artificial Sequence
  ENSG00000186615_57 (sequence is synthesized)
gaaatttgggcagaagtaggtagagaggtaaagctattatgtaacattacttaacatgattaaaaccaccttaatgtctcccatcctcaaaggctgccagtgaattggaaattaatggat

SEQ ID NO: 1034927 - DNA, 120 bp, Artificial Sequence
  ENSG00000186615_58 (sequence is synthesized)
taaatgaggacagagaaactagtatttgtgcatatgcactgtgccaggtatttaacgtatcttagctcatgtggtcttcgaaacaaccccatattgtagtatcaggctcacacgggtaac

SEQ ID NO: 1034928 - DNA, 120 bp, Artificial Sequence
  ENSG00000186615_59 (sequence is synthesized)
taactagtgcaaagacacaaggctcacaaactgctacttgaccctagagctctttgactccgattcccatgtacgtgccccaataccatgttgactcccaaggtgtaaatcttcaggtat

SEQ ID NO: 1034929 - DNA, 120 bp, Artificial Sequence
  ENSG00000256311_0 (sequence is synthesized)
caaagttcttccaacaatttaagccaggaattgccccactgtttccgaggtgatgagagcctctgagagatgagaaaactgaggcacatagggttaagtagattgtccaaggtcactgct

SEQ ID NO: 1034930 - DNA, 120 bp, Artificial Sequence
  ENSG00000256311_1 (sequence is synthesized)
gataactgcagcactgggatttgaagcactgaactctgctgactcctgagaagcatacctctaacagctgagatttccaaggctttttggccaatgtgtttgtcaacatctgcaacaaat

SEQ ID NO: 1034931 - DNA, 120 bp, Artificial Sequence
  ENSG00000256311_2 (sequence is synthesized)
cctgggcaaagcctccttttttgtctcctctttttatctcccagtgcagtaggaagccatcagatgattttaaatggagaagtaagacacttggatctgtgcctaaaagaatcactctgc

SEQ ID NO: 1034932 - DNA, 120 bp, Artificial Sequence
  ENSG00000256311_3 (sequence is synthesized)
tgttgagttcctgagaagcagactctgagatagagatcattttgtgggaagcttattgggaggtgctcttgggatccacacctgtagaagcctctttgctccccacacttcaggactggc

SEQ ID NO: 1034933 - DNA, 120 bp, Artificial Sequence
  ENSG00000255968_0 (sequence is synthesized)
aaagccacctttgggaaagggcctgtttcatgccgcaagtgtaggagtataagtagaaaataacaggacaaaaagcacaaaacataaggctcacattcgttgtgcttgttatggtaggaa

SEQ ID NO: 1034934 - DNA, 120 bp, Artificial Sequence
  ENSG00000255968_1 (sequence is synthesized)
gagattgtggcaaaacctggaaacacagccacgttacccaggaggcaaaaggactgcaggggagagagcgtgaacaaggaagcttgcctggcttccaattctgctccgttcccacactgg

SEQ ID NO: 1034935 - DNA, 120 bp, Artificial Sequence
  ENSG00000255968_2 (sequence is synthesized)
gactcagttggttgccagttactgcgtgaattttctggcgctgggacaatgaccttccctgcatccacaggagccctctgagggagctggccactctgcctcctagtcaccgtgaggctt

SEQ ID NO: 1034936 - DNA, 120 bp, Artificial Sequence
  ENSG00000255968_3 (sequence is synthesized)
aaggtcttcagcattgcttacaaactggcacgtaaacataatacatgcaaaacttgcatcctttgcagttccaggaagagagagaatggaaatgtccagagatctgttcttgattttgtg

SEQ ID NO: 1034937 - DNA, 120 bp, Artificial Sequence
  ENSG00000255968_4 (sequence is synthesized)
tttttatcatggactttgtctactgagtactattttaaacaagttttggtttttgtttcatttttgaaccttgatctagagcttgatgaatagattcctgttctcttcactaagtcttga

SEQ ID NO: 1034938 - DNA, 120 bp, Artificial Sequence
  ENSG00000255968_5 (sequence is synthesized)
cgtggagtggagttgataactgacagtggcgtctacctatttctgttgagataaaaaacagggaacttggtgtgcttttgttttaaagtgttcatatgaaggggaaatatgtgcaagaat

SEQ ID NO: 1034939 - DNA, 120 bp, Artificial Sequence
  ENSG00000243224_0 (sequence is synthesized)
gatgatgattgatccgccgtgcgcacgccagcgcgttcctctgtggcaggagaggggggcctgcgtgtgaccgagcgtgcgtgggaggacgcgcgtgtgtgtctgtgcgccctgatcacg

SEQ ID NO: 1034940 - DNA, 120 bp, Artificial Sequence
  ENSG00000243224_1 (sequence is synthesized)
gtggtctgtgggtggggcggatcgtgcgcgcgcgcccgatctgtgcgccccaagccagcagccttgccttactggtaccagtacctgcctgctgctaccaactagtcaacatgtggcatc

SEQ ID NO: 1034941 - DNA, 120 bp, Artificial Sequence
  ENSG00000243224_2 (sequence is synthesized)
ttccaggccactgtgatgagtcagggatgagcatctgactctggttggtccaatcagcttgtccagggactttggctgggaagattggaaaggaggccagctttttgggctggggttgct

SEQ ID NO: 1034942 - DNA, 120 bp, Artificial Sequence
  ENSG00000243224_3 (sequence is synthesized)
gagagatgtgatgatgaaatgtgtggcctacctggcatctggccccagcttcagctccatttactgtcttgctccccaccctcactagcctgcattgaggcctcctctgtgccccccaac

SEQ ID NO: 1034943 - DNA, 120 bp, Artificial Sequence
  ENSG00000243224_4 (sequence is synthesized)
agagcccagctacacagaattgaagggttttctcattcatcttcctgcgctcaccctgaagactgggcctatgtcatctgctaaccactgtccccccagcactcacagtggaaaatggag

SEQ ID NO: 1034944 - DNA, 120 bp, Artificial Sequence
  ENSG00000243224_5 (sequence is synthesized)
tgttatgcagccctgcagcttgccttctagaacagttcacaggcaaggcctcccacactgaaccctgctacagccagatggtgccagcaacacagagctacttgttacatcagctcagac

SEQ ID NO: 1034945 - DNA, 120 bp, Artificial Sequence
  ENSG00000243224_6 (sequence is synthesized)
taagccacacccacaggagcatctggtgattccacagaaccacaagagacttgacctcctggaaatgaattaaccaagattaatgaaaaagattaaggtcatgtgccctgtaaaaatgtc

SEQ ID NO: 1034946 - DNA, 120 bp, Artificial Sequence
  ENSG00000243224_7 (sequence is synthesized)
cctcactggatgaactgtgacaaagtagggtactgcgtggtctccccagctgaccctctccatgggtcattctttgcttttatcactacctggcacaaatctttacgtatttgtttatcg

SEQ ID NO: 1034947 - DNA, 120 bp, Artificial Sequence
  ENSG00000243224_8 (sequence is synthesized)
tcttccctccaccagtagttaggtgtttgcccttgctgtatcccctgtgcctagaacagtgcccaacattggcaggtggccaataattgcaaaataagcaaatgtatgaatgaaccatta

SEQ ID NO: 1034948 - DNA, 120 bp, Artificial Sequence
  ENSG00000255966_0 (sequence is synthesized)
tttcactggctgcgccgggggatattgagggcaggcagaggcaccagtgtggtcacgacagccagctcacagcctccggttcgaaggtgactcagcagagaagacttgaggagctggaga

SEQ ID NO: 1034949 - DNA, 120 bp, Artificial Sequence
  ENSG00000255966_1 (sequence is synthesized)
tcatgatctgaacttccacgagcctgggccggtctgctgccaacctttggagatgggattagggaacacgagtgggggtggggtgaggcacacggcagaaagcaacccttggtctagagc

SEQ ID NO: 1034950 - DNA, 120 bp, Artificial Sequence
  ENSG00000255966_2 (sequence is synthesized)
aggttttctcaactgtgacgctattgacattgtgggccgtgtgattctttgttgaggggccatcctgtgcactgcaggatgttgagccacatccctggcctcttcccacaaatgctggta

SEQ ID NO: 1034951 - DNA, 120 bp, Artificial Sequence
  ENSG00000254619_0 (sequence is synthesized)
atactgagtgtttttggaagagtccttgttcctgatgctgggcatttctggaagaggcctttttcactggggcctccctaagcatgggactaaggtgaccgccatgatgaaagaccagat

SEQ ID NO: 1034952 - DNA, 120 bp, Artificial Sequence
  ENSG00000254619_1 (sequence is synthesized)
gcctggcaagccactttctcctatgttcatgcatgtctagatttctcaatgaaaaacgtagttgaactcatgaaagcctatctttaaaaaatattaaatagctaatcttataaaccccta

SEQ ID NO: 1034953 - DNA, 120 bp, Artificial Sequence
  ENSG00000251616_0 (sequence is synthesized)
gccccgctagacgaagagctgaccgctcagagaatggttacgaaagggacaaacaagccaacaaacgaagtccagtctccccatttgttgtaaccgccgggtcccctttggttgccatgg

SEQ ID NO: 1034954 - DNA, 120 bp, Artificial Sequence
  ENSG00000251616_1 (sequence is synthesized)
cacttgaggccagaaagtcctcagctcccaggtgaagtcctccaccagctgcccattcctgggggtggatgccgtgacagccacgccagattgtcagctacccagaaggagaggaggtgg

SEQ ID NO: 1034955 - DNA, 120 bp, Artificial Sequence
  ENSG00000251616_2 (sequence is synthesized)
aggaagagcgatggcgcccccatgtggcaacacaagcactgcgatttcacacaagaccaaatcagaattggccggaggggaacgtcagattcttagggagtgttactccaactaatgcta

SEQ ID NO: 1034956 - DNA, 120 bp, Artificial Sequence
  ENSG00000251616_3 (sequence is synthesized)
cactcagggcgacttcttggaaggcaaaagccccatagtctagccatacaactttccagaaaagtagcactcttcaaaacagctggcattaaaattcttggctctgccatccacccgttc

SEQ ID NO: 1034957 - DNA, 120 bp, Artificial Sequence
  ENSG00000251616_4 (sequence is synthesized)
tgtgagactctttcctcatccccaaaaatggaaggtctgatgacttcaaaaagagttttaccgtttttcccctcattgaaaataatagaaaacagtaaaatactgcatttctgccttcaa

SEQ ID NO: 1034958 - DNA, 120 bp, Artificial Sequence
  ENSG00000254614_0 (sequence is synthesized)
gagactcccgagacccccccaagtcagggcttttcgctggtctcgcagccccagcccagcagctgctgcagtcttgcatgttgtggatgcaagcattttgctgaggaaactgcatagcgt

SEQ ID NO: 1034959 - DNA, 120 bp, Artificial Sequence
  ENSG00000254614_1 (sequence is synthesized)
gcctgaaatacctaacctggtgagtgatgggtggaaccagctcctaggctttctgcgcaggtgtccagggacagagaagggtggtttaaactagagaggtggcaggcagaagtagatgga

SEQ ID NO: 1034960 - DNA, 120 bp, Artificial Sequence
  ENSG00000254614_2 (sequence is synthesized)
tctcggctctcccttatctctccggcacggtctctgactatctcttactcacggtgtctccccgcccctccctccgcaggccgggggccaattccgcgagaggacaaattagtaaaaggc

SEQ ID NO: 1034961 - DNA, 120 bp, Artificial Sequence
  ENSG00000254614_3 (sequence is synthesized)
taaaaggcagagcagtccccggggaggggccagcgcggggggggatgggggggctggggcgcggcggaagggcaccgcggggaacggagggggagggccgggcagggggtatttttaacc

SEQ ID NO: 1034962 - DNA, 120 bp, Artificial Sequence
  ENSG00000254614_4 (sequence is synthesized)
gtatttttaaccaggggcagcagctcgagttgcagggccggacggccgcaccccacgcgcgccctggcgggcattccggggcgattgtgcggcggcgccgcctcccgcagccccgggccc

SEQ ID NO: 1034963 - DNA, 120 bp, Artificial Sequence
  ENSG00000254614_5 (sequence is synthesized)
cgctccgcgcgaccgcagctgctcccgccgttcccagccagccccggcgcggggccgagattacctcgggctgcggcagctgctctgaggaggggccgggctggcagcgagcagacccct

SEQ ID NO: 1034964 - DNA, 120 bp, Artificial Sequence
  ENSG00000254614_6 (sequence is synthesized)
gccggacactcagcaaacggcagcctcaccccgcagggccgcgccactccccttccccaccccaccgccgcgtcccggctcagcgctccccggggaacgcagggggaccgggctcgctgc

SEQ ID NO: 1034965 - DNA, 120 bp, Artificial Sequence
  ENSG00000254614_7 (sequence is synthesized)
gtgaccttgggctctcagcccacccacctggaagcgcccatgtgtcaccttacccaggagagggcggcagaggctgcgagcaggacggcagccccctctccccacccccaggaccctgag

SEQ ID NO: 1034966 - DNA, 120 bp, Artificial Sequence
  ENSG00000254614_8 (sequence is synthesized)
aaaatttaactcaaactggattacacacctaaatataaatggccaaaccataaaacttttttttttaaaaatggagacaatcttaacaatattgggtttgaaaagatttcttttttcttt

SEQ ID NO: 1034967 - DNA, 120 bp, Artificial Sequence
  ENSG00000254614_9 (sequence is synthesized)
cttttctaaaggcagggtcttgctttcattgaccaggcaggagtgcagtgccctgatcacagctcactgtaactttaaactcctgggctcaagagatcctctcacctcagcctcctgagt

SEQ ID NO: 1034968 - DNA, 120 bp, Artificial Sequence
  ENSG00000254614_10 (sequence is synthesized)
gagtagctgagactacaggcacgtgccacgacacacagctaatttttaaattttttgtagaaatggggtcctgctgtgttactcaggctggtcatgaactcctgggctcaagcagtcctc

SEQ ID NO: 1034969 - DNA, 86 bp, Artificial Sequence
  ENSG00000254614_11 (sequence is synthesized)
ttggcacctggccagatttcttaaatatgacacaaaaagtgtaaatgatagaagaaatcaataaattgaacttcatcaaaataaaa

SEQ ID NO: 1034970 - DNA, 120 bp, Artificial Sequence
  ENSG00000254615_0 (sequence is synthesized)
gtagcttccacgcgggcaggtccggaaactgagcatgtctgcaagcgctcagcggcgccggcagcagcggggctagagctgggctgcgtcaggctgagcccattcacctcgcggccacag

SEQ ID NO: 1034971 - DNA, 120 bp, Artificial Sequence
  ENSG00000254615_1 (sequence is synthesized)
gccccgccgagaggggcgcactcgccgccgcggggcccgccgccgctcaccgcagccccctcctggcgacccgcaagaggactcagccgccggctgcgaccaccgtggactccctctatg

SEQ ID NO: 1034972 - DNA, 120 bp, Artificial Sequence
  ENSG00000254615_2 (sequence is synthesized)
gctgcgaccaccgtggactccctctatggaagggaatcctgggagtcccggccgtcagaggggttcccaaatccaaagggtccatctccaaggcgtcactccaggggtccgcggttcact

SEQ ID NO: 1034973 - DNA, 120 bp, Artificial Sequence
  ENSG00000254615_3 (sequence is synthesized)
ttgctgccccttgcaggtgatgctgtgattgttgcctgcggactgggaagcacgatggctccaaaaggccagcggggccgagaagcagggacagagaccagcatttaagggatctctggt

SEQ ID NO: 1034974 - DNA, 120 bp, Artificial Sequence
  ENSG00000254615_4 (sequence is synthesized)
gggggcctccctggagttctccacatgtaaatatagcgaaaaaagaaaacactacgttactagaataaacacgtcctaaaatttctgtgcaaaaacacctttttgaacagcaaagatttc

SEQ ID NO: 1034975 - DNA, 120 bp, Artificial Sequence
  ENSG00000254615_5 (sequence is synthesized)
ttctgtcgtcggtttcacattttcagagagactttaccagatgcaggaaatgaggatgaaggcaactctggaaggatgcaaagaagggagagcaagcactgtacctactgtctgctgtct

SEQ ID NO: 1034976 - DNA, 120 bp, Artificial Sequence
  ENSG00000254615_6 (sequence is synthesized)
aagagggctggtctcataactaaaaggtccagtccctgagatcttgtgtgcaaccgtcagaaatagttcaggacatcaaattgcacagagaagattcagatgaagggaaacaagaactct

SEQ ID NO: 1034977 - DNA, 120 bp, Artificial Sequence
  ENSG00000254615_7 (sequence is synthesized)
gtggaaaactgttggggacagtggcacgagttgtcttgcaaggtgatgtctgtcccgtggagggacacaagagcgaggacagcatggttctaatggccagggcatgtcttcttattccat

SEQ ID NO: 1034978 - DNA, 120 bp, Artificial Sequence
  ENSG00000254615_8 (sequence is synthesized)
gtgacagtggctggctgagttgctagtacgtttttgaaatataccctttgaaatatgttgattattctggacatctgtaaggtgggagatttgaataaaaagacttctgctgtcattatt

SEQ ID NO: 1034979 - DNA, 120 bp, Artificial Sequence
  ENSG00000254615_9 (sequence is synthesized)
ggcttttatggctatgatttttttcagtcattattataaatcatgtgaaggtaaaataaatgatcattttagccattctgttctgcacagaatgctgttcaaataaaacatcatctgata

SEQ ID NO: 1034980 - DNA, 120 bp, Artificial Sequence
  ENSG00000254615_10 (sequence is synthesized)
ggcgacccgcaaggtagcattctttgcttatccaatgatgcctctttctaacctctccctctccacttacatcccaaacctgatgcgggtcttctctgattcggcactctaaggaggact

SEQ ID NO: 1034981 - DNA, 120 bp, Artificial Sequence
  ENSG00000251615_0 (sequence is synthesized)
tatgttgatgaagcctccggatggcaggcttcagagagaatagatgtgcatgtctcttataggcccttaaaaggtgtcagagtctccagaaaaagcctaataagggaagcagattctctg

SEQ ID NO: 1034982 - DNA, 120 bp, Artificial Sequence
  ENSG00000251615_1 (sequence is synthesized)
cagaatgcacatttcccccatgagagacagctttgcaagggccatttcaacatatgtcaaggaaatatattttgaggtaaaatactttgattccttcggggctactatgtgtcatgtgat

SEQ ID NO: 1034983 - DNA, 120 bp, Artificial Sequence
  ENSG00000251615_2 (sequence is synthesized)
gctataccggagtcccgttgaattgggtatcttattgctacagagagtctgttttgtcagtctaggatctctgtttttattttaatgttggtcagttgtgtctaaattccagagcggggc

SEQ ID NO: 1034984 - DNA, 120 bp, Artificial Sequence
  ENSG00000251615_3 (sequence is synthesized)
aggtataatggggcatcccgagccctccttcccattcatggcctgaactggtttttcaggtttctttgggtcccggtggctgcaaggggatgcactcagttggctgggggacttagaatt

SEQ ID NO: 1034985 - DNA, 120 bp, Artificial Sequence
  ENSG00000251615_4 (sequence is synthesized)
ttagttttggtttacagcaggatttgatgggcatgcatatttatcaatgtgaaagtgttgtctgtgggcggcggagggcttgggccgtgtccaggccacgcactgcaagggtgcagcccc

SEQ ID NO: 1034986 - DNA, 120 bp, Artificial Sequence
  ENSG00000251615_5 (sequence is synthesized)
cacacacggtccctgctcctaaagctgttgcccccactgcaagagtggagtaggttgaggtgtagccatgacattctggaaactacattttttgtaatagtcattttgaaaataaaacat

SEQ ID NO: 1034987 - DNA, 120 bp, Artificial Sequence
  ENSG00000251615_6 (sequence is synthesized)
ttgaaaatactgtgcagcaaaaacttgaataattggaataaaaatgttcagtttaatgtcattgcttgctgccaccgttttctgattgtaaaactaacgtgattattaggtactattttg

SEQ ID NO: 1034988 - DNA, 120 bp, Artificial Sequence
  ENSG00000251615_7 (sequence is synthesized)
gtaatgtagaaaactttaaagatgaaaatagatatcacttataactccacatggagaaatagttgcccctccaatttaattgatttacttttgggccacaggggcccagaatttgattca

SEQ ID NO: 1034989 - DNA, 120 bp, Artificial Sequence
  ENSG00000251615_8 (sequence is synthesized)
ttgtactccttggttcatgccagtgttcctgcacccagcactgaagctgaacattgacagtgatttgcccctgccccagagtcctccctgcattcccctcgagggcccccgtctcctggc

SEQ ID NO: 1034990 - DNA, 120 bp, Artificial Sequence
  ENSG00000251615_9 (sequence is synthesized)
cctggtgtccacttttctctcagctgctgggaacgtgttagtgtgcactgttctcctttccctcacctgctggcttcatgttagcatgcaccgttctgctcactttcttcccctcacctg

SEQ ID NO: 1034991 - DNA, 120 bp, Artificial Sequence
  ENSG00000251615_10 (sequence is synthesized)
ccgggatcatcttagcatgcaccattctgctcactttcttcctctcacctgccaggatcatgtaagcgtgcaccgttctccacactttcttcctctcacctgccgggatcacgttagcat

SEQ ID NO: 1034992 - DNA, 120 bp, Artificial Sequence
  ENSG00000251615_11 (sequence is synthesized)
gcaccattctgcacacttccttcccctcatctgccagggtcatcttagcatgcaccattctgctcacttcaccttcttcttctcgcctgctgggatcatgttagtgtgcactgttctgca

SEQ ID NO: 1034993 - DNA, 120 bp, Artificial Sequence
  ENSG00000251615_12 (sequence is synthesized)
cactttcttcctctcccctgctgggatcatgttagtgtgcaccgttctgcacactttcttcctctcacctgctgggatcatcttagcatgcaccattctgctcactttcttcctgtcacc

SEQ ID NO: 1034994 - DNA, 120 bp, Artificial Sequence
  ENSG00000251615_13 (sequence is synthesized)
catgttggcgtgcaccattctgcacactttcttcctctcgcctgctgggatcatgttagcgtgcacagttctgcatacttgcttcccctcacctgccaggaacaggttagtgttccccat

SEQ ID NO: 1034995 - DNA, 120 bp, Artificial Sequence
  ENSG00000251615_14 (sequence is synthesized)
tctgcacactttcttcctctcacctgccgggatcatgttagcgtacaccattctgcacactttcttcctctgtgtacgtgtgtgtggttttcctttcagaaatgggtcatactctgtgga

SEQ ID NO: 1034996 - DNA, 120 bp, Artificial Sequence
  ENSG00000251615_15 (sequence is synthesized)
catctttttccacttaaagtgatggcacagccattttcccagtcaagtaacatgaatgtacaagtttagcaaacttcctcctgagagatggagagatcaaggcttctgctccgtggcagc

SEQ ID NO: 1034997 - DNA, 120 bp, Artificial Sequence
  ENSG00000251615_16 (sequence is synthesized)
catccgtgcacatgcatcactgtgcgtgagttggtcccagtggcttgctgagacatgctctgcacaggggagatttcttataccagcagtgtgggaggcagtggggcaggtagagccaca

SEQ ID NO: 1034998 - DNA, 120 bp, Artificial Sequence
  ENSG00000251615_17 (sequence is synthesized)
agtggggatgagggagcagagtctagggcaggctcctggatggacaccagctacactgtctattggatgtgggacttccctcactgatgaaatgaataagagaatcttcctcatcctgct

SEQ ID NO: 1034999 - DNA, 120 bp, Artificial Sequence
  ENSG00000251615_18 (sequence is synthesized)
gttgttggcgttaaaacgggttaatgcatgaaagcaacaaagcccggcctgcagacagcacatggtaagtctcctcttcccagcatgttcaacaggaagccctcattccctctagaatgt

SEQ ID NO: 1035000 - DNA, 120 bp, Artificial Sequence
  ENSG00000251615_19 (sequence is synthesized)
aggagtcttgccagcagtggcctgtttgttctctgcctgttgccgacctgatgagaacataaaattggtgtcttctgtatagatttccttcttattgcccctactgtggctgaacatacc

SEQ ID NO: 1035001 - DNA, 120 bp, Artificial Sequence
  ENSG00000251615_20 (sequence is synthesized)
ttcccccgtgcttgaagtctgttcatatatgttctgctgtgataactgcccattcttgttctctatctaagaaggcatttagttttgaaaatattttgttggcttgtaagatatttgtac

SEQ ID NO: 1035002 - DNA, 120 bp, Artificial Sequence
  ENSG00000251615_21 (sequence is synthesized)
atattaagcacagcaaacctgtaacatattcactgtaaatcattattcctcatgcatcatttgccatttaactgtatttttttcctttttgatgtaacctgctatagtttacatttttaa

SEQ ID NO: 1035003 - DNA, 120 bp, Artificial Sequence
  ENSG00000251615_22 (sequence is synthesized)
atcagaaatgcctgcacattttaaaacgaagactcttatgctctagcctttgaggtcatgcttggaaagtcctttctcacacaaagattatttacactttcatctctttttctctgagta

SEQ ID NO: 1035004 - DNA, 120 bp, Artificial Sequence
  ENSG00000251615_23 (sequence is synthesized)
cgtttcagtgtttaattgaccaggaatgtatttcgaggtgtgatatgagacaaggatctgaaatgctttgcccactgaatcatcatgcactgaccgaaatgccacctgtatgagtgctaa

SEQ ID NO: 1035005 - DNA, 120 bp, Artificial Sequence
  ENSG00000251615_24 (sequence is synthesized)
aatcattgtcgctggacctgtgtctgcactgtttaattttagtgttgtttctcacatcagcttctgttgttttcatggttgtggttctcatacttttaatatctgttggagcaaataaag

SEQ ID NO: 1035006 - DNA, 120 bp, Artificial Sequence
  ENSG00000251615_25 (sequence is synthesized)
cctcgtttctcatcttttccaaaaatgtcttatgtatgtgaactttggtgttatttgtcaagtctgggcattctcccacccccatattaaagaatgctctctggagtttgtctggaggtt

SEQ ID NO: 1035007 - DNA, 120 bp, Artificial Sequence
  ENSG00000251615_26 (sequence is synthesized)
ttgtttaacttttagattcacatcaggagaatctttgtcttcatggtaagtggtcttcccatctaagactatttcttcaagctgtttgtaataaaaagctgtgtgatttttgtatgttta

SEQ ID NO: 1035008 - DNA, 68 bp, Artificial Sequence
  ENSG00000253497_0 (sequence is synthesized)
gagggtccccgctcagctcctggggcttctgctgctctggctcccagggtgccagatgtgccatccag

SEQ ID NO: 1035009 - DNA, 120 bp, Artificial Sequence
  ENSG00000253496_0 (sequence is synthesized)
ggttttgggaggtttggccagcttctttactgcatcctgttttatctgcggagtctgctgaactcctatctcacagcatttgcctctgagtacagcagatgtcaacaaggttttgaactg

SEQ ID NO: 1035010 - DNA, 120 bp, Artificial Sequence
  ENSG00000253496_1 (sequence is synthesized)
ccccaggattcattatattctcacctgggcttcagtaaacgaattttgcatggagagtttcagatgatgttcagtgacaaatttgtacctcagacaacttgggattcagaagaatatttt

SEQ ID NO: 1035011 - DNA, 120 bp, Artificial Sequence
  ENSG00000253496_2 (sequence is synthesized)
atataatcttctggccaagtcttacagcaaagaattttacattaaaaagaaggaagagaaagcaagcaagcaagcaagaagggtggtaatgagaagctgagagcagtgtgccaactcgca

SEQ ID NO: 1035012 - DNA, 120 bp, Artificial Sequence
  ENSG00000253496_3 (sequence is synthesized)
atgccatcttcgctgacatgtaaaaatagttgtgttttaacaagtgtgctttgcttaaatgaaataggtggatttctagaaatgaaattgctgcagcaaaaggactgcataatgtaaaca

SEQ ID NO: 1035013 - DNA, 120 bp, Artificial Sequence
  ENSG00000253496_4 (sequence is synthesized)
ctcttgagacagatgaccaatttgtttcctgcagtttgttcgcatttacacacttctaacaatatggagatgtatgtctcactgaaatcatgatgacaacagagttttttgcttctgtct

SEQ ID NO: 1035014 - DNA, 120 bp, Artificial Sequence
  ENSG00000253496_5 (sequence is synthesized)
gccaatttttcctttggggcactcatcattttgattacttaaatatgcatcttatggtagaaactggaaccactgtcttgaatcaaaagatggaagaagcttctcttgaagattaaaggg

SEQ ID NO: 1035015 - DNA, 120 bp, Artificial Sequence
  ENSG00000253496_6 (sequence is synthesized)
acacaagacagaagttgtctgtgtccctgagggcttagcagaggagacttgacctactttcttgggcttgttgtgacatctattttgtttaagatgcctctcaattttcatcttgttttg

SEQ ID NO: 1035016 - DNA, 120 bp, Artificial Sequence
  ENSG00000253496_7 (sequence is synthesized)
catcatttagatgcgctgaaagatgaggttattcttctgaagacaagaaggcaacccaaagtattaaatttacatttggtcagaaatgccacactccagaagaatgaacatgcttggaaa

SEQ ID NO: 1035017 - DNA, 120 bp, Artificial Sequence
  ENSG00000253496_8 (sequence is synthesized)
attttaattttattcatttactaacttagtgggagagacaaagacaagataacaagcaaattaataattgcatctttggtaacttttctgaagaaaataaacattagactcggtcagaga

SEQ ID NO: 1035018 - DNA, 120 bp, Artificial Sequence
  ENSG00000253496_9 (sequence is synthesized)
ataatggtgaaaaggttgccctggaaaaagtgataaggaacagcctttttgggatggtgaatatgaagagtatgaattacaatgttcctgaaaagccactttcctgagaagaactgcaac

SEQ ID NO: 1035019 - DNA, 120 bp, Artificial Sequence
  ENSG00000253496_10 (sequence is synthesized)
agattttcatgatatcaagaaggctttatgttcctgtaagaaagtttggctgtaagttcctatcaagattctacaagtgcccccaactttgctatgaagaccaaggcactgtggaattgt

SEQ ID NO: 1035020 - DNA, 120 bp, Artificial Sequence
  ENSG00000253496_11 (sequence is synthesized)
gtgtctgcgtttggaaagtcagcttgtgcctaaatggattttgaagatatcaggcattctaggattgagactgagaattccttttgttacaacaggcaagagtaagagccaataaataaa

SEQ ID NO: 1035021 - DNA, 120 bp, Artificial Sequence
  ENSG00000253496_12 (sequence is synthesized)
ttcctccccagattgttcatttggtcgaagtgtttaaccctcccagatagatgagaaccatcccttgtcaaggacatgagtgactatgaaggctggctgcaaactcaaaaaaggactgag

SEQ ID NO: 1035022 - DNA, 120 bp, Artificial Sequence
  ENSG00000253496_13 (sequence is synthesized)
tcagaaggcacctgtctatataaacacactgcactccaggtgaatagtatgcccaaacagaggccacagagatgaacaaactcacctcttgaatggggaaaagatgagcggatcgactca

SEQ ID NO: 1035023 - DNA, 120 bp, Artificial Sequence
  ENSG00000253496_14 (sequence is synthesized)
gctctgaaggaggaaaagaaatatgttgcgatgttctcaagacgtatatcaaagatgtttcagtccccagggtagaaactggaaccactgtcttgaatcaaaagatggaagaagcttctc

SEQ ID NO: 1035024 - DNA, 120 bp, Artificial Sequence
  ENSG00000260500_0 (sequence is synthesized)
ccaagcctccccacctatcccccaccccgcacgttgcgcgctcactgactgcaccagaacttagccggtcagtccagaggtttattttgagcacaggtgggagggacagggggaggagag

SEQ ID NO: 1035025 - DNA, 120 bp, Artificial Sequence
  ENSG00000260500_1 (sequence is synthesized)
aagcgcaggggtcgtggcctcatcaggtccgaggtccagggaggcgggtccggtcctgttggtcctggtcccgaattggtagctgggtgtatctccggaccatgttgggggcgcaccatc

SEQ ID NO: 1035026 - DNA, 120 bp, Artificial Sequence
  ENSG00000260500_2 (sequence is synthesized)
gagggaggggacgctacgcgggccacctcccttcccagcagaccactagcctcttccatcggtctgcatgccggggtgagagtgggagccgggtccgaatgctgagttctcctcgcctag

SEQ ID NO: 1035027 - DNA, 120 bp, Artificial Sequence
  ENSG00000260500_3 (sequence is synthesized)
tgcctctcctcacctaatgcccctggctcgacccaaagcccgcgcctgccgcgggtgacccactgcctgagttcgaatccaagctccacccagtattgtgacttttgacaagttacttaa

SEQ ID NO: 1035028 - DNA, 120 bp, Artificial Sequence
  ENSG00000253491_0 (sequence is synthesized)
aacaactgtatttctcggtgcactcttggcctggtgaagccttcacagaacctctccctcacctgtgccatctctgcattctccatcacaaccagtgtttccttctggagctgcatccat

SEQ ID NO: 1035029 - DNA, 120 bp, Artificial Sequence
  ENSG00000253491_1 (sequence is synthesized)
ttactcccctcttctcaagagtccagtcaccatctccagatccatgtccaaaaagtagttcttcttacagctgaactatgtgaggaacaaacacatagccatgtattttagagcaaaaga

SEQ ID NO: 1035030 - DNA, 120 bp, Artificial Sequence
  ENSG00000253490_0 (sequence is synthesized)
atcagtctttaaagagttaagttaaaataagctctttaaagtgggccctaatccagtatgactggtgttcttataagaagaggagatttggtcacagacatggttgcatgcagaataaag

SEQ ID NO: 1035031 - DNA, 120 bp, Artificial Sequence
  ENSG00000253490_1 (sequence is synthesized)
acttttcgaggacacactgagaaggcagccatctgcaaaacaaggaaagagtcctcagcagaaaccagtcctgcagactccttgatcttggacttccagccactgcaattgatgtcaagc

SEQ ID NO: 1035032 - DNA, 120 bp, Artificial Sequence
  ENSG00000253490_2 (sequence is synthesized)
ttcagcacccttgcatctctggataaatgaaatgtcaccccagctgccgtccttgttcagatctgtgcaataaagagcaaagcataaaaccaagtcaaggctttgagggagtgacctaca

SEQ ID NO: 1035033 - DNA, 120 bp, Artificial Sequence
  ENSG00000253490_3 (sequence is synthesized)
aaatgcataatgtgaaacaatgcaaaagcgaaaggtgcaaaatccccatcaaagagctggaggctgacagatgcgccagtgataattcccatcttccaacacaggagcacagcttccatt

SEQ ID NO: 1035034 - DNA, 120 bp, Artificial Sequence
  ENSG00000253490_4 (sequence is synthesized)
ttccataacagaacaacagccagagcagctggaaggcagggccgcatcccagacttccaccaacaatgggatgagacttgacatctggaatcacaaccacaacagacctgagagacccac

SEQ ID NO: 1035035 - DNA, 120 bp, Artificial Sequence
  ENSG00000253490_5 (sequence is synthesized)
cagcttgatgacaagcttcttctttcaaagaaaggtatcagtctgggggacctagtgctgcaaaccatgacaaattaagtgtggcatccctcacttgcataatggaactcagtgatattt

SEQ ID NO: 1035036 - DNA, 120 bp, Artificial Sequence
  ENSG00000253490_6 (sequence is synthesized)
tttaattaacaagagttatttttatgtaagcttctctcattcctccactgtgcgtgctcgggggctggtggtgaggaaaaagaaaacagctgtgcgggaagcatcaagaaaaggcaagtc

SEQ ID NO: 1035037 - DNA, 120 bp, Artificial Sequence
  ENSG00000253490_7 (sequence is synthesized)
atgaagtcttagagatcagtgacatgtaagaaaaagagtgaggagaaaaatattcctactaaagttttccatttgtttaccttccttgtcacatagacttccaagagttagaagtctagg

SEQ ID NO: 1035038 - DNA, 120 bp, Artificial Sequence
  ENSG00000253490_8 (sequence is synthesized)
atttgatctccaaatcttcctggcagattactcatcttcatttcattcatatagtccaggggtttgtacaaaggaagatgccagttcttccccaatcataactaagatatcaagagatat

SEQ ID NO: 1035039 - DNA, 120 bp, Artificial Sequence
  ENSG00000253490_9 (sequence is synthesized)
tcttttgaaatgtaacaaaggagatctgaagttcatctgaaaaaaataaatggttttaggcggtcatgaccatgggatgctggaccaggatggtaagcttcaggaaacagaatctggaga

SEQ ID NO: 1035040 - DNA, 120 bp, Artificial Sequence
  ENSG00000253490_10 (sequence is synthesized)
atgcccagctgctcccacaggaagcatcagggaagaagaagaagaggtgtgaagtctgccttctgctctgctgggatccctttcacatctcctttgcctccaggcagttttggttcctgg

SEQ ID NO: 1035041 - DNA, 120 bp, Artificial Sequence
  ENSG00000253490_11 (sequence is synthesized)
aagcatcttctctcctacccagagtagaggatgaagacctcatctcagaggttgaagggagctccagagagaggtctcaaacttccagcattaactgctaaagaagcttcatgagctgct

SEQ ID NO: 1035042 - DNA, 120 bp, Artificial Sequence
  ENSG00000253490_12 (sequence is synthesized)
ggagaacctgggaaatgaccaattatagggacagagctcaaatactctgggacactctagtagctgagaaagttccaactccagggtgatagaggactgcctggcaaaccatcatcaaag

SEQ ID NO: 1035043 - DNA, 120 bp, Artificial Sequence
  ENSG00000253490_13 (sequence is synthesized)
cagaagacctgatactaacatcacaggctatggtttattactgaagatcagtgcttacaccctgccagaggttcagaagcaaacttatcattgttctccctggagatgttggcccacatt

SEQ ID NO: 1035044 - DNA, 120 bp, Artificial Sequence
  ENSG00000253490_14 (sequence is synthesized)
ctgaaaagtgtggtcagtagtagcaacagaaagcaattgtgcttgccaagcacaatgtcactgtccccagcccttcccccaacacaacccagtaggtgcttcctggctgcaaacttggga

SEQ ID NO: 1035045 - DNA, 120 bp, Artificial Sequence
  ENSG00000253490_15 (sequence is synthesized)
aagtcacttgacctgtctgaggttccacttcctaatctggcctggcgaagataagaaaaacagtttatttaaagtgtctagcaaagtgcttggaccaaaataggacctctgaaatggtta

SEQ ID NO: 1035046 - DNA, 120 bp, Artificial Sequence
  ENSG00000253490_16 (sequence is synthesized)
tggtagtgctgttaaggtgatgttttaagtgctgatgagcacaaagatgggtaagatattccttctgttaaaatctacagtctaatgagagagaacaagatgaatgcacaataactgtca

SEQ ID NO: 1035047 - DNA, 120 bp, Artificial Sequence
  ENSG00000253490_17 (sequence is synthesized)
ttcagaacaggattatgagaaggtgtgaatttctgtgaaaaatcagaacagggagtaatatgatcccaggtgattggcagggggtgggggtctggattcaactggagagggagctggcag

SEQ ID NO: 1035048 - DNA, 120 bp, Artificial Sequence
  ENSG00000253490_18 (sequence is synthesized)
ggaaggcttcctggaggatgagagttcaacaaggggcaggtgtaggatgtgggtggccaagtgactgggcagaaggagctgcagaagtaagaccccaaatcaggaagacaagggcctgct

SEQ ID NO: 1035049 - DNA, 120 bp, Artificial Sequence
  ENSG00000253490_19 (sequence is synthesized)
gagaaacacgagctacaaagtgcaagtgcaggaagagttgggatgagattagaagggggtctggggccagactgtggaaggcccaaatgccgggctaaggagtttgtacttaattcagtg

SEQ ID NO: 1035050 - DNA, 120 bp, Artificial Sequence
  ENSG00000253490_20 (sequence is synthesized)
gtcaacggggagtcattggaggctgttgagcaggagagttgctttctttacagctgtgccagactaaattaaacctaaacagtactttatagctggaaagggaaggcccaggaatagctc

SEQ ID NO: 1035051 - DNA, 120 bp, Artificial Sequence
  ENSG00000253490_21 (sequence is synthesized)
ttgactcagaaacaggcattggggaaggtaatgagaaacagccgtgactgatcaaagcagagaggttaattaaatttgtaattattgtgaaaggccattaaaaaccctagttcactagag

SEQ ID NO: 1035052 - DNA, 120 bp, Artificial Sequence
  ENSG00000253490_22 (sequence is synthesized)
ataactgctctagtggggcttcaaagacaaacgcttcttttaaccttgaatagggggatgtttgcttctctgtggaggagatatgattaagatacttaataaatggtagataaacatgca

SEQ ID NO: 1035053 - DNA, 120 bp, Artificial Sequence
  ENSG00000253490_23 (sequence is synthesized)
ggaagtccccaggggtccagatgacagaatgaagcatgcatgttggggagatgatcagaacaggcacctggacccctgtggggtcaagggctctgctctcccctacatgggagctctgca

SEQ ID NO: 1035054 - DNA, 120 bp, Artificial Sequence
  ENSG00000253490_24 (sequence is synthesized)
ggctgctctcccctctgcacagggaacctgtgtttgcaacctgtctccctcctgggcctgcccatcgctgtcctgaccagcagcctccatcagtaggatcctttttgttttctctttctt

SEQ ID NO: 1035055 - DNA, 120 bp, Artificial Sequence
  ENSG00000253490_25 (sequence is synthesized)
cttccatttatccacaagccttactgagagcccaccttatgcgcagctgccaagagtccaaaccccatcctccaaggttggtggtgtaggagaattactgtgtgggtaaaggagactgga

SEQ ID NO: 1035056 - DNA, 120 bp, Artificial Sequence
  ENSG00000253490_26 (sequence is synthesized)
ctccgtgggtcctgctcttgcctctggagattcagcttccccaatggctcctctccctgattatgattgccatctccagccttgacgcccctatttctggggtccttacatttatgttta

SEQ ID NO: 1035057 - DNA, 120 bp, Artificial Sequence
  ENSG00000253490_27 (sequence is synthesized)
caggcgctgcagtctgaaaacagctcccagagtgaccctaatcagatcatggtgccctcttgtccaaaatcttttcagtgttttcccaaatcactcaggagcttacaagaccctaccaag

SEQ ID NO: 1035058 - DNA, 120 bp, Artificial Sequence
  ENSG00000253490_28 (sequence is synthesized)
actggctcccctgttctccgctagtctcatcttctctgattctctctcttctatctcgggtactaacacactggcagcctttctgagctggatgctcccttacatcccttggatactcca

SEQ ID NO: 1035059 - DNA, 120 bp, Artificial Sequence
  ENSG00000253490_29 (sequence is synthesized)
agcacgccctgccttgggccttctgcacttgctattggctgcctgcaatgtcgttggccagtcagccacatgacccagtccctcacttcctttgggtctttgctcaagctcacattctca

SEQ ID NO: 1035060 - DNA, 120 bp, Artificial Sequence
  ENSG00000253490_30 (sequence is synthesized)
gtgaggccttttctgacctccagtgtttaaaatctcaccccttatcacagacaaccccaatccccttccctactttattttccccattattctccttaccatctgacataccacgtattt

SEQ ID NO: 1035061 - DNA, 120 bp, Artificial Sequence
  ENSG00000253490_31 (sequence is synthesized)
atttcttctttgcctcccccttctagcttactagaaggtaagctccaagaaggtgggagtttttctgctttgttgcactgtcaccagcacccagaacagcacccatagcatcatgtctgc

SEQ ID NO: 1035062 - DNA, 120 bp, Artificial Sequence
  ENSG00000253490_32 (sequence is synthesized)
gtgactcatttgttctttaaaaacagtcatgtgctgcataatgacattttggtcaataacagactgcagatatgatggtggttccataagagtataatgtgatatttttactgtattttt

SEQ ID NO: 1035063 - DNA, 120 bp, Artificial Sequence
  ENSG00000253490_33 (sequence is synthesized)
acaattgcctacagtattcagtacagtcacaggctgtatgggtttgtagtctaggagcagtaagctataccatagagcctacgtgtgtcgtaggtcataccatctaggtttgtgtaagtg

SEQ ID NO: 1035064 - DNA, 120 bp, Artificial Sequence
  ENSG00000253490_34 (sequence is synthesized)
gtgtcgtaggtcataccatctaggtttgtgtaagtgcactccatgacgtttgcacaacatcacctaatgatgcattttctctgaggcaatgcatgactgtatccgaagctgaaaatgagt

SEQ ID NO: 1035065 - DNA, 120 bp, Artificial Sequence
  ENSG00000253490_35 (sequence is synthesized)
ttgttgccctcccacttccggaaatggataattcctacagtacctgtatcaggcccaccctgttcacctcattcttcttcctcggttctgatggcaagtggtttccaactcatagctgtg

SEQ ID NO: 1035066 - DNA, 120 bp, Artificial Sequence
  ENSG00000253490_36 (sequence is synthesized)
gacctacgaaacacttgcatggctttctgtaaggctgggcaagtcagtgaaggtgaaatgtaaagcccactccctacaaacgactagtattcactcacctctctcacccccagttactga

SEQ ID NO: 1035067 - DNA, 120 bp, Artificial Sequence
  ENSG00000253490_37 (sequence is synthesized)
tatagtttaacaaatagctatgattacctctgcagaaaagggtttttagaaaattacattctgtttgtttttattattgttgcaaaaagagataaaatcttggcatctttgaatttacac

SEQ ID NO: 1035068 - DNA, 120 bp, Artificial Sequence
  ENSG00000253490_38 (sequence is synthesized)
tgcttaaggttaccaaacagaatgggcagtagaatcctatgtttacagtgtttatatgtataaatgtacatgtgtatatatgtataaagattaaagaatacaacaataggctaatatttg

SEQ ID NO: 1035069 - DNA, 120 bp, Artificial Sequence
  ENSG00000253490_39 (sequence is synthesized)
ggtatgatgaaaataatataatttttattcaactgttttttccataataagtgtatattatgtatatgatatgaagaacaccaatcattcttctttttttaaaaaaaaagaaaggctggg

SEQ ID NO: 1035070 - DNA, 68 bp, Artificial Sequence
  ENSG00000253490_40 (sequence is synthesized)
gcccttgttttaattgggcacatactaaaggtcagctttctaatatagggaaacaagaaaatgatcct

SEQ ID NO: 1035071 - DNA, 120 bp, Artificial Sequence
  ENSG00000253490_41 (sequence is synthesized)
aggtcagctttctaatatagggaaacaagaaaatgatccttttgaatgtgactattatttttactttgtgatttcagcttttacgttggactcaataaactaaaaaaaggcaaactgaaa

SEQ ID NO: 1035072 - DNA, 120 bp, Artificial Sequence
  ENSG00000251613_0 (sequence is synthesized)
aaaaaagaggcacagtgaagctaaatatattggctaaagatcacaaagctaagaagattatcaaggttatctgtgctcaatgtgtgcatctcagatcagcagcatcagcatcacctggga

SEQ ID NO: 1035073 - DNA, 120 bp, Artificial Sequence
  ENSG00000251613_1 (sequence is synthesized)
gcttgttagagctggagactctcaggctccacggcagacttcctgaatcagaagctacaatttaacaggatcctcgggtgatctgaaaatgcaataaagtttgggaagcactgctgttgg

SEQ ID NO: 1035074 - DNA, 120 bp, Artificial Sequence
  ENSG00000251613_2 (sequence is synthesized)
tcattagacaatctaatgaactaagacttttgccgagcatctgagttgaaatttttcaagatgaaaagttgctaaagaaagagaaagggaagcggtttgctccagtattcctctttccac

SEQ ID NO: 1035075 - DNA, 120 bp, Artificial Sequence
  ENSG00000251613_3 (sequence is synthesized)
caaaagccaagaagaacctctggagcaatcagtctctctgctgagggagtgcattttgcttccagcacagtgctcaactcacacagttcccatggaaacccaggggctacagaggtgtct

SEQ ID NO: 1035076 - DNA, 120 bp, Artificial Sequence
  ENSG00000251613_4 (sequence is synthesized)
agaccctgtttggcactctaaccagaagtattcccagagactacaagcacactgcacaccttggctcagtttcaaactggagacaggcagagaaagaaagatcttcctcccctactttcc

SEQ ID NO: 1035077 - DNA, 120 bp, Artificial Sequence
  ENSG00000251613_5 (sequence is synthesized)
cggggaggtcttgaggagacttcctttttgttagttgtttccaaattgtccctatctgagtggttctcaaacagtgggtcttcgcgtggtcatgaagggcctgcaagaagataagggcac

SEQ ID NO: 1035078 - DNA, 120 bp, Artificial Sequence
  ENSG00000251613_6 (sequence is synthesized)
caagcgtggcctgtggctgagataaatgaagcatctctcatatatgtgttatgatttttcaagtaaatgaggttgctattgggcttaattaaaataaaaactaatttaagagcaatgcta

SEQ ID NO: 1035079 - DNA, 120 bp, Artificial Sequence
  ENSG00000251613_7 (sequence is synthesized)
actctagggaaagttagctgccatgttggcagcagctctgtggaaaggcccatgtggcaaggaattgagaaatcttgccaacagcccatgagaaactgaggcctcaagtccacagccaga

SEQ ID NO: 1035080 - DNA, 120 bp, Artificial Sequence
  ENSG00000251613_8 (sequence is synthesized)
atcttaaatgcttgtgtgcagccaccatcctgacaaatgattcaacaaatgattcaaagagaaaaaccagaatacaattattttgatagacacgtaaaactgaaaatcaaatatccacag

SEQ ID NO: 1035081 - DNA, 120 bp, Artificial Sequence
  ENSG00000251613_9 (sequence is synthesized)
atgaaacttcaccttcaaggaaaatcgccaacagtggtaaagagctgcacaacacttgaagttttctcctgcagctttgattgaacaagcaccagtaggagggactaaaaataaagagat

SEQ ID NO: 1035082 - DNA, 120 bp, Artificial Sequence
  ENSG00000251613_10 (sequence is synthesized)
gtttctggatgagattagcattcaaattcgtggactcattaaagtagatggctctctccaatatgggtgggcatcatccaatctgttgaaggcgtgaagagaacaagagaaggaggaagg

SEQ ID NO: 1035083 - DNA, 120 bp, Artificial Sequence
  ENSG00000251613_11 (sequence is synthesized)
aagaattcaccttttttcttgctgcccacctgcttgggctgggacattgcatctcaccttctccagcctttggatgaggatttacaccctggttctcaggccttcaggctctaactggag

SEQ ID NO: 1035084 - DNA, 120 bp, Artificial Sequence
  ENSG00000251613_12 (sequence is synthesized)
tggaccaggctccagtgccaacaaaagccaagaagaacctctggagcaatcagtctgtgagtgcctgggatatattgctgttacaatggggtcagtgagggccagttgagagagtgctag

SEQ ID NO: 1035085 - DNA, 120 bp, Artificial Sequence
  ENSG00000251613_13 (sequence is synthesized)
gctgacagacaaggacctgggcttccagctctgccacctaccaactgtgtgatttctctggttttagtttccccatctgcaggagggggtttgattttaaagatctggattcttaagtaa

SEQ ID NO: 1035086 - DNA, 120 bp, Artificial Sequence
  ENSG00000251613_14 (sequence is synthesized)
cctccatcataatatgagaaaaaagaggcacagtgaagctaaatatattggctaaagatcacaaagctagtaagtagaacaagctacttacctacttgaacaagaaacttcctcttttca

SEQ ID NO: 1035087 - DNA, 120 bp, Artificial Sequence
  ENSG00000251613_15 (sequence is synthesized)
aacctctgttctgttctttttttttgttttttttgaaactacgacagtcatttattctctctaacagttactattggtgaggaattttggagtaatttgattgggtgttctggctcaagg

SEQ ID NO: 1035088 - DNA, 120 bp, Artificial Sequence
  ENSG00000251613_16 (sequence is synthesized)
gtctcttatgagtttgcagtcagatgtcagctgtggctacatcatctggacacatgactgagggtggaacattcaatttcaaggtatctcactcatatggctggtaagttggttctggct

SEQ ID NO: 1035089 - DNA, 120 bp, Artificial Sequence
  ENSG00000251613_17 (sequence is synthesized)
gttggctaagagtctcaatttctggccacatgggccactccatgaggctgcttgagtgtcctctcaacatggtgtctggatctttggattacaaaagactaatgtggaatctgcaatgcc

SEQ ID NO: 1035090 - DNA, 120 bp, Artificial Sequence
  ENSG00000251613_18 (sequence is synthesized)
atttataatttatccttgaaagttcacacacttctgctgtacaaacttctgttcttacccgtgactcttttgtcaagctgtgtcttgataaattgtaacacttttgagtctttgaagaaa

SEQ ID NO: 1035091 - DNA, 120 bp, Artificial Sequence
  ENSG00000251611_0 (sequence is synthesized)
actcacgcacgcacaccgccgtacacagcacaatcgttcaccgtcccgccaaaggctcgtctctcgggttctgcctagtggaaggagtcggacaacgccgcacgtcacgggcgtttcgga

SEQ ID NO: 1035092 - DNA, 120 bp, Artificial Sequence
  ENSG00000251611_1 (sequence is synthesized)
ggaacaccgggtacttgccacaagtatctctccagattcatcagcctttcacctgtgacaagctcagtcaagaagtggctcctaagtaaaagctggggaagaacaaggaagatagagctc

SEQ ID NO: 1035093 - DNA, 120 bp, Artificial Sequence
  ENSG00000254222_0 (sequence is synthesized)
tgagttgtttttcagaaaccccaattcccaccaacttcagatctccattcctaccaacttcagctctgctggtatgtggacatcagagaagggggaactggaaactgaactctgaccata

SEQ ID NO: 1035094 - DNA, 120 bp, Artificial Sequence
  ENSG00000254222_1 (sequence is synthesized)
tcattctgtgttctaaatgtcttcctgaggggcctggaggaagttacactcacaagccagagctaacattcttttctgctgaccccaaattttaaaataaagcttctcttccttaaccaa

SEQ ID NO: 1035095 - DNA, 120 bp, Artificial Sequence
  ENSG00000286975_0 (sequence is synthesized)
tggaagagaaagaaatgaaatgtggtgaacaattgcacctgtctaatatcctagtttttttgtgcttctaagggtgtgtctaatggaaacattatttaccacatgtgtcctggtgccaaa

SEQ ID NO: 1035096 - DNA, 120 bp, Artificial Sequence
  ENSG00000286975_1 (sequence is synthesized)
aaggtacaaaacaattgttctagtataaggatagagatagttcttctagcataaggatagagatatttcttctagcataaggatagagatatttcttctagcataaggatagagatatct

SEQ ID NO: 1035097 - DNA, 120 bp, Artificial Sequence
  ENSG00000286975_2 (sequence is synthesized)
cttctagcataaggatagagatatttctctatccttatacttactgggaaagaaagctcccctcctcttttttttgtctgggtctaaatcaactttttggtggctggtcaaaatcgcttt

SEQ ID NO: 1035098 - DNA, 120 bp, Artificial Sequence
  ENSG00000286975_3 (sequence is synthesized)
cctttcagccacttgaatgctggttcaattaggccctttctcctcagggcacctatcccttattaaaaaatcacctaagttgccctcgatgtttaacaatgccatccacttctaatgact

SEQ ID NO: 1035099 - DNA, 120 bp, Artificial Sequence
  ENSG00000286975_4 (sequence is synthesized)
tcttactgtttttttttttctcctgaaattctctagctttctttatatgtttgcctctttgctttcattcactgtggctttttattttgattcctcctctgagcatcaacttctggtcca

SEQ ID NO: 1035100 - DNA, 120 bp, Artificial Sequence
  ENSG00000286975_5 (sequence is synthesized)
ctgtctcaaatcaattctagtatatctaccaactaattacatttcaatccctacaatgtcaggtaccttgggctttctcaaattacttttgatttggggaaagaatttaaaaaaatgttt

SEQ ID NO: 1035101 - DNA, 120 bp, Artificial Sequence
  ENSG00000286975_6 (sequence is synthesized)
ccactgcaattatttaatgattcaaccttcatagaaacttaaacttcagaggagcaaatagcctcaacagaggactaattaagcttcatgttaccctggcgaagtagggagaataagtac

SEQ ID NO: 1035102 - DNA, 120 bp, Artificial Sequence
  ENSG00000286975_7 (sequence is synthesized)
tgcaatcatttcctctgaagttcgattaaaagccaagttttaaaatgttagaccagtgctaatctgcatgactgcttcgggtttcatttgagaaagaattgtggttgcaaacattaacac

SEQ ID NO: 1035103 - DNA, 120 bp, Artificial Sequence
  ENSG00000286975_8 (sequence is synthesized)
taaaatatgtgaatctatttccataatcagggccctacgggatggagcctagatttaatatggttttggtgcttacgtgttttccactacattgattaatactgtcctctcatgtggaac

SEQ ID NO: 1035104 - DNA, 120 bp, Artificial Sequence
  ENSG00000286975_9 (sequence is synthesized)
ccaatcaggagcaacctgccagaggactattttctataaatttaagctgaactaatatctgtggaaatcttaagactaaagaagagttgatgaatatactacaattaaagttgccttgta

SEQ ID NO: 1035105 - DNA, 120 bp, Artificial Sequence
  ENSG00000286975_10 (sequence is synthesized)
aattgaagaatgaagcagaggataatgaacatattgaaatgattccacatgttttatgcatgacacatttgtaattaaaacggatcctgaagctactcccactaagtgctcggtactggg

SEQ ID NO: 1035106 - DNA, 120 bp, Artificial Sequence
  ENSG00000286975_11 (sequence is synthesized)
ctaggacatgctgctcactattgtgagtgatcgcagcaactcagttttgaatatttatatatgttgaggtgaaggatcttccttgactacatctgaggagttgtggaatcctcagaagta

SEQ ID NO: 1035107 - DNA, 120 bp, Artificial Sequence
  ENSG00000286975_12 (sequence is synthesized)
agtccttctaacaacacactacagtatgatgcgtttctgatccaagctgctgtgaatccatgtcaggagaaaccttcagttgtgttttaataaatgaaaacacagtagggctgagaaatc

SEQ ID NO: 1035108 - DNA, 120 bp, Artificial Sequence
  ENSG00000286975_13 (sequence is synthesized)
tgcagctacctggaaaaataaactccttcccccttggaaactgctaatttcttaaatatccacatttgcatttagttttgggaatttatattgtttcaataaaaatgagcatatttggtt

SEQ ID NO: 1035109 - DNA, 79 bp, Artificial Sequence
  ENSG00000254228_0 (sequence is synthesized)
atgttgtttcggagtttgaaggtgatttatggagaatgagagatgttgagcgtccagcgtgaggtgggtccccgagact

SEQ ID NO: 1035110 - DNA, 120 bp, Artificial Sequence
  ENSG00000254228_1 (sequence is synthesized)
tcatttgcagcttctagattcaccttcagtgacttctgaatgcactggatccgccaggcttctgggaaagggctggagtgggttggccgtattagaaccaaacgtaacagttacacgaca

SEQ ID NO: 1035111 - DNA, 120 bp, Artificial Sequence
  ENSG00000254228_2 (sequence is synthesized)
gaatgcgctgcatctgtgaaaggcaggttcaccatctcaagagatgattcaaagaacacactgtatctgcaagtgaataccctgaaaaccgagtacacggccatctattactgtactaga

SEQ ID NO: 1035112 - DNA, 120 bp, Artificial Sequence
  ENSG00000232913_0 (sequence is synthesized)
gatggggcaagccatgggactggaaggcagcaggcagatgtcagggttggggattactggctcagaagcaggaaatctcatgtagaagcccagaactttcaagagataagaagtagagag

SEQ ID NO: 1035113 - DNA, 120 bp, Artificial Sequence
  ENSG00000232913_1 (sequence is synthesized)
tacagggctgtacatacgactgttgaagtttataactaaaaataaaccaataggaaagctagccatgccatagtggctacatgcatgggatgtgaagccacacttcctgagtttgaatcc

SEQ ID NO: 1035114 - DNA, 120 bp, Artificial Sequence
  ENSG00000232913_2 (sequence is synthesized)
cagctctgcctcatcttaaaagtgtgatcatagagagtgtgccaacatcattctaaatgattgggatacatgagtgggagtgagtgaagtggacaatggcagcattttagaaaaggatta

SEQ ID NO: 1035115 - DNA, 120 bp, Artificial Sequence
  ENSG00000232913_3 (sequence is synthesized)
gtctgggtgttgactgagactggaggggtcaggtggggagctgtggtgggcaggaacaccagcttttcagagtttacctcaacactgtccaactcagttggcctagagtcaggcaacctg

SEQ ID NO: 1035116 - DNA, 120 bp, Artificial Sequence
  ENSG00000232913_4 (sequence is synthesized)
gttttaagcccatgttcaccacctttgattggaggaacccaggcaaactgcacttctctgggcctcagaatccttctataaaatgaaagggtctcctctgattatttccaaggccctcca

SEQ ID NO: 1035117 - DNA, 120 bp, Artificial Sequence
  ENSG00000232913_5 (sequence is synthesized)
tcagctcaaacatgctatcattttcatggcatcacaaagaggcgaatgaatggggcttccttcctcatttccaactgattatattccagactcaaaagagaaacgaataaataaaacata

SEQ ID NO: 1035118 - DNA, 120 bp, Artificial Sequence
  ENSG00000232913_6 (sequence is synthesized)
aatgtatgtgtcaaggtttgaaaataggttactcagataatttcattccatatgtgcagctgctgttctaaagtataaaccacactcgtctagtaaaaccatcatctgttctataaggaa

SEQ ID NO: 1035119 - DNA, 120 bp, Artificial Sequence
  ENSG00000232913_7 (sequence is synthesized)
tatgaacattcatctggcccttatttttagagtgagaggtcaaatgcacaagaggtgaactgtacttgagtccaccgtgccagatgcagatgggggactgaaggccaaatataaatcgta

SEQ ID NO: 1035120 - DNA, 120 bp, Artificial Sequence
  ENSG00000232913_8 (sequence is synthesized)
atatctgaatttgtgggtatttcaattagatggcttagaagatcaaaagaaataaatcctggaatatcaaagtggcaaacagaagccgcaaaaggccatcattcatttggttcattcatt

SEQ ID NO: 1035121 - DNA, 120 bp, Artificial Sequence
  ENSG00000232913_9 (sequence is synthesized)
caacaaatcactctcacaaaatcaatcatcaaaataaacaggctctgactcatttcccattgcttattgtagttaggtttctttttctccccagggtcatgggatacatgaacttcaggc

SEQ ID NO: 1035122 - DNA, 120 bp, Artificial Sequence
  ENSG00000232913_10 (sequence is synthesized)
ataatcaaggacagaaaatcagtattgatggggcaagccatgggactggaaggcagcaggcagatgtcagggttggggattactggctcagaagcaggtatcatagcagaagcccaagtc

SEQ ID NO: 1035123 - DNA, 120 bp, Artificial Sequence
  ENSG00000232913_11 (sequence is synthesized)
tcttccaagtcacagggctaggaaccaagatatcagcaggggaagcagggggtggagggggtataaaaatgacccaactacaaccaccaatactaccatttactgaggcttcgccatgca

SEQ ID NO: 1035124 - DNA, 120 bp, Artificial Sequence
  ENSG00000232913_12 (sequence is synthesized)
gcaggcaccctgaaaagtgttttgtttgcattatcttagtcagtcctcctagcagcctgattagtagaagttgttacagaaacacagatgaaaccatgggttagaaagaggttgagtgct

SEQ ID NO: 1035125 - DNA, 120 bp, Artificial Sequence
  ENSG00000232913_13 (sequence is synthesized)
actcaataagttgagtatttattggtaaacaataaatttttaccttaaaaaagagctatttggttgtttaattagcagaggacagaagggaggaagcgagcaaaatgggaaaagattaat

SEQ ID NO: 1035126 - DNA, 120 bp, Artificial Sequence
  ENSG00000232913_14 (sequence is synthesized)
gccagatgataaagggccttgactaccaagctaagaaatggagattaatttctttagtaggaaatgaggagcctttcattcattcaacacatatttattgagtgctttcagtgtgccaac

SEQ ID NO: 1035127 - DNA, 120 bp, Artificial Sequence
  ENSG00000232913_15 (sequence is synthesized)
atcattctaaatgattgggatacatgagtgggagtgagtgaagtggacaatggcagcattttagaaaaggattaaggtttctttttctccccagggtcatgggatacatgaacttcaggc

SEQ ID NO: 1035128 - DNA, 120 bp, Artificial Sequence
  ENSG00000232913_16 (sequence is synthesized)
tcaatggtcatgggatacatgaacttcaggcttaatctctgtgtgagaaaaacagcatgaagataatcaactctatgtcagaagaaattggcaacactactaaccacgagtaatgcacac

SEQ ID NO: 1035129 - DNA, 120 bp, Artificial Sequence
  ENSG00000232913_17 (sequence is synthesized)
cgaagggttgtgaagaggacgttactatttgtacactgttttgagcagtgcctgctgtacagtaaggaccatatatgtgtttataaaataaatcttagttgctataggcaacaccacgca

SEQ ID NO: 1035130 - DNA, 120 bp, Artificial Sequence
  ENSG00000232913_18 (sequence is synthesized)
ctctttccccagaagagactcagtcaacatcccaaagaccaatgatttcattgttttacaccaaatatccctcctctaaatttttcaagaaattgggaataaacttcttacgcaagaaaa

SEQ ID NO: 1035131 - DNA, 120 bp, Artificial Sequence
  ENSG00000232913_19 (sequence is synthesized)
tcaaccactgtcttctgactcacagcccaagggaaagaccaggcaagagtaggggtgaagaaatctcatgtagaagcccagaactttcaagagataagaagtagagagattctggtttaa

SEQ ID NO: 1035132 - DNA, 120 bp, Artificial Sequence
  ENSG00000232913_20 (sequence is synthesized)
ctgctatgattaagtttcatgaggcctccccagcccttcagaacctggcagctacgtgcatgagcacagcctctgaaagcatgctgtcagatgccgggtgtgaaactctggcacttggga

SEQ ID NO: 1035133 - DNA, 120 bp, Artificial Sequence
  ENSG00000232913_21 (sequence is synthesized)
ttgataaggctggcaccaaaaggagcgtccaccactgggtggattccattattgttcctatgctacaggtgaagaaggtgaagctcagagagatcaagtagtggtcgatctttgtaaggt

SEQ ID NO: 1035134 - DNA, 120 bp, Artificial Sequence
  ENSG00000232913_22 (sequence is synthesized)
gcctcagctttttcatggagagaggctgggaaggaaggcattgcagttacttgttaattcctcagaatgttaatttactatgaagatctactccctatagctgaagttccactgagatgt

SEQ ID NO: 1035135 - DNA, 120 bp, Artificial Sequence
  ENSG00000232913_23 (sequence is synthesized)
gattatattacctgagtgaatgcttatattatctggaataagaactgtttcatacttataaggttctttaatctactcttggcaggtctaaattaaacaaagtctattagttttcttcag

SEQ ID NO: 1035136 - DNA, 120 bp, Artificial Sequence
  ENSG00000232913_24 (sequence is synthesized)
gcaaaagcaagtaaccagcctagatgagcacatccaacctctctcctcttgattctcacatgtattacccagggtcctgtttctgcagaaaggagggaacccttgagaacattttcacta

SEQ ID NO: 1035137 - DNA, 120 bp, Artificial Sequence
  ENSG00000232913_25 (sequence is synthesized)
tgtcactttagcagcctaactctgtggtacccctgatttagggagggtgagggggtggtgaagactgcaaccccaatagaagcagggaaggtgacatagaggtgagaatggaaggacttc

SEQ ID NO: 1035138 - DNA, 120 bp, Artificial Sequence
  ENSG00000232913_26 (sequence is synthesized)
agttcttggcttctcttggtttctgccctgggtctttctggcactatctttccctaaagtatttcatctaattcctcaaacatccctggatagcctatatcataaagtcctttatgatct

SEQ ID NO: 1035139 - DNA, 120 bp, Artificial Sequence
  ENSG00000232913_27 (sequence is synthesized)
ctgttttacctggaaagaaagtgagatgcaaagaagtttagtaacttgctgagaccacagaaccagacagaggttgtgctgagacccacccagagcaccaggctcttcatcacaacctct

SEQ ID NO: 1035140 - DNA, 120 bp, Artificial Sequence
  ENSG00000232913_28 (sequence is synthesized)
ttttgtaatttcccacacagtcttcttaatggcatcaggggtgcacatgtgtgttctccctgaccattaaaccctcactggcattaactggacaaataggaagtttaaagagggtattta

SEQ ID NO: 1035141 - DNA, 120 bp, Artificial Sequence
  ENSG00000232913_29 (sequence is synthesized)
acaccccattcatctagtctccctgcctgagctgctcccccatcctagaatgtgcttttatctcctgtgataaccaaagacccactggatcctccctgccccctctctcaccataagggc

SEQ ID NO: 1035142 - DNA, 120 bp, Artificial Sequence
  ENSG00000232913_30 (sequence is synthesized)
ctcaatgcaagttaatgtctccattttccacattcctattatgtttatagatggttctgtacaatttcatgttttacagacttgttcaaccattgatataataacaaccatgaaaacaaa

SEQ ID NO: 1035143 - DNA, 120 bp, Artificial Sequence
  ENSG00000232913_31 (sequence is synthesized)
atgtgaatgtctaaagactccaagcatcctaactccaattagaaatccagcagcaatgtattaccatgcagttgtctaaaaccttaaaaaaaaaagctatttaaattgtccatcttttca

SEQ ID NO: 1035144 - DNA, 120 bp, Artificial Sequence
  ENSG00000232912_0 (sequence is synthesized)
gccaggaccatgcaatcggaacgtgggcttgataccaagtgacatctaacaggtccagtaaaagaggcctacacaataaaggcagcatgtgagaaaggctgactctggaacatcaggata

SEQ ID NO: 1035145 - DNA, 120 bp, Artificial Sequence
  ENSG00000232912_1 (sequence is synthesized)
aaatttaacttctggctttaaaaaagggacagaaaagcaggcagatctgctagtaagcaaactacagctcccccgaggagacacacaggcagtgggtaagaggaacagacccatggctcc

SEQ ID NO: 1035146 - DNA, 120 bp, Artificial Sequence
  ENSG00000232912_2 (sequence is synthesized)
actgaagacacagagcagcagacgaaaaagacatgtcctaaatgttaaatggtaaggaggggtagggtgaaaaaagggaacatggatgccaggcagaagaaataaaagcctttccaaaca

SEQ ID NO: 1035147 - DNA, 120 bp, Artificial Sequence
  ENSG00000232912_3 (sequence is synthesized)
agtgcagcaagggacccaagaaggctagactgcagtggtctgtagtagttcagaatgccttcgccaaggcagtgacatcagcgagatcacaaggggtgggcaactattgcaggggtggga

SEQ ID NO: 1035148 - DNA, 120 bp, Artificial Sequence
  ENSG00000232912_4 (sequence is synthesized)
cagcagacgaaaaagacatgtcctaaatgttaaatggtgggtctctctgttctctcctcctgagcctgggtagacctttgtaactgtcttgaccaacagaatgtgacagaatgataccag

SEQ ID NO: 1035149 - DNA, 120 bp, Artificial Sequence
  ENSG00000232912_5 (sequence is synthesized)
gtgacttctaagactacatcatacaaagcaacacagcttctgctgggctctccctctctggacacgtgtctttgaagccctgagctgccagattaaacagtccggcttgcctaaagtcac

SEQ ID NO: 1035150 - DNA, 120 bp, Artificial Sequence
  ENSG00000232912_6 (sequence is synthesized)
cacgctggagagaccatcagggatggagaggtgctacagaaaccctagctattctagtccccagccatttgagtcttcctagcccagactcataagtgaagaaaccttcaagatgattcc

SEQ ID NO: 1035151 - DNA, 120 bp, Artificial Sequence
  ENSG00000232912_7 (sequence is synthesized)
aatacctcctatcacttgactgcaacctcgtgaaagcctaagccagacctgcacggtggagccattcctaaattctggtcccacagaaactgtgaaagataataaatgatcatcattgct

SEQ ID NO: 1035152 - DNA, 120 bp, Artificial Sequence
  ENSG00000232912_8 (sequence is synthesized)
gcacggaaagatggccctgccctcaaggagctgcagtctgcccaggaaggcagacagataaactgctatagttttccactattgagctgaatttcgtatcaccatcaaaagttacctacc

SEQ ID NO: 1035153 - DNA, 120 bp, Artificial Sequence
  ENSG00000282408_0 (sequence is synthesized)
ctttatactgccctgggactctgtagagagtccctaccagcaagaaggctctcaccagatgtggcccctcgaccttggatgtagcctccagaattactctagaagtaaggaaccaagcgc

SEQ ID NO: 1035154 - DNA, 120 bp, Artificial Sequence
  ENSG00000282408_1 (sequence is synthesized)
gagtctcgaaccacatattttccatcgactacatccaaagctctgcaaagaacggaaccacagtcatgtcaatacactatgaacaatgccaaaatctcaagaaacccaaaggcatatttc

SEQ ID NO: 1035155 - DNA, 120 bp, Artificial Sequence
  ENSG00000282408_2 (sequence is synthesized)
tccatgtattaatatatttccagtcagcccaaataatgaatcattcttcaaaacctacacggcgttgtagataatttggcgctctcatagcacatttataaataaacctggatgacttca

SEQ ID NO: 1035156 - DNA, 73 bp, Artificial Sequence
  ENSG00000206195_0 (sequence is synthesized)
agagcgagcttcggagaagcagtggtgggttccatgtgatggtggagtaggaggcaggtctccgcgtctcgct

SEQ ID NO: 1035157 - DNA, 77 bp, Artificial Sequence
  ENSG00000206195_1 (sequence is synthesized)
aaagaaaaaagaagaaaacaaacctccatacgagaatgggtctaaaggaacttcccaaacctccatgattttgcagg

SEQ ID NO: 1035158 - DNA, 120 bp, Artificial Sequence
  ENSG00000206195_2 (sequence is synthesized)
gggtctaaaggaacttcccaaacctccatgattttgcaggaaacaagataaaggtggtttccacaagaaaaatggcacaatgtttctcagaagacaattacataagaatcagcatacttc

SEQ ID NO: 1035159 - DNA, 120 bp, Artificial Sequence
  ENSG00000206195_3 (sequence is synthesized)
aaattcacagcaaataatcagacaattgatgaaaatacttacccaaacactaattgtagactatgccttctgaatatgtttgtcataaacttggagtaaggaatcctcacaggcactgga

SEQ ID NO: 1035160 - DNA, 120 bp, Artificial Sequence
  ENSG00000206195_4 (sequence is synthesized)
caattcaaaaaacgtaaagttgtttgttagaatactggtgcttttggatagaaaccctcatccatatcctggtaaggcttgaagttgcacaggagttttcatttgtcaaaacccagaaaa

SEQ ID NO: 1035161 - DNA, 120 bp, Artificial Sequence
  ENSG00000206195_5 (sequence is synthesized)
ccataagctttagatttgtgaattttatattgtattatatgtgacctttctttttaaaaaatgagctgtaagcagtctcccagacagtagctcagcctccagaactctctttctgcatag

SEQ ID NO: 1035162 - DNA, 120 bp, Artificial Sequence
  ENSG00000206195_6 (sequence is synthesized)
ttgaagacccctcttcacacaagatggtagcaacaaatcataggtgcaattgcaccaaattcacagaagatcaattgaaaatcctcatcaataccttcactcaaaaaccttacccaggtt

SEQ ID NO: 1035163 - DNA, 120 bp, Artificial Sequence
  ENSG00000206195_7 (sequence is synthesized)
atgctaccaaacaaaaacttgctttagcaatcaatgcagaagagtccagaatccagatttggtttcagaatcaaagagctaggcatggattccagaaaacaccagaacctgactttagat

SEQ ID NO: 1035164 - DNA, 120 bp, Artificial Sequence
  ENSG00000206195_8 (sequence is synthesized)
ttaagccacagccatggacaagattaacctggtgtggagtttcaaaatagagaagccagatggtgttgtaccacctatagcacctttcaattacacacagtcatccatgcatttatgaaa

SEQ ID NO: 1035165 - DNA, 120 bp, Artificial Sequence
  ENSG00000206195_9 (sequence is synthesized)
aacccataccctgggattgattccagagaacaacttgctgaagaaattggtgcttcagagtcaagagtccaaatttggttccaaaatcaaagatctagatttcatctccagagaaaaaga

SEQ ID NO: 1035166 - DNA, 120 bp, Artificial Sequence
  ENSG00000206195_10 (sequence is synthesized)
gaacctgttatgtccttagaatgagaagaccagagaagaccaggggcaaggtttctgagggacttcaaggtacagaagatacacaaagtggcaccagcctcactagcactctcatttctc

SEQ ID NO: 1035167 - DNA, 120 bp, Artificial Sequence
  ENSG00000206195_11 (sequence is synthesized)
aagagccagaacatggtgaatacagtcaagttcagtgtatttgataatatcaatttgggccccaaatctctctcacagtcttcctgggagtctattcttcttccaaaagtgcaagctaag

SEQ ID NO: 1035168 - DNA, 80 bp, Artificial Sequence
  ENSG00000206195_12 (sequence is synthesized)
aagatggcttgagcctaggagtttgaaaccagtctgagcaacatagtaagaccctgtctctattctaaaaaacaaaataa

SEQ ID NO: 1035169 - DNA, 120 bp, Artificial Sequence
  ENSG00000206195_13 (sequence is synthesized)
acatagtaagaccctgtctctattctaaaaaacaaaataagtaaaaaggactgtaggaggccaagacaggtacaggaggcaccacactaccctgttgacacagcctggatccagagttca

SEQ ID NO: 1035170 - DNA, 120 bp, Artificial Sequence
  ENSG00000206195_14 (sequence is synthesized)
gcagaccttgagacaatgaaaacaaacttagtaataatcatttttcaatcattgcagtaattattgatttggacaaaaatcaattgatgtcaaaaccttaaagtgacgtttctctgccta

SEQ ID NO: 1035171 - DNA, 120 bp, Artificial Sequence
  ENSG00000206195_15 (sequence is synthesized)
tggagtggtcattcttttattcctttagtttcataataaattttcttttacttaaaaaaacttatagtttgatgaagagtgagatatatacctcatctcaaagaatcttcacacacgcac

SEQ ID NO: 1035172 - DNA, 120 bp, Artificial Sequence
  ENSG00000206195_16 (sequence is synthesized)
ttattaattacaaaaggaaaatcagtaattttgcagtggagacatatggccaactccaccttacccaagtggctgaaagtcactgcaccagtaatggcacaaaccaatgtgagatgattc

SEQ ID NO: 1035173 - DNA, 120 bp, Artificial Sequence
  ENSG00000206195_17 (sequence is synthesized)
gggtaagctgacactgaaactaataattaggcaatgtcaagcaaatacaaattcaggttgacagtctgcaaagtaacatccatgtactcttcaacaatggatcgaccctagctactcagg

SEQ ID NO: 1035174 - DNA, 120 bp, Artificial Sequence
  ENSG00000206195_18 (sequence is synthesized)
aggctgaggtggaataattgtttgaggccaggagttccagatcagcccgggcaacatcatgcgaccccatctctaaaaacatctttttaaaaatgagccaggtgtggtagcatgcacccg

SEQ ID NO: 1035175 - DNA, 120 bp, Artificial Sequence
  ENSG00000206195_19 (sequence is synthesized)
ggtgtggtagcatgcacccgtagtctcagctactcaggagcctgaggcaggaggaaggtttcaacataggagatcgaggctgctgtgagctatgatcgtgctactgcactccagcctggg

SEQ ID NO: 1035176 - DNA, 120 bp, Artificial Sequence
  ENSG00000206195_20 (sequence is synthesized)
tccaaacaacaacaagaaaacaaaacaaaacaaaacaaaaaatagatagaatagtgacaataaaaatggagaaacagtaggctgactcaggaaatgcttagaaagtacagccatacctca

SEQ ID NO: 1035177 - DNA, 120 bp, Artificial Sequence
  ENSG00000206195_21 (sequence is synthesized)
aagatattgtagatttgattcgagaccaccacaataaagcagatattgctacaaagtgagtcacacaaattgttttgtttccttgtgaatatgaagttatattggctgggtgtgatggct

SEQ ID NO: 1035178 - DNA, 120 bp, Artificial Sequence
  ENSG00000206195_22 (sequence is synthesized)
catgcctataatcccagtactttaggagacggaggcgggagggtcacttgagcccaggaattgtgagatcaacctgggcatatagggagatcctgtctctatttaaaaaaagaagctatg

SEQ ID NO: 1035179 - DNA, 120 bp, Artificial Sequence
  ENSG00000206195_23 (sequence is synthesized)
tttacactacactatagtctatttaaagtgtgaaatggcgttatgtccttaattttaaaactcttgatgctggctgggttcggtggctcatacctgtaatcccatcactttgggaggcca

SEQ ID NO: 1035180 - DNA, 89 bp, Artificial Sequence
  ENSG00000206195_24 (sequence is synthesized)
ctggacaacatggcaaaacacgtctttgaaaaagaagaaaaactacttgctgcccttacttgaagctcaattatttaaaacaaagaaaa

SEQ ID NO: 1035181 - DNA, 120 bp, Artificial Sequence
  ENSG00000206195_25 (sequence is synthesized)
ctgcccttacttgaagctcaattatttaaaacaaagaaaaaatataaaaatcttttattgctgaaaatgctaatgatcacctgagccttcagggagtcttagtctttttgctggtgaagg

SEQ ID NO: 1035182 - DNA, 120 bp, Artificial Sequence
  ENSG00000206195_26 (sequence is synthesized)
gtcttgccttgatgttgttggctgctgcctgataagggcgatggttgctgaatattgaagtggttgtaacaatttcttaaaagaaaacaatgaaatttgccacattaactgactcttcct

SEQ ID NO: 1035183 - DNA, 120 bp, Artificial Sequence
  ENSG00000206195_27 (sequence is synthesized)
aatgaaatttgccacattaactgactcttccttccacgaaagatttcagtgtaccatgcgatactgtttgataagcattttacccatagtagaacttctttcaaaattggagtcagtcct

SEQ ID NO: 1035184 - DNA, 120 bp, Artificial Sequence
  ENSG00000206195_28 (sequence is synthesized)
caatattctaaatcctttgttgtaggctaaacaatattcacagcattttcaccaggagtaaatttcatctcacaaaaccactttccaggctctttctggactgtagagttctttccaggc

SEQ ID NO: 1035185 - DNA, 120 bp, Artificial Sequence
  ENSG00000206195_29 (sequence is synthesized)
taccttgtggcagtttaagagtctggcatcattttccgctgggacctaaggatcgaggaggtgcttgtgactagactgccaatggacccatcacaaagtttaacccaaccttgatccccg

SEQ ID NO: 1035186 - DNA, 120 bp, Artificial Sequence
  ENSG00000206195_30 (sequence is synthesized)
agtcttcacaaatgctcactgaagaaaattcctggaacaattcagggtcctttcataacctctactctgaggtgttaataaaaaaccttagtaacttaaaaaaaatgagctgtacacaaa

SEQ ID NO: 1035187 - DNA, 120 bp, Artificial Sequence
  ENSG00000206195_31 (sequence is synthesized)
tactgaacaataatgctacatatgttaagtatgtaagaaaaatatatactttgacataaataagaaacggtgagttgataattggatagaatggtggatagagtgatagatatgtagtaa

SEQ ID NO: 1035188 - DNA, 120 bp, Artificial Sequence
  ENSG00000206195_32 (sequence is synthesized)
agcaaatataacaaaatgataattgtacaatctaagtggttggactataaatatgcacttcccacaacatttttatatgtttaaacagttttataataccatattagggaaactgtttgt

SEQ ID NO: 1035189 - DNA, 120 bp, Artificial Sequence
  ENSG00000206195_33 (sequence is synthesized)
ctcaaggaaatagagattgtgatatgttctagtacaatgaagtgtaatcatgtaaaataaaagcttttacttctggcaattaaagttaatcatgttagaacactgtctaggaatggttgg

SEQ ID NO: 1035190 - DNA, 120 bp, Artificial Sequence
  ENSG00000206195_34 (sequence is synthesized)
ggcgtggtcagagcgagcttcggagaagcagtggtgggttccatgtgatggtggagtaggaggcaggtctccgcggttcatctgtgttgctctaaatgacactgcttcattattttgatg

SEQ ID NO: 1035191 - DNA, 120 bp, Artificial Sequence
  ENSG00000206195_35 (sequence is synthesized)
gctggagaatatttcctagtgtatgtatatgagagtttcttgatctctttatctgtggatgaacagctactttgaaacatatggtacatttgtgttaaggctagtcaccctgctgtggaa

SEQ ID NO: 1035192 - DNA, 120 bp, Artificial Sequence
  ENSG00000206195_36 (sequence is synthesized)
tagaaggccagaattgatcagtctcatctgagagtaactttgtacccatcactgattccttctgagactgcctccacttccccagcagcctctggtttcttcatgtggctgcagatggca

SEQ ID NO: 1035193 - DNA, 120 bp, Artificial Sequence
  ENSG00000206195_37 (sequence is synthesized)
ggatttcccaaaggtttctggctgaaacatattccgtggtgtatctgtacagcagtttcctcatccctgcagctgtgtttgaacaggtcatttaccatgctgtcctccaggttcaacagt

SEQ ID NO: 1035194 - DNA, 120 bp, Artificial Sequence
  ENSG00000206195_38 (sequence is synthesized)
atggctccaaatgatgaaatttcattctgattttctggctgaagactattctctttgtgtatgtccaccacagttactttatcccttcatctgtggatgggcagtctcgctgtattgccc

SEQ ID NO: 1035195 - DNA, 120 bp, Artificial Sequence
  ENSG00000206195_39 (sequence is synthesized)
gaaactccaaactgttcaaggagatagttctgttgtgattacttcattgagaaatttaacttatgagcagttgaaaggaatgcaagttgctgcaaaatcagaatgaagagtgcaaaacga

SEQ ID NO: 1035196 - DNA, 120 bp, Artificial Sequence
  ENSG00000206195_40 (sequence is synthesized)
ccaagctacaatgttttgtcattattcactctgatgtgaaaaaggcagtgaatttaatagaaaataacttcgtagagcaaaatctcaggtgtgtttttttagtgccgcagtcttggatga

SEQ ID NO: 1035197 - DNA, 120 bp, Artificial Sequence
  ENSG00000206195_41 (sequence is synthesized)
cttgattactttgagtgctattcattagtttctgctttcattgagaatgcaacaaaagccaactaggctgctgctaactccttgctggacttcttctgccactgtcacaggaactgtaat

SEQ ID NO: 1035198 - DNA, 120 bp, Artificial Sequence
  ENSG00000206195_42 (sequence is synthesized)
ctcactggacaattaactagggagtctttcatcttgagtgactgctgcacaaatgatcttcaaagcattttagccaccagaggaattctcttgaaatacccaaaatccatcagtatcttg

SEQ ID NO: 1035199 - DNA, 120 bp, Artificial Sequence
  ENSG00000206195_43 (sequence is synthesized)
aatcatgctggattttgaagaattcttaacaagccatgtaaagggggctctctggccttgaaatagtgatgttttttatacagaaaggagaatgcagaatggtcagactaccatgcactg

SEQ ID NO: 1035200 - DNA, 120 bp, Artificial Sequence
  ENSG00000206195_44 (sequence is synthesized)
ttaaatttgatttcaagaaattacaggaaaactttccaaagttccatctcacagaaattatttttacaaagaattccaagataagtttagttttatggaagacttttatgtggtttttac

SEQ ID NO: 1035201 - DNA, 120 bp, Artificial Sequence
  ENSG00000206195_45 (sequence is synthesized)
tcactcttcatctcagacatcaacagatgattacatcacttatttagctagtaaatttattaatataaaaactcagagacattccaatatccacattgcttacaccattagtcatagatt

SEQ ID NO: 1035202 - DNA, 120 bp, Artificial Sequence
  ENSG00000206195_46 (sequence is synthesized)
cagtgtcagctatgacaattgaaaataagctgttttgtgatttaaaggtttaaatttctctaaccaaactgcttgatccagatgcaggactgcaaatgttaatatttgttctggaagaac

SEQ ID NO: 1035203 - DNA, 120 bp, Artificial Sequence
  ENSG00000206195_47 (sequence is synthesized)
aatcaaataagacttaagaggaaaaggaatggccacaatccacctgaaatttttttttaaaaagtgtgcagcctactaaatcagaatgaaaatagaagtacaagattataaacaaaatgc

SEQ ID NO: 1035204 - DNA, 120 bp, Artificial Sequence
  ENSG00000206195_48 (sequence is synthesized)
aatcaaacttttcttaagcttacctaaagttatttcatctgaaaatttcaagcaactttgttcaacattaaattgacaatctaaactaacaagtcttttgaatttatgcatggtagtaaa

SEQ ID NO: 1035205 - DNA, 120 bp, Artificial Sequence
  ENSG00000206195_49 (sequence is synthesized)
cattctctctattaactttattacctaaggctaaacctaaaatttttaagcaaaattagaaaaatagtcttcactcatcaaaaaataaagtttgttacatttagtattttcccaataaaa

SEQ ID NO: 1035206 - DNA, 120 bp, Artificial Sequence
  ENSG00000206195_50 (sequence is synthesized)
tgagtgtctcactggagactgaagtccacagatatgcaacaaagcctttgtctccctgatgtttttgcctcctgctggtcatgtgctttcacacatcaagagaggacatttaacatttga

SEQ ID NO: 1035207 - DNA, 120 bp, Artificial Sequence
  ENSG00000206195_51 (sequence is synthesized)
ttctttttttcctattctttgcaagacctccaactgttttttatagtgttaatactaatttatgtttccacaaacagttcccctttctggaaattcataccaggaattgtctttttaaat

SEQ ID NO: 1035208 - DNA, 120 bp, Artificial Sequence
  ENSG00000206195_52 (sequence is synthesized)
attttgatctttttgtaatgttcattctattggagtgagataagatctgagtgtggttttgatctgcatttttctcatgagtagtaatgttaaccacgtttttgtagacattgggtcagt

SEQ ID NO: 1035209 - DNA, 120 bp, Artificial Sequence
  ENSG00000206195_53 (sequence is synthesized)
accacgtttttgtagacattgggtcagtttcctgtcttctttagaaaaatatctaatccggttatttgcccagtttttgtctggcaattgttctgttgttttgttttgttttgttttttt

SEQ ID NO: 1035210 - DNA, 120 bp, Artificial Sequence
  ENSG00000206195_54 (sequence is synthesized)
gcttgtaccttttcaaaaataatcccttatcccaaacttgtaatttttagtgtgcctttttattttctttattgtttcctttgttgggcacaaacgcttcagcttgacgtggtcccacat

SEQ ID NO: 1035211 - DNA, 120 bp, Artificial Sequence
  ENSG00000206195_55 (sequence is synthesized)
gtgcataatttcttggtggctgtgctgttggttactaatcaagaaaaaacaaaatcacaaatcactaccaaagcagttcattgtcaataattttttcccttgtatttttgtttacttttt

SEQ ID NO: 1035212 - DNA, 120 bp, Artificial Sequence
  ENSG00000206195_56 (sequence is synthesized)
gcgaaccctgagcatacatccaagttgccctaaatatacgcacacctgaggttgtctttataggagctttatggttgcaagttttgtgtataatctttaatcattttgagttgattattg

SEQ ID NO: 1035213 - DNA, 120 bp, Artificial Sequence
  ENSG00000206195_57 (sequence is synthesized)
tgtatctagtaccataagagtcctgtattattcttttgcatatggatatctagttttggaaatcttccccgttgtgtcattttggtggtgttttgaaaaatgtgttcattccatataaat

SEQ ID NO: 1035214 - DNA, 120 bp, Artificial Sequence
  ENSG00000206195_58 (sequence is synthesized)
tctctgtgtacgccagtaacatatgggtttgttaactacagattttcatttaattagaactcagggaatgtgacacatcccatatggtttgtatttctcagaataactttggaaattcag

SEQ ID NO: 1035215 - DNA, 120 bp, Artificial Sequence
  ENSG00000206195_59 (sequence is synthesized)
ggtgtttcacatttccacataaattttggcattgtttctttatatttcttaaaacactatttgtcatatactaaatgtatacaattaaaaggtacaaggaagattttgatacgtgtatat

SEQ ID NO: 1035216 - DNA, 120 bp, Artificial Sequence
  ENSG00000206195_60 (sequence is synthesized)
gttgagtaatgataaaatcaggttatttagcatctctttatctcatatagttattatttttgagtggtaacaacattcagaatctttccttctagctactttgaaacatatggtacattt

SEQ ID NO: 1035217 - DNA, 120 bp, Artificial Sequence
  ENSG00000206195_61 (sequence is synthesized)
cgtgagccaccgtgcccagctgtatactaattaacattcttaccaaatgagtttttctctggaaatttccaccagcatttgtgtctcttttaatatattgtatcactttgataacatcca

SEQ ID NO: 1035218 - DNA, 120 bp, Artificial Sequence
  ENSG00000206195_62 (sequence is synthesized)
ctgctttaaatgtggaaccagtggtggggctgttagctgacatggtagttgtactgtgaattttttcagaaacctctagctgttttttatagtgtgtatactaatttacatcctcaccaa

SEQ ID NO: 1035219 - DNA, 120 bp, Artificial Sequence
  ENSG00000206195_63 (sequence is synthesized)
gttttcatggacatttttttgtgaggtttagtgatgtcgagaaagttatttgagaaatccccacattgctttccatggtgtccgaactagtttgcatttccaccaagagcagaccagcat

SEQ ID NO: 1035220 - DNA, 120 bp, Artificial Sequence
  ENSG00000206195_64 (sequence is synthesized)
ccctcctcctctgccttgctggtgttcattcttgtggactgtgtcataattgtcattcatcagaatgtgtgaaatactatctcatgggcctttagctttgcatttctctgatgattcctg

SEQ ID NO: 1035221 - DNA, 120 bp, Artificial Sequence
  ENSG00000206195_65 (sequence is synthesized)
aggtaaagcaatgatatcttgtctgttggttgctgtaaaccttcttttgagatgcatgttttcatgccccttaccctttcttcattgagtttttgtttttctgatttatttgcttaatgt

SEQ ID NO: 1035222 - DNA, 120 bp, Artificial Sequence
  ENSG00000206195_66 (sequence is synthesized)
atttgaggtagatcctggatattagacttcatcagatgcgtatgtgggaacattttctcccattgtgtaggctgtctgtttactgtgttggtaattgcttctgctgtgcagcagctcttt

SEQ ID NO: 1035223 - DNA, 120 bp, Artificial Sequence
  ENSG00000206195_67 (sequence is synthesized)
tgtatattaggccccacttgtcaataattgttttagttgcacttgcttttggggacttaggcatagccatgctctgccaaatcctctgtcaagaagggtatttccaagttctcttgcagg

SEQ ID NO: 1035224 - DNA, 120 bp, Artificial Sequence
  ENSG00000206195_68 (sequence is synthesized)
cttttcatagtttgaggtcttgtgtttacatctttcattcatcttgagttaatttctgtgcagggtgagacacaggggcccactgtttttcttctgcaactggctagcactttatcctgg

SEQ ID NO: 1035225 - DNA, 120 bp, Artificial Sequence
  ENSG00000206195_69 (sequence is synthesized)
caccatctattgagaggagggagtcctttctccaaagcttatttttgtggatttttttgaagatcagatggtgttaggggtgtgggtttacatctgggtcctctaatctgttccactgct

SEQ ID NO: 1035226 - DNA, 120 bp, Artificial Sequence
  ENSG00000206195_70 (sequence is synthesized)
ctgtgtgaaatggggtccctagcttttcaatgaaaattaaaatcgggaagtgtgacacaaccaatgtagtgtggacttctcaggattgctttagaaattcagggtgttttgtggtctgca

SEQ ID NO: 1035227 - DNA, 120 bp, Artificial Sequence
  ENSG00000206195_71 (sequence is synthesized)
tgaattttagcattgcatatttacatattttttaaaaggttggccatatagtaaaggtatacaatggggggagttagagtggggcattttggttaatgcagacacagaggaatgttaaaa

SEQ ID NO: 1035228 - DNA, 120 bp, Artificial Sequence
  ENSG00000206195_72 (sequence is synthesized)
tcaggatatttagagtctctgttatcacaaacagttgttaatttatttgtggtgaaaacatttggaatcttcttttccagattttgtgaaaaagctgtgatgttttgttaacctctggtc

SEQ ID NO: 1035229 - DNA, 120 bp, Artificial Sequence
  ENSG00000206195_73 (sequence is synthesized)
acagtgctgtagaacagagaggaacaattcattgctctcatctaagtgtaattttgtacctatttctgatccctgcccatgcctctgcttccttccaatctctggaaaccactgttgtgc

SEQ ID NO: 1035230 - DNA, 120 bp, Artificial Sequence
  ENSG00000206195_74 (sequence is synthesized)
agataaagctccaggccaggagccccaactggctggtggaggatgtcttgctcctcagcagctgggatttgtaagtatttgtaggaacatggaacagatcagtggctgacaggcccagga

SEQ ID NO: 1035231 - DNA, 120 bp, Artificial Sequence
  ENSG00000206195_75 (sequence is synthesized)
agcagacagtccccttcccataggtcaccagcttcacttccccttcctgcaccccatcctgatttgagggagcccaggatgacaaagagggagtagttgagcaaggtatggagtggcagt

SEQ ID NO: 1035232 - DNA, 120 bp, Artificial Sequence
  ENSG00000206195_76 (sequence is synthesized)
ctctacaggagctcaaaggatgcatttgtccatctgccctgggctcagcttccacactcagagtcactcacatccctccaccgtcgccacagctcacctgtgtgcccacacagacaaggt

SEQ ID NO: 1035233 - DNA, 120 bp, Artificial Sequence
  ENSG00000206195_77 (sequence is synthesized)
cacactgaccccaaacgcacactgtttcaactctcagcacttcactgtcacactcgcgtgtgtacacacatgctttctaatttccacagccacatggatgctcacacactcacacctttg

SEQ ID NO: 1035234 - DNA, 120 bp, Artificial Sequence
  ENSG00000206195_78 (sequence is synthesized)
cacacacacacaagctggctcacagacacactgggggcccagatcctggtcattccccacaggtcttaataaaggttcatggaaggaaacctgtttcctaaggtagggtgggagtgtgtg

SEQ ID NO: 1035235 - DNA, 120 bp, Artificial Sequence
  ENSG00000287605_0 (sequence is synthesized)
caatgctggcttgtgaaatctccctttctatattttccttgcttttgccactattagctttcttgtttgtttgtttgtttgtttgttcctagtgatggaacaaatataatgccttgaaag

SEQ ID NO: 1035236 - DNA, 120 bp, Artificial Sequence
  ENSG00000287605_1 (sequence is synthesized)
gcaatcagaaataatttctgaggtatctgctgttttgcatcctcccagcctccgtgcccctccactggtgtggaccatcaatggccagttgtttctctgtggggtgtatgtgtgactgga

SEQ ID NO: 1035237 - DNA, 120 bp, Artificial Sequence
  ENSG00000287605_2 (sequence is synthesized)
accccctgtaattaccctttccacagcctctgcccccaagcagtgtggcttcttgggttactgaaggcctcacaacaaacctgactttgttcttttagctatcttctctcaatgccatct

SEQ ID NO: 1035238 - DNA, 120 bp, Artificial Sequence
  ENSG00000287605_3 (sequence is synthesized)
cattaaagtactttgccagtgaaaacagccctgacaaatgtctttccacttgtaacctggcctgaaactgcctaacttttcttgatgaatgggctaaatattccaaaataatttactagg

SEQ ID NO: 1035239 - DNA, 120 bp, Artificial Sequence
  ENSG00000287605_4 (sequence is synthesized)
atttcttgtcctttagtattaatataaactatgataggatattaagacccatacattaagagaaataatgggtgaccaaaaagtataggggcaacggggaccccacatgttgagtctttt

SEQ ID NO: 1035240 - DNA, 120 bp, Artificial Sequence
  ENSG00000287605_5 (sequence is synthesized)
gtggaaatttgggggaactaaagctttttcaaaaaattcttattaaaagggggtaaaacgttctgtgtctagaagggaaactgttaataaaaggtttgttaatgtaacaataattatact

SEQ ID NO: 1035241 - DNA, 120 bp, Artificial Sequence
  ENSG00000287605_6 (sequence is synthesized)
atttatgatttcagacacactaaataatgtcactggagacaagacgtagccccattttccatcttgtagtcccagtctcaacctctggtttattctcctgagaatcaataatgatacaga

SEQ ID NO: 1035242 - DNA, 120 bp, Artificial Sequence
  ENSG00000287605_7 (sequence is synthesized)
agcagagctggggagtggaactgaaatttctcaatttgggacacaatcttgctctcagttattgatacagaagttgacacataaaaagtgaagggtaattcaaaccaacattatcatatc

SEQ ID NO: 1035243 - DNA, 120 bp, Artificial Sequence
  ENSG00000287605_8 (sequence is synthesized)
tgctaaaacttctaagtgtccaattcttgattgtgaaaatcatgtatttgcaccagtccatagactcaccaaaatggcccctccactgataaacaaaaaaataaataaaaagtgcaggta

SEQ ID NO: 1035244 - DNA, 120 bp, Artificial Sequence
  ENSG00000287603_0 (sequence is synthesized)
agtatttctgccgtgaacatggccgtcgaggaggactcatgaagactctaaatctctctcgggtaaacctggcgttggcagtactcctggatgttttgctgtcgttgggagttctctgga

SEQ ID NO: 1035245 - DNA, 120 bp, Artificial Sequence
  ENSG00000287603_1 (sequence is synthesized)
tggggacgcctcgggtggctggcacgtgtgctgagtcagtgctaagccccgtgcgtgatcaaccctggggccacagtgaccctgttcacccaatgttacagctgggtgagaaactgaggc

SEQ ID NO: 1035246 - DNA, 120 bp, Artificial Sequence
  ENSG00000287603_2 (sequence is synthesized)
ccagagaggttaagtaactctcccaggtcacacagccgggcagtggcctagtgggctctgaaccccagaacccccgcacctttccggaggaaggccccgcgacggtggtccagcaggctg

SEQ ID NO: 1035247 - DNA, 120 bp, Artificial Sequence
  ENSG00000287603_3 (sequence is synthesized)
ggaggcagcagcgtgtagttggacatggtgttggccttcatggcgctgaaggttgagtgtgccacgacggagcccagtgcctccttgcccagcggacggcccaggaacccacagatgcgc

SEQ ID NO: 1035248 - DNA, 120 bp, Artificial Sequence
  ENSG00000287603_4 (sequence is synthesized)
tccacggagccctgtgagggggatggaagacgtcagactcacctaacagatgcaggaagggggcccagagaggtaatgtggcttcccccagggcacacagcactgcccgccttcactctg

SEQ ID NO: 1035249 - DNA, 120 bp, Artificial Sequence
  ENSG00000287603_5 (sequence is synthesized)
atgactgtcaaccccatgaaagaagggcttgttctatgtcaaatctgcggttatttcccaagggaagagcctggaatatagtaaatgctcaataagtgcctgttgatggaatgaatgaat

SEQ ID NO: 1035250 - DNA, 120 bp, Artificial Sequence
  ENSG00000287603_6 (sequence is synthesized)
tgtcacaggaagacgtgatggaatgagtgaaggtcatggtggtgccaggagaagtccactgaatctctgtggagaatgaggagggagctgaggagatgcaaaagcctgattctggaaggc

SEQ ID NO: 1035251 - DNA, 120 bp, Artificial Sequence
  ENSG00000287603_7 (sequence is synthesized)
gaggggtccagactcctacagaggtggcaaggaggaaccagaagacaccagagtgacattttagccaattgtgagagtgcagagatactagtggagaccatcaacccccagaaatgaatc

SEQ ID NO: 1035252 - DNA, 120 bp, Artificial Sequence
  ENSG00000287603_8 (sequence is synthesized)
agagatactagtggagaccatcaacccccagaaatgaatctgagggtcttggacatctgggagacaaggacgagaccagaaggatgaaggagtgggctgggcttggtggctcatgcctgt

SEQ ID NO: 1035253 - DNA, 120 bp, Artificial Sequence
  ENSG00000287603_9 (sequence is synthesized)
gtctcaattaaaaaaaaaaaaaaaaaaagatgaagagtgtgggaaaatgcaagtggaaaacccagagccacttggtcatgggtagtgagaggagcaaggattatacatccattcatccct

SEQ ID NO: 1035254 - DNA, 120 bp, Artificial Sequence
  ENSG00000287603_10 (sequence is synthesized)
ccagctgttcatccctctatctatgcatccacctgtccctctattcatccatcatccatccacccgaccatccacccaaccattcattcagccacccaaccacttatccaatcatccatt

SEQ ID NO: 1035255 - DNA, 120 bp, Artificial Sequence
  ENSG00000287603_11 (sequence is synthesized)
caacatccatctatctacccatccaaccatccatccctccatccattcatcagccatcaaaccatccacctcttcatccattcatcatctatccatccattcatccatccaaccatctac

SEQ ID NO: 1035256 - DNA, 120 bp, Artificial Sequence
  ENSG00000287603_12 (sequence is synthesized)
tcaaccatccatctatccagccatccatcacccatccatccattttccatccattcatctagccacccaaccatccaaccatccatctatccatccatcctgcattcattcagccattta

SEQ ID NO: 1035257 - DNA, 120 bp, Artificial Sequence
  ENSG00000287603_13 (sequence is synthesized)
ttcatccatcacccaaccattccttcatctatccattcatccatccatcctgccatccattcatcactgtctatccattcatccatccaagcatctactcaaccatccttctatccatcc

SEQ ID NO: 1035258 - DNA, 120 bp, Artificial Sequence
  ENSG00000287603_14 (sequence is synthesized)
atccatcctctattcatccactcagccaggtatccattcaaccagccatctatgcatccatctttctatgcatcctccatccattcatccatccatccaaccatctacccatccattcga

SEQ ID NO: 1035259 - DNA, 120 bp, Artificial Sequence
  ENSG00000287603_15 (sequence is synthesized)
ccatccatccatccatccatgcatccactcatccattcatccaggcatccaatagtctatttttccaactaatatctgtagagacctcctctgggtcagtctctgatattgtgtccacaa

SEQ ID NO: 1035260 - DNA, 120 bp, Artificial Sequence
  ENSG00000287603_16 (sequence is synthesized)
ctctgatattgtgtccacaaacaagacatgtaagtaaatggcttacatctgtgctgtccatcccagaagccactggccataggtggctatttagcacctatgtgcaatgtgactgagaaa

SEQ ID NO: 1035261 - DNA, 80 bp, Artificial Sequence
  ENSG00000287603_17 (sequence is synthesized)
ggctatttagcacctatgtgcaatgtgactgagaaagtgaaaattttccattttatttcattttaattaatttaaataaa

SEQ ID NO: 1035262 - DNA, 120 bp, Artificial Sequence
  ENSG00000287603_18 (sequence is synthesized)
atttcattttaattaatttaaatgaaattaaattttcatttaattaattccattttaatgtaccttttcgaaattgagcatcaaaattgagatacaaagcatataaaacatctcatgggt

SEQ ID NO: 1035263 - DNA, 120 bp, Artificial Sequence
  ENSG00000287603_19 (sequence is synthesized)
catctcatgggtaatttctatattgattacatgctgaagtggtgatattttagatacatcaaattgaataaaatctattcctacaattaattattttcttttcttttttccttctagtct

SEQ ID NO: 1035264 - DNA, 120 bp, Artificial Sequence
  ENSG00000287602_0 (sequence is synthesized)
gtgtgtgtgtgtgtatttaaaaggcctttataatttttataattttatgtttatttggcaatgaagtccattttaatttccctctagcaccaccagactttttctctctgtaccttaaga

SEQ ID NO: 1035265 - DNA, 120 bp, Artificial Sequence
  ENSG00000287602_1 (sequence is synthesized)
tgtaccttaagacataaattttgctctttgatttttgcctgagttgtttcctttaatatgcaaacttaaagccatttagctgacaacttcctaggggattaaaacaggttattgagaatt

SEQ ID NO: 1035266 - DNA, 120 bp, Artificial Sequence
  ENSG00000287602_2 (sequence is synthesized)
tgaaagtctaagatagtggaaaaatcttcttatgaatctataagatgtacttctatcaacatgcctactaggtctatgtatttatgtgttgtgtacacaatgtctcactactgaaaatat

SEQ ID NO: 1035267 - DNA, 120 bp, Artificial Sequence
  ENSG00000287602_3 (sequence is synthesized)
atatataaaagggctctaattaattggcttaagaaaaaaagcacttaaatcaaatacttattaggaaaaaagaaaagactagttgaatgctttctcaagtttatgtaacttaagtaaaat

SEQ ID NO: 1035268 - DNA, 120 bp, Artificial Sequence
  ENSG00000287602_4 (sequence is synthesized)
aataaataagctacttttaaaatgattggtaaagtaatattagacatgtcttaagaattgccagcatgcattttgtttgcatttattaatcaagcaatttcatgtttatccctgtcaaat

SEQ ID NO: 1035269 - DNA, 120 bp, Artificial Sequence
  ENSG00000287602_5 (sequence is synthesized)
actataaggtgtcaaaatttggcatggggttacaaaactgtgatagaatgatctttgcttgtgtaatctttaataaataagacattgatactggtttaataaaaatagccacatcttgaa

SEQ ID NO: 1035270 - DNA, 120 bp, Artificial Sequence
  ENSG00000287602_6 (sequence is synthesized)
tttagtcagattaccataacttctaatcttgtggcttttagtggtctagtccacaggcagtaatatttactttgggaatgaaatattataatctttgtttcaaaggtaaactataaacta

SEQ ID NO: 1035271 - DNA, 120 bp, Artificial Sequence
  ENSG00000287602_7 (sequence is synthesized)
ttttcctctcaaagtctgttcagcctgtgctggtaagaaagcttaaagagaaataatttcatatgagaaagaatcttgtatggtaaatttagacctaaaataaaatgactgattgtttaa

SEQ ID NO: 1035272 - DNA, 120 bp, Artificial Sequence
  ENSG00000287602_8 (sequence is synthesized)
aagaggatttattttaaaaaaataccaaaaaacttttatatgattgagttgtctataattaaagggaaattataatggtcttcctgaagattgggcttcatgctaaaaaaaacacttata

SEQ ID NO: 1035273 - DNA, 120 bp, Artificial Sequence
  ENSG00000287602_9 (sequence is synthesized)
gactaaataattagttacagcgatgaaattttcttaagggattgatttactcttaataaattataagagattttaattttttaacccaaagttcaactatttacttgctgttttctctcc

SEQ ID NO: 1035274 - DNA, 120 bp, Artificial Sequence
  ENSG00000287602_10 (sequence is synthesized)
ccttcaacttgttttcagctcatataagttattttccttaagttctgtttgttgtggcctgatgctaacaatgttttctaaaagtctaaaggaaatgttttcttccaaagtaatactctg

SEQ ID NO: 1035275 - DNA, 120 bp, Artificial Sequence
  ENSG00000287602_11 (sequence is synthesized)
tgcagtgtagaaggtcttttcttttgccttttggtaattgacctaacagattttatggcttattgaaacaattcctatgccattattattaatttttggtttgcttaggaaaaagaaact

SEQ ID NO: 1035276 - DNA, 120 bp, Artificial Sequence
  ENSG00000287602_12 (sequence is synthesized)
gagacaatttttttaaaaaattaacgttattacatccatgtatatttctgtgtgcactttgaaagtacctgtgacattgagttaccggcctttaactcctggatctaaaaaggagaccaa

SEQ ID NO: 1035277 - DNA, 120 bp, Artificial Sequence
  ENSG00000287602_13 (sequence is synthesized)
gatctgctaaatcttaaacactgacagcaattaaaacctcatcttcaggcctggtagaagatgcctatcaaaataagctgcatttctgagacataaggccataaatcaaagctattcaac

SEQ ID NO: 1035278 - DNA, 120 bp, Artificial Sequence
  ENSG00000287602_14 (sequence is synthesized)
tcttcaagactcaggaacaatcacagaagaggtttctaataactctggagattgtgacatcacaatgaaggaaaagctttcaggactcatggagacctgaaatgttcatgaatagcaagc

SEQ ID NO: 1035279 - DNA, 120 bp, Artificial Sequence
  ENSG00000287602_15 (sequence is synthesized)
agaacaggaattaactgcatgaactgaactaacagaagactgaagtaatctttttgactttttgcttaaaacattgctgaccctttattttgtttttttcagtcaaggaaacttttcttt

SEQ ID NO: 1035280 - DNA, 87 bp, Artificial Sequence
  ENSG00000287602_16 (sequence is synthesized)
ccctttattttgtttttttcagtcaaggaaacttttcttttgagctgttgtcagcttttaacaagttagtatactcctgtgaaaaat

SEQ ID NO: 1035281 - DNA, 120 bp, Artificial Sequence
  ENSG00000287601_0 (sequence is synthesized)
cattactaagtggctttaacatagaaccgcgcagttcgcctaaaggagactggggacaaaatggagggagcagctcgctaatgaacatgcgtcagcacgttggtgtccgcggagagggcg

SEQ ID NO: 1035282 - DNA, 120 bp, Artificial Sequence
  ENSG00000287601_1 (sequence is synthesized)
cgcgtgtggcgaagtcttccggcgtccccgaaggaaaaatgcctctgcaacgtgcatttttgatgtgaagtcgtgttccacgtttcactcctccctaagactgcgacataacgtgaaaca

SEQ ID NO: 1035283 - DNA, 120 bp, Artificial Sequence
  ENSG00000287601_2 (sequence is synthesized)
catgcagggtcgagcccatttttcagccatcaaaataatacaatgcaattttttctagtatttataatttttcccctttaactttatgcctcctttatgtacttctacatttcacgttta

SEQ ID NO: 1035284 - DNA, 120 bp, Artificial Sequence
  ENSG00000287601_3 (sequence is synthesized)
ggttatatgtaacctaagggcactccttaggaaactggacttgtagaatatgtcattgtgcaaagtcatgctgcttcgaattatgctgcgcgctggcacacagcaagcgctcagtgttaa

SEQ ID NO: 1035285 - DNA, 120 bp, Artificial Sequence
  ENSG00000287601_4 (sequence is synthesized)
cgatgtcgaattcatattaagtactgttcattgggcgttttcttactccgtaaggaccttacttgcatgcccatttgatacctttctacaatcccagtaaaatacacagttaaggttgtg

SEQ ID NO: 1035286 - DNA, 120 bp, Artificial Sequence
  ENSG00000287600_0 (sequence is synthesized)
gtgcccgtggcgacggccctcctgactcacacacgctccccgcacgcgtcgctctgcccgtggcgacggccttcctgactcacacacacaacccgcacgcgtcgctctgcccacggcaac

SEQ ID NO: 1035287 - DNA, 120 bp, Artificial Sequence
  ENSG00000287600_1 (sequence is synthesized)
agtgttcctgcctatcatcacaacaggcgactcaagaacgtgacgtcatgtggaccccgtgaccaaaaccaggcccatactacgcccgtgatgtttcctctttcagggtgctgagacctg

SEQ ID NO: 1035288 - DNA, 120 bp, Artificial Sequence
  ENSG00000287600_2 (sequence is synthesized)
agaccacacctgacctgcccggggcggcacagtgagggtgacctgtacctctgctttacctgtgtgtcctctctgatgaggaaaagaggcagaccacagatgcaaacaggctgggatgca

SEQ ID NO: 1035289 - DNA, 120 bp, Artificial Sequence
  ENSG00000287600_3 (sequence is synthesized)
ctcctcacaggctctcctgtgcccagcgtgcctggtcccacctcacctcaccagagggatgtgcggatgccaggtgacttgggcacagctcctcagagaaccctaaacagcacagacccc

SEQ ID NO: 1035290 - DNA, 120 bp, Artificial Sequence
  ENSG00000287600_4 (sequence is synthesized)
agagcccaggaatgctcaggtggcccaaagttaaccttaacacacacagactgactggaacccagaaacactcctctatccattcagaagcccgcagacagatctgggcgtgcttagctg

SEQ ID NO: 1035291 - DNA, 120 bp, Artificial Sequence
  ENSG00000287600_5 (sequence is synthesized)
ctgactaaatcaccagagaacaagactgaggccagagagaaactgacttccaggtcctcttttcagttgcttccatgtcaaaagtccacaaaagaaaaagaattacgttcaagaagcatc

SEQ ID NO: 1035292 - DNA, 120 bp, Artificial Sequence
  ENSG00000287600_6 (sequence is synthesized)
actggcattccacgtaaaaaagagagagaccgtttactgatactgtttattaaaacagtggagggatacagacaatctaacaaaatatagactgggttgaatattaaacaaaattaatta

SEQ ID NO: 1035293 - DNA, 120 bp, Artificial Sequence
  ENSG00000287600_7 (sequence is synthesized)
taaaacattttgattctttgatagagtgaggaaaagtcttgctaggacttctttttgccatttctaagccataaaaccaatgcatatttccagatctttgtactggaaaaagctatattc

SEQ ID NO: 1035294 - DNA, 120 bp, Artificial Sequence
  ENSG00000287600_8 (sequence is synthesized)
cttacaataacattttccttctcttgtgttgccctctctgcccctagagatcttttttggttactctttggaggcagggtctcactcccgtcacccaggctcaccacagcctggacctcc

SEQ ID NO: 1035295 - DNA, 120 bp, Artificial Sequence
  ENSG00000287600_9 (sequence is synthesized)
acccaggctcaccacagcctggacctcctgggctaaggtgatcctcccacctcagcctcaaaagaagctgggaccacaggcatgtgctcccagctaattttttgtatttttttgtagaga

SEQ ID NO: 1035296 - DNA, 120 bp, Artificial Sequence
  ENSG00000287600_10 (sequence is synthesized)
tcccaaagcgctgggattacaggcattgagccgccatgctggcatgcccctagagatcttgaaaacacacatgtatttcaatatgtcaaagcaaagggcaagttgctaaacataagctaa

SEQ ID NO: 1035297 - DNA, 120 bp, Artificial Sequence
  ENSG00000287600_11 (sequence is synthesized)
atatgtcaaagcaaagggcaagttgctaaacataagctaaggggtcaaaataaagcaatttccctatgtaaaaacatttacaagacatttttgaagaacaaaaattatgtatacgaaatt

SEQ ID NO: 1035298 - DNA, 120 bp, Artificial Sequence
  ENSG00000287600_12 (sequence is synthesized)
ctagtcatactggagtaacaggaagcagatttaccatctaatcttaaatgagaaaacctcatttaaggcaaaatggatgaaatgacatctggtaaggttgctgtacacagggcagtgagg

SEQ ID NO: 1035299 - DNA, 120 bp, Artificial Sequence
  ENSG00000287600_13 (sequence is synthesized)
gctgggactcctgagtcggaagaccagggaccctctctacaaatgctctaactttcttgccgggaggcatcttccaaccacaggcacgggagggagcccaagtggagcacagccactcgc

SEQ ID NO: 1035300 - DNA, 120 bp, Artificial Sequence
  ENSG00000287600_14 (sequence is synthesized)
tgagtcgaggagacagagattggagttcagggagtctgaagtgactgaaggctgcagaacagaattccagaggggaaggaaatatgaagaaatacctcagaaggagtgcccaggatcctc

SEQ ID NO: 1035301 - DNA, 120 bp, Artificial Sequence
  ENSG00000287600_15 (sequence is synthesized)
atggcgcccccgatgtcctggatgaatactcaggtgtgtgtgagcaggggacattccctgcagctatgtaaagggcgcccgtggtctgtgagctgaagggctcctggacctcacacaggc

SEQ ID NO: 1035302 - DNA, 120 bp, Artificial Sequence
  ENSG00000287600_16 (sequence is synthesized)
tgagaggagtgcatactccgaccgccagagtggagagtgcccacggatccttcagcacactcagtggagaccccagaggaccacaattgagtgttaagaccaaacctaaacccctcccag

SEQ ID NO: 1035303 - DNA, 120 bp, Artificial Sequence
  ENSG00000287600_17 (sequence is synthesized)
tcaaagcttaaaaaaaccaaacctcaaaggatcacaccaaatcacaagtaatggaaatgcctaacggaacaaaatctaacactcactaaaggaacacacaatccacacacttcagatcac

SEQ ID NO: 1035304 - DNA, 120 bp, Artificial Sequence
  ENSG00000287600_18 (sequence is synthesized)
aatgttcagcagctaatcaaacactacctaacatgctaacaaagcaaaaccatgtgacccctaaccagaagaaaaaccagtcaatagaaacacaatcagaaatgacaatcatgatggaat

SEQ ID NO: 1035305 - DNA, 120 bp, Artificial Sequence
  ENSG00000287600_19 (sequence is synthesized)
tagcagacagaacattaaaacagctattatggggttgttcaagacgtgaacgagaacataatgaaaaaacagtataaaaagaatcaaatagaacagagcagaaaaatacactatcagaca

SEQ ID NO: 1035306 - DNA, 120 bp, Artificial Sequence
  ENSG00000287600_20 (sequence is synthesized)
taacaacttcactgaatggaattaaaagcagattagacgatgtagaaaatcagtcaacttaaaatacggcaatagaaactttcgaataaaacatatttctaaagaactgaaaaaaaaaat

SEQ ID NO: 1035307 - DNA, 120 bp, Artificial Sequence
  ENSG00000287600_21 (sequence is synthesized)
gaaaaagcacaggagtggcctgtggaacaacatcaaacagtctaacatgaaagcagacagagtcccagataaaggggagggtcaaggaaattcagtgaggaaacaatgaccaggtatttt

SEQ ID NO: 1035308 - DNA, 120 bp, Artificial Sequence
  ENSG00000287600_22 (sequence is synthesized)
ccaaatgtgatgaaaaccataagccccaaacagacagaactcaagaggaaaagacaaatccgtaattagagacgaacactgcatccagcaaggggagaaagtatagtcttctgaagtgca

SEQ ID NO: 1035309 - DNA, 120 bp, Artificial Sequence
  ENSG00000287600_23 (sequence is synthesized)
attcaccagcagagatcatgtgctggcaatcaagtaagtctcaaatcttaaaagactgaaatcataactcaaaactatgctgaatacagaggaatcaagtgacttacagtggagaggaat

SEQ ID NO: 1035310 - DNA, 120 bp, Artificial Sequence
  ENSG00000287609_0 (sequence is synthesized)
ttttttttttttttttttttttggtgacagaaaacaaatgctcctttctggaaaattactccggccttgatttctgcaagtgcactgagctaggcatggacaataagagtgagcaagacg

SEQ ID NO: 1035311 - DNA, 120 bp, Artificial Sequence
  ENSG00000287609_1 (sequence is synthesized)
gcaagacggggttacctccaaggggatccctgtctcgcaaggcagacaggcttgcccagcaataattataccaccaagcattaagcctcatgctatcagcggatacacagaactgtggga

SEQ ID NO: 1035312 - DNA, 120 bp, Artificial Sequence
  ENSG00000287609_2 (sequence is synthesized)
gcacaaaatgaaatgttcactttgcctgaagaggtagagaaggcatcacagaggaaatggtgccattctggaccttgaaggatagatcctctacggagtggaagaggagggcattcagac

SEQ ID NO: 1035313 - DNA, 120 bp, Artificial Sequence
  ENSG00000287609_3 (sequence is synthesized)
agtgggagaagcacatggaaaaccatgacatgttcaacattttgcaaaagtcaagtggtgccatgtgactggaggatggtgctgtgtcaggtggcaggaaagagaggagcctgggagtgc

SEQ ID NO: 1035314 - DNA, 70 bp, Artificial Sequence
  ENSG00000287609_4 (sequence is synthesized)
gctgtgtcaggtggcaggaaagagaggagcctgggagtgctgactgtggtctgtattagtccgtgctcat

SEQ ID NO: 1035315 - DNA, 79 bp, Artificial Sequence
  ENSG00000287609_5 (sequence is synthesized)
ttttataaaaccatcagatctcatgtgacttattcactatcatgagaacagcataggaaaaacccacccccatgattca

SEQ ID NO: 1035316 - DNA, 120 bp, Artificial Sequence
  ENSG00000287609_6 (sequence is synthesized)
agccaaaccatatcaggaccaaccccaaattgccttgtatgtctcatgaagtagattcaatatatttctgaagacaatgaggacccatgaaagttttgtcagatttccattttaaaagtg

SEQ ID NO: 1035317 - DNA, 120 bp, Artificial Sequence
  ENSG00000287609_7 (sequence is synthesized)
cctttgcaggagcagtggctagaataacaacaaaacaagcctcaggaccctacccctgtctttgaggggaggcaccatggttatctaccctgggggattgtatggagagggcagagccag

SEQ ID NO: 1035318 - DNA, 120 bp, Artificial Sequence
  ENSG00000287609_8 (sequence is synthesized)
ggggatatttctgaggtggcatgcacaggacttgatgggtgtggttcagggagagagaaaggaaggggccaacgatgactcgagttttggaccagcactggcagggagaagatgaaatgg

SEQ ID NO: 1035319 - DNA, 120 bp, Artificial Sequence
  ENSG00000287609_9 (sequence is synthesized)
aagatctttggagtcagacagacccagcctccaatcccaggtggaccacttttgagttttgtgttcatgggcaagccacttctcaaaggcaccatttcctctcaaaagaggaggagtagt

SEQ ID NO: 1035320 - DNA, 120 bp, Artificial Sequence
  ENSG00000287609_10 (sequence is synthesized)
taactgtctcaatgagggttgatgagatcttggaggccttggacagagtggctgcaggacaggccctgttgttattattttaggtaggctcaaagccattctctgtatcataagaccagg

SEQ ID NO: 1035321 - DNA, 120 bp, Artificial Sequence
  ENSG00000287609_11 (sequence is synthesized)
aggtctttgaaggcaggatctgtgtctgtgtccttaacctgtggggacgcttcctcaactattggttctttatttttcagctcagcctaggacaaagaaagctggaacattgtgagtatg

SEQ ID NO: 1035322 - DNA, 120 bp, Artificial Sequence
  ENSG00000287609_12 (sequence is synthesized)
gcttagggatattagggaaaggaatgctggagtttctatccaggaaggcggtgggataattccttcactcaggagtgctgggggacttgcagcagtggggtgctgctggctcaggatctg

SEQ ID NO: 1035323 - DNA, 120 bp, Artificial Sequence
  ENSG00000287609_13 (sequence is synthesized)
atggagatgaaaattttaaatgcttggtaactgctaaacaattaaagctgcattagagtccagaccagagcttaatgtaggagaaacaacaattgatcccaggccctggtacttctgagt

SEQ ID NO: 1035324 - DNA, 120 bp, Artificial Sequence
  ENSG00000287609_14 (sequence is synthesized)
tgtctcttctgcctgagctcatcaaggagttaattctagggagaatggagccctggacaaaagtgctcaccaggatgcagaactgagagaaactgaagcagcggagaaaattgaggtcta

SEQ ID NO: 1035325 - DNA, 120 bp, Artificial Sequence
  ENSG00000287609_15 (sequence is synthesized)
catggtaaaggagggggactgcacataccacatgcagggcttgggagcggatgggtgcagggtcagccaccctgctctcagagcagctggcctccccagacccagaatcgcttcttcatc

SEQ ID NO: 1035326 - DNA, 120 bp, Artificial Sequence
  ENSG00000287609_16 (sequence is synthesized)
ctcagagtagaaactaggtcaggcctccaaaaaggagttaaaagtctcagctgcagagagaccccactaggcgcaatcagccagtgctctgcttcccttggcttcatgcagacccttctt

SEQ ID NO: 1035327 - DNA, 120 bp, Artificial Sequence
  ENSG00000287609_17 (sequence is synthesized)
ggaactctgtagccacatttggcctccacagtttaagagaaatcaagaaactggagaggtgccaaaggacagcaacaaacatgattagaaagagtgagaataggacccagggggtacatt

SEQ ID NO: 1035328 - DNA, 120 bp, Artificial Sequence
  ENSG00000287609_18 (sequence is synthesized)
aaagaaattggggttgatttgcctgaaacagtagagacaaaatgggaactatattcaagtacatgaagtgggaccagtgtctagttatttgccaattttaagggcacagaataagaggca

SEQ ID NO: 1035329 - DNA, 120 bp, Artificial Sequence
  ENSG00000287609_19 (sequence is synthesized)
aagggcctaatttgccacaagagagatcaggtaaagacggagtttcaataaggcatgtaggtcttgggatggcttttcctgcgttatcgtaaagtaggtctggcctctctccctaggaag

SEQ ID NO: 1035330 - DNA, 120 bp, Artificial Sequence
  ENSG00000287609_20 (sequence is synthesized)
aaacctgctggagattggatagggaggccaagacttgtccccagagcaccttggagtcctcccccagcctccatccaccccagccctcctggtttctgggagtccatgcatccttgcagg

SEQ ID NO: 1035331 - DNA, 120 bp, Artificial Sequence
  ENSG00000287609_21 (sequence is synthesized)
aacagaaacctgacacttgagtggccagcctgggtggtggggccactatgcttcctctggtgattctctctaagagaaagagcaagcatgacctttcatcacatcttctcttggatgcat

SEQ ID NO: 1035332 - DNA, 120 bp, Artificial Sequence
  ENSG00000287609_22 (sequence is synthesized)
tcaagatacagccaccagcagagccccaggtactttggcaggaggtgaaaaatgtcttacaacttccggaaacggcagtccagatcagatcactgtgtgactggctaaccgtgtagtggg

SEQ ID NO: 1035333 - DNA, 120 bp, Artificial Sequence
  ENSG00000287609_23 (sequence is synthesized)
gatactcagacaatcttgtgagtcttcatggcctcagccagttttgctttgggagctgtggcttggtatctatcaccgcgagcgagctcattcagccaaccaaccttcatggaaggaatc

SEQ ID NO: 1035334 - DNA, 120 bp, Artificial Sequence
  ENSG00000287609_24 (sequence is synthesized)
aagtcaagatgtacaaccaagcacgtgtgcctgcccatccctcctgccctgaagacacggcacaaaagaaacatttatctacagacaggataactgtgcactttgtttacaaatcaggac

SEQ ID NO: 1035335 - DNA, 120 bp, Artificial Sequence
  ENSG00000287609_25 (sequence is synthesized)
tctagtgagagagaaagggactgccgttgataagtacaataggacaagactgggacccatggccaccctatctacaccctgttttcaaagctgataaacaagaagggtgcccttcatatt

SEQ ID NO: 1035336 - DNA, 120 bp, Artificial Sequence
  ENSG00000287609_26 (sequence is synthesized)
gaaattatcaagacattccaaaagctagaaaaatccatagaaatggaatgttcgctttattacatgcataacaattattgctgtgtaaaaaattattccccaaagtaatgggtcaaaaca

SEQ ID NO: 1035337 - DNA, 120 bp, Artificial Sequence
  ENSG00000287609_27 (sequence is synthesized)
acaaatactcattatctcagggggtttctgtgtgtcaggaatttgggagcagcttagctgaatggttctgccctggggtcttctcataaggctgctgtcatctgaaaatgacgggctgaa

SEQ ID NO: 1035338 - DNA, 120 bp, Artificial Sequence
  ENSG00000287609_28 (sequence is synthesized)
tgatccacttgcaacgtagctaactcacatggctattggcaggaaacctcattccccacctcagctctactccactggtctgcttgaggctcctcacgacatggcagctggttgcctcca

SEQ ID NO: 1035339 - DNA, 120 bp, Artificial Sequence
  ENSG00000287609_29 (sequence is synthesized)
gagcgagcaacctgagtcaaggaggaagctgaaatgcctttcatgatttggcctcagaacttacacactgctcacttaggctgcgttttgttagaatgagtcactaattcacaattgtaa

SEQ ID NO: 1035340 - DNA, 120 bp, Artificial Sequence
  ENSG00000287609_30 (sequence is synthesized)
agatatggaaccaatctaaatgcccattaaccaatgagtgcataaagaaaatgtggtatatatgcactatggaatactactcagccataaaaaagaataaaatcatgtattttgcagcaa

SEQ ID NO: 1035341 - DNA, 120 bp, Artificial Sequence
  ENSG00000287608_0 (sequence is synthesized)
tactgccaagaaactcacctgagataagatcaggtctttcatatggttgtcctctgagtcaggtgcacccccaccaaataaactaggtattcaccttattagagtttgttcagtcggcct

SEQ ID NO: 1035342 - DNA, 120 bp, Artificial Sequence
  ENSG00000287608_1 (sequence is synthesized)
gccctaatcataagtcaaattaaaggtgatctccaagaactagaggaattaactttaagcaagcaaatgcaggctttaagaacagccatgcaagaagtccataactgaatacaagaaaga

SEQ ID NO: 1035343 - DNA, 120 bp, Artificial Sequence
  ENSG00000287608_2 (sequence is synthesized)
atgcctataagtctgacagatcaagtacacccctttcaacatggagactctgtttaggttaaaaagtagaatccaacttctctaggactcatataggatgggccctgtactgtaatcttg

SEQ ID NO: 1035344 - DNA, 120 bp, Artificial Sequence
  ENSG00000287608_3 (sequence is synthesized)
tccactcccactgctgttaaatttgcaggaatcatgccataggtccaccacagtcagctgaaaccagcagttcaggacaagtggaacagccagcaagacccagatcatccaactcagccg

SEQ ID NO: 1035345 - DNA, 120 bp, Artificial Sequence
  ENSG00000287608_4 (sequence is synthesized)
atcctgagatgagaccaagctgctgctgaggacgacagccctgctctggtcactctggaggctgaccagtctatgcacagctgaagctggaggggacgacaagcccagctctagtcacac

SEQ ID NO: 1035346 - DNA, 120 bp, Artificial Sequence
  ENSG00000287608_5 (sequence is synthesized)
accagaagctgactagtctacgcacggccgaagcttgaggactcgtcaagcaagtaaatgtggttagaaatcttaagactagtagttttccttgtaatactaactgttttattattgttc

SEQ ID NO: 1035347 - DNA, 120 bp, Artificial Sequence
  ENSG00000287608_6 (sequence is synthesized)
tgtcgttgtgctcaacctcctctgccaggcaaggccctcttctgtccttgctggatatgaacatgctgtacactgttttgctgttgtcaccccccttaaccatggtagaagaagcaacta

SEQ ID NO: 1035348 - DNA, 120 bp, Artificial Sequence
  ENSG00000287608_7 (sequence is synthesized)
tatgagtgtacaaggactcacttaagaacttgtacttataaaggccaggcacagttgctcatgcctgtaattccagcccttttggaggccacgatgggtggatcacctgaggtcgggagt

SEQ ID NO: 1035349 - DNA, 120 bp, Artificial Sequence
  ENSG00000287608_8 (sequence is synthesized)
tcgagaccagcctcaccaacatggagaaccccgtattgaataaaaatacaaaattaaacaggcatggtggcgcatgcctgtaatcacagcctttcaggaggctgaggcaggagaatcgct

SEQ ID NO: 1035350 - DNA, 63 bp, Artificial Sequence
  ENSG00000287608_9 (sequence is synthesized)
gtatttatagccagacgacctactcagttactcaatttgtgaccaggaaataaccaaccttat

SEQ ID NO: 1035351 - DNA, 120 bp, Artificial Sequence
  ENSG00000287608_10 (sequence is synthesized)
tcagttactcaatttgtgaccaggaaataaccaaccttatgtatgttataaccccaagatttcacctggtgaatagtttaaattcgtgcaaggtcaaaagaaagtcacctcttaaaccaa

SEQ ID NO: 1035352 - DNA, 120 bp, Artificial Sequence
  ENSG00000287608_11 (sequence is synthesized)
accaaggtcccccccttttaccgatggcctatttctctgtattttgatgcttgtccaacctgtaatcctgtaaatttcaccattctaaagccagacttacccatgcggactgcaggttac

SEQ ID NO: 1035353 - DNA, 120 bp, Artificial Sequence
  ENSG00000287608_12 (sequence is synthesized)
cccatacgtgtctccacacacacctacccagcaacctacctatatgttatcaaaaaggaacccggaccagcaacaattccgagtctttaaatcattccataagcatgtagaccagaagtt

SEQ ID NO: 1035354 - DNA, 120 bp, Artificial Sequence
  ENSG00000287608_13 (sequence is synthesized)
accagagcatcatcctttagctaaaaacctgtttgcttggttagctgaaaacattgattgctagcagcttaagcatttcctcatgttgtttgtagaaggacgaacatagtagaccaatgg

SEQ ID NO: 1035355 - DNA, 120 bp, Artificial Sequence
  ENSG00000287608_14 (sequence is synthesized)
ccttaagaagcaaaagagttaatgccacaagataatttaactctaactgactcttcccccgaaccgatgcccacaagttcaagcacctagctcttaaaaacttctattatcaggagatac

SEQ ID NO: 1035356 - DNA, 120 bp, Artificial Sequence
  ENSG00000285601_0 (sequence is synthesized)
ggagcgctgctgcccacccagcggggcctgacacctcctagccccagactccccgtgcgctttcggcccggccagtcctttctgaatatgcgattcctgagacgttagcgtatgcattag

SEQ ID NO: 1035357 - DNA, 120 bp, Artificial Sequence
  ENSG00000285601_1 (sequence is synthesized)
cgtgatcgattttcatctaaagccattaaatcagttttatagcttccccaagaacgtgggcaaccccctgcttggaagatgaaagagaaagtcctcccgcccgaagcccaggatcggagt

SEQ ID NO: 1035358 - DNA, 120 bp, Artificial Sequence
  ENSG00000285601_2 (sequence is synthesized)
gaggacaacaaaatgtctaaatcacctttccaaggcttcaacaatgaatgtattttccaaatcaatgttggagtacatggtcagaaaagatgtcttttggacttgtgaaattacttatat

SEQ ID NO: 1035359 - DNA, 120 bp, Artificial Sequence
  ENSG00000285601_3 (sequence is synthesized)
aaaaattcttaccaagatggaagcataaaaaacacatttatttatatgtttactaaatcttcttttattgaaaacaataagacaacctgaaagcaagtctatcagagaaaatctgggact

SEQ ID NO: 1035360 - DNA, 120 bp, Artificial Sequence
  ENSG00000285601_4 (sequence is synthesized)
tatgtcttcactgacaaaataataaatgagacaaagtgatagaagacctttgtcatgacacctgtttgctaccagagccccaggccatcgtcatccactgatgtctccacattaattctg

SEQ ID NO: 1035361 - DNA, 120 bp, Artificial Sequence
  ENSG00000285601_5 (sequence is synthesized)
cagaggtcctggacagtcttctctgccctgtctaatggtcagttaattctccttgtaagcacatcatggctgaccaggtgctggaccgcgcaaagaaaggtgtcagagctttcagcttaa

SEQ ID NO: 1035362 - DNA, 120 bp, Artificial Sequence
  ENSG00000285601_6 (sequence is synthesized)
gccttgattgggtggtgagtaggtctcctgcagctaatcagtggctttagaaaccctggagtccttcagaaaccctaaagttcttccttctgatttttctggtagaccaaaggaaaaggc

SEQ ID NO: 1035363 - DNA, 120 bp, Artificial Sequence
  ENSG00000285601_7 (sequence is synthesized)
caacaacaaacaatttctaaataagaaatttccaccttagctaaaagcaaaaggcctttgatactctataagattgatcaactcacttcagttgaaataatggttttctgaagtcaaggc

SEQ ID NO: 1035364 - DNA, 120 bp, Artificial Sequence
  ENSG00000285601_8 (sequence is synthesized)
atgaacagcctttccccactggatgggatgctcagattaccagccctggaatgaaacaaaaggagaagactgtctcaccccacacttctcaaccattggccattctgagatgacacctgc

SEQ ID NO: 1035365 - DNA, 120 bp, Artificial Sequence
  ENSG00000285601_9 (sequence is synthesized)
agagccacagccccacctgcccgagcacccacgggtgccttggtcatcctgcaccatggagctgcttgtctctcctctgtactcacaatgctgtgtgtcctctctgttgcacctaaaact

SEQ ID NO: 1035366 - DNA, 120 bp, Artificial Sequence
  ENSG00000285601_10 (sequence is synthesized)
cttcatcaagtaaccaggcgaagaggtctgtcttctcttccagaagcccaagatcccttttccaaggactgtctggatgcccctgccttgaatctgagttttatcttctgcagacctggg

SEQ ID NO: 1035367 - DNA, 120 bp, Artificial Sequence
  ENSG00000285601_11 (sequence is synthesized)
cttaatttgctgctctgaaaaaggacacaggctctgtagccagacagatgtgggttttgatgccagagccaccgtttaagtagctggggaactttgggtacgtttctggccattgctttt

SEQ ID NO: 1035368 - DNA, 120 bp, Artificial Sequence
  ENSG00000285601_12 (sequence is synthesized)
cacatcttgtcactgggaatgttattattattttatctatttttttttttgagacggaatcttgctttgttgcccaggctagagtgcagtggctctatctcaattcactgcaagctccgc

SEQ ID NO: 1035369 - DNA, 120 bp, Artificial Sequence
  ENSG00000285601_13 (sequence is synthesized)
ggcctcccaaagtgctgggattacagacgagagccaccacgcccagccaggaatgttattaacacctagattcatcattgggaacattttcaaaaaatgtattattattccttattcctt

SEQ ID NO: 1035370 - DNA, 120 bp, Artificial Sequence
  ENSG00000285601_14 (sequence is synthesized)
attattattccttattcctttctcttagacaattttttctttttaagctgagaggtgtcaatagggcaacatttctgatttatacattgttttctccatggagttgcatttggcaaaact

SEQ ID NO: 1035371 - DNA, 120 bp, Artificial Sequence
  ENSG00000285601_15 (sequence is synthesized)
ccaggtgcatggaaacacacaggtgggtctttgtgccatcaggctgggctgctcagtgggcccagctgttagtccacgtgtttgcctgtgggtcaacagaacaggaaaggctcctggatt

SEQ ID NO: 1035372 - DNA, 120 bp, Artificial Sequence
  ENSG00000285601_16 (sequence is synthesized)
ctctctgttgctttccatccacctggactgctccacctcctatcctctctgtctccttgattcaactcgatgctaccctcatttatccaagcagagaaaggtgctcctttcctcttttag

SEQ ID NO: 1035373 - DNA, 120 bp, Artificial Sequence
  ENSG00000285601_17 (sequence is synthesized)
ttttctctcacccttccttcttttcacatctatttcttactgtttcctgcacagtgcttgtcttttctctgacattgtatgagcaatttctttgatacaatggtagtctccaattatgct

SEQ ID NO: 1035374 - DNA, 120 bp, Artificial Sequence
  ENSG00000285601_18 (sequence is synthesized)
actgggcaagccagcctagaggttgtggaacagaaaggctctcagaccaacttaagtcactcatatcgcaagttttattgaatcagctgaaaatatccagtactttcaaggggaaagatg

SEQ ID NO: 1035375 - DNA, 120 bp, Artificial Sequence
  ENSG00000285601_19 (sequence is synthesized)
tgagaaaggttcacccacttagcttaaggtgcaagcaggtggcaggaccacacgacccgatcctcagtgactcagtgttcatgtgaccggtgttctcttctacattgaccttccaagctc

SEQ ID NO: 1035376 - DNA, 120 bp, Artificial Sequence
  ENSG00000285601_20 (sequence is synthesized)
atggggtagttactttggaacaaggaggctctgcagagaaaactgcctgaagccaaaatgatcttgctctaccagagagataaaggggcaagtatgcctggccaataaagagcttgctaa

SEQ ID NO: 1035377 - DNA, 120 bp, Artificial Sequence
  ENSG00000285601_21 (sequence is synthesized)
acagccattgcttttctctgtgtttctagacaaagctcatgtggggagagatgggattaatgtagtttcaccaatgatggctgattcagcaataatgtgcctgtcatatagaggtggcat

SEQ ID NO: 1035378 - DNA, 120 bp, Artificial Sequence
  ENSG00000285601_22 (sequence is synthesized)
gcataatacacacgttgtaacttggcctgttcatcttttttctgactttaagtgtcagaggcatgtgaaccagagcaactccatcttaactcggagctgggtaaaatgaggctgagacct

SEQ ID NO: 1035379 - DNA, 120 bp, Artificial Sequence
  ENSG00000285601_23 (sequence is synthesized)
ggctgcattcccagttggttaaggtatcctaagtcccaggatgagacagaaggtcagcataaaatacaggtcataaagatcttgctgatgaaacaggttgcaatacagaagctggctaaa

SEQ ID NO: 1035380 - DNA, 120 bp, Artificial Sequence
  ENSG00000285601_24 (sequence is synthesized)
ctgatgaaacaggttgcaatacagaagctggctaaaacccaccaaaaccaagatggccaagagagtgacctctggtcttcctcactgctacattcccaccagcaccatgacagtttacaa

SEQ ID NO: 1035381 - DNA, 86 bp, Artificial Sequence
  ENSG00000285601_25 (sequence is synthesized)
tttagcatatgatcaagaaataaccataaaaatgggcagccagcagccctcggggctgctctacctatggatcagccacgcttgta

SEQ ID NO: 1035382 - DNA, 80 bp, Artificial Sequence
  ENSG00000285600_0 (sequence is synthesized)
aggccggccaatcagcaccgccgaggctcgggggcttggcccggccgcccgcagacctgggcctcgcacctcgcgcccgg

SEQ ID NO: 1035383 - DNA, 120 bp, Artificial Sequence
  ENSG00000285600_1 (sequence is synthesized)
atgccgctctctccccgcgcggtcacccgttccctgggaagcagagtgggcagctgtggcagatgggactgatgggacgaggacgacgcgtggaaatgactgtgagggtggacagaggcc

SEQ ID NO: 1035384 - DNA, 120 bp, Artificial Sequence
  ENSG00000285600_2 (sequence is synthesized)
tgggggtctggatctgtcaccaaggctggagtgccagggcaccaccatagctcactgcagcctcgctctcccaggcttaagtgatcctcctgcttcagctcctggagtagctgggattac

SEQ ID NO: 1035385 - DNA, 120 bp, Artificial Sequence
  ENSG00000285600_3 (sequence is synthesized)
agaactctgaacggagaaggtggaaagggccttcagcggaagtccaggttacttactaaagcggaatggaagccaacagataccagcgtttatattttattcaactttattaaaaattaa

SEQ ID NO: 1035386 - DNA, 120 bp, Artificial Sequence
  ENSG00000285600_4 (sequence is synthesized)
aactacagaaaccaaaccgaatgcacaaataagagagtggggaaacagacagggagcaatggcagctgataactgtggcgagtggataatccgcatgactcacatcccacccctgcgact

SEQ ID NO: 1035387 - DNA, 120 bp, Artificial Sequence
  ENSG00000285600_5 (sequence is synthesized)
gaggagcccagaacgctgcgctggcactgtcgtgccctcttccaccacaggggcacagaaacctgcaggagactgaaaacgattacaaacatcttcaaccagctctctggccaaaggcag

SEQ ID NO: 1035388 - DNA, 120 bp, Artificial Sequence
  ENSG00000285600_6 (sequence is synthesized)
caaaagcagcctgaatacgcaactcacgccaagagggcagcagctctcctgacatccatgtaagaaggctaacacctaaaccacacgcaggcatcctgaactcagcagctctgatccaag

SEQ ID NO: 1035389 - DNA, 120 bp, Artificial Sequence
  ENSG00000285600_7 (sequence is synthesized)
gtactgagtggagacaaagcactcggaggtggcaagatgttcagcaaccaagtaagacacactggcaaggcatcccacccaaaggtgagaagcacaaagcaggcttggagaaacaaacag

SEQ ID NO: 1035390 - DNA, 120 bp, Artificial Sequence
  ENSG00000285600_8 (sequence is synthesized)
tcatgccaggtgcagccagacatcctgctataagccctgaccctagtaccccgagttcatcaagtgctctggttttgtgtccataaagcacagagggcactgaccaccccaaaccagaat

SEQ ID NO: 1035391 - DNA, 120 bp, Artificial Sequence
  ENSG00000285600_9 (sequence is synthesized)
cccaaggaatccttatggatggcatagggcctcagaactgctgcaggatcattttccttttcaggtcgtggctgaacttgttcatcctgaagagctcactgtcataaaatgcagagaggt

SEQ ID NO: 1035392 - DNA, 120 bp, Artificial Sequence
  ENSG00000285600_10 (sequence is synthesized)
tgtggatgttgatctgacgagcctgcaaggaggaagtgtccagtgagccatcagtggtgtgagaacaggctgtttccagagcgccccagttacagtgcactttcagacaccatcacctcc

SEQ ID NO: 1035393 - DNA, 120 bp, Artificial Sequence
  ENSG00000285600_11 (sequence is synthesized)
ccaggggtggagaggccgattaaggggcttcaaatctctgctgtacaagctgtgcgtgtaaactgagacaagttacttggctgccctgtatctgtctccacctctgcacaacaggaaggc

SEQ ID NO: 1035394 - DNA, 120 bp, Artificial Sequence
  ENSG00000285600_12 (sequence is synthesized)
agtaacaggactcacctcactcccctgctgtcagactacaggcacagaactggactcaacagactgtaagcattcaataaatggctgtcaaccaaggcccacccacttcatgacccatta

SEQ ID NO: 1035395 - DNA, 120 bp, Artificial Sequence
  ENSG00000285600_13 (sequence is synthesized)
tgatggagcccccatcaggagactggcagctcccaagtcagcataccccaaccctcacctcccttccgggcccataccttatccaccaagtccttctcagggacctcaatagtgtcctgc

SEQ ID NO: 1035396 - DNA, 120 bp, Artificial Sequence
  ENSG00000285600_14 (sequence is synthesized)
tgggccccaaagcggttgcgctgatatgtcacctgctctgccactaactgcttcagtatgaagagcaacagctcattgttgtcacgccggaatgaaaggtagcgggcaaaagtctgcagg

SEQ ID NO: 1035397 - DNA, 120 bp, Artificial Sequence
  ENSG00000285600_15 (sequence is synthesized)
aaaaaagcctcagtcaaacacccgctcccactacgcctgccacactccctttaccctacgtgccagcacccaggtcagacaggctgccgctcctgggtgcacgtccaggccagagccctg

SEQ ID NO: 1035398 - DNA, 120 bp, Artificial Sequence
  ENSG00000285600_16 (sequence is synthesized)
gatacccacgtgtggcctccttcactgagcttgcccatcaggcccctacctcggagcacacccaccttgcgcatgctgcgcatgacgctgaacttctgtgtgtctatgaagctctccagc

SEQ ID NO: 1035399 - DNA, 120 bp, Artificial Sequence
  ENSG00000285600_17 (sequence is synthesized)
atcacgcggatggccatgttgacgtcgtcttcgatcacatagtcccgcagatggatgcgcgcgtgggcctccgccatgcggatcatggactcgatgtgccgcaccgtaatggggatgctg

SEQ ID NO: 1035400 - DNA, 120 bp, Artificial Sequence
  ENSG00000285600_18 (sequence is synthesized)
cctgtcgcctggagagaagcacagtgtcaggtctttcacgggcaggaaagagaagcaaggaaaataaagcagcggcactcttagcacccagagccaagaagacccatctgacagtgcccc

SEQ ID NO: 1035401 - DNA, 120 bp, Artificial Sequence
  ENSG00000285600_19 (sequence is synthesized)
agcagaaatgcagaatgcttgactgcgctgcccagtgaatgcacacttcctatccctcctggaaatcagaggatgccagtggatgctgcatgcttacggcctgtcaccatcacacctgca

SEQ ID NO: 1035402 - DNA, 120 bp, Artificial Sequence
  ENSG00000285600_20 (sequence is synthesized)
cagttctgctcccaccagctgacttctgtgcatctcagaggctgttgtatttgtggccagctgtattggttattgtcacacactaaatattgaataatcctgtacaatgtaagtgcaaaa

SEQ ID NO: 1035403 - DNA, 120 bp, Artificial Sequence
  ENSG00000285600_21 (sequence is synthesized)
aaaggtcgttgtttgtaggaaaactaaattgaatgatctgaaaaaacttggtaaagttaaaaggcagaaatttgaaaagctgctgtgttgactgggtgtggctgaggcagcaatctacaa

SEQ ID NO: 1035404 - DNA, 120 bp, Artificial Sequence
  ENSG00000285600_22 (sequence is synthesized)
ggactcggcattcccatggcttgcaagctgctttaagtttccattccactatgaatgagccaaagaccttgtgttcattagagtgaaatttacacaaagtcaatatggaacttaataagc

SEQ ID NO: 1035405 - DNA, 120 bp, Artificial Sequence
  ENSG00000285603_0 (sequence is synthesized)
cccaaggtccatgtaagtgcagctgcccaggactccccttgctgtccagacataggctctcctacctgcttccaacttcagttctgtggcatttccaggaaatatgggtagttaacacat

SEQ ID NO: 1035406 - DNA, 120 bp, Artificial Sequence
  ENSG00000285603_1 (sequence is synthesized)
aaccatgctcaatgagagccaacctgtggctgtgcggccctttctcggcacgtggcccaagcctgtgctgggtctacgcagtgaagtacaagatttatcttaattccaaggccagaattc

SEQ ID NO: 1035407 - DNA, 120 bp, Artificial Sequence
  ENSG00000285603_2 (sequence is synthesized)
aggtaccagaaatgggtactttgcccagatcatccctgacaaaaatatttgcctattaacacaatcttactacaactaaatagaaaacaaaaactgttgacctataagataaatgaatct

SEQ ID NO: 1035408 - DNA, 120 bp, Artificial Sequence
  ENSG00000285603_3 (sequence is synthesized)
gcttattcctgcctagagccccagggaagcagcttccacctccacattccaagctgccatggaaacaacaatgctgcctattccactacaggctttgcgagactcctctgaagacctccc

SEQ ID NO: 1035409 - DNA, 120 bp, Artificial Sequence
  ENSG00000285603_4 (sequence is synthesized)
tccagagtccacagttgcgagactcctctgaagacccctatccagagtccacagttgcgagactcctctgaagacccctctccagagtccacagttgacttcctcctcagagtcctacca

SEQ ID NO: 1035410 - DNA, 120 bp, Artificial Sequence
  ENSG00000285603_5 (sequence is synthesized)
caggattaattcctgaaatctttcccaaatccaaacgttaagcattatctacatcagtcaatgtcctactaaaagtttccattacacatgctataaattttgactgatgaaaactaaaaa

SEQ ID NO: 1035411 - DNA, 120 bp, Artificial Sequence
  ENSG00000285605_0 (sequence is synthesized)
ggtcttggaggggcccagtgggggcttctattgagagatggttagtacgggcaagaacagacagttaaactagccacgcatccatcagagtcagtcaggaacacaggcacctcaccagtt

SEQ ID NO: 1035412 - DNA, 120 bp, Artificial Sequence
  ENSG00000285605_1 (sequence is synthesized)
acctgaacgggaagaatttaacccattctgtcttggagaggcagaaacagcacagttaaggctgaggaatcctgtgaggtgacctggtccataccacacccaaacagacaaagaatcacc

SEQ ID NO: 1035413 - DNA, 120 bp, Artificial Sequence
  ENSG00000285605_2 (sequence is synthesized)
atgtggtctcttctgtggtatctcttctgtggtgtctcttatatctcaggtataagattgagaataaaaataacttggagaaattgactactccactttttaaaaaatctgctctctaat

SEQ ID NO: 1035414 - DNA, 120 bp, Artificial Sequence
  ENSG00000285605_3 (sequence is synthesized)
ttactagagatgtcttttggattaaggagtaaaaagaagcaggatattgattgcagaaaatcagaaaagtcagagaagaacactgaaaatcttaaaaccacctataattccatcacaaaa

SEQ ID NO: 1035415 - DNA, 120 bp, Artificial Sequence
  ENSG00000285605_4 (sequence is synthesized)
aggtttgttacataggtatacatgtgcgatggtggtttcctgcacccaccaacccatcatctacaattatgaaaactttctctttaatcaaggattttaacatgaacagacttcttgaat

SEQ ID NO: 1035416 - DNA, 120 bp, Artificial Sequence
  ENSG00000285605_5 (sequence is synthesized)
ttacacgatacctgtaacagccatgatcttaatctcagacgcttcttccagctaccaagtgtgttctggatacagagcacaccatggcttctggggtcacactcagctgaggctgtggcc

SEQ ID NO: 1035417 - DNA, 120 bp, Artificial Sequence
  ENSG00000285605_6 (sequence is synthesized)
cacagagcactcatctctctgggctgtggtggtggtggctctactgaagaagcaaaactgttaccagcacattcaaaaagcgtgttgaacatcttttaaatatcaaagtgagaaacaaga

SEQ ID NO: 1035418 - DNA, 120 bp, Artificial Sequence
  ENSG00000285605_7 (sequence is synthesized)
aggcaaaataatagtgttatcagaaagatgttaggaagcaaggacagctgtgtaaagctcgaggctggaaggtgacttgccaacttcatttaccatctggcttcttgggtagcgggcact

SEQ ID NO: 1035419 - DNA, 120 bp, Artificial Sequence
  ENSG00000285605_8 (sequence is synthesized)
ggaatagtaagatgtgaggctctggttcatggttcatataatggactcatccctgactctgctgaatgccaagattcctccattcagattcatactctgctgaactccaagattcctcca

SEQ ID NO: 1035420 - DNA, 120 bp, Artificial Sequence
  ENSG00000285605_9 (sequence is synthesized)
ttcaattcaagtgggttttagggaccagcttggctatgtccttgggcaacatgacatgccaatactcaaacccctcatcattgtatttctccaaatagtaaatttatttatgcgatatga

SEQ ID NO: 1035421 - DNA, 120 bp, Artificial Sequence
  ENSG00000285604_0 (sequence is synthesized)
cctgggtgacagagcaaaaccctgtctctgaaacaatacaatacagtacagatgaaataaaataaataagaaaaggggaaatttggacacagagacagatgtgcacacagggagaatgcc

SEQ ID NO: 1035422 - DNA, 120 bp, Artificial Sequence
  ENSG00000285604_1 (sequence is synthesized)
atttggacacagagacagatgtgcacacagggagaatgccatgtgaagattggagttatgctgccacaagccaggcgaccccagtccccagccggggaccagtaccagtccatggcctgt

SEQ ID NO: 1035423 - DNA, 120 bp, Artificial Sequence
  ENSG00000285604_2 (sequence is synthesized)
taggaacggggccacacagcaggaggcatcaccaactgtactcagatcattgcctcaaagtctgtgcatcagtctgctcaggctgccataacaaactacgacagacagcagggtggctta

SEQ ID NO: 1035424 - DNA, 120 bp, Artificial Sequence
  ENSG00000285604_3 (sequence is synthesized)
aacaacagaaattaattgtcagctcttgaagccagaagtccaaaatcaaggcttaaagaaaagactaggatgtacctgcgagtgggatggacaggagagagaggctggtctgacttcagc

SEQ ID NO: 1035425 - DNA, 120 bp, Artificial Sequence
  ENSG00000285604_4 (sequence is synthesized)
aattgagactctactatgtgccaagccctggggtcagggctggggatcctgcaggaagacgatagacaagtcatgacacatggaaggagtgttaggaaagtggaaccatgggaggcacca

SEQ ID NO: 1035426 - DNA, 120 bp, Artificial Sequence
  ENSG00000285604_5 (sequence is synthesized)
agagcccagagccaagacctctgagctggcttggggtcagggagggccatccctccatccatccaacaaatgtttatttctcttttttttcgagatagaatctcgctctgtggcccaggc

SEQ ID NO: 1035427 - DNA, 120 bp, Artificial Sequence
  ENSG00000285604_6 (sequence is synthesized)
tggggtcagggagggcctacacttaagtggaccctgaggaatgcagagccttcggaggaaccctcagctcctgggacaagatgggatacacctgccatgctccctacctaacacttggcc

SEQ ID NO: 1035428 - DNA, 120 bp, Artificial Sequence
  ENSG00000285604_7 (sequence is synthesized)
tggcctcacatccttcccctgaacctgggcaggcctcaaacatctgcaggagagaccccttcctgtggggagcgagtctgcacacaaagagagggtagtccaggaagatggagaacagga

SEQ ID NO: 1035429 - DNA, 120 bp, Artificial Sequence
  ENSG00000285604_8 (sequence is synthesized)
agggctttgtagcccccgcattagctcttcactcgtaaactcttctgcctcccaaattcgaggccttgagggtcagtatcaactacagttgaagagctcaggagactgcactcggtggtc

SEQ ID NO: 1035430 - DNA, 120 bp, Artificial Sequence
  ENSG00000285606_0 (sequence is synthesized)
tcaggtgtcagacgttgctcaatagctcacaaaatatcttgtgccttctaggtggtccaattccacagtgacagaaccaggtcaagagcaagtatgctgcctcttgtgttgtaaaggaat

SEQ ID NO: 1035431 - DNA, 120 bp, Artificial Sequence
  ENSG00000285606_1 (sequence is synthesized)
ttatgcagcagatggcccagacagagacccgaaggtactccagaattccttctactcagaccaagtggcaaccccacccctgctgtacccagctgtgaaacccaggctcttctcagtcca

SEQ ID NO: 1035432 - DNA, 120 bp, Artificial Sequence
  ENSG00000285606_2 (sequence is synthesized)
gaagaaccaccacaaatcatttctgaaaatgatatctgtagaataaataaataaatgcctcaagtgataataaagtgtttaacaagacagcgagcatcgacattacaggagatatcaaaa

SEQ ID NO: 1035433 - DNA, 120 bp, Artificial Sequence
  ENSG00000285606_3 (sequence is synthesized)
tattgggcaaaatgaagggaaaaaatggaaagaggtttacaacttgcccctgctgtaataacagacacgcatgctgctccaaatgatgagatgttattaataaaggacgagatggctaca

SEQ ID NO: 1035434 - DNA, 120 bp, Artificial Sequence
  ENSG00000285606_4 (sequence is synthesized)
aattaaagcaagccctgcttaatcacattaatccagagcaagtcaaaggcttcaattttcgaaataattttgggcttaatgccttggagatgggcagactgctccattgaggcagcagct

SEQ ID NO: 1035435 - DNA, 120 bp, Artificial Sequence
  ENSG00000285606_5 (sequence is synthesized)
ggtccaatttaagctgcattgtgaggccggaattgtcaggtccttacagaaacaagaaagcctgacagttttcaggatgcaaccaaaactgctgagacaaaggaaattgcaagaaactga

SEQ ID NO: 1035436 - DNA, 120 bp, Artificial Sequence
  ENSG00000285606_6 (sequence is synthesized)
ttacaaggcagcccactgttgggtggattatatatgattaaccaactctcgctgggtggcgtgcacttactgcgaccatgtgctcggccactgagccccaaacagctgctccaggaggca

SEQ ID NO: 1035437 - DNA, 120 bp, Artificial Sequence
  ENSG00000285606_7 (sequence is synthesized)
cagtcagggagccactgctgtggactgctgattagagaaaggtaacttgtctataaagaaacagagtagccaccaccacggaggtcaccctacatgtgtcgcctgtttcccccacagtaa

SEQ ID NO: 1035438 - DNA, 120 bp, Artificial Sequence
  ENSG00000285606_8 (sequence is synthesized)
cgaccgctgcagtgaccaccaggaagcccagacacggagcgagaggcctgcccaggcaccagtgtgtaaacaccagccagtgttggagcaacagaaggaacttaaacccccagtaccaga

SEQ ID NO: 1035439 - DNA, 120 bp, Artificial Sequence
  ENSG00000285606_9 (sequence is synthesized)
ggacaggtttttagcagtgcgatttcacttttcatgagcaattaatgattttctatggaacaaaactaaaaaagtaggttaaaaacaaacgagttccagattgtgggtcaagaggcgtca

SEQ ID NO: 1035440 - DNA, 120 bp, Artificial Sequence
  ENSG00000285606_10 (sequence is synthesized)
tttccaaccctagatgtgcaactctttgtctgtgtgatgttgaggaatccatgttaatctctgggccctgcttttttcatggattgtactgaggtttcctgttttgtgtcacacagctta

SEQ ID NO: 1035441 - DNA, 120 bp, Artificial Sequence
  ENSG00000285606_11 (sequence is synthesized)
taagtgacagagtcgaccgactgcaagtttctcatggcatctccttgtacttacacatttcctaatccattgggagatgccagtgcatagtggtgaagggcacagactcaggtgtgaatc

SEQ ID NO: 1035442 - DNA, 120 bp, Artificial Sequence
  ENSG00000285606_12 (sequence is synthesized)
ctagttccatctcttgctttttactatgactgttccaattacttcaagcagaacctgagaaagagaattggactctttgctacttatttcaccaatgaacaataaagaggctgtacagag

SEQ ID NO: 1035443 - DNA, 120 bp, Artificial Sequence
  ENSG00000285608_0 (sequence is synthesized)
ttttgactttttaaaattatatgtgtatttatatccagttgacaaatagcatcacaattattactgtataaaaaactaaaaatcaccatggaagctaaggcctaaattctcattccaatt

SEQ ID NO: 1035444 - DNA, 120 bp, Artificial Sequence
  ENSG00000285608_1 (sequence is synthesized)
gttcccttttgttgatacctaagagatattaattagattccagtacctcaaaaaaaaaaacaaacccaaataaacaaaaaaacccaggtctacattatttacatacagtatgggaaaaaa

SEQ ID NO: 1035445 - DNA, 120 bp, Artificial Sequence
  ENSG00000285608_2 (sequence is synthesized)
agctgctttttggctaacttagattgcggttacctgcagtatttacactgtaaatgttaaggggaagaagcactactaacaaataccatttaaaaaaaatatattgtgcctggaatttta

SEQ ID NO: 1035446 - DNA, 120 bp, Artificial Sequence
  ENSG00000285608_3 (sequence is synthesized)
ttcttaaattagttgtatatcctaataagtgtctgttgaatagaatttgacttctaataaatctactgaaagtgtgaaacagagtaccactatgcttctttatattgctaatctagatcc

SEQ ID NO: 1035447 - DNA, 120 bp, Artificial Sequence
  ENSG00000285608_4 (sequence is synthesized)
tgttaggtccaatattgtagttaactataagcactgaaccttaaatgaaacaatggcaacatgtgtgtagatgaaattttattcagtattgtaaaatataatgccttgatgtttactcac

SEQ ID NO: 1035448 - DNA, 120 bp, Artificial Sequence
  ENSG00000285608_5 (sequence is synthesized)
aattatgagactatcctattcttttaatcctttaagaagtctcatatgataggtccctaaacagtgaaaccttccagtaacttaccagaaaaaagtttaattatgttattctgttcttag

SEQ ID NO: 1035449 - DNA, 120 bp, Artificial Sequence
  ENSG00000285608_6 (sequence is synthesized)
atgtttctaatatttaaaagcatatctaaacccttggcaaaaacaaacacaatcaattcagtgtaacagactgagctttaaactgtactttaattttcaataactgtaacctactggtta

SEQ ID NO: 1035450 - DNA, 120 bp, Artificial Sequence
  ENSG00000285608_7 (sequence is synthesized)
attgaaccaaacgtagagtatttaaatgactcactatgaagtgtgtcaaatcaatgatagaatgcatagaaaagtggagataagtttgggggaaggtgcaaggtgggttaatgtgaaaaa

SEQ ID NO: 1035451 - DNA, 120 bp, Artificial Sequence
  ENSG00000285608_8 (sequence is synthesized)
cggtaaatgccagttttaataacaaaaatggtactaaacgcagatgaacattaaattaatacagtataaaagagaacagcttaaataaactggtattcacatattacaatagcaaagtta

SEQ ID NO: 1035452 - DNA, 120 bp, Artificial Sequence
  ENSG00000285608_9 (sequence is synthesized)
tgacagaatgaactgaagacacgaacagttttgaaaattctcttttcagcctacttccaaatagaaatagtcaggcttttttcctgtacatagtttgatgctttgtctataccatatata

SEQ ID NO: 1035453 - DNA, 120 bp, Artificial Sequence
  ENSG00000285608_10 (sequence is synthesized)
gtagaaaaataaattctttagcaacctagaaacagtttataaaactcttaaagtttaattttctttgccagacatgccaatagttaaactgacaactataaattaaagctatatagacaa

SEQ ID NO: 1035454 - DNA, 120 bp, Artificial Sequence
  ENSG00000285608_11 (sequence is synthesized)
taggtataagtaatatagaacaggttaagaatactacatttaccggatttttttttaaaaattactgtactttcttaattcctgtgtgctttgcaataggaataatagggactttgtttt

SEQ ID NO: 1035455 - DNA, 120 bp, Artificial Sequence
  ENSG00000285608_12 (sequence is synthesized)
cttagaaaagataacatgtaagagtataacacaaataagataatttataatatacatgtacttcaacagcagcctggttcatgccaacatcttggttctgaagttaaaattggaagtaca

SEQ ID NO: 1035456 - DNA, 120 bp, Artificial Sequence
  ENSG00000285608_13 (sequence is synthesized)
atacctagaacttaacagttgggagagacaatatttattttaggaaaaaacagagcaaatcaaactcttaggagccttgaatctgaaaatcatctatttactataatacacataagataa

SEQ ID NO: 1035457 - DNA, 120 bp, Artificial Sequence
  ENSG00000285608_14 (sequence is synthesized)
tcttaaattgtagtatgaattaagataacattgaccaaataatttttttctttactacacaaaatataacctagtgaaatttacctgtgccacctattctgaaaattttatccataattt

SEQ ID NO: 1035458 - DNA, 120 bp, Artificial Sequence
  ENSG00000285608_15 (sequence is synthesized)
agtgttctggttttatcttcactaacaaaatgtttacccccaaaagcagcagtcacttatagtaattctggtaccaacatcaaaggaaaaaattggcttaaaaatggtgcaaaagccatt

SEQ ID NO: 1035459 - DNA, 120 bp, Artificial Sequence
  ENSG00000285608_16 (sequence is synthesized)
ctatattagcaatgggttttttggatattttttaagggccacataaaaatagattcaaggaacaaattaaattgaagtcctagatttaaatgtttggtttaaagaattttctacaacaaa

SEQ ID NO: 1035460 - DNA, 120 bp, Artificial Sequence
  ENSG00000285608_17 (sequence is synthesized)
tttcatgtttatgtatgaaaagttatataaccttatatgaaaatgtcatggaagtattttctacactatactaaatgtgttccccaagagggaaaaaattaaaatatctaaaatatatta

SEQ ID NO: 1035461 - DNA, 120 bp, Artificial Sequence
  ENSG00000285608_18 (sequence is synthesized)
gattaagattacaagaccatcatagatcttttgaacatgcatctgtttacagaattaacagtatacaaaatttttatttcattatggaccataaagaaatgagttggtgacaactatcct

SEQ ID NO: 1035462 - DNA, 120 bp, Artificial Sequence
  ENSG00000285608_19 (sequence is synthesized)
ttgcacaacattatcaactcactttagccacaagcatgtccttggtatgtgtgtaaaagaaataggttcatttatccctcatcaaatcatccacgggtttacttggaagtaaagatgaag

SEQ ID NO: 1035463 - DNA, 120 bp, Artificial Sequence
  ENSG00000285608_20 (sequence is synthesized)
gtacagaaatgtgaaatatgtcaagtgtattttttctttctttcaaacaacatcccaagcatggcctcagtagcctgaaattataaaatacttaactgggcttttagttatctacaccga

SEQ ID NO: 1035464 - DNA, 120 bp, Artificial Sequence
  ENSG00000285608_21 (sequence is synthesized)
ctgccagaatgtaaattaagttgcccaaattagcacatcaaataacaaaatcagccagaaagcaggctgaaaagcattaaatgtttcatataggtgagtttttaaatcatttaatttcta

SEQ ID NO: 1035465 - DNA, 120 bp, Artificial Sequence
  ENSG00000285608_22 (sequence is synthesized)
tagaaaaattttattcacaatataaggtgacagaaattgccacaggaatgatatactgattgcaataaggttgcatgcagcagcagctttgtactttatagctatttttgtttataaaaa

SEQ ID NO: 1035466 - DNA, 120 bp, Artificial Sequence
  ENSG00000285608_23 (sequence is synthesized)
ttaaacctctccagtcatgcttatcacatggtcttagatttgtaatgtaagtgaataaggaataccatctagttcaaagagaaaatgtaattttgaatgtgaattatctgtatgaaacat

SEQ ID NO: 1035467 - DNA, 120 bp, Artificial Sequence
  ENSG00000285608_24 (sequence is synthesized)
gaagtatactactgaaccctgaaacatgcatgtctagatttgctttttgtccaaatccagcctgtttgcaatcacttcctactcatataataccaagaggatccgtttgtaattgtggtt

SEQ ID NO: 1035468 - DNA, 120 bp, Artificial Sequence
  ENSG00000285608_25 (sequence is synthesized)
gtatcagctgaggttgcaatggtggcggcaactgaagtggcaccattggttccaccaactgtcctgggtttgaaggtggtggaggagccacaatgtttgtcgtttctacaatttctccat

SEQ ID NO: 1035469 - DNA, 120 bp, Artificial Sequence
  ENSG00000285608_26 (sequence is synthesized)
tgtaaaagaaaaactgacactgctgaatgaatgtttcaacaacagattgatgaatcttagtagtagacagaaactctcgattttcaaaatcaggtctcatcaaggttggccaaaaacaga

SEQ ID NO: 1035470 - DNA, 120 bp, Artificial Sequence
  ENSG00000285608_27 (sequence is synthesized)
tggataagttgtctgctgtcattaggttgattttatgttgctgactaaccctgaaattatgaaaggaaaaaacatttagaaatcaaaactcattacaatcacagaattccagagctagaa

SEQ ID NO: 1035471 - DNA, 120 bp, Artificial Sequence
  ENSG00000285608_28 (sequence is synthesized)
atgatctcagatttaatgttaccttttatcctacttcaaacctggggtttaaaaatttgcataaagaagcatctttaattcgtatgtaaaaaacttttcctgggccaggtgcagtggctc

SEQ ID NO: 1035472 - DNA, 120 bp, Artificial Sequence
  ENSG00000285608_29 (sequence is synthesized)
ctgtaatcgcagcactttgggaggctgagccacggcgcctggccccacttttcttttcaggcttacaaactacacagatcagggaaaagacaaccaagcaataagccttttctgttataa

SEQ ID NO: 1035473 - DNA, 120 bp, Artificial Sequence
  ENSG00000285608_30 (sequence is synthesized)
ataataaaaaaatgctgttaggcttattagtatattgaggaactttactaatatctatcttttttttttgtttatacagctatttaaaagaggccacaagaggcaggtgaggtggtgcgt

SEQ ID NO: 1035474 - DNA, 120 bp, Artificial Sequence
  ENSG00000272825_0 (sequence is synthesized)
gaaagcttctgtttgtatgtataaggcaatgtgcatgccagcatgtcagttacagcaggagagagggaacaagccatgtgggaactgatggagccatgtcacatccagtgtcctctgcag

SEQ ID NO: 1035475 - DNA, 120 bp, Artificial Sequence
  ENSG00000272825_1 (sequence is synthesized)
ccgctatggagtgccaggaggaatgaggggcaaatggtaagatctttatgacgtgagagaagccaggtgcggagcagggaacagtcaggtttaattggtgtgaagaacaggatcactgaa

SEQ ID NO: 1035476 - DNA, 120 bp, Artificial Sequence
  ENSG00000272825_2 (sequence is synthesized)
gataggaaacccataatcatggtttcaagtgggcagagaactaggctctggcgtcaggggaggaaggggaactgttcactgtcaacaccttttaggacgtttccattgggatcgaagggt

SEQ ID NO: 1035477 - DNA, 120 bp, Artificial Sequence
  ENSG00000272825_3 (sequence is synthesized)
ggctcactctgccactttgacataagaatcacttctacctaaggcacttgaaaaatggcacaggcaagagcatcatcggatctctccttttcttcctgaagacaggagataaaaacgctc

SEQ ID NO: 1035478 - DNA, 120 bp, Artificial Sequence
  ENSG00000272825_4 (sequence is synthesized)
aggtgaaagatgccttccctgtaccgggcgaagaaagattcctctacagggaagcacgtcatagccaacagaattctgtacagacattaaagtaattaaagtaattcctgtcgttcttaa

SEQ ID NO: 1035479 - DNA, 120 bp, Artificial Sequence
  ENSG00000124835_0 (sequence is synthesized)
gccttggctggccatgtgcacctcattccatgccattccaacagttgctgtgctcccaggcttatataagaagaaccagttttcccacttcatgattttgcagcttaatgggatggatat

SEQ ID NO: 1035480 - DNA, 120 bp, Artificial Sequence
  ENSG00000124835_1 (sequence is synthesized)
ggaagagaataacttagcttctagacaggcacaatcgcagacgtacacagaggctggaagacggtgcacaccattgagatacgtgtctcatccagcccgccacatgcagccggaaccagg

SEQ ID NO: 1035481 - DNA, 120 bp, Artificial Sequence
  ENSG00000124835_2 (sequence is synthesized)
ccaccgcctgggtgtcccttgtgtcctgtcctcctacctcttctctctggtccccacattccttccagagtttctcatacatggattgctcccaggctcccttccattgggggccagagg

SEQ ID NO: 1035482 - DNA, 120 bp, Artificial Sequence
  ENSG00000124835_3 (sequence is synthesized)
ttctcacagagcacagagaaggggaccattcgcccctgggaccatcaggggaatgatctagaagtcaagcaaatgttctagcccttcagggtcttcaagggagattacgggggaagaagg

SEQ ID NO: 1035483 - DNA, 120 bp, Artificial Sequence
  ENSG00000124835_4 (sequence is synthesized)
ctgaggtagagagcagggcctctatacatttaagctcatagagatacagagcatatgaagatatgggaattcagaagagttccgtccaacagaaatgtaatattgtaaagtaacagcagc

SEQ ID NO: 1035484 - DNA, 120 bp, Artificial Sequence
  ENSG00000124835_5 (sequence is synthesized)
agcagcagcagcagcagcagcagcacttgaatatgataccaacaaacaggaagtgtcaggaagacgccttgcagaactgtcagcctgtggagttgtttccccaagagagtttggagttag

SEQ ID NO: 1035485 - DNA, 120 bp, Artificial Sequence
  ENSG00000124835_6 (sequence is synthesized)
aaagagattgtcctcttcctgtcacatgtgacactgggactactcactctcatcaagagaaacatgacacttctcacaggggtgtagactagccccccacgataatcatgcaatagccct

SEQ ID NO: 1035486 - DNA, 120 bp, Artificial Sequence
  ENSG00000124835_7 (sequence is synthesized)
aacatcaattcatgcactgggatgttcgtgaattaatattaaataatattacagaatggacagcaagggaattcaattccttcttatatcaccctgagagtggagcctacaaatcctcct

SEQ ID NO: 1035487 - DNA, 88 bp, Artificial Sequence
  ENSG00000124835_8 (sequence is synthesized)
ttcttatatcaccctgagagtggagcctacaaatcctcctgagtctttgaggttctctattcctgttatccttgaacaagaaaatgtg

SEQ ID NO: 1035488 - DNA, 120 bp, Artificial Sequence
  ENSG00000124835_9 (sequence is synthesized)
gacaaaatatgtgatataatgttttcaagtcactggacatcaaacaatgaagggcagtgaaccctctgagatagcaaatgaacaataatgaggcctccaattgctcagtctgtcttcctt

SEQ ID NO: 1035489 - DNA, 120 bp, Artificial Sequence
  ENSG00000124835_10 (sequence is synthesized)
gatagtgtttccaggctcctgttcagagaagggggaacccaggcagagctcagtggagtccctgagttggagagacacaactgagagtatagagaaatcccagaggcaggagctcacagg

SEQ ID NO: 1035490 - DNA, 120 bp, Artificial Sequence
  ENSG00000124835_11 (sequence is synthesized)
acagaattccagcaaggagagtactgcacaggaagaatgaccaggaggcatacagagggtgcagagggtcaccactgagggttccagtgagtacttatgatcacatgaaaacctcccaag

SEQ ID NO: 1035491 - DNA, 120 bp, Artificial Sequence
  ENSG00000124835_12 (sequence is synthesized)
tttggggaaggaactactcaaaaagactggaagtaactggagctgaccaaggcctgagaacagtgcctgtttctattagccagactgaagaacttcatgattcacaggacatttggtttg

SEQ ID NO: 1035492 - DNA, 120 bp, Artificial Sequence
  ENSG00000124835_13 (sequence is synthesized)
aatacacagagagccttcccttaatcagtggggaataagtagaaatagactcagcattgttatggtcctacctagaaaatcttaaaagccagactcaaaaggatcaatctatttccagta

SEQ ID NO: 1035493 - DNA, 120 bp, Artificial Sequence
  ENSG00000124835_14 (sequence is synthesized)
acttaattgcatcccagaataaagctcaataatattgaaaggactacagcaactttcagcacccaacaccaggcattcagggaagcagaagaatataaccctcaatggagagatccaata

SEQ ID NO: 1035494 - DNA, 120 bp, Artificial Sequence
  ENSG00000124835_15 (sequence is synthesized)
agcacagagaaccttaagtataggaagatgtgaagaaaattacacgaaagcacatactaaccaaattggctaaaaccaatgactaagagaacatcttaaaagcagtcatacaaaaaagac

SEQ ID NO: 1035495 - DNA, 120 bp, Artificial Sequence
  ENSG00000124835_16 (sequence is synthesized)
aaaaggaaaagacagacaaaataaagaggagggaagataagggtgacagcagatttctcagaagaaacaatgcaagtgagaagccattggagctgcattttaaaagtactgaaagaaaaa

SEQ ID NO: 1035496 - DNA, 120 bp, Artificial Sequence
  ENSG00000124835_17 (sequence is synthesized)
aattgccaatcttgaattctgttcccagtgaaaatatttttcaaaaacaaagatgaataaagacttttttcagattggaaaagcaattccatcaagtgaatatattataatttttctatt

SEQ ID NO: 1035497 - DNA, 72 bp, Artificial Sequence
  ENSG00000256615_0 (sequence is synthesized)
gttctttccctttatgagctgtaacattcaccgcgaaggtttgcagcttcactccttaagccagtgaaacca

SEQ ID NO: 1035498 - DNA, 120 bp, Artificial Sequence
  ENSG00000256615_1 (sequence is synthesized)
gtaacattcaccgcgaaggtttgcagcttcactccttaagccagtgaaaccactaacccaccaagaagaatgaacaaacaactccagacgcgcggccttaagagctgtaacactcaccgc

SEQ ID NO: 1035499 - DNA, 120 bp, Artificial Sequence
  ENSG00000256615_2 (sequence is synthesized)
agaactgtaacactcaccgcgacggtcggcggcttcattcttgaagtcagtcagaccaagaacctaccaattccggacgcactacccgggggacatgataaatctgggaagggcacctca

SEQ ID NO: 1035500 - DNA, 120 bp, Artificial Sequence
  ENSG00000256615_3 (sequence is synthesized)
ggttttatcttcatcagcctggtcaaagctggatttccatcacacatgtgctcactccacggaacgtgcaaaaggtcaagacatacaaactcagagtttttaaaatcaagaattgaaagt

SEQ ID NO: 1035501 - DNA, 120 bp, Artificial Sequence
  ENSG00000215014_0 (sequence is synthesized)
gatgcgaaacgccgcgcttgccggagatagcattgagggcccttccgcggcccggcgtttcgtctcttgggacgattttgtgcgttccctcggtccccgtggggcccatagtcctcactt

SEQ ID NO: 1035502 - DNA, 120 bp, Artificial Sequence
  ENSG00000215014_1 (sequence is synthesized)
ctgccaccccagagtcgtcgcgcttcactagacccgctccctccactgtcccggaggcccacagacattcccgcattctgaggctcgctcccgtcccgtgccgctgttaccggcctccgg

SEQ ID NO: 1035503 - DNA, 120 bp, Artificial Sequence
  ENSG00000215014_2 (sequence is synthesized)
ccccggctcatacaagcaggagcacatcgctcttttatgaaagcccttcaacatttaacgtttaaatgcgagggccgacctgtgacagacctggttgggagtgcacgtcgactaggatct

SEQ ID NO: 1035504 - DNA, 120 bp, Artificial Sequence
  ENSG00000215014_3 (sequence is synthesized)
tcctcgcctcgggcttccttggagaggccgccggctggtctgagatttgggtccagttacagtaaatccagtcaacgcgagtgtgtcattccccagctatgcctgtctgcctggatgcag

SEQ ID NO: 1035505 - DNA, 120 bp, Artificial Sequence
  ENSG00000215014_4 (sequence is synthesized)
cctcgcggtggacagtgggctgatgttttgccgtgggagcgccacggacgggagagggagtgataatgattgtcaacctaataacaggctaactgaaaatgatatttatttgggaatagg

SEQ ID NO: 1035506 - DNA, 120 bp, Artificial Sequence
  ENSG00000215014_5 (sequence is synthesized)
gcgttggcgaatatgcgtgccatagtaaacgatttgcgcattcaggaaagtaatggtttttaaagaaaaaatgaagaggaagataatggtttggaaataattaaccttggctacaaagaa

SEQ ID NO: 1035507 - DNA, 120 bp, Artificial Sequence
  ENSG00000215014_6 (sequence is synthesized)
aaaaaaaaaaaaacaagtgtactcccgttccagggttggacaggcagttgctgggcagctgtccttgctgaagtattttttgtgtaagattgccttagtgcaaggttgtggtttttgcag

SEQ ID NO: 1035508 - DNA, 120 bp, Artificial Sequence
  ENSG00000215014_7 (sequence is synthesized)
aatcttgtgatagtttttcttattattgattcatgagaattctccatggcctttcccagctgtctttgtcaaggtattttttaaacataagtgagtccacttttatttgacaacttgggt

SEQ ID NO: 1035509 - DNA, 120 bp, Artificial Sequence
  ENSG00000215014_8 (sequence is synthesized)
attttccccttttgattgagatctttctccaaatgcatcactaatgagtcatcctgtaattaggttttgatagtccccgtgctgggatgaacttgtcccagatagctggtctggtcccac

SEQ ID NO: 1035510 - DNA, 120 bp, Artificial Sequence
  ENSG00000215014_9 (sequence is synthesized)
actggagagagtggctgctgggagtcattgtcaaaacccttttttaccatatttgagcatcaaaggaggtttgaagggtgtggctctcaggctaagtctaacctggagtccattattaac

SEQ ID NO: 1035511 - DNA, 120 bp, Artificial Sequence
  ENSG00000215014_10 (sequence is synthesized)
taacttcaacttttgtcacttctgtagtctttctatcatctcaaagtgctgtgtcagcattattctgttagaaattgtacttgtagccgggcgcggtggctcacgtccgtaatcccagca

SEQ ID NO: 1035512 - DNA, 67 bp, Artificial Sequence
  ENSG00000215014_11 (sequence is synthesized)
tggaacactacaaatacaaaagttagccggatgtagtggtgcgcacttgtagtcccagctactcagg

SEQ ID NO: 1035513 - DNA, 89 bp, Artificial Sequence
  ENSG00000215014_12 (sequence is synthesized)
caggaggctgaggcaggagaatcacctaaacccaggaggcggaggttgctatgagctgagattgtgcctatgcagttcacccttaaaaa

SEQ ID NO: 1035514 - DNA, 120 bp, Artificial Sequence
  ENSG00000215014_13 (sequence is synthesized)
aaaaaataaaaaaaaagaaattgtccttttgcaaaatatggcaatgaataagtttaaaaggggaaaatacaaggtaaaatcaataataatatgactatcccagtttgcatattggttttg

SEQ ID NO: 1035515 - DNA, 120 bp, Artificial Sequence
  ENSG00000215014_14 (sequence is synthesized)
acccatgaacctaggcttaaaggaaagcaattaaaaagaaaaaaattagaaaacaaaaatagaaaaatagagattaaaggaagccaattgaataaataaaatggccatagaaattacacg

SEQ ID NO: 1035516 - DNA, 120 bp, Artificial Sequence
  ENSG00000215014_15 (sequence is synthesized)
tcgtggtatgccgtgattgtgttgcgcgccgtttccagggaaggtggccaacgacgcacacgaaataccatgatcggccgccgccgcgcagcccctcgccgcggacgctaccctcgcccc

SEQ ID NO: 1035517 - DNA, 120 bp, Artificial Sequence
  ENSG00000215014_16 (sequence is synthesized)
ccgggcccggcctcggagagctcgaaggaccaccggacagcgggcgcctcgtcccggaacctgccttccctgtgatgcccacccgcgtgtggactacgcgcgctgccgtccagctgccat

SEQ ID NO: 1035518 - DNA, 120 bp, Artificial Sequence
  ENSG00000246174_0 (sequence is synthesized)
cccgggccggaagggctcctgcgcaggcgtttgtagccacttttaagttttatcagctagttcatgcttgcgttgaaagagtggtcgtttgcgctgggtcatcactgtgtagtattgggg

SEQ ID NO: 1035519 - DNA, 120 bp, Artificial Sequence
  ENSG00000246174_1 (sequence is synthesized)
atacttaggtgagaaaaaaacttaacgctagagacgttcacgcactagtggagaagccaggattgttgccctagagttacagtagataaaagtacctcagagaactgcgggggctcccaa

SEQ ID NO: 1035520 - DNA, 120 bp, Artificial Sequence
  ENSG00000246174_2 (sequence is synthesized)
cctggacgcttgcaccggagtattaaatccagctagagaatggcatgtgcaaagatacagagcttttagaagttgcctgcattccttggccccttcctcacatcattccaaccaacttcc

SEQ ID NO: 1035521 - DNA, 120 bp, Artificial Sequence
  ENSG00000246174_3 (sequence is synthesized)
actttcctgtaatagctacagtcaaatgggcagctgaagatgatgatgatgatgatcttgacaccgagaagcagaagaccaatgaagatgaccagacagcaaaaaaggataagttaaaag

SEQ ID NO: 1035522 - DNA, 120 bp, Artificial Sequence
  ENSG00000246174_4 (sequence is synthesized)
aaggtaaaagaaggccactcgtacttgctgtctcagtatctaaaggtggtcaccttccagtagagaggcccacccactgcagaccgtgccaccgaaggtgacatgcactttctgccaccc

SEQ ID NO: 1035523 - DNA, 120 bp, Artificial Sequence
  ENSG00000246174_5 (sequence is synthesized)
tgccacccatccaaaaccgtaacgtgaatctgcaacaggagaggaaagaagaaccaaaacttccaaggccttgcattttttcttaaaagcatttttttttttttttggagatggagtctc

SEQ ID NO: 1035524 - DNA, 90 bp, Artificial Sequence
  ENSG00000246174_6 (sequence is synthesized)
ttttttttttggagatggagtctcactctattgcctggagtgcagtggcgtaatttcggctcactgaagcctctgcttcccgggtttaag

SEQ ID NO: 1035525 - DNA, 70 bp, Artificial Sequence
  ENSG00000246174_7 (sequence is synthesized)
tggatcacttgaggtgagggccaaagtattagctgggcgtggtggcatatgcttgtagtcccagctactc

SEQ ID NO: 1035526 - DNA, 69 bp, Artificial Sequence
  ENSG00000246174_8 (sequence is synthesized)
ggcaaaacctcctctctactaaaaatccaaagtattagctgggcgtggtggcatgctgggaggccaagg

SEQ ID NO: 1035527 - DNA, 120 bp, Artificial Sequence
  ENSG00000246174_9 (sequence is synthesized)
gtgacagagtgagactctgtttcaaaaaataaaaaataaaaaaaaggaagcagagtgggagacaagaatatatgaggtctgtgggccccttcaagccttcacgatcctttggcatccact

SEQ ID NO: 1035528 - DNA, 120 bp, Artificial Sequence
  ENSG00000246174_10 (sequence is synthesized)
cactaataatttttgataaatctagagtataaaatattcttggtgactgggtccacttggctttctggacgcctgaccaacactgtgggtggcatagtccatagactgtaggtttggttc

SEQ ID NO: 1035529 - DNA, 120 bp, Artificial Sequence
  ENSG00000246174_11 (sequence is synthesized)
aggacctgccctccacctcaagtccagactcaccactggcaggtcagcatctcaggccctggatcagaacaaggagcatattaggagtcctggctctggaaggtgaggtctggggccagt

SEQ ID NO: 1035530 - DNA, 120 bp, Artificial Sequence
  ENSG00000246174_12 (sequence is synthesized)
tgtgtttccccagtccaggtttctaagtacctggggctcactccaggcacctaggggaccaccaagctgcagtcagagcttctacagagttgtgtgatacagcaatcccagccttcctct

SEQ ID NO: 1035531 - DNA, 120 bp, Artificial Sequence
  ENSG00000246174_13 (sequence is synthesized)
aactcttgctctatctgccgtgacatacaactaagctgcttctgccttggttacctgatttcactgtcttttcagtgggcctgaagccaggccctggtcttcttgcctgacaccttggag

SEQ ID NO: 1035532 - DNA, 120 bp, Artificial Sequence
  ENSG00000246174_14 (sequence is synthesized)
ctgccggcctgaggacccttgggttaacccacactcaccaggaaagagccaactccatcactcatggattcagcagaccggcctgcactctctccaccacgctgtgggtactcgtaggtc

SEQ ID NO: 1035533 - DNA, 120 bp, Artificial Sequence
  ENSG00000246174_15 (sequence is synthesized)
tcacaggaagaagctgacagaggaaggaggattcataagtactcatggttgattcatgtgttgacacttacccataccctcaccagtgtggttcaaggtcttactgatactccagaagat

SEQ ID NO: 1035534 - DNA, 120 bp, Artificial Sequence
  ENSG00000246174_16 (sequence is synthesized)
actactctcaaccccaaatgataaggaatttcttcgaacacatcactcctcagttcaaaaattcctcctgggcttctagatgtagctccagtgttagcatctgcagagaagctgtccttg

SEQ ID NO: 1035535 - DNA, 120 bp, Artificial Sequence
  ENSG00000246174_17 (sequence is synthesized)
actactctaccctcatctatgcacctctcctttgactcctacaccactcacctgtcctgctcaccccagccatcacttctctgaacaccacagtaacaatacttgtcctgatttatatgt

SEQ ID NO: 1035536 - DNA, 120 bp, Artificial Sequence
  ENSG00000246174_18 (sequence is synthesized)
gttggttttattttcccaatgagatgtaagctctgaagggcaggaacatgttttatgtatgtctttatcatctcagttccaaaacggagtatgactgctcaaattgtcgatggattgaaa

SEQ ID NO: 1035537 - DNA, 120 bp, Artificial Sequence
  ENSG00000246174_19 (sequence is synthesized)
gacggcaaagaggtctaaactaggagctgggactctagggtctgagtctcatctctggcacaatgactctgcaactctatttaagtctcttaactgtcattggcctcatgtgagatggag

SEQ ID NO: 1035538 - DNA, 120 bp, Artificial Sequence
  ENSG00000246174_20 (sequence is synthesized)
acaaggaggttttgtcccaccaacctctctgcctggcttaaacaacaggatggacaagaaaaggctttgcaaaccataaagcaagatgcaaaatgaaaggaattaatattgttctatttt

SEQ ID NO: 1035539 - DNA, 78 bp, Artificial Sequence
  ENSG00000246174_21 (sequence is synthesized)
agcatgtgggtgagaagaatcgatgcagaagccatcgctcagagcgattttcagtacctcttccacgaagacctggaa

SEQ ID NO: 1035540 - DNA, 120 bp, Artificial Sequence
  ENSG00000246174_22 (sequence is synthesized)
tcagagcgattttcagtacctcttccacgaagacctggaagctgttgatctgcttgttggcgggcaccacccagagcctcttgaggttctgcttggtgtactcctcctctggcaggccct

SEQ ID NO: 1035541 - DNA, 120 bp, Artificial Sequence
  ENSG00000246174_23 (sequence is synthesized)
gacgtgggtcagcttgttaacggatacaagaaggcagcagagggaatatgcctggacatggccttcttacagatggataaatgcggcactggctagcggtacagagagatggagcccagg

SEQ ID NO: 1035542 - DNA, 120 bp, Artificial Sequence
  ENSG00000246174_24 (sequence is synthesized)
agaaaactgctgctcttttgtcctggctggaaaatcctcctatggcctcctttagtacacatcagctgactcttcacttgtcataataaaccgcctgtctgcagctcaaaatggcaagaa

SEQ ID NO: 1035543 - DNA, 120 bp, Artificial Sequence
  ENSG00000246174_25 (sequence is synthesized)
cacaattaatacagattagtatagtcccctgcctcgcaccactggcgagatgccctccaagacctggctgacatgagcttcctgggactccccatctccagtgttgttggggtcctttta

SEQ ID NO: 1035544 - DNA, 120 bp, Artificial Sequence
  ENSG00000246174_26 (sequence is synthesized)
gaagatgttggcgttgaagacctccatgctggaagaggagaggctgtagatctggggtgcctcgcgcacagtgaagtggaccgtctgcacacgctggttcagtgtgatgttgagcatggc

SEQ ID NO: 1035545 - DNA, 120 bp, Artificial Sequence
  ENSG00000246174_27 (sequence is synthesized)
attcttctcggccttggagagctccacttccttctcctgcagggcctcaatcaggggctgcacctggtagaagtcggcctccctgcggagcagccccatctcctggaagtcctcaggcag

SEQ ID NO: 1035546 - DNA, 120 bp, Artificial Sequence
  ENSG00000246174_28 (sequence is synthesized)
gtcaaggtgggaggtccgcaggaagttgaggatatagcggaacactttgccgtcacggtcaatgaagcagttgccctggctgtccctcttggtgggcatcttcccgctgaacatggcgcc

SEQ ID NO: 1035547 - DNA, 120 bp, Artificial Sequence
  ENSG00000246174_29 (sequence is synthesized)
tagcatggagtcagggaagctggtcagggtcgccagtgaggttgtatagagcttccccccgacgttcagcgtgatggggtcggacatggcaggagactgggttgctggaagtagtcctgg

SEQ ID NO: 1035548 - DNA, 120 bp, Artificial Sequence
  ENSG00000246174_30 (sequence is synthesized)
agagggtgagaagtgagaaatgactataaccaaaccttatcagagaactcacagtccttaactccttattgtacatcaagcctatgcccttgggatcgaaatgaattaatacctgatgaa

SEQ ID NO: 1035549 - DNA, 120 bp, Artificial Sequence
  ENSG00000246174_31 (sequence is synthesized)
tgggtgataattgctaacactgtgcaaagtacattagcttcactagggagagggaaaggagaaagggaaaaggaaaggaaaaaggaaacagggaaagaaagggaaggacccctaaagcct

SEQ ID NO: 1035550 - DNA, 120 bp, Artificial Sequence
  ENSG00000246174_32 (sequence is synthesized)
gggtcccccgcgcccccctctgctgccgacattctattttaattggtctggaatactgccccagccctggtattttgaaagagttcccttagtgattctaaatgttcagttagaatagag

SEQ ID NO: 1035551 - DNA, 120 bp, Artificial Sequence
  ENSG00000246174_33 (sequence is synthesized)
aaccactggtctaaagaaagaaaggaaaacgtgcctggactgaaagctatgctacgtgtttatacatatatttgcttacataatagttgtatcagccaggtgcggtggctcacacctgta

SEQ ID NO: 1035552 - DNA, 87 bp, Artificial Sequence
  ENSG00000246174_34 (sequence is synthesized)
atggtggtgggtgcctgtaatcccagctgttcaggaggctggggcaggagaatcatggactgaacaactgcactccagcctggacaa

SEQ ID NO: 1035553 - DNA, 120 bp, Artificial Sequence
  ENSG00000246174_35 (sequence is synthesized)
gtagccacttttaagttttatcagctagttcatgcttgcgttgaaagagtggtcgtttgcgctgggtcatcactgtgtagtattggggatacttagttctgtaaaccagaaatctaaaat

SEQ ID NO: 1035554 - DNA, 120 bp, Artificial Sequence
  ENSG00000246174_36 (sequence is synthesized)
cagtcactggagtaaagtcaaggtgtcatttggattggttgcttccagaggctctgcagggagattgtttttcttgtctttttcagcttttagaagttgcctgcattccttggccccttc

SEQ ID NO: 1035555 - DNA, 120 bp, Artificial Sequence
  ENSG00000246174_37 (sequence is synthesized)
tgtacatatttttagagtgcaggcatttttaataatcttggatgaccaaagcagctttcagaatgttctttgcccaacttctgactttacttgtagtgtgaccatgttcattagaatctc

SEQ ID NO: 1035556 - DNA, 120 bp, Artificial Sequence
  ENSG00000246174_38 (sequence is synthesized)
tctcaaaggaggaagaaaagaaaaaacaaacttgtaaaaaatgaaaaatagatctggcgaggtgattcacggctgtaagcccagcactttgagaggctaaggcgggtggatcacctgagg

SEQ ID NO: 1035557 - DNA, 80 bp, Artificial Sequence
  ENSG00000246174_39 (sequence is synthesized)
tctgaaaaaaagcaaaaataggccaggcatggtggctcatgccttgatcccagcactttggtaagcctaggcaggtggat

SEQ ID NO: 1035558 - DNA, 80 bp, Artificial Sequence
  ENSG00000246174_40 (sequence is synthesized)
tctgaaaaaaagcaaaaataggccaggcatggtggctcatgccttgatcccagcactttggtaagcctttagccaacatg

SEQ ID NO: 1035559 - DNA, 86 bp, Artificial Sequence
  ENSG00000246174_41 (sequence is synthesized)
gcaaaaacaacaaatcttattttttcagcctgttcgatgtatgtgtgaaacaatgttgtccaacaataaacgggaatcttattttt

SEQ ID NO: 1035560 - DNA, 120 bp, Artificial Sequence
  ENSG00000246174_42 (sequence is synthesized)
aaatagcctgttcatcattaccactggatttgttcctgagctgacacttaactgagccttaccagaacattccaccatcatctgccagggtctgttttattgcagaagccatagaggtga

SEQ ID NO: 1035561 - DNA, 120 bp, Artificial Sequence
  ENSG00000246174_43 (sequence is synthesized)
tctgaatagagatataatgggcataaacaggcttgtgtcctctaagtctgttctgatggtgttaatctctgcagttctttctgggatgcaatattgcttctactgatgggggcagtgaag

SEQ ID NO: 1035562 - DNA, 120 bp, Artificial Sequence
  ENSG00000246174_44 (sequence is synthesized)
attgcttctactgatgggggcagtgaagtgtctgggtaacttcaggggcttccacttggccctttctactacagactcttactcggctggatgtggtggctcacgcctgtaattccagca

SEQ ID NO: 1035563 - DNA, 120 bp, Artificial Sequence
  ENSG00000231563_0 (sequence is synthesized)
ggcatccctccaggaccagctctccaggaggcccacattctttctgcgggaaccactccaaaggggcatgctgttccaggcagcccctcgcgcagacactccggctttgtcgagggccca

SEQ ID NO: 1035564 - DNA, 120 bp, Artificial Sequence
  ENSG00000231563_1 (sequence is synthesized)
cacctcccagtagtgcctcccagaggagaaggccgtctggcccacagcacaggggagatgattaggacagagacgtgcatagagagatgatgccatgaggacgcggggaggagacggcat

SEQ ID NO: 1035565 - DNA, 120 bp, Artificial Sequence
  ENSG00000231563_2 (sequence is synthesized)
cttcaggcctaggagagaggctcaggaggaaccaggcctgcccgcaccttggcctcagccacccagcctccaggactagcagactgggagctaacagccctttcccgttggctgcctctt

SEQ ID NO: 1035566 - DNA, 120 bp, Artificial Sequence
  ENSG00000231563_3 (sequence is synthesized)
ccgtctggcccacagcacagggagcccccagtgcctcacctaagctgagctaccctgtcagcccacggccacacgcctgaggtcctgcaactcaggagaggcggagggaccccttccagg

SEQ ID NO: 1035567 - DNA, 120 bp, Artificial Sequence
  ENSG00000258736_0 (sequence is synthesized)
agagacggtcatctgctcctgttcttgccgttcgcggggtctgcctccagcaagttctccttcagcattctgagtgtaccacgggacagctagggtctcgctctgttgcccaggatggag

SEQ ID NO: 1035568 - DNA, 120 bp, Artificial Sequence
  ENSG00000258736_1 (sequence is synthesized)
ttcacctgttggccaggttggtcttgcactcctgagttcaagcggtccacccgtcttggccttccatgtgatgggattacaggcgtgagccacctcgctcggcctggatacaccaggttc

SEQ ID NO: 1035569 - DNA, 120 bp, Artificial Sequence
  ENSG00000258736_2 (sequence is synthesized)
gcccagccgcctcgcccggcctggatacaccaggttcgcccagccgcctcgccaggcctggatacaccaggttcgcccagccgcctcgcccggcctggatacaccaggttcgcccagccg

SEQ ID NO: 1035570 - DNA, 120 bp, Artificial Sequence
  ENSG00000258736_3 (sequence is synthesized)
gcacacagccagcactcgttgaggtttgcacatgtttgcaccccactctttctggcagcccaggcgtcccctctttctgagctgtattctgtggaggttgctctgctaaggagctgggtg

SEQ ID NO: 1035571 - DNA, 120 bp, Artificial Sequence
  ENSG00000258736_4 (sequence is synthesized)
gtggcgcagtcattttgctgatctgatgcttctcccacacccgtaagtgggagtggagcagggcgtgtgggtccggctgctgcctctgcctcggcacttcagagacggtcatctgctcct

SEQ ID NO: 1035572 - DNA, 120 bp, Artificial Sequence
  ENSG00000265737_0 (sequence is synthesized)
gtccatgggatggacccggcaggtggcaagacaaactatgcaaaaggatcgtgatggaaccctcaaatatgaaggtgaaaagaactgcacaggcagcgaagtctggccctgtcacccagg

SEQ ID NO: 1035573 - DNA, 88 bp, Artificial Sequence
  ENSG00000265737_1 (sequence is synthesized)
agaactgcacaggcagcgaagtctggccctgtcacccaggctggagtgtaggtatgggttctcacattctcctgcctcagcctcccga

SEQ ID NO: 1035574 - DNA, 120 bp, Artificial Sequence
  ENSG00000265737_2 (sequence is synthesized)
tacaggcgtgaaccacagtgcccggcctgaaatcttgaaataaatgaaaaacgagctaatcgctgaacaaaaaaataaaaaatcactgtggaatgacaagaacattctacaaacatttat

SEQ ID NO: 1035575 - DNA, 120 bp, Artificial Sequence
  ENSG00000265737_3 (sequence is synthesized)
atgtgatttttgcaaaaagtgttaatgccaatgtgtatatgctgagtgatgaggagataagtgatcctgaatcagaggagcaaatcgtgacactgagaaaataaatgcaaaagctgaacg

SEQ ID NO: 1035576 - DNA, 120 bp, Artificial Sequence
  ENSG00000226601_0 (sequence is synthesized)
cagaaataatcatgaggaaagtgcaattgtgggatcatacaagctgaggatgcctagagggatccctggatgtctgtgagctgtaaggctcaagtggattcctgcagtgctcagcaagcc

SEQ ID NO: 1035577 - DNA, 120 bp, Artificial Sequence
  ENSG00000226601_1 (sequence is synthesized)
tcgccaggccccatgtgcacaggtgtgggggtcttgctctgtcatccaagctggagtgcagtggtacaatcacggctcactgcaacctggacctccagtgctcaagcaattctcccacct

SEQ ID NO: 1035578 - DNA, 120 bp, Artificial Sequence
  ENSG00000226601_2 (sequence is synthesized)
ctgagtagccaggactacagcccaagaactggaaacaacccccgtgtccttcaacaagtcggtaaatgattaagcagactggttcatccataccatgaaatactactcagccatgagaag

SEQ ID NO: 1035579 - DNA, 120 bp, Artificial Sequence
  ENSG00000226601_3 (sequence is synthesized)
aaacagccttgatacacaaagcaacctggataaatctccagagaattatccggagtggaaaaagccaatccccaaaggctgctacacagtccgtgactgcattagtttaacattcttaac

SEQ ID NO: 1035580 - DNA, 120 bp, Artificial Sequence
  ENSG00000231754_0 (sequence is synthesized)
gtcgcaatgcagcaaagcagaagcagacaactaggcacaaagcaacagagttttaaagttttcttctcctgctactacttagcatgtcttacatgaggagtatttacctttgtttagcca

SEQ ID NO: 1035581 - DNA, 120 bp, Artificial Sequence
  ENSG00000231754_1 (sequence is synthesized)
ggagcagagatgcatcctgaatgtacacgatggcttctaacttggcagcgtgaattttcagctgagcaggtactgctcggagacttgtaaccaaaccgcctctgatggagcacggctggt

SEQ ID NO: 1035582 - DNA, 120 bp, Artificial Sequence
  ENSG00000231754_2 (sequence is synthesized)
ctcccaccatgtgtgtgaatagtttgggggcttcttatgccacgctgctctacctgcaggaataaaggctaggacaaaggagaggatgcttgctatggtttgtctggctggggcctgtgc

SEQ ID NO: 1035583 - DNA, 120 bp, Artificial Sequence
  ENSG00000231754_3 (sequence is synthesized)
gagcgactcaccgcactgatgctgtgtgactccccagctcacatttaaggctggtcacggggctggcgcagatccccactcctcagttagcgcacggtttaaaggagaaaccagactccc

SEQ ID NO: 1035584 - DNA, 120 bp, Artificial Sequence
  ENSG00000231754_4 (sequence is synthesized)
tgacctaaatcactcccagtcctctctggatgcgggacagctgtcgactagcagtgacacaaccagccatcaagtggagaatcgttgcgactgcagtctgtgtgcaggtggagcccggga

SEQ ID NO: 1035585 - DNA, 120 bp, Artificial Sequence
  ENSG00000231754_5 (sequence is synthesized)
gaatgacagtctaatttcggtcatccaacggcttttccttattttcctaaataatcgtgctcgctaagtatacagttgtctggattagcctgcctgccatgcagtcctcatcaactctgg

SEQ ID NO: 1035586 - DNA, 120 bp, Artificial Sequence
  ENSG00000231754_6 (sequence is synthesized)
ctggaaatcagggtgccaggcaagccgcctttagccctggctcctttctgcgtgatgctatgcagctaggatgggtcatgctgacaacaaagaaggaagcagaaagcatcactttctctt

SEQ ID NO: 1035587 - DNA, 120 bp, Artificial Sequence
  ENSG00000231754_7 (sequence is synthesized)
caacaaagaaggaagcagaaagcatcactttctcttctcttgtgatgttagcggaacataactcttcttcgcagtgatgcccttgtgtgtggtgtatgtgtgtgtgtgtgtgtgtgtgtt

SEQ ID NO: 1035588 - DNA, 120 bp, Artificial Sequence
  ENSG00000231754_8 (sequence is synthesized)
aacagcggcacatttaggttattgccaatttgaaatacttggtttgtgaagctgagccctaagggacaagctcggtaactgaggaagagatcgtagataaagaaataaaaatgacaagcg

SEQ ID NO: 1035589 - DNA, 120 bp, Artificial Sequence
  ENSG00000231754_9 (sequence is synthesized)
taatggaggctctgcgaagggactgtcagagcatcagttcatggatggcaatttcaccaggctgagattgaataattcatagattgaaattaccctgctttcacctttccatttaagccg

SEQ ID NO: 1035590 - DNA, 120 bp, Artificial Sequence
  ENSG00000231754_10 (sequence is synthesized)
gcatgatctgaatctctcataaattttcaagataaagtaaaatgccaatttgaatctgaagagcttttaaaaccagatgctgcatccctgaatctttcggtatctttcacaattatccta

SEQ ID NO: 1035591 - DNA, 120 bp, Artificial Sequence
  ENSG00000231754_11 (sequence is synthesized)
tgagaacagcacttcatcacgaagcaccattaccagggaaaattacggtgattacaatagcaacaatagaataccatcaaatgatctctaatttacctaatttgctaagactgactgtac

SEQ ID NO: 1035592 - DNA, 120 bp, Artificial Sequence
  ENSG00000231754_12 (sequence is synthesized)
ggttttgatatccattgtatgtcaccatgcccggcacccgtgaagctatctcgcactggaacaaaagtggcatcgtgtgtgtgtgtgtgtatgtgtgtatgtgcacgcacaccctgctac

SEQ ID NO: 1035593 - DNA, 120 bp, Artificial Sequence
  ENSG00000231754_13 (sequence is synthesized)
cttaactgtgaatgcctagcaaagaacattctcctaggttacaatatttctttcctttggttcacattttcgcttttttccaatgcctctaccccaaatgtgtttggggaaatggagagc

SEQ ID NO: 1035594 - DNA, 120 bp, Artificial Sequence
  ENSG00000231754_14 (sequence is synthesized)
ctgtcatgggttgggagactgttttttgatacagaagagcattgacttgttaatttatataccctctttattttaatgtatacaagcctgtgtttactaaaagggagggaggatgctgtt

SEQ ID NO: 1035595 - DNA, 120 bp, Artificial Sequence
  ENSG00000231754_15 (sequence is synthesized)
ctgggagagtaattttaaaatgcagccgagatgtagcatatgtgtttgtttcttctttgaaacccctgtctgtctctttcaggttagaaatcctttcagggaagtttagtcctggtgtga

SEQ ID NO: 1035596 - DNA, 120 bp, Artificial Sequence
  ENSG00000231754_16 (sequence is synthesized)
tgtgtcaaaaacctctcagattgcaaagaagctcaggagatacaatcagtaataactctgtacagcttttattaaaagcatgcatgttcaattcagtgattaaatgaagcttcggtacaa

SEQ ID NO: 1035597 - DNA, 120 bp, Artificial Sequence
  ENSG00000231755_0 (sequence is synthesized)
tgaggagacaatcttgataggaagtttgaactttgaaataatattttattctaccacccatctaaaggctaattaatcacaaatgttaaaccaatcagaagaaaatgtttgttaaaccag

SEQ ID NO: 1035598 - DNA, 120 bp, Artificial Sequence
  ENSG00000231755_1 (sequence is synthesized)
aaaaggctgttacctctcacagacaagtttctttctttaggtcaacatatctggtgtagctgtcaggattcagagcaacctcctcacaccctggaccacctagtgatccctcctggactc

SEQ ID NO: 1035599 - DNA, 120 bp, Artificial Sequence
  ENSG00000231755_2 (sequence is synthesized)
agcactcagcaccagcacaaacctactgtgtttctctgtctccacatctttccctgagtacaaaaggtagccctgcgtgagtaggcatcttccatcatcagagatctccaactgaagctg

SEQ ID NO: 1035600 - DNA, 120 bp, Artificial Sequence
  ENSG00000231755_3 (sequence is synthesized)
acctgcagccagtcacctggttcttcagaccaggacaagaaattgaaactcagtttaaaaagatcactcaaaaggctaaatggctacaagatgacccatggttggaaagacagacccctt

SEQ ID NO: 1035601 - DNA, 120 bp, Artificial Sequence
  ENSG00000231755_4 (sequence is synthesized)
atatttctcacatttggatttcaaattgtttaattagtaattgtccttatttgtgtcatatttttgattcttaaatcaattatgctttgcatttctctatctaaagtgtttgttgacaga

SEQ ID NO: 1035602 - DNA, 120 bp, Artificial Sequence
  ENSG00000231755_5 (sequence is synthesized)
aactaaactcatgatagctagatgcatagaaattattcaacacgccatacttcctttgtaagtggatgaaatcctgagacccaattcctctgcccctttgtgttgccagttaatttagcc

SEQ ID NO: 1035603 - DNA, 120 bp, Artificial Sequence
  ENSG00000231755_6 (sequence is synthesized)
taagacttcactaaattcttaagctgtagtgcctctcctctttccctccaatgtagagagagattacccgggaatgagccttcctagcaatatggggaaaagctacgtttaaaatgttga

SEQ ID NO: 1035604 - DNA, 120 bp, Artificial Sequence
  ENSG00000231755_7 (sequence is synthesized)
ttatcaatgctttcagaagaggaagatctcaatcaaaaaggggaaatgagaagaaaagtagctcagagatgtctgagctatgtgaggtatgcaaaatgtatcagatccagagagacatga

SEQ ID NO: 1035605 - DNA, 120 bp, Artificial Sequence
  ENSG00000231755_8 (sequence is synthesized)
gtattgaaagccaacttgtaactactgctaatcaaagcatatattcatggcaacttgaatctgtgtctccttggttgcagtccccaaatttggcccaaataaattctcgacttatgttaa

SEQ ID NO: 1035606 - DNA, 120 bp, Artificial Sequence
  ENSG00000231756_0 (sequence is synthesized)
aactattttaattagcattatacagtggaatgccatggacgaagagtcagaagaattcagattctttaacaaccgaccatccttcaaatttctcatcttcagaaggggatcctacttttt

SEQ ID NO: 1035607 - DNA, 120 bp, Artificial Sequence
  ENSG00000231756_1 (sequence is synthesized)
caattcccgtgtccaaaagatctcctatcaactccctacccaggacagcctagaggggaaactgatgagaacgaggagttttgctttatccaccattaaaactgaaagggtttcccccta

SEQ ID NO: 1035608 - DNA, 120 bp, Artificial Sequence
  ENSG00000231756_2 (sequence is synthesized)
aagatctgccatcaagagctgagccactgacgccattcctagttccactgctactagaagccttcatcacttgcaataatagaggatgatgattcattacaataaaaacagtatctactc

SEQ ID NO: 1035609 - DNA, 120 bp, Artificial Sequence
  ENSG00000231758_0 (sequence is synthesized)
gggtagtgtggtcaaagatgacttctgcagataaaaacatcatcttgtatgcaagggcgtggtgaaaacctctgctaccatactggatacaaggtctttaacttctcagcaccagtttta

SEQ ID NO: 1035610 - DNA, 120 bp, Artificial Sequence
  ENSG00000231758_1 (sequence is synthesized)
tggagcccccaccgctaagcaagtatgcaaaatgcagtgctgcttcgcattgggaaatccccaatctggtgccaagaggttcataaatacagtaatggaccctcttatgtcaaaagtgag

SEQ ID NO: 1035611 - DNA, 120 bp, Artificial Sequence
  ENSG00000231758_2 (sequence is synthesized)
ctggaaaggcaacctacttcagtctgcaaagtgaactaaaagggaatggttgttcatacatggccctgatgccactgacataagaaacgcaatgacaagagcgatgaagtaggaatttgg

SEQ ID NO: 1035612 - DNA, 120 bp, Artificial Sequence
  ENSG00000231758_3 (sequence is synthesized)
tggcagatggtcaggtctgcaggaagtgtccacccagctttgtttggcccatattctgaaacaactagaataaacacttagtgtcataatttataagcatatcagtaccaataaatcaga

SEQ ID NO: 1035613 - DNA, 120 bp, Artificial Sequence
  ENSG00000231758_4 (sequence is synthesized)
ataaaactccctggctgtgcttttctactgagttcacatttacagtactaataatgccttcagtacaagtcatttccagggaattaaatctttgcagtcagtgggttaaatccccatgaa

SEQ ID NO: 1035614 - DNA, 120 bp, Artificial Sequence
  ENSG00000231758_5 (sequence is synthesized)
ataacctgcaggtgacccagttggattgatctcaagtatagaatttcagatcaatagttgctgtacttggattctgagatataaaacaatccctagtgtttttgttaccccaatgagtat

SEQ ID NO: 1035615 - DNA, 120 bp, Artificial Sequence
  ENSG00000231758_6 (sequence is synthesized)
tatcagacaagggattactatggcaattgcagggtcttatgatattaatggggtttttttttttttggtccaaaaagaagttattttaaaaagtaaatgccttctgttcactcttcttgg

SEQ ID NO: 1035616 - DNA, 120 bp, Artificial Sequence
  ENSG00000231758_7 (sequence is synthesized)
tcactcccagaatggcaaaaagatagatgaagatggagaaatgtgcacctaacactgcatctttatgagcaaaggattttctttggaaaaactgtgattatatgaaaatcataggacatt

SEQ ID NO: 1035617 - DNA, 120 bp, Artificial Sequence
  ENSG00000285699_0 (sequence is synthesized)
tagattgctgtgagaaggagccatgtaacaactggctggcagtggatagaggaagaaaaaacatcatcaagttgttgtgataggagtggatgaatagtgaccaacatgacacctggaaat

SEQ ID NO: 1035618 - DNA, 120 bp, Artificial Sequence
  ENSG00000285699_1 (sequence is synthesized)
cacaaaccagtacaacctaaacttgctggtcagtatcatgtggtcaaaggatctgtcactggcaatatgcggtacatgatcaaagtttacttctgctgcaaagaattgaagaacggtact

SEQ ID NO: 1035619 - DNA, 120 bp, Artificial Sequence
  ENSG00000285699_2 (sequence is synthesized)
gtaattttaattgatgtatggcatgtaaaacattgctttgctttctgctacatgtgtgttataaccaaaaggttataattttattgtcaaaattaaatgtaattcagacttatgtacagc

SEQ ID NO: 1035620 - DNA, 120 bp, Artificial Sequence
  ENSG00000237759_0 (sequence is synthesized)
caggacagaactttatggaaacactttgccaagccatgtggtgctcggcttccctttgcatcaatacccttttaattacctgatcctgagggggaaaaagttagggaaaagtgtcagtgc

SEQ ID NO: 1035621 - DNA, 120 bp, Artificial Sequence
  ENSG00000237759_1 (sequence is synthesized)
aaaagcctaggaacctgctgtgaatcagactttttcaaaaagacagcatgataaaatatctggcaattattctacaggacatcgatctaaatccgcaactagcctgcaaagatgctctct

SEQ ID NO: 1035622 - DNA, 120 bp, Artificial Sequence
  ENSG00000237759_2 (sequence is synthesized)
tctggaagtctgaggaacctgcaggcacctgtggttgctggagctctcttctctgcgagaggcagcaggcagttctctgtggagggacccagatggtctgcattcaagaatgtaagaaag

SEQ ID NO: 1035623 - DNA, 120 bp, Artificial Sequence
  ENSG00000237759_3 (sequence is synthesized)
gcccttaagcaagacctgtcttttattttctcttgcacagtctttggattcatcattagggtcacagacaaaccccagaagtcttgctctcagaataaatgtgaatttcattcaaagaaa

SEQ ID NO: 1035624 - DNA, 120 bp, Artificial Sequence
  ENSG00000237753_0 (sequence is synthesized)
cccctccctgcggcctcgccctggagtctcggcaccgtctggccccgccggctgattacagccagagatcgagggggacctcgctgtccccctagaggccgtcatgcggggttacagagg

SEQ ID NO: 1035625 - DNA, 120 bp, Artificial Sequence
  ENSG00000237753_1 (sequence is synthesized)
ctgcgaccaaagtcattcctagctcctctctcggggctccggaaagccgtccgcgcctccagccgcactttcagcgcacgcaggacctgccgcgcccggtggccacacccgtccctctgc

SEQ ID NO: 1035626 - DNA, 120 bp, Artificial Sequence
  ENSG00000237753_2 (sequence is synthesized)
cgggtgacgctgcgggagatcttgcgccctggggctccggatccagttctgtcatgcacttgggtgaaaacagactgaagagtcacgggaaccagcttgtctccccagttatggcgcaga

SEQ ID NO: 1035627 - DNA, 120 bp, Artificial Sequence
  ENSG00000237753_3 (sequence is synthesized)
gctgcaaggatggctgtgggtcattaatttctccgtggctgacctgtgtttgtaacgccgcagctgttgcgagggggaaggacactgcttcggattcaaattctgactccttgctgcagt

SEQ ID NO: 1035628 - DNA, 120 bp, Artificial Sequence
  ENSG00000237753_4 (sequence is synthesized)
gtgtcaccttgagccagtcccagatctctgcgttctcacaattgtaaaatgttaacagaggctgcctaccttgtggctggaattaaatgaattaacgtgtgtgaatgtgactagaattca

SEQ ID NO: 1035629 - DNA, 120 bp, Artificial Sequence
  ENSG00000237753_5 (sequence is synthesized)
gaaaagggtggaaggggatgttattgcatcctggaagcttatccttttgagtctgtccacaggcgtacttttataggtctgtgatagtaggtagctcttcaagttggcaaacacctgctg

SEQ ID NO: 1035630 - DNA, 120 bp, Artificial Sequence
  ENSG00000237753_6 (sequence is synthesized)
gacaacccctgagagattcatctgagtgagagagcactctccagccccatcggagtgggtttgcagggaaatcataaggaagaaatccttatctttccaacactgagatgcttctgccga

SEQ ID NO: 1035631 - DNA, 120 bp, Artificial Sequence
  ENSG00000237753_7 (sequence is synthesized)
agagtagaatgggagtgaggggacacgcaaaacgggctgctgccggaggaagaggaacagtgttgtggctcatgccatatgaatgggctcactggcctggcccagaccctgactgcccac

SEQ ID NO: 1035632 - DNA, 120 bp, Artificial Sequence
  ENSG00000237753_8 (sequence is synthesized)
aggatctttgacagagaaacggaggcacagagaaggaagcggcagttaaagctgcgaagaacctaacaaatttcaagattgtaagtgccttttcccaggatgccagcaagtactgagcct

SEQ ID NO: 1035633 - DNA, 120 bp, Artificial Sequence
  ENSG00000237753_9 (sequence is synthesized)
gtattttgagctgcatcaaaccctgttggaataaaaaaggacatttctaggagatcagtcttcgagattggccccagtttccccagagtaggaagaggcaggaagccagagcacatgttc

SEQ ID NO: 1035634 - DNA, 120 bp, Artificial Sequence
  ENSG00000237753_10 (sequence is synthesized)
ccatgttggggactgtgggtttagagtcctcttggggacatgtccatcgttcactaattcggtggagttgagctgctgagagctaggaaagctactctccccccggatcccaacctagcc

SEQ ID NO: 1035635 - DNA, 120 bp, Artificial Sequence
  ENSG00000237753_11 (sequence is synthesized)
gagaggcacagtcaaggaaatgcatttgaggtcactgttcgatgtacttgaagtactcatcctggaaatagtctacttggagtagagggagctcaagtgggcatgggaacgttgtggaac

SEQ ID NO: 1035636 - DNA, 120 bp, Artificial Sequence
  ENSG00000237753_12 (sequence is synthesized)
cagaccaggaacaaaggcggcttcagaggccgtctgtgaggacttgcatgggagcaggggcgagaacatccagggaagagaaggtaggagccttggagtaaaggagaaccagctcctctc

SEQ ID NO: 1035637 - DNA, 120 bp, Artificial Sequence
  ENSG00000237753_13 (sequence is synthesized)
aaggagaaccagctcctctccacccaccaatgccctccccatccccagatgaatgaggtaataataatacctgtagctggacatggtggctcaagcttgtaatcccagcattttgggagg

SEQ ID NO: 1035638 - DNA, 67 bp, Artificial Sequence
  ENSG00000237753_14 (sequence is synthesized)
gaggccaaggcgggtggatcacctgaggacgggagttcgagaccagcccggtggtgcatggctgtaa

SEQ ID NO: 1035639 - DNA, 120 bp, Artificial Sequence
  ENSG00000237753_15 (sequence is synthesized)
gtgatgcagttgaatgcttactgtgtgccaggtactatttcaggtgctctgcatggattatctcaggtgatgctctcaataaatctcagatgaggtattttccccttactttatagacag

SEQ ID NO: 1035640 - DNA, 120 bp, Artificial Sequence
  ENSG00000237753_16 (sequence is synthesized)
ctgcgtggtatatagtgtagttttgacattatttagatgtgttatgcacatttgggtgttgattatatggcttacgatcaagactaaccagtcatgccgtgggagattaaggtcgtggtc

SEQ ID NO: 1035641 - DNA, 120 bp, Artificial Sequence
  ENSG00000237753_17 (sequence is synthesized)
tcttgtcaggattgtagtgagatttaaaaattccagccagaaataccaggcttagaatgctctgaagccctccccacatttttgccatctctagcaggagggcactgcatagcagaaaca

SEQ ID NO: 1035642 - DNA, 120 bp, Artificial Sequence
  ENSG00000237753_18 (sequence is synthesized)
aagacgttgtaaattgttgctgcctgagtcatttatagaggcttaaacaacctgaatgtcctctgacctacctgtaacatttgatggagttgtatgagtaacttacaaagctgtaggtcc

SEQ ID NO: 1035643 - DNA, 120 bp, Artificial Sequence
  ENSG00000237753_19 (sequence is synthesized)
caaggtcggtctgaaaaagaaagttcatatccgggagcactgaccccgtagtgtaatcctggcaccttaaaacgtactgctccctccaccttcacttcaaggttatgaaaacattgagta

SEQ ID NO: 1035644 - DNA, 120 bp, Artificial Sequence
  ENSG00000237753_20 (sequence is synthesized)
aaagggatgatctgttcaaagtccttagtgttctgccaatttaaaacagtaattttcaaagcagttatttgcaaggaaattgcctagaacttctcccagtgtgcggttgttttgtgtgtt

SEQ ID NO: 1035645 - DNA, 120 bp, Artificial Sequence
  ENSG00000237753_21 (sequence is synthesized)
ggggctccggatccagttctggcacgttgttgcacctgtgacttgtccttggcctggcactgtccctcgcctgggggaagcgggggggtgggggggggatgctcacgtggtcgctttgct

SEQ ID NO: 1035646 - DNA, 120 bp, Artificial Sequence
  ENSG00000237750_0 (sequence is synthesized)
atattcagaacagctgcttctttttggttgctggtggcagggatattatggaggcaacagacgcatgagagtgaggtatttatctgagggcgattgaagtcaccagcttaacagtagtgg

SEQ ID NO: 1035647 - DNA, 120 bp, Artificial Sequence
  ENSG00000237750_1 (sequence is synthesized)
aaagaccttaagccagagaactccaggttcaagaaccaccacctgcaaacttggcaaatttggacaaatgtctctctgagtttcattgtcttcatccacaaataaagcaagattacttcg

SEQ ID NO: 1035648 - DNA, 120 bp, Artificial Sequence
  ENSG00000237750_2 (sequence is synthesized)
cctacagaattgcgaaattatgaccagaccatgagggtatgaaggatgaggaaaagggagcagtcatggagctgttttggagggagtcataattccttagacctctgacaactggaactc

SEQ ID NO: 1035649 - DNA, 120 bp, Artificial Sequence
  ENSG00000237750_3 (sequence is synthesized)
tcaatctgccagtgaaagctgacatgagcccaataaggatggtcttttctattcaaagatagggacaccctctttttaaaggacattcaattcaaatgtatcttctctggttaaagtatg

SEQ ID NO: 1035650 - DNA, 120 bp, Artificial Sequence
  ENSG00000237750_4 (sequence is synthesized)
gtgaagtctgtcctgtgggcactccccattgactcctagcagctcttgagccccatcttcaggatccgtactttgatagtcactgacaattagctttgaaaatctatagttccaatcctg

SEQ ID NO: 1035651 - DNA, 120 bp, Artificial Sequence
  ENSG00000237750_5 (sequence is synthesized)
tgaaatgagaagaatgttgaagctataaaggaggtctttgcctgcattcagattctgacaccaaagactcctctgattatactgaagtatgtaagaaaaccttctcttgaaatcaaggac

SEQ ID NO: 1035652 - DNA, 120 bp, Artificial Sequence
  ENSG00000237750_6 (sequence is synthesized)
catttctcttcatcttatcttgagctacataccaaatatgagtacacatagttaggattcaataaataatttaagatacttgtgaacaccttgctctgactggttctatttttacattca

SEQ ID NO: 1035653 - DNA, 120 bp, Artificial Sequence
  ENSG00000237750_7 (sequence is synthesized)
gagaggaaagcatcctgtattctccctataaacaaatctaggagaatagggtcatggacatcctatgtacacagaattacagtccgatgttgggtatcttactcctgtgaagtgaaggga

SEQ ID NO: 1035654 - DNA, 120 bp, Artificial Sequence
  ENSG00000237750_8 (sequence is synthesized)
aatagaaaagtaaacaaagaagaccacagtataagatgtcaccttaaaatataaacctgaagacaagaaaaaccaggctcaaggaacaaatgagcaggaaagttgaaattctagaataca

SEQ ID NO: 1035655 - DNA, 120 bp, Artificial Sequence
  ENSG00000237750_9 (sequence is synthesized)
tttgttttataccaatattatttgcatcttgtttaaatgaaaagttgtttacatacacaatggatgactacaaagaaacagcatggaaactggaatcagaggcctgtgtctgaatttcat

SEQ ID NO: 1035656 - DNA, 120 bp, Artificial Sequence
  ENSG00000237750_10 (sequence is synthesized)
gtctaccactgaacaactgcatgacactgggaaatttacttagtttctatagacctcatttttcttatctgtaaaatggcttccacaatctgaaactcaaaggtctcttgacaagattga

SEQ ID NO: 1035657 - DNA, 120 bp, Artificial Sequence
  ENSG00000237750_11 (sequence is synthesized)
atgtgataatgcatgtaagggatcaggacgaaacccagcacaaaaaaagactgcaagccacactgtttacaaacaccgtttccaagtaaaaaaaaaacctgctcattgaaactgaaggca

SEQ ID NO: 1035658 - DNA, 120 bp, Artificial Sequence
  ENSG00000237750_12 (sequence is synthesized)
ggtgatataattgctctatggttatgccctacccaccttgtcttaaacagtgcaaaatatgtgatatcattacacatttcttatcaggaaaatatttcaaagggcaggcactctctgtgt

SEQ ID NO: 1035659 - DNA, 120 bp, Artificial Sequence
  ENSG00000237750_13 (sequence is synthesized)
ttccttagtaacagcagctatgtggagcatcttctgtattatgtttaacatggtgcaaatatgaacaagtaatcacaactcctgtgcaccagcaactagagaaatgtagctacaataaaa

SEQ ID NO: 1035660 - DNA, 120 bp, Artificial Sequence
  ENSG00000237750_14 (sequence is synthesized)
taggtggcattcatatttgtttgttggccatacctgggactttttaagaacctgtttttggttaatcttgtttttttttttaaattctaaacccttttttgtgtaatgttgcagcagaag

SEQ ID NO: 1035661 - DNA, 120 bp, Artificial Sequence
  ENSG00000237750_15 (sequence is synthesized)
cgagggtctcagaaaacatctcctgttctgatctggcacagttccaattatatggataaccttccatttgtaaagctctgaaataagtgtcacaaggatacgtagatttaagatgcaggt

SEQ ID NO: 1035662 - DNA, 120 bp, Artificial Sequence
  ENSG00000237750_16 (sequence is synthesized)
ccatctagaagaagtacaatctggttgaaggatggtggggcaatacaacaagtacataactcactttgttgcaaggcataattggtaaatcctcatctactgggactacagaagtttgac

SEQ ID NO: 1035663 - DNA, 120 bp, Artificial Sequence
  ENSG00000237750_17 (sequence is synthesized)
aacccctgtctctcgtgtcttatggccaccaatgactgcagtctttcattgtgaatttgggtttcgtctcagaaatcttctcaacatgatgctctgtcaagccaacaatgtttgagcagt

SEQ ID NO: 1035664 - DNA, 120 bp, Artificial Sequence
  ENSG00000237750_18 (sequence is synthesized)
cagccatttgtttaatatctctggattattgcattggtaattcttgctgaaaacactcaagtcacctgggagaactgatctgtttattaatagcttttaggatttcaacatttcatattt

SEQ ID NO: 1035665 - DNA, 120 bp, Artificial Sequence
  ENSG00000237750_19 (sequence is synthesized)
aaacagagaaatctaacattacttgacagaaaacaggagtggtcataggaatgaaaaattcacatatctttgggaaccaagttattattatcaatgagtgtcatggactggataagaaaa

SEQ ID NO: 1035666 - DNA, 120 bp, Artificial Sequence
  ENSG00000237750_20 (sequence is synthesized)
caaggactggttggaccagaattatagcaggatacagacacaaaggcatttaaattttaaaattctaagaatgaaatataactatagtaaatacatctttggactacttttggcttatgg

SEQ ID NO: 1035667 - DNA, 120 bp, Artificial Sequence
  ENSG00000237750_21 (sequence is synthesized)
atcatggtttgcaaacccttgatctgtgacatagatgttaaaggtggggtaatgaggttgtgtgtgcagatctccaaacaccagagcatcatgggcagcactaacctgcatggtgccctt

SEQ ID NO: 1035668 - DNA, 120 bp, Artificial Sequence
  ENSG00000237750_22 (sequence is synthesized)
aggagggctgtaagccagaagcaagttctccattctgccctagtcaggcgtgactataccaaggcttataactggagatacaagccaagccatatacctggcaattcagcaaagttcaga

SEQ ID NO: 1035669 - DNA, 120 bp, Artificial Sequence
  ENSG00000237750_23 (sequence is synthesized)
gaaatatggcatgaattcatacaaattaatcaagtgcataacattaagaaactgcaattttgagttgtgcgtatgcttatagtggcccatttctaaattaaaaggaagactatttctgtt

SEQ ID NO: 1035670 - DNA, 120 bp, Artificial Sequence
  ENSG00000237751_0 (sequence is synthesized)
ccgcgtctccgctcccgcgctgccggcttccgcggcttcccccacttctcagcctgcttctctctcccctctccttcctttcctgtcctttcacactcgcgccccagcccccgtcaccat

SEQ ID NO: 1035671 - DNA, 120 bp, Artificial Sequence
  ENSG00000237751_1 (sequence is synthesized)
ctaccccaaggacttgcaaacttcgcccctgaggagcggactcttcggttctccgtggaaaatcaaccagacccaaaacagaggtcccgggtttggggataccacgccgcgcgcctgagc

SEQ ID NO: 1035672 - DNA, 120 bp, Artificial Sequence
  ENSG00000237751_2 (sequence is synthesized)
catctgcgggaagggagacctaaaggccaaggctggggacgagagatcatccaccaaggccggggtttccgagtgaggcgcccacttcgcatcccacagtaccgccagaaacccatcgga

SEQ ID NO: 1035673 - DNA, 120 bp, Artificial Sequence
  ENSG00000237751_3 (sequence is synthesized)
cccacaaagatcaaaatcttcggtaacacaccaaactggcgacgctgtggggaagcaagcactctcccaagtggctggcgcgcagtgagggcgcaggaaagaaaaagaaaaaaaagaaaa

SEQ ID NO: 1035674 - DNA, 90 bp, Artificial Sequence
  ENSG00000237751_4 (sequence is synthesized)
ggcagagcggaggagaccaaggagggagaagccctagcggccaggagttccagatcagcctgggcaacataacgagaccctcgtctctgc

SEQ ID NO: 1035675 - DNA, 120 bp, Artificial Sequence
  ENSG00000249912_0 (sequence is synthesized)
atgagcaacaggcttctctgctgtgtgatcatttgtctcctaagagcaggcctcaaagatgctgtagttacacaattcccaagacacagaatcattgggacaggaaaggaattcattcta

SEQ ID NO: 1035676 - DNA, 120 bp, Artificial Sequence
  ENSG00000249912_1 (sequence is synthesized)
aaaaggagatatctctgaggggtatcatgtttcttgaaatactatagcatcttttcccctgaccctgaagtctgccagcaccaaccagacatctgtgtatctctatgccagcagttcatc

SEQ ID NO: 1035677 - DNA, 120 bp, Artificial Sequence
  ENSG00000249917_0 (sequence is synthesized)
tgtggctgtggccaagtgattgttgctgaacttacctgtgtcgaaaggtcagccttccagtgctaaggctgggcacaggcgctaaggcaaattggattgtgaatggaggccctgaggcat

SEQ ID NO: 1035678 - DNA, 120 bp, Artificial Sequence
  ENSG00000249917_1 (sequence is synthesized)
gttctgcactttgcaactggtctggcaggctccactcctccaccttctaagtctgccacaggcatgggaaacacctgggcagcgacaaaggtggttaaggcagcttcgccaagaagagga

SEQ ID NO: 1035679 - DNA, 120 bp, Artificial Sequence
  ENSG00000249917_2 (sequence is synthesized)
gccaagatggttaactagacgtagccaggaggaacatctcccaccaagagactgagctgtcaggaagactggtacattctgagcagatctttggagggaaggcattgagagtggatggaa

SEQ ID NO: 1035680 - DNA, 120 bp, Artificial Sequence
  ENSG00000249917_3 (sequence is synthesized)
ggatgatgcagacactgggctgaagaggaaggaagctgggaaccctgtacaggactaccgagcaccaggacttgtttctggccccctgcaactcctgggaaagggggttttagccagatg

SEQ ID NO: 1035681 - DNA, 120 bp, Artificial Sequence
  ENSG00000249917_4 (sequence is synthesized)
ataccaaaatgaccccagaaccagaagatggcagagccacaaagtgaaaaatacttgggtctctgaatcatagcttggaggagggcttcctggaaaaccatcccaacagagacatccgca

SEQ ID NO: 1035682 - DNA, 120 bp, Artificial Sequence
  ENSG00000249917_5 (sequence is synthesized)
ttaaactttgtgtaaacaaaaaataaatctttcttgtggtaggccactgagatttagattgctacagcagctaaccgatctgaccaatacagcagagaactcctccagtgctctcaagtg

SEQ ID NO: 1035683 - DNA, 120 bp, Artificial Sequence
  ENSG00000249917_6 (sequence is synthesized)
ttttacagaccactaattattaaatgtggaagctctggagcagagaacctttcaactgaaatgatgacaaacgatgctggctgaggagagtcagacctgaaaagttaggaatccctaaaa

SEQ ID NO: 1035684 - DNA, 120 bp, Artificial Sequence
  ENSG00000249917_7 (sequence is synthesized)
tgacgtcaacctataattcctattacagagctctgatttctactgatcgttttaggaaccatatctactatgtgagaaaagctgctggtgggcctaatttagatgaaaagcagaaaggcc

SEQ ID NO: 1035685 - DNA, 120 bp, Artificial Sequence
  ENSG00000249917_8 (sequence is synthesized)
gaacaccagttctgagctgcagagcaggaggcacaagacgtaaacaaaaaagtctctgttacggtcctaaagaagccaatcatctagagaaatgtatgcacagcaggtccagcagaatgg

SEQ ID NO: 1035686 - DNA, 120 bp, Artificial Sequence
  ENSG00000249917_9 (sequence is synthesized)
gctttgcgctgatgagggaagcaagaggagagcatggcctgggaaaggagatgatcaggctcacttcccatttctctgtggaagaaccgtggcaaacacagagtcaactcacaacgttca

SEQ ID NO: 1035687 - DNA, 120 bp, Artificial Sequence
  ENSG00000249917_10 (sequence is synthesized)
ttggaatttttcccacttgactccttcgcaagttggaataaggagtttggaaagggaggatttcttcatataaaaatggtctgggtatatccacgcaaaactaaagggagtggaagagac

SEQ ID NO: 1035688 - DNA, 120 bp, Artificial Sequence
  ENSG00000249917_11 (sequence is synthesized)
cctaggtctacacatttgatgggatagatccttcgggctcagcctcacctgcaggtactgaaggaagccttagtctgctatacagagcactctgcaccatggggagaagatcaatatgct

SEQ ID NO: 1035689 - DNA, 120 bp, Artificial Sequence
  ENSG00000249917_12 (sequence is synthesized)
aaacttgggtactgggcctaaatcttacgaagtgacctcaaacctaggaaggtcctcgatggattgggtgatgtctgcccacatagataaaggtggatcttctttactcagtctactgat

SEQ ID NO: 1035690 - DNA, 120 bp, Artificial Sequence
  ENSG00000249917_13 (sequence is synthesized)
tcaaatgctaacctcctctggaaacaccttcacagacacactcagaaataatgctttaccagctatctggacatcccttagctcaggcctgtgctttcatcttccctgtgtatctgaatg

SEQ ID NO: 1035691 - DNA, 120 bp, Artificial Sequence
  ENSG00000249917_14 (sequence is synthesized)
tggagtttttttcttttgcattaatagtatattggttttttgacttctggtccccttaaggacccttcacttcaacccttgtagtacataaatcaacttttactacattttctatcaagt

SEQ ID NO: 1035692 - DNA, 120 bp, Artificial Sequence
  ENSG00000249917_15 (sequence is synthesized)
ccctgctaatgctttttatttctattcctacctgtggcatgtataatatgactgctttacattttttctcctatctcaaatggattgtacatataaatggaagtctggatttgagttttc

SEQ ID NO: 1035693 - DNA, 120 bp, Artificial Sequence
  ENSG00000249917_16 (sequence is synthesized)
ttttttcattagaatacacataagctttgtaacaaatctggtatgttttaaatgtgctttcctgaacggttagaaatgagcttctttcagcttgttcagattaaattaattttcactgcc

SEQ ID NO: 1035694 - DNA, 120 bp, Artificial Sequence
  ENSG00000249917_17 (sequence is synthesized)
aagagcatgaatagctgctgcttttttggagttggggcctttcattcaccatgaagatactgcattgtggcacagtccttgaagagacaagtagagacagggtttcaccgtggtgacagg

SEQ ID NO: 1035695 - DNA, 120 bp, Artificial Sequence
  ENSG00000249917_18 (sequence is synthesized)
agcatcccaaagtgctgggattacaggcacattgaagaatcagaagatgttttccccctgtgtttttgatggaaggaagaaagcaggatttgccaggatgcattctgcatccaagaacat

SEQ ID NO: 1035696 - DNA, 120 bp, Artificial Sequence
  ENSG00000249917_19 (sequence is synthesized)
aagcaggatttgccaggatgcattctgcatccaagaacatgaacggaaatgagccacagaaaatctggagtgatggcagctgttgtgagaggtggcaatgaaatggatttctcagacaca

SEQ ID NO: 1035697 - DNA, 120 bp, Artificial Sequence
  ENSG00000249917_20 (sequence is synthesized)
gagatgtggtctcccaccaggtcccatttcagtgtatggtttcttggatttctctgccagcttcaaacagtgcttctgataaagtgatttatgaagtaatgggaaatgtatgttgactca

SEQ ID NO: 1035698 - DNA, 120 bp, Artificial Sequence
  ENSG00000249917_21 (sequence is synthesized)
tggagtaacaatgaggaaataggcattggcaccaggactctgttgacatcaggacttcagtgagggggaaattctgcagagatgtgcataaactcatcgcagctgctctaccatctgaca

SEQ ID NO: 1035699 - DNA, 120 bp, Artificial Sequence
  ENSG00000249917_22 (sequence is synthesized)
acctgatggtcatgggggacctcaatgcacgtgttggtggtagtgccaaaatgtggaagaaaattattggaccacagaggattagtctcttcctgcatggtgaacagaccgagcaataac

SEQ ID NO: 1035700 - DNA, 120 bp, Artificial Sequence
  ENSG00000249917_23 (sequence is synthesized)
ttgtaatcacagacaacagcgtcaatcatataagttaggagaaaaatatcatggatatgccacaaatcaaaaacagtgacatcacacccattctgccattgtttcacagcagaatgccaa

SEQ ID NO: 1035701 - DNA, 120 bp, Artificial Sequence
  ENSG00000249917_24 (sequence is synthesized)
caagctgacaatctgaatgggtctgagatcgttacccaatatgcttcaaatcaggagaacatacggcaacactcattgacttacatattctgggtaagacacagagcaaagaactgcaac

SEQ ID NO: 1035702 - DNA, 120 bp, Artificial Sequence
  ENSG00000249917_25 (sequence is synthesized)
agaggttaaagtttcagaaagagaagaagcagccttcactatatcagacagatgaatccagctccaatcaataattgagttttggattggaggaaagaatatttggacattaaagaaaat

SEQ ID NO: 1035703 - DNA, 120 bp, Artificial Sequence
  ENSG00000249917_26 (sequence is synthesized)
aagcagagagtgcctaatctcttcaattctcaagatcatgcttaacatgaccacattaattacagcagagtgagacaggcacagaagaggagggacttggaacctgacctaaatacagaa

SEQ ID NO: 1035704 - DNA, 120 bp, Artificial Sequence
  ENSG00000249917_27 (sequence is synthesized)
gtgtcaagcctagaaggaagtaaaatttggaagaaagtacatggcatatgaaagaaaaataacaacccaacaacatctgacattatggaatacttaaataaaaataaaattttagattca

SEQ ID NO: 1035705 - DNA, 120 bp, Artificial Sequence
  ENSG00000249916_0 (sequence is synthesized)
gagtaaagcagattgctcaaagctaataatgatgacaggaatcaaagccagagacagtaataaatatggttgtttacacctctgtacctcataaagacctccaagcattctgtacaccag

SEQ ID NO: 1035706 - DNA, 120 bp, Artificial Sequence
  ENSG00000249916_1 (sequence is synthesized)
aagtgaagcttggaaaagtgaaaccacttgctctaagtggcaggaagaggtggcgttgaaccccagggctcttgcattcaaaagctcttttggaaagagaaaaggaaaagtgcagctgac

SEQ ID NO: 1035707 - DNA, 120 bp, Artificial Sequence
  ENSG00000249916_2 (sequence is synthesized)
tgaactgtgaagcaaaggagctaagaagcctggatgccaaccccaagggtcctgaagagtcccattgaggagctccttacagcagaaagcccatttctcagaggcacatacatggtccag

SEQ ID NO: 1035708 - DNA, 120 bp, Artificial Sequence
  ENSG00000226604_0 (sequence is synthesized)
attcaagccacagtgtcttctatctccaagctggtgagacacactgcagtcctctacagaacagaagagagacagtgcacaagattgctcttgggagcttgatgatgattgacaaggtgt

SEQ ID NO: 1035709 - DNA, 120 bp, Artificial Sequence
  ENSG00000226604_1 (sequence is synthesized)
actctggtccttgcctgcctctgcaggcttctctcttctcgaacgcactctagtctaagctccagacacaaattgtcgttgccctgagtggaccatgttccctctcacctccccacgttt

SEQ ID NO: 1035710 - DNA, 120 bp, Artificial Sequence
  ENSG00000226604_2 (sequence is synthesized)
gcagaagctttcttcaaatccccagagctgccttttctgtgactagtccccatttgtcctttattcacagtttaacctctcaaaaacctgcctggaaacccacccccagaagggctaatg

SEQ ID NO: 1035711 - DNA, 120 bp, Artificial Sequence
  ENSG00000226604_3 (sequence is synthesized)
gaccctcactaggtcttcctataccatcatccgcttccccagttaaaattgtacttagcgtatttgtgaaatgaataactggatgactttctccatgctgggcattgtgctaaatgtttc

SEQ ID NO: 1035712 - DNA, 120 bp, Artificial Sequence
  ENSG00000226604_4 (sequence is synthesized)
aagtacataaggcattcaaatctagaagagccccgtgtttggtcctattattatccccattttacagacaatgaaattgaggtttcaagagggtaagtcattcccatgctgtccagttaa

SEQ ID NO: 1035713 - DNA, 120 bp, Artificial Sequence
  ENSG00000226604_5 (sequence is synthesized)
tctattttgaatggatgtggatattcaggagaatctgatgagatgggctgatctgattctctctcggatgccctatgatttggcactacttgggggctcaggggcctgatggagctgtga

SEQ ID NO: 1035714 - DNA, 120 bp, Artificial Sequence
  ENSG00000226604_6 (sequence is synthesized)
tcacaacctggctcttcactaattagctggtgtcaatgaccagcacactttagccctgagtccgtttcctctttggcaaattggcaaaataatgactaccttcccaactgttatgaggac

SEQ ID NO: 1035715 - DNA, 120 bp, Artificial Sequence
  ENSG00000226604_7 (sequence is synthesized)
aacaaattttttaaagtaaaagatgaggagtttccctttccttaaaggaagtaatctgtctctgctaccttgtgccacagttaaactgcacaggctcaataacttatgttttggttaaac

SEQ ID NO: 1035716 - DNA, 120 bp, Artificial Sequence
  ENSG00000226604_8 (sequence is synthesized)
gtttttaatttttttagagtgaaatccgagtttttgttggcaagtgattgaacacgctgggcccagcctgcaggcccacagtccattaggaaatttacgaggcgagatggggaccttcag

SEQ ID NO: 1035717 - DNA, 120 bp, Artificial Sequence
  ENSG00000226604_9 (sequence is synthesized)
ctcaagtactcccttcagacgcagtacttacaaagccatcaatttccttaacaaagagcattggcttaaatgccccttaaagcagtgttatttacacagctatccacttccttttgaatt

SEQ ID NO: 1035718 - DNA, 120 bp, Artificial Sequence
  ENSG00000226604_10 (sequence is synthesized)
ctctgcctggggggtggcagacctgcagttctttccagctacgagttaattaggctctctccccaaatggaagcaagccgcagactgagatttggtattaaaaagcagctcaatttgggg

SEQ ID NO: 1035719 - DNA, 120 bp, Artificial Sequence
  ENSG00000226604_11 (sequence is synthesized)
ccatccgagagtcttatggggtgatccaaataccaccaaaatcactggttccacccacccattcttctaaaattctaaagcctttggaccttaccaaagagtaatgacctctgtcagtat

SEQ ID NO: 1035720 - DNA, 120 bp, Artificial Sequence
  ENSG00000226604_12 (sequence is synthesized)
agagatagagaaggaaaggcagcatttgagcccgtctctacttagtgaaagaagcctcaaaaaagtactgctggctaagatagcatactttctacctcttggtgtatcgatatagtaaca

SEQ ID NO: 1035721 - DNA, 120 bp, Artificial Sequence
  ENSG00000226604_13 (sequence is synthesized)
ttaacattttaaagaagcccccaccccttttgtgggggaactaggatttggatacaagcagcccagttcaggggtctgagcatgaaaccaccaccccaagccacctgacccaagataacc

SEQ ID NO: 1035722 - DNA, 120 bp, Artificial Sequence
  ENSG00000226604_14 (sequence is synthesized)
tgcccgagatgacagctaagggggaaagtctcctattcaaacaggattgtctgactctaaagaccagcaaagctcaactacactttcttgcctgaaaaataaaactgtctcttaagaaat

SEQ ID NO: 1035723 - DNA, 120 bp, Artificial Sequence
  ENSG00000253939_0 (sequence is synthesized)
agaaggagaagaagaagaagaagaagaaggaagaagaggaggaggaggaggagaagaagaagaagaataataagaataattttataggctgatggtatgaaaccatggcccagagaagca

SEQ ID NO: 1035724 - DNA, 120 bp, Artificial Sequence
  ENSG00000253939_1 (sequence is synthesized)
tttataggctgatggtatgaaaccatggcccagagaagcaaagcagcttgtccaaggtcatatagccagctaatcgcaggaccaggctgggaagagtttcacaactcaggccagtgctgc

SEQ ID NO: 1035725 - DNA, 120 bp, Artificial Sequence
  ENSG00000253939_2 (sequence is synthesized)
ctgagtgactcagaaccaaagccagtaaatcctttatgaggtaacaaaggacagatatgaggcacctcaaagtggcatgaagaggaagtcctcacaagatctggagccagcccctaaaga

SEQ ID NO: 1035726 - DNA, 120 bp, Artificial Sequence
  ENSG00000253939_3 (sequence is synthesized)
gacttcaataacagaaaagtaaaaatggtccataaaagggaaaaagatcaatatcaaatggtaatgtaactctccaaacagtcgagagtcacacaaacataaattcaaaacaaataattc

SEQ ID NO: 1035727 - DNA, 120 bp, Artificial Sequence
  ENSG00000253935_0 (sequence is synthesized)
atggcctggacccctctcgtgcttgtcctcactccctgcacatgttccctcttccaggctgggctgacccaggtgtcctcactcccagcatcttcatgcagatcaaacactcacctgcac

SEQ ID NO: 1035728 - DNA, 120 bp, Artificial Sequence
  ENSG00000253935_1 (sequence is synthesized)
atatcggctttcatatcggtggcaaaaataccttcttttccctacagaatccagggagccctccaactatgttctgagattatgctcaggctaaaatgagtaccaggcctctggggtccc

SEQ ID NO: 1035729 - DNA, 120 bp, Artificial Sequence
  ENSG00000253935_2 (sequence is synthesized)
cagacaattctctgggttgagaggctcctccagagtctcaagttatttggtcgtctctggccttcaccttgaggatggagcagatcatctctctcagatgggctgacagggcatggctta

SEQ ID NO: 1035730 - DNA, 120 bp, Artificial Sequence
  ENSG00000253936_0 (sequence is synthesized)
tatggggtttgagctaaccagaatttttcttgttgctattttaaaagtgttcagtgtgaggtggagctgatagagtccatagagggcctgagacaacttgggaagttcctgagactctcc

SEQ ID NO: 1035731 - DNA, 120 bp, Artificial Sequence
  ENSG00000253936_1 (sequence is synthesized)
aagtcagatataccatgcagactctgtgaagggcagattcaccatctccaaagacaatgctaagaactcaccgtatctgcaaacgaacagtctgagagctgaggacatgaccatgcatgg

SEQ ID NO: 1035732 - DNA, 120 bp, Artificial Sequence
  ENSG00000253930_0 (sequence is synthesized)
aggtattcagtgatagcaacagaaaacagactaatacaaataaccatcatttaacttaggttaatataagatttttaagttaccaaaaattaaatataaaaatatttaaaagtagacatc

SEQ ID NO: 1035733 - DNA, 120 bp, Artificial Sequence
  ENSG00000253930_1 (sequence is synthesized)
ccataatcccagcactttgggaggccgagccaccatgcccggccacacgtaagtgttttgattagtaaatccaggtagaagttgtatgtgtgaactgtaaataatgttgacaactcttaa

SEQ ID NO: 1035734 - DNA, 120 bp, Artificial Sequence
  ENSG00000253930_2 (sequence is synthesized)
taattaaaccaagaaacttaaactagctttctatttactaaagattatctcagatcacgtgaccttgaaaaacatttagatgggctccagtttttctaagaaaatgctccatttatggaa

SEQ ID NO: 1035735 - DNA, 120 bp, Artificial Sequence
  ENSG00000253930_3 (sequence is synthesized)
gcaattcttttctttcttttaaccaaatctttgcataggtaccaaataacacatttgtttaggatgagagctgcccactgcccccgccaaaaaaaagtacttttatatacaaaagtccaa

SEQ ID NO: 1035736 - DNA, 120 bp, Artificial Sequence
  ENSG00000253930_4 (sequence is synthesized)
atttccaaaggtatatgtactttaattgtgacttgaactcaaggtaaataaattaaataattaataaattaaccttagcttactggacggccaccatcttatatgctgttcccttgactg

SEQ ID NO: 1035737 - DNA, 120 bp, Artificial Sequence
  ENSG00000253931_0 (sequence is synthesized)
cgtttgcaggaaagagagaacgggagtggagcagcagccaccagtgagggaagaggtggcaaagtgctccatggctggggtgcctatcttggcagagtggagcagatgaaaggcccatct

SEQ ID NO: 1035738 - DNA, 120 bp, Artificial Sequence
  ENSG00000253931_1 (sequence is synthesized)
gccgacaagaccactgccaccctctgccaccctccaccaccctccgccaggtcaccagaatgccaggcctcactcatgatcagctgagcaccagcaggcaggtgagaagagcctccagtg

SEQ ID NO: 1035739 - DNA, 120 bp, Artificial Sequence
  ENSG00000253931_2 (sequence is synthesized)
ggcagcagcacccagagactggctcccagtgagttaagcccagccgcgacccttggatgtgccagctgatttaatactcatgataaacccagtagacagatgtgcatatatcacttcaaa

SEQ ID NO: 1035740 - DNA, 120 bp, Artificial Sequence
  ENSG00000253931_3 (sequence is synthesized)
aaaacaaaagtggatgtggctgatgccaaagtgacctgccccagaagagctgctaacagaacagcatcccaggaggctgcagaaggctgaagagcagagcccacacctgctatgggccac

SEQ ID NO: 1035741 - DNA, 120 bp, Artificial Sequence
  ENSG00000253932_0 (sequence is synthesized)
gactctttttgtgaagacacaaagatgaacaagctctgatccctgactctgagaagttcagttctgagaagtctatttcccatgtccccacacctcatctgtacgtgaagataagccaga

SEQ ID NO: 1035742 - DNA, 120 bp, Artificial Sequence
  ENSG00000253932_1 (sequence is synthesized)
tggtcttgaagggctcacctcatcccaaaaaccagtggttccacacccagatcacaggagagactacatctctaggaatcatcacaccaggcaacagattacaggtgagtattttagata

SEQ ID NO: 1035743 - DNA, 120 bp, Artificial Sequence
  ENSG00000253932_2 (sequence is synthesized)
ttttgttgatacttgtgtgctgttttaaaatcacatttggtctctggtaggacacagggcagagatgccctgtcattatgtcgcctgttttgaaataaggagagtaggtggctttcatct

SEQ ID NO: 1035744 - DNA, 120 bp, Artificial Sequence
  ENSG00000253932_3 (sequence is synthesized)
tcagaaaatttgcttaacaatcagaacctctaaaattgcatgccaagtttatttgtgcatatgtatttttttgttaagaaaataatccctagctttcataaaatacacaaagagattgtg

SEQ ID NO: 1035745 - DNA, 120 bp, Artificial Sequence
  ENSG00000253932_4 (sequence is synthesized)
attctctccaaattaaaattacttgtatagaaagcctatagcaattagatagtttacaaagtttttcactcatggctcaaggacttgtattcatttctttcttctttctttcatccactc

SEQ ID NO: 1035746 - DNA, 120 bp, Artificial Sequence
  ENSG00000253932_5 (sequence is synthesized)
acttagcaaatattgattgaatgtccgctatgtgctaaaagcagggaaaatccagcaataaataaaacataaaattcctgccataatcctcgggagacaggcaaataagcaactgactga

SEQ ID NO: 1035747 - DNA, 120 bp, Artificial Sequence
  ENSG00000253932_6 (sequence is synthesized)
agtagaaaatcaggtagcagtaaaagtgaggaagggatatgaagcagaagtggagtggagcattctgagtggggtgggcttgggcgttagggcttcagacaggagatcagggaaggaggt

SEQ ID NO: 1035748 - DNA, 120 bp, Artificial Sequence
  ENSG00000253932_7 (sequence is synthesized)
cctggggaggaggccggaatgaagtccaggagaaagccactctcatatctgggtgaagggcattgcaggcactatttgaggcttggtttcattttttatttttattttttttgagatgga

SEQ ID NO: 1035749 - DNA, 79 bp, Artificial Sequence
  ENSG00000253932_8 (sequence is synthesized)
cactctgttgcccaggctggagtgcaggggaaccatcttggctcagagcctcctgagttgctgggattacaggtgcctg

SEQ ID NO: 1035750 - DNA, 120 bp, Artificial Sequence
  ENSG00000253932_9 (sequence is synthesized)
acaggcgtgagccactgcacctggcctcatctttaattttttaatgctgacttttctcttgcatatggtcttgcttactttttgttgctacttaaaaaaacaaaaacaaactatttttct

SEQ ID NO: 1035751 - DNA, 120 bp, Artificial Sequence
  ENSG00000253932_10 (sequence is synthesized)
atttttctttcacaggcctaatggatgtaaatttctgctcctaatttcctttcccctaaacaaggatgtttgactagctgattcttcaaaacgttaacatgtgtagtggctattgtttta

SEQ ID NO: 1035752 - DNA, 120 bp, Artificial Sequence
  ENSG00000253932_11 (sequence is synthesized)
ttgttgttataaacttcacaggtttcaaagctctcccaaactcagtaacaatctggcctatgccataaattccctaattcatccaacaaattttcacaaaagagtaaaatatatgccctg

SEQ ID NO: 1035753 - DNA, 120 bp, Artificial Sequence
  ENSG00000253932_12 (sequence is synthesized)
gctttggaagaacttaaaaatctaacagatatataattcttggaaagttcagccatcctctatggctgcgcccaattgcaagggaattattcctatttcttagggtagttttaccagcgt

SEQ ID NO: 1035754 - DNA, 120 bp, Artificial Sequence
  ENSG00000253932_13 (sequence is synthesized)
gctggcacccatgtcatggtgctgacaaaggcatattcacatcgagctatggggatattcagggtcaatattgagactcatggtggggagaaacgtgtgttcagtaggatttgaaggaag

SEQ ID NO: 1035755 - DNA, 120 bp, Artificial Sequence
  ENSG00000253932_14 (sequence is synthesized)
gatttaaaataatgtgctgaggatcagttttcagcaaaagtactgtttttcacattgaactaatttctttagcttataaccacaacactgagcaaaaaacaccaataacaaatgcataac

SEQ ID NO: 1035756 - DNA, 120 bp, Artificial Sequence
  ENSG00000253932_15 (sequence is synthesized)
aaagacaaaaagaagagaaaagaaagacctcacgaaactgcaaagcttgatgatcctaccatatataaaagaaccactgggaattgtctagtctagaaatgaaaatcatgatgcaggaat

SEQ ID NO: 1035757 - DNA, 120 bp, Artificial Sequence
  ENSG00000253932_16 (sequence is synthesized)
gcagctatgagtgtcacttggagctttgggaacggacatgtgctatgccttcagcttcgagcagttcttgaactccagcgtgcgtcagaatcacaaggagggcctgttaaaatgcaagtt

SEQ ID NO: 1035758 - DNA, 120 bp, Artificial Sequence
  ENSG00000253932_17 (sequence is synthesized)
actggcccccacacatggtttctgattcactaggtttggggcagggcctgggaatttttaatttctgacagttcctcgaatacgctgctgctgctggagtccgttttgagatagggtgcc

SEQ ID NO: 1035759 - DNA, 120 bp, Artificial Sequence
  ENSG00000253932_18 (sequence is synthesized)
tttgagaattcccaggtggcccagatgggagaatcgctgctgggcttcagaggatgtcccagcagttagaatgttgtaaggacacgtcgcagaaagccttgaaagcaaagtggccaggtt

SEQ ID NO: 1035760 - DNA, 120 bp, Artificial Sequence
  ENSG00000253932_19 (sequence is synthesized)
gtgactctggtaggcaaaacaggcaggttcatcctcctggtatgcagctactgagatgcaaggtgctttttaaacattgtgcagctcttagattggtgccccagggaaggacaggcccca

SEQ ID NO: 1035761 - DNA, 120 bp, Artificial Sequence
  ENSG00000253932_20 (sequence is synthesized)
tcaaggctagccaagagcagattgattacatctgtggccaaagtgtaggcgataaaatgtcatccatcagattctctaatcaccggtgaacatgaaataaggcaaatcagctgaagagtc

SEQ ID NO: 1035762 - DNA, 120 bp, Artificial Sequence
  ENSG00000253932_21 (sequence is synthesized)
tttcagtaagtaaaaataataaaatgcctaaactgctttctattctacaagctaagtggtatttattttagtaataaagatgctctttaaatgaaaatgcatcagatcgagaggatacat

SEQ ID NO: 1035763 - DNA, 120 bp, Artificial Sequence
  ENSG00000253932_22 (sequence is synthesized)
ttggccagtgtgaattaaaagagtttatatgcattcattctgtgaattccaaaacaaaaactatttctgatcttgaagaatctaaccatgaccaatgaggtatcatgaaattaaagttct

SEQ ID NO: 1035764 - DNA, 120 bp, Artificial Sequence
  ENSG00000253932_23 (sequence is synthesized)
acattttcctctgtgtaataaatatgaactacatgacaggtaataggaactactttatttacaaactattcaatgcttacactgaaaaacagtcacctcctatttcaggaaaaagtgttt

SEQ ID NO: 1035765 - DNA, 120 bp, Artificial Sequence
  ENSG00000253932_24 (sequence is synthesized)
caaacatgcagaaaatttggagaaagctctgaaaaaattatctatatgattagaatagcaagaaaagcaaaccatttggacaagcaagagatatatgatggttaattttatgtgtcaact

SEQ ID NO: 1035766 - DNA, 120 bp, Artificial Sequence
  ENSG00000253932_25 (sequence is synthesized)
tggcaaggctatggtgcacagttgtttgaccagtctagatattgctgtgaaagtatttttcagatgtgattagtatttgaatcagtaggttctgtgtaaggcagagtaggctttgtaatg

SEQ ID NO: 1035767 - DNA, 120 bp, Artificial Sequence
  ENSG00000253932_26 (sequence is synthesized)
caggtgaaactcatccaatcagttgaaggccttaagaggaaagactgaggtttcctgaagaggaaggaattctgccctaagaccgcaacatagaaatcctgcttggaaattcaaggaatt

SEQ ID NO: 1035768 - DNA, 120 bp, Artificial Sequence
  ENSG00000253932_27 (sequence is synthesized)
gggactaaagactgcaagatcaactcttagcagaacttccaggctgactgcttgctttatggattttggacttgccagccccacaattatgtaagccaaattaaaatctctctcttcctg

SEQ ID NO: 1035769 - DNA, 120 bp, Artificial Sequence
  ENSG00000259932_0 (sequence is synthesized)
acgtggaacctggttctagggtgtccacaatctccacagaggcggcattgggtcaccgctggaggatgcagcaggagggaggacccgtgaggagcgccccctgtaggaccggaaccctgg

SEQ ID NO: 1035770 - DNA, 120 bp, Artificial Sequence
  ENSG00000259932_1 (sequence is synthesized)
agggttcgcggcaagggtctccggggcataggaaacgggcatcccccaagggtagtctgagttccgcccagccccattcctggatgctcacgccgtctcccctaaactcccactgcgctc

SEQ ID NO: 1035771 - DNA, 120 bp, Artificial Sequence
  ENSG00000259932_2 (sequence is synthesized)
ccacagcccgtggctaatgggccaaaacagaagaagaaaagcaactggcggagtacaacgcgcctgcgcattatcagactcagggacaggctggaacctcgccccgtaagtaggccattt

SEQ ID NO: 1035772 - DNA, 120 bp, Artificial Sequence
  ENSG00000259932_3 (sequence is synthesized)
aatgacgcgcaaactgggaaggcctatgactgttgaagaggataatcagaagccaacccctacgggtccccggtagctcgccgtgatcgtatagtggttagtactctgcgttgtggccgc

SEQ ID NO: 1035773 - DNA, 120 bp, Artificial Sequence
  ENSG00000259932_4 (sequence is synthesized)
agcaacctcggttcgaatccgagtcacggcattgtgggaacaatggcacggcaaggggctcggtatttttttccccttttttgtaacattttatataaatcgtaattcactttcttgaaa

SEQ ID NO: 1035774 - DNA, 120 bp, Artificial Sequence
  ENSG00000259933_0 (sequence is synthesized)
cgcaaaggggcggacgctgagggcggccagggcgcggccggccgccgggaactcgaggcgcagcgtgacggcggcgtgcagccccacggccgggctgtagcgcgtgagctccaggaacac

SEQ ID NO: 1035775 - DNA, 120 bp, Artificial Sequence
  ENSG00000259933_1 (sequence is synthesized)
gccgggctgtagcgcgtgagctccaggaacacagcgcggctcctgcgcagagggtgcggggtctggctggactaaaggcaaaactaaagcccagaagacagaccagtgcaccggatgccc

SEQ ID NO: 1035776 - DNA, 120 bp, Artificial Sequence
  ENSG00000259933_2 (sequence is synthesized)
gtaccgcgtgatggccaggaaggcccggctgtgcagctcctgcttgatggcgctttgcagacggagccagtgaccaccgaggctgtgccactgcatcgggccaccatgctgatatgcccg

SEQ ID NO: 1035777 - DNA, 120 bp, Artificial Sequence
  ENSG00000259933_3 (sequence is synthesized)
gtcccagagctgctagagaagaggtacagaggcagcgaagacacgttgagggggaggacgagaccaactgcgagacgccgagtcccgggctctcaggacgctctcccgtacctgcgccct

SEQ ID NO: 1035778 - DNA, 120 bp, Artificial Sequence
  ENSG00000259933_4 (sequence is synthesized)
cgtcagcccatcaccgaaagaacggcctgacccagggtcacactgcactgaatgcttcctgttttgctgtctctcggaggataaaagacactcttggctgggcgcagtgtctcaagcctg

SEQ ID NO: 1035779 - DNA, 120 bp, Artificial Sequence
  ENSG00000259933_5 (sequence is synthesized)
cggcgtgcagccccacggccgggctgtagcgcgtgagctccaggaacacagcgcggctcctgcgcagaggggtctggctggactaaaggcaaaactaaagcccagaagacagaccagtgc

SEQ ID NO: 1035780 - DNA, 85 bp, Artificial Sequence
  ENSG00000259933_6 (sequence is synthesized)
ggacgctctcccgtacctgcgccctcgtcagcccatcaccgaaagaacggcctgacccagggtcacactgcagacttctgggcaa

SEQ ID NO: 1035781 - DNA, 120 bp, Artificial Sequence
  ENSG00000259937_0 (sequence is synthesized)
aaattatgttctttttttgtaaatctgttttttttttcaagattatttgtccggtatagaattatagaagtggaattagagaagtgatctcttaagttagattgttttctttattagttt

SEQ ID NO: 1035782 - DNA, 120 bp, Artificial Sequence
  ENSG00000259937_1 (sequence is synthesized)
ttaaatggggacatttaattttttaccatcaggttgtttttacatatttactgtcttttgtttgagttgtatcgcaacttacaagtttaaaatgttgaagttttgaacagagacaaggga

SEQ ID NO: 1035783 - DNA, 120 bp, Artificial Sequence
  ENSG00000259937_2 (sequence is synthesized)
ttatttaaaatataagcatttttttattcaaaatagcttgtgtttttccatttatgaatgttttactaattacaatcagtatgtgggataattatattgtcattgtaaattatgtggata

SEQ ID NO: 1035784 - DNA, 120 bp, Artificial Sequence
  ENSG00000259937_3 (sequence is synthesized)
aattaatttaaaaatttatactgccagttcaatattgtattccagcattataacatttttggttgttggatttttgtgtcataatctctattgcaatatctattaaggaacaaagaagga

SEQ ID NO: 1035785 - DNA, 120 bp, Artificial Sequence
  ENSG00000259937_4 (sequence is synthesized)
tttattacctatattcccacggggaaaacatgatgaatactaatttttattgtttttaaaaataacaccttctagaattctacaaatgcagatggcaattaattgttagattatttctct

SEQ ID NO: 1035786 - DNA, 120 bp, Artificial Sequence
  ENSG00000259937_5 (sequence is synthesized)
tgattcctcagtcttattattactttttatttattcaacaaatatttacctatatatgtttggcatgctctaagtactagggttgcaacaaacacatttctataaaaaagtaaagtatgt

SEQ ID NO: 1035787 - DNA, 120 bp, Artificial Sequence
  ENSG00000259937_6 (sequence is synthesized)
tatgtacatatattcaggctcagaggtaaataatctgccaatgaaatctaaaaaattagtataatcgactaggagattgtgatttttttttttaaacattcatacgttttccaaactggt

SEQ ID NO: 1035788 - DNA, 120 bp, Artificial Sequence
  ENSG00000259937_7 (sequence is synthesized)
tctacttagaaaaaagtaggagttccttgtggaaactttagtttctcattgctaataatatttattcattgtttggtaaatattaataaattacttaaatttatttgcaactctcccata

SEQ ID NO: 1035789 - DNA, 120 bp, Artificial Sequence
  ENSG00000248356_0 (sequence is synthesized)
ggcacgtgagagaaatcactcaactctgtggacaagagccacgacaggcagcctctgctacatcttccttacggcctggcaaaagcaatctccctaaatgccctcggttggcttccgttc

SEQ ID NO: 1035790 - DNA, 120 bp, Artificial Sequence
  ENSG00000248356_1 (sequence is synthesized)
catttcccacagcagctattatgaacattcactgtcccataatctccccgcttgatgaggactacagcacctacttcacagaggaaataaaggcaagaacttcctaggcttctccctctc

SEQ ID NO: 1035791 - DNA, 120 bp, Artificial Sequence
  ENSG00000248356_2 (sequence is synthesized)
ccgtactccacaggtgctaatgcagccaggaaacacaacaggagcaaagaggggcctggccttatgcatggaagctgaaggactgaaatttgcatttgatcatcttcaacttctggcacc

SEQ ID NO: 1035792 - DNA, 120 bp, Artificial Sequence
  ENSG00000248356_3 (sequence is synthesized)
actgagctatccacaagctggcctcctctgaggagtacaacactcccaaactacttctctcagcttccacctaactctgcagaactcccttcctttagcgagaccaaacttagctagcag

SEQ ID NO: 1035793 - DNA, 120 bp, Artificial Sequence
  ENSG00000248356_4 (sequence is synthesized)
ttagaggtcacccaactgtgccaattcctactaaattgtaacagaaagcccccagacctctgcaattgaaaaagaatcagccatacttaccaccactagtacaagaagaagggtccacag

SEQ ID NO: 1035794 - DNA, 120 bp, Artificial Sequence
  ENSG00000248356_5 (sequence is synthesized)
ctagcacagataatttgtgccctctctcagtaagcatttttccaaaatattctataaatgttgattttccagcaccagggggcccagacaatcctacggtggaaagagatcttctaattc

SEQ ID NO: 1035795 - DNA, 120 bp, Artificial Sequence
  ENSG00000259935_0 (sequence is synthesized)
agacattattgctgggcttagcacctaaaaatgttttatatactggagcatctgaaagttcctattcagtagcagaacttcagggtagttgaggtttataatctagtcagttataataac

SEQ ID NO: 1035796 - DNA, 120 bp, Artificial Sequence
  ENSG00000259935_1 (sequence is synthesized)
attgctagcatatttcagttttttggatttgtctattatttgacaatataatttttattgtctttgtctatgtcatatctttaaattggctattgttttgtgcttatggaaaaatacttt

SEQ ID NO: 1035797 - DNA, 120 bp, Artificial Sequence
  ENSG00000259935_2 (sequence is synthesized)
aagtgctagtatttactagatgcagtgattgctacagttggttttaagtaaaacagattgtttttgattattttgaaatcagcccctaaggctcatacatggatgggcctcagattttgc

SEQ ID NO: 1035798 - DNA, 120 bp, Artificial Sequence
  ENSG00000259935_3 (sequence is synthesized)
tataagcttcctgtcatctgtcatatgagagggatgctgtgtgaatcagttatgtatattcctgttctttaacattgctaaatttttaccattaaaatttatgttggtttctgttttctt

SEQ ID NO: 1035799 - DNA, 120 bp, Artificial Sequence
  ENSG00000248358_0 (sequence is synthesized)
agtgttcttcatgtaagctggaaaaaatctggtagaagactagttgttgacagtttgaattatagaatcaaaacaccagggtaaaaggtagggttttcagtataccacatgtacagactc

SEQ ID NO: 1035800 - DNA, 120 bp, Artificial Sequence
  ENSG00000248358_1 (sequence is synthesized)
ctctgtgaactggaaagaacttcctaatgtaaccaaagggaattttctgtctctggtctctcttgccaaagcaatgaggtcacacctgtgttcatgatttattgagccactacagtgcac

SEQ ID NO: 1035801 - DNA, 120 bp, Artificial Sequence
  ENSG00000248358_2 (sequence is synthesized)
ctgtaatcccaacactgtgggaggctgagactacaggcacatgccaacacaccaggctaatttttcctattttttgtaaagacagggtctcactatgttgactaggctggtctcgaactc

SEQ ID NO: 1035802 - DNA, 120 bp, Artificial Sequence
  ENSG00000248358_3 (sequence is synthesized)
ggctggtctcgaactcctgggctcaagggatcctctcacctccgcctcccaaatgttgggattacaggtataacccatcgtgcccatcttgcccttcactttttattccaaatgtcagca

SEQ ID NO: 1035803 - DNA, 120 bp, Artificial Sequence
  ENSG00000248359_0 (sequence is synthesized)
gcggcacctcagtaatgagccagagaagaaggaaaggcagatgaatttgccagcattattgcaggtatcttgaaggagagttgagcccagcttttcaattcatacagatcctttctctga

SEQ ID NO: 1035804 - DNA, 120 bp, Artificial Sequence
  ENSG00000248359_1 (sequence is synthesized)
agaaccccttcctgatattgtcactttaacacatctctgtggttttattttgaaatttttaaaggtacagtcatgtgccgcataatgacattcagtcaatgacagactgcatatatgagg

SEQ ID NO: 1035805 - DNA, 120 bp, Artificial Sequence
  ENSG00000248359_2 (sequence is synthesized)
aaaaattcctactactgaacgacatcatagccattgtaacatcatagcacaaccaatcaccttttctatatttagataaggagttcatatgctggaatgatagtgacacaggagtttaac

SEQ ID NO: 1035806 - DNA, 120 bp, Artificial Sequence
  ENSG00000248359_3 (sequence is synthesized)
actcctacagtatccagagcctggatccctgagtcatcagatggagaagaactactcaggagagtcatccaaccttcatagacagtggcatgagtgggaattaaacattgattatgttaa

SEQ ID NO: 1035807 - DNA, 120 bp, Artificial Sequence
  ENSG00000248359_4 (sequence is synthesized)
agtccagtctcactcccaccatgtccccgcaaacagcactgaatttatttccaggcaaccagtgagcaaggctgagaacttgtcccaggttacgagactcccaggtacagtcatgtgccg

SEQ ID NO: 1035808 - DNA, 120 bp, Artificial Sequence
  ENSG00000248359_5 (sequence is synthesized)
aacaactgataggctgaactccattaaaattaaaagcttttgctctgcaaatacaagagaatgagaacacaaaccataaggagttcatatgctggaatgatagtgacacaggagtttaac

SEQ ID NO: 1035809 - DNA, 120 bp, Artificial Sequence
  ENSG00000259939_0 (sequence is synthesized)
ccaacagggaacaattcaaggctggagagaaaaggccacctttgacccagcagaaggcagaggcgggagaggagggtgaggatgtacaaggagcatcgcaggcgaggaaacaatggccag

SEQ ID NO: 1035810 - DNA, 120 bp, Artificial Sequence
  ENSG00000259939_1 (sequence is synthesized)
catgcgtatttgctattctcaaacaactcccttccacccccttaggctgaaaggacaaactcatcagagttgaggagtacctacctgatgaagctgttcatgcttccagcatcaaactgg

SEQ ID NO: 1035811 - DNA, 120 bp, Artificial Sequence
  ENSG00000259939_2 (sequence is synthesized)
acgtttactgtctgcccaaaagccagtttccaaaaggctgtcaggatgcaagctacctactcttttctggatggatcgggacaaagtttttaaacaaagactgtgtcctctccacaagcc

SEQ ID NO: 1035812 - DNA, 120 bp, Artificial Sequence
  ENSG00000226605_0 (sequence is synthesized)
agctgctcagagcattcaactggtttacaatttctgtaaacagaagccagtcaagacaaatataagaaaaatgcaagataatgaaaactgaagagcggcagatacaacttttttagataa

SEQ ID NO: 1035813 - DNA, 120 bp, Artificial Sequence
  ENSG00000226605_1 (sequence is synthesized)
ttaacttgacatcagtctgagttggcatagggcttgcatactgtttcatattgatgctgctagtagcaagagctttccttcgaccagaaggggattcctggaagattaaagaaaaaaaaa

SEQ ID NO: 1035814 - DNA, 120 bp, Artificial Sequence
  ENSG00000275055_0 (sequence is synthesized)
gaaaatggagagcttatcagaggcttgagttcacacaggcagacacggcgtgggggtaaagtcctctgaacagacacggaacagaaataagttagtcttctcctcgcaggggacagtgaa

SEQ ID NO: 1035815 - DNA, 120 bp, Artificial Sequence
  ENSG00000275055_1 (sequence is synthesized)
cggcgcaaacttctcaaaggccagaacccattattaccacaaaggcgcggcatcccttcttagcggttatgatggctgtgacgtctcagctcaatggaaaattaaagtcacctctgggca

SEQ ID NO: 1035816 - DNA, 120 bp, Artificial Sequence
  ENSG00000275055_2 (sequence is synthesized)
cctcagtcactattgtaaatgcgaagcgttttagaagccgtataaaaactgaagcaagagagactagaacaaaaaataagcgagcggtgcgttgcaggtaacggagccagagcccttagg

SEQ ID NO: 1035817 - DNA, 120 bp, Artificial Sequence
  ENSG00000275055_3 (sequence is synthesized)
ggggacgttcggtgtccgtacggcagaacatattctctctgagaagcttgcggtggaactggcccatggaaatgtctttagaagagaagaaccacctggctctgttcttgactctggaaa

SEQ ID NO: 1035818 - DNA, 120 bp, Artificial Sequence
  ENSG00000275055_4 (sequence is synthesized)
agaatccttttctagaattatttaggttgttgccagattaatttcctttagagagtttccttgcccccacgacttcctatctttaaagccaacaatagtatgtgaaatccctttcatatt

SEQ ID NO: 1035819 - DNA, 120 bp, Artificial Sequence
  ENSG00000275055_5 (sequence is synthesized)
tgaaaccactgactattgctgctgcatctctccggtttctcctattcttaagtgcttgggcaatccagaataatctcccaatgctaaagtcagctgattaataaacttaattacaatgca

SEQ ID NO: 1035820 - DNA, 120 bp, Artificial Sequence
  ENSG00000271967_0 (sequence is synthesized)
caaaccctacctactcccctccttcataattcacagatatctcctctaataaatctctttcagacttaatgccatcttgccatctgttttgtagagaacctagattaacatggataactt

SEQ ID NO: 1035821 - DNA, 120 bp, Artificial Sequence
  ENSG00000271967_1 (sequence is synthesized)
tttaaaaacaacctacagtttttcagaaaatgtcatacaatgcttgttatttttttagtgtaatcatagtttaaacacttttatatcgcttgagggatttctgggaatttgtatgttgat

SEQ ID NO: 1035822 - DNA, 120 bp, Artificial Sequence
  ENSG00000271967_2 (sequence is synthesized)
tatgtctactaggtcccagttgctgagatctacaatgtgtcaaaatatatatattacctattattaaacttgtaagagcaagcataaagccacattctgctagtaaataacaaatgttca

SEQ ID NO: 1035823 - DNA, 120 bp, Artificial Sequence
  ENSG00000271967_3 (sequence is synthesized)
ttggatagtttgcagtgagaaaactttgtcatagcaattgttaatgatagtatattagtaatttgataatttcagaacaggacagtaatttttctaaataaaagataagaatggcagtga

SEQ ID NO: 1035824 - DNA, 120 bp, Artificial Sequence
  ENSG00000271966_0 (sequence is synthesized)
ggcgtggcgggcctctggtggcaccgcgcccagcacttcgggctcttggtggcggccgagctgcgggaccagagatccccccactcggcacccctgctcctgccgagtgaacaggactcc

SEQ ID NO: 1035825 - DNA, 120 bp, Artificial Sequence
  ENSG00000271966_1 (sequence is synthesized)
tggctactctgcactggctttctaactttctgatgggggtgcagtcctttgcattccaggggtcacagcaacacccgcatcgcccgttctcagccgcagggtctccgcctgcatcactcg

SEQ ID NO: 1035826 - DNA, 120 bp, Artificial Sequence
  ENSG00000271966_2 (sequence is synthesized)
actctaaaatttccttccctagtgcacggaactgctgtccaggactctgctctccgactacctcagggaggattctgttttgggaaaagtaagccaaaacctattgataagggttcaaaa

SEQ ID NO: 1035827 - DNA, 120 bp, Artificial Sequence
  ENSG00000271966_3 (sequence is synthesized)
atgtttcacttttttctctctctgtcggataaatcggtcaactctagatttcaggtcccttctgaattgactcagttaaggtgaatggttgtgaatgaggtcccttagagttctgtgttt

SEQ ID NO: 1035828 - DNA, 120 bp, Artificial Sequence
  ENSG00000271966_4 (sequence is synthesized)
atgtaaaccagtttagaatggaaaagctttaagtacaaacagattaacacacgtgaccatgtgtttgctttagtctgagtgtagaactcaaatttctgcagtatttaatttctacagttt

SEQ ID NO: 1035829 - DNA, 120 bp, Artificial Sequence
  ENSG00000271966_5 (sequence is synthesized)
ccttctgagcagaaaaagaataccataaaaatatttgcaaacattatatatggtgatctagggtcacgtctccaagttctaagcttctgtggctccacgcacacaggttccctaatgttt

SEQ ID NO: 1035830 - DNA, 120 bp, Artificial Sequence
  ENSG00000271966_6 (sequence is synthesized)
actatgcatctgtcactgttctgttctattagattgccttaactataggcttgtcctaacgtaaccatccaaacctaaggaaggagaaacttaagtgactctgtgaacttagtgaagtga

SEQ ID NO: 1035831 - DNA, 120 bp, Artificial Sequence
  ENSG00000271966_7 (sequence is synthesized)
ccagatttaggaaggctaaaacccagaggaaataaaatggaaaacttgaaggtgacaaattaaagtggaaaaatagattaatttttttaaactttattgtcctgagaaacaaatctataa

SEQ ID NO: 1035832 - DNA, 120 bp, Artificial Sequence
  ENSG00000271966_8 (sequence is synthesized)
attcattaattttattttagagactatctctagattcctggaaatgaaggattcattatactcttagatcagatataatactgatttctgtgtatacgttaataaacttttttagaacaa

SEQ ID NO: 1035833 - DNA, 120 bp, Artificial Sequence
  ENSG00000271964_0 (sequence is synthesized)
cctctgggagcttttaaaaatcctgatgcccacgccactccccagatcattcattcacaagctctgcaggcgagccccggcatcaggattttgtatagcttcctcagtgatttcaagctg

SEQ ID NO: 1035834 - DNA, 120 bp, Artificial Sequence
  ENSG00000271964_1 (sequence is synthesized)
ctgctaacttaacaccctccactgtagactgatttttgccagaatcagcagggtgtagagaagcaagggagaaaaaacaagacctttaggaactgttagcctgacactagggccaaactc

SEQ ID NO: 1035835 - DNA, 120 bp, Artificial Sequence
  ENSG00000271964_2 (sequence is synthesized)
aattaattgaaaaatgtacccaaagctgagcaatgtaaggccctctagcctggaaccgtttgcttttcaaagttgagtgtggtgtttttgtcctggcctgttgctgactagcatatattt

SEQ ID NO: 1035836 - DNA, 120 bp, Artificial Sequence
  ENSG00000271964_3 (sequence is synthesized)
ttaaaatcatgatcctttaagatatgtgccaagagataatgtttttattaaatcaaaatgctgtatagacattgacttagttgtggaaaatgtcattaaaaaatagttgtcttctctttg

SEQ ID NO: 1035837 - DNA, 120 bp, Artificial Sequence
  ENSG00000271963_0 (sequence is synthesized)
agtcagagaaaccagttaggaggctattgcaataaaatccagtcacaggagggatgcatttcacccgaagttctccctgtagccaaagaagcaagttcaggtaaaagaagaaagctggaa

SEQ ID NO: 1035838 - DNA, 120 bp, Artificial Sequence
  ENSG00000271963_1 (sequence is synthesized)
aattgtagaccctccccattacctctcagcaaggtctaaccagcttaaaatctttactgggatttgtactgacatgcaatataacgatccttacccacttcaagaaatgccatcctgatt

SEQ ID NO: 1035839 - DNA, 120 bp, Artificial Sequence
  ENSG00000271963_2 (sequence is synthesized)
ctttgtactggcttctcctgcagaccactttgagctctgggtgaatggggcatgagttatttttaaaaatgtaaactaaagagaaccaaccagtaaaaaatgcatggctgtcaaattaaa

SEQ ID NO: 1035840 - DNA, 120 bp, Artificial Sequence
  ENSG00000230408_0 (sequence is synthesized)
ctcggcctccctgccgaagcggcggcctttcaggccctagatccggcccggcctcaagaggcgacctccgttcgggcccatccaagccgggccgcatccagcccgccgcctccctctccc

SEQ ID NO: 1035841 - DNA, 120 bp, Artificial Sequence
  ENSG00000230408_1 (sequence is synthesized)
tctgcccggcgtccacgacccgcagcgtccgcccggggtgagcggggcgccgcgtctcaccgaatttaaggcgaagaggaaagagccagaaatccccgatgtaccggcaactgcggcggt

SEQ ID NO: 1035842 - DNA, 120 bp, Artificial Sequence
  ENSG00000230408_2 (sequence is synthesized)
gtctcctctgcgaccggaactaacgccaggaggagggagaggtgccacccccgcccggaccgctctcctatcgcgagatttcttccccttgccccgccctgatcgtggacaggcgcttcc

SEQ ID NO: 1035843 - DNA, 120 bp, Artificial Sequence
  ENSG00000230408_3 (sequence is synthesized)
gaacacatggagtggaggatggataatttcccaaaggaagagacagcagtcaaataaaaacaacaggagcattacatcaagtctttgggtttaaaacattttttggatgagaggaggctg

SEQ ID NO: 1035844 - DNA, 120 bp, Artificial Sequence
  ENSG00000230408_4 (sequence is synthesized)
gatgttcctggctcctggggcatgggactgtgtcattcccttcaattgacaactgtgaaaagaaggccattcgaacccattctggcgttgctgggctcttcaccgtgaagtcctcagcta

SEQ ID NO: 1035845 - DNA, 120 bp, Artificial Sequence
  ENSG00000230408_5 (sequence is synthesized)
tgtctctttctcttcgcactgcggccacagcgtcagcaatggcaaagaacacagatgaccccaggaacatcccagactccccgaggccctgtaagaaggcacattggtgtaagaaacttc

SEQ ID NO: 1035846 - DNA, 120 bp, Artificial Sequence
  ENSG00000230408_6 (sequence is synthesized)
catactacactacaagtttctagagggtaggggccaggtctcgttcaccattgtgtccccaacccctgcacagtgttttgtacacaaaatcttctcaataaatgtttgttggctgactta

SEQ ID NO: 1035847 - DNA, 120 bp, Artificial Sequence
  ENSG00000230403_0 (sequence is synthesized)
ctttccctggctgacagaactctgccttcgagtaggtgttgggggtcatgcccttcatgaaaggaggagtttctctctcatctcgtcaaaaaacaaattattctgccaagcaaggagcat

SEQ ID NO: 1035848 - DNA, 120 bp, Artificial Sequence
  ENSG00000230403_1 (sequence is synthesized)
aattatgacatttcatcaacacttggcaagtaagaaagatgggttgaaagactgcatcagaaatattctagagttattttcctgctaacatggaaacaaaaagattcaatgtgagaagaa

SEQ ID NO: 1035849 - DNA, 120 bp, Artificial Sequence
  ENSG00000230403_2 (sequence is synthesized)
aaaatagattcctaatggtcaagagaacaagaaaattagatagaaacttaaatataaagtacccggaagtcaaaatgtttgaaatgacacttagagccttaattaaccagattttaagat

SEQ ID NO: 1035850 - DNA, 120 bp, Artificial Sequence
  ENSG00000230402_0 (sequence is synthesized)
agcctcagcagctatatgaccacaacagcacgagagaccccaaatgaggactgcccagatgagttcatttaccctgcaaaactaagagggataatactaatgaagcgttgcctcaagcca

SEQ ID NO: 1035851 - DNA, 120 bp, Artificial Sequence
  ENSG00000230402_1 (sequence is synthesized)
ctaagttttaccctgatgggaaccatcaagcagaaccttctggacctgtacttccgagttcactagggctgggagaactcagcccagggatcagcaacgcatgtacgagtctctccagaa

SEQ ID NO: 1035852 - DNA, 120 bp, Artificial Sequence
  ENSG00000230402_2 (sequence is synthesized)
gtatgctctacaactaactaatcttcagtttgcagaagaggaaactaaaggacaggaagttggctgattcctacaatgagcagaagttacagcaaaggtcaatgccaggactgagttccc

SEQ ID NO: 1035853 - DNA, 120 bp, Artificial Sequence
  ENSG00000230402_3 (sequence is synthesized)
tgtttttctcactcacattctttaagttggtacctgggcccctggtgcaggatgggttcttcataaacctttattaaataagtgttcaataaatcaatactcagttttctccattgtaaa

SEQ ID NO: 1035854 - DNA, 120 bp, Artificial Sequence
  ENSG00000230401_0 (sequence is synthesized)
ggcagacgccctgctatcctcatcttaggatacccagttcccaacacagtgcctgctgcaaattatcagtaataacaggccattaactcccctgctggtccctatccatggagcccattg

SEQ ID NO: 1035855 - DNA, 120 bp, Artificial Sequence
  ENSG00000230401_1 (sequence is synthesized)
acagatgagtttgattctggacctaagaaggacagttaacagacacagatatcttttaagaatcttcccttcagagaatactagaaagtgttcagtatgttaagcccttagaaataaatt

SEQ ID NO: 1035856 - DNA, 73 bp, Artificial Sequence
  ENSG00000230401_2 (sequence is synthesized)
aggagaatggcgtgaacccgggagggaacccgggaggcggagcttgcaacgagccgagattacagagcgagac

SEQ ID NO: 1035857 - DNA, 120 bp, Artificial Sequence
  ENSG00000230400_0 (sequence is synthesized)
gactcatcaactataccagtcctctgttcctggtctctggagcttcaatttgggaaagtgacccattagcttctgaggaccagggtgagagagggcaaacttgaatgcccttcacaatgg

SEQ ID NO: 1035858 - DNA, 120 bp, Artificial Sequence
  ENSG00000230400_1 (sequence is synthesized)
agagatgtgtgcagaccggacagacatcagttcctttatcagtgcacaggtagctgcaatatgcttcctggaatcctctctcaaataaactgcttgcctccaaatccttgtctcaggcct

SEQ ID NO: 1035859 - DNA, 120 bp, Artificial Sequence
  ENSG00000230400_2 (sequence is synthesized)
gcatgtggagagataaaacccagacaaagaggcagacatgagcagatgagctcccccgaacaggagacaagtgggctgagaggtgaaggaagaggatgaggatacctctgcctccgagaa

SEQ ID NO: 1035860 - DNA, 120 bp, Artificial Sequence
  ENSG00000230400_3 (sequence is synthesized)
aatgagactgggttgtcctgctgaaggaaaagagtcacatgactattgctcagataacatcaagctaaccaccaggcatgtgagtgagactgtctaagataacccagtttcagctgagct

SEQ ID NO: 1035861 - DNA, 120 bp, Artificial Sequence
  ENSG00000230400_4 (sequence is synthesized)
gatccagagcagaaaagctgtccaggaaccaaggaacctgacagataagtaatttttcttactttaaatctttatatttgaattggtctcttatccagcaaaaactgcctgatatgacac

SEQ ID NO: 1035862 - DNA, 120 bp, Artificial Sequence
  ENSG00000230400_5 (sequence is synthesized)
gactgacatcttctgaagctccttcaggactcagattctgcctcactcatttaaggagcagaggacatgtttgttgattgacaatcttgtccaaagtttctgctatgcttcaaggatcag

SEQ ID NO: 1035863 - DNA, 120 bp, Artificial Sequence
  ENSG00000230400_6 (sequence is synthesized)
ttagtaatttaattcctttagaggctggtttaggtccccaagcaccagctaaaaacaaacctgcaacatcgaatcttgaaaaaaagccaacagatcataagctttgaaatcaactgtagg

SEQ ID NO: 1035864 - DNA, 120 bp, Artificial Sequence
  ENSG00000230400_7 (sequence is synthesized)
atctatggaggaacattttgctagggcttcaaagaccataggcattaatataaactcactctcagactcagatcctctctctgatttctccttcagttcctgcagagaatttgagtcaaa

SEQ ID NO: 1035865 - DNA, 120 bp, Artificial Sequence
  ENSG00000230400_8 (sequence is synthesized)
gggaatggaagagtcagctagttcaaatgaattgaggtggggatgattagaaattgaaactcagctgacaaaattgggaagtaaagtttctctgaaagtattattttcataattataagg

SEQ ID NO: 1035866 - DNA, 120 bp, Artificial Sequence
  ENSG00000230400_9 (sequence is synthesized)
aatttgcatatatatataaattactttctgtcatttaaaaatgcttccacaaaaatatacataagagtttcacctcaaggttgaaaatgagaaagttggagtatatgatgagtaagagct

SEQ ID NO: 1035867 - DNA, 120 bp, Artificial Sequence
  ENSG00000230400_10 (sequence is synthesized)
tataaatatataatcctgtatagagttctgacatcctagatgctgtccacctgtccctaacaaaagccatggatttctacagggtcatgtaaagtaaaaggttattttgaacattctaaa

SEQ ID NO: 1035868 - DNA, 120 bp, Artificial Sequence
  ENSG00000230400_11 (sequence is synthesized)
ctatcctctgaagcagagtcacagagccgagtgtagcaagaaaaggctcggtgatgcctggggaggcgacgccggcagtcagaagaatccaaaggagccttgacagcgtcactgcagaca

SEQ ID NO: 1035869 - DNA, 120 bp, Artificial Sequence
  ENSG00000230400_12 (sequence is synthesized)
aacctgtctccactgactgccctactcagactctgcctgtctgtggtggcccactctcctcggggtggatcggcctaagagtttcattaaaatcaaggggacggggattgtgggtagtgt

SEQ ID NO: 1035870 - DNA, 120 bp, Artificial Sequence
  ENSG00000230400_13 (sequence is synthesized)
tgggacccagtaaagccctgggcttaatggatcagaaccaaaaccccagctccacatgggcagccctcagttttcatgggtcagccctttctgagaaacccagccagggaggagcacagg

SEQ ID NO: 1035871 - DNA, 120 bp, Artificial Sequence
  ENSG00000230400_14 (sequence is synthesized)
accagcagcaggggatgcttctaaacccatatctcactggataagctcatcaccttccaagcctctgaagaacatttacgttcctataagtttctgaagccacgttcaaatcgtagctct

SEQ ID NO: 1035872 - DNA, 120 bp, Artificial Sequence
  ENSG00000230400_15 (sequence is synthesized)
accaccaatgagctgcacgttggaggggaagtgaattcaccccagacctgagttccacatccctagactgggtgagagggcctctgcccaggctctccatgaggatgacctgcaccgtgt

SEQ ID NO: 1035873 - DNA, 120 bp, Artificial Sequence
  ENSG00000230400_16 (sequence is synthesized)
gcctttaatgcacttagaacagcaggtgcctcagtaaacgctcactgccattctgcgatcattattgcattcacttcctggggctgctgcaacaaagtaccacaccctgggggcgaaaac

SEQ ID NO: 1035874 - DNA, 120 bp, Artificial Sequence
  ENSG00000230400_17 (sequence is synthesized)
aacagaccctgaccgtgccgatgctggaagtctgagatcaaggtgtgggcagggctggttccttccgaggactgtgaggaagactgttccacgcctctctgcagctccgggtggtttgca

SEQ ID NO: 1035875 - DNA, 120 bp, Artificial Sequence
  ENSG00000230400_18 (sequence is synthesized)
tccattgctggctttgcagacacatcacccagtctctgccctcatgttcacatggctctctccctgtgtgtgtgtgtctgcgtcccagcctcccctgtttataaggacatagtggcatta

SEQ ID NO: 1035876 - DNA, 120 bp, Artificial Sequence
  ENSG00000230400_19 (sequence is synthesized)
catgactactattactctgatagggcctcatcttaactaactacatctgcaaataacccattgccacataaggtagcattctgaagtactaggggctaggacatcaacataggaatttgg

SEQ ID NO: 1035877 - DNA, 120 bp, Artificial Sequence
  ENSG00000230400_20 (sequence is synthesized)
ggagcacataattcaacccatgataatgattatcgtgattattattaagaatatataaccactgtaggatgaaagcaaatactgtaaaatcctactcataggtttgcagggattaaatgg

SEQ ID NO: 1035878 - DNA, 120 bp, Artificial Sequence
  ENSG00000230400_21 (sequence is synthesized)
catcactggaaaattgtctgacacaaagaaggggttcaacaaatgttgttttacttcctcactgtcagcctaaatatagaaagtatttgctcattggcccgacagacaagttttgacttc

SEQ ID NO: 1035879 - DNA, 120 bp, Artificial Sequence
  ENSG00000230400_22 (sequence is synthesized)
tagttttataccagctttatgtatacatgcttatatgtcgtatgtgacattttgtacatataaacattagttctgccttctaatgctattttgaaatcacctttcccttgttaaagtgtt

SEQ ID NO: 1035880 - DNA, 120 bp, Artificial Sequence
  ENSG00000230400_23 (sequence is synthesized)
cttttgaaattatataaaatagctgaatagtattttaaagccaaaatgctacaatttacttgccatgttttataatttgcttacattcagatggtgtaccatcttgtgttctgttatgaa

SEQ ID NO: 1035881 - DNA, 120 bp, Artificial Sequence
  ENSG00000230400_24 (sequence is synthesized)
atagcacaaccatgcataaatgaccctgccatcctacccctagaactttatttaccatgaaatgcctccacgtactttcatttgcatgtcttgagaactgaaccgtagacccctcttccc

SEQ ID NO: 1035882 - DNA, 120 bp, Artificial Sequence
  ENSG00000230400_25 (sequence is synthesized)
tgtcagtgttgaccatcgatatttcctcccacatgtggcttctgtttctgtctctgggcagatttattctaacctgccctcaaatctgtaagaagattgttcattccctagggctagtcc

SEQ ID NO: 1035883 - DNA, 120 bp, Artificial Sequence
  ENSG00000230400_26 (sequence is synthesized)
aagtctcctggcctggtgcttacttcaaattcacctaaatctggcataaaagctttcaggacaaggtggatcaaactgcgcccttgtgtgagtactccctggacagaatgtctggttatc

SEQ ID NO: 1035884 - DNA, 120 bp, Artificial Sequence
  ENSG00000230400_27 (sequence is synthesized)
ttcggtgtaagttatttcccatgactcacaaatagaaatcaggagaggagggaggtaggaggtgcaagcctctgcagctgtctggagagtcagcaaaagggagacagaatctttagttac

SEQ ID NO: 1035885 - DNA, 120 bp, Artificial Sequence
  ENSG00000230400_28 (sequence is synthesized)
ttcacatgtgtgacaatacgcctatgttttgttttatgttgtttatttcttatgtaacattgttgagttatcaaatgaagtggtgtataaaaatgtcaaataaacaggttctctcccttt

SEQ ID NO: 1035886 - DNA, 120 bp, Artificial Sequence
  ENSG00000230400_29 (sequence is synthesized)
tctcctggaggggacagttctgagtcctcatgcccccgcccccctccttcagagaccacacctcggctgctcacagcaatggctgcccatcaactcacccttcaatgcttccacccccac

SEQ ID NO: 1035887 - DNA, 120 bp, Artificial Sequence
  ENSG00000230400_30 (sequence is synthesized)
ggagcctctgcctcctaaacctgcctcaatatctatggagggtgggagcagagtcacttttcctcactggacctcagtttactcctcagaaagacagcagtgatgatgccctctcaagat

SEQ ID NO: 1035888 - DNA, 120 bp, Artificial Sequence
  ENSG00000230400_31 (sequence is synthesized)
atcctctaactccagaatccctgtctctattgatcgtgtaggatgaggcagtccaagttaaaacaaacactttgttcttagtatctcatttcattttcataaaagccttagaggacacac

SEQ ID NO: 1035889 - DNA, 120 bp, Artificial Sequence
  ENSG00000230400_32 (sequence is synthesized)
ggcacagagggctcaaaaggtgaggagggattcaaacctggctgtctagacccattgcccacatggctaaccaccccataacctgcaaggaaaaatgatcgttgtcattccttctgcaaa

SEQ ID NO: 1035890 - DNA, 120 bp, Artificial Sequence
  ENSG00000230400_33 (sequence is synthesized)
agaaggatggctgcttgtttcacaaaggttaaagttatttagcaaggggagctcaaagggctttgactgcattgcagcctgggagtcagagcaggaatggaaaacaaccatgagccggca

SEQ ID NO: 1035891 - DNA, 120 bp, Artificial Sequence
  ENSG00000230400_34 (sequence is synthesized)
ttgtgtccggacccttccaggggttccttgaaaggggctattttccttttattcctatgcaggggttggcaaactttttctgtaaaaggccagagaataaatagtttaggctctgcaggc

SEQ ID NO: 1035892 - DNA, 120 bp, Artificial Sequence
  ENSG00000278829_0 (sequence is synthesized)
tagatatggagagtcggaaggggagttgtatcacaaaagctggtctgaggctaaaggaatctggcaagatggtcggggtgaacaaagaggaaagaactcacacggagcaagaggcggttg

SEQ ID NO: 1035893 - DNA, 120 bp, Artificial Sequence
  ENSG00000278829_1 (sequence is synthesized)
caaacacttgtagccagcagtgatggaaaagccaaagaagaaaaccaagtgtcagcttttagaaagacgggattaatgaaaagcacaagaattttaaagactaaaagagataccgattct

SEQ ID NO: 1035894 - DNA, 120 bp, Artificial Sequence
  ENSG00000278829_2 (sequence is synthesized)
ctctttgccaaagagccagagtcagttcttttcttcttggtccctgtgatcccgccatacctcgtatcaaataaatagtgccaaaagtgggtcaaagaatgttagagctggaaaggaacc

SEQ ID NO: 1035895 - DNA, 120 bp, Artificial Sequence
  ENSG00000278829_3 (sequence is synthesized)
tccagggattgaaacttcaaggactctgagattcgtgctcttcccaaagcatcgtgcagtatacagatctttgcctagatacaattccatacattttctctgcagtgtcctcagggaatg

SEQ ID NO: 1035896 - DNA, 120 bp, Artificial Sequence
  ENSG00000278829_4 (sequence is synthesized)
ccctttgaaagggccagcgtgacactgaatatcatacttgggcttatgtcatttttttcagtcttcaagtggtgtttatggtctgcttggatcttaggaatcaccttcagccttaaaact

SEQ ID NO: 1035897 - DNA, 120 bp, Artificial Sequence
  ENSG00000278829_5 (sequence is synthesized)
cttcctttactctcctggatcacttaagtgataggtcacttttaatataaatgttgcaggatgagttaagtggagccttgagaaatatgtgtagattgtttcagtgattaaagcaagtgt

SEQ ID NO: 1035898 - DNA, 120 bp, Artificial Sequence
  ENSG00000272702_0 (sequence is synthesized)
gcaacccggcctcgcttgtggggagccctacacccgcggccaggtacgaaaaacccgctctgcgcctccaggccaatcccacgtcttccttctaaaagtccctgctccggaaagccctct

SEQ ID NO: 1035899 - DNA, 120 bp, Artificial Sequence
  ENSG00000272702_1 (sequence is synthesized)
ccgtaaaagggtcccggcccgcagttcctgggatggccagcctcttggcgcggacttggggtgatggggacccccgccgctcccctgaccccgggccgcgctctcccctcctccagtccg

SEQ ID NO: 1035900 - DNA, 120 bp, Artificial Sequence
  ENSG00000272702_2 (sequence is synthesized)
cccctgcgggggaaaatgccggagtgaaactggagcgattgccgccccgccacgtgacggtcccgcatcggcgacctggaagcgggtgagctgccgccgcctccaatctctcccggcgca

SEQ ID NO: 1035901 - DNA, 120 bp, Artificial Sequence
  ENSG00000272702_3 (sequence is synthesized)
gggggccgggatgcggccatgcggcggcgcgggaggcccgagagcggggctcaccctcctcagactctgcggcggagagccgagtgatgaataaatgagtaaccacatcaatatttaagt

SEQ ID NO: 1035902 - DNA, 120 bp, Artificial Sequence
  ENSG00000272702_4 (sequence is synthesized)
gttcactcggagccttggggccagtgtgtcacgggttgggggaaattacaggccctggtggggggttaaataactacttccacccattattaagtgcctactgtgtgccagggcctaagt

SEQ ID NO: 1035903 - DNA, 120 bp, Artificial Sequence
  ENSG00000272702_5 (sequence is synthesized)
attaacgtatacttggtttattattgataataacgatgtttagtaattatagatgctgaatttcagccaactctggtcagtgcgcttttatatgcattacctcattttatcctcagagca

SEQ ID NO: 1035904 - DNA, 120 bp, Artificial Sequence
  ENSG00000272702_6 (sequence is synthesized)
actctgtggggtgagtatggcttttatccctattttccagaagataaaatgtcagctcagatgggggagggttgtgaatccactagatgcccccagagcgttttttttttttttaacttt

SEQ ID NO: 1035905 - DNA, 120 bp, Artificial Sequence
  ENSG00000272702_7 (sequence is synthesized)
cagagcctgtacttttaaaataataatttaaaaataatacacacagcttttttaaaaaaatcaaataggacagaatggcttgcaatgaaaagcaagaactccctctccatccttcaatcc

SEQ ID NO: 1035906 - DNA, 120 bp, Artificial Sequence
  ENSG00000272702_8 (sequence is synthesized)
agggatgctgcttaaagccactggtgttttcaggtctgatggttacctccacatcactacattaagatgctcacatagctacatctgcatttatcaggactggccactgtctgttgcctt

SEQ ID NO: 1035907 - DNA, 120 bp, Artificial Sequence
  ENSG00000272702_9 (sequence is synthesized)
cctcctatgatagataatgatttagctggctcacacccacttccatccctcaatcttgtgtagttatgctattatttttagttcctctatagcaggggtccccaacccttgggccacaga

SEQ ID NO: 1035908 - DNA, 120 bp, Artificial Sequence
  ENSG00000272702_10 (sequence is synthesized)
ctggtaaccctccatgtcctgttaggaactgggctgcacagtaggaggtgagtggtggtaggggctagctggtgaaacttcatctgtatttacagccgcttcctatcgcattaccgcctg

SEQ ID NO: 1035909 - DNA, 86 bp, Artificial Sequence
  ENSG00000272702_11 (sequence is synthesized)
ctgatgatctgtcactgtctcccatccccagatgggaccatctggttgcaggaaaacaaggcatataattgcttcattatatatta

SEQ ID NO: 1035910 - DNA, 84 bp, Artificial Sequence
  ENSG00000272702_12 (sequence is synthesized)
tcccactgattctacattatggtgagtcatataattgcttcattatatattacaatgtaatgataagagaaataaagtgcacag

SEQ ID NO: 1035911 - DNA, 120 bp, Artificial Sequence
  ENSG00000272702_13 (sequence is synthesized)
ggtgtcaaaaaggtggggaaccagtgctctataggatacccaacaggagaaacatgtatttcttcttagggagactccacagtacccctcaactgtccaccttccaggccatgtcctcta

SEQ ID NO: 1035912 - DNA, 120 bp, Artificial Sequence
  ENSG00000272702_14 (sequence is synthesized)
ctgggaatatgaacctaggaaaccagtagagtaggcagaggagacccatgatagcacacccagcacaggcccagtcctcacagcctcccaccttaactcttccatcagaagactggagtg

SEQ ID NO: 1035913 - DNA, 120 bp, Artificial Sequence
  ENSG00000272702_15 (sequence is synthesized)
gggaagtcctaggcaccagccccatggtccagcaaccctgacgatagcacctagctttagagacagccagatctgcctacagatattggccatctgcctcttagtagctatgaaacctga

SEQ ID NO: 1035914 - DNA, 120 bp, Artificial Sequence
  ENSG00000272702_16 (sequence is synthesized)
tatgaaacctgaagtttaagccaactctctaacctctcttggccttatttctccatttggataatgggataatgattcttacctcaagccaggcggagtggctcacacctgtaatcccag

SEQ ID NO: 1035915 - DNA, 83 bp, Artificial Sequence
  ENSG00000272702_17 (sequence is synthesized)
gctacactccagcctgggcgacagaatgagactttgtctcaaaaaaataaaaaatggggccaggcctggtggctcatgcctgt

SEQ ID NO: 1035916 - DNA, 79 bp, Artificial Sequence
  ENSG00000272702_18 (sequence is synthesized)
tagccaacatctctcaaaaaaagaaaaaatggaaataaatcataacgcaaccatccataaataaacactgttaataatt

SEQ ID NO: 1035917 - DNA, 80 bp, Artificial Sequence
  ENSG00000272702_19 (sequence is synthesized)
cgaggcggtgcgacagggatgcgggcacgcagctcgcgccccggcagccgcagaccagcccggagcgggaaggggcggtg

SEQ ID NO: 1035918 - DNA, 120 bp, Artificial Sequence
  ENSG00000272703_0 (sequence is synthesized)
gaaccatcatttctcatgactcctgcgcttcctccttcccatggggtaaagtccacacttttaatgtggcctccagccctttgcagtctgtccagtctccccttcagtctcttttaacat

SEQ ID NO: 1035919 - DNA, 120 bp, Artificial Sequence
  ENSG00000272703_1 (sequence is synthesized)
ttggcctctcagatcctgtgtcattcctgctttttttccccctttgaaacctgagattaaaccctgctggctctgggaagccacttctaactgccatgacacagcacaatatccctttcc

SEQ ID NO: 1035920 - DNA, 120 bp, Artificial Sequence
  ENSG00000272703_2 (sequence is synthesized)
tccggcacttactgtttcacaatttggtgagcatggcatgctgccttatactgtgatttaatcctttttaaaggttgaggtataaaataacataaactgtgtaaacagtcctgatcttaa

SEQ ID NO: 1035921 - DNA, 120 bp, Artificial Sequence
  ENSG00000272701_0 (sequence is synthesized)
gcatccagagggggcgctgcaggcctcccttcggctgcgcacggcccgggccctccgcggctctgcaactctgcaccccgaaaggttcggtgctggaccgcggggcatccaacccgggac

SEQ ID NO: 1035922 - DNA, 120 bp, Artificial Sequence
  ENSG00000272701_1 (sequence is synthesized)
cgggggcgacccacggacactgaggaaactaccgcctataagcctatcatcagaacctctggcacaacacaggccagaaacaccagcatccaagatgaaggcaattttctgtttatggac

SEQ ID NO: 1035923 - DNA, 120 bp, Artificial Sequence
  ENSG00000272701_2 (sequence is synthesized)
tgagtaccccacaaaagatcttattctgaaggccatggaacatgtctacccacatggatcaagtgggcagactggaggagaaacagtttaaaggccctgggggaaggagggagcgccagg

SEQ ID NO: 1035924 - DNA, 120 bp, Artificial Sequence
  ENSG00000272701_3 (sequence is synthesized)
gagagctcctgaagacaacaggaattccaagtctggcactcgggagaaatcctcccttcagacattattgatgtctggccgaggagttaggaaaaacttccttgaaggagggattgaggt

SEQ ID NO: 1035925 - DNA, 120 bp, Artificial Sequence
  ENSG00000272701_4 (sequence is synthesized)
tgagatgggcatggaacccagatcttaggcagagaaagcatattcctgtttggaagaaccctgagtacagaagtcagctcaaagatatcagcttggcccaaccaggaattcgctgtggga

SEQ ID NO: 1035926 - DNA, 120 bp, Artificial Sequence
  ENSG00000272701_5 (sequence is synthesized)
agtctaagagagaaaatgctggccataatcccccaggagccaaagagttaacgaatcttctaaatgtgcctgatttacttccagaaaggagcttcctccgcagggggagaatttgaccca

SEQ ID NO: 1035927 - DNA, 120 bp, Artificial Sequence
  ENSG00000272701_6 (sequence is synthesized)
aggtataaaacacttggagccctgagaaaacacacagccacacataaattcaaagtcggctctggcttgctcgaagttgcaccctttcagttcctctggacagatgctatcctggactgt

SEQ ID NO: 1035928 - DNA, 120 bp, Artificial Sequence
  ENSG00000272701_7 (sequence is synthesized)
gcaggatatctcatgcagtagtactccctcagccagtggcttatcacacattcttgtcacattccaagtctaacacagttccgcctcatgataagacctcagatctgtgcaaaaattcat

SEQ ID NO: 1035929 - DNA, 120 bp, Artificial Sequence
  ENSG00000272701_8 (sequence is synthesized)
gtagaaagctctgcatttattatctcgctgattcacaacagtggtatgggatcagcagagatggtaccacagattcaagaaccatatttttctaaccccagtttgagacccataatatga

SEQ ID NO: 1035930 - DNA, 120 bp, Artificial Sequence
  ENSG00000272701_9 (sequence is synthesized)
caagtgcaggatatttatggagacaacaagacacaaccgggactgccactttcaagagccatcattgtagattcaaatcaactaaaacacttcataatgggagaaacttggttgaacagg

SEQ ID NO: 1035931 - DNA, 120 bp, Artificial Sequence
  ENSG00000272701_10 (sequence is synthesized)
agcacatgttaacgaaggggttttggttgagaaacttactgaatcagtaagacaggacccttaaaaaggctactgtgactgcagactgaggggaagtaccaaaaataagctaatcctact

SEQ ID NO: 1035932 - DNA, 120 bp, Artificial Sequence
  ENSG00000272701_11 (sequence is synthesized)
ctattatgctggttagaactcacagaaagcattttattctgttctacagagcagatacatattgaaacagagacaaataggaatgtgttcagagaaggtcaactaaatgaattgcaaact

SEQ ID NO: 1035933 - DNA, 120 bp, Artificial Sequence
  ENSG00000272701_12 (sequence is synthesized)
gaaggtgtaacagttctcgtattttaagctcctaccatgagcatggatcttcacccaacatatccctgatcctcacagtagcctggctagatgagtattttcactcacagatttcagaga

SEQ ID NO: 1035934 - DNA, 120 bp, Artificial Sequence
  ENSG00000272701_13 (sequence is synthesized)
gagatacggcagctcggaacgctaagtgttaggatgtgaaggggctgggaactgaacgcagatgtgcctggctccaaagttggccttctttccactactccacactgcctccctgtttga

SEQ ID NO: 1035935 - DNA, 120 bp, Artificial Sequence
  ENSG00000272701_14 (sequence is synthesized)
aatagatgggcatgtttggtttgaagaaaagaagccttgtggagtaagtagaagaaggaaatgtgttagcagtcctcaaatatttgtggaagcagcattagacattttattctgtatggc

SEQ ID NO: 1035936 - DNA, 120 bp, Artificial Sequence
  ENSG00000272701_15 (sequence is synthesized)
tccaatgagtgcaaattgtagagaaacagatgtcgattcaacataaagaattttccaacataggggctgtctagagggattgggtggctcagccattttggtatgggacaaattctctgt

SEQ ID NO: 1035937 - DNA, 120 bp, Artificial Sequence
  ENSG00000272701_16 (sequence is synthesized)
ccactgggggctgggtaaccctgtggcaggtatgcgagctctgcatgtaagacaatgaatgacctgcaaggtcttttcccatctgatgtaaaataaggctccaagatgaactggaacttg

SEQ ID NO: 1035938 - DNA, 120 bp, Artificial Sequence
  ENSG00000272701_17 (sequence is synthesized)
tcagtcttccctagttatgtccctcagcccagaacccttggtacaacatgctgctttgtactgagggcaaggcaaattgaagacattatcatcaataaaatcacatcgagcccgctctca

SEQ ID NO: 1035939 - DNA, 72 bp, Artificial Sequence
  ENSG00000272701_18 (sequence is synthesized)
agacattatcatcaataaaatcacatcgagcccgctctcaaccaaattaaccactgaagcaggcggatcact

SEQ ID NO: 1035940 - DNA, 120 bp, Artificial Sequence
  ENSG00000272701_19 (sequence is synthesized)
gacagagcgagacttcatctcaaaaacaaaaccaaacaaaaacaaattaaccaatatatccctgaagctactggtgtgttcctcttcaggcccatttttgagtaaaagtgtttggctgta

SEQ ID NO: 1035941 - DNA, 120 bp, Artificial Sequence
  ENSG00000272701_20 (sequence is synthesized)
ttcaggcccatttttgagtaaaagtgtttggctgtaaaaagctcaaaagatgagtggcagacgagggaagcagtggaactgaataatctcttacccaaataagatgaacctaaatgacag

SEQ ID NO: 1035942 - DNA, 120 bp, Artificial Sequence
  ENSG00000272701_21 (sequence is synthesized)
atggttgtttctccaggtgacagtattagtgggcacccctaaactatcttcacacaccctctgcattactccacacatcccattatcccacagctggtacttcttcaccaggtactcctg

SEQ ID NO: 1035943 - DNA, 120 bp, Artificial Sequence
  ENSG00000272701_22 (sequence is synthesized)
ccccactatcccacacctagaggacattttatccactcaaacagataaataggctgaaggattctaattaagtaatagaatcttgcatttttatagctctttaccctttcacatatatca

SEQ ID NO: 1035944 - DNA, 120 bp, Artificial Sequence
  ENSG00000272701_23 (sequence is synthesized)
tctcatttgtcactcaccacagtcccctaaggaaaacagctactttctttcagacaggcaattttctagctgcctgggagctaggaggaggaaagggcttcagcacaggcacagtcgctc

SEQ ID NO: 1035945 - DNA, 120 bp, Artificial Sequence
  ENSG00000272701_24 (sequence is synthesized)
tttctcgcttttttttttttttcctgttactaccttcccacattagattatgcctccagccagaatgagtcaaccaggagcaggtgcttccgttttcctcgactgctctcctcacctcac

SEQ ID NO: 1035946 - DNA, 120 bp, Artificial Sequence
  ENSG00000272701_25 (sequence is synthesized)
accttcttcagctgtccccctccctgaaccaggcccccagccgcgccaccactgccgctctccgccctggtgaccccagcgcctggacctggaccgacacctgcagctccgacccggaac

SEQ ID NO: 1035947 - DNA, 120 bp, Artificial Sequence
  ENSG00000272701_26 (sequence is synthesized)
agccacgccctctaccactcggtcacacccgtgtgcctgcgacctttccaacctccaaggctggctgtcccacaagtaggaaggcgcagcctcccaagaaatcgagtccccacgcccagg

SEQ ID NO: 1035948 - DNA, 120 bp, Artificial Sequence
  ENSG00000272701_27 (sequence is synthesized)
agggcgggtggagccagctaacggaatgactaaactctgtcgcgggggtcaagcctcggcgagggttgtgtgacttttgtgttctctacgaccccgaggtgctgggaggcgacgaccgag

SEQ ID NO: 1035949 - DNA, 120 bp, Artificial Sequence
  ENSG00000272701_28 (sequence is synthesized)
gctctcgcccacgtggccctcttctggaccggcggcggcgcacctcgtatgggcacccacgcgccccgggagccctcccctcgccagcacagcctcacgcctcctgggccacgcgcactt

SEQ ID NO: 1035950 - DNA, 120 bp, Artificial Sequence
  ENSG00000272701_29 (sequence is synthesized)
acctgcccctaggactggtgtggcccacgcacacgagccacacccccaaggagggctagtcccactcctggagcgggctgcgagggtgcacggggaggctccactccttccccgcccgcc

SEQ ID NO: 1035951 - DNA, 120 bp, Artificial Sequence
  ENSG00000272701_30 (sequence is synthesized)
tcttacctgattcaggtaagaccttgcctacaggactccatgtttcggagaaccggttgcgcatgcgcttcctgaggccagaggttctcggccttcaccctgttcccagggaggacccgg

SEQ ID NO: 1035952 - DNA, 120 bp, Artificial Sequence
  ENSG00000272701_31 (sequence is synthesized)
ccacgaatacgcggctcggggctagagcgtcgccaggtccgcgcacaagcccatcgcccccgagcccagcatgtgctgccgccttctccctgccaggcgtcagcgccacctattgcaaag

SEQ ID NO: 1035953 - DNA, 120 bp, Artificial Sequence
  ENSG00000272701_32 (sequence is synthesized)
ggtatgaaatggcaggccgtggcttcgacaatagcctccggcattggataaagagaataaaattgtattcggcctgatctgagtacttttacataataaaagtgaaggccaaagaagtga

SEQ ID NO: 1035954 - DNA, 120 bp, Artificial Sequence
  ENSG00000285552_0 (sequence is synthesized)
aagctcagcccattgccctgtgatcccctgcagcacctcaggactgcagtgtcctcacggatgagaagactcacataagaatcaatctctcacccctggacttcccagcctccagaactt

SEQ ID NO: 1035955 - DNA, 120 bp, Artificial Sequence
  ENSG00000285552_1 (sequence is synthesized)
tttttgactgtggaggtggaacttttggatacaaaatgctgattatatgctgagaaaggataaagaaggaaatgtcttaaatagaagaaaacataagaagatagaaactgcagaggacag

SEQ ID NO: 1035956 - DNA, 120 bp, Artificial Sequence
  ENSG00000285552_2 (sequence is synthesized)
aggaccactgtatgccctgaagacatcactaaagtggcacatgaagcacacttttgaacactcaggaagaaattcctgacaatcaatggacacagaaaaacattattaagtaaaacttgt

SEQ ID NO: 1035957 - DNA, 120 bp, Artificial Sequence
  ENSG00000285552_3 (sequence is synthesized)
agttcgtggagctgcttcctgcggaaatcatgaaaaatgccattgaaagtcaaagccctgcactaataactaattatttgtccttgaacaagttatttgtgaatacagaacccatagata

SEQ ID NO: 1035958 - DNA, 120 bp, Artificial Sequence
  ENSG00000285552_4 (sequence is synthesized)
cgaaaggccaactgtacttattgaaaacaatccaggtataactagacccgcacagttcaaacccatgttgttcaagggtcaactgtataattcacttaatccctagagcaactgtaagag

SEQ ID NO: 1035959 - DNA, 120 bp, Artificial Sequence
  ENSG00000285552_5 (sequence is synthesized)
ctagatacgattgttatccttgttttgtaggagaggaaagtgaggcacagaagtgtggttcaaggaccagaagcatctgcatcacttgggagtttgtgagaaatgcataatcttaaggcc

SEQ ID NO: 1035960 - DNA, 120 bp, Artificial Sequence
  ENSG00000285552_6 (sequence is synthesized)
aagctcagcccattgccctgtgatcccctgcagcacctcaggactgcagtgtcctcacggatgagaagactcacataagaatcaatctctcacccctggacttcccagcctccagaactc

SEQ ID NO: 1035961 - DNA, 120 bp, Artificial Sequence
  ENSG00000285552_7 (sequence is synthesized)
tggtgtaggttgaattcagcaaagaatttttctattctgtctttggggaccctccagcatcttctcattcacatctgaaaggacgtctcccagtccacagtgcctgtgattgccacattc

SEQ ID NO: 1035962 - DNA, 120 bp, Artificial Sequence
  ENSG00000233271_0 (sequence is synthesized)
atttattttaagccactaaattctggggtggtttgttatacagcaatagataaatagaacagccttcaacaacgaacgtttgctgagtgcctactgtgtcccaggcactgcataagactc

SEQ ID NO: 1035963 - DNA, 120 bp, Artificial Sequence
  ENSG00000233271_1 (sequence is synthesized)
cagtctgaaccaggcctgagcaggagcgtgtggcactcggtgtcgtctccgcagaaacggcatcaagagcaaggctgatgctctcatagctgggtggaggccaggcgggctgggtgctga

SEQ ID NO: 1035964 - DNA, 120 bp, Artificial Sequence
  ENSG00000233271_2 (sequence is synthesized)
gcagggcatccctcgatccacttggctccagggcttcctccgtagggtatgcaggtgaaggtgtggtggtggaggacgccagggctgagcgaccctaccagcggcgaccctcgggtctgc

SEQ ID NO: 1035965 - DNA, 80 bp, Artificial Sequence; identical to SEQ ID NO: 823505
  ENSG00000226725_0 (sequence is synthesized)

SEQ ID NO: 1035966 - DNA, 120 bp, Artificial Sequence; identical to SEQ ID NO: 823506
  ENSG00000226725_1 (sequence is synthesized)

SEQ ID NO: 1035967 - DNA, 120 bp, Artificial Sequence; identical to SEQ ID NO: 823507
  ENSG00000226725_2 (sequence is synthesized)

SEQ ID NO: 1035968 - DNA, 120 bp, Artificial Sequence; identical to SEQ ID NO: 823508
  ENSG00000226725_3 (sequence is synthesized)

SEQ ID NO: 1035969 - DNA, 120 bp, Artificial Sequence; identical to SEQ ID NO: 823509
  ENSG00000226725_4 (sequence is synthesized)

SEQ ID NO: 1035970 - DNA, 120 bp, Artificial Sequence; identical to SEQ ID NO: 823510
  ENSG00000226725_5 (sequence is synthesized)

SEQ ID NO: 1035971 - DNA, 120 bp, Artificial Sequence; identical to SEQ ID NO: 823511
  ENSG00000226725_6 (sequence is synthesized)

SEQ ID NO: 1035972 - DNA, 120 bp, Artificial Sequence; identical to SEQ ID NO: 823512
  ENSG00000226725_7 (sequence is synthesized)

SEQ ID NO: 1035973 - DNA, 120 bp, Artificial Sequence; identical to SEQ ID NO: 823513
  ENSG00000226725_8 (sequence is synthesized)

SEQ ID NO: 1035974 - DNA, 120 bp, Artificial Sequence
  ENSG00000233277_0 (sequence is synthesized)
ccaatctcatgagagaagagcccctagttctcaggactttaaccctcttcctgccagcacccccaggccagtgctgaggctgacaagttgtctaaaagggcaggaggacttactcctgac

SEQ ID NO: 1035975 - DNA, 120 bp, Artificial Sequence
  ENSG00000233277_1 (sequence is synthesized)
atgcatctgccacccaaaccatcacaatagccttccgccttctcagtgggagtacgagtgaccctgcagcagaaggcagcaggaggtggtgacaagaatacacgtctggccctaaaacct

SEQ ID NO: 1035976 - DNA, 120 bp, Artificial Sequence
  ENSG00000233277_2 (sequence is synthesized)
aggaaagtggattcacctctgagctgcagattcctcatcaataaaatgaagacaagaacacccacccttagtatttgggtatttagactgtttccatgttttttttatttcttttatcat

SEQ ID NO: 1035977 - DNA, 120 bp, Artificial Sequence
  ENSG00000233277_3 (sequence is synthesized)
attcttggcattacgagtttagcattcaaggttctgaccaataagtgatcccaggggtgttcatgaaaatccccggggaaagcttttacaaaataaagaacggagtctattgagctggaa

SEQ ID NO: 1035978 - DNA, 120 bp, Artificial Sequence
  ENSG00000254397_0 (sequence is synthesized)
ttaaatataaagtcaatattgtgaaaaaaataagtctttgttttaaaatgacttacacattatgaaattgtgatctcagataaaaatagaatgaaataccattacaatgagaaaaacaca

SEQ ID NO: 1035979 - DNA, 120 bp, Artificial Sequence
  ENSG00000254397_1 (sequence is synthesized)
caatgagaaaaacacaaggaatggctagcttaatttacctaaaaaggaaaaaacaacattctcgaaaaatgcaaacaactatgaaaataaaggagttggccgggcgcggtggctcacgcc

SEQ ID NO: 1035980 - DNA, 120 bp, Artificial Sequence
  ENSG00000254397_2 (sequence is synthesized)
gtacttaatattatgaatagttttcattaatattactggttaacacttgacaatgtccaaataaaagtatatttaatcatcaagggggtcactgatttatcttttgtaaaattcaatcga

SEQ ID NO: 1035981 - DNA, 120 bp, Artificial Sequence
  ENSG00000254397_3 (sequence is synthesized)
ttattttgagcattccagggcactatgcagatagtcatgctgcagcccgaggtagtagttaagaacaagtaccatgaaggcccatatataaatcccaaccgcaccctgcctagcttaggc

SEQ ID NO: 1035982 - DNA, 120 bp, Artificial Sequence
  ENSG00000232581_0 (sequence is synthesized)
ggaaaacgaggatccacatgtgtaaataaacgggaactacagctcaaaggcagtcatacacttgtcattcttgtttcttcctctcatgacatggaaaggcaggtagaaagatctcttgaa

SEQ ID NO: 1035983 - DNA, 120 bp, Artificial Sequence
  ENSG00000232581_1 (sequence is synthesized)
tagtagtctggttggtggccgccagatacaggacaaacaacagctcctcttgggcagcagtgtgtgcctggcatgaccagtagctgccggacatggttcttccaggagcctggatctggc

SEQ ID NO: 1035984 - DNA, 120 bp, Artificial Sequence
  ENSG00000249008_0 (sequence is synthesized)
cagctgcagaatggggagaccttggtggtaactaaaatggagccatagtagaaagaagtcttggccggctacagtggcgcatgcctgtaatcccagccctttgggagactgaggcaggca

SEQ ID NO: 1035985 - DNA, 120 bp, Artificial Sequence
  ENSG00000249008_1 (sequence is synthesized)
gaacctttcagagtgcttgatgatattgcaagtagcaagctgtgctgcattaaaagatgatgaatctctgttcaggatggaacggagtgtttggcatctccacttcatctttcgtaaagg

SEQ ID NO: 1035986 - DNA, 120 bp, Artificial Sequence
  ENSG00000249008_2 (sequence is synthesized)
ctgaatgaactctttgctgccacttattgaagataaaaggaggcagaattacccttaagtaaatactttggcctcagtatttcctccactttgtacattaataaaaatccctttctttca

SEQ ID NO: 1035987 - DNA, 120 bp, Artificial Sequence
  ENSG00000249001_0 (sequence is synthesized)
actctcatttcatccacagtgacccaggcacccaattattgaatgcttttagaagtcttctcaaatgaatctctatgaacagcagtaataacggtctcaggtctgaagtccactgcggtc

SEQ ID NO: 1035988 - DNA, 120 bp, Artificial Sequence
  ENSG00000249001_1 (sequence is synthesized)
agccttccctggtggtgagctgctgtcagaacctccccactactcctctgggtggccccagtcttgtgcctatttccctctcgtggtcatcaagtctcgcccagtggaaattgacttcct

SEQ ID NO: 1035989 - DNA, 120 bp, Artificial Sequence
  ENSG00000249001_2 (sequence is synthesized)
ctccagccaacagccagcaaggaactgtggccttcggtgggaggaacagaatccaactaacaaccatatgagtgagcttggaagcagatgcttccccggttgagacctgagatgactgta

SEQ ID NO: 1035990 - DNA, 120 bp, Artificial Sequence
  ENSG00000249001_3 (sequence is synthesized)
gacccagttgacaccttgattgcagcctatgaaaggccctaaagcaggggacccagctaagccaaggccaggttcctgacccataggaactgtgagataataaaattttttttttgtaaa

SEQ ID NO: 1035991 - DNA, 120 bp, Artificial Sequence
  ENSG00000249001_4 (sequence is synthesized)
tacaaccagaaagttgcctatagatgattcagctagaagacaccaactagtgtgaccaacaaggcaacttagtgctacgtgggaagtcagagagaaataaatatgcttttttgaacctgg

SEQ ID NO: 1035992 - DNA, 120 bp, Artificial Sequence
  ENSG00000249001_5 (sequence is synthesized)
ccgttcatacaacctagaggaaacgtaacacaggaaaagcagcattgaaactcagaatccagatttaagtctcaattaactcactggttttggttttagccctgaaaaccaatcatcttg

SEQ ID NO: 1035993 - DNA, 120 bp, Artificial Sequence
  ENSG00000249001_6 (sequence is synthesized)
aagactcttgattcattgtcatgcatcccctggtactattatacacatccattataagaagaaagctaacagaaaatatgcttccttgccagagtatactactaagttggaatcacagca

SEQ ID NO: 1035994 - DNA, 120 bp, Artificial Sequence
  ENSG00000249001_7 (sequence is synthesized)
gtattttcttctatgaactctatagcttagcttattaatatgctgatgaagtcattagcagtttcaatatttgcaatgaaatcaatttggttatactcataataaattaaaattaaaata

SEQ ID NO: 1035995 - DNA, 120 bp, Artificial Sequence
  ENSG00000249001_8 (sequence is synthesized)
aatgtgacttgctcctccttgccttccgtcatgattgtgatgcctcccagccatgtggaaatagaattccaaaattgtacgagcttcaggccccacaaaacctggatccaccctcagatt

SEQ ID NO: 1035996 - DNA, 120 bp, Artificial Sequence
  ENSG00000249001_9 (sequence is synthesized)
agcgaaaagtttcagaaatgttcgttatgactccttggatattcttaactaatagggcctctgtgagatctgtactactaagaagtttcacaagtaattctaatattcagcctgggttga

SEQ ID NO: 1035997 - DNA, 120 bp, Artificial Sequence
  ENSG00000249001_10 (sequence is synthesized)
aaaccgccatccaccatccacggatgctgtgcttagggcccgtgcttctcagatggtgggccatcactcattctgagttgtgaaatcatcttaacaggtcccaattagcattgttttaat

SEQ ID NO: 1035998 - DNA, 120 bp, Artificial Sequence
  ENSG00000249001_11 (sequence is synthesized)
agaatggaatatgttaccttgcatcataaggttggtgtgttcgtcccacttttgtttcaatatctacaatatatataacttatacattgccttgggtagcgcaattctgaatcctgtggt

SEQ ID NO: 1035999 - DNA, 120 bp, Artificial Sequence
  ENSG00000249000_0 (sequence is synthesized)
cagaatgtcttcctttctgaattatgtatttagataaacttatccaacaacttcagagcaacattgtgttcctgtcctcccatctgtatgtaagagtaaaaactaagagggcttcttcag

SEQ ID NO: 1036000 - DNA, 120 bp, Artificial Sequence
  ENSG00000249000_1 (sequence is synthesized)
tctgacgattgatggcttacaacaattttgggaaatcctcagctaataacacacatagtatcattttttcctgtttatccctgtcctctgtctctggaactccagttgctaattaaaact

SEQ ID NO: 1036001 - DNA, 120 bp, Artificial Sequence
  ENSG00000249000_2 (sequence is synthesized)
gtcgcttccaagatggacgaataggaacaactccaacctacagctcccagcgagattgatgcagaagatgggcgatttctgcatttccaactgaggtctctgaagaatctccataccatc

SEQ ID NO: 1036002 - DNA, 120 bp, Artificial Sequence
  ENSG00000249000_3 (sequence is synthesized)
ttccacaattgttgaactaatttacacttccagtaacaatgtgaccaacaacacatggaagctgccaaggcttggggtttacaccctctgaagcaatggcctgagctgcaccttggacct

SEQ ID NO: 1036003 - DNA, 120 bp, Artificial Sequence
  ENSG00000268659_0 (sequence is synthesized)
gaatgtcagtgactgttgggtagtgaatatattttctgcttggatcccccaaatacccaacttttgctgtttctggtcactgtagggttagctcttggctggtcttttgggaggttttcc

SEQ ID NO: 1036004 - DNA, 120 bp, Artificial Sequence
  ENSG00000268659_1 (sequence is synthesized)
cagtctgaagggcagtggaaacctctgctgattccctatgcagtggatgaatttttggctaaagttgtcttagttcctgccttatttactggtatagcaagttggtgtatgtggcatagg

SEQ ID NO: 1036005 - DNA, 120 bp, Artificial Sequence
  ENSG00000268659_2 (sequence is synthesized)
aagggcagtaaaggggaaacagtgctaactctagagttagcagacccaggctctggttctcacatggcctttgctccctcaggcttcctagtgttcccatgatcttttgctgaattactt

SEQ ID NO: 1036006 - DNA, 120 bp, Artificial Sequence
  ENSG00000268659_3 (sequence is synthesized)
caaaatctagggatttgaaacaagcatgtcataagcacatgtattgtgtgggtcaggaatttggagaggccacagtggagtggcttgtctctggtccacaagcttggacctgggctggaa

SEQ ID NO: 1036007 - DNA, 120 bp, Artificial Sequence
  ENSG00000268659_4 (sequence is synthesized)
ggactcaaagactgaagatgacttgatgctaagggctgggattatctgaaatgtctctccatgggcttggcttcatggccacctcagcacggtaggactttttaaaacattaaaaaaaaa

SEQ ID NO: 1036008 - DNA, 120 bp, Artificial Sequence
  ENSG00000268658_0 (sequence is synthesized)
gtgtgtcctggccgtttgaggctctggccgatttcttttcccaagtccccatggagaatcagggaccgtcctgtgccatcttccgagagcctggaagggtccgcccgtgggctttccgag

SEQ ID NO: 1036009 - DNA, 120 bp, Artificial Sequence
  ENSG00000268658_1 (sequence is synthesized)
cgccgaaggggccacatgctgctctgagggtgccgcagagatgctgtctcaccatgttggccccggatagtcttggactcctgggttccaggtatcctccgtggcctccaaaagtgctgg

SEQ ID NO: 1036010 - DNA, 120 bp, Artificial Sequence
  ENSG00000268658_2 (sequence is synthesized)
gattacaggtcctgcctacagaagatcttgtgacatatccctgcacccatcacacaggatattgtgacattgctgagcccagcatctaggtgatgtgactcttctctactgtttggtctc

SEQ ID NO: 1036011 - DNA, 120 bp, Artificial Sequence
  ENSG00000268658_3 (sequence is synthesized)
tacccaaaaagggattgtgacatatcactctgtcaagaacctagaagaggtgactctcctctccagcctgggacctccatacagaggggattgtagcatattcctaatggagcaccaagg

SEQ ID NO: 1036012 - DNA, 120 bp, Artificial Sequence
  ENSG00000268658_4 (sequence is synthesized)
tgatgtgacactgctgcctggtccctgccctcagagaagattgtgacatatcactgccccgaaacccaggtgtgattgttacatacacctctgcccagcacctgagtgatttgactcttc

SEQ ID NO: 1036013 - DNA, 120 bp, Artificial Sequence
  ENSG00000268658_5 (sequence is synthesized)
tgcttgggcccagcgtacagatgggattgtgccgcattgctggacccagcacttaggtgatgtgatataattctcctcttctgcctggccctgccaaaaagtgggagattatggcaaatc

SEQ ID NO: 1036014 - DNA, 120 bp, Artificial Sequence
  ENSG00000268658_6 (sequence is synthesized)
actgaacccagcacctagggaccttgtgacatatatctgcacccatgacctagaagatgtgacatttattttttgcctgcaccctgccctgcacaggaatgattgtgacatatccttgga

SEQ ID NO: 1036015 - DNA, 120 bp, Artificial Sequence
  ENSG00000268658_7 (sequence is synthesized)
accagacaccagaattgtaacatatccctggctgagcactcaggtgatgtgacactcctgcttggcttcttccctcagcagattatgagatatccatggctgaaatccagggggaattgt

SEQ ID NO: 1036016 - DNA, 120 bp, Artificial Sequence
  ENSG00000268658_8 (sequence is synthesized)
gacatatcacttggcccagtaccaagcaagtgtgactgttctattcatcataagtcctgctttcaagggagattgggacatattgtggggctcaacaccaatgtgacattactgttttgc

SEQ ID NO: 1036017 - DNA, 120 bp, Artificial Sequence
  ENSG00000268658_9 (sequence is synthesized)
cttggcccagaccttaaaggcactgtgacgtattgctcggctcagcaacaaggtgacgagagatcctgtgtggacattgacaacagagagcattgtgacatatctttgggagcatcagct

SEQ ID NO: 1036018 - DNA, 120 bp, Artificial Sequence
  ENSG00000268658_10 (sequence is synthesized)
atttgatgtgactctccttttataccaaggctttgctcataggggagaccgtgatgtatcttctggcccagaaatcaggcgatgtgtttctcctgcctgagctttgctcacagggagcat

SEQ ID NO: 1036019 - DNA, 120 bp, Artificial Sequence
  ENSG00000268658_11 (sequence is synthesized)
tgtgacatatcactgagcccagcacccaggtgatgggactctactgcctgtcccctgctttcaggaggaaattgtaacatatctctgaccaagcacccaggtgataagtcttctgcctgg

SEQ ID NO: 1036020 - DNA, 120 bp, Artificial Sequence
  ENSG00000268658_12 (sequence is synthesized)
tccctggcccagcaaccagatgatgcagatgacgtatctctcctgctcactctctatccacaggttctgcccacaaaggagattgtggcatactgctgggcctaacactaaggtgatgtt

SEQ ID NO: 1036021 - DNA, 120 bp, Artificial Sequence
  ENSG00000268658_13 (sequence is synthesized)
acttctctgctttggctatgtccttagaaggcattgagacacactgctgggcccagcaccaagatgatgtgagtcctctgcctgaaccctgaccacagggagcattgtgacatatttctt

SEQ ID NO: 1036022 - DNA, 120 bp, Artificial Sequence
  ENSG00000268658_14 (sequence is synthesized)
gacccactgcaatctctcctatggacaaagcccaggttggattgtgacatatactttagcccagctcacagttgtgataatgacactcatactgacaaatcagtcagtaggagagatact

SEQ ID NO: 1036023 - DNA, 120 bp, Artificial Sequence
  ENSG00000268658_15 (sequence is synthesized)
ggcacttgtagctaaacttagagaaacaggttatgtaactctccttgctgggtcctgcctacaggaagctttatgatctatctgtgtattcatcatccaggtgttatgactctcgtcttt

SEQ ID NO: 1036024 - DNA, 120 bp, Artificial Sequence
  ENSG00000268658_16 (sequence is synthesized)
tcactggaacctgccaaaaagggtgattgtgacatatcactggacccagcaccttggtgatgtgactctcctctcctccttaggccctgcttacattgtgtctgttgaaatacggctggt

SEQ ID NO: 1036025 - DNA, 120 bp, Artificial Sequence
  ENSG00000268658_17 (sequence is synthesized)
ccaacacctaggtaatgtgactctcctgcataggccttgctaataggggatgtatgacatatgttttgtttatcacttaagtgatgttactctccttttcttcctgaatcctgtaaaagg

SEQ ID NO: 1036026 - DNA, 120 bp, Artificial Sequence
  ENSG00000268658_18 (sequence is synthesized)
tgggggattgtgaccctatcactggacccagcacataagtaatatgagtttcctgcataggctctgttcagaagggtattatgacatatctttttgttcatcactttgtgacttgtcttt

SEQ ID NO: 1036027 - DNA, 120 bp, Artificial Sequence
  ENSG00000268658_19 (sequence is synthesized)
tgactggaacctgccaaaaagggtgattgtgacatattgctggacccagcacctaggtgatgtggctctcctttttttctgggcctcacatattttgggtattgtgatgtatagctgggc

SEQ ID NO: 1036028 - DNA, 120 bp, Artificial Sequence
  ENSG00000268658_20 (sequence is synthesized)
tcaacacctagcagttggggagctcctttcttgaccattcccacaaatgacatatctctgctatgaccgcctatgacacatgacctaaatatgtgacccttcttttctgcctgtaccctg

SEQ ID NO: 1036029 - DNA, 120 bp, Artificial Sequence
  ENSG00000268658_21 (sequence is synthesized)
ctaacagagaagattgtgacaaattgctaagtgcattgtatcttgtgctaaccttctatctcagcctgtgaccaagaatgcctaactgccggggaatgcagccctgtaggtctcaacctc

SEQ ID NO: 1036030 - DNA, 120 bp, Artificial Sequence
  ENSG00000268658_22 (sequence is synthesized)
aatttgcccagccactattcaaaatagagtcactctggtttaaatgcctctgacattaagatacactgtaaaattatgaaaaaagttgatttgaattttagcaaatgagaaatgaaataa

SEQ ID NO: 1036031 - DNA, 120 bp, Artificial Sequence
  ENSG00000268658_23 (sequence is synthesized)
ttagaatgggctattctgaaagatatagcattagttatatttgtgtttgagttttctattaacctatatttgttacttatgaatagataccttgttttattctgtctaaacagatacact

SEQ ID NO: 1036032 - DNA, 71 bp, Artificial Sequence
  ENSG00000268658_24 (sequence is synthesized)
gaatagataccttgttttattctgtctaaacagatacactaggtggggtgcggtgctgaggtcaggaattt

SEQ ID NO: 1036033 - DNA, 68 bp, Artificial Sequence
  ENSG00000268658_25 (sequence is synthesized)
cagagcgagactctgtctcaaaaaataagaaaaaataagcggccgggcatgcaaggtcaggagttcaa

SEQ ID NO: 1036034 - DNA, 120 bp, Artificial Sequence
  ENSG00000268658_26 (sequence is synthesized)
ggacataaatttaatgttaagtgtggactcataaagaatctagacagccaccaagccatttgtttattcttgatttcttaaagcttccattattaaaagctctgcattccattactcatc

SEQ ID NO: 1036035 - DNA, 120 bp, Artificial Sequence
  ENSG00000268658_27 (sequence is synthesized)
ggcggtccaggtcctgggcctctcccactcagcagcggggaggaggggtcggcggggagtaggggccggtcgcccccccttgagctcttccccgtcttagtggaccagcagacagtgtgg

SEQ ID NO: 1036036 - DNA, 120 bp, Artificial Sequence
  ENSG00000268658_28 (sequence is synthesized)
gagagcgctgggaaggaaggttggcggagttatactccagacggacgggctcaggccccgcgcgccacactcggccacacttggcgcgtagtgtggacccggtgggcctctgccctcgcc

SEQ ID NO: 1036037 - DNA, 120 bp, Artificial Sequence
  ENSG00000268658_29 (sequence is synthesized)
accggctggcttctctgtccagccgctgggtcgaccagatgtcagccccaaggtcctgcctacagaagatcttgtgacatatccctgcacccatcacacaggaggggattgtagcatatt

SEQ ID NO: 1036038 - DNA, 120 bp, Artificial Sequence
  ENSG00000268658_30 (sequence is synthesized)
tataaaatagtcattagaaggcctatgtgcgtaatagaacctcatgtgtcttctgctactaaagtctaacattactaaattcaacaaggctttaatgcattatggcaaagcacattttca

SEQ ID NO: 1036039 - DNA, 120 bp, Artificial Sequence
  ENSG00000268658_31 (sequence is synthesized)
ccaggtgaggaaagcctttactagtctactgactgaggagagtaaaaccctttataatcaagaacccagagattgaatctgcctgccacctacactgacgcaagacttcaagaccttgaa

SEQ ID NO: 1036040 - DNA, 120 bp, Artificial Sequence
  ENSG00000268658_32 (sequence is synthesized)
cattggattgataatctcacaacttagaagggcccctccaaactcttgaaattgtaaacccataggagattttaaggtaaagctaaccaggaaagtttgtcctcaaaagcagatggccgt

SEQ ID NO: 1036041 - DNA, 120 bp, Artificial Sequence
  ENSG00000268658_33 (sequence is synthesized)
ctccatgtagatagcttttttcacaagatcaaaaatcaagacatctcgttatcatgacactcttagttcacagtttgtttatggttctacaaaccacagaaattttaaaaagtggtctct

SEQ ID NO: 1036042 - DNA, 120 bp, Artificial Sequence
  ENSG00000268658_34 (sequence is synthesized)
tgtgtgcactcatgggggtatacttatatgtagagaattttgcagccaacattatgtatgaggaaacttattccttgaaaggtaaaagaagaagggccaatgtaggtgagaagttttaat

SEQ ID NO: 1036043 - DNA, 120 bp, Artificial Sequence
  ENSG00000268658_35 (sequence is synthesized)
gaaacatttgttttctcacaatatcaaaaacagaatattggtccactgctcttaacctatttcataagttaaaaagaacttattcagaataggttaaagagcattgccaggaggccatta

SEQ ID NO: 1036044 - DNA, 120 bp, Artificial Sequence
  ENSG00000268658_36 (sequence is synthesized)
ctcttctgaatgggtatcactgtttagagtaaatgaggcaatggttacaaatttatccctctcaatagggctctatagcagattataccataaaaactatgcttacacaatagactttaa

SEQ ID NO: 1036045 - DNA, 120 bp, Artificial Sequence
  ENSG00000268658_37 (sequence is synthesized)
gttttctcacaaagttatgctaaatataatttcttttgattacttactggataaatagatatctgtgcagttgctaatagttgcccatggagaactacagccggtattacagagatgcag

SEQ ID NO: 1036046 - DNA, 120 bp, Artificial Sequence
  ENSG00000268658_38 (sequence is synthesized)
ttgtagatgattcatgaacaggctgattagatgaaatgagtagatcatttatctagctaactatttgatctatttaactttaattggttgttcatggggaccctggctaaaaagcatgct

SEQ ID NO: 1036047 - DNA, 120 bp, Artificial Sequence
  ENSG00000268658_39 (sequence is synthesized)
tcaaactcttggtattatcctcctgatagtcaaaatggtaatcttcctactgcactgtattctctcaaaagatgtaaacgtttgaatgtagtcatctgtagaatgtcaaatggtctctct

SEQ ID NO: 1036048 - DNA, 120 bp, Artificial Sequence
  ENSG00000268658_40 (sequence is synthesized)
ttaactggaatgacagaaactcaaagacatatgtgactatgaagacagcacaacctatgaatgacatgctaaggacaaaaaacaaaaataatggaaactgagagtggcactaaagccccg

SEQ ID NO: 1036049 - DNA, 120 bp, Artificial Sequence
  ENSG00000268658_41 (sequence is synthesized)
agttttggttacactgtgacctatgtaagaacttaaccaaacggggaattttttaaagaaaactattggaggccataattctggactgagcttatgcactaggtccaaacaaaccaaacc

SEQ ID NO: 1036050 - DNA, 120 bp, Artificial Sequence
  ENSG00000268658_42 (sequence is synthesized)
aaaatgagtcactcatgctggatgtgacataattaaactaaaaatttaaggcaacaggtagattctaaaactggccaggttttgtttttcttctctaaatagcagatttcaacacaagga

SEQ ID NO: 1036051 - DNA, 120 bp, Artificial Sequence
  ENSG00000268658_43 (sequence is synthesized)
ggtcccctgtactctaacactttaaaaaacaaataaaaataatttcaaaataataagctgaagtttttatttccactttacaaacccacagttctgctgtttcacagtgagattcgagtc

SEQ ID NO: 1036052 - DNA, 120 bp, Artificial Sequence
  ENSG00000268658_44 (sequence is synthesized)
taaataagtacatttttgatggtgacaaagtgatattaatgtctaaagttttggtctcaaacttgagaagatgacaaaagggagaaattgttaaattagttgtagcctaaagcttccctc

SEQ ID NO: 1036053 - DNA, 120 bp, Artificial Sequence
  ENSG00000268658_45 (sequence is synthesized)
ttatgtttaattttggctaataggatttgttttttgttttttgtttttttacatagtaaacttaatgttcaaatgggacatatcttaagctgtaataaatctggctgtttctgtacctca

SEQ ID NO: 1036054 - DNA, 120 bp, Artificial Sequence
  ENSG00000268654_0 (sequence is synthesized)
gcaaaagggataaaactggcaattcgcaagaaaatccaaacggctggccgacctgcgaaggaaacatcacgacctgtttgcataaagaaatgcaaacctgaaacaccgggcacgtgcggt

SEQ ID NO: 1036055 - DNA, 120 bp, Artificial Sequence
  ENSG00000268654_1 (sequence is synthesized)
ttaggggagcgggcagtctcacacactactgagttgtttcccagcagccgtcaatacagaccttccactgcgtaagcccactgcattgccatttaataaaacagcaagaaaatgagagag

SEQ ID NO: 1036056 - DNA, 120 bp, Artificial Sequence
  ENSG00000268654_2 (sequence is synthesized)
aaaaataatgaggtagaattgtatgggattattaaggattgaattctcagtagatttagtgaaatatacaagttactgaagtttgtagaaacgaactggtaagtgttttctcatttattt

SEQ ID NO: 1036057 - DNA, 120 bp, Artificial Sequence
  ENSG00000268654_3 (sequence is synthesized)
gttttttaaggataaacccaaatataggtaaaactgttggaaaggtaggcaagaaattgttgatgagttacttctagggacaaggaatgtggggtggaagagggatttttcccttctgcc

SEQ ID NO: 1036058 - DNA, 120 bp, Artificial Sequence
  ENSG00000268654_4 (sequence is synthesized)
tggtccaactattccactctcaaggaactaaaaaagcaaaggaaatacagggatatacagaagattctatacagggatattcacggagcatcatttttatcaccaaaaatgtgctccaca

SEQ ID NO: 1036059 - DNA, 120 bp, Artificial Sequence
  ENSG00000268654_5 (sequence is synthesized)
gaaaagaattaaactgtattctggtaaatttacacagcgcgattttaactgactaataaaaatgctgtatgattttaactttaaaggaaaaaatctgtaagatgtggttaattaccaaaa

SEQ ID NO: 1036060 - DNA, 120 bp, Artificial Sequence
  ENSG00000268654_6 (sequence is synthesized)
ggtgtttacctaaggagcacacagactttaataccccaaattaaactttatattatactcaaggagttatcagtggttgcttgctacactgagaagctgctttatgtgttttagactccc

SEQ ID NO: 1036061 - DNA, 120 bp, Artificial Sequence
  ENSG00000268654_7 (sequence is synthesized)
tagaccatcaacagtctctttttgcccagcagtgccacataaacataatatacgaatgaaaacactgtgcttcttatgaaaatacacgttcaaaacaaattccccagcaggaatattgaa

SEQ ID NO: 1036062 - DNA, 120 bp, Artificial Sequence
  ENSG00000268654_8 (sequence is synthesized)
gtcagggagtggccgtgagggaccccaaagccaggtctggaaaaggggggtgggttgggtggtgggggtgcagcccccaaagaaatgggggtcgaaatggaggaaaccccactgagatgc

SEQ ID NO: 1036063 - DNA, 120 bp, Artificial Sequence
  ENSG00000268654_9 (sequence is synthesized)
tcaaatgtaaaaccgctgaagaataaagggacaaatgtacacatctgtctaaatgaaaaaaatgaaaatcctggccgcaaaaacacatacattaacgtctaaagacctgcagggaagaca

SEQ ID NO: 1036064 - DNA, 120 bp, Artificial Sequence
  ENSG00000268654_10 (sequence is synthesized)
ttttatgtcaggagagtccaaatccagtacctgtttgccacaatgagcctgggacctcaacatgcatggagtgcttccggacctcattacccaagagcagtcagatttttaatttcctct

SEQ ID NO: 1036065 - DNA, 120 bp, Artificial Sequence
  ENSG00000268654_11 (sequence is synthesized)
gcctttttcaagatcattagttcagaaggtttatgttttcaattccacatatccttgcatttttctttcaagttttgacccatatggatatcttaaatattcctattattgcaagtttat

SEQ ID NO: 1036066 - DNA, 120 bp, Artificial Sequence
  ENSG00000268654_12 (sequence is synthesized)
attaaaaggaggttaaattgtgaactcacaaactcatagcatcatagcaccatctcaatcaaaagtattatcttctgtgaactacaacagttttcacttctttcgcaagtgtggagtgac

SEQ ID NO: 1036067 - DNA, 120 bp, Artificial Sequence
  ENSG00000268654_13 (sequence is synthesized)
gtttgcctgaggctgtatgacctgtgatatcatgacaaattgaaggccaaagcagatgcgaatccagctgttttctattaagtcaaatgccaaggagatttacaaagatgtaaaataatg

SEQ ID NO: 1036068 - DNA, 120 bp, Artificial Sequence
  ENSG00000268654_14 (sequence is synthesized)
cgcctcttctcaataacctttggttttgaaaattgttatttttcataaaaaatgttgcttccattaacctgtaataggtttactaccattattttaaataaaatacacatttcaaatggc

SEQ ID NO: 1036069 - DNA, 120 bp, Artificial Sequence
  ENSG00000268650_0 (sequence is synthesized)
ggtcaagagagcctcccctccccaccattcccagaaaaggaggaaggggctgatggactctctgggaaccccctcccctccctgcgccccgtcatcaagaagaaaattcgaagaaaaggt

SEQ ID NO: 1036070 - DNA, 120 bp, Artificial Sequence
  ENSG00000268650_1 (sequence is synthesized)
ttagcagggacagagaagcgacctgtcccggaaaccccttaaagcctgcgagtcagttcaaactggaatctgtcaggcccgtcccgctcggggttggtgaggtctgagggacttcggggg

SEQ ID NO: 1036071 - DNA, 120 bp, Artificial Sequence
  ENSG00000268650_2 (sequence is synthesized)
atcttgctctggtaccactctcgattgtcctccagcgtgtccagcaggtcctgtgcatctgggtggaccagtgtctaccggttcagcccagtcccctgccaacctgggacttctccactg

SEQ ID NO: 1036072 - DNA, 120 bp, Artificial Sequence
  ENSG00000268650_3 (sequence is synthesized)
cactgaggccgtatgcttgtcacacatgggactgatgtccaggcccgactcacgctcgcggtctccctgctggaagaactcggccatgatgcgagacagggtcttgctgtcacccaggct

SEQ ID NO: 1036073 - DNA, 88 bp, Artificial Sequence
  ENSG00000268650_4 (sequence is synthesized)
tcccaaccaaagcagtgactcaacaaagctcacccaggaaggtccgggagatgtactcggacacctggttcccggagcggctggtttc

SEQ ID NO: 1036074 - DNA, 120 bp, Artificial Sequence
  ENSG00000268650_5 (sequence is synthesized)
agatgtactcggacacctggttcccggagcggctggtttcggacaggtgggtcaactcccggttcaggatccgcttgaactggggcggagagaaggtgaagaccgtgatgatggggcacc

SEQ ID NO: 1036075 - DNA, 120 bp, Artificial Sequence
  ENSG00000268650_6 (sequence is synthesized)
gtgggccgaggcaggtgagctcagcgatctgccccacctcaccttgttggaggccatctcccccaccgagtgccgggtctgcagcgtctccaactgatccaggcaccagtccagctcgtc

SEQ ID NO: 1036076 - DNA, 120 bp, Artificial Sequence
  ENSG00000268650_7 (sequence is synthesized)
ttaaagcctgcgggtaacatgtttgctccctcctcccccactcggactatagaagtatcaccaatccactgcagagaaattgggaaaattcagaaaaacaaaaaataaaaagaaatccac

SEQ ID NO: 1036077 - DNA, 120 bp, Artificial Sequence
  ENSG00000268650_8 (sequence is synthesized)
gagggaggcagaggggagggatggatactgaggcttccggaggcggggatcgaaccctaggcttgagcatggtgctgcccagtccgctcggaggcccgaccagcaggacgagctcttccc

SEQ ID NO: 1036078 - DNA, 120 bp, Artificial Sequence
  ENSG00000268650_9 (sequence is synthesized)
ggcgaggtgcgggaaggaggaacacgtaggggacccagtatggagttctgcggacagagaaagcagggggctcctacatccagagacaccaaagacagaaaataaagcgacttaaagcaa

SEQ ID NO: 1036079 - DNA, 120 bp, Artificial Sequence
  ENSG00000233183_0 (sequence is synthesized)
ggcgaggtggcccagggagagaagagggatgaggcgcagagggagtgggaggcccgtctgactgtcatgggcataaagcatccccaaagaacattcaagtctgagcctcaaggagcctct

SEQ ID NO: 1036080 - DNA, 120 bp, Artificial Sequence
  ENSG00000233183_1 (sequence is synthesized)
gcgactcggtgtctagatccaggaaatggagaatgagccgtgactttggatgcttcactcttgtccatcaggctcggaattggtgagcatctcccacattaccgtctccaacggaacaag

SEQ ID NO: 1036081 - DNA, 120 bp, Artificial Sequence
  ENSG00000233183_2 (sequence is synthesized)
gtgccccattggacatttcctctgcatggaccagccattctccaaatctgcccccatgtcaccccagctccccatcgcagtcacttctcactccttgtcccctgtccccctgagtgacag

SEQ ID NO: 1036082 - DNA, 120 bp, Artificial Sequence
  ENSG00000233183_3 (sequence is synthesized)
gacttttgccagttaggtcctgtccctgtttctgatcttgggtccattccccatggtccctttcttgcttgtgccttgggatctcaggcctgttgaagtaggaggcaggactcaacttca

SEQ ID NO: 1036083 - DNA, 120 bp, Artificial Sequence
  ENSG00000233183_4 (sequence is synthesized)
gaagaggcaccaaaagcacctctctctccataagacatgcccaccagtgccatgacagtttaccattgctatggcaatgcccagaagttctcaccccttttccagacatttctgcataat

SEQ ID NO: 1036084 - DNA, 120 bp, Artificial Sequence
  ENSG00000233183_5 (sequence is synthesized)
ctacccctcaattggcatgtgatcaaaagtgggtgtcaaaatgactgtggaactgtccctgagctgctactcttgacatgctggttacagggtagcccggctctgcagggacagtcacgg

SEQ ID NO: 1036085 - DNA, 120 bp, Artificial Sequence
  ENSG00000233183_6 (sequence is synthesized)
agctgaaaaactgctgcctaatgaagctgttttcttctaccaccggctcaccctcaaattatttcctgagcgaactcaagaaccttcctgggctaagccccaattttggggctcgcctgc

SEQ ID NO: 1036086 - DNA, 120 bp, Artificial Sequence
  ENSG00000233183_7 (sequence is synthesized)
ccctgcatcacagcttcctcttctgttcacagctgcaaccgcctactcaaccttctgcggttcctctccctgcccctccacagtggctgctgatgggagctctggctccctgcgttttca

SEQ ID NO: 1036087 - DNA, 120 bp, Artificial Sequence
  ENSG00000233183_8 (sequence is synthesized)
ctatctcccagtcaaatgcagagtccctgtgcaatttaaatgcttctcagctaagaacagagaaggggatagcataaggatattcaaaagattcaagaaatctcaaaagtgatcacaaaa

SEQ ID NO: 1036088 - DNA, 120 bp, Artificial Sequence
  ENSG00000233183_9 (sequence is synthesized)
gtagagggccaccaggtccctccccacacgcccgctgtccacgcgctgcggccttggagtaactgctgttcttaaaggctgcctccgtcctgccgcgcggcctttagagggttggagctg

SEQ ID NO: 1036089 - DNA, 120 bp, Artificial Sequence
  ENSG00000233183_10 (sequence is synthesized)
gcagaaccgtaactccctctctgagggtgaatacgggccttgattgccagaagggccctcggccggggacgcgggatgatgcggggccgggagatgctttcctggaggctgagaaacctg

SEQ ID NO: 1036090 - DNA, 120 bp, Artificial Sequence
  ENSG00000233183_11 (sequence is synthesized)
cttggtcccagagggagaggagcagtttcctgcggagttccagtgtcttcagcagatcaccattgctttcaactttggaaggagcaggccttctggggacacccaagacattcctgggca

SEQ ID NO: 1036091 - DNA, 120 bp, Artificial Sequence
  ENSG00000233183_12 (sequence is synthesized)
gagttccaaaggaagctggagatgacctagagcctttggcttctccgcctaacatccgcttgggcagggaaggggagagaaggagaacacgaagtgaggcatgggaatgagacaatggtg

SEQ ID NO: 1036092 - DNA, 120 bp, Artificial Sequence
  ENSG00000233183_13 (sequence is synthesized)
atagaatatgaagagaaatgcagcccacccactccttcggggagaggagagtgctggtggagaaactcggggcctgaatttttcttgaggaatctaagaagatcctttggcttcaaggca

SEQ ID NO: 1036093 - DNA, 120 bp, Artificial Sequence
  ENSG00000233183_14 (sequence is synthesized)
gatggaacctggatggtttaggggaggaatgggacttgacagcggcgctcaaagcttctgggcagggctttgatctaattgacagaagtgaaaatagtagaccttggctcctctctgctc

SEQ ID NO: 1036094 - DNA, 120 bp, Artificial Sequence
  ENSG00000233183_15 (sequence is synthesized)
ccatctctctcctgctcaaagtccttggtcaggcactgttcgttccttccagcccaaagacttgggaaagtaatttctgcagacccctccagagctgtttctgaccccacagacaatctg

SEQ ID NO: 1036095 - DNA, 120 bp, Artificial Sequence
  ENSG00000233183_16 (sequence is synthesized)
gtgggtgaagaaacctgaattagcggagactttccacaatagccctcaatcacttctcttcagctcagttccagaccctttacaaagtgcgtgaaggcaccattccccaaagcgcagaaa

SEQ ID NO: 1036096 - DNA, 120 bp, Artificial Sequence
  ENSG00000233183_17 (sequence is synthesized)
gttacctgaaatcttgttggtcctgaatattgtatgtggagtcccaagctgcaagaagtcagtggggctggacgggagccaaaatcagagactcaagcagcacagctgggccccattgaa

SEQ ID NO: 1036097 - DNA, 120 bp, Artificial Sequence
  ENSG00000233183_18 (sequence is synthesized)
agtgagaccagctgtcccagttggaagctggggtatagagctggggatgggtggaggcagtgacaggctccatgtattggtcattcagactccccagtagcctcaggacccaactcccac

SEQ ID NO: 1036098 - DNA, 120 bp, Artificial Sequence
  ENSG00000233183_19 (sequence is synthesized)
aggtcagagaagacctggtggagggccttatgcaaacctcagtgggtgatgcaggagggagttttctgagcaggaatgccaacaaaaaaggccttcaaaggaaggccctgcttgggacaa

SEQ ID NO: 1036099 - DNA, 120 bp, Artificial Sequence
  ENSG00000233183_20 (sequence is synthesized)
gttgatagatgaagatgggaaggagatggtcatgtggcatgagagggctccaagaggaagaggaagcatcaccaagaggaattagaatggtcaggagcgggaggaaagaagccagtaagg

SEQ ID NO: 1036100 - DNA, 120 bp, Artificial Sequence
  ENSG00000233183_21 (sequence is synthesized)
cacagtcctggaggccttgcctgagggaagatagaaaagagaagagccttactgtaaatttcagaagacttggaagaggagccaccctcagggaaagacaggttttggataaggggaaga

SEQ ID NO: 1036101 - DNA, 120 bp, Artificial Sequence
  ENSG00000233183_22 (sequence is synthesized)
gacgccaggaagcgagtgtctgcggcttcctcatgcaacgtggcctgccttcccaatcccctctgggctcacaggctgctacccagccaaggggaagggcagggtaaagagcaggggaca

SEQ ID NO: 1036102 - DNA, 120 bp, Artificial Sequence
  ENSG00000233183_23 (sequence is synthesized)
tctgtcctcagatatcacaaggctctatccccaggattatggcactctcctttgtgaccagctctggattttggccctcgcccactgaatgcaagtacagagaaacaagaaggctaaaga

SEQ ID NO: 1036103 - DNA, 120 bp, Artificial Sequence
  ENSG00000233183_24 (sequence is synthesized)
ggaacgggtggagcagatacagtgccaagagacagggttccgtgaggagccagacatggtgaacacagaggagcagaagccccaggacatttctgagggaagagcatccccaaagaacat

SEQ ID NO: 1036104 - DNA, 120 bp, Artificial Sequence
  ENSG00000233183_25 (sequence is synthesized)
cagagagcatgggtgacaatgtcaaatgccacctaaatattatgtgctggaggcctgagcagtgtcctgtggatttagcaaggctgctggtgagctcagcacaagctgctgctgtggggt

SEQ ID NO: 1036105 - DNA, 120 bp, Artificial Sequence
  ENSG00000233183_26 (sequence is synthesized)
gagtggagggcgcattggtgccaccaggagggaaggaaggagtggcccactagcagccttagtggaagatgccctagagaggagaggggttgaggatttctggatcgagggagaagactg

SEQ ID NO: 1036106 - DNA, 120 bp, Artificial Sequence
  ENSG00000233183_27 (sequence is synthesized)
cagggctcaaatcctggagaggctggggaggagggtccagggccagaccttgggagagaggaggccctgtcaactggcacatgggaaggtcaggaggcaggcgaaggccgctgggctctg

SEQ ID NO: 1036107 - DNA, 120 bp, Artificial Sequence
  ENSG00000233183_28 (sequence is synthesized)
ggccctactgtcctcagtgaaatagctgctgaggatattttctgagtgtctggctagtggttgcaaaaagcccagaggaggttgcaagaggtgaggcagctgatcaaagcaagtggaagg

SEQ ID NO: 1036108 - DNA, 120 bp, Artificial Sequence
  ENSG00000233183_29 (sequence is synthesized)
gtaggccccgaggcccagctggagagggaggcagaggttcctggcgctgtggctgtgcagaagcagctttcctgcagcctgagtgcctgtggagctggggtgggaaggcagagcggacac

SEQ ID NO: 1036109 - DNA, 120 bp, Artificial Sequence
  ENSG00000233183_30 (sequence is synthesized)
tagcctgggttggggattgtaaggaggctgagctgagctgtagggacaaaggcccagcgatgtggatgctggtgagagtagctccaagaagtgaaagaaggaagggaagcctggatgttg

SEQ ID NO: 1036110 - DNA, 120 bp, Artificial Sequence
  ENSG00000233183_31 (sequence is synthesized)
aggcctggtcaggggcccagggtaaagctagttcatactgtcttttctgggtgaatagttcgagctcactgagactacctgggaattgagaagatgcacaggaaaagtactttataccct

SEQ ID NO: 1036111 - DNA, 120 bp, Artificial Sequence
  ENSG00000233183_32 (sequence is synthesized)
cggatgtctactctctatcaaacattgcaagagttttgtaaggacagggtggcctggctccacactcactggcaggtgctgccctcaaggggctgctcctcctttcaggtagaagagggt

SEQ ID NO: 1036112 - DNA, 120 bp, Artificial Sequence
  ENSG00000233183_33 (sequence is synthesized)
ttctcaggttctgctggtgaaccaaggtcgctgagtaccatcttcattggcactgtagcccgtttgacccaaggctagaatccagcccgggcggggacaatgctttctggctggcaccca

SEQ ID NO: 1036113 - DNA, 120 bp, Artificial Sequence
  ENSG00000233183_34 (sequence is synthesized)
agcacaatttgaaacccaacattgatttgtgtgattatttgattaatgtctccctcgcctccaagacagacctcacctaattgagctgaacatctttcccggcctctggcacttaatagc

SEQ ID NO: 1036114 - DNA, 120 bp, Artificial Sequence
  ENSG00000233183_35 (sequence is synthesized)
ttggagctttggtatgaaccatgcccggtaacagggactgtgcagaggaagaatcccagctagcctatggatgaagagctcagtgaaaggagaggcagacaggaccgatggctgccacct

SEQ ID NO: 1036115 - DNA, 120 bp, Artificial Sequence
  ENSG00000233183_36 (sequence is synthesized)
tggaccatgatgtgggagccacgttatgagaatggcagagcaaccagatagcgttggcaccaccaatcccagccctggacttcccatggtaaggagagagagaaacgtcttatgggagcc

SEQ ID NO: 1036116 - DNA, 120 bp, Artificial Sequence
  ENSG00000233183_37 (sequence is synthesized)
accatcattctcgtgcagcaaacctgatcctaacacacagcaccaagaccctgcctcctcctctcccttccctcccagtgccgacgaagacctactatgcagagaggatagaggagggac

SEQ ID NO: 1036117 - DNA, 120 bp, Artificial Sequence
  ENSG00000233183_38 (sequence is synthesized)
acagaggccactggaggtgatttgaaaaggacgaggacacctgggaacaaggcaatgaaggtggctaggacagaggcatgaggacagagcctggggaggactcattagtgcagggctgac

SEQ ID NO: 1036118 - DNA, 120 bp, Artificial Sequence
  ENSG00000233183_39 (sequence is synthesized)
aggcagagccttcccaggaactcagccagcagaacctgacagccatgatttgggcctgcccactgccccaggggccctccaacccagtcctccccagagggctgagggccctccctcccc

SEQ ID NO: 1036119 - DNA, 120 bp, Artificial Sequence
  ENSG00000233183_40 (sequence is synthesized)
atactcagcaatactccagagcctacttccccatggaggcccaatccccttcccggacgaggcagctggtggtgtgtgggtgctggtctggtgagagagggactccttggagactgaggc

SEQ ID NO: 1036120 - DNA, 120 bp, Artificial Sequence
  ENSG00000233183_41 (sequence is synthesized)
catgggggagggagtgtctgtccatacctgcaggtttgtcccaaatttagaccccaggtctggaggtgaacacagccccacctgattcctgggaagccacgctatctatgcagctcgctt

SEQ ID NO: 1036121 - DNA, 120 bp, Artificial Sequence
  ENSG00000233183_42 (sequence is synthesized)
cttagaagcgggcttcctctccatccccatcgaactcagtgcagtcaatgcctactgagctcctactgagtacactacatggatgtgggttcaggtgctaaggaaataaaccaggcccca

SEQ ID NO: 1036122 - DNA, 120 bp, Artificial Sequence
  ENSG00000233183_43 (sequence is synthesized)
cactgcagtccccagggcgcagtgccctgacaggttgccccaagactgtggtgtgctgggaaatgttgaacacccagctctctgaaggagaacacctggtttgtggcagttgcaggtttg

SEQ ID NO: 1036123 - DNA, 120 bp, Artificial Sequence
  ENSG00000233183_44 (sequence is synthesized)
tagtgtttcgtgatctaaatcatccaccctggccaattccaagttgtaaacacagagtccttgaagtcaggaaggccctggcccggctcccaggcccagctccagcaccccactgccagg

SEQ ID NO: 1036124 - DNA, 120 bp, Artificial Sequence
  ENSG00000233183_45 (sequence is synthesized)
ggctgctcgcctccggtcccaggtcctcaccccaccaccagcaggtctcggccctgtgcctcataggttcccagccttcccctgcttgggccctgggtttggctctggggctgacagccc

SEQ ID NO: 1036125 - DNA, 120 bp, Artificial Sequence
  ENSG00000233183_46 (sequence is synthesized)
gtgccttgactgtggcatgtgggctgtggctgccaggtcaggaagaatcagtggacagttggtcacaagcaccctggtcccaaatcttgaaatgctcacgttcttcaacttcttcaacta

SEQ ID NO: 1036126 - DNA, 120 bp, Artificial Sequence
  ENSG00000233183_47 (sequence is synthesized)
ctaccccacccctccaggccttttcctctctctgacagcttcacttcaccccagtgtctcctcctcctcctcagaagtggccgttccccagcatttggagcccaggacccctcccagccc

SEQ ID NO: 1036127 - DNA, 120 bp, Artificial Sequence
  ENSG00000233183_48 (sequence is synthesized)
ccttgctcccctactgccaccccctgtctgtcccggaggaggcctcatagacacttgctgcgtgccactccaaggaggctgtggtgctcctgccaactctccagtggctgccacaactgc

SEQ ID NO: 1036128 - DNA, 120 bp, Artificial Sequence
  ENSG00000233183_49 (sequence is synthesized)
tgtcttcaggaggaggagggatggccccctcagcctccctgcctctgctatctcagccccagcgtcccggcatcatctgctccacctccaggcaagtcagagccaggcttgccatctgcc

SEQ ID NO: 1036129 - DNA, 120 bp, Artificial Sequence
  ENSG00000233183_50 (sequence is synthesized)
tggcagcctggggcactgtgcctttatggctcccgggtaggacgtggacctgggccccagcccctgggcgccaaggtgccaaccctgcaggggagttgcttaatgaccttcatgagcagt

SEQ ID NO: 1036130 - DNA, 120 bp, Artificial Sequence
  ENSG00000233183_51 (sequence is synthesized)
aattacaccccagggccctctcttaataaccacgtattctccctgtcaatgtgccttaattgaaaatgagtaggcgatacaagttgctgtgaagttggctggcaagcccttaacgtgata

SEQ ID NO: 1036131 - DNA, 120 bp, Artificial Sequence
  ENSG00000233183_52 (sequence is synthesized)
ttaattgtagtaattagtagtcactttgtgttggagtcatctataaatagggggtccattagtttagcaaaagagcatgatttaaaatgcaaataaaagcccaattagacagataaatcg

SEQ ID NO: 1036132 - DNA, 120 bp, Artificial Sequence
  ENSG00000233183_53 (sequence is synthesized)
cttgtcttttccagcaaattatcatcttccagaaggacggcagccactttggggctgcactgctcagttcaggggctctgaactctttataccaccggagtggcccttttgatacactgt

SEQ ID NO: 1036133 - DNA, 120 bp, Artificial Sequence
  ENSG00000233183_54 (sequence is synthesized)
ccctttaaacaggtttgcaccaagcttcctcaggaggctgtcactcttagagcagtccctatagactcttattttattggcacaactggtggtcagggccccaagtagctcctccccctg

SEQ ID NO: 1036134 - DNA, 120 bp, Artificial Sequence
  ENSG00000233183_55 (sequence is synthesized)
tatgctgattggtcccctttggtgacacagaagcacattttaaaggaatagtagcacagtgcgtaaggcactaggagaatgggtggggggtaggaggggtctactctttgaatttggctc

SEQ ID NO: 1036135 - DNA, 120 bp, Artificial Sequence
  ENSG00000233183_56 (sequence is synthesized)
tgcacggtccagacagagtgaaccaccaatgctatgtgttgtcctgtgacccaaaaaagttaaaaataaactcacaccattgttgtggggctggacaacttactttccgcttctttctct

SEQ ID NO: 1036136 - DNA, 120 bp, Artificial Sequence
  ENSG00000233183_57 (sequence is synthesized)
tgttgtggggctggacaacttactttccgcttctttctctcttctacaaaagctacttacggtggttgcagagatttctctctctctctctctctcgcacacacacacacacacacacac

SEQ ID NO: 1036137 - DNA, 120 bp, Artificial Sequence
  ENSG00000233183_58 (sequence is synthesized)
aacatttcaggtgcaaacaactggaagtagaatgtggcagctagggaggtgttaagagggcgcagcttcaaggccagaggggagatttctagttcaaccttcctttgactagagcttcac

SEQ ID NO: 1036138 - DNA, 120 bp, Artificial Sequence
  ENSG00000233183_59 (sequence is synthesized)
cagttacccaacactttctcccaggcctgtgtttcaaacttctcaattaaagaggctgttgagatgtgcgtggggacatgggtgtgagttcttccctctctggcttgttgagcttctgga

SEQ ID NO: 1036139 - DNA, 120 bp, Artificial Sequence
  ENSG00000233183_60 (sequence is synthesized)
gaactggtgtcctgggctcagctcggagcccttcctgtcccctccttcggcctgccacaccccctccccacgagcccttcactcctttgtggccaactgaggctacccctcagacagcat

SEQ ID NO: 1036140 - DNA, 120 bp, Artificial Sequence
  ENSG00000233183_61 (sequence is synthesized)
ttgcattttaataagacccaaagtcaaaagataaaacagctattcccaaacacagggaacactaacaattgtctcttccagcaggagtttcatctttgtccaaaaaatgaggagaacaca

SEQ ID NO: 1036141 - DNA, 120 bp, Artificial Sequence
  ENSG00000233183_62 (sequence is synthesized)
ggaaacttgaaagtattatccttgattatattatccttttatgattcaatgtttgcagcaggtggtagtacttgctatttttaatgtcctatttgacaaaataaaatattggcaaccctg

SEQ ID NO: 1036142 - DNA, 120 bp, Artificial Sequence
  ENSG00000233183_63 (sequence is synthesized)
agactgtcaaatactggccgaggccaagggagactctgtcatgtctgaggccataggcatgttttcttctggacttcagcgagaggcagagcccccagccccatgcagtcacctcagctc

SEQ ID NO: 1036143 - DNA, 120 bp, Artificial Sequence
  ENSG00000233183_64 (sequence is synthesized)
gtctgacttcaaaagttttcagaaatgccacttttgtaagcatcagggattgggttttctgagatgcaaaacatctttgttaaggggttaaagcatccttaagctgtttaggtttctggg

SEQ ID NO: 1036144 - DNA, 120 bp, Artificial Sequence
  ENSG00000233183_65 (sequence is synthesized)
gatacatagacttaggaagttagagcaggtgaagttgagggggatgggaactaagaattagctcaaaatagtcaccaatgcagaaacccaggcacttgggaccctgacagtggggaaggc

SEQ ID NO: 1036145 - DNA, 120 bp, Artificial Sequence
  ENSG00000233183_66 (sequence is synthesized)
agaggagtaactgtggggacttgggcaccctattagcagaatggggtaacagagaaggcaagaattgcttcccaggagactgggctgggaacaggaaggggactaaaatgctgtccctgg

SEQ ID NO: 1036146 - DNA, 120 bp, Artificial Sequence
  ENSG00000233183_67 (sequence is synthesized)
ctgaagagtgtggaggtatagaggagctggtagcagggctctgaatccatacacgagagcaaggaccagtggtttcagggtgggatagggctttgatgtcttcatggacttagggtaata

SEQ ID NO: 1036147 - DNA, 120 bp, Artificial Sequence
  ENSG00000233183_68 (sequence is synthesized)
ttcaccaccatggtgaattccacaaaggagaattcacacaaaggtctcggaccagccagtttccatgtgaaaaagccatctgggagcaagggaacaaacccaggaatacaactgtattgg

SEQ ID NO: 1036148 - DNA, 90 bp, Artificial Sequence
  ENSG00000233183_69 (sequence is synthesized)
tgggagcaagggaacaaacccaggaatacaactgtattgggggaaattcagccagacatagggcaaaattcacccccagtaagtgtcggc

SEQ ID NO: 1036149 - DNA, 120 bp, Artificial Sequence
  ENSG00000233183_70 (sequence is synthesized)
gcagaacagaaaagaaacagtgggattagggctccaaaaaccctccagaactatcagagaattctggacagtggtccctgatggcatctgtgttaggggctgggaacaagaacccctctc

SEQ ID NO: 1036150 - DNA, 120 bp, Artificial Sequence
  ENSG00000233183_71 (sequence is synthesized)
aaaatggaacttgggagtcagctgtctgaaggcatcacgccttgtatgacccttgcaagcccaagctacctacctgttcctgtacagaaaccctccctggcctcatcctgtgggtggcaa

SEQ ID NO: 1036151 - DNA, 120 bp, Artificial Sequence
  ENSG00000233183_72 (sequence is synthesized)
acccacatattcagttattgctgttttcttccttccttggatacttgtctccaataaatatttacagtgggacccacagatgaaccttagccccaaacataagatagctatgtcaaaagg

SEQ ID NO: 1036152 - DNA, 120 bp, Artificial Sequence
  ENSG00000233183_73 (sequence is synthesized)
ggtcctgggacagtgataccccaggggggtcaggcaaaaacagaagcaagcctcttggccacctcctcccttagccttctgcgtaaagatggacttgcaggaggagaacacaccctgcaa

SEQ ID NO: 1036153 - DNA, 120 bp, Artificial Sequence
  ENSG00000233183_74 (sequence is synthesized)
gtcctgcctcgcggtctagggaaggggtctcggccacctcctcccgcagccttccaaatcaagatggactcgcaggagactacaccctgcgtctgcagaacctcagaatacagaaccacc

SEQ ID NO: 1036154 - DNA, 120 bp, Artificial Sequence
  ENSG00000233183_75 (sequence is synthesized)
aggggttcctggcccatggccctgggaggattgctgttggggagatgggaaggaatctagggaggccgaggcccgcaacaaccatccccgaggacctcagagcacagtcttcccccctcg

SEQ ID NO: 1036155 - DNA, 120 bp, Artificial Sequence
  ENSG00000233183_76 (sequence is synthesized)
cacaggctttggaggcacacagaggaccacagaggcagagcctcatttcccgctggatcgtcctctgcccggtgctagggattccatggtgtcattcaagagtgctgcgacattttttat

SEQ ID NO: 1036156 - DNA, 120 bp, Artificial Sequence
  ENSG00000233183_77 (sequence is synthesized)
tctttggtatctaggaatctgcgacttcccacttttctttctcattctctgtccactctttaaggcctggctggagcccttccccttcacgaaaccccttttgtccactccagcccacac

SEQ ID NO: 1036157 - DNA, 120 bp, Artificial Sequence
  ENSG00000233183_78 (sequence is synthesized)
agtctccccagtccactttttttgcagcccagattcatttagcctttattatgctcagtttaggcgtcactctgttttactctctaagagttccctaggcattctttttctttctagcaa

SEQ ID NO: 1036158 - DNA, 120 bp, Artificial Sequence
  ENSG00000233183_79 (sequence is synthesized)
gatgataaacttcttgaggacaagacgttctgccccaccacccccctcctgacctggggggataaatgaagggttttggtagcaatcagggaagctggcctacatgctacctgcctgcgt

SEQ ID NO: 1036159 - DNA, 120 bp, Artificial Sequence
  ENSG00000233183_80 (sequence is synthesized)
atgtaatggtggctgatggttcaatattaatggatactgaataagcctggcacctgctggagacagcgatgacatttgctctcacagcagatgacagggtgattgatggcaggcatctct

SEQ ID NO: 1036160 - DNA, 120 bp, Artificial Sequence
  ENSG00000233183_81 (sequence is synthesized)
gggtggaagcgatgagttctccaggggcgatgaaggggttagactgggtgcttagggccctcaagggacctcaagggaatgtagagaagcctcaggcaacccagggtcaggggtgagggg

SEQ ID NO: 1036161 - DNA, 120 bp, Artificial Sequence
  ENSG00000233183_82 (sequence is synthesized)
accaggaagagaaagtccgctcaggaagggtgtaggctcggacactgtaggaggcagatccaagaggcttcctaagtcagacctcttgtctaaattggatgggctgagagctttggagtc

SEQ ID NO: 1036162 - DNA, 120 bp, Artificial Sequence
  ENSG00000233183_83 (sequence is synthesized)
actgctttgcatacgagaccatggggacatagaatccgtcattatccctgccagctcagctcagaggtcagaactgaggagggaagtggtcaggtttagggtacagggagagaaggtagg

SEQ ID NO: 1036163 - DNA, 120 bp, Artificial Sequence
  ENSG00000233183_84 (sequence is synthesized)
acgtcccctccagggcctagagctggggaccacagccaggctctggcatgcctgaaaacagggcacatcgcaggtggtcggtaaagacacgtgggattgaactgaacaatgagggattaa

SEQ ID NO: 1036164 - DNA, 120 bp, Artificial Sequence
  ENSG00000233183_85 (sequence is synthesized)
tagattcttcttaaaattgtcttatggtttaaggagggaacagaacagagttggaagtaggggacaggaactcagatgtgattttagccagggcttggtttaagctgttgtgcttcttct

SEQ ID NO: 1036165 - DNA, 120 bp, Artificial Sequence
  ENSG00000233183_86 (sequence is synthesized)
cttgtgatactagtttgagccaagggcagcaggggctgctcctggtgagaggacgtgggcagggatcccatcagagacaagccaggcagacactgtccagagaggcctctcaggaggcca

SEQ ID NO: 1036166 - DNA, 120 bp, Artificial Sequence
  ENSG00000233183_87 (sequence is synthesized)
ggacagccagctgcttctccttaaggaggaggcctctgctccaccctccattcctcctcccctgggcctctctccctttctccctgtgagatcttctgctactccagccacaggaggtat

SEQ ID NO: 1036167 - DNA, 120 bp, Artificial Sequence
  ENSG00000233183_88 (sequence is synthesized)
agatccattcccagaacaaaaactgtctggctgctcctgaaacactttttctcctatgcactactggctcatcctcatgcctccagctcagcttagacatcccccttgaaaaggtcttct

SEQ ID NO: 1036168 - DNA, 120 bp, Artificial Sequence
  ENSG00000233183_89 (sequence is synthesized)
ctgagttcctgtggctcctgggcccatgcccaaggctgccctgtcacactggtccccgtattttcttcacagcacttatcattgtctgaatttatctcatccacctcttctctttgttgg

SEQ ID NO: 1036169 - DNA, 120 bp, Artificial Sequence
  ENSG00000233183_90 (sequence is synthesized)
gtatctctcttgcttccttagaagggaagctccatgcagggttgtggtcattctcgaccatgttgtgccccagcttctagaacagggcccacatagacagtggccagtgagtatttgttg

SEQ ID NO: 1036170 - DNA, 120 bp, Artificial Sequence
  ENSG00000233183_91 (sequence is synthesized)
aatggatgagtgggtggatgacagcacttgggaaggcaccaagtctcaagtggggtgggattggggtggggtcctagcaaacctccttgtctctcatccaggacagaatagagctgtcct

SEQ ID NO: 1036171 - DNA, 120 bp, Artificial Sequence
  ENSG00000233183_92 (sequence is synthesized)
gtgggggagctgctcactggggagagggcctgttgggccctggtagaaaatccattctgggcctgggccggccactgcttgccccctgacagatggtatgctaagcaatctgtgaaatgg

SEQ ID NO: 1036172 - DNA, 120 bp, Artificial Sequence
  ENSG00000233183_93 (sequence is synthesized)
gatgcaacacaagtttcatttgagcctgaacccccagaggcagggagaagaagaaccaaaaatgtgtagtcctgctcccctacccaggcacaggcctggtgccctcgagggccagacagt

SEQ ID NO: 1036173 - DNA, 120 bp, Artificial Sequence
  ENSG00000233183_94 (sequence is synthesized)
gcagaggggactctgagggtgggggagagagaggcgtggtccccggcctctgatggagtgggaagtgtggtgctgtgcacagtgaacctatggggtttactagacagtggcctgtctagc

SEQ ID NO: 1036174 - DNA, 120 bp, Artificial Sequence
  ENSG00000233183_95 (sequence is synthesized)
aatgggcagcagggagagagcagggtttccagacaggcctttagttaggtgcccaggcacaggcagggctgtcacacctgtctgccccggcccccgagcattttggggattttggatggt

SEQ ID NO: 1036175 - DNA, 120 bp, Artificial Sequence
  ENSG00000233183_96 (sequence is synthesized)
ggctcaccctgacctctttccagctttagcacgagagtcccagccccattttctttcctagctaactgtaccatcactgccacatcagggcccccaatacaataaggagttaaaggaaaa

SEQ ID NO: 1036176 - DNA, 120 bp, Artificial Sequence
  ENSG00000233183_97 (sequence is synthesized)
gaggctaccttgagatccccctctacccgccagcccacagggttcccccacctcagagttcaggaagtattggtaaatggaggcaggagtggggcagggatcctcgggggaagatcttaa

SEQ ID NO: 1036177 - DNA, 120 bp, Artificial Sequence
  ENSG00000233183_98 (sequence is synthesized)
gaacttcaccatggaattagctgatgacactggtgtctttcttctaaggggtgcctatcctttttctatgcttgctagggagcttgaatcttttctttttaagagagaaaatttctgggc

SEQ ID NO: 1036178 - DNA, 120 bp, Artificial Sequence
  ENSG00000233183_99 (sequence is synthesized)
ttgggaaagaggagcctcaagctgacactggtctgagtgggaaaatttggggctgaagtccttcccttgaaaatgtgtctgctgggcaatgctgagcaaaattccacaaaggagagaaag

SEQ ID NO: 1036179 - DNA, 120 bp, Artificial Sequence
  ENSG00000233183_100 (sequence is synthesized)
ggtggaggagggcagattgcccttcacctacctctgcgtcttctttgcctgcccagccttagctgggccccacaccactaatggaatttccatcctcatcccatagcatccccaaagaac

SEQ ID NO: 1036180 - DNA, 76 bp, Artificial Sequence
  ENSG00000233183_101 (sequence is synthesized)
gagccgtaaaaccagcaagtttttattcgtgattttcaaaaggggagggggagtgtatgaatagggtgtgggtcac

SEQ ID NO: 1036181 - DNA, 65 bp, Artificial Sequence
  ENSG00000233183_102 (sequence is synthesized)
ggggcttatttcatccctacagctttgaccataaaagacggccgccccccgaagcggccatttcg

SEQ ID NO: 1036182 - DNA, 63 bp, Artificial Sequence
  ENSG00000233183_103 (sequence is synthesized)
ggatgttccttgctgagaaaaaaaatttagcgatatttctcccatttgtttttgaaagaagaa

SEQ ID NO: 1036183 - DNA, 83 bp, Artificial Sequence
  ENSG00000233183_104 (sequence is synthesized)
tcttcacaatccacaattatcctgacttcccgcaacacaagtggagagagaggtggcctgacattatggctaagttgatatgg

SEQ ID NO: 1036184 - DNA, 120 bp, Artificial Sequence
  ENSG00000233183_105 (sequence is synthesized)
gagagagaggtggcctgacattatggctaagttgatatggaagcattctggtttgttctagaaaaaatgaaagaggtggtgcaggtaatcatcagctcctggttctgtagcaaggctttt

SEQ ID NO: 1036185 - DNA, 120 bp, Artificial Sequence
  ENSG00000233183_106 (sequence is synthesized)
gctgcaatcccaggaggtagcaacctaggctttggttctgaaagaagagggtctaccttcctgaatcatttttaggagtctgctgatggccaggcttggtgagttggactctgtaaggaa

SEQ ID NO: 1036186 - DNA, 120 bp, Artificial Sequence
  ENSG00000233183_107 (sequence is synthesized)
tttttatttaagtgaggtctgggtaggaaaagagaagggaaaaacttgaccctgcctgcaccaaaggattctgggaaggagaataaagagaaaaacccttcttcatgtttctgcttcaga

SEQ ID NO: 1036187 - DNA, 120 bp, Artificial Sequence
  ENSG00000233183_108 (sequence is synthesized)
gcaggagaaccatcacaagctaagtaaagtcaatgaagggcgagtggccctatggccacctgggcacacacctgccccttggccaccttgcataggcaggctgaggaggtcactaaggct

SEQ ID NO: 1036188 - DNA, 120 bp, Artificial Sequence
  ENSG00000233183_109 (sequence is synthesized)
tggttttcctgacctgccctgattccacatgctgtaaggaggacccagaaggctgtgtggctacagaggtgcccagcatggtgggggtcacttcagtgtggacactagactggaccgcgt

SEQ ID NO: 1036189 - DNA, 120 bp, Artificial Sequence
  ENSG00000233183_110 (sequence is synthesized)
ggaactacaaccagctcagagcgccagccagagtgctgttctggccagaaggaggagccaagacccacacccaggaggacaatgagcccctctctgcagacaggagccagccacacctgg

SEQ ID NO: 1036190 - DNA, 120 bp, Artificial Sequence
  ENSG00000233183_111 (sequence is synthesized)
ggtctggggagactcttcctgattccaaatgggactgaactttaaaccagactgggcatttgagcaattttttaaaagctgtcaaccaaataaaggaatgccattttctttacccagtca

SEQ ID NO: 1036191 - DNA, 120 bp, Artificial Sequence
  ENSG00000233184_0 (sequence is synthesized)
cgccggctgctggggcagggcggcgaaaggtcagtcggccgagaggagtccgtggagccaccgtttcatagcctcagggaaaggatcgggcgtgctcacgagccctctaacccatggctt

SEQ ID NO: 1036192 - DNA, 120 bp, Artificial Sequence
  ENSG00000233184_1 (sequence is synthesized)
aaacacccgcttcctaagcctgggttcttatgcctttgtttgaaaaacatggttccctgtgaaattttacatgtagaagaaagcttcacactacgagagctctcaggatataattatttc

SEQ ID NO: 1036193 - DNA, 120 bp, Artificial Sequence
  ENSG00000233184_2 (sequence is synthesized)
agacagatactgggaacataagatggcttatcaatctaagatggccttcctgtccttcggattgaactgaaaccatccctgattccagggataggtagatgatccaggtttggacaatca

SEQ ID NO: 1036194 - DNA, 120 bp, Artificial Sequence
  ENSG00000233184_3 (sequence is synthesized)
aaatattgaaccaccctggacctacaagtgtttctgggatgggaacatgcaaacgttggtccaaattgttgttctaggcagcccagtacatttctccaatgcctgatggaatgatagggt

SEQ ID NO: 1036195 - DNA, 120 bp, Artificial Sequence
  ENSG00000233184_4 (sequence is synthesized)
gcaagcctacacctttgcaaataaaggaggattgggaaagattaagcctctcaagcactgtgaaaaatcactttctcttgttgtattcttggagcccctgctaattcattattgaaaaat

SEQ ID NO: 1036196 - DNA, 120 bp, Artificial Sequence
  ENSG00000233184_5 (sequence is synthesized)
acctgctgcctgcatttggccttatgttgtcatttacttggtacttcctaagcgtggctactccaatgaagctttagtatatgtactgaaagaagatcctctcatactgccacagccaag

SEQ ID NO: 1036197 - DNA, 120 bp, Artificial Sequence
  ENSG00000233184_6 (sequence is synthesized)
agataaggttgtaaatctttattgggagaagccgtcaaggacagttctgtgaaatgaaaggatctctggatcaccacaaagtctggctcagtgactatggctttgcaaacactaaacatt

SEQ ID NO: 1036198 - DNA, 120 bp, Artificial Sequence
  ENSG00000233184_7 (sequence is synthesized)
cctgtctcaagtcctgtagatggcttgaaatagtatacataagcatgccttataaacatcttcagtctttatcaactctttggagattcagccattcttttttgtactttagggaattaa

SEQ ID NO: 1036199 - DNA, 120 bp, Artificial Sequence
  ENSG00000233184_8 (sequence is synthesized)
aaacacctaataagagtaaaggcaaagagttcctgaatatatcacatgtggtgataaacatgaagatgtatgaaaaattgtgttcgttgagagaaaatggaaggcttttcattctacttc

SEQ ID NO: 1036200 - DNA, 120 bp, Artificial Sequence
  ENSG00000233184_9 (sequence is synthesized)
cacattttcattccagcagcttttctgttttggaagatgagtactgaatcttgcaatgaaatttttttaacttaaacaagacaaggaaaatgaagcgcagagacgttaaataactctctc

SEQ ID NO: 1036201 - DNA, 120 bp, Artificial Sequence
  ENSG00000233184_10 (sequence is synthesized)
aaacgtcagtgttactatttagcctttgatatctccagtaaaggcaacttctttctggacccagaaataaagctttacattagcagcttccataacaccaataacatgaatgaccatcta

SEQ ID NO: 1036202 - DNA, 120 bp, Artificial Sequence
  ENSG00000233184_11 (sequence is synthesized)
ctgagcaattgcagtgcaccaggattatggcttatgagcactttatgtttattatctcacaactcactgagttagatactctccacaacccagtgagcctctcaagcactgtgaaaaatc

SEQ ID NO: 1036203 - DNA, 120 bp, Artificial Sequence
  ENSG00000233184_12 (sequence is synthesized)
tcatttacttgggtctgtgcatggcgtttagaaggctacaccttaggctgggggtcaagaatgtcttccctgatgtgaggtttacacagagatctgaagaatgaagagtccagctaagtt

SEQ ID NO: 1036204 - DNA, 120 bp, Artificial Sequence
  ENSG00000233184_13 (sequence is synthesized)
tacaaaggccctgaggtgggagtgaacaaggaactgagagaagaactgagagaaggccactgtggaaagccagatgctgtgtgacatgaataatgggacacaggaaattgagatattagc

SEQ ID NO: 1036205 - DNA, 120 bp, Artificial Sequence
  ENSG00000233184_14 (sequence is synthesized)
aaaagagagattgatgacccataggcttgaagatgtactggaactaaagtaaggggcgaggataaataaaaagagggagaaattggagaaacagagtgcttggaagccctgatgaatttg

SEQ ID NO: 1036206 - DNA, 120 bp, Artificial Sequence
  ENSG00000233184_15 (sequence is synthesized)
aggaaaaggatggtgatagagttgacctagccagctagaagagtagtactttttagtcagtgagccctccatcccatttctcattaattcttgtaacactttctcacttcctatattctg

SEQ ID NO: 1036207 - DNA, 120 bp, Artificial Sequence
  ENSG00000233184_16 (sequence is synthesized)
cactttctcacttcctatattctgtcatattttatagttgtttatataattatcttattctttataccaattgtagtttccctgggtgcttattatggattaacaattatattattatta

SEQ ID NO: 1036208 - DNA, 120 bp, Artificial Sequence
  ENSG00000233184_17 (sequence is synthesized)
gtgccagccctgttaatcactattctgtactgtctttcagatggaatgatagggtatgcataaatgttcatgtgggctctggagtataccaggaactgaagtaaggtacatggacgtctt

SEQ ID NO: 1036209 - DNA, 120 bp, Artificial Sequence
  ENSG00000233184_18 (sequence is synthesized)
tttgatcaggggtttttatttatgaattcatcttatatgtcacttgacaaacactgaatgctgaatgccacagagtacatgacactttagcagcataaagaaaggcaccaaaaccaagca

SEQ ID NO: 1036210 - DNA, 120 bp, Artificial Sequence
  ENSG00000233184_19 (sequence is synthesized)
gcaaactacatgctacaaaacaacaatttttggaattaatgaatgaggctaattttctggagtcctctctctcttttaaaatgtaagaagtgttagtatggccaggcatggtggctcatg

SEQ ID NO: 1036211 - DNA, 120 bp, Artificial Sequence
  ENSG00000233184_20 (sequence is synthesized)
cagggagggctgggaaggattttcctgatttgtccccggatttggccgagtgcacagattttaattccagtcttctcatcctcctgtagttcaactaggtgtcttcctggtgaagcgtga

SEQ ID NO: 1036212 - DNA, 120 bp, Artificial Sequence
  ENSG00000233184_21 (sequence is synthesized)
gattggcaaacccagcagtgagtgtgcttctgatttcccaacaaggcaatgactccttgggtttgtccccaagaccttatgcctggagtgccccaaggatgtttcagtcaccctcagtgt

SEQ ID NO: 1036213 - DNA, 120 bp, Artificial Sequence
  ENSG00000233184_22 (sequence is synthesized)
caggaatcccagaccttcctgtacctaaagaagtgacctttaatagtgctcagggatttcagacctctcaagtgtttctgccgggggaattcttataaagctgttggttacatgtaatta

SEQ ID NO: 1036214 - DNA, 120 bp, Artificial Sequence
  ENSG00000233184_23 (sequence is synthesized)
tgaaaatgctcttcccaaggtgacctcatccaagttaaaaaagacagctgtcattgcttttcttagcaggcagtgttggttactcagaattttcctgttgcctccccgacaatgcccaac

SEQ ID NO: 1036215 - DNA, 120 bp, Artificial Sequence
  ENSG00000233184_24 (sequence is synthesized)
tccgcttccttgaaccttggctttttttcattcccaggttccatccacctttttgcacttcctatctataaactcttcgtggctgtgttttatcccctctcattacgttgatctattcct

SEQ ID NO: 1036216 - DNA, 120 bp, Artificial Sequence
  ENSG00000233184_25 (sequence is synthesized)
cacaccacatacacaccccaaaaaactcaaaatggatcgtagatgtaaatggaaaacctaaacctataccagaagaaaacataggaggaaatattcgtgaccttatttaggcaaatattt

SEQ ID NO: 1036217 - DNA, 120 bp, Artificial Sequence
  ENSG00000233184_26 (sequence is synthesized)
cttaaaccaaaagcgtgatgaaaaaaattgataaattggacttcaacaaagtaaaaatttatgctcttcaaaagacttgaagccacatactgaaaatatttacaaagcatgtatctgatg

SEQ ID NO: 1036218 - DNA, 120 bp, Artificial Sequence
  ENSG00000233184_27 (sequence is synthesized)
aaggacttgtatggagaatatataaggagcactcagaaagcaataataaaacagttcgttgtttaaaaatgggcaaaagatttgaatagacaccaaagaagatacacaaatagcaaataa

SEQ ID NO: 1036219 - DNA, 120 bp, Artificial Sequence
  ENSG00000233184_28 (sequence is synthesized)
aattcccaacaacttagttaccaagtaaactatctcagatatgatttttcagtccttgctaatctatttataaaatcttttgctattttataatcttattatttgtgtctgtccttaagt

SEQ ID NO: 1036220 - DNA, 120 bp, Artificial Sequence
  ENSG00000233184_29 (sequence is synthesized)
gttcatttgtttttatgtctgtgtatgtcatgtttatttgagctgtttaatgtaaagtaaaacaagaactccctgcatcttatagcataaaaagcaatgtttttcatattcttaccctaa

SEQ ID NO: 1036221 - DNA, 120 bp, Artificial Sequence
  ENSG00000233184_30 (sequence is synthesized)
tagaaaccctcattcacagagtgatggctaatgctctacctttctgcaattcctagtcagagaactgtccaagtctcacatgacctgcatcttgaagaagaaacctatcacgagttagtt

SEQ ID NO: 1036222 - DNA, 120 bp, Artificial Sequence
  ENSG00000233184_31 (sequence is synthesized)
cttagctatacaggttaacaaactcaaatgacccactaactaaatcttgattcttaacaaaaacactatggtctatcatcataacaatgtcaatttctcacattatcattttgaatcaac

SEQ ID NO: 1036223 - DNA, 120 bp, Artificial Sequence
  ENSG00000233184_32 (sequence is synthesized)
aatatgccatcatatcaaagagaacttatcatattagcatattgaatataaaattacagtgcagctagttccaagacctgaatgagtgtggtatataaaaagagcagtggattagaaata

SEQ ID NO: 1036224 - DNA, 120 bp, Artificial Sequence
  ENSG00000233184_33 (sequence is synthesized)
aggcaatctgacgtgcttatctcagttctgctgatacttgctatgtgtatttaaggctaattatttaaatgggctttatttaaaaagggaaaagaagtagaggcatgcccattcctttta

SEQ ID NO: 1036225 - DNA, 120 bp, Artificial Sequence
  ENSG00000233184_34 (sequence is synthesized)
agaatatgacccggaatttccgtgtatcatctctgctcatgtacctttggccagagcttaatcagtttgtcccaggtagtaggaaaggaggctggaatatgtggcctttagctgaaactt

SEQ ID NO: 1036226 - DNA, 120 bp, Artificial Sequence
  ENSG00000233184_35 (sequence is synthesized)
cgaggattctaaaggaattggactattgaaagacaagtaatagtctttgccattgctctcttatcaggaaagcaaatgttctttcagaccctcctcccctgccccactgagtgattccat

SEQ ID NO: 1036227 - DNA, 120 bp, Artificial Sequence
  ENSG00000233184_36 (sequence is synthesized)
cagatgaatcaccatctatggcagatagacccttatgaaatctgtatgcagcagatttctacttaggccataattgagcatatagttactcctagatttaaaaaagctggggaagcagga

SEQ ID NO: 1036228 - DNA, 120 bp, Artificial Sequence
  ENSG00000233184_37 (sequence is synthesized)
aacaggattgacatgattggctttgaccaaagtttcacagactttcttggtgcacagctcccttgggttcttaatttttttcgtggtaccaaaagaaatacataaaagtttcatatacaa

SEQ ID NO: 1036229 - DNA, 120 bp, Artificial Sequence
  ENSG00000233184_38 (sequence is synthesized)
actctacaacttctcaaaccttggactcagattggatggtgccaccctatgtcttgccagacagtgcttgcttttcatcacagcaaccactgaaaacccagctttgcaatgacatcaatg

SEQ ID NO: 1036230 - DNA, 120 bp, Artificial Sequence
  ENSG00000233184_39 (sequence is synthesized)
acataatattctaaagaaatgtagcatggtctaatgtggaaactgtgaatcaccccaagctaatagtgggcatgctatctgccagaagttaagtccctatttcccttgaaaatttgaata

SEQ ID NO: 1036231 - DNA, 120 bp, Artificial Sequence
  ENSG00000233184_40 (sequence is synthesized)
tattatagctcccccagtgagtttactttagcacccttgagggctgggcacacagtttgggaaccatgggcttagactaatcatcgtttattttctgggctggacatattgctccctaga

SEQ ID NO: 1036232 - DNA, 120 bp, Artificial Sequence
  ENSG00000233184_41 (sequence is synthesized)
caagaattagttttttagaggggaagaaagaagaatggaaaatatttaggaaaccgactatttctgcctccttctattccagctaaactacatgatctttaagaagagaggctatgtctg

SEQ ID NO: 1036233 - DNA, 120 bp, Artificial Sequence
  ENSG00000233184_42 (sequence is synthesized)
aaactacatgatctttaagaagagaggctatgtctgtttttacacacttttctgtggcatagttctgggtatttcaaagaacatagaggcttggtacagtggctcaagcctgtaatccca

SEQ ID NO: 1036234 - DNA, 83 bp, Artificial Sequence
  ENSG00000233184_43 (sequence is synthesized)
gctgagatcatgccactgtacttgaaaaaaaagaacatacatatttattaaatgattaagaaatgaagtttatatgatcaatg

SEQ ID NO: 1036235 - DNA, 120 bp, Artificial Sequence
  ENSG00000233184_44 (sequence is synthesized)
tttattaaatgattaagaaatgaagtttatatgatcaatgaaatatgattaataacattaaccaaccataaaatgccagattataggaaatttgttgcctatacaacaggcttctgtgta

SEQ ID NO: 1036236 - DNA, 120 bp, Artificial Sequence
  ENSG00000233184_45 (sequence is synthesized)
aattcaagggcctggactatgccttcctaatttcttaccaccagtgcccaataattgtttggtatattgtaggtgagagaaaaatgttgttcagatgaattggtgaatgtctcagtgaga

SEQ ID NO: 1036237 - DNA, 120 bp, Artificial Sequence
  ENSG00000233184_46 (sequence is synthesized)
gctagttctgttcccaaacaccattacaaaggagttgcattacactgctaatgaaaatgcttattagtggactcttaatgtaaatgctcatgttgactgccaagaaagaaaaataaccac

SEQ ID NO: 1036238 - DNA, 120 bp, Artificial Sequence
  ENSG00000233184_47 (sequence is synthesized)
tttatcttatcactatggatctagggctttttttgttaccacagtcaccactagaaaaactgacaaaaagagaaaagcagaactattctgagatataagatgaacttttcttagaatggt

SEQ ID NO: 1036239 - DNA, 120 bp, Artificial Sequence
  ENSG00000233184_48 (sequence is synthesized)
ttatattgtcagcagctaaactgtttcagtattcaggattattacataaagccgggaaagtgactattttcaaaagagctaccaaactttatgacagtcatttgagcaaaatgtatcttt

SEQ ID NO: 1036240 - DNA, 120 bp, Artificial Sequence
  ENSG00000233184_49 (sequence is synthesized)
ctcctttttcttgttccatagcctaaataggcttttctctgttttgatggttttgccattcaagctcattctgttttcttgggaagctatgcaagctctttggtttctgtgattgtaaag

SEQ ID NO: 1036241 - DNA, 120 bp, Artificial Sequence
  ENSG00000233184_50 (sequence is synthesized)
tgtatggctctgtgacaactccatggaagaatgtgtatgtgcaagcgctttagatttgtctagatctaaaaattttctatggttatttgagttttttcagtaatatatttagaaaattat

SEQ ID NO: 1036242 - DNA, 120 bp, Artificial Sequence
  ENSG00000233184_51 (sequence is synthesized)
ttatgtctctgtctgtattactaaatcaaaagtattttgaaggcagggactatgtccttttcatttttgaatccccagagcattgcatctgaacccccaagacctggtacatagtaggta

SEQ ID NO: 1036243 - DNA, 120 bp, Artificial Sequence
  ENSG00000233184_52 (sequence is synthesized)
cccaattcatatttgtcgagttaataaactctttcttagcaaaattttcccaatagcacagtacagagtttgttcatgataaatactgaatgtatttttattttgtgagagcctaaatca

SEQ ID NO: 1036244 - DNA, 120 bp, Artificial Sequence
  ENSG00000233184_53 (sequence is synthesized)
tgattgagtctcagaattgttctttaatcctcagtatttccattaagaagagcttctatcaagtgcttcaaaagtacccaatgtgaaggagtaataatgactccctgctggtgagcgaag

SEQ ID NO: 1036245 - DNA, 120 bp, Artificial Sequence
  ENSG00000233184_54 (sequence is synthesized)
tgtggaggacacaggtccctcagccgtccactggatgctgcactgtttggcctgagccaacatgggcagaaatacaggcggcagcataagcagatgccaagaacctgtcttgcttctact

SEQ ID NO: 1036246 - DNA, 120 bp, Artificial Sequence
  ENSG00000233184_55 (sequence is synthesized)
gttttcattgggttactatatctcctttgtagtccaacctgcaaattactttgagaaggggagatacacccctggaccaatctaggactatatttgttcccttgctaaagtaggaaaaaa

SEQ ID NO: 1036247 - DNA, 120 bp, Artificial Sequence
  ENSG00000233184_56 (sequence is synthesized)
aatacagaacctttaaatattgaactcaagggcaactaatttaaattcctttcctttcatgttgaaagtcttttgactgggttattctgaagccatagcaattaggttacagtttacttc

SEQ ID NO: 1036248 - DNA, 120 bp, Artificial Sequence
  ENSG00000233184_57 (sequence is synthesized)
tctgttactttaccatctttaaatttggcaccttcaaaaggttgttctgtgcgtttaaaaaaaaaaaggaactaccgttggatattgtattgttgatgaccattatttgattctggattc

SEQ ID NO: 1036249 - DNA, 120 bp, Artificial Sequence
  ENSG00000233184_58 (sequence is synthesized)
ttttgtgtgtttgtgtttgggtgtttttggttgttgtttgtttgttttctagagacggggggtctcactatgttgtccagactagattcgagcccctgagctcaagggattctccagccc

SEQ ID NO: 1036250 - DNA, 120 bp, Artificial Sequence
  ENSG00000233184_59 (sequence is synthesized)
cagcctcccgagtagctggaactgcaggcacccgccaccacgcccagggacagttacttgattcttaatagtccagtcataatgagacaggatactgcataagccaaagaccacacaaag

SEQ ID NO: 1036251 - DNA, 120 bp, Artificial Sequence
  ENSG00000233184_60 (sequence is synthesized)
tatcaatgttaagtatcaagagggtgtggaggaagtgggttacaaccactttgtctcccaactgttgtatgttttgcctttaaaaatttttttaagtacgttaaattctaatgtactcag

SEQ ID NO: 1036252 - DNA, 120 bp, Artificial Sequence
  ENSG00000233184_61 (sequence is synthesized)
atgtggctgaaacaatgacaaaacattagttttctttaaatatgcgtgacttttaagctttttccctttcccagtgacttgcttctccactaagctctttttttcttttttttttttcct

SEQ ID NO: 1036253 - DNA, 120 bp, Artificial Sequence
  ENSG00000233184_62 (sequence is synthesized)
caaatattattgtttcatgtcactgtgacaagtttagtctactggaaattcctatgtcctctgtaatttaggttttaagcaacatatgatttatcttgttattttaaaaaaactatctgc

SEQ ID NO: 1036254 - DNA, 120 bp, Artificial Sequence
  ENSG00000233184_63 (sequence is synthesized)
cttccctaagtgggcaactctctggcatccttaatattcttctatagaaattgtgatgaaagaacagataagcctaagtaaatctagcgtgtggagctcctttaaaatgtgaagaccttg

SEQ ID NO: 1036255 - DNA, 120 bp, Artificial Sequence
  ENSG00000233184_64 (sequence is synthesized)
tttgcaaggcttctgaatgaactccattcattctgtacttggaaatgtctcttcagccacaaaaagaaacaatagttataacctaatttctttggtgccaatatcagcagaagaagagcc

SEQ ID NO: 1036256 - DNA, 120 bp, Artificial Sequence
  ENSG00000233184_65 (sequence is synthesized)
aagagaccattatgaaaactctagtaagttctcttggtgattatataatgctgtattcattgatcatatttctgtatttaaataagtacattttttaaaacatcataaagtggatcagta

SEQ ID NO: 1036257 - DNA, 120 bp, Artificial Sequence
  ENSG00000233184_66 (sequence is synthesized)
atgctgtaatatcacatttcatgtattatacaacatttttgaaatggagtactccaaagtaatttgcttcttatggttaccaaagtttaaagaataccctaacatgcactccaagatttt

SEQ ID NO: 1036258 - DNA, 120 bp, Artificial Sequence
  ENSG00000233184_67 (sequence is synthesized)
aagaggaaaggctttgtgtttttcattactgtattttgaaatctgagagtgcaaaactagttttcttaggtaaaccccgtaatcagtttccacatttacctgtaaaagtcagtggagggc

SEQ ID NO: 1036259 - DNA, 120 bp, Artificial Sequence
  ENSG00000233184_68 (sequence is synthesized)
atacatctggaagtagtagtggcggtacacaatgtgtgttaatatgatttccaaggggtatctagagtaaactttcttaatcacagatctgatctgagcatgccactcctttcttaaaat

SEQ ID NO: 1036260 - DNA, 120 bp, Artificial Sequence
  ENSG00000233184_69 (sequence is synthesized)
cttttgttgattttccatttccctaaaaggaaggcccactggagcatgggccttgcaaagtcctctttctggcttctgcctgcctgccttttcagcttcatctctgccatcttccctgaa

SEQ ID NO: 1036261 - DNA, 120 bp, Artificial Sequence
  ENSG00000233184_70 (sequence is synthesized)
tgaacttttgtcagtggcctcgctctttctacctatgagatgttgtttctgcatgttcttgcatggaattctcttcctcccaaccctgtttcattcctttaatctgtacaactctttctt

SEQ ID NO: 1036262 - DNA, 120 bp, Artificial Sequence
  ENSG00000233184_71 (sequence is synthesized)
atcctgaagtctttatgttaaggttgccttttcaggaagacttttaattgtattagctaattaattaattaatagtctgaggtatttggagctgagattctatggggattagttgctgga

SEQ ID NO: 1036263 - DNA, 120 bp, Artificial Sequence
  ENSG00000233184_72 (sequence is synthesized)
gggtagtttagagccagattgtgaaggactttctaaactgtgctttcaaggttttgaacaggaaaatgatgtagactttctgttttttgtaagtttggaggatggcttgtgtcttaaaag

SEQ ID NO: 1036264 - DNA, 120 bp, Artificial Sequence
  ENSG00000233184_73 (sequence is synthesized)
aatatgtaacataaccatctaatttgtgagtagtggactaaggaaacaccactctaacctttttctctctgcgataatcccatcttcagcctctcaagcactgtgaaaaatcactttctc

SEQ ID NO: 1036265 - DNA, 120 bp, Artificial Sequence
  ENSG00000233184_74 (sequence is synthesized)
agaatatacacacagtaactaaacactacttataaaatatggctctagatatgtttgataaatatttccttcatgaaaacatggaggaattaattagcagtatctctctgcagcctttag

SEQ ID NO: 1036266 - DNA, 120 bp, Artificial Sequence
  ENSG00000254391_0 (sequence is synthesized)
ggagaaacatgacaaggaaagagcctgcagagaacagtgcctttgcatgtacaggtctgtctgcaggaacattctgctgacttctgtccatcccttttcactcagctttcgtcaatccaa

SEQ ID NO: 1036267 - DNA, 120 bp, Artificial Sequence
  ENSG00000254391_1 (sequence is synthesized)
cagctgacgccaaccagtttgaagaccccacataggaacagaatcagcatgaggacagtttcttcatctgtctgtcctatgatttcaccctgcactctttgaccaatcaacaatcttcac

SEQ ID NO: 1036268 - DNA, 120 bp, Artificial Sequence
  ENSG00000254391_2 (sequence is synthesized)
acttctgcctgttctaaaactcttataaactttagccccaaactcctcacggaggtggatttgaggtttcctcccatctctttattcggtagccctccaattaaatctctttctcctgca

SEQ ID NO: 1036269 - DNA, 120 bp, Artificial Sequence
  ENSG00000234122_0 (sequence is synthesized)
ggacccaaagcaaaatctgagactgatctattactcaagggttgaaaaggatattcagagaggagacctaactgaaggctacggtgtctcccgagaggagaaggggctgtttcttctcat

SEQ ID NO: 1036270 - DNA, 120 bp, Artificial Sequence
  ENSG00000274015_0 (sequence is synthesized)
gtagacccagcgtacgtacaacgctcacaccaccacgccgtacgctgcgttagcggaagtttaatggccccattggtgggatgcgtggccaataaagggcaagaataaggcggattccgc

SEQ ID NO: 1036271 - DNA, 120 bp, Artificial Sequence
  ENSG00000274015_1 (sequence is synthesized)
cttcctcgtggctgactggatgcatccgctggtactgatttacgaagagaatgatcatgaagggcaaatggcagtgaagcaagaagagctggcttcaggctcagaagagaatgctgtgcc

SEQ ID NO: 1036272 - DNA, 120 bp, Artificial Sequence
  ENSG00000274015_2 (sequence is synthesized)
tcttcctcatggtttcagctgacatcactctctcaaaagaatcgctggcacaggaatcttcatctcaagttctgcttcttgagaacatagcctgaaacaagcgtatgattttaaaacaat

SEQ ID NO: 1036273 - DNA, 120 bp, Artificial Sequence
  ENSG00000274015_3 (sequence is synthesized)
ctacttctggtataatttcttcttagccaaaatatgtgataaaaatgacagtttaataaaacctaacaagatgtcagttaaaagagaactacaaagaggactatttgaaaaaaaaattct

SEQ ID NO: 1036274 - DNA, 120 bp, Artificial Sequence
  ENSG00000274015_4 (sequence is synthesized)
aaagagaactacaaagaggactatttgaaaaaaaaattctatccactttctttttttttttttttcgaaatggagtcttgctctgtcacccggcctgggcaacagagtgagaccttgtct

SEQ ID NO: 1036275 - DNA, 120 bp, Artificial Sequence
  ENSG00000274015_5 (sequence is synthesized)
gaagatgggtatttctagtggaatttcaataaaaatttttctataaatagggtataggactaaaaaatgagtatcctgattttttactacttctttgaatcttggcatctttttcaatta

SEQ ID NO: 1036276 - DNA, 120 bp, Artificial Sequence
  ENSG00000274015_6 (sequence is synthesized)
tgtttctcatctatgatagatattaaaaccaataattaagataaattgaatgtaaacccatacctcctcagcagatctgtagaacttatgtaaaaaaataaaaatacaaaataaataaaa

SEQ ID NO: 1036277 - DNA, 120 bp, Artificial Sequence
  ENSG00000274015_7 (sequence is synthesized)
ggcggattccgccttcctcgtggctgactggatgcatccgctggtactgatttacgtgagtttcagcatttagacgttccgagtttccaccgagccagagttgggtagagagttattaag

SEQ ID NO: 1036278 - DNA, 120 bp, Artificial Sequence
  ENSG00000274015_8 (sequence is synthesized)
atgactaggagactaatgcggggagaaataatttagtagttagactcaggccctgaaactaccactcgtgttcagaaagtctacgtaataccttattgttttcacgcgaagaaaccagcc

SEQ ID NO: 1036279 - DNA, 120 bp, Artificial Sequence
  ENSG00000274015_9 (sequence is synthesized)
gctccgcctgggctctagggaactctgggatttgtagtccggaactttcgagtcctgtagctttaaatgtggttgttgctactgagttctttcatgttgttaataacacccattgacatt

SEQ ID NO: 1036280 - DNA, 120 bp, Artificial Sequence
  ENSG00000274015_10 (sequence is synthesized)
tattgtggtttgttggactttttatcctttcgtttatcagcagcattaaagacaacatttaagaaatgtgtaaacactgcatgtatgttcgtaaacaataaatgttagtgtttccaacaa

SEQ ID NO: 1036281 - DNA, 120 bp, Artificial Sequence
  ENSG00000259006_0 (sequence is synthesized)
gtgggcccgggcgcgcacagcacctggacgtgccactgcccggtgcgcatccgtgtcaggaattgtcacaaggacgcacaagccaggagccgctgcaaggctgtggatgaagctttctgg

SEQ ID NO: 1036282 - DNA, 120 bp, Artificial Sequence
  ENSG00000259006_1 (sequence is synthesized)
tcacaaagccccttctcctggggctgctgtgggagtagctcttggcacacacttccacccagagacttcacatcccagctgacgagggcacggtcctgagagctggcagcaaagatgggg

SEQ ID NO: 1036283 - DNA, 120 bp, Artificial Sequence
  ENSG00000259006_2 (sequence is synthesized)
tggggtggatgctgctcagtcattggagcagacggagtgtcccaggagtgggcggaaaatgtctctttaggagcctgaggttggcccctggtgcccggagcctgaggccccacaacctcc

SEQ ID NO: 1036284 - DNA, 120 bp, Artificial Sequence
  ENSG00000259006_3 (sequence is synthesized)
ccatgtcctcctccgttccccacgactgctggtgagaagtcctgcctggagttttgcagggacccctccctggacccagaagggtccgcgcttcaacactttcagagatcatttagtcca

SEQ ID NO: 1036285 - DNA, 120 bp, Artificial Sequence
  ENSG00000259006_4 (sequence is synthesized)
gaggtaaggaactgcccagggtcacacaggaaccagaccacacaatatcaccacctccctctgcccagcacacttaaagccgcgtgcaccgcgctcaccaggagcatgtcagcacctcct

SEQ ID NO: 1036286 - DNA, 120 bp, Artificial Sequence
  ENSG00000259006_5 (sequence is synthesized)
tgagcgtcctgcggagctcctggctgtggaaggcgtagatgagggggtcgatgatggcattgcagatgatgagggcgagaaagaggttgaagttcttgaagatgcagccgcacgtggggt

SEQ ID NO: 1036287 - DNA, 120 bp, Artificial Sequence
  ENSG00000259006_6 (sequence is synthesized)
gctcggggcagaggacgatgagtgtgagatgcaggaagaaggggccccagcagaggaagaaaatgcccagcaggatggtgagggtgacagcgcctttaaggccaaagccctggtggaccg

SEQ ID NO: 1036288 - DNA, 120 bp, Artificial Sequence
  ENSG00000259006_7 (sequence is synthesized)
ggcgctgcctcttgtggagccgggcgatgccctgggcgtgctggcaggcccgggccagcatgtggacgtacagcacggccatgagcaccagcatagccaggaagaagaccacgaggcaca

SEQ ID NO: 1036289 - DNA, 120 bp, Artificial Sequence
  ENSG00000224855_0 (sequence is synthesized)
tctagctatgtttttgctcaccgaagctaaatatacatatgaattgattccacagccatggaattgagaaaaaccaggaagtgatgctgaaaacataaatgaaactatgatccacgatct

SEQ ID NO: 1036290 - DNA, 120 bp, Artificial Sequence
  ENSG00000224855_1 (sequence is synthesized)
cctttacattctccagtgatgtcaacagcctaagctgaatttcaaattacatcgagtcaatgaaaaggtgaatggatttttagagcaactcagattcaaagaatcaaatcgcctttattc

SEQ ID NO: 1036291 - DNA, 120 bp, Artificial Sequence
  ENSG00000224855_2 (sequence is synthesized)
ttattttaaggaacatgactgataacctgtgcagaaaataaaaaaaaaactaactatagcaatcgcagcatatgtttaacctaacaattaaaaatatataactgaaaattacaataaaaa

SEQ ID NO: 1036292 - DNA, 120 bp, Artificial Sequence
  ENSG00000224855_3 (sequence is synthesized)
ctatgtttttgctcaccgaagctaaatatacatatgaattgattccacagccatggaattgagaaaaaccaggaagtgatgctgaaaacataaatgaaactatggtattatttagaaaaa

SEQ ID NO: 1036293 - DNA, 120 bp, Artificial Sequence
  ENSG00000224855_4 (sequence is synthesized)
aactttcaaggaatcagttattttaccaattccaaaagaatgaaaaaagtgaagactcagaaaacgtcagatccacgatctgttgctctaaacgccgtttcttccggagaaccttaaaga

SEQ ID NO: 1036294 - DNA, 120 bp, Artificial Sequence
  ENSG00000224854_0 (sequence is synthesized)
atcccatttataagaaatattcagaataggtaaatccatagagacaaaaggagttttgtagttgccaggagttggaggcaagaagagtttaacaggtatgcttaatggggcctcctatgc

SEQ ID NO: 1036295 - DNA, 120 bp, Artificial Sequence
  ENSG00000224854_1 (sequence is synthesized)
agttgacgaaaatgttttgggctagataggagtgatggttgcataacattgtactaaatgccactgaattctactctttaaaatttttagttttatgttatgtggcgtgtaccctaaaaa

SEQ ID NO: 1036296 - DNA, 120 bp, Artificial Sequence
  ENSG00000224854_2 (sequence is synthesized)
aaaaaatagaggtgcagtgctccagcacgggatgaggcagcgtggacaggagcatctcccaacctcagtgaagtctgagccgcgtgcctgcaacaatcccactgtggcagagaaccgcag

SEQ ID NO: 1036297 - DNA, 120 bp, Artificial Sequence
  ENSG00000224854_3 (sequence is synthesized)
attccgagactatgggccagggttggctggattcagttacctggctgaggcctggtgagcaaaatatcccaaacctcgcgtgatctggaaggggaagccggataaatacggatctccaga

SEQ ID NO: 1036298 - DNA, 120 bp, Artificial Sequence
  ENSG00000224854_4 (sequence is synthesized)
tgtgccagtctcgagtctatcgatatgaggtccccctagagtttctattcatcattttaaccgcatttcatcgatcttgagacacggcttttgatattttatcacctcaagataaatagt

SEQ ID NO: 1036299 - DNA, 120 bp, Artificial Sequence
  ENSG00000224854_5 (sequence is synthesized)
gttagatgtctaatagcagcgtttttctaagagatacatgaaacaacagtgtcagaaacgatgctgtcttccatgcgatgaaattgttgtaataggtgctcaataaatgttgacaataaa

SEQ ID NO: 1036300 - DNA, 120 bp, Artificial Sequence
  ENSG00000224857_0 (sequence is synthesized)
cattgtgctacattattttctaaagtaaattaaaaattaaatagcaaaatcagtttttataaacaaagtttttgaacataataagccaacacataaaaaataatatacatagttgttgca

SEQ ID NO: 1036301 - DNA, 120 bp, Artificial Sequence
  ENSG00000224857_1 (sequence is synthesized)
ttgacaatgttattcatgaattatcttcactgacttcataaacaaattttattgtaaaagcataatcacgcattcatgattcactgagaatcacacagacattattattatgacacatga

SEQ ID NO: 1036302 - DNA, 120 bp, Artificial Sequence
  ENSG00000224857_2 (sequence is synthesized)
atcagaagatatgcaagtccaaagaattctccggtgcattccataggccagcaaaaacatgactttgccagcttctcttacaatttgtgaatcatacttttgaatgccaataaatctcaa

SEQ ID NO: 1036303 - DNA, 120 bp, Artificial Sequence
  ENSG00000224851_0 (sequence is synthesized)
actgtctttgaatatcagtgacctgccatgggaggaaggccagagatgcttgctgcgcagcagtggttcagaagtgttttaatgaactaagaagagattttccagatggctgtgtttgat

SEQ ID NO: 1036304 - DNA, 120 bp, Artificial Sequence
  ENSG00000224851_1 (sequence is synthesized)
gctgccaactatcccagatggagagggtttcctcacctgcacccaatctgtgaagaaaagttgtttccatacatctgttcaggactgtgtcatctgaaggcttgactggggctgaaggag

SEQ ID NO: 1036305 - DNA, 120 bp, Artificial Sequence
  ENSG00000224851_2 (sequence is synthesized)
ctgtttccagcatggctcactctcatggctgttggcaagaggccccaggtcctaccatgtggacttctccataggactgcttgagtgttctcatgacatgacaaccagcttcttccagag

SEQ ID NO: 1036306 - DNA, 120 bp, Artificial Sequence
  ENSG00000224851_3 (sequence is synthesized)
taagagatcccaaagagagcaaagaggaagccagaggactgattttccatctggcctaaccagagtctgaagttgctgaatcaaacagagccaataggtcggacttgagctgactggagc

SEQ ID NO: 1036307 - DNA, 120 bp, Artificial Sequence
  ENSG00000224851_4 (sequence is synthesized)
agggctatcaaccagatgcctcctcctccctcctcccagcctgcctcagatcatggccctgaaagagaagacatcctgtttttccaactcaagagacaccactgcagggggagcagtagc

SEQ ID NO: 1036308 - DNA, 120 bp, Artificial Sequence
  ENSG00000224851_5 (sequence is synthesized)
aggcttggggacgttttccactcaagaagctggctatgggaagagcttaccctgtatttcatgcaatacaaaggaagatggctgtttggggttgccgtgtctcttagcaattaaggagat

SEQ ID NO: 1036309 - DNA, 120 bp, Artificial Sequence
  ENSG00000224851_6 (sequence is synthesized)
ggctacagccaagcagtgtgaagtgacagcaccagaaagttttctacaccagaggctgagaacaggggctgtgcagtcatattcaatattgagtccccaaccctaacccggacctggcac

SEQ ID NO: 1036310 - DNA, 120 bp, Artificial Sequence
  ENSG00000224851_7 (sequence is synthesized)
atacaagacattcagcagatggctattgaatgaaaatatataaatgaatcaacgattaccagctgcctccactcccttaacctgctacagaattaataaactaatcttgagcatagtgga

SEQ ID NO: 1036311 - DNA, 120 bp, Artificial Sequence
  ENSG00000224853_0 (sequence is synthesized)
ctccagccgctgcctcccgggcggcgcttgccggcgcggcggcaaagacttcacatccctgttaaaggcatcccatttttatttcttttgtaaagagtggaaacttttggcaggagaatt

SEQ ID NO: 1036312 - DNA, 120 bp, Artificial Sequence
  ENSG00000224853_1 (sequence is synthesized)
gtggaaacttttggcaggagaattatcaaccacgtgactcctttaggtgtaatatttgcttaagatgtgatatacaccaatgaatggtgcgaagaaccatggtaggtactaaggacacaa

SEQ ID NO: 1036313 - DNA, 120 bp, Artificial Sequence
  ENSG00000224853_2 (sequence is synthesized)
agatgaaaatgattctccaaattgatcagcctggacgttgtttccctctgaaatcaatagattaatcattttttaaatttcttgaggctcacgtttggaggtcaactgcagtgaggtctc

SEQ ID NO: 1036314 - DNA, 120 bp, Artificial Sequence
  ENSG00000224853_3 (sequence is synthesized)
tataccacagagtgttgttggcgtctcacatggccattcatcagctcaatacaaacaagtcttcacggaggtggagtttcctcctcacctgttgctaaaccaggcagcgtggattggcat

SEQ ID NO: 1036315 - DNA, 120 bp, Artificial Sequence
  ENSG00000224853_4 (sequence is synthesized)
aaaagatactctctctgtccaatacacttgtaagtgcattctagaatataaaaaatagagagagataaatgttctgttgaaagataatctcccaaaatataagtttttatgtaagacagt

SEQ ID NO: 1036316 - DNA, 120 bp, Artificial Sequence
  ENSG00000224853_5 (sequence is synthesized)
gctctcaagtcataaatggtaaattcttctgaaagtcacagaggaaattactcttaagacctctgtcttgttaagttatcatagtaataaaatctcaacctactaaggtaactttctaaa

SEQ ID NO: 1036317 - DNA, 120 bp, Artificial Sequence
  ENSG00000224853_6 (sequence is synthesized)
catgtcagagcttgaaagtctcttgtaaacctctaaatacaaagaaaacctaagtttatttattgaagttcaagctgtagaaatctgacagctttgaggactttaaaagatactgaatca

SEQ ID NO: 1036318 - DNA, 120 bp, Artificial Sequence
  ENSG00000224853_7 (sequence is synthesized)
actgctataaaaggaaaacagtcttgacaattttaattcatatagtattacaactgaagaaactatttgatgatttatgaagggcacatttgccggctgtgttttggagtttttgcatga

SEQ ID NO: 1036319 - DNA, 120 bp, Artificial Sequence
  ENSG00000224853_8 (sequence is synthesized)
aaagtgaatttgtactcagactgtttgcatcttcaaagacccatgagcttggctgtaggggcatgcaacattaggtttggaaatatatgaaataaatattgctatgccttaagaatgtga

SEQ ID NO: 1036320 - DNA, 120 bp, Artificial Sequence
  ENSG00000224853_9 (sequence is synthesized)
aggagaggcgttgtggggcaggaggggacgtggtcacgaaggagcaaacatggtgtggcctcggagagaggggcagggctctgccagaccgtgagggcgccgccagacctgacaggggcg

SEQ ID NO: 1036321 - DNA, 120 bp, Artificial Sequence
  ENSG00000224853_10 (sequence is synthesized)
aagaagtttggttcctgtaagcaaatgtctcagaagaatccttctttgaagctgccacaaaagcagaagacattgcgtgactgtgcaagtacaagaactaagagaaactcataagcactt

SEQ ID NO: 1036322 - DNA, 120 bp, Artificial Sequence
  ENSG00000224853_11 (sequence is synthesized)
agcaaacctgtgctttttaattctgcttcctgtttggaggtcaactgcagtgaggtctctataccacagagtggtgagtccccaagtcccggtgaacttaggaaatgggcattatcctct

SEQ ID NO: 1036323 - DNA, 120 bp, Artificial Sequence
  ENSG00000224853_12 (sequence is synthesized)
ctaaaagtgacagacactggttcctgcaaagaaaggcctgtgctgtgaaatacctaacagctcatccagaataagagtcaaaataaggttaccatcttttgtctaatttttaccaaggtt

SEQ ID NO: 1036324 - DNA, 120 bp, Artificial Sequence
  ENSG00000224853_13 (sequence is synthesized)
aggctccacacgtactaaattcacctggattatggtcaagttgcattttatttacatctcaaagatgaggacaccgaggcatcaaaaggtatagtaattttcctaaggggaaagcagggg

SEQ ID NO: 1036325 - DNA, 120 bp, Artificial Sequence
  ENSG00000224853_14 (sequence is synthesized)
ccatcttaagagctttggctcattggcctgccactgtgaagatcagaagcaagccactgagttgaaaccctccacattcttttctgccctgcagatggaagatttgtttcatcccttctg

SEQ ID NO: 1036326 - DNA, 120 bp, Artificial Sequence
  ENSG00000224853_15 (sequence is synthesized)
catttcctggctgatgacctatagtgacttgggaagttaatttgacaacttgttcacaaacgtattgaatgaatagccaacaacagagttaactctctaactaaagtgactacagagcag

SEQ ID NO: 1036327 - DNA, 120 bp, Artificial Sequence
  ENSG00000224853_16 (sequence is synthesized)
gaggcactggccaggcaaagaaaatccacttcagagtcatccagtaggttacaggcaggggaataaaaaaaaaggagccgagaggaaaatttccagaacatttccatttagaagcacgat

SEQ ID NO: 1036328 - DNA, 120 bp, Artificial Sequence
  ENSG00000224853_17 (sequence is synthesized)
cagacttgttgactaaggtagcgacgttatctagggcatgcatttgacaatctggcacaggtgatgaaactgacaaacacacacaagaaactagcacattatctgtaaattggttgtgat

SEQ ID NO: 1036329 - DNA, 120 bp, Artificial Sequence
  ENSG00000224853_18 (sequence is synthesized)
tgaatatttcatgtcatcaagggaatagaggcaatgaaagaaaagccttatttctctgcaaagaaaagaatttctgtcagaaagggactaggaaataaaagagaaaaatgtcttaagaga

SEQ ID NO: 1036330 - DNA, 120 bp, Artificial Sequence
  ENSG00000224853_19 (sequence is synthesized)
acggccctaggagcaggaccctgcacacagctgagctcagaggctccagtctggccacgagaatgcaatgggaggtattcttcattgatcttactcgaagttgagaacatgtattttgac

SEQ ID NO: 1036331 - DNA, 120 bp, Artificial Sequence
  ENSG00000224853_20 (sequence is synthesized)
tgtattggaggcatccactcgctgctttagaagctcctggagagtagaaattgtctccatgtagctctcagcaattaataaacactgaaggcaactgggcttttaattctttttaatgct

SEQ ID NO: 1036332 - DNA, 120 bp, Artificial Sequence
  ENSG00000224853_21 (sequence is synthesized)
tagttacttaattcaatatctactccattctatttggtctcaagtgtattgtgtgtgaacagaataaacaaaagactgaatgaatgaagtcagatgtaacttagacaaagtttctggaat

SEQ ID NO: 1036333 - DNA, 120 bp, Artificial Sequence
  ENSG00000224853_22 (sequence is synthesized)
ggctccttaataaaatcctcttcaaagaataggatccaaacaaagagaggacacatgatttctgaaattaaaatcactgtctaattggagaagataaatgtacccacgtgattcatccag

SEQ ID NO: 1036334 - DNA, 120 bp, Artificial Sequence
  ENSG00000224853_23 (sequence is synthesized)
agactaattacaaagcagcctgtgagcaagtctaagattgtttagtatacactaagtgtgcggttgctaaacagacgatgtgcagataagcatcagctatgggcaagcggtggtccctgt

SEQ ID NO: 1036335 - DNA, 120 bp, Artificial Sequence
  ENSG00000224853_24 (sequence is synthesized)
ttgacaacttgagaactgcgttcaaggaaagtctttaacaattctcctcctcacctccacccctagtcctcaccttctccatctcggaaataggaggagtctgtttcactcattcacagg

SEQ ID NO: 1036336 - DNA, 120 bp, Artificial Sequence
  ENSG00000224853_25 (sequence is synthesized)
gaaacagtccaggtgttcatgtgaatgctagaacggacatcatcccttcctgcgatggcaggggctgtcacagatcttctttaagggattgtgtctctgagctggggagtcattgtgtca

SEQ ID NO: 1036337 - DNA, 120 bp, Artificial Sequence
  ENSG00000224853_26 (sequence is synthesized)
cccacattggtgggttagctttacaaagagttatgttgccacattgctgggtcacattatcctgcctcatccctgccaaagggatcccaggaggatacattggatgaaaaccaatattca

SEQ ID NO: 1036338 - DNA, 120 bp, Artificial Sequence
  ENSG00000224853_27 (sequence is synthesized)
ctctaacaagcacttactgaaattccattaggtgcgaagaaccatggataaggtaaacatcaagttctcactgaaatggctccaactttcccgggcatggggaagagaacctcaaacaaa

SEQ ID NO: 1036339 - DNA, 120 bp, Artificial Sequence
  ENSG00000224853_28 (sequence is synthesized)
aaatcactcttcaaggccgctgaataataaacatgccagaagagtctaattccatgcagagaaaggaaacattggcccctaggtttggaggtcaactgcagtgaggtctctataccacag

SEQ ID NO: 1036340 - DNA, 120 bp, Artificial Sequence
  ENSG00000224853_29 (sequence is synthesized)
agtggtgagtccccaagtcccggtgaacttaggaaatgggcattatcctctggaagacgtttatagaggtgacttttttgatgaggacaccgaggcatcaaaagaaacattaagaagatg

SEQ ID NO: 1036341 - DNA, 120 bp, Artificial Sequence
  ENSG00000224853_30 (sequence is synthesized)
acttaaagaacaaattcacctcaaagttatcttccttttggtaggagtttgaaaaatctgaactccatctgatttgataaagcaattacagacaatcattttcccctcaaagtctgcata

SEQ ID NO: 1036342 - DNA, 120 bp, Artificial Sequence
  ENSG00000224853_31 (sequence is synthesized)
tttgactaagctataatctaaagaatcttctaggactttgggaaacttcttagaggaaatttgcaattttggagacataaaaataaagacagtgcatattttaaagtcatggatcttcaa

SEQ ID NO: 1036343 - DNA, 120 bp, Artificial Sequence
  ENSG00000224853_32 (sequence is synthesized)
atgagtatgctgaagctaacattaattgccaagctactcatcatcgtgcaggaaaactgatgatttttaatgatattttctctttagtataattttggttggatgataataagtttttaa

SEQ ID NO: 1036344 - DNA, 120 bp, Artificial Sequence
  ENSG00000224853_33 (sequence is synthesized)
ataaggtcttttctggacacccattcatgtagactccagttccaaccttatcagagctgtgatttgtcgatcgtcagagcatgagttctttgaacaaaaaggtacacagccaattacaac

SEQ ID NO: 1036345 - DNA, 120 bp, Artificial Sequence
  ENSG00000224853_34 (sequence is synthesized)
taaacaaaccaactaattacaataataactttgaaaagctctaccctagaccgggtgctctcattctctggtcagaagattcttggagccaatacaaaaaacatttcaaatccatgcgct

SEQ ID NO: 1036346 - DNA, 120 bp, Artificial Sequence
  ENSG00000224853_35 (sequence is synthesized)
taccaagcaatgtctctgtgctaaacaagtaatcttatgcaaatacctgtgccatctcctaaaaacatattcagttagttttacgttttaataaatagaaaacatttaagggttactaaa

SEQ ID NO: 1036347 - DNA, 120 bp, Artificial Sequence
  ENSG00000224853_36 (sequence is synthesized)
cactatgcatttggtaaagtacatgttgtaaaaggaaaagggaaaagcagcttgattctgaaactctattcagtgtaattttgtgtaagctattctctaaggagagagattgaaccctaa

SEQ ID NO: 1036348 - DNA, 120 bp, Artificial Sequence
  ENSG00000224853_37 (sequence is synthesized)
tcaaccagcatcttcttccagatggctctaagtgtgccttcatctgttttttaagagagggcgaagatgatttcttactatgaggaaaggcacatgttgagattcgatcaaagggttttg

SEQ ID NO: 1036349 - DNA, 120 bp, Artificial Sequence
  ENSG00000224853_38 (sequence is synthesized)
ccaatacatatttataacttgaagagcactctcagaatggtttgtaagggttttccctttacccattctctgcctggcatttgttggttcataattgctgagatgttggcatgcttcagc

SEQ ID NO: 1036350 - DNA, 120 bp, Artificial Sequence
  ENSG00000224853_39 (sequence is synthesized)
agaatcctggttcttgagtggctgagtggctaagtggcaagtccacagatttttttttttttacagtagacccttaatcaatacttgctggatgaatgaaaataaagagatcacattccc

SEQ ID NO: 1036351 - DNA, 120 bp, Artificial Sequence
  ENSG00000228800_0 (sequence is synthesized)
gcaacctgtgaagagaaatatttaagctaatgtgttccatcgtgctggtgagcactttcaaaggagtgcatgaaagatatcacagcctcacaaatgcagagaaaagcctcccttggccac

SEQ ID NO: 1036352 - DNA, 120 bp, Artificial Sequence
  ENSG00000228800_1 (sequence is synthesized)
tgctgatcaggaagtgagactttgtcctccccacagtgctatacctagccggctggattatcttcctcatggccaaaaggagactagacatggaaggcaaattgcagttagatgaattta

SEQ ID NO: 1036353 - DNA, 120 bp, Artificial Sequence
  ENSG00000228800_2 (sequence is synthesized)
gggctgtgcaggcattgccaaggtctcctcccttgttgacgttccctgctcgtcttcacgtgatcccatctcagggctctgccgtccacgccctcaccaagctggatcctggaagtcatg

SEQ ID NO: 1036354 - DNA, 120 bp, Artificial Sequence
  ENSG00000228800_3 (sequence is synthesized)
caattccttcttccttacttctgtaaaccaaaaagtgtctgagacagatctcagtcaacttagaggtttattttgctgaggttgaggaaacactcaggaaaaaagaaacacgagttacaa

SEQ ID NO: 1036355 - DNA, 120 bp, Artificial Sequence
  ENSG00000287625_0 (sequence is synthesized)
agagcaaacggtgctccttggagttgagcggcgcgacggtcctgcagcagctagcctgggatgtacccacagctcaccggggagtccgggccacacgtcagctggatcttgaatgagatg

SEQ ID NO: 1036356 - DNA, 120 bp, Artificial Sequence
  ENSG00000287625_1 (sequence is synthesized)
aagacggggagaaagggccttccggacaaagggcttacgccctggataaagggcgtggaggggcgtggcacgttcagtctggacacagcataaagtgcattggagagaggcgggagacag

SEQ ID NO: 1036357 - DNA, 120 bp, Artificial Sequence
  ENSG00000287625_2 (sequence is synthesized)
gatggaaaggagggtgggaagagctatgaagctccccagggccttgctaacgcgtttggactttatcccgcgccagactttttaaaggtggtaagtagtttacagatgtgcgttttgagg

SEQ ID NO: 1036358 - DNA, 120 bp, Artificial Sequence
  ENSG00000287625_3 (sequence is synthesized)
tgcgttttgaggccagcacattttgttgttgtcgtttgtttgtttgtttttctttgagacggggtctcactcccaggctggagtgcaataacgtgatctcagctcactgcaacctccgcc

SEQ ID NO: 1036359 - DNA, 120 bp, Artificial Sequence
  ENSG00000287625_4 (sequence is synthesized)
aactcctgacttcaggtgatcctcccgccaaggcctcccaaaatcctgggattacggccatcgtgccgggccagcagcacagcgtcttaagcaattttggatatgaataccttcgagacg

SEQ ID NO: 1036360 - DNA, 120 bp, Artificial Sequence
  ENSG00000287625_5 (sequence is synthesized)
agcttgcgctcccacagaccccaccactcctacagtctgtaattacccccagctgcacccatatgcgtagcttccctggtccagagggacgtgcgtgtgtgaccctgcaggatagtgggg

SEQ ID NO: 1036361 - DNA, 120 bp, Artificial Sequence
  ENSG00000287625_6 (sequence is synthesized)
tggccctgcatggcatggctgccagtgctaagaggggtgtgccgccagcctctgatccctctcaccggcgggccccccatcatcatcactatatgatgacctgaggcgtccaggctcccg

SEQ ID NO: 1036362 - DNA, 120 bp, Artificial Sequence
  ENSG00000287625_7 (sequence is synthesized)
tgcagtcggcagccatcagcggattgcaggtaccccgcgtgcgtgtctcggctacagtgcggaagacaagaggccttaggaagtgggaacgggcgccatctggtggtcatctctggagtg

SEQ ID NO: 1036363 - DNA, 120 bp, Artificial Sequence
  ENSG00000287625_8 (sequence is synthesized)
acagcagagaactggaacatattttatattttgtttccactgctccatgacttgactaaagcagaaacaattcggagagtactgtagtattaaatacctaagggccacaccaggccagaa

SEQ ID NO: 1036364 - DNA, 120 bp, Artificial Sequence
  ENSG00000287625_9 (sequence is synthesized)
agcaacaaaaaagaaatgctaaaaagaagttcttcagagagggatccaagaaggaataagtgaagggcggtgctccaggtgtgaatggagacgacttcgagctcactgtgctgagaaact

SEQ ID NO: 1036365 - DNA, 120 bp, Artificial Sequence
  ENSG00000287625_10 (sequence is synthesized)
gcttttcagagggcttctacagagcccacagctcatcttctagaagtcatctatagctactgtcagtttctaggcttccaaggacacccttcagcctactgcaatgcagcttcttaccct

SEQ ID NO: 1036366 - DNA, 120 bp, Artificial Sequence
  ENSG00000287625_11 (sequence is synthesized)
actcctccatggacagatgacatccatttctgaaatccaggggccacacttcaatctatctcatgaggtatctctgcttggtggacaccgatgttctcccttcctgaagactctgcttct

SEQ ID NO: 1036367 - DNA, 120 bp, Artificial Sequence
  ENSG00000287625_12 (sequence is synthesized)
ctgacttctgtgagcatagcctcttctggtcactcgttctctggcatagacttcttctctgtgggctggcagcgaacagtggggccttcagcatcattattgctcagatctctttaatgt

SEQ ID NO: 1036368 - DNA, 120 bp, Artificial Sequence
  ENSG00000287625_13 (sequence is synthesized)
ttggcttaaatgaagacagctggattctcttcttctgcattcaatctgttaggatgtgctgtttgctgaaagcatgaaaatcctagcacctcacctcacctcttggggaccttggaccgc

SEQ ID NO: 1036369 - DNA, 120 bp, Artificial Sequence
  ENSG00000287625_14 (sequence is synthesized)
acctcacctcttggggaccttggaccgcactttgagaaccattagtttttctttcagctctacatcattcacagccgggcctggtggctcatggctgtaatcccaggactttgggaggct

SEQ ID NO: 1036370 - DNA, 120 bp, Artificial Sequence
  ENSG00000236939_0 (sequence is synthesized)
agaagtcacccggctgggggtgaacttacgtgctcgctgacaatgtccttaaagtcctggcatcctcagagcaagacaaaaagagtgggggcaagcgaaggtaacccccagtggggctct

SEQ ID NO: 1036371 - DNA, 120 bp, Artificial Sequence
  ENSG00000236939_1 (sequence is synthesized)
tcacaggcaacacctggtttctgcacagatgcagctgcattttgaacctagaggaaagcatggacagcgactggggggcttggtggggggtgtcgctccctagaagggcaccttttctga

SEQ ID NO: 1036372 - DNA, 120 bp, Artificial Sequence
  ENSG00000236939_2 (sequence is synthesized)
tatatgggtcagatgggccttggtgcacacaggcaggcttcccaggatggggacattgacaaggaggcaacagtcctctctcctccactccagtgactaataaaagctaacatttatgta

SEQ ID NO: 1036373 - DNA, 120 bp, Artificial Sequence
  ENSG00000236938_0 (sequence is synthesized)
gttaagttccttggaaacagattctgggacagttatttgtgaacagaaagtttactggaaggaagcaaaattaagcagaggaagaaactaaactgtgatatagtcacaactatggtctca

SEQ ID NO: 1036374 - DNA, 120 bp, Artificial Sequence
  ENSG00000236938_1 (sequence is synthesized)
taccttgaaaaacatgaatccagtggacccatttgaggaggcccgctgtcaactctaaagccattgtaccactccatagcttggactgccgagcaactaaccatgaagtatgaagagaat

SEQ ID NO: 1036375 - DNA, 120 bp, Artificial Sequence
  ENSG00000236938_2 (sequence is synthesized)
ctcaaagcaggttttcttgaaaaatgaaatgtgaacgaaaacttatctattccatttagtcacttcttattgatagagaagtttccatctgaatatctgaattaaacattcattaacaga

SEQ ID NO: 1036376 - DNA, 120 bp, Artificial Sequence
  ENSG00000223492_0 (sequence is synthesized)
gcttctggaacagccggaaaccttgtcaactgtccaggtagtttgtccacctgaagtctcacctatgacttctctggatcctttggcatcctagcactgaaatctgcaaagctgcttatg

SEQ ID NO: 1036377 - DNA, 120 bp, Artificial Sequence
  ENSG00000223492_1 (sequence is synthesized)
tactttctgtaaggtgaaaattacggatgcagcacctgtgattaagtcatgatggctggaagtaaatcttggtgaatatttctaaatgttttccacatttcccatacagaggtttgataa

SEQ ID NO: 1036378 - DNA, 120 bp, Artificial Sequence
  ENSG00000223492_2 (sequence is synthesized)
tttgttcacctagtttccattttataattgaggttggcagtggagaccaagactcgatgtggtgtgggtcaatttggaagaattacttcgaagaaaatgagaaagaaacactcaaatgaa

SEQ ID NO: 1036379 - DNA, 120 bp, Artificial Sequence
  ENSG00000223492_3 (sequence is synthesized)
atcccttttgaggaaggagatactcttttccttaaaaaaaaaaaaatcaacatttgtatcaataaaggttgagatcagaaaatgtttcccgttcaatgagaaagatttggactgtgatga

SEQ ID NO: 1036380 - DNA, 120 bp, Artificial Sequence
  ENSG00000223492_4 (sequence is synthesized)
agataaactaaaaagaaaagagtttgaccaactggcaagggtttgacccctttcccctttaaaaaaatcacactaaaactacagcttatgtttcgcatgagtggatgctctgaattgcaa

SEQ ID NO: 1036381 - DNA, 120 bp, Artificial Sequence
  ENSG00000223492_5 (sequence is synthesized)
tgcaaagtgcttatgaaaacttaagatcttacattactacttcaaagagtacatgtgataggaattcctatagaagaaaatgaaaaaggatatagcttgaaaatccaaatttatagcaaa

SEQ ID NO: 1036382 - DNA, 120 bp, Artificial Sequence
  ENSG00000223492_6 (sequence is synthesized)
aaatattacaaaggaaaattaagcttcattttactctatcttcttataaagtgaggcccacatcctggtgatgactatttccttaatgagactatgggattttatcaaactccataaaac

SEQ ID NO: 1036383 - DNA, 120 bp, Artificial Sequence
  ENSG00000223492_7 (sequence is synthesized)
atgattgcatttccttcactctgaaatcaccttattttaatttccacatgaaattgggatgcaatttgtgtgtacatttaatatgcgagggttccttctccacctctcactcactcctcc

SEQ ID NO: 1036384 - DNA, 120 bp, Artificial Sequence
  ENSG00000223492_8 (sequence is synthesized)
ccaaaaaagctttggccaaatctacagcatgttttacaatggacagagtcttaggattgaggcaagtacaatcaagaggagtcaggggctaagataaacaaaagaacatgaaaacagtga

SEQ ID NO: 1036385 - DNA, 120 bp, Artificial Sequence
  ENSG00000223492_9 (sequence is synthesized)
tggtgatgcctcatgtgattagctctatggtcccttcctcttctcagagtgacaggcagaaaaatcgacagttaattccagatccatcaggggctgtgctgcctttctacagaaatgatg

SEQ ID NO: 1036386 - DNA, 120 bp, Artificial Sequence
  ENSG00000223492_10 (sequence is synthesized)
agtttagagagcaagctgcagatgagtgtctgagcactcgcgggaggtgccgagtgtcatggcagaagttcgtgtggcatcgctgtctgctgcgtccaagagatgatagggtccttccag

SEQ ID NO: 1036387 - DNA, 120 bp, Artificial Sequence
  ENSG00000223492_11 (sequence is synthesized)
aagaggaacagcagggtagcgcagaaatggaaggaagaccactcttcccagtttctggccaatgggatgagggaagaagtgatgggcatcagttacagaactcattcacaccttcaatgg

SEQ ID NO: 1036388 - DNA, 120 bp, Artificial Sequence
  ENSG00000223492_12 (sequence is synthesized)
ttttggaagccacatgctccagatggcagagctaccctggaaagaaggttgcatctgagtcaccacgtggagatcaactttgtacatgtgaaacataaatgtttactgtgttgggccact

SEQ ID NO: 1036389 - DNA, 120 bp, Artificial Sequence
  ENSG00000236935_0 (sequence is synthesized)
tgtgtccaaagctggaagctgccccagccaaacactggaaacacccagctctccaccaagataaaccacgcgagccacagcttgcgggcaatatcccatctccatcctcaccactgctca

SEQ ID NO: 1036390 - DNA, 120 bp, Artificial Sequence
  ENSG00000236935_1 (sequence is synthesized)
gcccagacctccctcatcttcctggcctgcagaccttagcagtggctgttcccacccctggaacacccttcccacctggtacctgatgcctgcagggcccatgcacggcatattcactgc

SEQ ID NO: 1036391 - DNA, 120 bp, Artificial Sequence
  ENSG00000236935_2 (sequence is synthesized)
cctatgtgactgtgaggagacacaggctggacgatgaatgtgatggctggaactcaagcagccacagtggatcataagggacggtgtcttgctatgttgtccaagctggtctcaaactgg

SEQ ID NO: 1036392 - DNA, 120 bp, Artificial Sequence
  ENSG00000236935_3 (sequence is synthesized)
cctgaatcaatgcttccacctcagctgccagaggaaccgggattacaggcctgagccactgcagccagccagtttgttattttaatgtaaattcttagtaaacaactcaggagctctctt

SEQ ID NO: 1036393 - DNA, 120 bp, Artificial Sequence
  ENSG00000236935_4 (sequence is synthesized)
gtccttttaaaatccatttcaacttctgctaatcggagtgtatattcagggcaacttgaatctgtgctcctgggatgcaatcctcaagcttggcccaaataaagtctccgctgatattaa

SEQ ID NO: 1036394 - DNA, 120 bp, Artificial Sequence
  ENSG00000275678_0 (sequence is synthesized)
agtgctttgtacttaggcagagaccaagtgaagaaaaggagattggggtggataagaggatcaaagtgagaagggctgggatttatttcatagatgttaagttttagatgcccataggca

SEQ ID NO: 1036395 - DNA, 120 bp, Artificial Sequence
  ENSG00000275678_1 (sequence is synthesized)
tctaaacattcaggtagagatatctggaagaaagctgccaccattgatgaaaccgtggcaggcaaacttgttagctcgtaagtagggtcaaatctcagactcttagtggtttttaacacc

SEQ ID NO: 1036396 - DNA, 120 bp, Artificial Sequence
  ENSG00000275678_2 (sequence is synthesized)
tacttctagggaagcttaggagtagaataactgatacttggatcctccttagaaactgtggtaaaagtaattgtatctcagtcttcagtgagttatagaacacccttatccaggtccctg

SEQ ID NO: 1036397 - DNA, 120 bp, Artificial Sequence
  ENSG00000275678_3 (sequence is synthesized)
tcagcctagaaggaaactttatatccattttatctatcctacaattctatctgcttctagatagcagaatttataatttagttatacctcagccaaataaaaaaattttatataataaaa

SEQ ID NO: 1036398 - DNA, 120 bp, Artificial Sequence
  ENSG00000275678_4 (sequence is synthesized)
tggaaacttcaaaaaatatgacaagagacaaataaactagaaaagaaagtcaagatcagttgaggacaggatttgtgtataactaatcttataaatcaaatgtataatacttagttttta

SEQ ID NO: 1036399 - DNA, 120 bp, Artificial Sequence
  ENSG00000275678_5 (sequence is synthesized)
attcaatacattgcttataaaccatgttaagtatgcatttgttggaggactaaaaaaaagaaaagctgtcaatctcccagtatgttcaccaaactttggctttcctctcataagcgcact

SEQ ID NO: 1036400 - DNA, 120 bp, Artificial Sequence
  ENSG00000275678_6 (sequence is synthesized)
ctggaattacaggagtgagccactgcatccagcctagcacactgaacttttaagagtacttgggaaacttagtatgtttaacacctcccaaaagaatgttaaaatgaccacagtttgcaa

SEQ ID NO: 1036401 - DNA, 120 bp, Artificial Sequence
  ENSG00000275678_7 (sequence is synthesized)
caatattggtaatcaagaagaaactatagccatggatatggaagacattaaaataattataatgaatgctttgtgtaactacattgctttgacacatgggtgtaataatggatgaacttt

SEQ ID NO: 1036402 - DNA, 120 bp, Artificial Sequence
  ENSG00000275678_8 (sequence is synthesized)
tgggaaaatatgaaagggaaaaatctcaacaaaaaagaaaacataaatagatcaataactgtagaaaaatttgaggaagcagtcaaagaattcttttacaaaagtaccactttgaagctg

SEQ ID NO: 1036403 - DNA, 120 bp, Artificial Sequence
  ENSG00000275678_9 (sequence is synthesized)
tgtcaaaggtgagtttctttgtagtttcaaagaactatttaaatagttttggaacacagacaaaggtggaacagttctcagttcttttctgcaaaggtagatttgatccttaagtctgac

SEQ ID NO: 1036404 - DNA, 120 bp, Artificial Sequence
  ENSG00000275678_10 (sequence is synthesized)
cacaagaatagaaagcaaatatagatttttaaagaaatataaaataaaatgttagttttaactatttcattgcttattcttgattcagggacataaaaacataaagcagcccagccatgg

SEQ ID NO: 1036405 - DNA, 120 bp, Artificial Sequence
  ENSG00000275678_11 (sequence is synthesized)
agcctgggcaccaagagtgaaactccatctcaaaaatagtaatagtaataaagcagttttatatttctctaatttcatcctgatcactttggttattaaaagtctgtccaacttagtatt

SEQ ID NO: 1036406 - DNA, 120 bp, Artificial Sequence
  ENSG00000275678_12 (sequence is synthesized)
ttgatctcacccctcgtcatggctttcccgtccctatacaagccagtctaatgacacagggagctgaaatggagaggggtatggtcagcaatttgattactcctgttccctcaactgaga

SEQ ID NO: 1036407 - DNA, 120 bp, Artificial Sequence
  ENSG00000275678_13 (sequence is synthesized)
gtaggaggttgatatggccttcttctagcacaactcctcctcactcttcttctaatttcttttttctcttatatgggtacagtggtgtgctaaagccagctcctaccaattcattagagc

SEQ ID NO: 1036408 - DNA, 120 bp, Artificial Sequence
  ENSG00000275678_14 (sequence is synthesized)
tgcttgttgaattttcagcaattttgtgagatgtttattaaacactcaccattaaaaattaaattatgtaaacttaaaattcaatggcataccaaaaataaagataatactcaaaactca

SEQ ID NO: 1036409 - DNA, 120 bp, Artificial Sequence
  ENSG00000232638_0 (sequence is synthesized)
ctcctcgctttcctccacccgagctccgccggctgctccttgggaggaaggggactcgctagaccaggccgaggcccagcctcagaagtcagcattttcaagacctggcatccgcagcgt

SEQ ID NO: 1036410 - DNA, 120 bp, Artificial Sequence
  ENSG00000232638_1 (sequence is synthesized)
gcgcagaacccatggcagcttttggtcttacgcgtggctgtgagctgggctcacgctgcgtggcgcatccacccctcgattgacgcgcggagaagcatttttcattttttctttcagctt

SEQ ID NO: 1036411 - DNA, 120 bp, Artificial Sequence
  ENSG00000232638_2 (sequence is synthesized)
ccctgatttcaaacaaacatcagatttaagaaggtgaggactccaaagaagatccaaacgcgagaccaggaagattcacgtttccactacttcttccaatacatttcactaatctttcta

SEQ ID NO: 1036412 - DNA, 120 bp, Artificial Sequence
  ENSG00000232633_0 (sequence is synthesized)
aagccagctgccctgtcatgacggtatgcatgcagccccatggagaggcccacatcatgaggaactaaccaagcactaacttgcctggtgtttcaataggccactttggaggcagattct

SEQ ID NO: 1036413 - DNA, 120 bp, Artificial Sequence
  ENSG00000232633_1 (sequence is synthesized)
ccagccttggtcaggccttcagatgactgcagccctggctgatgacttgactgccacctcatgagagaccttgagccagaaccacccagccaagccactcctggattcctgatccacaga

SEQ ID NO: 1036414 - DNA, 120 bp, Artificial Sequence
  ENSG00000232633_2 (sequence is synthesized)
aactaggtgaaacgtcaagaatgactaaaagccaacattcaagaagacagcatctgcaaacaagtgttgatcccaagtgtaatcctagggaacccgacttaaggcctccccatctgaaga

SEQ ID NO: 1036415 - DNA, 120 bp, Artificial Sequence
  ENSG00000232633_3 (sequence is synthesized)
acacaatctcaaggaagaatttaaggggaaacctgtctacacagtttgactttctgtaaagaattgccatgctactcctgaggatctaggataatactgaaagaagcacatatggggcac

SEQ ID NO: 1036416 - DNA, 120 bp, Artificial Sequence
  ENSG00000232633_4 (sequence is synthesized)
aagatttctagcactttaaagcttaatgctttaaaagtatgttttgaggcttctttaaaagtttatggatcttgcccagagctggagtcggagcccccgaggctgccgccgagagtgccc

SEQ ID NO: 1036417 - DNA, 120 bp, Artificial Sequence
  ENSG00000232633_5 (sequence is synthesized)
gcgagcccgtggcccagccgaagctctttcccgccgcctctccgcgcctcgtccccgtccagccccacccaacccccaacccagcctggtcccctgaccctcagtctggcccggtctggc

SEQ ID NO: 1036418 - DNA, 120 bp, Artificial Sequence
  ENSG00000232633_6 (sequence is synthesized)
ctcccagcagggtcacgcaactgccccggggacgatgaaaggaggataaatggtgcccaaggtggacagcggtgccttcctgctgctcttcctgctcttgctgtcactgagccgttgcgg

SEQ ID NO: 1036419 - DNA, 120 bp, Artificial Sequence
  ENSG00000232633_7 (sequence is synthesized)
ccagtggggaccctctgctgagacaggctctgtgtccagcacctgctccgggtcacgctctgggggagtaggagtcgcacgactgtctcagccttggatttgactttggcctcatccacc

SEQ ID NO: 1036420 - DNA, 120 bp, Artificial Sequence
  ENSG00000232633_8 (sequence is synthesized)
taggggccacgggagaaccatgtgggttaccaagttcaaggggagagagaagaagctgatgaaaatagaggctcatctgggactgccttccttctctggctccacccttgacttcttcag

SEQ ID NO: 1036421 - DNA, 120 bp, Artificial Sequence
  ENSG00000232633_9 (sequence is synthesized)
agcttgggctttaagccgtgagctccatctcattccctgggccgcaagaagctcactgggcccgcgtctctggaggctgttgggggggcccttcctctgtctccatagtcgacggcttgc

SEQ ID NO: 1036422 - DNA, 120 bp, Artificial Sequence
  ENSG00000232633_10 (sequence is synthesized)
tggggaaacccaggatctccgactgcctggacatttgcattgctgtcccctcgggttttgtctcaggctgtgcctggggctgtgcctctccctcaggctccagcttggtggcagacttct

SEQ ID NO: 1036423 - DNA, 120 bp, Artificial Sequence
  ENSG00000232633_11 (sequence is synthesized)
tgtcagagccaggttcgggggtccacaagggttcagttccccgggaactctccccctccttgttgatggccacagagggagatccccgtgccttgggctgcatccagcagtggctgagga

SEQ ID NO: 1036424 - DNA, 120 bp, Artificial Sequence
  ENSG00000232633_12 (sequence is synthesized)
tctcgtcgatgtggagccgccggttgacgtcgggctgcagcatgtggtagatgaggtccttgcactcgcctgtcaggtgcttggagcgtgggaagttgacgcggtgctccttctggatac

SEQ ID NO: 1036425 - DNA, 120 bp, Artificial Sequence
  ENSG00000232633_13 (sequence is synthesized)
gcagcatcttcttgatgttggagtcgtcgtagggcatggagccgcagaccatgatgtagaggatcacgcctaggctccagatgtcgtacaccttgggctggtagggaatgccctgcagca

SEQ ID NO: 1036426 - DNA, 120 bp, Artificial Sequence
  ENSG00000232633_14 (sequence is synthesized)
ctctggggccgcatacgctggtgacccacagaaggtcttgcttaatgccattcgaccactgtcatcccgcaggcagcgcttggagaagctgaagtcggacagcttgatgttgaagtcctt

SEQ ID NO: 1036427 - DNA, 120 bp, Artificial Sequence
  ENSG00000232633_15 (sequence is synthesized)
gtcaaggagaaggttgtcacacttgaggtcccggtggacgacgtccaggtcgtggcagtacttgatggccaaggaaagctggtggaacttcttgcgagcttcgtcctcatgcagggctcc

SEQ ID NO: 1036428 - DNA, 120 bp, Artificial Sequence
  ENSG00000232633_16 (sequence is synthesized)
ccgggttttgattaactcgaggaggtcgccctggaccgcgagctccatgacgatgtagaccttgccatgtgatgtctcaaagatctcgtaggtcttaatgatggagcagtggtttaacat

SEQ ID NO: 1036429 - DNA, 120 bp, Artificial Sequence
  ENSG00000232633_17 (sequence is synthesized)
ggccagaatctcaatttcccggggaaggaatttctccaagaagtctgcgggggccttcttgcggtcgatgatcttgatcgccacattgaacttcaggcgctcagagtaagcagattttac

SEQ ID NO: 1036430 - DNA, 120 bp, Artificial Sequence
  ENSG00000232633_18 (sequence is synthesized)
ttttgcataggagccctctcctaaatttatccccaggaggtagcctcgtcgcttgaggacagcagcgtcatccatggtgccaggaatgcccagtgcctctgaggctgccctctacagccc

SEQ ID NO: 1036431 - DNA, 120 bp, Artificial Sequence
  ENSG00000232633_19 (sequence is synthesized)
cgaggcgcatgggccagcagtgtgctcatttacatcctggatagagagtcctttgggctggccaggcctgctgttcctgcctcctagaggccaagactctggagtggaacatttggcact

SEQ ID NO: 1036432 - DNA, 120 bp, Artificial Sequence
  ENSG00000232633_20 (sequence is synthesized)
gtctcccagatgacttcagcgagtgaagtcacaaaggaggagtgccctgggggaatgagaccctggcctgaggcacttggacttggaatcctggaaggctggccagtaggctggagcaga

SEQ ID NO: 1036433 - DNA, 120 bp, Artificial Sequence
  ENSG00000232633_21 (sequence is synthesized)
caagatgagcagaaagtggcctcgtgtcttgctgggacctgagcccttgatgctgtccacacaggtgaccctcaggagtgcagagcagggccaagaagagtggtgtgtcaagaaggtaga

SEQ ID NO: 1036434 - DNA, 120 bp, Artificial Sequence
  ENSG00000232633_22 (sequence is synthesized)
cagcttcctggccccggagtcacgcagtttgagatgcctggattctgccgcctccctatacatctcttcccttgtctgagcctttgctggcttcttacagcagctctgtaggaggacagc

SEQ ID NO: 1036435 - DNA, 120 bp, Artificial Sequence
  ENSG00000232633_23 (sequence is synthesized)
tggcaggagttctgctcttggctgtgagctccctcctggggacctgcccagctcacggccctggctgggctcccagggcatatctggggctgggggctgaaggtggggcctggatgccac

SEQ ID NO: 1036436 - DNA, 120 bp, Artificial Sequence
  ENSG00000232633_24 (sequence is synthesized)
cctgagcactggcagctgctctgaggacattacaagcagcaggggaagcactggacagcaaccatcatttcttctggcagtggagcctctgctgtgactggttctgtgtccagcacctgc

SEQ ID NO: 1036437 - DNA, 120 bp, Artificial Sequence
  ENSG00000232633_25 (sequence is synthesized)
tctgggccacaccgtcaggaagaaggagttgcatgactgtcctagccttggatttgactttggcctcatccacctagagggagtgagaactccttcctcacatgagccaggtggaaccct

SEQ ID NO: 1036438 - DNA, 120 bp, Artificial Sequence
  ENSG00000232633_26 (sequence is synthesized)
gggcccttcaggagtgagttagtagagctggatgtcgctcaggctgggttgggtcaccaccagctgtggcccttctcccttttctctgctccttcaccttgttccccaactctgactgcc

SEQ ID NO: 1036439 - DNA, 120 bp, Artificial Sequence
  ENSG00000232633_27 (sequence is synthesized)
cactgccagtcctttgtgcgtggttggtgctccttcctccagacagcctccttctccttcctgctggggaaaccccaagtgctgtctcttggaaaccaaaaataaaattctaatctcccc

SEQ ID NO: 1036440 - DNA, 120 bp, Artificial Sequence
  ENSG00000232633_28 (sequence is synthesized)
acttggacttggaatcctggaaggctggccagtaggctggagcagacaagatgagcagaaagtggcctcgtgtcttgctgggacctgaggtgaccctcaggagtgcagagcagggccaag

SEQ ID NO: 1036441 - DNA, 120 bp, Artificial Sequence
  ENSG00000232633_29 (sequence is synthesized)
ccttcaggtttcaggcacagctgagcagcagtaacatcgacacagagacctgaagactgacaacagactctggcagtaagatacagcaggctctgaaagaaactgaagtattttactatc

SEQ ID NO: 1036442 - DNA, 120 bp, Artificial Sequence
  ENSG00000232633_30 (sequence is synthesized)
aaacagatttctttgacatattttgaaatagctctgcaaagctgtctcttatgaggaaaatctacattctgtgaagaatccccttccctttctagctcttttctcctgagataattaact

SEQ ID NO: 1036443 - DNA, 120 bp, Artificial Sequence
  ENSG00000232633_31 (sequence is synthesized)
agagtctgataagaaacatttaacagtgtgttttttctgaagcctgatacctggaggcttcatctgcctaagaaccttggtctctacaacctcttaccccagagacagtcccttctattg

SEQ ID NO: 1036444 - DNA, 120 bp, Artificial Sequence
  ENSG00000232633_32 (sequence is synthesized)
attccaggtctttagataaactctctgagccaattgccaatcagaaaatctttgaatccacatgacccagaagcccgcctcccactttcaagttgtccctccttttctgactgaaccaat

SEQ ID NO: 1036445 - DNA, 120 bp, Artificial Sequence
  ENSG00000232633_33 (sequence is synthesized)
gtataccttacatacactgattgatgtctcgtgcctccctaaaatgtataaaaccaagttgcagccctatccctttgggcacttgttgtcaggatcttctggggctgtcctgggccatta

SEQ ID NO: 1036446 - DNA, 120 bp, Artificial Sequence
  ENSG00000232633_34 (sequence is synthesized)
gtcacatattggctcagaagaaatctcttcaaaaaaaaaaaaagtttatctatattgctgtctacaatgaaaaatatccaatgttatgtttactctttgtaattaaatgctaaaaaattt

SEQ ID NO: 1036447 - DNA, 120 bp, Artificial Sequence
  ENSG00000232636_0 (sequence is synthesized)
agctgatcaggaggagaagttcatactccttgagctggatctatctgcacatgcacctggcccaggaagctgaaatgggagatctgatgagcagtggaggactgaaccaaagcccttggc

SEQ ID NO: 1036448 - DNA, 120 bp, Artificial Sequence
  ENSG00000232636_1 (sequence is synthesized)
ttttgctccataccagtcagagtctcatcaggatatcatgttgcattgagtagtcatgtctccacaggcttttcttggctgcgactcttactcacgttttccttggttttgcccacctta

SEQ ID NO: 1036449 - DNA, 120 bp, Artificial Sequence
  ENSG00000232636_2 (sequence is synthesized)
aaaatttgagagctctctactccatcttccgctagtataaccctcattggctggaatcataatggtatctgcatctggaactggccactagtataacacctacaaaatgcacaacggcct

SEQ ID NO: 1036450 - DNA, 120 bp, Artificial Sequence
  ENSG00000232636_3 (sequence is synthesized)
tcagaccatatgaaaagtctacagggtgagaatctgaaaatccagcaatgaggagaaaaaagttatctcccattaagaacactttccagaagctacacaattccagttattgattcatcc

SEQ ID NO: 1036451 - DNA, 120 bp, Artificial Sequence
  ENSG00000232636_4 (sequence is synthesized)
catttactagaacctgttcatctggctatgcccaaaaccaagggaaactgaaatagtggttaccatattctgtaactcagcctagcctagcttcagaagttttaataaagaaaataaaat

SEQ ID NO: 1036452 - DNA, 120 bp, Artificial Sequence
  ENSG00000229294_0 (sequence is synthesized)
accccatccccttcatacacacctcattccaaatgctatcctgtcacagcagatgccacatcacttttggggtgggctaagagatcaaggacatatgccgtgcccaaatttcatctaata

SEQ ID NO: 1036453 - DNA, 120 bp, Artificial Sequence
  ENSG00000229294_1 (sequence is synthesized)
attaaaaatacgggaagtgacacaaaagggaaaacacaggatgctctggaaacttgttataggcagcgagtgggaaggagacctagagtcagaggaagctactactggaaagaggagcag

SEQ ID NO: 1036454 - DNA, 120 bp, Artificial Sequence
  ENSG00000229294_2 (sequence is synthesized)
tttcaggcagaagaaacagcactctggaaacccaacatctagcctttgagaatgtaaaatgaagccaggatgacactaccaattccaagctgtgtgtgtgtgcatgcatgtgcatgtatg

SEQ ID NO: 1036455 - DNA, 120 bp, Artificial Sequence
  ENSG00000229294_3 (sequence is synthesized)
tgtgtgtgtgcatgcatgtgcatgtatgtgtatatatattagatgtatattttaacattctgacttaacattaatattaacatattaatatttatttattgaaatatttaacgtgtattt

SEQ ID NO: 1036456 - DNA, 120 bp, Artificial Sequence
  ENSG00000286357_0 (sequence is synthesized)
atgtcatgagtcagaagagtgcaggctgaggcatgccctccactgaatggcttgtctgcactctgaaagccaagtgaaccaaccattccatccgtatgaagagcgtaagtcctagatttg

SEQ ID NO: 1036457 - DNA, 120 bp, Artificial Sequence
  ENSG00000286357_1 (sequence is synthesized)
tcaggtgccactgctatctgttctgaggttcactctgttcagcagccttggactcttcatggagtaacagattggtactgcaccagggaagaggtggtcatcaactatgaaggaatccag

SEQ ID NO: 1036458 - DNA, 120 bp, Artificial Sequence
  ENSG00000286357_2 (sequence is synthesized)
acctttaatcctgtagagcttccaagtaaggataatgggtcaactacaaccttcttcctaggatatgtcgacgtgcacggcattaggaaaatctgctctttaaattaaaatacaaactca

SEQ ID NO: 1036459 - DNA, 120 bp, Artificial Sequence
  ENSG00000270696_0 (sequence is synthesized)
gtggccctgaaaatcagatattccccccttcctgagagttagttttatttttattattgaagattgtagcagtctattgctacatgtgcagtcatttccaaactatttttgcaaagactg

SEQ ID NO: 1036460 - DNA, 120 bp, Artificial Sequence
  ENSG00000270696_1 (sequence is synthesized)
tattccttctgtgtgtcatcactgaagtctctgttccttagtttgtgtttaatagtttgacatagatttccttgaaaggagttaaaactagcagaaaaatctctctcccagtctttccag

SEQ ID NO: 1036461 - DNA, 120 bp, Artificial Sequence
  ENSG00000270696_2 (sequence is synthesized)
tctttgtagattggttctgtgctgggcttttccattaatacttagccaggcttgtactgagcctaacaatcaggcccaaaagcgtagggtctttgcagatcttgtctgagcatgcttctt

SEQ ID NO: 1036462 - DNA, 120 bp, Artificial Sequence
  ENSG00000270696_3 (sequence is synthesized)
gctgtgtatgcacgtagttttctaaatctccctgtatgtgctgttgaatattctaatttcccaaagaaactcctttgcagctttttctcacagaacatagatggttttttggatatcttg

SEQ ID NO: 1036463 - DNA, 120 bp, Artificial Sequence
  ENSG00000270696_4 (sequence is synthesized)
accatagtctttcgacccaggtgtttgcggttgttagttcaccttacacttttttcaagcattgcctactgcttacgatgagtgctctgtcaatcctttaagtagccccagacaggctac

SEQ ID NO: 1036464 - DNA, 120 bp, Artificial Sequence
  ENSG00000270696_5 (sequence is synthesized)
cagagacttaaacaagaatttgtaagttctgctcagcttcctctagaaatggggatcagggtccaagacagaatgcagttgctgatttcaagactgctgcaacaccagggagcttgtggg

SEQ ID NO: 1036465 - DNA, 120 bp, Artificial Sequence
  ENSG00000270696_6 (sequence is synthesized)
ggaagggcaagcagaaatgtcacaaagctttcttgccattttaaagttgcctgttcttgactcagcatttgcttcattgctataaactttttactgtttttcagagttctgataaaattg

SEQ ID NO: 1036466 - DNA, 120 bp, Artificial Sequence
  ENSG00000270696_7 (sequence is synthesized)
gctggtcttgaacttctggcctcaagccatcctctcatttcagcttcccaaagtgctgcaattacacgcgtgaaccaccacacccagcccctgcttgtttttcaatgtgcctactccacc

SEQ ID NO: 1036467 - DNA, 120 bp, Artificial Sequence
  ENSG00000270696_8 (sequence is synthesized)
caccatgttgctcaagtatgtatattttctaaactaccttgtagtgttgtgatgggaaataaatccctgagccttttgaataactcagagagatcaaaaacttagtttatcctattcgaa

SEQ ID NO: 1036468 - DNA, 120 bp, Artificial Sequence
  ENSG00000270696_9 (sequence is synthesized)
ggattagaaaaatgatatatctttcactttttcagggataggctcctcattagaaggctcctatgtgccgatgctgtacaagacatttcatttctcttaatgtttacaacaagcttgttg

SEQ ID NO: 1036469 - DNA, 120 bp, Artificial Sequence
  ENSG00000270696_10 (sequence is synthesized)
ccaaggctgatcttgaactcctggcctcaaacgatcctcccagctcagtctcacaaagtgttgggatgtctggccaactaatgactatcttaactcttgtgtttcaatgtttatgccttc

SEQ ID NO: 1036470 - DNA, 120 bp, Artificial Sequence
  ENSG00000270696_11 (sequence is synthesized)
ttttatcttgactgattgtatgactatgtcttctagaacaatgttgaacagaaatggtgagagcagacatccttgctttaatatttcaccattatatatgatgttaggtatagatttttc

SEQ ID NO: 1036471 - DNA, 120 bp, Artificial Sequence
  ENSG00000270696_12 (sequence is synthesized)
tcacagatgccttttatcagattgaggaatttatattcctactttgccgaaaggtttttgtagtatgagggggtgctgaattttgtcaaacactttttcggtaataattgagatgattgg

SEQ ID NO: 1036472 - DNA, 120 bp, Artificial Sequence
  ENSG00000270696_13 (sequence is synthesized)
ttctgcagtcatcgagatgtggattttctcctttattctgttcgtgagtgattacactggttgactaatgttaaaacaaccttactttccaggaataaaccctattatcttttttataca

SEQ ID NO: 1036473 - DNA, 120 bp, Artificial Sequence
  ENSG00000286355_0 (sequence is synthesized)
gcacccagcctggtaaaggttttttaaacagccttctttcttttttaacttttattgttgcctgaaattctttatttttatttgtttgtaaatgttttctagcctatctgttccagaaaa

SEQ ID NO: 1036474 - DNA, 120 bp, Artificial Sequence
  ENSG00000286355_1 (sequence is synthesized)
ctaggagaaatatttatgctagacataaagctataatcttgcaaacaggctgaaaataacttttttaaaacttagataatcttcagtttgctatgaccgaagtttaaaaatagttttata

SEQ ID NO: 1036475 - DNA, 120 bp, Artificial Sequence
  ENSG00000286355_2 (sequence is synthesized)
tctgcctatatatttctatattatggatatttagtttaagaattgtttggacagatgttttttgagacaactacatttacaaagattgtacttggtgtctacaaaaaagcttttgcgagc

SEQ ID NO: 1036476 - DNA, 73 bp, Artificial Sequence
  ENSG00000286355_3 (sequence is synthesized)
aaagattgtacttggtgtctacaaaaaagcttttgcgagcttccgggcccagcgtgagcgacgcagaagacgg

SEQ ID NO: 1036477 - DNA, 120 bp, Artificial Sequence
  ENSG00000286355_4 (sequence is synthesized)
cactaggaagtgccagagagtgggcacagccatcctacaggaaattttgctcactcctgagctagagaaaggtcagaaagagcagcagcagagtcaagagaaagaagacatggccagaag

SEQ ID NO: 1036478 - DNA, 120 bp, Artificial Sequence
  ENSG00000286355_5 (sequence is synthesized)
tcacaggacataaggacagcctctgtttcaccctccccaaggctgaagtaggtctccattttgccctattttctagaagtagacacatgctacaaaggaataatgagctttacagtttgc

SEQ ID NO: 1036479 - DNA, 60 bp, Artificial Sequence
  ENSG00000286355_6 (sequence is synthesized)
agctgggcatggtggcgcacgtctgtaatcccagctactctggaggttgaggcacaatag

SEQ ID NO: 1036480 - DNA, 120 bp, Artificial Sequence
  ENSG00000286355_7 (sequence is synthesized)
actccagcctgggagacagagcaacactccatcttggggataaaaaaaaaaggctctaatctgttttgtttttttccctttcttccaactggataatttatattggtctatcttcaagtt

SEQ ID NO: 1036481 - DNA, 120 bp, Artificial Sequence
  ENSG00000286355_8 (sequence is synthesized)
aattgccttttctctgtcattgccattctgctactgagctcatctggtgaattttttattttagttcttatatttttcagttctaaaatttccatttggttctttttttaatgctttcta

SEQ ID NO: 1036482 - DNA, 120 bp, Artificial Sequence
  ENSG00000286355_9 (sequence is synthesized)
cttctttgctaagatcatctatccctctgttcatttcaagaggctttacctttgtctcatagagaccagttataaaagctgctttaaaatttttgtattgtaattccaacatttgcataa

SEQ ID NO: 1036483 - DNA, 80 bp, Artificial Sequence
  ENSG00000286355_10 (sequence is synthesized)
gctttaaaatttttgtattgtaattccaacatttgcataaacttggatgtgatggttaacactgaatgtcaacttgatta

SEQ ID NO: 1036484 - DNA, 120 bp, Artificial Sequence
  ENSG00000286355_11 (sequence is synthesized)
agtgggctgggaaaggcaggcccacccttaatttgggtgggcacaatcttatcagctgccagcgctgctagaatataagcaggaagaaaagtaacctcccagcctacatctttctcccat

SEQ ID NO: 1036485 - DNA, 75 bp, Artificial Sequence
  ENSG00000286355_12 (sequence is synthesized)
tctttctcccatgctggatgtttcctgccctcaaacatcaaactccaagttcaggtggcctgttgtgggacctgt

SEQ ID NO: 1036486 - DNA, 120 bp, Artificial Sequence
  ENSG00000286352_0 (sequence is synthesized)
aaccggcgcgcggctggaggctgggaaccagctcctgggtcttagtcagaggttcacatccaccaactatcttcccagggttggactgagaaggggagcagagggtcccagggactctcc

SEQ ID NO: 1036487 - DNA, 120 bp, Artificial Sequence
  ENSG00000286352_1 (sequence is synthesized)
ccacctggagagaccaaacggaagaaaactaaggcccctggccaacagccctagctgtgctcctactggccagtcagcaccagcctgccaggcatgtgactgagacagtcttggaagtgg

SEQ ID NO: 1036488 - DNA, 120 bp, Artificial Sequence
  ENSG00000286352_2 (sequence is synthesized)
attttccagccctactcaagctgccgcagctgacaccacatggaacagagatgagcttttctccccagtgcccaaatagcagaattgtggaaaaataaataaaacagttgtattaagcca

SEQ ID NO: 1036489 - DNA, 120 bp, Artificial Sequence
  ENSG00000286353_0 (sequence is synthesized)
aatatcagaaaggatgctgatgagaagaattacatggatgcagacccatttcttaagtttgtggactactctcataggttattacccggcagtgcagctgagtggaaagataaccacatt

SEQ ID NO: 1036490 - DNA, 120 bp, Artificial Sequence
  ENSG00000286353_1 (sequence is synthesized)
cattctccttatctgcaatgatgtaatgcatcctagccctgggtctagatgattggggaataatgggattgtacaactgcagggatgacaaacaatagtgcagcgtctttctctgataca

SEQ ID NO: 1036491 - DNA, 120 bp, Artificial Sequence
  ENSG00000286353_2 (sequence is synthesized)
ctgaaccccacgcctccaacgcaaggtgaaaggcatcacaaaataggcactgagtctgccccttggatgaagttagcattttttggcccgaggagcatctgctctggcactgaaacagca

SEQ ID NO: 1036492 - DNA, 120 bp, Artificial Sequence
  ENSG00000286353_3 (sequence is synthesized)
ataccgacacggagacgagagccatgcaaaaacactcagtttccgagccccagccaggacagtgcgagtgagtatcctgcttttctttgtggttagaatcaagtgtcatctaaaaataac

SEQ ID NO: 1036493 - DNA, 120 bp, Artificial Sequence
  ENSG00000286353_4 (sequence is synthesized)
cggttggtaggaagaagtcactgcatagtacaatgccaagaaacccggggatcagagagtcctccgataactgatgctgctcggggctcacgtttgtttggaaaactaaatctgcctcca

SEQ ID NO: 1036494 - DNA, 120 bp, Artificial Sequence
  ENSG00000286353_5 (sequence is synthesized)
ttttctgtgccggaaaaatcatcgcttcctgccaccacagaaaccttaccttttgcagaagctgggaaccggagtacttagcagcaatggattttatctccccaccaaaagccgaggccc

SEQ ID NO: 1036495 - DNA, 120 bp, Artificial Sequence
  ENSG00000286353_6 (sequence is synthesized)
agagcttcaccctacagggagaaggggcacaggaagatatgtaacacccgtgtcacagtcaacacgcacgcacacgcacacgcacacatgggactatggctgaaggagcagtgcgatgta

SEQ ID NO: 1036496 - DNA, 120 bp, Artificial Sequence
  ENSG00000286353_7 (sequence is synthesized)
acatgttttaaaagaagaaaagatagaaaaagcggcttggtagaaactgccagcaccaaaactgcaaagcgcagcgcgggagggggcccgaggggggtcgcggagttaagaatgcgcaaa

SEQ ID NO: 1036497 - DNA, 120 bp, Artificial Sequence
  ENSG00000286353_8 (sequence is synthesized)
ctaaaaagaccactgagtttcattcgaaccactgcccgaggactcgaccccccaaactgggcatcacctggcaaatagcagtcagaagaaatccacccatcccccccccaaaaaaagaag

SEQ ID NO: 1036498 - DNA, 120 bp, Artificial Sequence
  ENSG00000286353_9 (sequence is synthesized)
tggggcggcagtagagcaaagaggggggaaattcagcggcccatggaagttggattcggtaaccaggctccaaagttggtgccgtcacttgaggcatccataaggaagcccattgaccta

SEQ ID NO: 1036499 - DNA, 120 bp, Artificial Sequence
  ENSG00000286353_10 (sequence is synthesized)
attgctgccatcaacccagggacaaagccaatcgggtggacagcggagaggcaatatgggaaggaccttggtccttgaagatattgtgccactatatcaagcaaccgctgaagcctgaat

SEQ ID NO: 1036500 - DNA, 120 bp, Artificial Sequence
  ENSG00000286353_11 (sequence is synthesized)
tacctctggatgcctaataacgtggaacaataaatttccttattgtttaatttgagtcaggatttatgatacttgcttccaatagcatcccatagggcacgtccttgtgggtaagggttg

SEQ ID NO: 1036501 - DNA, 120 bp, Artificial Sequence
  ENSG00000286353_12 (sequence is synthesized)
ttgttgcttttattccaagaagaacagtcttctgaaatttgggaggaagttgcataattctaagaaaaaggttataaaacagggcctggtacattcctcatcaccaccaccacccaaaaa

SEQ ID NO: 1036502 - DNA, 87 bp, Artificial Sequence
  ENSG00000286353_13 (sequence is synthesized)
agggcctggtacattcctcatcaccaccaccacccaaaaaatgttaaatgaaaaatgtagaaaatgaaattccctgcatatgatccc

SEQ ID NO: 1036503 - DNA, 120 bp, Artificial Sequence
  ENSG00000286353_14 (sequence is synthesized)
taagaaaaacactaagttaagtgattgctcttaggtagtaagattattactagttattattttttaacctctgctttatttggtttggttctttatattcttcagtacttcctgattttc

SEQ ID NO: 1036504 - DNA, 120 bp, Artificial Sequence
  ENSG00000286353_15 (sequence is synthesized)
ctacagtgaacatgctttacttttttaatagatatcaaagacaataattgttttctatctaaatttatactacctatcacaaaggaagtcactttgactttttaaaaacataatggccaa

SEQ ID NO: 1036505 - DNA, 120 bp, Artificial Sequence
  ENSG00000286353_16 (sequence is synthesized)
atgaaagcaaaaaagtagcatatttggtgcaatctattggtgaaagaaaaacatttccagtttttatgtactgtatccagagacttaaagatttatgattggtcatgtagtagaataaaa

SEQ ID NO: 1036506 - DNA, 120 bp, Artificial Sequence
  ENSG00000273956_0 (sequence is synthesized)
gaggtagaccatgatgcatcaacacagaaagtctggggtgggggccctctgcacgcaccaacatctttgtctcctgaaaaatggcctttgtcagttatttttaaaaactggtgttaatcc

SEQ ID NO: 1036507 - DNA, 120 bp, Artificial Sequence
  ENSG00000273956_1 (sequence is synthesized)
gagaaaatgacattgattccagccctcaaagcaacgggacaaaaaacaaacaggaggcttccctcccgccccaggggcagcggccaatgtctgcggctctgcgggaagggctctcactgt

SEQ ID NO: 1036508 - DNA, 120 bp, Artificial Sequence
  ENSG00000273956_2 (sequence is synthesized)
gaccagattgtggcttctgattgtattgtagaatttctggcccagcttttaaggttcaaggcttcctccctttgcttttatgttattttcttgtttaataaagatacacctgtgtgagaa

SEQ ID NO: 1036509 - DNA, 120 bp, Artificial Sequence
  ENSG00000286351_0 (sequence is synthesized)
acagttttccagggttttcgggcaactcaaagaatatgtgtaacctctactcaccaaatggccacttggctctattttaaatttaggcccagttagctacttgggatccatcatgaagga

SEQ ID NO: 1036510 - DNA, 120 bp, Artificial Sequence
  ENSG00000286351_1 (sequence is synthesized)
ctggctctttcaggttcacatttgttcaccaagtgatgaacctcatttttgagtgtggagattggaacttagggaagtgatttgtaactttgctccagcttgagacttggcttggaaata

SEQ ID NO: 1036511 - DNA, 120 bp, Artificial Sequence
  ENSG00000286351_2 (sequence is synthesized)
gagtatgctcaaagagtgagaaaggagtttggagacagaaagacggaagagttgatattccgctcacagatgtcaattttcaaagaaatttctgcccattatggatgcaccacaaatact

SEQ ID NO: 1036512 - DNA, 120 bp, Artificial Sequence
  ENSG00000286351_3 (sequence is synthesized)
aaagtctatgcaatatatattttgaaaagaatttttttcgtgaaactgtaattttcgttcataagagtatatttcctgacttagcattttattgactagattaaaattttgttccccaaa

SEQ ID NO: 1036513 - DNA, 120 bp, Artificial Sequence
  ENSG00000261261_0 (sequence is synthesized)
tgggcagaggtttgactggcaagcagctctgggtgtacatttcatccaagagtctcatggtggtcgaaggagatccccagatgcaaaatcaaagttgcttggatttccatttcttcccca

SEQ ID NO: 1036514 - DNA, 120 bp, Artificial Sequence
  ENSG00000261261_1 (sequence is synthesized)
tctaggaaaagggcaatggaatcaaagcctttaaaaaatgtagtaagagaaagactctctaattgatcagaaccttctggcaaccagcactttggcccatctactgaaaaatactttatc

SEQ ID NO: 1036515 - DNA, 120 bp, Artificial Sequence
  ENSG00000261261_2 (sequence is synthesized)
ttgaaatagagtgtcttctaagtcatcaagtaaaagagaaattctgctcagaagacttttggatagtacccaacatttggtgaggcttactatattacatgcattacctcgctaaatcac

SEQ ID NO: 1036516 - DNA, 120 bp, Artificial Sequence
  ENSG00000261261_3 (sequence is synthesized)
cacattagaacacttacaggttatgacaaaacaagaaggcccttacaagatgccagcaccttgatcttgaacttctcagactccagaactgtaagccaataaatttctgttcttcataaa

SEQ ID NO: 1036517 - DNA, 120 bp, Artificial Sequence
  ENSG00000261261_4 (sequence is synthesized)
caacataccctccagcaagctctacggctatatgacccttatccacagcaagtccctggggaaaattattccttaacatggtgttgaatgctgacaaggtatatcagtcagctttggcta

SEQ ID NO: 1036518 - DNA, 120 bp, Artificial Sequence
  ENSG00000261261_5 (sequence is synthesized)
ggactcattttgccatttacagaaccacagtgcaaatcagtaatttgcacagagtcatcaagatgcatgagtttgcagactttttctaccactccctctctacatttgctggggtgcctc

SEQ ID NO: 1036519 - DNA, 120 bp, Artificial Sequence
  ENSG00000261261_6 (sequence is synthesized)
acaaatcttgatcttggttctgctttctgagaaactcaaactgaaaccaagggctatgaaggagagtcatgaagccatagaatgggaaactcatccagtctgatgaggtcagaggaagtg

SEQ ID NO: 1036520 - DNA, 120 bp, Artificial Sequence
  ENSG00000261261_7 (sequence is synthesized)
aatgggatcaagtggccaagagaggtagggccagatcccaggggaccatataggctgtaccaaggcctcaggtatagatcctgaaccagtggggaaccaccaaagcatttaagcagctgg

SEQ ID NO: 1036521 - DNA, 120 bp, Artificial Sequence
  ENSG00000261261_8 (sequence is synthesized)
gtagggtgacataatgtatgtgcactggccaggctcaagagaggataccagaagcttcacgctcctgtcgcctgaccccagtcccccctacaagcccagttcatactagtgacctgttct

SEQ ID NO: 1036522 - DNA, 120 bp, Artificial Sequence
  ENSG00000261261_9 (sequence is synthesized)
tcttgccccactcacccctaatcacttagaattctgggcaggaaatctaaaacatcaccttaaagcagacccataaatagttaagtgccctccatcaacaggagagagagggaaaaaata

SEQ ID NO: 1036523 - DNA, 120 bp, Artificial Sequence
  ENSG00000261261_10 (sequence is synthesized)
atctataaaaatacataatgaaacaactacagaacaaacagagctgcagcacgtgggccctgccaggatattgcttagacttggagaaggattttgtaataacatcatttgattctttgg

SEQ ID NO: 1036524 - DNA, 120 bp, Artificial Sequence
  ENSG00000261261_11 (sequence is synthesized)
aaagcccatcactctaaaattgacaccacacctgggaagagcaggcagcaccatcactggctttcctgttcaagaatgacacctgtcaatcaggtttctgacacatccatcacttgttat

SEQ ID NO: 1036525 - DNA, 120 bp, Artificial Sequence
  ENSG00000261261_12 (sequence is synthesized)
aagtgaaggctctgtacctctgctccacatgttttctgcaacctgagatgcaggtctcatggttcagggagaagagcactgtgaatgaaccatacaaagtcttttaaaacttctgcacac

SEQ ID NO: 1036526 - DNA, 120 bp, Artificial Sequence
  ENSG00000261261_13 (sequence is synthesized)
tgtggcctcattcttccatcttcaaagtcaacaatctcagtcttatagcaccttcctgtagtgccatctctctggttctcttctgcctcacttttccctttttaaagatcctcatgatta

SEQ ID NO: 1036527 - DNA, 120 bp, Artificial Sequence
  ENSG00000261261_14 (sequence is synthesized)
agagaaagcaagagaaggtggatgagaagggaggcaggggaactgcaagccttcagtccttgtaccttttaggatgtagggacacccagagaacagccctcaataagatctggaaagaag

SEQ ID NO: 1036528 - DNA, 120 bp, Artificial Sequence
  ENSG00000261261_15 (sequence is synthesized)
agctgtcaccacagacttagaaagtaggtgtatttttttacaaatccaaaattcctatatcccataatcataggtgtgtgttgagcagggcagatttcctttcctaatctctgttttctc

SEQ ID NO: 1036529 - DNA, 120 bp, Artificial Sequence
  ENSG00000261261_16 (sequence is synthesized)
aattgccaggagatcgctatccaaactgtcaccccctgatcagaaaagaaggagttatgtaagtaactgacagcacctgagcgatctctcatttggattaaatcaagttctttaaatatt

SEQ ID NO: 1036530 - DNA, 120 bp, Artificial Sequence
  ENSG00000261261_17 (sequence is synthesized)
catttctgtgcagggaacaacaagatatcaatcaactttgagcatcaccaggagggtgaaaacaatggtactgaattgcaaattgtaggactgcagaaataaagttctgttcacaaaaaa

SEQ ID NO: 1036531 - DNA, 120 bp, Artificial Sequence
  ENSG00000261261_18 (sequence is synthesized)
cactggcttcttgaaaagccaaagagaacaagagaaaagggatgaggagagtgaacagaggggaggagggaacaataggaaagggaggagaggtgagaataaagaaaagagggaggaaaa

SEQ ID NO: 1036532 - DNA, 120 bp, Artificial Sequence
  ENSG00000261261_19 (sequence is synthesized)
gagaaggagaaattggaagcaaaggtagaataatgagaggatgtggaagagcaggtagaggcagaagaacaggtgggagaaaaggaaagaagacaaatgaggagaagaagaagacaagca

SEQ ID NO: 1036533 - DNA, 120 bp, Artificial Sequence
  ENSG00000261261_20 (sequence is synthesized)
gtgtaaaagatggttagaagagatgggaaatacaagagaaatatgcaaaattctgccgccaccagaggcaacatttgccaacttttttgcagagtgttaagcccatgaaacgctctatga

SEQ ID NO: 1036534 - DNA, 120 bp, Artificial Sequence
  ENSG00000261261_21 (sequence is synthesized)
tcaaacaattttggaaaacagtgaatttatgtataccctcttttcttggagtttcacaatgcatgttagcagattaaaggctctgagaagtcttgctggaaagaaacctgttttacttca

SEQ ID NO: 1036535 - DNA, 120 bp, Artificial Sequence
  ENSG00000261260_0 (sequence is synthesized)
attaccattctcatattgcaaactcaagtaggcagttatgtagcccccgcccaaattagtgaacccaaaacaaaacccacaagatctcatcaacagtttttacctcacagctgacactta

SEQ ID NO: 1036536 - DNA, 120 bp, Artificial Sequence
  ENSG00000261260_1 (sequence is synthesized)
taaaggagttccaagtgcttccgccaactcctcctaccagcaactgtgaaaacaacggccacaaggagtaatgctgcttttcacacagaaagggcttctactgtgcctgaccttaagaca

SEQ ID NO: 1036537 - DNA, 120 bp, Artificial Sequence
  ENSG00000261260_2 (sequence is synthesized)
ggaaaagtaggggagctaaggaagctacctacaccgccctcacccccagtagccaggctcaggaaggaagaggcacagcggtgtgaatggatggagaagaggaggctggtaggctgagcc

SEQ ID NO: 1036538 - DNA, 120 bp, Artificial Sequence
  ENSG00000261260_3 (sequence is synthesized)
cctggctcctggaacgaacacacagccatggcagaggagaatgtggcttgaataggttccatgacttgtacaagaccacagctggtacatgatgaagcaaggacaagacacgggcatctg

SEQ ID NO: 1036539 - DNA, 120 bp, Artificial Sequence
  ENSG00000261260_4 (sequence is synthesized)
acctcaagagtctctccaatcatgaaatacctgtatgagttatctattgctgcataacaaattgccccaatatttagcagcttaggagcaggattgctggaatggtgggataaaacttag

SEQ ID NO: 1036540 - DNA, 120 bp, Artificial Sequence
  ENSG00000261260_5 (sequence is synthesized)
tggcttaaaacaacatctgttatctcacagtttctgtgggtcaggaatctgtgcatggcttagcagggtgactctacctcaccgtctctcatgaggctactatcaaggtgacaggcaagg

SEQ ID NO: 1036541 - DNA, 120 bp, Artificial Sequence
  ENSG00000261260_6 (sequence is synthesized)
tttggttgttagcaggatttagtccctcactggcactaggccagaggccaccctctgtcccttgccacatggaccactccccagggcacacacagcagcttgctttctcagagcaagtga

SEQ ID NO: 1036542 - DNA, 120 bp, Artificial Sequence
  ENSG00000261260_7 (sequence is synthesized)
acaagaagaaccagagagaaagagtgtgcaaaatggaagtcatggtcttttgtaacctaattttggaagtgacagctccttactattggcagagttgattcattagaagtgagccaccag

SEQ ID NO: 1036543 - DNA, 120 bp, Artificial Sequence
  ENSG00000261260_8 (sequence is synthesized)
gtccagcccttactcaaggggtagtgattacacagaggtgtcgataccagtaggtcgggatcattgggaggcatttcagaagccgcctaccaccgcgcctttctcagacaactgcccacc

SEQ ID NO: 1036544 - DNA, 120 bp, Artificial Sequence
  ENSG00000261260_9 (sequence is synthesized)
ccatcactcccaggggcaggctaaatggtgtgcttgtgttctgtgactgtgaccccccaccgcccccagccacagctgactggaccagagacggacacctgatccaaactaggccaatta

SEQ ID NO: 1036545 - DNA, 120 bp, Artificial Sequence
  ENSG00000261260_10 (sequence is synthesized)
gattctctcccccaggaattctgaattgcaattcagagaccctggttggtttctgctagaggtttgaaatgaaataattgggagctttgggacagccattttctgctgtgttcaaaaata

SEQ ID NO: 1036546 - DNA, 120 bp, Artificial Sequence
  ENSG00000261260_11 (sequence is synthesized)
agtagagatggctggataggagtgtgagagagagagagaggcatagagacagagaggatggttgtggttcctcccctgggtttggaaaggtacaataaaaactaggtttctgtcacatgc

SEQ ID NO: 1036547 - DNA, 120 bp, Artificial Sequence
  ENSG00000261260_12 (sequence is synthesized)
cattaattgcaaaattctatcctggattatcaactggatcttcagcaaacacatggtggtgtgtagagatgttctttgaagatttaattcatcactgttaataaaaatgtttaaccttta

SEQ ID NO: 1036548 - DNA, 120 bp, Artificial Sequence
  ENSG00000261265_0 (sequence is synthesized)
gctctgatgtcctgagtctataaatgactggccccttccttcaatcaagaaataacctcactacacccagctgtgggagagaataaaaatccaagacttcccaaaggctgagctgagagc

SEQ ID NO: 1036549 - DNA, 120 bp, Artificial Sequence
  ENSG00000261265_1 (sequence is synthesized)
aaagaggctgcttctctcgtggcccagcctcgctctctgcaggtcccccagctcacactgtacggcccacagacctccatctgcttgaccagcctgctgcggtcatctttgaggtgactc

SEQ ID NO: 1036550 - DNA, 120 bp, Artificial Sequence
  ENSG00000261265_2 (sequence is synthesized)
ttggcttccagctcatactccaggtccttcagcgtctgctccagaagctgcctttttgtggcactcaactaacagctttgaagaaagcgcaacagacaaaacagcttgattcacaagggc

SEQ ID NO: 1036551 - DNA, 120 bp, Artificial Sequence
  ENSG00000261265_3 (sequence is synthesized)
tgtgtgggctgatctggtgaagccgcaggctgtctgctttgttctaagtgtcctaccctcttggagttggtactagtattgagtagagctagtctcatgaatagaataatacaccagggg

SEQ ID NO: 1036552 - DNA, 120 bp, Artificial Sequence
  ENSG00000261265_4 (sequence is synthesized)
gtctgtttccttcagagtatatgaaagtgaatggccatctccgctacagaatgccacccttctgcagtgtctggcacagaagagttggaaagccccagtagttgaggacagctttggaga

SEQ ID NO: 1036553 - DNA, 120 bp, Artificial Sequence
  ENSG00000261265_5 (sequence is synthesized)
acccgtggaaaagcttgaggaaatgtgttcttctctgggaggctgacaggagcactgggcatttctaagagaacagcctagccttgaagatgacatctccagatgaagacccacatctgg

SEQ ID NO: 1036554 - DNA, 120 bp, Artificial Sequence
  ENSG00000261267_0 (sequence is synthesized)
atgcctcatcacaggatgcctggataaggcaaatgccaacccaaattaagttcagcagggtgaagtaaagttcatgaatccagaagatggactgacaaaacctttccaaccagttggttc

SEQ ID NO: 1036555 - DNA, 120 bp, Artificial Sequence
  ENSG00000261267_1 (sequence is synthesized)
gatgacagtccgagagtcttgcagaagagactatgccagacactcttgactactgatacctcaagaaactgactcatggacacaaactttggagtataagcgacatcccttaagcaacag

SEQ ID NO: 1036556 - DNA, 120 bp, Artificial Sequence
  ENSG00000261267_2 (sequence is synthesized)
gctagactacaccaaaggattcagtcgagatttctgggaccctttgtgaagcagacaacccaagatctagtggaacacaatgtaatgactgaatgaattaatgaaagaaatctaactcta

SEQ ID NO: 1036557 - DNA, 120 bp, Artificial Sequence
  ENSG00000269019_0 (sequence is synthesized)
ggggaacacaggggtccccggaacccaggcccttccggtccggcagctcctgctgcgacttgcagcgtttggggaaagttactcaccaactagtcatgcgcctcggatgccgccggccac

SEQ ID NO: 1036558 - DNA, 120 bp, Artificial Sequence
  ENSG00000269019_1 (sequence is synthesized)
ggggctcccggaggggggtccgacaccgcccggtgcccgggatccccaatctggccggtggatgaggccccatcccatgcacccgagtgcgggggacgggggggttaatattaattcagg

SEQ ID NO: 1036559 - DNA, 120 bp, Artificial Sequence
  ENSG00000269019_2 (sequence is synthesized)
atcccatccccacccgaggcaggacacccagtgcacgccccaactccgggacgcgggctctgaccctggaacttccgagattcccgcgacgccccctgtctctgggtccagaacttcggg

SEQ ID NO: 1036560 - DNA, 80 bp, Artificial Sequence
  ENSG00000269019_3 (sequence is synthesized)
ttcccgcgacgccccctgtctctgggtccagaacttcgggggacacctcttctgcctcctccaaccccagagatggggtg

SEQ ID NO: 1036561 - DNA, 120 bp, Artificial Sequence
  ENSG00000269019_4 (sequence is synthesized)
cagatgtaagccactgcatctggcctccaatgagttgttatgtgaagagaacgtgattaagttagaggactccaaccaggcctgaactctcaaggacagaaatgggtccaacctggcatg

SEQ ID NO: 1036562 - DNA, 120 bp, Artificial Sequence
  ENSG00000269019_5 (sequence is synthesized)
acatcctctaaatctttagctcctggcctctcaggtgccccctccagctacctccctcttccttctcttcattccccaagccatagctggttgggccaacctccagacattagcctcttt

SEQ ID NO: 1036563 - DNA, 120 bp, Artificial Sequence
  ENSG00000269019_6 (sequence is synthesized)
cccagccctgactcctgggagtgtctgtgtgcagctttgactcccccagcctgagtgtctctcaagggctgagaccagggcccatgtttccctagagtttgtcatcttccagcatagtgt

SEQ ID NO: 1036564 - DNA, 120 bp, Artificial Sequence
  ENSG00000269019_7 (sequence is synthesized)
ggacgcatgggggtcaggcaaagggggagtttgatgactcagtactattggtgattttgcatcacttgaaggagaccctgccttaaattcagaacttgacttctgcccacggctaaagtt

SEQ ID NO: 1036565 - DNA, 120 bp, Artificial Sequence
  ENSG00000269019_8 (sequence is synthesized)
aattcattcaacaaccccccatgaagcaatggagccaggctccctcaggcccaggcaagaaagggtcgtggagttggggtcgccagcactggtttatggatttgaggacctaggaccaga

SEQ ID NO: 1036566 - DNA, 120 bp, Artificial Sequence
  ENSG00000269019_9 (sequence is synthesized)
gtgagttggggatgggaggaggcagtgcttgaggcccctctgagcagcaaacctggacccgaggttcagttcccgcagacctaattaccctaatttgccacatgcactaattacctcctg

SEQ ID NO: 1036567 - DNA, 120 bp, Artificial Sequence
  ENSG00000269019_10 (sequence is synthesized)
ggtgccaggtggctgggcggggctgccccaatttccggaggtaggtcggggcccgattatttttggctgtggcgtccttgaagcctccgccatcagcagcgcttgaagggcagaaagtgg

SEQ ID NO: 1036568 - DNA, 120 bp, Artificial Sequence
  ENSG00000269019_11 (sequence is synthesized)
ggcggagaaattgaggccacatcaggggaggcactgcgggaattgggggtcggctggccttggagctccctgaacagggggccttgggcccaaggcctgagagtctttggcacctagcca

SEQ ID NO: 1036569 - DNA, 64 bp, Artificial Sequence
  ENSG00000269019_12 (sequence is synthesized)
gccttgggcccaaggcctgagagtctttggcacctagccagaggtggcaagatctggaggggca

SEQ ID NO: 1036570 - DNA, 120 bp, Artificial Sequence
  ENSG00000261269_0 (sequence is synthesized)
ctggagtggagccctaggactgaaattttccaaattgctcctggcaattcttatgtgcagccaagattgagaagattgaggggactaaaatagaactcaccatttctgtggcttccagga

SEQ ID NO: 1036571 - DNA, 120 bp, Artificial Sequence
  ENSG00000261269_1 (sequence is synthesized)
cacttcccagagacttcataagtatttctgttcctagcctcagactctttaaggttgagaataggagacctcacaatcatactgctgacttaggctttcttacctgtctgtaagagcctt

SEQ ID NO: 1036572 - DNA, 120 bp, Artificial Sequence
  ENSG00000261269_2 (sequence is synthesized)
atgagcggacacacacagtctatatatagatacacactttttacattatactagaagatgatgcctgtgatgtttatggtcacttactatgtttaaaaaatgcatgactggcctatggtg

SEQ ID NO: 1036573 - DNA, 120 bp, Artificial Sequence
  ENSG00000261269_3 (sequence is synthesized)
actcattatttcttcccagatgcttgaaccatgatgccagtgagtggaaatgactctattgggtgggatgggcccagcaggtcagacttacttaggcactggcactgagaaaagcaatac

SEQ ID NO: 1036574 - DNA, 120 bp, Artificial Sequence
  ENSG00000261269_4 (sequence is synthesized)
tgactgggtgtcgtgtacgtgtgactgcccatagcaataaccctctggtactgtgtctgtttatgtaaaaacttcttgtttggtagttttgactcgtatttgtagagctaggtactggtt

SEQ ID NO: 1036575 - DNA, 120 bp, Artificial Sequence
  ENSG00000261269_5 (sequence is synthesized)
attattgtgcttcatcctatcccagatttcccagtacattcctttagaagacatgtccatctccaactgctgggggctggccttttctgtaggccaaggtgctgccccattagccccacc

SEQ ID NO: 1036576 - DNA, 120 bp, Artificial Sequence
  ENSG00000261269_6 (sequence is synthesized)
tggttgtcatcactcacccatgtgttgtgtccatctctgacccatttcccctgccaccttgcctaaagcttctcctgtcagcctccccaccaccatgaagtgctaagagtactatgtcct

SEQ ID NO: 1036577 - DNA, 120 bp, Artificial Sequence
  ENSG00000261269_7 (sequence is synthesized)
gaggtaagggcacctgcaacggagattgtgaagagaagactgtgggtttctgtggttacaagcacaactctgggtcaaaaacccattccaagtcctcagaggggcaagtcccttccattc

SEQ ID NO: 1036578 - DNA, 120 bp, Artificial Sequence
  ENSG00000261269_8 (sequence is synthesized)
agtattaatatagctcatcagtgcctctgatgaaattgcccaggatgctggcagtgtggcctgggaggcttccagctcttggggtctggttacacatttattcacactgcggccatgtgt

SEQ ID NO: 1036579 - DNA, 120 bp, Artificial Sequence
  ENSG00000261269_9 (sequence is synthesized)
tgaggacctactatgtgctgtgtttgaccacacgtcctgtagaatgccgtttggttctgagtatgcctggctggaatggaaaccaggaaattctagagtaacaggctctagtcctttcca

SEQ ID NO: 1036580 - DNA, 120 bp, Artificial Sequence; identical to SEQ ID NO: 622872
  ENSG00000261269_10 (sequence is synthesized)

SEQ ID NO: 1036581 - DNA, 120 bp, Artificial Sequence; identical to SEQ ID NO: 622873
  ENSG00000261269_11 (sequence is synthesized)

SEQ ID NO: 1036582 - DNA, 120 bp, Artificial Sequence; identical to SEQ ID NO: 622874
  ENSG00000261269_12 (sequence is synthesized)

SEQ ID NO: 1036583 - DNA, 120 bp, Artificial Sequence; identical to SEQ ID NO: 622875
  ENSG00000261269_13 (sequence is synthesized)

SEQ ID NO: 1036584 - DNA, 120 bp, Artificial Sequence; identical to SEQ ID NO: 622876
  ENSG00000261269_14 (sequence is synthesized)

SEQ ID NO: 1036585 - DNA, 120 bp, Artificial Sequence; identical to SEQ ID NO: 622877
  ENSG00000261269_15 (sequence is synthesized)

SEQ ID NO: 1036586 - DNA, 120 bp, Artificial Sequence; identical to SEQ ID NO: 622878
  ENSG00000261269_16 (sequence is synthesized)

SEQ ID NO: 1036587 - DNA, 120 bp, Artificial Sequence; identical to SEQ ID NO: 622879
  ENSG00000261269_17 (sequence is synthesized)

SEQ ID NO: 1036588 - DNA, 120 bp, Artificial Sequence; identical to SEQ ID NO: 622880
  ENSG00000261269_18 (sequence is synthesized)

SEQ ID NO: 1036589 - DNA, 120 bp, Artificial Sequence; identical to SEQ ID NO: 622881
  ENSG00000261269_19 (sequence is synthesized)

SEQ ID NO: 1036590 - DNA, 120 bp, Artificial Sequence
  ENSG00000261268_0 (sequence is synthesized)
tgcgcattagcactccgatgagtggcttgctatgggcaggtcccccagacgcctctcccccagtaagctggccacactgctcctccagggatctcagagagatggcagcttgtcaagttc

SEQ ID NO: 1036591 - DNA, 120 bp, Artificial Sequence
  ENSG00000261268_1 (sequence is synthesized)
ctgagtcgctggtctcaatgtaggttgctgcaaggtttgatgctttaatgacatcatgaaggacccagccattccatctctctgctttgcattcctcaatgtgtcagctttgtgccagag

SEQ ID NO: 1036592 - DNA, 120 bp, Artificial Sequence
  ENSG00000261268_2 (sequence is synthesized)
tcacaagacggctacactcctccaggcattgtatgcagatataacgacataccccaaaagaagagaagacttctccagaagcctcccaggagaccttcacacatggcttattagatcaga

SEQ ID NO: 1036593 - DNA, 120 bp, Artificial Sequence
  ENSG00000261268_3 (sequence is synthesized)
gcccctccttaaaccaatcactaaaaaggaaaatggaattgccatgagtggctcagcaaaatcatgatttacccctggatgggaatcagggtcaccttcaaagagcatatggacatgtga

SEQ ID NO: 1036594 - DNA, 120 bp, Artificial Sequence
  ENSG00000261268_4 (sequence is synthesized)
acaaaattggggctcccaccatcggttgcagaggcagtcggcagtgtctgctacaagtgacatcaagtagcatctatcaagtggcattactttaacaaatattaacaatagggtcctcat

SEQ ID NO: 1036595 - DNA, 120 bp, Artificial Sequence
  ENSG00000261268_5 (sequence is synthesized)
ctcagtttagaagaaaaatccaaaatcaaagtagactgaagataaggtaaacggtgatgtttgccacactagtggtgaggttttcatagttttacccaaaccagtttttatttttagtgc

SEQ ID NO: 1036596 - DNA, 120 bp, Artificial Sequence
  ENSG00000261268_6 (sequence is synthesized)
ttggttggggtcactgaaacttccaggttgtcctaacctgttaaaatcttttaaaacattatttgtgactgtttctctttggacagtgctttttgttaatcacaaaaaacagggtagaag

SEQ ID NO: 1036597 - DNA, 120 bp, Artificial Sequence
  ENSG00000261268_7 (sequence is synthesized)
gtaataacacatgcaaagggatgtgtagcaatcaaagggaaatgttatccttcctaggagacaggatttatgggattcctggatcttttttgtgtctgattgttaaggtcttgacagcct

SEQ ID NO: 1036598 - DNA, 120 bp, Artificial Sequence
  ENSG00000261268_8 (sequence is synthesized)
ttcaattgaggaatacggtcgtgtctgttaaactaattgtagctgttcactccactatataattttacaacatttcagcttcaaatagaatggcttcaataaacataaagcagactgaca

SEQ ID NO: 1036599 - DNA, 120 bp, Artificial Sequence
  ENSG00000262791_0 (sequence is synthesized)
tggctcttccaaaggatttattggtcctatttacatctattgcaaattgtgagaaggcagcaggggccaacccctggacctcatctctgtctagaatgtgaggtcgcagggatgcttaag

SEQ ID NO: 1036600 - DNA, 120 bp, Artificial Sequence
  ENSG00000262791_1 (sequence is synthesized)
ccctcagctgaaggcacaaacactgtggtaggggtgggcagacaacgcatggactcactcctggcaggcgccactggggcctcctcattctcgtcctcctcgggcctctcataagcactc

SEQ ID NO: 1036601 - DNA, 120 bp, Artificial Sequence
  ENSG00000262791_2 (sequence is synthesized)
aggtccagtcgcagctcgctgcaaagcttctcatccactgcgatgtgatacaaagacagggccccacacgccagcccctggcggtgacaggcgtccatagccctcagcacgcggaagaga

SEQ ID NO: 1036602 - DNA, 71 bp, Artificial Sequence
  ENSG00000267313_0 (sequence is synthesized)
tccgagccaggtgcgggatgtaatctcgtggtgcaccgtttttcttaagccggtccgaaaagcgcaatatt

SEQ ID NO: 1036603 - DNA, 120 bp, Artificial Sequence
  ENSG00000267313_1 (sequence is synthesized)
agccggtccgaaaagcgcaatattcggttgggagtgacccgattttccagagatgaggtctcacaatattgcccaggctggtctcaagtccctggactcaagtgaccctcctgcgttgac

SEQ ID NO: 1036604 - DNA, 120 bp, Artificial Sequence
  ENSG00000267313_2 (sequence is synthesized)
gaatatctggacaggagtcagacaaagggaaggagaatccaggggaagatgaagcagctgcaggcctgtctgctaccctatatccggggaagagccagaaattgctgaccatagagagtt

SEQ ID NO: 1036605 - DNA, 120 bp, Artificial Sequence
  ENSG00000267313_3 (sequence is synthesized)
acattgtccagcttttcctccacgaaatggagcagcaacaaaaggccagatcattcaacctatgcttcctcaagtctgataacattagcgtttctctcagatatcagttcaagtaaggag

SEQ ID NO: 1036606 - DNA, 120 bp, Artificial Sequence
  ENSG00000267313_4 (sequence is synthesized)
ttgccaatagaagcaaagatgccaggaatcatcgtttttatttcagtgtccttacgaagacctttgagcacaatggaacgatgaggcaacattaaatattactggaatggggtatgaaag

SEQ ID NO: 1036607 - DNA, 120 bp, Artificial Sequence
  ENSG00000267313_5 (sequence is synthesized)
tttcttcctggaaaagagactccaactgtcttttgtacagtgcttgaaactcataccattaatcactctttgagactaaagctctgataacctgagtgaagaattggttacaaggacgtt

SEQ ID NO: 1036608 - DNA, 120 bp, Artificial Sequence
  ENSG00000267313_6 (sequence is synthesized)
acaatgcaccatgctaccttcagccatttgtgcttctgcataaattgttttgaccgattagccaatcagtcaccaacaagacccaaaaggaatgagaatctaaacagattgtcaccattt

SEQ ID NO: 1036609 - DNA, 120 bp, Artificial Sequence
  ENSG00000267313_7 (sequence is synthesized)
ggtgggtttgaacaccaagaggatagagcctagagcattgtggtctgctttaagacttctgagaggcaataaggagccctgagagaagctgagggcttcaagcaatgagatttgagccta

SEQ ID NO: 1036610 - DNA, 120 bp, Artificial Sequence
  ENSG00000267313_8 (sequence is synthesized)
cctcccttcatcaaaagtgcagctagaaaaacttggagaagcaaccagaacgggagttgggagggtaatacttttacatcaaaacaacactagctttattggctgtaataagagcaaagt

SEQ ID NO: 1036611 - DNA, 120 bp, Artificial Sequence
  ENSG00000267313_9 (sequence is synthesized)
atgtaagtagaaatgatattaatctgtcatgcatatcacttctcaagtggttcctcaacaatagtgttaatcaagctttgccctacttttatcggaaacctggtgaagaatagctttgac

SEQ ID NO: 1036612 - DNA, 120 bp, Artificial Sequence
  ENSG00000267313_10 (sequence is synthesized)
atttatcagacataggacactaagaaaattgccatatgtataaataaatttatgccttgaaaatgtttgtgccatgctctgggaaagggggtcaggaacaaatgagagggtagaggtaga

SEQ ID NO: 1036613 - DNA, 120 bp, Artificial Sequence
  ENSG00000267313_11 (sequence is synthesized)
agggaaaggtctgcagaatgtggaggtgagaaggaaagaagaaaagggttgggcatggagggaggtaacatcagggctaaacctaataggcctggggagactccagagattcaggcagtt

SEQ ID NO: 1036614 - DNA, 120 bp, Artificial Sequence
  ENSG00000267313_12 (sequence is synthesized)
aagtttctctccttttttttttttctggtgttctcattttcatttgggtggctttgggcaagtctttcttaatctcagatggtgctaacactttcatccaactgaggaatcaataacatg

SEQ ID NO: 1036615 - DNA, 120 bp, Artificial Sequence
  ENSG00000267313_13 (sequence is synthesized)
acaggcttaaaagtgttttgctaactataaagtgaaacactaatgttatttagagcaaggaagaaaaagtagagagcatctaataacttacaatgctattatggtaaaaaaaaaaaaagt

SEQ ID NO: 1036616 - DNA, 120 bp, Artificial Sequence
  ENSG00000267313_14 (sequence is synthesized)
aaaaagtgattcatcaattatcccaacctagaaagactcagccaaggatggacaaaatactaaattcctctcttagctatatatgaaataggtcagggagagggtttattttactgctct

SEQ ID NO: 1036617 - DNA, 120 bp, Artificial Sequence
  ENSG00000267313_15 (sequence is synthesized)
ccttcttataaatgtggggttcagaattgaacagttgttccatcaaccatgaccctaaaacctgggtatgctaggaatctaggagaagagattcaaatgtattttcgcttggatataaaa

SEQ ID NO: 1036618 - DNA, 120 bp, Artificial Sequence
  ENSG00000267313_16 (sequence is synthesized)
atggggaggaaaagccacagtggtgacatgtcattttgcatacctcagaattccagagatccctagcttttgattctgtgcaggctctctgtggtactggctgtatcagctgctcttaac

SEQ ID NO: 1036619 - DNA, 120 bp, Artificial Sequence
  ENSG00000267313_17 (sequence is synthesized)
catgaaccagaacatcttggagaggagctgctaagtgcctactgagtctgtagcatggaaaacatgtctgcaacgttaatggagagctccggtttctggggctgagagatttcaatcact

SEQ ID NO: 1036620 - DNA, 120 bp, Artificial Sequence
  ENSG00000267313_18 (sequence is synthesized)
tggggctgagagatttcaatcactgatattgtcagtgagtgagggtggcgggggccatggtgtatgcttgtctggaataaagaacatcagttttgaaaaaaaaatcaaaaaacaaaaaca

SEQ ID NO: 1036621 - DNA, 120 bp, Artificial Sequence
  ENSG00000267313_19 (sequence is synthesized)
caggtgtggttgtgagccattagtaggtgtgtaagcggactggagctgggccgacttcctcccacgcaacaaggagccctcctgcaaggccaggcagctcaccacagcaccactgctcag

SEQ ID NO: 1036622 - DNA, 120 bp, Artificial Sequence
  ENSG00000267313_20 (sequence is synthesized)
aaacaggaggttaattagcccagcacttaatgagagcgtctggaggaactgttaagaaaatactaaaaaataaataagatggagtaacgatggaaggaaggcatagacatgctccgaaat

SEQ ID NO: 1036623 - DNA, 120 bp, Artificial Sequence
  ENSG00000267313_21 (sequence is synthesized)
ggctggtagaagaaataatatggctgagacaaattgagaatgactgagcagctgaagcctggccccagtgctgcttaaggggcaccctcctaatgaacaagcagtgcagagatggaggaa

SEQ ID NO: 1036624 - DNA, 120 bp, Artificial Sequence
  ENSG00000267313_22 (sequence is synthesized)
cttatgaagcttggcagctatggtggtggtgaagtgtgtgtgcatatgtgtgtgtgtgttgggggtagggtagaatgggagatagagtttcttttcattttaaggactttggaatcacaa

SEQ ID NO: 1036625 - DNA, 120 bp, Artificial Sequence
  ENSG00000267313_23 (sequence is synthesized)
gacttctaagtcaaagaaattattatcttctatccctaggatcatttcgatttatttcctattaagcttggcacttatcaaaaataaatatttgtggaataaatgagtggattaaaaaaa

SEQ ID NO: 1036626 - DNA, 120 bp, Artificial Sequence
  ENSG00000267313_24 (sequence is synthesized)
tccagaaaaacatcagagagaaaaaaagaaacaaaagccagtctgaagaaatggttacattattttctacaatggcaatttcagaagttgtttttcttcatgcagagatatggatatgag

SEQ ID NO: 1036627 - DNA, 120 bp, Artificial Sequence
  ENSG00000267313_25 (sequence is synthesized)
ctggcatgctggagtcagctagaattggattgccagagcctgttgtgtgcacctgtccccaactctgtccagtgacctcagcctcctttcacagagactgaatttcaatcagctgctctc

SEQ ID NO: 1036628 - DNA, 120 bp, Artificial Sequence
  ENSG00000267313_26 (sequence is synthesized)
agttgacaatgataaaattatctctatatgggcaaatgcgtgctctttgtcgaaaaagaaagcttcagcttcatgttccaggtgagttaattaggcaatgtatgaatgctaatatctctt

SEQ ID NO: 1036629 - DNA, 120 bp, Artificial Sequence
  ENSG00000267313_27 (sequence is synthesized)
tggagcctgtcagctgagcaaaggagggaaactcaggatggagaactcctccccctccatccataagtggcacaccactggcctcctggtgttattaaaggaaaattggaaaagtttcca

SEQ ID NO: 1036630 - DNA, 120 bp, Artificial Sequence
  ENSG00000267313_28 (sequence is synthesized)
gaagattaagcagaaagcttacaacttgcacaagactctcaattttccagtggctctgacagaaggataaatcttcggctgttttaactaaaatggacggtcaagttggtatccatcgtg

SEQ ID NO: 1036631 - DNA, 120 bp, Artificial Sequence
  ENSG00000267313_29 (sequence is synthesized)
ctattgtggcagctattacccatttttgttatgcatctgtctcttcccagactataaattatttaaggtgtgagtcggagacctaggcatttcttatggccagaaccttaagcaatgtct

SEQ ID NO: 1036632 - DNA, 120 bp, Artificial Sequence
  ENSG00000267313_30 (sequence is synthesized)
gtctgaaaaaccaagagtcgggataaacaagtcaattgtgtatacatggaggtgggatgaataaagaggaggaggggttgatggaagaaaactgcacccaaaattatcgtgtgtcaaagg

SEQ ID NO: 1036633 - DNA, 120 bp, Artificial Sequence
  ENSG00000267313_31 (sequence is synthesized)
ctggctgtggagccgatcttacaacctcaaataatgtgatcatactatcactcagcataatttgtgccccccagttttgtatgtctaggctgcttaggaaattgatgaataacagaagat

SEQ ID NO: 1036634 - DNA, 120 bp, Artificial Sequence
  ENSG00000267313_32 (sequence is synthesized)
gccacttatcactgagatgaaccaagtcatcccagagggagtactatttgaagatgtgtggaacattctgtgaatatagaaaaggatcccataccatgattcaattcatgactgtggcta

SEQ ID NO: 1036635 - DNA, 120 bp, Artificial Sequence
  ENSG00000267313_33 (sequence is synthesized)
gtagagatccacatttcatgttttgctatccatgggatttaaatctgctgtcactctccttcctatgcagcttagattgcttgacctaacattacaattaaaccttacataaatgctaaa

SEQ ID NO: 1036636 - DNA, 120 bp, Artificial Sequence
  ENSG00000267313_34 (sequence is synthesized)
aaaggtaagatatcaagttatttctccaggtgtgtgtgtgtgtgtgtgtaaggtgccttagagactgcagcattttataccatcatttcagaaataaggacacagaggccttggagagag

SEQ ID NO: 1036637 - DNA, 120 bp, Artificial Sequence
  ENSG00000267313_35 (sequence is synthesized)
taagccggtccgaaaagcgcaatattcggttgggagtgacccgattttccagagatatggatatgagaggcattcctccacagaagaggcttaaccactttggcccttgagatctttact

SEQ ID NO: 1036638 - DNA, 120 bp, Artificial Sequence
  ENSG00000267313_36 (sequence is synthesized)
ctgtcttaggactctcgtctggcccatatggttttccaagggcagaagggcctctttttgatgagaggcagttttcagtaactcttaaagtgataacagcaaaggagaggagagagaaga

SEQ ID NO: 1036639 - DNA, 120 bp, Artificial Sequence
  ENSG00000267313_37 (sequence is synthesized)
agaaagcctcctgggtccagcatccctgtcttcttgtcaacttttcaagtaaagtaatgcatttcattacattttggatgccacaccagtttaatcccattgatagagggctatgcaatc

SEQ ID NO: 1036640 - DNA, 120 bp, Artificial Sequence
  ENSG00000267313_38 (sequence is synthesized)
ctttactttcacactgaaatattgccccctccacttaaaaaaaaaagtagaagaagaaaaagaaagaacgtttcttttggctcactctaaccagagacatacgagaaaactatttatggc

SEQ ID NO: 1036641 - DNA, 120 bp, Artificial Sequence
  ENSG00000267313_39 (sequence is synthesized)
aaatgaagttcagcctatccaagttggcacattacaaagctgccacagagagcatagaaaatggtgaatatttataaatgtacccttatatgggtacaaatgcaatggcagggcaggaaa

SEQ ID NO: 1036642 - DNA, 120 bp, Artificial Sequence
  ENSG00000267311_0 (sequence is synthesized)
aatagtaaattgctttatttgtggctacacatagcttagaaaaacttactttaaaatgaattctgtatgtgaacttgaaaaacaaataatattcaactcttctcctggtttcaaaataga

SEQ ID NO: 1036643 - DNA, 120 bp, Artificial Sequence
  ENSG00000267311_1 (sequence is synthesized)
catttgtatccagaaataaaaataaatgatttgtaattaattaatcacagtagcactgtgcagttggtatgaatttcaaaaatcagactttcaaaaatctctctgaagattcttgctatg

SEQ ID NO: 1036644 - DNA, 120 bp, Artificial Sequence
  ENSG00000267311_2 (sequence is synthesized)
cactgtctttgcacttcttagaaggaaaaaaaggttctccagaatttaattgaatgaagatgggaaattaacgccgttataagtgctacttgaagagggagttgaagaaagggtgttaag

SEQ ID NO: 1036645 - DNA, 120 bp, Artificial Sequence
  ENSG00000267311_3 (sequence is synthesized)
atcttccttgtctctttctgttatttcagcacagcctctttgtcccatgccatgcgactggctttgtcctttcagactttgatcttaaaacaattgccctccagctagaatattttactc

SEQ ID NO: 1036646 - DNA, 120 bp, Artificial Sequence
  ENSG00000267311_4 (sequence is synthesized)
tctccttgtaccagcattgtctctggtacagtgtccaagctaatactcggtagacagtagtgttaattccttagagctggaggtactattccattgttagatggaaaaacaaaagggatc

SEQ ID NO: 1036647 - DNA, 120 bp, Artificial Sequence
  ENSG00000267311_5 (sequence is synthesized)
caaaatttcaaagtgcaaaagaccccaagctaatgaagcttttcaatattagattaaattaaaagtggcaaaaaattggcagagaggatatttagaaggcacatacctccaaatcctgca

SEQ ID NO: 1036648 - DNA, 120 bp, Artificial Sequence
  ENSG00000267311_6 (sequence is synthesized)
tcgtgtgtcttagaatgcttatgcttgtaaacacttccatctttgaaatgcatccaaagcgttctcgcttttagcgagtgtaaatgccaggagaggtgctgggccctctctgttagcttt

SEQ ID NO: 1036649 - DNA, 120 bp, Artificial Sequence
  ENSG00000267311_7 (sequence is synthesized)
tttgactgtgaattccatttacacacacccttcaacactgctggttcctctgaagccattcctcacaagaatctctgttcatatgtcagttttgttgtcacaaagatgtatgttttacag

SEQ ID NO: 1036650 - DNA, 120 bp, Artificial Sequence
  ENSG00000267311_8 (sequence is synthesized)
agcactttaattcatttttgaagaagtaatatgagaaaatgtggttcccatatgtcctcgcacatgatatgtcagccttgcatgatggcagccttctctgtctgtcccctgaaggcagct

SEQ ID NO: 1036651 - DNA, 78 bp, Artificial Sequence
  ENSG00000267317_0 (sequence is synthesized)
ttttttttttgtagtgatggggtctcactatttttgcccagcctggtctcgaacttctgagctaaagtatgagcagcc

SEQ ID NO: 1036652 - DNA, 120 bp, Artificial Sequence
  ENSG00000267317_1 (sequence is synthesized)
tcgcccggcctcaattactttttatattgacaaagagaagatgttgcaatgtcctcaaacgtaaaacaccccctacagttccaattctgggcctgtcttctatctatctttgcccttctg

SEQ ID NO: 1036653 - DNA, 120 bp, Artificial Sequence
  ENSG00000267317_2 (sequence is synthesized)
gtccgttccctgttctgagccccagggaacttagggctgaaagtcacccccgaagcctcagaccagatcgggaggccacacgcagctcatggggacagagggcccagggtgacggtccac

SEQ ID NO: 1036654 - DNA, 120 bp, Artificial Sequence
  ENSG00000267317_3 (sequence is synthesized)
tgacccagcctgtgtccctttagcggccgaggagccaccacctgttcgggggctggaggatggcttcccagaggacctgggacactcacctagctcgttcatggcacggcggtactcctc

SEQ ID NO: 1036655 - DNA, 120 bp, Artificial Sequence
  ENSG00000267317_4 (sequence is synthesized)
atcaaaggacagcttcataacagcacaggtggcctggcagatctgcggctcgatggggatcggggctgtgggcacagggaccagatcagagcccccattcccaggaaatgtcccaggtga

SEQ ID NO: 1036656 - DNA, 120 bp, Artificial Sequence
  ENSG00000267317_5 (sequence is synthesized)
ctcccgaaggtcccgcaacccgcccgccccaggcctgaaggatcccgggagctttgcaaatggctgcaaagttgggacttcctttcccagcctctctaagatgggatgatggggtggcct

SEQ ID NO: 1036657 - DNA, 120 bp, Artificial Sequence
  ENSG00000267317_6 (sequence is synthesized)
ctctcactcagccttgggaagggaggcgaggtagttcctggagcaccacacctttcagctgtgcttctgccctttttaaaaataaaactgacgagacagggtctcgctctgttgtccaga

SEQ ID NO: 1036658 - DNA, 120 bp, Artificial Sequence
  ENSG00000267316_0 (sequence is synthesized)
atggagaagaaataagatgaactgcttgtcccagaaagcgatagaactttgaaagcagctatatatttcctagctacctctaaaaaatggagctgtcttcatgagacctgtaagaagcca

SEQ ID NO: 1036659 - DNA, 120 bp, Artificial Sequence
  ENSG00000267316_1 (sequence is synthesized)
tgaagaaggatgtgtttgtttcccttccttcatgattatcaaatggaggttcccatgattttctttttcctcatggaaacatgtttggtcagaagggaaacaaaccaattaaggtgatac

SEQ ID NO: 1036660 - DNA, 120 bp, Artificial Sequence
  ENSG00000267316_2 (sequence is synthesized)
caaaggatgatccttgatacagttgtattttggtggagcgttgagattcgccagtgaactctaacagtgaggatggcactggaataaaaagagaagaaacatgtactagaagccaaaaaa

SEQ ID NO: 1036661 - DNA, 120 bp, Artificial Sequence
  ENSG00000267316_3 (sequence is synthesized)
tgccaccatgtgaagaaggatgtgtttgtttcccttccttcatgatttcctggaggcagggaagtctaagatcaaggcaccagcagatttggtttttgatgtggtctctcttcctggctt

SEQ ID NO: 1036662 - DNA, 62 bp, Artificial Sequence
  ENSG00000224142_0 (sequence is synthesized)
tgcctactgaagtgctgggcttacaagtgtgagccaccgtgcccagccacttattttttatg

SEQ ID NO: 1036663 - DNA, 120 bp, Artificial Sequence
  ENSG00000224142_1 (sequence is synthesized)
taagtgtatagtaatgttaactataagcactctgcttagcttaatttttaaaggcacataatagtggctttacctaaagcaactcatttcttctaggaattttgggaatccttcacaaat

SEQ ID NO: 1036664 - DNA, 120 bp, Artificial Sequence
  ENSG00000224142_2 (sequence is synthesized)
taaccttataaacttactagaggggccaggcgcgctggggtgtagacgttttaaaaataatatcactgaattgtaatgcatcaatttgggttttggagcagtatctaacttgttccattt

SEQ ID NO: 1036665 - DNA, 120 bp, Artificial Sequence
  ENSG00000224141_0 (sequence is synthesized)
ttttggcaaccaggaagggacctccaaagcgacctgccactgactcccatccctccggatccggcaggctgtccgctgtgctcctgaaccagcgaggcacccattgccaatcctgattgg

SEQ ID NO: 1036666 - DNA, 80 bp, Artificial Sequence
  ENSG00000224141_1 (sequence is synthesized)
ctcctgaaccagcgaggcacccattgccaatcctgattgggctaaaggcttgccgttgttcctgcacggctaagtgccca

SEQ ID NO: 1036667 - DNA, 120 bp, Artificial Sequence
  ENSG00000224141_2 (sequence is synthesized)
aggctagccaccatcttggaagtggcctaccaccatcttggaagtggctcgccaccatctgaggagctctgtgagcaaggacccccgggagaaagcatttatggtgaggagaaaagcagc

SEQ ID NO: 1036668 - DNA, 120 bp, Artificial Sequence
  ENSG00000224141_3 (sequence is synthesized)
tggtatcacactctacccaagtcccaaaagcaggttcacataactcctgtcttcattatctgatatccgtatgaagaatgtaagatagaaaaaaacattagcatttgagaggattgaaag

SEQ ID NO: 1036669 - DNA, 80 bp, Artificial Sequence
  ENSG00000224141_4 (sequence is synthesized)
taagatagaaaaaaacattagcatttgagaggattgaaagagaagcattctcagcagagccaagattcacttagaacaaa

SEQ ID NO: 1036670 - DNA, 120 bp, Artificial Sequence
  ENSG00000224141_5 (sequence is synthesized)
acagctcgagctgagctttcactcaccgtccaccactgctgtttgctgccgtcgcagacctgccgctgactcccatccctccggatccggcagggtgtccactgtgcttctgatccagcg

SEQ ID NO: 1036671 - DNA, 120 bp, Artificial Sequence
  ENSG00000224141_6 (sequence is synthesized)
agcgaggcgcccattgctgctcctgattgggctaaaggcttgccgttgttcctgcacggctaagtgcccgggttcgtcctaatcaagctaaacagtagtcactgggttccacggttctct

SEQ ID NO: 1036672 - DNA, 71 bp, Artificial Sequence
  ENSG00000224141_7 (sequence is synthesized)
agagaacctgaggcttgccaccatcttagaagcggcttgccaccatcttggaagtggctcgccaccatttt

SEQ ID NO: 1036673 - DNA, 120 bp, Artificial Sequence
  ENSG00000224141_8 (sequence is synthesized)
gcggcttgccaccatcttggaagtggctcgccaccattttggcaaccaggaagggacctccaaagcgggagaaagcatttatggtgaggagaaaagcagctggtatcacactctacccaa

SEQ ID NO: 1036674 - DNA, 120 bp, Artificial Sequence
  ENSG00000224141_9 (sequence is synthesized)
agcctttggaatgatgtcttcatttcagattgtttttgcatttcataaggaaagaaaaactattttaacaaagtagatgccagacctatcagaatgaaagagaaacgtaggtgtccatat

SEQ ID NO: 1036675 - DNA, 120 bp, Artificial Sequence
  ENSG00000224141_10 (sequence is synthesized)
ctaaccatataaaaacatctctttgtaataatgtgctttgacatttttgatatatgaagtgcttgtgagtcattaatcaactgtctttaattaagagattcaaaaaggaattgaacaaac

SEQ ID NO: 1036676 - DNA, 120 bp, Artificial Sequence
  ENSG00000224141_11 (sequence is synthesized)
agcagagaatagaaataaaacctcacatccttcctcagtcatttgcagggggtggtaggtgtaggaataaaattcaaatgtttatgacatattggctctggatgcaaacttatgattatc

SEQ ID NO: 1036677 - DNA, 120 bp, Artificial Sequence
  ENSG00000224141_12 (sequence is synthesized)
atgctttcatgttgggggattcaaaatgtattttaatcatgtaattgctcagttttgattctaccactgaatacagtttcctgaaaatcaatagtaatcaccattactctctttctctag

SEQ ID NO: 1036678 - DNA, 120 bp, Artificial Sequence
  ENSG00000224141_13 (sequence is synthesized)
ttttcaatgcatacatttacttccttgaaacaaacatctctctacgacctctttgtcacattgatgaatggtgttaaaagaaagaataatgtatttaataaatcccaacattcagtgaaa

SEQ ID NO: 1036679 - DNA, 120 bp, Artificial Sequence
  ENSG00000224141_14 (sequence is synthesized)
tttttccctttcaccttccattataggatgatgcagcaagaaggccctcaccagataccagtcctttgatcttggactacccaggcttcagaactataagaaataaatctccgttctttg

SEQ ID NO: 1036680 - DNA, 120 bp, Artificial Sequence
  ENSG00000224141_15 (sequence is synthesized)
aggattacccagtttgtgctattctgttatggcagcacaaaatggactaagacataggtccaatctaaggcctatctcccagaggacacctcatagctgtgaatgaatgagcactaagta

SEQ ID NO: 1036681 - DNA, 120 bp, Artificial Sequence
  ENSG00000224141_16 (sequence is synthesized)
agccagcatctgccttttttgttctggaaatcccactgtttataagatttcaaactattgcacatctctggtaatcttttctccttgtttctctctctacaaggtcaaacagacctgtac

SEQ ID NO: 1036682 - DNA, 120 bp, Artificial Sequence
  ENSG00000224141_17 (sequence is synthesized)
attttcaactgactctactggttccttttattttattttacatgctaactttgatgcttccccttgctattgagggacaatttagaataatgattaaagggaatattttacaaccagaaa

SEQ ID NO: 1036683 - DNA, 120 bp, Artificial Sequence
  ENSG00000264569_0 (sequence is synthesized)
tgacccatcttccgtgcttgaaatcgacgtagtggaccctggctagcatatttttccctgccaagattattgcaaaaagacgatgtggtggttaatatcggaaagaatgtgtggttaata

SEQ ID NO: 1036684 - DNA, 120 bp, Artificial Sequence
  ENSG00000264569_1 (sequence is synthesized)
tcaggaagaacacgtgaaatggagaatttcagggctaacatttcttgttttgtttctgaaaacatcggcatgtcctaaaaagtgtcgcctgtgcccatcatctctcaggcttgggagcag

SEQ ID NO: 1036685 - DNA, 120 bp, Artificial Sequence
  ENSG00000264569_2 (sequence is synthesized)
tcagcagagctccgctttcatctgtgggcgaaggattacctagatgccaaggcaagagactgaagacacaaactgtttcagtataacaaagaaaataggccgggagcggtggctcacgcc

SEQ ID NO: 1036686 - DNA, 87 bp, Artificial Sequence
  ENSG00000264569_3 (sequence is synthesized)
atcgagaccatcctggctaacacgctacctaaaagggaagcgccccctgtcctatgggaagattcaccctccttaccctgccctcct

SEQ ID NO: 1036687 - DNA, 120 bp, Artificial Sequence
  ENSG00000264569_4 (sequence is synthesized)
cttaccctgccctccttgtcttgtatgcaataaatatcagtgcgcccagccattcggggccactactggtctccgtgtcttgatggtagtggtcccccgggcccagctgttctctcttta

SEQ ID NO: 1036688 - DNA, 120 bp, Artificial Sequence
  ENSG00000264569_5 (sequence is synthesized)
agacaccaatgtcagcagagctccgctttcatctgtgggcgaaggattacctagatgccaagctacctaaaagggaagcgccccctgtcctatgatcacgtgacttgcttcaccttgtca

SEQ ID NO: 1036689 - DNA, 120 bp, Artificial Sequence
  ENSG00000224149_0 (sequence is synthesized)
aaaatactaaccttgatctaagagcgtctatctctgcataagtggagaaaatgattcatttttagaggtttctgggcttggggaagaagaatggtcgtcagacaggagcagaagacgtga

SEQ ID NO: 1036690 - DNA, 120 bp, Artificial Sequence
  ENSG00000224149_1 (sequence is synthesized)
aagattggtctggcctcgctttactccaggcgccttgtgggatgctgacctgtcccggggtgcagctgcgcgcacccctccttgagctgtaagcctctgggcggtggaaaagcaatcgcc

SEQ ID NO: 1036691 - DNA, 120 bp, Artificial Sequence
  ENSG00000224149_2 (sequence is synthesized)
tgcgtcgtgacagttcctacctactaaattgaaaatttgaaaatcagaggcggcaggcccacccaaggtgtctaccaacatccgtggaccacagggctttttgcaagcccatgggaaaga

SEQ ID NO: 1036692 - DNA, 120 bp, Artificial Sequence
  ENSG00000224149_3 (sequence is synthesized)
cagcctgagagacttcggagtgcgtcctgtcccaggctgtgcctctcctgcttaagggaagccttgagtgtatctccctaaaaacagatgggggcagggaaggggtctagatcccgtgga

SEQ ID NO: 1036693 - DNA, 120 bp, Artificial Sequence
  ENSG00000224149_4 (sequence is synthesized)
gccaggccttgattggaggtccgggctggagagagggaacatcaacccgccctgacccccacagcttccactcacccgaagagctgcctaattgggctgcgagcagctgcgaaatttgta

SEQ ID NO: 1036694 - DNA, 120 bp, Artificial Sequence
  ENSG00000224149_5 (sequence is synthesized)
atcgtctaatgagccttccgcctcggtaattcttatcaaaaggcataaaactgatattttcacactcagctcgcactgcaggcgccgtttataaacatccttcatcagtgggatgaaatt

SEQ ID NO: 1036695 - DNA, 120 bp, Artificial Sequence
  ENSG00000224149_6 (sequence is synthesized)
aagcctgcattgacagaggtctctggaactcgatatttaaaagcaatagatccgaattagcaaattataactttaagtagggaaagtccccaccaacttgactattgaaccctttgcctc

SEQ ID NO: 1036696 - DNA, 120 bp, Artificial Sequence
  ENSG00000224149_7 (sequence is synthesized)
tgagctcctcggggtgagtaaccacacgtttgagagaacttaacctggaggttctgcggtgctcaggcaatctccggaaactcggattcccgaaactgcccctgctacggctcctcccgc

SEQ ID NO: 1036697 - DNA, 120 bp, Artificial Sequence
  ENSG00000224149_8 (sequence is synthesized)
ccgccttctagggactcgcctgggtcagacctgtggagatcggggcgaggcacagctggagcctgagagaaaacgtggtcaaaggaggcgcatccaggactcccgggcggcctgcaggcg

SEQ ID NO: 1036698 - DNA, 120 bp, Artificial Sequence
  ENSG00000224149_9 (sequence is synthesized)
ccgcggccctcaccgcccacctccagggctccagcgccaagggtacagtgggccataggactgtaggaggcggtggaggatggggagactttcgcgatcataagaaggtgcggattctgg

SEQ ID NO: 1036699 - DNA, 120 bp, Artificial Sequence
  ENSG00000224149_10 (sequence is synthesized)
cagaattctggttggcgactccttcgatccctgaaggtgaaatctcagctaaaaccactctgaaactgtggatgtcacacttggttcagggttaggagaccgtgtctttggatttttgcc

SEQ ID NO: 1036700 - DNA, 120 bp, Artificial Sequence
  ENSG00000224149_11 (sequence is synthesized)
catcacgtgtaaccattataaatattagtctggaaaaagactttaggagattgcttctagaggttctttccacaaacttaccctgctcagaatctgcataacccctcagagatggcagag

SEQ ID NO: 1036701 - DNA, 120 bp, Artificial Sequence
  ENSG00000224149_12 (sequence is synthesized)
ctgtatacgggctcaccttgggacttaccggtcccagactccgttttataccttgctacccacagtttctgagggtaagagaggggtgcttttattcacgccagtggaggtcgccaaaag

SEQ ID NO: 1036702 - DNA, 120 bp, Artificial Sequence
  ENSG00000224149_13 (sequence is synthesized)
cgggcgagggcctccgtctgggacccactggtctctctcccactgtgggccaagactgaggtttgatgggcttcccagctgggcaagcctgctccacgcgggacacccgggaatccactg

SEQ ID NO: 1036703 - DNA, 120 bp, Artificial Sequence
  ENSG00000224149_14 (sequence is synthesized)
gcgggcagaccctgccttcgccacccgccccgcggcattcctcactgcggtctgatgcgccagctggggccagttgtttcaagcggttctggaggaccaatagcggaaagccaagttctg

SEQ ID NO: 1036704 - DNA, 120 bp, Artificial Sequence
  ENSG00000224149_15 (sequence is synthesized)
cgaccaagagtctgtacgagtgactcggtgtttctttccagccggttcgcagagcgccagtaagctctcccggtccgctacggaagaaataggggaagcgtttccagtctaagagagagg

SEQ ID NO: 1036705 - DNA, 120 bp, Artificial Sequence
  ENSG00000224149_16 (sequence is synthesized)
atgggagagagaaaattaggaaccacgccgaaattaagcagggcagcctggaaagcttcccggctaaaagctatggcgcgaaacgctaaagtccatcacaccatttattcattgtgacat

SEQ ID NO: 1036706 - DNA, 120 bp, Artificial Sequence
  ENSG00000224149_17 (sequence is synthesized)
ttccaagccgacaatagcgccttaagcacgcctgtggtttggaggtgccggttttatatgcattttactgtttagaatgataaacaaatcaggaccaatggaaacctgattctaacctct

SEQ ID NO: 1036707 - DNA, 120 bp, Artificial Sequence
  ENSG00000275869_0 (sequence is synthesized)
ggagagactacaactcccagtatgcaccgcgatgcgcgcctcaccctgcatctcccagcccgcagccagctggcatcctagaccctctgccctgcgaccaacagccgggagcggaccaga

SEQ ID NO: 1036708 - DNA, 120 bp, Artificial Sequence
  ENSG00000275869_1 (sequence is synthesized)
caccagaactcccggaacggttgaagacggttccgctccctgtcccgcctttcgcagcccagcagtttcgccctgcggagaggagccttgctgtttccaaatctctcctgctgaagagac

SEQ ID NO: 1036709 - DNA, 120 bp, Artificial Sequence
  ENSG00000275869_2 (sequence is synthesized)
attggagctagggcggctagtttcacctggtaattgtgacaccctgtctcctcgagctgcaggcttttatgcttgtcatgttcgaagtttgataccttgcagatcaacaaagggtcggtg

SEQ ID NO: 1036710 - DNA, 90 bp, Artificial Sequence
  ENSG00000275869_3 (sequence is synthesized)
aaactgatagacactgcctcagctccgtgcagggcagacgcacaagagcagaatctccgtgggacatctctctggagcatcaatattact

SEQ ID NO: 1036711 - DNA, 120 bp, Artificial Sequence
  ENSG00000275869_4 (sequence is synthesized)
gaatctccgtgggacatctctctggagcatcaatattactgcagtatttggaagaaacaaatttaaataagttctaaggtgaagaatggaacatttaagacaagtctggaaagtcatctg

SEQ ID NO: 1036712 - DNA, 120 bp, Artificial Sequence
  ENSG00000275869_5 (sequence is synthesized)
gtcaattgaaagtcctgcctgctgctttcctaaatcacaatatggccttggtatggttttatttgtacttttgtgggggattcgtggatctttagattaaaaaaaaaaaataggtttttg

SEQ ID NO: 1036713 - DNA, 120 bp, Artificial Sequence; identical to SEQ ID NO: 748366
  ENSG00000275869_6 (sequence is synthesized)

SEQ ID NO: 1036714 - DNA, 120 bp, Artificial Sequence; identical to SEQ ID NO: 748367
  ENSG00000275869_7 (sequence is synthesized)

SEQ ID NO: 1036715 - DNA, 120 bp, Artificial Sequence; identical to SEQ ID NO: 748368
  ENSG00000275869_8 (sequence is synthesized)

SEQ ID NO: 1036716 - DNA, 120 bp, Artificial Sequence; identical to SEQ ID NO: 748369
  ENSG00000275869_9 (sequence is synthesized)

SEQ ID NO: 1036717 - DNA, 120 bp, Artificial Sequence; identical to SEQ ID NO: 748370
  ENSG00000275869_10 (sequence is synthesized)

SEQ ID NO: 1036718 - DNA, 120 bp, Artificial Sequence
  ENSG00000225439_0 (sequence is synthesized)
actgcagcgcctgccgacctcggggccccgccctctgccttcgctcgcgccgctctccttcagtctccccagggcctgtttcatggatagggtccccttgcccgcgtgaaagtctcattc

SEQ ID NO: 1036719 - DNA, 120 bp, Artificial Sequence
  ENSG00000225439_1 (sequence is synthesized)
ctcctcagctcagaaacactccaaggtgcggggactcgtggaaggatttgattcgcgcttgagaaagatcgctccgctcctgtaaggaagagagcgtgtaggggctgcaaccagagacac

SEQ ID NO: 1036720 - DNA, 120 bp, Artificial Sequence
  ENSG00000225439_2 (sequence is synthesized)
agtcagaagctccgaggctaccgcgatggtccaggacacagcctaacagaggcccaggttggagccatggaccatggagtcatgagaatggaagggaagctgacgccatgtgggatgggg

SEQ ID NO: 1036721 - DNA, 120 bp, Artificial Sequence
  ENSG00000225439_3 (sequence is synthesized)
tagaactgtccgcaaattcgtcccgcctctggagtcttcagaccagtcaaggccgaaattcaaccaagcctctcctctctctagctgttatttgtttgcagcacgcggtctggtggcacc

SEQ ID NO: 1036722 - DNA, 120 bp, Artificial Sequence
  ENSG00000225439_4 (sequence is synthesized)
ctgcaggatttaccagctttttgccaacattctggcctatgcaatcaatacgtcccttcagcgttgcacttggatggattggacctatagttgttatatatggatattgtctaatttatt

SEQ ID NO: 1036723 - DNA, 120 bp, Artificial Sequence
  ENSG00000225439_5 (sequence is synthesized)
tattacagtattaactgactcctatgttctggccttcagaatttctcctttggatcaattactagcctgtcttacattttctgcttcattcttttaaaatgtttagagatgatttgctaa

SEQ ID NO: 1036724 - DNA, 120 bp, Artificial Sequence
  ENSG00000225439_6 (sequence is synthesized)
gttttcttcattgctgtcaatgatgcaatttaaactgtcaaaaaaattttttctcaagcagggtagtaatggtgaaccattcccttgctattcagacagcatggtttagatgaggcgcac

SEQ ID NO: 1036725 - DNA, 120 bp, Artificial Sequence
  ENSG00000225439_7 (sequence is synthesized)
ctatccccagctttaggaatggaaacaggacccaagtctggctaatcagagactggtttagggtcggccccatggtctgagccagaccaatgagaattggtagagggacttccttttgca

SEQ ID NO: 1036726 - DNA, 120 bp, Artificial Sequence
  ENSG00000225439_8 (sequence is synthesized)
acttctattttagaatcgggggtatatatgcaggcttgttacagaggtatattgcatggtgctgaggtttggagtatgaacgaatccgtccttcaggtaatgagcatagtacccaatagg

SEQ ID NO: 1036727 - DNA, 120 bp, Artificial Sequence
  ENSG00000225439_9 (sequence is synthesized)
tagtttcaacccttgcccccttcctccttccccagtcttgtattccccagtgtctgttgttcccagacattgatctttttcctctatgttgctaagctggtagaaaggctggagttgctg

SEQ ID NO: 1036728 - DNA, 120 bp, Artificial Sequence
  ENSG00000225439_10 (sequence is synthesized)
gcaaccatctttgcaaccatgcagggagaactactttggaaatgaagcaagataaagaagaaaacagataaaaggagacaaatgtttgactttgtacagctggaaaccagcaatgctgga

SEQ ID NO: 1036729 - DNA, 120 bp, Artificial Sequence
  ENSG00000225439_11 (sequence is synthesized)
aatgagcactgaaggcagtttaatgggtttgtcacttgtaaccaagtgacccatggcaagctcacagatttgtattggcagaattcctccttttctttatttaaaatggtacttttggcc

SEQ ID NO: 1036730 - DNA, 120 bp, Artificial Sequence
  ENSG00000225439_12 (sequence is synthesized)
aggcaaggtggttcacacctgtaatccaaagactttgggaggccgaggcgcactgatcacccaaggtcagaagttcgagaacagcctggccaacattggcgaaaccccatctctactaaa

SEQ ID NO: 1036731 - DNA, 120 bp, Artificial Sequence
  ENSG00000225439_13 (sequence is synthesized)
aatacaaaccattagctggctgcggtggcctttctaccagctttttgtctcaaaaaaaaaaaaaaaaaaggtacttttgcttatctctaaccttcctcttccccataatttaacagttgc

SEQ ID NO: 1036732 - DNA, 120 bp, Artificial Sequence
  ENSG00000225439_14 (sequence is synthesized)
ttactctgagctactctctgccccattctcctcctcttatcttcagttcctcctaggctgtcagagccatctgaaatgaaaacatttaggccgggcatagtggttcatgcctgtaatccc

SEQ ID NO: 1036733 - DNA, 120 bp, Artificial Sequence
  ENSG00000225439_15 (sequence is synthesized)
aaatgaaatgaaaacatttgctacttgaaatccttcagattccccatcgcctacctacaggcaaaactctcaagttcttttgtatgatttaaccactatctacctgtccaactgaaatct

SEQ ID NO: 1036734 - DNA, 120 bp, Artificial Sequence
  ENSG00000225439_16 (sequence is synthesized)
acccttcagtaatattatacttgcacctcccttcataagctatgctacaagtttggttatgcagttgcccaccttttaaggttcaagccttgtcttctccaaagagccacctctgactgc

SEQ ID NO: 1036735 - DNA, 120 bp, Artificial Sequence
  ENSG00000225439_17 (sequence is synthesized)
ctcacagtaagcttagggcccgcaacttacctgtaacttttgttgcacttatggccttttacaactatcaatttatgtatgtgtctgttctcactggtttataagctccctgaggacaga

SEQ ID NO: 1036736 - DNA, 120 bp, Artificial Sequence
  ENSG00000225439_18 (sequence is synthesized)
gccttgcttgagtcatctgtcagcagcccaatatgggacaaaaagtgcatgcattgtaattactgaacagaactgatagaggctcagcaatttgcgctccataggtctaagtttgaactt

SEQ ID NO: 1036737 - DNA, 120 bp, Artificial Sequence
  ENSG00000225439_19 (sequence is synthesized)
ttctagaaaaggatttgcaggacgatctgacgaatcttgggcttccaaattagttccaacagttctagtatttttttttttttttgacagaagcaaataagtaagttttactttgtgatt

SEQ ID NO: 1036738 - DNA, 120 bp, Artificial Sequence
  ENSG00000225439_20 (sequence is synthesized)
aaaacaaaagtgaaatgcatttagtcccaggaaatgtcaatcctttctgcatcttacttttttttgctgtgacctcgagattctcttgttctcttcagttgtattggtccatgatcactc

SEQ ID NO: 1036739 - DNA, 120 bp, Artificial Sequence
  ENSG00000225439_21 (sequence is synthesized)
atagctttcatacacatatatacatctgaaactcagaaaattcattaggtaggaactctttggatgcatctccttttttaacctcattgggatgatttttcgttgcaccatcattttata

SEQ ID NO: 1036740 - DNA, 120 bp, Artificial Sequence
  ENSG00000225439_22 (sequence is synthesized)
gagcttcctagcactgctgagcatgcagaatttttgcaaatgcaatccagagaaacagacttgctatatactagctatttgaacttgtctgagcttatgtggcatggtctaaagaatact

SEQ ID NO: 1036741 - DNA, 120 bp, Artificial Sequence
  ENSG00000225439_23 (sequence is synthesized)
gaaatatttctggcatacctcttaattgcagtcactttctccaggttgctttatggattaaatgagataacctactaaaggactccagtaaaaagctaaaaaggtagctagcttttgagg

SEQ ID NO: 1036742 - DNA, 120 bp, Artificial Sequence
  ENSG00000225439_24 (sequence is synthesized)
tgttgtggcagactggcatctagtggccagcgataaaggtgcagactagtgtccacacctaagtggggacagtgcaggctgtaatgtccatacctagtggggacatcaatggggtatttg

SEQ ID NO: 1036743 - DNA, 120 bp, Artificial Sequence
  ENSG00000225439_25 (sequence is synthesized)
tcagagaagctccatggcatagtttggacattgtttctggctgtgcaggttcaaacccagagtctggctctcccaaagattatctgagttattctattattttacaaagtttgaaatagc

SEQ ID NO: 1036744 - DNA, 120 bp, Artificial Sequence
  ENSG00000225439_26 (sequence is synthesized)
cattagatacccttacaaacttatcatttttgtgattgattttaagtctactgaaaatgtcaaaagaaatccaaaactgattgctagtaactaggccaggtgtggtggctcacacctgta

SEQ ID NO: 1036745 - DNA, 120 bp, Artificial Sequence
  ENSG00000225439_27 (sequence is synthesized)
tccctcatccgaatacccctcgtgctcctgatgtacttttccattcccactccctactctggcagtctagcttctaagctgaggagtttggccttcgctccaggtgcggggactcgtgga

SEQ ID NO: 1036746 - DNA, 63 bp, Artificial Sequence
  ENSG00000225439_28 (sequence is synthesized)
tctctactaaaaatacaaaaattatccagacatggtggcacatgcctgggttgcagtgagccg

SEQ ID NO: 1036747 - DNA, 120 bp, Artificial Sequence
  ENSG00000225431_0 (sequence is synthesized)
caggctttgcctgtaagagggctggtctggggggacatctgaacccaattcaggaacacctcacaggtctgccagcagggctagacccggggtgagatccagggcaacagggtctgcctg

SEQ ID NO: 1036748 - DNA, 120 bp, Artificial Sequence
  ENSG00000225431_1 (sequence is synthesized)
ggaagctcagctccggcactgcctggggcgtctctgcctacacaggaccattcctctcgcctggactcctcttggagtttgccaaggctggcctctgcagaaataggagactcctggagg

SEQ ID NO: 1036749 - DNA, 120 bp, Artificial Sequence
  ENSG00000225431_2 (sequence is synthesized)
aagacagtggacttcagcaagctgcaccaaggagaatccacagcggcagctgccctgccaggcgcgggatctcggtcaaggtggatcaacacagcctcaggtgtgtgctctgccccactg

SEQ ID NO: 1036750 - DNA, 120 bp, Artificial Sequence
  ENSG00000225431_3 (sequence is synthesized)
agatggcaagtgcattcttttctattcctacgaggaaagagcatccgaaagagcctgccttcacataggatgaataacagtggaccttggctttgcctcagtgttatgtgctaataaacc

SEQ ID NO: 1036751 - DNA, 120 bp, Artificial Sequence
  ENSG00000225431_4 (sequence is synthesized)
atgtattctatgccctaaggaagcccagagagaactggacaagctggatatcccaaagagcatggcactggcccaccacattgattacattgcgctggccgggtgctaaccaagaagcag

SEQ ID NO: 1036752 - DNA, 120 bp, Artificial Sequence
  ENSG00000225431_5 (sequence is synthesized)
ctaacacactgggagtcttggtaagatgcctgagtgcctgcagctggcagacaaatcctacaaagattctgggaactgccactaataacactcttggtggggaggtcccatatcccataa

SEQ ID NO: 1036753 - DNA, 120 bp, Artificial Sequence
  ENSG00000225431_6 (sequence is synthesized)
ccaggagcatactgggcctcctgtccacagcaaagagccaattactgcatcttgcatctcccatgaccaagagagacagacaatgccagtacgccttctggaggcagcacgttccacaca

SEQ ID NO: 1036754 - DNA, 120 bp, Artificial Sequence
  ENSG00000225431_7 (sequence is synthesized)
gtgactcaggccctgcagctggtcggaccctgtgttatgagaggtatcagacgtgggaaagcaatgctgtgtgtttatggcaaaccactatgccagaatcacagtgcaggcccctgggat

SEQ ID NO: 1036755 - DNA, 120 bp, Artificial Sequence
  ENSG00000225431_8 (sequence is synthesized)
tcagaaacaaagccgtgccatctgcggcagaggattctgcgaaaaattctgaaaagtccctgttgatgtgctcctggggcctggggtgatggaatacctgattgtgcatgtggaactgct

SEQ ID NO: 1036756 - DNA, 120 bp, Artificial Sequence
  ENSG00000225431_9 (sequence is synthesized)
cagatgagctggattctgtctcacccctgggtcatgaggttggggactcagaaataacccatcacaggtgggagtgtgcgtgtggcagcagcagaagcaggagcaggaggccaagcagcg

SEQ ID NO: 1036757 - DNA, 120 bp, Artificial Sequence
  ENSG00000225431_10 (sequence is synthesized)
gcagctgcccagtacccccccccaccctccacagcagtccccacagccccagtggaggaaccttctggtgaactgaggagggagggacaagcccggcctcagttcatggaggtgtctgct

SEQ ID NO: 1036758 - DNA, 120 bp, Artificial Sequence
  ENSG00000225431_11 (sequence is synthesized)
cctcagttcatggaggtgtctgctctgcctgtggggccagcccaaatcgcctggctgccatactccagtctcagcaagctgccctttaaagagggtgatatggtttggctctgtgtcccc

SEQ ID NO: 1036759 - DNA, 120 bp, Artificial Sequence
  ENSG00000225431_12 (sequence is synthesized)
gaactgtaatccccaggtgatgagggtgagacctgatgggaagtgattggatcatgggggctgttttccccatgctgttctcgtgatagtgaaggagttctcatgagatctgatggtttt

SEQ ID NO: 1036760 - DNA, 82 bp, Artificial Sequence
  ENSG00000225431_13 (sequence is synthesized)
tctgatggttttataagtgtctggcaattcccctgcttgcacttgtctttctcacccaccaccacgtaagacgtgccgtccc

SEQ ID NO: 1036761 - DNA, 120 bp, Artificial Sequence
  ENSG00000225434_0 (sequence is synthesized)
gaaatgctgcagagacccagccggaaacagtgctggccagctcacgcctgacccacccttattctaagcatagggtctgcctctgaagagctaaagacttcctgaaatttaaaaattagt

SEQ ID NO: 1036762 - DNA, 120 bp, Artificial Sequence
  ENSG00000225434_1 (sequence is synthesized)
gcttttatttgcttgtcctgctaagaccgtaggcaaaggccatcctcctcccattgacagtttagagtgggcagaaacaaccacggttaccctagaagtaaatccagagctgcgggacgc

SEQ ID NO: 1036763 - DNA, 120 bp, Artificial Sequence
  ENSG00000225434_2 (sequence is synthesized)
tggaggacaaaaccaaccttccagggaagccgaggagaagtcatgccttcaaaagatgaagaaactgacatctggagaagttgaagtaatttgcacaaagattcacttggctaacggagt

SEQ ID NO: 1036764 - DNA, 63 bp, Artificial Sequence
  ENSG00000225434_3 (sequence is synthesized)
cgcggctgggaagttcaagatccaggcctcagaagatttggggtttggtgagggccatcttct

SEQ ID NO: 1036765 - DNA, 120 bp, Artificial Sequence
  ENSG00000225434_4 (sequence is synthesized)
aggcctcagaagatttggggtttggtgagggccatcttctcactgtagccttacatggtggaagaggtaaggcagctctctggaacctcttttataagggcactaatccctttcatgaga

SEQ ID NO: 1036766 - DNA, 120 bp, Artificial Sequence
  ENSG00000225434_5 (sequence is synthesized)
actcagcccttatgaactcatcgcctcctaaattctctacctcctaacaccatcactttgacaatcagatttcaacatatgaatttgtgggagtcaccagcattgagactatagcaaccc

SEQ ID NO: 1036767 - DNA, 120 bp, Artificial Sequence
  ENSG00000225434_6 (sequence is synthesized)
cttattagaaataattcatgaggaactgaaactgttaggaaaccactgtgtaaatgctgggaaacaaagtcagataaataatgctgataattacctgactgcttttggaactgtcctttt

SEQ ID NO: 1036768 - DNA, 120 bp, Artificial Sequence
  ENSG00000225434_7 (sequence is synthesized)
ttgtgaacatgagactacatcattgtcagttgattgcagaagaaccactatgatattataatggggtcctgactccatgactgtgtaattcatggctttctaacggtttattattgacct

SEQ ID NO: 1036769 - DNA, 120 bp, Artificial Sequence
  ENSG00000225434_8 (sequence is synthesized)
ttgggttgcaaccaatgacctgttattgcaaaacaggtaatctcacttagataagtattaatcagaggggcttgacttccagagttcatttcaatggttttcaactcatttgtagagttt

SEQ ID NO: 1036770 - DNA, 120 bp, Artificial Sequence
  ENSG00000225434_9 (sequence is synthesized)
aacatcagtagccctttctcttccataggagggagatgaaccatcctgtttgttcaataatcagtgagagcgtggctttaacgtctcttccactcctttctagttcaggtctttcttaac

SEQ ID NO: 1036771 - DNA, 120 bp, Artificial Sequence
  ENSG00000225434_10 (sequence is synthesized)
ttgatggagatagcttgggccagggagggcagagtgaagatgagatggcaaaaaaaaaaaagttttgatcagcagcattgactctgtgctaaatactgtgctcagctctttggatgttat

SEQ ID NO: 1036772 - DNA, 120 bp, Artificial Sequence
  ENSG00000225434_11 (sequence is synthesized)
ttcattgaaatggaaagaacactgtaaagttgtcttgtgaggcacactttcctgttgaggaaataaaagcattaaataacttgcccccaaatacaaagctattaggattgaaacaaagac

SEQ ID NO: 1036773 - DNA, 120 bp, Artificial Sequence
  ENSG00000225434_12 (sequence is synthesized)
ttgagcccgggatctatctaatttcaaggtccttgttttttttctactacatttctctttgagatacagttactcaaaggtgtccaaacttcagttaatgtcaacctctgcctcactctg

SEQ ID NO: 1036774 - DNA, 120 bp, Artificial Sequence
  ENSG00000225434_13 (sequence is synthesized)
gtcctggtgcctttcccatgttcctgagaagatcatgtggcacacttctctaaacgtctctgtgccatatctcttgggatcaaaaggccattccaataattcttctgcatttcttaatgt

SEQ ID NO: 1036775 - DNA, 120 bp, Artificial Sequence
  ENSG00000225434_14 (sequence is synthesized)
atgctcagatggccctggtttgcatttagagaaaggaagctaagaccttggtgataactaaatatttatatctattttttgattatgtgcttgtatttaattaagtgggtgcctactgtt

SEQ ID NO: 1036776 - DNA, 120 bp, Artificial Sequence
  ENSG00000225434_15 (sequence is synthesized)
gtgaaaatacttttgaatacaattctgaagttgtgccagggaactctgacaatgggtatgctgggagctgtctgatttccttgtcctagacaactcatacaatgcagtagaaaaagaatt

SEQ ID NO: 1036777 - DNA, 120 bp, Artificial Sequence
  ENSG00000225434_16 (sequence is synthesized)
ctttattcccactgcctttccttagcccttcttcagagcaggggaagtgtgactgtagctttaaatagtttaaatagtccttcaaatacggcaaataaaacagtatcaatgaaaaagaag

SEQ ID NO: 1036778 - DNA, 120 bp, Artificial Sequence
  ENSG00000225434_17 (sequence is synthesized)
cccagcgagcctctccaaggccagactgccaagaaaagctggcagtgtgacagcaagtttcattcagcgtggccggtggtcactgaggagcgaccatgaggaggatggccagagggggta

SEQ ID NO: 1036779 - DNA, 120 bp, Artificial Sequence
  ENSG00000225434_18 (sequence is synthesized)
ccccccagtctcaccttggggaagagtacagcctcctattagtgagctgtgtgggctattaaaattcccccaggctgagtgtttcaggaaacaccataaataaataaaattgtctgtgtg

SEQ ID NO: 1036780 - DNA, 120 bp, Artificial Sequence
  ENSG00000225434_19 (sequence is synthesized)
ttttttcaccctctctcctctaacctgtttgtaactgggaaatgaaatagttttggtttgcaagctgtcgccagggagtggagcaagactttgtaataaacaagagcaactgccagagcc

SEQ ID NO: 1036781 - DNA, 120 bp, Artificial Sequence
  ENSG00000225434_20 (sequence is synthesized)
gtaggcaaaggccatcctcctcccattgacagtttagagtggatgaaggaacgagggcacagagagattcgagttgtcacccaagctcacatagcaccagtgacagagatgaagaaactg

SEQ ID NO: 1036782 - DNA, 120 bp, Artificial Sequence
  ENSG00000225434_21 (sequence is synthesized)
atttttgctgcagcttctgctttgtaatcatacggacagttgtgcttgtcagagtaacggtgaagtccacaaaacaaatttccacatcggcagtcaaaccctgtacaaacgaagaagtag

SEQ ID NO: 1036783 - DNA, 120 bp, Artificial Sequence
  ENSG00000225434_22 (sequence is synthesized)
agtcatttgagaacttgaggcaattaaaagaaaaaaaagccttagtcactatagaaaaggaaccagattttcattgctttgtaacataaaagacagtgaactcttttcttccacttcctg

SEQ ID NO: 1036784 - DNA, 120 bp, Artificial Sequence
  ENSG00000225434_23 (sequence is synthesized)
gtgataagacacagtcaactcttacagagtctatcacgttaacctggaaaaggaacttttaacttcctttgacatggtgagaaattcaaataactatgttcagtctttccttgcaagggc

SEQ ID NO: 1036785 - DNA, 120 bp, Artificial Sequence
  ENSG00000225434_24 (sequence is synthesized)
aatagcgaagtgtttggtaagccaaaccacgtggagaaaacaaaatgggctatctgccagctaatttctcccagatgctctccctctatcgactcctgtagatgcaacgcaggataaaat

SEQ ID NO: 1036786 - DNA, 120 bp, Artificial Sequence
  ENSG00000225434_25 (sequence is synthesized)
ttacacaggctctggagttaggctaagctggattcaaaacacagtcctaccatatcttaagtaatgcttcctcaagtgaaaacaaccatcaaggtctgagatttgaaggagacaagaaaa

SEQ ID NO: 1036787 - DNA, 120 bp, Artificial Sequence
  ENSG00000225434_26 (sequence is synthesized)
aaagcaccaagaacattccctgcatagctcaaagtaggtggcgcttactgttagttcagtaacattttccctaggtatacaaaaactttttatcaatctaataaaataagagggcctgag

SEQ ID NO: 1036788 - DNA, 120 bp, Artificial Sequence
  ENSG00000225434_27 (sequence is synthesized)
caaattcccaagagcccacgacccttacagcagaagccaaactcagaattagcacacacttaggtcttctgcaaaagaacaccaagctcaccacttttatttctggaaactgagcctagg

SEQ ID NO: 1036789 - DNA, 120 bp, Artificial Sequence
  ENSG00000225434_28 (sequence is synthesized)
cggtcagcccactctcctcttacaaaacccctaggcacttaagagaccacaggggaaaaaaaagaactcaaccccttttctaatctaaacctaatccttcttaaaccttgcctgacccgg

SEQ ID NO: 1036790 - DNA, 120 bp, Artificial Sequence
  ENSG00000225434_29 (sequence is synthesized)
gttaccaggaatcctgccagtgccaaatgatacgatgtttattcagctcatgtcttagcccgctgctcctgagccacagaaatcaaaggggaacattcagccaccacctgctgatcaacg

SEQ ID NO: 1036791 - DNA, 120 bp, Artificial Sequence
  ENSG00000225434_30 (sequence is synthesized)
tgtaaacaaaggggtagtcaagactgaggaggaccagcttttgaggacaatcactgcgtgttgctccagctcacataaaggcacggctcctaaggaacaggcttgagacatgcacaagtg

SEQ ID NO: 1036792 - DNA, 120 bp, Artificial Sequence
  ENSG00000225434_31 (sequence is synthesized)
ctgtgccaagtagttcaggagcctggtacagctgttcccaatatgcctttacctcctgttgcctcttctaaccacaatagggtgtggatgacatagtgcccttgctcccagaagaaactg

SEQ ID NO: 1036793 - DNA, 120 bp, Artificial Sequence
  ENSG00000225434_32 (sequence is synthesized)
ggaaagttacaactcattaaccagttaggttagtgttggaacagtgcttgccacattattctgagaagcctcagatccgtgagggtgatgtggagctcagaacacatggcctgaccccat

SEQ ID NO: 1036794 - DNA, 120 bp, Artificial Sequence
  ENSG00000225434_33 (sequence is synthesized)
gtggggttttactggagcagttgttttgatctgtcttacatctgggggatctgcaagagatttcgagggatgagggccagttcccttgctaaaacttagaatgtttaaaaaaaaaaaaaa

SEQ ID NO: 1036795 - DNA, 120 bp, Artificial Sequence
  ENSG00000225437_0 (sequence is synthesized)
ataatgaattggaggggagcggtggggcacgattcagtccactgcacaccgttctcctctccagacctctcactggcaagtcctttcatctcaatttcagttctgtgaggccgtcctact

SEQ ID NO: 1036796 - DNA, 120 bp, Artificial Sequence
  ENSG00000225437_1 (sequence is synthesized)
attgtctatcaccctgtttgatttttttgtagcctcatcatttattcattacagtttcttaagttcttttttttagggagcttgtcattgcctagaagagtgctgggcacacaatagtga

SEQ ID NO: 1036797 - DNA, 120 bp, Artificial Sequence
  ENSG00000225437_2 (sequence is synthesized)
tactgaatatacaactaaaatcatgtaatatagcacatgagattcttaatgctaaaattaagactttttaacatgaaaaatgctcttaagggcagaaatgaagcaaatttcaggcaagat

SEQ ID NO: 1036798 - DNA, 120 bp, Artificial Sequence
  ENSG00000225437_3 (sequence is synthesized)
ggcagacaagactgaaacggattcatccatcaactgctacagacttaaaaaacaaaatatgcccaatgcaaagctgagctcaggaaatcctcagatgctagagataaagacaaaatccag

SEQ ID NO: 1036799 - DNA, 120 bp, Artificial Sequence
  ENSG00000225437_4 (sequence is synthesized)
catttggtgagagaagggaactaatccgagactcccgcatacaaccaggacacttgaagggctgcctcacctgtgaaaaagaaactggaaaaatctcttcaaatctgtctgtggaaacag

SEQ ID NO: 1036800 - DNA, 120 bp, Artificial Sequence
  ENSG00000225437_5 (sequence is synthesized)
aaagacagcctggtgtttgacaaagctctcggtgggacaaacctcctctgagaaatggaaacctaggaaatcaaaagcccagaaattaagggaaagcattagtctcagataatgaaaagg

SEQ ID NO: 1036801 - DNA, 120 bp, Artificial Sequence
  ENSG00000225437_6 (sequence is synthesized)
aaacccttggggcccgggccaaagcaaatgtaaaaacatgaacacttgcataatctcgtacatgggactcacagaaaatgcaacccctaatatagatgagctcgcaatgaaaaattatcc

SEQ ID NO: 1036802 - DNA, 120 bp, Artificial Sequence
  ENSG00000225437_7 (sequence is synthesized)
accactgtggcaatgcagtcaccaaaaggaagactcaacagaccaatgagcatagacacgagctgtggaggtaacaactggaaacagaagaataaaatctcaagataaataatttaaaaa

SEQ ID NO: 1036803 - DNA, 120 bp, Artificial Sequence
  ENSG00000225437_8 (sequence is synthesized)
tacttaacatggaaaaatatttcacttaaaaaatataacttttagaaaaaatatagtatcattaacttaaaaattcagtagctaggttgaacaataaattcaccacaaatgaaaagagaa

SEQ ID NO: 1036804 - DNA, 120 bp, Artificial Sequence
  ENSG00000225437_9 (sequence is synthesized)
agtatgatcagcttgtcgaaagaatgaatcaatgacactctgtcttcgtggagagcagcctgggtgtggaatcaggcacccccgggttcaaagccatcactggcgaactcacaaagagtg

SEQ ID NO: 1036805 - DNA, 120 bp, Artificial Sequence
  ENSG00000225437_10 (sequence is synthesized)
tcattcgtgaaggacacagcacacacagcccagagagctcgcaggttaaaactgcacatggagcaatgtctgccagccattcagggtacttcaaaatagcaaacacagtattcacaatca

SEQ ID NO: 1036806 - DNA, 120 bp, Artificial Sequence
  ENSG00000225437_11 (sequence is synthesized)
agttatttagaccttttagattgtatacaaatgacatagaaaaatgtacagccagtccactgggttgtaattttagaaacaaacatctcaagtcataataataaagtagagttttaaaaa

SEQ ID NO: 1036807 - DNA, 120 bp, Artificial Sequence
  ENSG00000229728_0 (sequence is synthesized)
cacacctccctgtatccgcaccactttgcaatgagaaatttgctgtttctcctagtgagagagggagtctatttctttacccttgggcctgggctggcctggtgacttgttttgaccaat

SEQ ID NO: 1036808 - DNA, 120 bp, Artificial Sequence
  ENSG00000229728_1 (sequence is synthesized)
acatggaagaagtgacattatgtgagttctgcagctgaagctttaagaggccttgaagtttctcctcaccttcttggaaccttgagaccaccatgctgtgagaagcctgggcatatctac

SEQ ID NO: 1036809 - DNA, 120 bp, Artificial Sequence
  ENSG00000229728_2 (sequence is synthesized)
tggaggccgaggggccacatgacacgtctaaaactcatacgtcaagatatgcttgaaagctgcacccatcaagtgcgtcctgaatctgacgattcactatcttcacttccgccagtctgc

SEQ ID NO: 1036810 - DNA, 120 bp, Artificial Sequence
  ENSG00000229728_3 (sequence is synthesized)
tccaggcctccatcctttctggcctaaatgaaccccaaagctggcttgtgtcctgcatccatccaccactcttgcccttgtttcacttatctattgctgtgaaataaacttcaaaaccaa

SEQ ID NO: 1036811 - DNA, 120 bp, Artificial Sequence
  ENSG00000229720_0 (sequence is synthesized)
ggaaggaatccatgcagcagaaaatcagatactttcaacagcagagtcgacgctacccagattcactttggacgtgtgaaggaggcagcaaccacgtggaactcgtgtctcgaacacagt

SEQ ID NO: 1036812 - DNA, 120 bp, Artificial Sequence
  ENSG00000229720_1 (sequence is synthesized)
gcagtcttcacacctcagcgctgggcatcgggaggcagccttcatgtgatgctaccctatgaggccagcaagggctcccgggaaatgaaaacggcagcagccggcacccagtcccagcag

SEQ ID NO: 1036813 - DNA, 120 bp, Artificial Sequence
  ENSG00000229720_2 (sequence is synthesized)
cagacaggagcaggttaatccacaccatggacactgtctatgcaaagcggatatttggtcccagatggctcaacccttggctattacacatccttaaagctgacactggcatagcacatg

SEQ ID NO: 1036814 - DNA, 120 bp, Artificial Sequence
  ENSG00000229720_3 (sequence is synthesized)
ggaggggctaaatgacatttggagaccatgtgtgctgatgtggtttggatgtgtgtccctccaaaacgtatgtgaaatgtgatccccagtgttagaggggaggcctggtgggaggtacta

SEQ ID NO: 1036815 - DNA, 120 bp, Artificial Sequence
  ENSG00000229720_4 (sequence is synthesized)
gatcacagaagtgaatcagtcatgtcatgaacagttcagcaccaaccccttgatatgagttagttctcactcagtcagttcacctgagctctgggtgtttaaacgtctgggaaccccctc

SEQ ID NO: 1036816 - DNA, 120 bp, Artificial Sequence
  ENSG00000229720_5 (sequence is synthesized)
ctctgggtgtttaaacgtctgggaaccccctcctctcctgctcccactcttgccatgtgatgctttggcccccttcacccaccaccacaattggaagcttcctgaggcctcaccagaagc

SEQ ID NO: 1036817 - DNA, 120 bp, Artificial Sequence
  ENSG00000229720_6 (sequence is synthesized)
cagaactgtgagccaatttaacctcttttccttataaattatgcagcctcaggtatttctttacagcattgcaataacaggctaatgcatggatcatcaagaagatggatttccacattt

SEQ ID NO: 1036818 - DNA, 120 bp, Artificial Sequence
  ENSG00000229722_0 (sequence is synthesized)
agccccaaaagttacctttgtcacgtctactgtactctattggttatgcatgttctgttggaggaaggagactatggaacggcatgaatatcaaaaggccatgatcactggagccatctt

SEQ ID NO: 1036819 - DNA, 120 bp, Artificial Sequence
  ENSG00000229722_1 (sequence is synthesized)
ggtggtgaaggcctgaaagagaatggaagataaagcagcaatttactatgggcatcaaacagatacgtcgaatgacattgagggtttcactgaagaccagtggactcaaacttacccaat

SEQ ID NO: 1036820 - DNA, 120 bp, Artificial Sequence
  ENSG00000229722_2 (sequence is synthesized)
atggccactgttctctcaaaaaacgtgagcaaatgacatctggagctgatctccaatattttagagaaagaattgaaaagaatttttgtgggggaataaaattttacccagaaagtaaaa

SEQ ID NO: 1036821 - DNA, 120 bp, Artificial Sequence
  ENSG00000229723_0 (sequence is synthesized)
cttcacccctggctctcggcaatgctgctcctctctcctgcatggatcacctgctcctggaattcattctcccatttcttaggttgccactttactgtagcttcctaatcgaagagtctt

SEQ ID NO: 1036822 - DNA, 81 bp, Artificial Sequence
  ENSG00000229723_1 (sequence is synthesized)
aggttgccactttactgtagcttcctaatcgaagagtcttgctgtgtcacccaggctggaatgccgtggcacaatctcggc

SEQ ID NO: 1036823 - DNA, 120 bp, Artificial Sequence
  ENSG00000229723_2 (sequence is synthesized)
aactgttggtatttgcagatcctctccaaaaagagttcaccgatctcctaagactgcaaacctgaccccagcatgctgggagccaagagggtctgcggatctccctgcttagcaaattgt

SEQ ID NO: 1036824 - DNA, 120 bp, Artificial Sequence
  ENSG00000229723_3 (sequence is synthesized)
gtgtatatatatacacacacacacaatgaaatactattcagcctgaaaagaagaaaatcctgccacttatggcaacagggatgaatttgaaggacattatgttaagtaaaataaaccaga

SEQ ID NO: 1036825 - DNA, 120 bp, Artificial Sequence
  ENSG00000229727_0 (sequence is synthesized)
ggcacctatccacagcctgaaccttggagaacacctccctttcatatgacttctgcaaagggcgtgtttcagctcacagggacaaagagtcactgcaccagagaaccagaaagagatgtt

SEQ ID NO: 1036826 - DNA, 120 bp, Artificial Sequence
  ENSG00000229727_1 (sequence is synthesized)
tcaggaaactgccgcaactttgtagagcacagtttgaaagctactgctgaagaaatatgtcaccttgaaggctttttaaacacgggatttgcaagatagggtttgcattttagaaacatt

SEQ ID NO: 1036827 - DNA, 120 bp, Artificial Sequence
  ENSG00000229727_2 (sequence is synthesized)
attctgcttgctacactactgagtttggatgagggagacttgaaggcaagggagctctgttatgaaataactacacttttcttatagaagaagactataatagactgtatcaaaaatgtc

SEQ ID NO: 1036828 - DNA, 120 bp, Artificial Sequence
  ENSG00000229727_3 (sequence is synthesized)
tacgttccatagcattggtggaaccatgcattacgtctgaggacaaggacgggaaccttctgtggcgtgctgtcaacagctttaaataggcattgagtttgaagatagagcacatgaagg

SEQ ID NO: 1036829 - DNA, 120 bp, Artificial Sequence
  ENSG00000229727_4 (sequence is synthesized)
gcatgttacagcagagctgaagggagaacagttgatggggtttggtgatcaactgatttggagagtaaagcaatgagaagaatgacattcatgatttggtatgaattaagggtttattgg

SEQ ID NO: 1036830 - DNA, 120 bp, Artificial Sequence
  ENSG00000229727_5 (sequence is synthesized)
acagaagaaatgatgggcaagagcgggcatggtgtaggggtggagttggaaacttcctttcatatggtcaacacctcagcaacctcatttagacataggacctgtgcatagtaatccctt

SEQ ID NO: 1036831 - DNA, 120 bp, Artificial Sequence
  ENSG00000229727_6 (sequence is synthesized)
ttgtcttggaggtgagttgttgattttatttttatttttattttttagctccttggcacttctttctaaggttagggatcagaaagaaacataattgagttcctgccaaattgaatattc

SEQ ID NO: 1036832 - DNA, 120 bp, Artificial Sequence
  ENSG00000229727_7 (sequence is synthesized)
agaaagggcactgatagggggatcaattccttatttctaccatgagacaggcaagataaagaagagttgataatttctgcacccatcttacttcctgcccaccacagagcagttcaccca

SEQ ID NO: 1036833 - DNA, 120 bp, Artificial Sequence
  ENSG00000229727_8 (sequence is synthesized)
gtggcctggttggatgttagccattggcagggcaagaaatccaacaatcgactgttgaagaattccagagaatcagtctggatctctttcacacagacaaagtcttgttccagctaatct

SEQ ID NO: 1036834 - DNA, 86 bp, Artificial Sequence
  ENSG00000229727_9 (sequence is synthesized)
gatctctttcacacagacaaagtcttgttccagctaatcttaggctcctatgcgagaggaaagatgctgggaggccagcagggcca

SEQ ID NO: 1036835 - DNA, 120 bp, Artificial Sequence
  ENSG00000229727_10 (sequence is synthesized)
gtaataacccccatctctacaaaaaattaagaaaaataattagccagatgtgttggtgcatgccttagtcctaactactccgcaagctgagctgagaggatcacttgagcccaggaggtc

SEQ ID NO: 1036836 - DNA, 120 bp, Artificial Sequence
  ENSG00000229727_11 (sequence is synthesized)
aaggttgcaaagagccatgatcctgtgcctaggcaacagaacgaaaaagatgtgagaaatactcaaagtcttggtctttacccagaagaatcagagcaaggaaaagaaagatctctttcc

SEQ ID NO: 1036837 - DNA, 120 bp, Artificial Sequence
  ENSG00000229727_12 (sequence is synthesized)
ccagtttgacatccatcttcctaaatttggacaaagggatcctaaaccacagcgtcctacagtgagtcaaaatgcccatgcactgattctcatctcactggagttacagacacggctcac

SEQ ID NO: 1036838 - DNA, 120 bp, Artificial Sequence
  ENSG00000229727_13 (sequence is synthesized)
aggcttaagcgtcttgctgtaggtcatacggcaggttaatgacaacactggggcaagaacacaggttacgctcgtcctggggaaggctcccacaccaagctacacacttctgcaatgctg

SEQ ID NO: 1036839 - DNA, 120 bp, Artificial Sequence
  ENSG00000229727_14 (sequence is synthesized)
ttccagatgtgaaaatccgctaagacaaataggtcacaaaaacaccatgggaaacgatgatgtcttttcctttttgttatcttgataaagcttcatacatgtctggattctgattgatac

SEQ ID NO: 1036840 - DNA, 120 bp, Artificial Sequence
  ENSG00000229727_15 (sequence is synthesized)
acaaaagctgcattcccacatcaagggaactccgagtgttcaccctccgtggtaaggggagactgggagaccccacaaaagcatcccaagagaggaagagtccctttacacacctgctgc

SEQ ID NO: 1036841 - DNA, 120 bp, Artificial Sequence
  ENSG00000229727_16 (sequence is synthesized)
cccgtgtgtggatgcccactgagcacggaagttgtcaaggacaaaaggaggaactagcccaccaagcaggtttaaagggagtgtcggacacaaaaatgacatgccccatattgcagtcta

SEQ ID NO: 1036842 - DNA, 120 bp, Artificial Sequence
  ENSG00000229727_17 (sequence is synthesized)
gaaggaacaacacggtgaattgtctactgcagaacacttcactctgtctcgattactacatggtgaattgaagttccagtagagagggagttgagctgatactgaggagataaataccca

SEQ ID NO: 1036843 - DNA, 120 bp, Artificial Sequence
  ENSG00000229727_18 (sequence is synthesized)
tcactgtatacatctacttcttggaatttgcaagggaaccagtcaacagatttttcaagccttataagtttatctgcctgagaagttcaccagctacataacatcctggactctggagcc

SEQ ID NO: 1036844 - DNA, 120 bp, Artificial Sequence
  ENSG00000229727_19 (sequence is synthesized)
caagagatgtgtagtttccattttggagccattttctttgataaataagtagtgaggctgccattcttgtcaaagttgaggaccacaaccttactcatgaaactgaaagattgtttgtta

SEQ ID NO: 1036845 - DNA, 120 bp, Artificial Sequence
  ENSG00000229727_20 (sequence is synthesized)
tgaggagttctgtttgagccatacaagcaatatatcctttttaaagaaatgtatccggaatcttaggtgttcattgctccaagccatgtgcagaataaaaagaaaacaaaaaacaaaaaa

SEQ ID NO: 1036846 - DNA, 120 bp, Artificial Sequence
  ENSG00000229727_21 (sequence is synthesized)
atgtggtggaatgaagagtaaatggaggggaagaaatgaaagaagcaaatgaaaactattcttttagtaattttggtaaagaagagaagggtatgaatgaaatagtgtaagagtatttta

SEQ ID NO: 1036847 - DNA, 120 bp, Artificial Sequence
  ENSG00000229727_22 (sequence is synthesized)
tcagctgtgttgggattaagatggccaactctcaatccaggctgcctagctttgaattttggctttaccaccttttcactgtgatcttgagcaagttacataacttccctgtgttccagt

SEQ ID NO: 1036848 - DNA, 120 bp, Artificial Sequence
  ENSG00000229727_23 (sequence is synthesized)
ttcctcatctagaaaacaacgatgatgatgatgtcagtgataacctattttgtacgttctcataaatggtaagtatgttaatatatgcaaacttactggagcattgccttgtccatgata

SEQ ID NO: 1036849 - DNA, 120 bp, Artificial Sequence
  ENSG00000229727_24 (sequence is synthesized)
aactcaactagtgtttgctcatctcaattatccagaaaaaaaatggagaagggaggaggttgggcagtagttttggaggcagatgcaatactgaaagaagatatttttaggataagtgga

SEQ ID NO: 1036850 - DNA, 120 bp, Artificial Sequence
  ENSG00000229727_25 (sequence is synthesized)
gtgaattgtgaattctgactgctctggtctgatcctaagtttcagtttttagctaggtctgctcagttcatgaaatcacagtgggcagggaccttcacacaaagcaccgaggatgagatg

SEQ ID NO: 1036851 - DNA, 120 bp, Artificial Sequence
  ENSG00000229727_26 (sequence is synthesized)
aatgacaggagagagggcagattggcagagcactgtgtgggaaattaagcagtccctggtctcatgtcttaccattgcaataatcagaagagcaggtctcatatcttgcctcagtttttt

SEQ ID NO: 1036852 - DNA, 120 bp, Artificial Sequence
  ENSG00000229727_27 (sequence is synthesized)
agggtttgaagcaacatggatctctcaaatgtgagcaccaagactgaaaaccactaaggataatgagaagctgtctttgtgcacacattttggtctcctcccatccatgctggaaatagc

SEQ ID NO: 1036853 - DNA, 120 bp, Artificial Sequence
  ENSG00000229727_28 (sequence is synthesized)
cacttcaatatcatcagaagggtataatgctgggagacactctctggcctcatggagttccctgtccagttggatggacacaaaggcaagaagacacagggagcgtgacagcagctatga

SEQ ID NO: 1036854 - DNA, 120 bp, Artificial Sequence
  ENSG00000229727_29 (sequence is synthesized)
gaggtgttggagcctgcggctggggtgggcgcggtgccggaaggcttcctgaagggaagggcttctccaccagatcctaaaaaccaactggaacagactttttcctcctgctattgggca

SEQ ID NO: 1036855 - DNA, 120 bp, Artificial Sequence
  ENSG00000229727_30 (sequence is synthesized)
tcagaagcccaagttctctggcctttggactccaagacctgcaacagtgccatggtttccctcctggccccagtggatttcagtgctgactgaaagttacaccatcagcttccttgattc

SEQ ID NO: 1036856 - DNA, 120 bp, Artificial Sequence
  ENSG00000229727_31 (sequence is synthesized)
gccagctaccccggttctccataatcatgttagacagttccctgcctgtgggctcctgaaggaaaggagagatgagatcattatgggcagaacttagaacctctggatgaatagagacga

SEQ ID NO: 1036857 - DNA, 120 bp, Artificial Sequence
  ENSG00000229727_32 (sequence is synthesized)
atgtcttactccacaacgaggtgcaagatcttgaggctggatttagaaagaggaagagaagaccaattgcacagctcatcacccctcacccatctgatgatatgaaaggtttgaaggaag

SEQ ID NO: 1036858 - DNA, 120 bp, Artificial Sequence
  ENSG00000229727_33 (sequence is synthesized)
ccagagctggagcaagattttcctcagatgagttttgatgaactacaaagaatgaagatgctctcccttgtcatccccagtcaaagaaaaggcactttaaagaaatcactcacgagccag

SEQ ID NO: 1036859 - DNA, 120 bp, Artificial Sequence
  ENSG00000229727_34 (sequence is synthesized)
atattgtggttgtattttggtggacacagtgaagtcacgtctggctcgctccgcaaatactgggagggtgagaagtgggaggcagccgtgggaccgctgagtggaggaggctgacctttg

SEQ ID NO: 1036860 - DNA, 120 bp, Artificial Sequence
  ENSG00000229727_35 (sequence is synthesized)
aggaagcacgtgggatttttccccgcggaacagacgtgagccatgaacacgggagcaaaagtgtgctagagtaactcccgtcaaagagagacccttactagggcaagaagaccttgatca

SEQ ID NO: 1036861 - DNA, 120 bp, Artificial Sequence
  ENSG00000229727_36 (sequence is synthesized)
aagcatacccagatgccgaggttctgaggaaggaaataagtgaccaccaggcatggtgctctgattattaagctagtttctcagctccaaactcaaccttcactgcttagccttgtcacg

SEQ ID NO: 1036862 - DNA, 120 bp, Artificial Sequence
  ENSG00000229727_37 (sequence is synthesized)
gtgggaaggctgggagaggccaaaccacctttcccctttgccagggctccctgatcagttctgcctatgtgctactaagggaaacagtaaggctggaggagggaaaggggacaccaccct

SEQ ID NO: 1036863 - DNA, 120 bp, Artificial Sequence
  ENSG00000229727_38 (sequence is synthesized)
tctctttgcgcactgcttatgccagcagcatccgagcaataccgcttgccctgtagtgcttcttgagtcggatttcagttcagtgtctgggttttttaacatttctataaccattctccc

SEQ ID NO: 1036864 - DNA, 120 bp, Artificial Sequence
  ENSG00000229727_39 (sequence is synthesized)
aggtattacagtcatagcagagcagaggaccttagcagccctaggcagagaggggctgaagaagccaaccaaggcttcaggtgtggttggagaaagaagtctcagcttcaatcaagtttt

SEQ ID NO: 1036865 - DNA, 120 bp, Artificial Sequence
  ENSG00000229727_40 (sequence is synthesized)
taaagcttcatacatggataccagaatagagagatgattattactcttattgtgcagatgagaaaactgatgtctagagagaatgaataaatcccatctttcacagctgaacacttcact

SEQ ID NO: 1036866 - DNA, 120 bp, Artificial Sequence
  ENSG00000229727_41 (sequence is synthesized)
tgtccccggtgctgagaacaccatcagatgatctttctgcccagagccactatctgtccctaaatatcaggtttatcaatgcctggccatctcttttcaatttgggacaactgccagcga

SEQ ID NO: 1036867 - DNA, 120 bp, Artificial Sequence
  ENSG00000229727_42 (sequence is synthesized)
ttctccagatcctagaactatcagcaccagcagcagcacacattccattcctgtggggcttggctctgtgaggctcctctcagctcccagattctcccaacacaacttctttcctttgtt

SEQ ID NO: 1036868 - DNA, 120 bp, Artificial Sequence
  ENSG00000229727_43 (sequence is synthesized)
cccccagacttcgagcaggtcatttcttgctatgcctgtctaaccccttccctaaattcaattctctctgttaagataaccagtatgtttctgctttccagtctggattctgattgatac

SEQ ID NO: 1036869 - DNA, 120 bp, Artificial Sequence
  ENSG00000229727_44 (sequence is synthesized)
gaggaggtatgtatgctaatactgcccagtactaacttggtgtccattttagcagaaggcaagtcactgcgttccttttttcaatcagtaaaactataaggctgggtttgattaccaatt

SEQ ID NO: 1036870 - DNA, 120 bp, Artificial Sequence
  ENSG00000229727_45 (sequence is synthesized)
aagatttttctgtataccaaattatctggtctttggagaatgaaaagctgttcaaatcttataatcaagcagcaaagaagtactaggtaacatattttcagtatatgctatgagccagtt

SEQ ID NO: 1036871 - DNA, 120 bp, Artificial Sequence
  ENSG00000229727_46 (sequence is synthesized)
cacaatgccatgcacttcactatatcatctcattaaacaaatttgtgagattctcttacaatttctgtttcatacatgggaactgaggcatagagagtaccatgctcagggtcatggaag

SEQ ID NO: 1036872 - DNA, 120 bp, Artificial Sequence
  ENSG00000229727_47 (sequence is synthesized)
gagtaagcactgaaaccggcagttgcatctgagtgtatctgactcctggatctcaggtcttctacaagcaaacaggagtagttgctacataggccctcagaaaattaacacaataaataa

SEQ ID NO: 1036873 - DNA, 120 bp, Artificial Sequence
  ENSG00000229727_48 (sequence is synthesized)
taggtgctgtagtttgtaccagaagccaggcacatttctgcccttggttgcagcctcttctgcccagatattgtcggtccatactttcacaacctgtcgtctcatggttaaggaatccct

SEQ ID NO: 1036874 - DNA, 120 bp, Artificial Sequence
  ENSG00000229727_49 (sequence is synthesized)
caggagcagcagccactgcagcttctgggctggctagccacccttctgtagattccatgggtggggaatggatctagacagcctattagtcacagcacaacaggcagcatgagcttcttg

SEQ ID NO: 1036875 - DNA, 120 bp, Artificial Sequence
  ENSG00000229727_50 (sequence is synthesized)
ttgcatcggttccatatgtccccaaggtaggcccaggtgattgccatgtacaatggggtctgcatcacagctgaggaacatggggtgccaaacccctaaccttaatggggctgctagcaa

SEQ ID NO: 1036876 - DNA, 120 bp, Artificial Sequence
  ENSG00000229727_51 (sequence is synthesized)
acctgcccaaactttgtttctgaaggagacactatccttattatcttgatcacaaaacaagtctgccctttgcccttaagggagacactagcttctaatgctgctagataaatgtagtct

SEQ ID NO: 1036877 - DNA, 120 bp, Artificial Sequence
  ENSG00000229727_52 (sequence is synthesized)
gagatgcagagacaccatagagaactgcatcctgacaattcctaaaggtgaaaatgtggccagaagcaaactctattcatatatgtgtccatctggtgggcttccatagcatttgccttg

SEQ ID NO: 1036878 - DNA, 120 bp, Artificial Sequence
  ENSG00000229727_53 (sequence is synthesized)
ctcagacttctcttcacagccaagaaggatgatacaacgtagagcatggagtgtggatgagaagtccccacaagttccccagaaggctatttttctctggagcagatagtctgagtgtag

SEQ ID NO: 1036879 - DNA, 120 bp, Artificial Sequence
  ENSG00000229727_54 (sequence is synthesized)
attggtataatccatttggaaaacattttggtaatatgaagaaaaagacatataagtacattgatacacattcaatggaaattacaggtcttggaatcaattcccaaaggcataattcaa

SEQ ID NO: 1036880 - DNA, 120 bp, Artificial Sequence
  ENSG00000229727_55 (sequence is synthesized)
aactcttgggaagacccacaaaaatagatcctttatgtagcaaaaaggtgatcataacttaagaataggagaatagatatgatatagtgtactttcttgatgaattattatctttttact

SEQ ID NO: 1036881 - DNA, 120 bp, Artificial Sequence
  ENSG00000229727_56 (sequence is synthesized)
taaaatgatggctatggactccaataataagaaaaatgtctatgacataatgttatatgaaaaactgggtttaaactgtgtatataatatgaatacaaatgtggtaagacactcactcct

SEQ ID NO: 1036882 - DNA, 120 bp, Artificial Sequence
  ENSG00000229727_57 (sequence is synthesized)
aaggggaaaaggtttgaagaaaattcattaactcctaagcatttgttgaattagactgagagaatgaagaatgactttttttctctttttataattccctgctaactttagacacatagt

SEQ ID NO: 1036883 - DNA, 120 bp, Artificial Sequence
  ENSG00000229727_58 (sequence is synthesized)
tagattttaaaaggaaaaatatgtataaggctaaaaagaaaaaaaatcgtagtgatgtattaatgccctctctagacctaaatcagaaaccaccaagcatttttcttctttttaatgttg

SEQ ID NO: 1036884 - DNA, 120 bp, Artificial Sequence
  ENSG00000229727_59 (sequence is synthesized)
tcttttcattttttaggtttattaattaaaatctctccattaaacctatttgtctgcccagcataaaacagcatccgggcctctaaagagaagtcatgggacaaactacctgcccagggc

SEQ ID NO: 1036885 - DNA, 120 bp, Artificial Sequence
  ENSG00000229727_60 (sequence is synthesized)
ctggatctttcctcttttttttctttatttatttttatatttatgtatttatttatttactgagacagggtctcgttctgtcccccaggctggtgtgcagtgacgcgatctcggctcact

SEQ ID NO: 1036886 - DNA, 80 bp, Artificial Sequence
  ENSG00000229727_61 (sequence is synthesized)
attttttttagtggagacggagtttcactgtgtcagccaggatggcttcgatctcctaacttcctgatccgcccccctca

SEQ ID NO: 1036887 - DNA, 74 bp, Artificial Sequence
  ENSG00000229727_62 (sequence is synthesized)
attttttttagtggagacggagtttcactgtgtcagccaggatggcttcgatctcctaacttcctgatccgccc

SEQ ID NO: 1036888 - DNA, 120 bp, Artificial Sequence
  ENSG00000229727_63 (sequence is synthesized)
aataaaatgcaaatttgcgtgggtattgcaaggtccttagaagttagtattgactccttcataatcctctggccctacccatcattaatagagccttccattaacagcatctccccgcct

SEQ ID NO: 1036889 - DNA, 120 bp, Artificial Sequence
  ENSG00000229727_64 (sequence is synthesized)
aagcatgctgggtcccacctcgcgaccaccccttactctaactggacccacacagaaatttttcaagctcctagaatgttccagggtctctggcttccgaatctatcacctacagttcta

SEQ ID NO: 1036890 - DNA, 120 bp, Artificial Sequence
  ENSG00000229727_65 (sequence is synthesized)
tctgcccagaactctctgcctccccaattcactctcaccaagctagctgtttcctgattaaaattgctttcttcatgacaaaaccctgtactccagatcccccagtctggatcaggcacc

SEQ ID NO: 1036891 - DNA, 120 bp, Artificial Sequence
  ENSG00000229727_66 (sequence is synthesized)
cctgctgggtctcctccctaggagccttcaccttagtccctgccgttacctgagtctcatcgccctcgtggtgctctcaaatgctccctccacagtctgggaggttttcactggggacta

SEQ ID NO: 1036892 - DNA, 120 bp, Artificial Sequence
  ENSG00000229727_67 (sequence is synthesized)
tcctggaaaaggcgtaacatgtgattctaagaggtgacagtgagcacccacatgtcatctcaaactgctgagaacagggaaggcaggtgaaggtcccgcttctattgttttgtaacaaca

SEQ ID NO: 1036893 - DNA, 120 bp, Artificial Sequence
  ENSG00000229727_68 (sequence is synthesized)
taaaagcacagtttatttcctacataaattttattttctaaagaggccttgggtactgagatgtgagatggacttcacggagagctggctgcatcacgagccccaaagggtaagaatcag

SEQ ID NO: 1036894 - DNA, 120 bp, Artificial Sequence
  ENSG00000229727_69 (sequence is synthesized)
gcctgggacagagcactcacacacataccgtgtgctcacaggtaagggcaggagtgcgcagcaaagaaagcttcacatggctcccatgtaacctgacttttatctctgctttcacagaat

SEQ ID NO: 1036895 - DNA, 120 bp, Artificial Sequence
  ENSG00000229727_70 (sequence is synthesized)
gaggcataaaactaccagctaggcactcgccttcctttctatttaaatttgctgtattggaatgcgtttctatgtctcacctaagttattgtctcatagtgcttggataaactttgtttt

SEQ ID NO: 1036896 - DNA, 120 bp, Artificial Sequence
  ENSG00000229727_71 (sequence is synthesized)
ccattatcttcctaaaaataaacttcttgaaatactgtgtgttaaatcatctcaacttacatctgaggtaatcaggcttttggtaaattcatgaagtatttgttccaagtgttggaaatt

SEQ ID NO: 1036897 - DNA, 120 bp, Artificial Sequence
  ENSG00000229727_72 (sequence is synthesized)
cacccttgaagtctcatctctgagtgaaatgtctgccttagagaataacaatgatcacagcaccccaggacttctcctgtgtcagtggttctcctccctcaccatctaaggggaggggga

SEQ ID NO: 1036898 - DNA, 120 bp, Artificial Sequence
  ENSG00000229727_73 (sequence is synthesized)
gagaaacacctgctctctcatggcagctccacacccctccccacatctgacttcctccttggtggagaattactgagcattcctgttaagaatacagcacatctgacaaatagattgaat

SEQ ID NO: 1036899 - DNA, 120 bp, Artificial Sequence
  ENSG00000229727_74 (sequence is synthesized)
tgaaaaatgtataaaatcatctaattgttaattggagaactaggtaaaatccttaatatgtagagaaatttaaacatacttttataggtttatatgtatttggacaaagatttttttgtt

SEQ ID NO: 1036900 - DNA, 120 bp, Artificial Sequence
  ENSG00000229727_75 (sequence is synthesized)
tttctccaggctaaaacacccataaccatcatctttggtgaggagaaaagacagatattttaaaaaaatttgtgtgatgagaatttatttattcaaatattgtttttttcttattttcaa

SEQ ID NO: 1036901 - DNA, 120 bp, Artificial Sequence
  ENSG00000229727_76 (sequence is synthesized)
aaaagattgcctacaaatgtgtctaagctagaaatcatctacagtccatactacggggtggatcaatggtgatttcatcagcaccagcccagctgctccatgacagagaggcctgcatgc

SEQ ID NO: 1036902 - DNA, 120 bp, Artificial Sequence
  ENSG00000229727_77 (sequence is synthesized)
cgccctccatcttccacctgtccacggctgacacacggtgggaaagggttttgctgacattggtgatctgagctgaaaatgtgaagccaccttttggcatataattcatattggtttttc

SEQ ID NO: 1036903 - DNA, 120 bp, Artificial Sequence
  ENSG00000286402_0 (sequence is synthesized)
gtagtgattttatgctagtttcattccctttaaatacaaaatttgcttttttatctgaaaaatgttctcaggcccatgtgatttttacatacaacaatttaaaattctttcatagctcct

SEQ ID NO: 1036904 - DNA, 120 bp, Artificial Sequence
  ENSG00000286402_1 (sequence is synthesized)
cattgtaaacctcataggaaacctatactctgtatcaaacgtaaatggcattccattagctggcctctgtccacttcttcatatacactgtgcctgtgctactaacccatcacacccaag

SEQ ID NO: 1036905 - DNA, 120 bp, Artificial Sequence
  ENSG00000286402_2 (sequence is synthesized)
ttcctttgtacagttctttaaatgcaccgttctcctacaaacctctcatttgtctctgaggttggactttactccttcttcccctggcctttccctattcatatacttaaatttaaatta

SEQ ID NO: 1036906 - DNA, 120 bp, Artificial Sequence
  ENSG00000286402_3 (sequence is synthesized)
tcaaaatctcttgactaattaatatttccaccataatattaagtgtgtgaacattgagatgttattacaagattactgttggtgcgattgttttgaaggaaagttttcccaaagccaaac

SEQ ID NO: 1036907 - DNA, 120 bp, Artificial Sequence
  ENSG00000286402_4 (sequence is synthesized)
tttcccaaagccaaactccccaaagggacttaaatcagggttcaacaaagagtaagtgatattaaatatttaatcttaatatatatacatatatgtgtatatatatgtgtgtgtgtatat

SEQ ID NO: 1036908 - DNA, 120 bp, Artificial Sequence
  ENSG00000286402_5 (sequence is synthesized)
atatgtgtgtgtatacatatatatatgagactgacattttatagtttgaattgaaaatattttacatggatttaaagttgccaatgaggtgattatctggaacccattttcaaatcctct

SEQ ID NO: 1036909 - DNA, 120 bp, Artificial Sequence
  ENSG00000286402_6 (sequence is synthesized)
tttttttgtgaaatgatttgagacacagaaaaataccccatagctttccttcacagtgcctgcctctgccaagtctctcctgacccccatagacagacttagctgccacactcctgttgc

SEQ ID NO: 1036910 - DNA, 120 bp, Artificial Sequence
  ENSG00000286402_7 (sequence is synthesized)
tttcctttgtaattgcttatatgtttgctgtctttctaacttctgcaagcctaatctcttcctctcagttatcttgttgtgtaatagtgcctgggatgcagcaagcaaccaagacattgc

SEQ ID NO: 1036911 - DNA, 120 bp, Artificial Sequence
  ENSG00000286402_8 (sequence is synthesized)
ttattaaaggaatcattgcaggatttaatatatactacatagacacacttggtagtatctgagtttgatttttgttgattgagtaacttatccttacgtagagatgctgaatatcagctg

SEQ ID NO: 1036912 - DNA, 120 bp, Artificial Sequence
  ENSG00000286402_9 (sequence is synthesized)
ttagagaatagtctggcaaatggaacacgattgtgattgtgatttgatgggcaaatgtcgtgttaatctttttgttttctggctgatagttaaatctctagtactgtacatcaaaagtgt

SEQ ID NO: 1036913 - DNA, 120 bp, Artificial Sequence
  ENSG00000286402_10 (sequence is synthesized)
cacagctaagcaatctgagggattaaatgactcctcataatttctgtgttgttaaatagcagaaggatattatctaatcactgttgtcagtgtatgctggtgaactcttatggaaaacat

SEQ ID NO: 1036914 - DNA, 120 bp, Artificial Sequence
  ENSG00000286402_11 (sequence is synthesized)
tttcttttctactttgaaagcattaggaaacacactcaaattacattttaaaatgttgttttctggagtacacaaacaatctatttcagtgctatttcactgtcagtcatttcaagtatt

SEQ ID NO: 1036915 - DNA, 120 bp, Artificial Sequence
  ENSG00000286402_12 (sequence is synthesized)
ttactataaacgccccagtagtggtcaccttttatattcagggcttgtgtgtgtgtgtgaattgcttctgtgataactcttacaaaattaatttttgaattatttgctgttttgtcatga

SEQ ID NO: 1036916 - DNA, 120 bp, Artificial Sequence
  ENSG00000286402_13 (sequence is synthesized)
cagctacatatgtatgttgtcgttatgtctgaacactaatagatgcttaagattttgttggcttaattatttctgatagcatttctaatgatactatgtaaaactcatataaccctctac

SEQ ID NO: 1036917 - DNA, 120 bp, Artificial Sequence
  ENSG00000286402_14 (sequence is synthesized)
attttacctctggctaaacattaggcctccttttcttgtctcgtgtttcccattaagttttcaaaagctaaaaaggcccattttctcttttaaatgactcattattggaaacagtttcaa

SEQ ID NO: 1036918 - DNA, 120 bp, Artificial Sequence
  ENSG00000286402_15 (sequence is synthesized)
agagaactgtgtagcagttaagaaaggaaaggtatgagatatctcttactgtctcttacaggtttattcagcaagaatacttgactttctgtctcttacaggtttactcagaaagaatac

SEQ ID NO: 1036919 - DNA, 120 bp, Artificial Sequence
  ENSG00000286402_16 (sequence is synthesized)
ttgaaaatagattacacataattacttcacaaggagctttttaaaatccaattacaagatttctaatttaagtgaaaaaatgggaaaaaaataagctccagtctcacttaaatccattgt

SEQ ID NO: 1036920 - DNA, 120 bp, Artificial Sequence
  ENSG00000286402_17 (sequence is synthesized)
gctattttgcagaatatcaagtccatcttgggagtttaactgtgggaggactttgtaatagcactgtctccctataacaggattccacagatagcattatgatgagactcctgtatgtgt

SEQ ID NO: 1036921 - DNA, 120 bp, Artificial Sequence
  ENSG00000286402_18 (sequence is synthesized)
attctattcaattgaatatacacagggtgaatttcaagtaagagaaaatttaacttgagtgacagattttctctaaaagttgcttttgtttgatttcatctttttttcctttctttactg

SEQ ID NO: 1036922 - DNA, 120 bp, Artificial Sequence
  ENSG00000286402_19 (sequence is synthesized)
tgaaaccacacaatgaaatggaaatcaggatgtcgattctgttgctgctgcagctttctgcttctgacttaggcttttgcatgagtaaaagtagttgcttcatatattcctcatgtggat

SEQ ID NO: 1036923 - DNA, 120 bp, Artificial Sequence
  ENSG00000286402_20 (sequence is synthesized)
gtgcaggatgtgccctgtacaaaaatccaggaagcactgtttacagagaccattatgtgcatgactacaactagagttttatgttgcccatcttggatgactgtaaacagaagaccgctg

SEQ ID NO: 1036924 - DNA, 120 bp, Artificial Sequence
  ENSG00000286402_21 (sequence is synthesized)
agcttcctcaatttgaaagaggtattttcttcctgctttctttcaaaggaatgcaaagaatgagaatgacagaagttttgatttgtgatttaggcactatctgaaggcactttagggaat

SEQ ID NO: 1036925 - DNA, 120 bp, Artificial Sequence
  ENSG00000286402_22 (sequence is synthesized)
gtgagccctgaactgatacattgtgaccctaggtacagaaattacttaaattctctgggccttagttttctgatctgtgaaatataaataataatatctgttctattgatgcaggatttt

SEQ ID NO: 1036926 - DNA, 120 bp, Artificial Sequence
  ENSG00000286402_23 (sequence is synthesized)
ttgctcctcagctcagctaaatctgggttcttgtctcacaacgaggaaaaattacgcacatggacacactaaaaggagatgtttcttttgtgtatcttgctgttttggtagtcacctgtt

SEQ ID NO: 1036927 - DNA, 120 bp, Artificial Sequence
  ENSG00000286402_24 (sequence is synthesized)
cacctgtttgcagtggcaccattgaatctatcttcaagaagctgagaaagcagaaacctgggaattaatggattcagtattataaatcaacttggatggagctggagaccattattctaa

SEQ ID NO: 1036928 - DNA, 120 bp, Artificial Sequence
  ENSG00000286402_25 (sequence is synthesized)
actcagaaatagaaaaccaaacaccatatgttctcacttttaagtgggagctaagctatgggtatgcgaaggcatacagaacggtataatggacactggagagtcaaaagcagccgactt

SEQ ID NO: 1036929 - DNA, 120 bp, Artificial Sequence
  ENSG00000286402_26 (sequence is synthesized)
ggaggggatgaggaataatattgggtatgatgcacactgttcagatcaggaaatcctgagagttgtcatgaaaccctctgccacatttccaatattttattagtagggaaatagtgaaaa

SEQ ID NO: 1036930 - DNA, 120 bp, Artificial Sequence
  ENSG00000286402_27 (sequence is synthesized)
tgaatggatctgacagacacaagcaattgagagtatggcctaaagaaaaaaaatccactgaacatcatgcaattagaagtgccattaggaaaggggtcaatggattggctggagaaagct

SEQ ID NO: 1036931 - DNA, 120 bp, Artificial Sequence
  ENSG00000286402_28 (sequence is synthesized)
ggaagcttgaaatgactgtctacaaggtgatcaagaacacagcacctggatgaagggaggagcaagaggaaaggtggtgacagtaagcaaggagagcaaaccttcagagggctaagggga

SEQ ID NO: 1036932 - DNA, 120 bp, Artificial Sequence
  ENSG00000286402_29 (sequence is synthesized)
agcccttcacccctacagttttggcactgtgaacaggatctcatcaaagctgctctgcttttcagggagccacagtgaaagaaacccaggacctgacaagccaacagaaaggtaagaatt

SEQ ID NO: 1036933 - DNA, 120 bp, Artificial Sequence
  ENSG00000286402_30 (sequence is synthesized)
tttaccagccaggctcctggtctctcttcctgtggaatttgactgagctgacgctaaaaacccactatttgtctctctttttctctgcaaagttctgattaataggagaaaaaaatttgt

SEQ ID NO: 1036934 - DNA, 120 bp, Artificial Sequence
  ENSG00000286402_31 (sequence is synthesized)
gtgagtagtcttgggtatagcaatgctggtatattttatggtataaatattcatattgtttgattcctatcatacccaaaacagactatgttggttaatactgagtgtcaacttaattgg

SEQ ID NO: 1036935 - DNA, 120 bp, Artificial Sequence
  ENSG00000286402_32 (sequence is synthesized)
attgaaggatgaaaagggttgttcctgggtgtatctgtgagggtattgccaaaagagattaacatttgagtcactgaattgggaaatgcagaaccaccctcaatctggataggcacaatc

SEQ ID NO: 1036936 - DNA, 120 bp, Artificial Sequence
  ENSG00000286402_33 (sequence is synthesized)
taatcagttgccagtgcagctagaataaaagcaggcaaagaaatgtggaaagactagactggcttagtcttttggcctacatctttcccccatgctggatacttcctgccctcaaaaatt

SEQ ID NO: 1036937 - DNA, 86 bp, Artificial Sequence
  ENSG00000286402_34 (sequence is synthesized)
atttttgagattttgggactcggactgtattccttgctcctcagcttgcagagggccttttgtgggtcctcaccttgtgattgtgt

SEQ ID NO: 1036938 - DNA, 78 bp, Artificial Sequence
  ENSG00000286402_35 (sequence is synthesized)
gagattttgggactcggactgtattccttgctcctcagcttgcagagggccttttgtgggtctcctttatgtatacat

SEQ ID NO: 1036939 - DNA, 73 bp, Artificial Sequence
  ENSG00000286403_0 (sequence is synthesized)
ggtaacctgctcgggtccccttccacatcatggaagctttgttcttttgctcttctgagctgtaacactcact

SEQ ID NO: 1036940 - DNA, 120 bp, Artificial Sequence
  ENSG00000286403_1 (sequence is synthesized)
cactcactgtgaaggtctgcagcttccctcctaaagccagcgagaccacaaacccactgggaggaacaaacaactccagatatgccagctttaagagctgtaacactcactgggaaggtc

SEQ ID NO: 1036941 - DNA, 88 bp, Artificial Sequence
  ENSG00000286403_2 (sequence is synthesized)
cctgaagtcagcaagaccacgaacccattgagaggaatgaacaactccggacgtgctaccttgtcttcactcctgaagtcagcaagat

SEQ ID NO: 1036942 - DNA, 79 bp, Artificial Sequence
  ENSG00000286403_3 (sequence is synthesized)
ccaccagaaggaaccaattccagacacattttgtctacccagatgggactatcgcctatcgccaaggagttaaattttg

SEQ ID NO: 1036943 - DNA, 120 bp, Artificial Sequence
  ENSG00000286403_4 (sequence is synthesized)
tcaccacacccgagttaaattttggacatcccctgaggaacctgcgggaccatcagctcaggagtcccaagatcacccagaccagccttgatacctgtgaaccattggaggacttgcatc

SEQ ID NO: 1036944 - DNA, 80 bp, Artificial Sequence
  ENSG00000286403_5 (sequence is synthesized)
accagccttgatacctgtgaaccattggaggacttgcatctcctattttggaaggaataaaaccccttcctccttaaaaa

SEQ ID NO: 1036945 - DNA, 120 bp, Artificial Sequence
  ENSG00000286403_6 (sequence is synthesized)
gcccctttaatggaaaccttttactatttcatcatgttattaagcagcatactaaccatactctttgcaataggactatatactgtagctcctgctgggatgaaaataaaatagaacaca

SEQ ID NO: 1036946 - DNA, 120 bp, Artificial Sequence
  ENSG00000286403_7 (sequence is synthesized)
gagctaccttggcaagtactctagaagtatgaaaaaatgaaaacaacaaactcgcacacctttttaacatacacaaccagttttgtctacccagccgaggtatattcttcttatgtggaa

SEQ ID NO: 1036947 - DNA, 60 bp, Artificial Sequence
  ENSG00000286403_8 (sequence is synthesized)
ttttgtctacccagccgaggtatattcttcttatgtggaacacccaacattaacattgcc

SEQ ID NO: 1036948 - DNA, 73 bp, Artificial Sequence
  ENSG00000286403_9 (sequence is synthesized)
gataatgaaatctccagaactgctgaggcctagacctcctcattgctaagaaaggaggactctgcaccttctt

SEQ ID NO: 1036949 - DNA, 81 bp, Artificial Sequence
  ENSG00000286403_10 (sequence is synthesized)
ttactcgccttcaggccctgtatttttaaccttgtcaaatttgtttcctctaggatcgaagccatcaagctacagatggtc

SEQ ID NO: 1036950 - DNA, 87 bp, Artificial Sequence
  ENSG00000286403_11 (sequence is synthesized)
ttacaaatggaaccccaaatgagctcaaataacaacttctactgaggacccctggacctacccaccgaggacactacaactgcaagg

SEQ ID NO: 1036951 - DNA, 120 bp, Artificial Sequence
  ENSG00000286403_12 (sequence is synthesized)
ccctttcactggcctaaagagttcccctcccgaggacactacaactgcaaggccccttcttcgcccccatccagcaggaagtagccacagcgatcattgcccaattcccaacagcagttg

SEQ ID NO: 1036952 - DNA, 78 bp, Artificial Sequence
  ENSG00000286400_0 (sequence is synthesized)
gtgctctgatgttcacctcctctgtgaatttttttttctttttgagatggagtcttactctgtgacccaggctggaaa

SEQ ID NO: 1036953 - DNA, 86 bp, Artificial Sequence
  ENSG00000286400_1 (sequence is synthesized)
gtagcctcaacctcctgggctcaagtaatcccaccccagcctcctgcgtagggctacaggcggtgccactacacctagctaacccc

SEQ ID NO: 1036954 - DNA, 120 bp, Artificial Sequence
  ENSG00000286400_2 (sequence is synthesized)
caatcctcccacctcagcctcccggtgctgggattacaggcatgggccaccgtttccagcctgtgaattgatcttgatttgggttctttgagagcagccagcaggctgtgctgtgtctga

SEQ ID NO: 1036955 - DNA, 120 bp, Artificial Sequence
  ENSG00000286400_3 (sequence is synthesized)
catgtagaattcctggatagcaaggcttagaagcaggagaactagctcttgtaagatcctggctctggtcactcctgttcattccagagctgagggatccaactgaccctctgtctccac

SEQ ID NO: 1036956 - DNA, 120 bp, Artificial Sequence
  ENSG00000286400_4 (sequence is synthesized)
tacccttgactgctcactcctggaaattcaccagtctacatgtgctctgcagaggttaggactcctaggacatcaagtggtaactcatcattatcaccatcacacagcagctggaaccag

SEQ ID NO: 1036957 - DNA, 120 bp, Artificial Sequence
  ENSG00000286400_5 (sequence is synthesized)
cagcctcaccaggcctttctcctttaataatgacaaacatggtgtgcagtctgggccacttaatcctgttctgcagatggggactctgagacataaagaggtaaagatcatgcaggtgac

SEQ ID NO: 1036958 - DNA, 120 bp, Artificial Sequence
  ENSG00000286400_6 (sequence is synthesized)
cagccttgatttccaacaatagggtattgatgtgtaatacaaccacacagtagggtattgtatagcgactaagaatgatacagcagtatttgttgacctgggaacatttttcacaatatg

SEQ ID NO: 1036959 - DNA, 120 bp, Artificial Sequence
  ENSG00000286400_7 (sequence is synthesized)
ctttaaaaaaagatagataagtgcttattaataatataggtacagggactcaagtcaaagtggggatatattctaaactctggcgaccaatttcctaaaccatgtagtttttgctataga

SEQ ID NO: 1036960 - DNA, 120 bp, Artificial Sequence
  ENSG00000286400_8 (sequence is synthesized)
aaacatctagctgtgggtctacttgtaatactcagtatattaccttatttcatatgccatttattttttctttatgaaaatggtgtcattcatctttattaatgtagttgaaattcataa

SEQ ID NO: 1036961 - DNA, 120 bp, Artificial Sequence
  ENSG00000286400_9 (sequence is synthesized)
actttctgtgtgaatcatttaatcaagaaaaatgtgttacggggatagattttatataaatgagaatgaaatgaaatgtttcattaaaatatgtaaaagttgcccagtatatcttaagga

SEQ ID NO: 1036962 - DNA, 120 bp, Artificial Sequence
  ENSG00000286400_10 (sequence is synthesized)
gaaatcgtatgtgtataatattattgtatttttgtaagataaaacaaatgttgtaagaccttaaaaatattgttaggagaaaaaaatacacgtatgcatagaaaaatgtctagaaggata

SEQ ID NO: 1036963 - DNA, 120 bp, Artificial Sequence
  ENSG00000286400_11 (sequence is synthesized)
aatgctaaaatgttcatcctggacctctgcaagatggggctatgggtgattttttaccccttcctttattgttcacctgtattttctaatttttcaataacgttcatgtgttacttattt

SEQ ID NO: 1036964 - DNA, 120 bp, Artificial Sequence
  ENSG00000286400_12 (sequence is synthesized)
agaaaagacaggagatgaatgtttaaagtgatggatatggtaattaccctgacttgatcatgatacaatgtatatatgcattgaaacatcacactgtaccccataaacatgtatggctat

SEQ ID NO: 1036965 - DNA, 120 bp, Artificial Sequence
  ENSG00000286401_0 (sequence is synthesized)
agggagaaaggctacatggtacggcccctcaatactggatccatcttcaacatgtgcttggccagaacctacatctacctaccccttggtagcaaaatttcccaatgcacagactttttt

SEQ ID NO: 1036966 - DNA, 120 bp, Artificial Sequence
  ENSG00000286401_1 (sequence is synthesized)
aaggagctgaattaaacttaggtgaatatcctaaactgtcagtttactgctgagaacatgctgcttatcaagccaggctcccagcaagagtccatatccttggattttcaatgacaacaa

SEQ ID NO: 1036967 - DNA, 68 bp, Artificial Sequence
  ENSG00000286401_2 (sequence is synthesized)
acactgaagagaggtcacagggagagagacaggaaaccagcgatggaccccagtagaaggacagggtg

SEQ ID NO: 1036968 - DNA, 120 bp, Artificial Sequence
  ENSG00000286401_3 (sequence is synthesized)
acaggaaaccagcgatggaccccagtagaaggacagggtggacgatgcttaggaagatcatgacgactctgctttcatttcccacatccctatcccgccagaggtgaaaatcagagagga

SEQ ID NO: 1036969 - DNA, 120 bp, Artificial Sequence
  ENSG00000286401_4 (sequence is synthesized)
cttagttggatgcattctggacacaaacgctctgaagctaataaaattcaatataattggcccatccaattatgttagaatctaataaaatgtagttgtatatatatatgacaacagaaa

SEQ ID NO: 1036970 - DNA, 120 bp, Artificial Sequence
  ENSG00000286407_0 (sequence is synthesized)
gttataggaggagttttgtctgtaaacgtttattcaagaggcaaaggtagcctttctggctgaaaactagaaactcattctatttaactaatgtgtagtttgcggggaggtgggatttag

SEQ ID NO: 1036971 - DNA, 120 bp, Artificial Sequence
  ENSG00000286407_1 (sequence is synthesized)
atgtatttaaaccccacccctgaactattgtgagctttctagtgtgtgaagccaagataccgaacaagtcggcaagagacaaaaacggggagatgccaggacgagcatccgttctgctcc

SEQ ID NO: 1036972 - DNA, 120 bp, Artificial Sequence
  ENSG00000286407_2 (sequence is synthesized)
ctgatccgcgcacagaacaggaccccggccacggtgaggaagagagaacgcgcacgcttcagatctctggtcggagcgctgttatggagttggcggtggacctcacgagtgccgagtgca

SEQ ID NO: 1036973 - DNA, 120 bp, Artificial Sequence
  ENSG00000286407_3 (sequence is synthesized)
tttgctccccggggaggctcgatgctcagggactccaggcctcggcgtctgcagcagataatcacagaggcttgccaggtggcctccggtgagctccgtgtggctgcagcccagctggaa

SEQ ID NO: 1036974 - DNA, 120 bp, Artificial Sequence
  ENSG00000286407_4 (sequence is synthesized)
tcgctgagattagggaggaagaggggccggttcctcatagcccgtggcacgtgggaaggatgcgcccccggcgtagagcccgcgctggggaccacaaacacgcccctccagctgctaccc

SEQ ID NO: 1036975 - DNA, 120 bp, Artificial Sequence
  ENSG00000286404_0 (sequence is synthesized)
aagagtctgctgtttggtgatagtgacaatgctgagccaggagggatggaggcaccgtgccctgtgacaggcgctccacaggggcatgacccaacctggctgcacgtccagtgaaaactt

SEQ ID NO: 1036976 - DNA, 120 bp, Artificial Sequence
  ENSG00000286404_1 (sequence is synthesized)
tgaaggtcaatctgaggaagaggacctggctgggtggagagtgaagaaagactgttccaaacgagaaggacaggatgtggtgaaggtgctgaaatggagaaacatatgacccttttgaag

SEQ ID NO: 1036977 - DNA, 120 bp, Artificial Sequence
  ENSG00000286404_2 (sequence is synthesized)
ggcaggaaaatattcagatacagctggagcatgtcgagtaaaagacaaagtagtaggagatgcatttgcagaccttctcaatgaccagtcaaggcaagacttcagaagtcatttaagccc

SEQ ID NO: 1036978 - DNA, 120 bp, Artificial Sequence
  ENSG00000286404_3 (sequence is synthesized)
gttggactttatcctaagagcaataggaagccgctacagttccttcagcagcagagccgcatggagagatggagtgtttaacattcactctggattgctgcagctgcagtgggtgatgtg

SEQ ID NO: 1036979 - DNA, 120 bp, Artificial Sequence
  ENSG00000286404_4 (sequence is synthesized)
gagagatctgatgaaaggtaaaaaatacatctttacaatattaggtctttctacccaagatcatgacacttcttgttacttaacccttggtcttgtgtagtctgctggatggatgctgaa

SEQ ID NO: 1036980 - DNA, 120 bp, Artificial Sequence
  ENSG00000286404_5 (sequence is synthesized)
cagggaagataaacctttctgttgttcaccaactgaggttctatgttgtttgtttttgttacagcagctagtcgtccctgatttatacggtatcctatattcttgtccctatactcaatg

SEQ ID NO: 1036981 - DNA, 120 bp, Artificial Sequence
  ENSG00000286404_6 (sequence is synthesized)
agtttttattttgctttacatttcctaaatgattaccttagaaatcttaagaaaactattgattttgtcatgtacttttagagatatcttaatcttgtacattactaatttaaatgattt

SEQ ID NO: 1036982 - DNA, 120 bp, Artificial Sequence
  ENSG00000286404_7 (sequence is synthesized)
gtgttgtttttcaattgattctcttgtgattgtcagctggatgtgagcctaacgatgttacttgtctgttccctttagatagtattactcttatttgtttcttaatttattagattttag

SEQ ID NO: 1036983 - DNA, 120 bp, Artificial Sequence
  ENSG00000286404_8 (sequence is synthesized)
aaattcttcaatagttatgaaacaatggagaggataaagagcattcttgattttatctcaaatttatttaaaatattatggtattttaccccattatgttctttttagagaaatatatat

SEQ ID NO: 1036984 - DNA, 90 bp, Artificial Sequence
  ENSG00000286404_9 (sequence is synthesized)
gtattttaccccattatgttctttttagagaaatatatattctttaccatcattttatgctaatttttttcaagaatgggcactgtaatc

SEQ ID NO: 1036985 - DNA, 85 bp, Artificial Sequence
  ENSG00000286405_0 (sequence is synthesized)
gctgagtagatggaatgtcaacaattgaaacagggagtaccaaaagaggataaagattgaatgggaaagataatgacgtccctac

SEQ ID NO: 1036986 - DNA, 120 bp, Artificial Sequence
  ENSG00000286405_1 (sequence is synthesized)
gagatactatctcatctctttcatacatttccactcctgtactagatgacccaggccatgtcagtcagcacaccaaaatctcctggacactgatggatttagtagactccaactaaattc

SEQ ID NO: 1036987 - DNA, 120 bp, Artificial Sequence
  ENSG00000286405_2 (sequence is synthesized)
agagtgaatccttgaacttgtgggagaaacagaaatactgtcttttttattggacctaaaccttgaagaatatgaccttgaacttctcaaatgagctgtatggagcttaagaacaaaaga

SEQ ID NO: 1036988 - DNA, 120 bp, Artificial Sequence
  ENSG00000286405_3 (sequence is synthesized)
cagagaaggctgatctaaaagaagcaagaaattaaaagaaaacgaggaagtgagaagagaaaagagagaagaggagaaaaacacagaaagagagatagaaaagataggagaagagataga

SEQ ID NO: 1036989 - DNA, 120 bp, Artificial Sequence
  ENSG00000286405_4 (sequence is synthesized)
aacatagaaatcggaaaaggaaaaaaattattttgagaaaattcttttaattgatctagtagctttcatatagattgtcatatttaatgttttcataaaattcctgtgcaaatacatggc

SEQ ID NO: 1036990 - DNA, 120 bp, Artificial Sequence
  ENSG00000286408_0 (sequence is synthesized)
gaatacgtcacgtcctggctcgagaacctgggaaaggactgggtggctgaaagatggctggaaagcgcatttagccaaccgagcctgcgcatggaacctgcggcgctgcacagctgcata

SEQ ID NO: 1036991 - DNA, 120 bp, Artificial Sequence
  ENSG00000286408_1 (sequence is synthesized)
gagatgtggagcacctccctttaccgtagaaagtaggcgagccagctcgaggcactatactgaggaagcgctgcggcctacttccgccgtttttcttaacatcaaagaaacttccggtag

SEQ ID NO: 1036992 - DNA, 120 bp, Artificial Sequence
  ENSG00000286408_2 (sequence is synthesized)
tggggtgtcttgcattccaccgtgtcggtgccccagaatgagacgcaagctgatctgcagatcccgcagggtgccttctgctcttttcggggcaggttggccggtaggggagaaggccgc

SEQ ID NO: 1036993 - DNA, 120 bp, Artificial Sequence
  ENSG00000286408_3 (sequence is synthesized)
tagccttgttgcgccgttctctaagccactcatgtccttagatcagattgaggggcccgcaggatttaagcctttaatccacagcacattccaagcacctacccggtggtaggccctaac

SEQ ID NO: 1036994 - DNA, 120 bp, Artificial Sequence
  ENSG00000286408_4 (sequence is synthesized)
aaggaacacaggcaagtgacacgctgcctggcctgaaaggtccgctcagacctttacatgaagttaataaatgttaagcttcagggcccctcgcttgtatggcctcctgggagaatagat

SEQ ID NO: 1036995 - DNA, 120 bp, Artificial Sequence
  ENSG00000286408_5 (sequence is synthesized)
agttgctgagttgtggagaggggaagccagcttgagattaggaagcaaatctatgtaagcatttctaataaattacccagagagatctaaggagaatctgaatctccaagtctctagtaa

SEQ ID NO: 1036996 - DNA, 120 bp, Artificial Sequence
  ENSG00000286409_0 (sequence is synthesized)
gccgagagcggaagaggagacgcagtttggcggctgtggggatttgccggaaggttaataatgtccatgggcacatcggcctcctcctttcttattctctcccaagtgtaattccaggac

SEQ ID NO: 1036997 - DNA, 120 bp, Artificial Sequence
  ENSG00000286409_1 (sequence is synthesized)
gccccctgagcgcagattcatccaggcatttggcctagaggcccgcggaggagaaataaagtacaggcctggtaggacctttgagaacctgggcttcagctacaaaaccagagccccagt

SEQ ID NO: 1036998 - DNA, 120 bp, Artificial Sequence
  ENSG00000286409_2 (sequence is synthesized)
ccttcatctgctgtctcctcaagctcttttcagtgtattgtggagttcattaccactctaagctcgcacggaagtgtacaccagcttcgtgatcttaaaagcaaaacaaaatcaaatgga

SEQ ID NO: 1036999 - DNA, 120 bp, Artificial Sequence
  ENSG00000286409_3 (sequence is synthesized)
ctaggaattaacttgaagcagagttgtgacacttaagtggtttcttgccatcagtttccacgcactgctttaagatgcaattttacaaggtcttcctattccctgagacacaacaatatt

SEQ ID NO: 1037000 - DNA, 120 bp, Artificial Sequence
  ENSG00000286409_4 (sequence is synthesized)
gcatgtttgaagctgaaacagactgaaagcaagtcctcttgcaccaaaaggccaagttgttaaagcaaaggaaaaattattgaagtaaattaagtgctactctagtaaacacaattgata

SEQ ID NO: 1037001 - DNA, 120 bp, Artificial Sequence
  ENSG00000286409_5 (sequence is synthesized)
tgaagtaaattaagtgctactctagtaaacacaattgataagaaagcaaaacagccttattgctggtacagagaaagtttgagtcgtttgggtagaagatcaaaccagccacaacattcc

SEQ ID NO: 1037002 - DNA, 120 bp, Artificial Sequence
  ENSG00000286409_6 (sequence is synthesized)
aattctatgaagactaagagaggtgagaaagctgcagaagaaaagttggaagctagtagagtttggttcatgaggtttaaggaaaaaagccatcgctataacgtaacaggtcaagaagga

SEQ ID NO: 1037003 - DNA, 120 bp, Artificial Sequence
  ENSG00000286409_7 (sequence is synthesized)
agtgttgatgtagaagctacagcaagttatctgaaagatctagctgactagaacccagacaggactctgactcagcctccacgcagacaacagcaaggccatagagatggtggagccata

SEQ ID NO: 1037004 - DNA, 120 bp, Artificial Sequence
  ENSG00000286409_8 (sequence is synthesized)
caccgaaggaacctgagtcactctgtgactgcccagagaaaagctgtcccattcacctgaactggacaccttggactattatgtggaagggaaataaacttctttgctctttaggctgca

SEQ ID NO: 1037005 - DNA, 120 bp, Artificial Sequence
  ENSG00000244321_0 (sequence is synthesized)
agacagatctcacattcatgttaactggtttattttgaagcataacatttcatcaaggtgtatacctgtatgtgaatatttaacaatttagaaactgaaacagatgcagatgaagaatga

SEQ ID NO: 1037006 - DNA, 120 bp, Artificial Sequence
  ENSG00000244321_1 (sequence is synthesized)
cctacttgaaaatttaccagccaagcctgtaagctgtgtagagtaatgtcaacacaaaggaaatatcaattcaagtggattccaatgtgcaatcacagtcattagtatggattggtgtca

SEQ ID NO: 1037007 - DNA, 120 bp, Artificial Sequence
  ENSG00000244321_2 (sequence is synthesized)
aactttcaagcatttgccttgtttattgaacaacctaataattcaaaatggtaatgggaagagggtggagtaggaaaataaggatagactctgaaaccaaggtccttagggcttctatat

SEQ ID NO: 1037008 - DNA, 120 bp, Artificial Sequence
  ENSG00000244321_3 (sequence is synthesized)
gtgtcctttctcttgtatgtagacaataagtacacatacagatagctgtctaaaaattaagtgttaagctggaattagatattgaaattgagtaccaatattatctttagtcaatttccc

SEQ ID NO: 1037009 - DNA, 120 bp, Artificial Sequence
  ENSG00000244321_4 (sequence is synthesized)
ttaggatactattttgtgaagagaaaatattattcatgtgcatattaattaaagcttttaaaatgatcactgaaaatgtatcctctgacctgcagagtatatccagtgtatgttcttaag

SEQ ID NO: 1037010 - DNA, 120 bp, Artificial Sequence
  ENSG00000244321_5 (sequence is synthesized)
tcctggtgctagatgcaaattaaagatgagtaatgcaaattgaaatttccatgaaatgaatcattctacataatgagctttacaaattccacattttatgcaataccaaaaataaaaaaa

SEQ ID NO: 1037011 - DNA, 79 bp, Artificial Sequence
  ENSG00000229092_0 (sequence is synthesized)
aatgtgaggaggtccctgcgaccctcctgtgcagcctctggattcgccttcagtagctatgctctgcactgggttcgcc

SEQ ID NO: 1037012 - DNA, 120 bp, Artificial Sequence
  ENSG00000229092_1 (sequence is synthesized)
atactatgcagactccgtgatgggccgattcaccatctccagagacaacgccaagaagtccttgtatcttcatatgaacagcctgatagctgaggacatggctgtgtattattgtgcaag

SEQ ID NO: 1037013 - DNA, 120 bp, Artificial Sequence
  ENSG00000232564_0 (sequence is synthesized)
aaatgaatttttgggatggtacaaggtaagagtcaatgttccctctctctctctcctttttttttttttaagacggagtcttgttctgttggccaggctggagtgcactggcacaatctc

SEQ ID NO: 1037014 - DNA, 120 bp, Artificial Sequence
  ENSG00000232564_1 (sequence is synthesized)
aatttttttaacatacagatagccagttctttcctgatttgtaagtttttatttaaaccagagttagaaaaataattaaaataacactacctctaaacactcaaaaccactgctatgaca

SEQ ID NO: 1037015 - DNA, 120 bp, Artificial Sequence
  ENSG00000232564_2 (sequence is synthesized)
taatcctgccatttcagtagaacagaaaatccccacgccttcccctcagctcggagggcacaggactgggcagcaagctccaccagtttgtagaaggagttcaacttccagacagcaggg

SEQ ID NO: 1037016 - DNA, 120 bp, Artificial Sequence
  ENSG00000232564_3 (sequence is synthesized)
aaatgcctttctctgaagttattacatgagttcacactgaagggaaagaagaaagtgagccttatcattttcccaagatgctgtgagatgtgttggatttactctcactcataattgtgc

SEQ ID NO: 1037017 - DNA, 63 bp, Artificial Sequence
  ENSG00000232564_4 (sequence is synthesized)
ctgtgagatgtgttggatttactctcactcataattgtgcaggatggttgttttgttttattc

SEQ ID NO: 1037018 - DNA, 65 bp, Artificial Sequence
  ENSG00000232564_5 (sequence is synthesized)
catgcctactccaactcctgacctgaagtgatccgcccccctcaacctcccaaagtgctgggatt

SEQ ID NO: 1037019 - DNA, 120 bp, Artificial Sequence
  ENSG00000232564_6 (sequence is synthesized)
gattacagacgtgagccactgtgcctagccacaggtatgttcgggatggtttcaaccaacatcaatagaaccaactaagaatagatggccttcagcaacacagaggggtagcacaggagt

SEQ ID NO: 1037020 - DNA, 120 bp, Artificial Sequence
  ENSG00000232564_7 (sequence is synthesized)
aacacagaggggtagcacaggagttccaaagatcagtagtttgaaaatcaggtcacagggagtccacgctatatgatcttggggtctcactttgtggcccagctggaataccgtggtgca

SEQ ID NO: 1037021 - DNA, 80 bp, Artificial Sequence
  ENSG00000232564_8 (sequence is synthesized)
ggggtctcactttgtggcccagctggaataccgtggtgcaaacacggttcactgcagccttgacctcccaaattcaatct

SEQ ID NO: 1037022 - DNA, 120 bp, Artificial Sequence
  ENSG00000232564_9 (sequence is synthesized)
gggattacagctgtgagccactgcacccggcaaataatctttttaaaacagattgtgattccgcaggtctgaggtggcgtctgagattctgcattcctaataggcttccagagacagcat

SEQ ID NO: 1037023 - DNA, 120 bp, Artificial Sequence
  ENSG00000232564_10 (sequence is synthesized)
tgaactcctggcttcaagtgatcctccccattcggcctcccaaagcgctgggattataggtgtgagccaccataacaggcccaaaagtaacatctgatcaaaaatctcaaggtgatgcgg

SEQ ID NO: 1037024 - DNA, 120 bp, Artificial Sequence
  ENSG00000232564_11 (sequence is synthesized)
atcaaaaatctcaaggtgatgcgggaacaagccatgaggctactcagggaaacgtgctctaaatagaaggaataacaagtacaaaagccctgatatgcgagctaaggtgctcagggacaa

SEQ ID NO: 1037025 - DNA, 120 bp, Artificial Sequence
  ENSG00000232564_12 (sequence is synthesized)
caaacaaagccaatatggttggggtaaaacaagcaagggagagaagagaagcagataaaataagagttacaaagcagttcatgtgggactttgtagacgagtataaggactgtggctttt

SEQ ID NO: 1037026 - DNA, 120 bp, Artificial Sequence
  ENSG00000232564_13 (sequence is synthesized)
tcagtgaatgagaataactggcaggttctgagcaaggagggatatgacctgattaattttaaatggataatgtaatcgtgtttaaactcaaaaagctgaattaaacacctgttccatctc

SEQ ID NO: 1037027 - DNA, 120 bp, Artificial Sequence; identical to SEQ ID NO: 893442
  ENSG00000265218_0 (sequence is synthesized)

SEQ ID NO: 1037028 - DNA, 120 bp, Artificial Sequence
  ENSG00000265218_1 (sequence is synthesized)
atgcaagggaagcaaaaaagatgcctcaggaggcacgattacaacaggattgatgcaaacggaagctgaagcttaaccaaagacattaatgtacgcccacaaaagaaactgctaaggaag

SEQ ID NO: 1037029 - DNA, 120 bp, Artificial Sequence; identical to SEQ ID NO: 893444
  ENSG00000265218_2 (sequence is synthesized)

SEQ ID NO: 1037030 - DNA, 120 bp, Artificial Sequence; identical to SEQ ID NO: 893445
  ENSG00000265218_3 (sequence is synthesized)

SEQ ID NO: 1037031 - DNA, 120 bp, Artificial Sequence
  ENSG00000265218_4 (sequence is synthesized)
tgaactgtctggatgaaccggtcaacggcactcatcataccttagtttttaaatctgcattgtggtcataatctgttatttaattaatttctcgtatttttaataaaaactttgcctata

SEQ ID NO: 1037032 - DNA, 120 bp, Artificial Sequence; identical to SEQ ID NO: 893440
  ENSG00000265218_5 (sequence is synthesized)

SEQ ID NO: 1037033 - DNA, 120 bp, Artificial Sequence
  ENSG00000265218_6 (sequence is synthesized)
cagctcagtttttaacatatgtatgaaatatcaactgtgtttggttcaaaggactttatgatcttacagataggaactaaggaataataacataagaaataaaaaatgtggaaataaaaa

SEQ ID NO: 1037034 - DNA, 120 bp, Artificial Sequence; identical to SEQ ID NO: 893430
  ENSG00000265218_7 (sequence is synthesized)

SEQ ID NO: 1037035 - DNA, 120 bp, Artificial Sequence
  ENSG00000265218_8 (sequence is synthesized)
gccagttaattactttgaatgctctgctgctatggtgagctgcacgtctggaggcttcacagagacactgggtgaagctaaatgatgagtttgatggtgacctggaggtgaaactgtgac

SEQ ID NO: 1037036 - DNA, 120 bp, Artificial Sequence
  ENSG00000265218_9 (sequence is synthesized)
tgaactggctgctgctgctcactgatggaaagttcatgctccataggaggaactggaggctcaattggggcctcctgttgggttgcagaaggttccacctcctctggaaactgaattggg

SEQ ID NO: 1037037 - DNA, 120 bp, Artificial Sequence; identical to SEQ ID NO: 893435
  ENSG00000265218_10 (sequence is synthesized)

SEQ ID NO: 1037038 - DNA, 120 bp, Artificial Sequence
  ENSG00000265217_0 (sequence is synthesized)
gcaacccgctggcgtccccttccacaccgtggaaggtttgttctttcgctcttttcaataaatcttgctaccgctcactctttgggtccagactgcctttatgaactgtaacactcacct

SEQ ID NO: 1037039 - DNA, 73 bp, Artificial Sequence
  ENSG00000265217_1 (sequence is synthesized)
taaactccggacatgccgcctttaagaactgtaacactcaccgtgttaagaactgtaacactcaccgtgaggg

SEQ ID NO: 1037040 - DNA, 88 bp, Artificial Sequence
  ENSG00000265217_2 (sequence is synthesized)
cagacgcaatatgatgcacttaataagcctttcacaccaatttgatacggtttggatttgtgtccctgctggaatgtaaagttgaact

SEQ ID NO: 1037041 - DNA, 120 bp, Artificial Sequence
  ENSG00000265217_3 (sequence is synthesized)
ctgggaggtgattgcatcatgggggcatatttcccccttgctgttctcatgatgacacaaatgaacagcagaactcttgctcccatgaattggcaagtatagtcagaagtctccccactg

SEQ ID NO: 1037042 - DNA, 120 bp, Artificial Sequence
  ENSG00000265217_4 (sequence is synthesized)
tggatgggagacagaaaagaaagaaagagcctgaattactgagggggtgagtaaatagccacattagtccaggactcctatctctccaattattatataggacaaataagttggtatttc

SEQ ID NO: 1037043 - DNA, 120 bp, Artificial Sequence
  ENSG00000265217_5 (sequence is synthesized)
ttcatgacactctttgcctaggttttctgttatatacagacaaattcatcctttaaaaatagagatataacatggatatattgttctaaatggaactggaaatgttgtggaatactatgg

SEQ ID NO: 1037044 - DNA, 120 bp, Artificial Sequence
  ENSG00000265217_6 (sequence is synthesized)
cgttacgattttcatataactaataacataatagaatttaaaaaatgccctctcccacaggtggtcatttaaaaaacttgtattagtttttagaggttcattaaaatgaattattggcaa

SEQ ID NO: 1037045 - DNA, 120 bp, Artificial Sequence
  ENSG00000265217_7 (sequence is synthesized)
gtctgcggcatcattcttgaaaatcaagttaaagttttgttctgaaatttcaaggcctttcacaccaatttgatacggtttggatttgtgtccctgctggaatgtaaagttgaactgtaa

SEQ ID NO: 1037046 - DNA, 120 bp, Artificial Sequence
  ENSG00000265217_8 (sequence is synthesized)
tgagtgcttgaactggaacatggattggccctcagtgctcctgtttcttaggccttcaagactagatcagaatcttcaccatcagcactgtttgtcctcctgctttcaggccttcaaacc

SEQ ID NO: 1037047 - DNA, 120 bp, Artificial Sequence
  ENSG00000256482_0 (sequence is synthesized)
aggggccactacctccacaatattggatagcatgattaaatgcatggctgaaagagatttcatgcttctaatttgtatctgagtcatgcctactcatgccttgctggcttgcaggttttg

SEQ ID NO: 1037048 - DNA, 120 bp, Artificial Sequence
  ENSG00000256482_1 (sequence is synthesized)
tggctgtaaatgcttcctaagcctggatcattaaaattatgctaaactttataaacttcttatttctagaagtgaaataataattcaacttaaaaaaaatctggcctaatgacaacttca

SEQ ID NO: 1037049 - DNA, 120 bp, Artificial Sequence
  ENSG00000256482_2 (sequence is synthesized)
gtggatggatcacattaccttgatgcattcttatcaatgcttacaaaagttgttcatatcaaaggcacccacccactgatgtgccaggtccagaatgcaccgccttgtcactcctggaag

SEQ ID NO: 1037050 - DNA, 120 bp, Artificial Sequence
  ENSG00000263110_0 (sequence is synthesized)
aaaaatggctcctcttccttcctagagtgtgaccatctctacctgtgcgcccacacggctggcctgaacatgaggcagtgactcccggctggaagggaccccgaggacagcaaataccga

SEQ ID NO: 1037051 - DNA, 120 bp, Artificial Sequence
  ENSG00000263110_1 (sequence is synthesized)
gaggaggctcaccgcaaagaaaggggaagtacaaactgtccaaatggctaggaggggaggacgttggttctgacacagcctgggacctactcctgacccagacgtgtggctcggaggatg

SEQ ID NO: 1037052 - DNA, 120 bp, Artificial Sequence
  ENSG00000263110_2 (sequence is synthesized)
ccaggagttagagaccagcttggggcaacgtagcaagaccccgtctctacaaaaaaattcaaaaattaatcaggcatggtgatgcatctttgcaatcccagctactcaggagactgaggc

SEQ ID NO: 1037053 - DNA, 89 bp, Artificial Sequence
  ENSG00000263110_3 (sequence is synthesized)
cccagctactcaggagactgaggcaggagggtcacctgagcccagggaggccaaggctgcaatgagttcgttagtgaaaccctgtctca

SEQ ID NO: 1037054 - DNA, 120 bp, Artificial Sequence
  ENSG00000226167_0 (sequence is synthesized)
gaatacagtgatttccctccatatattctagtcttttccactctctcatttggaagcaaattcagctctatgtccttcaccttaggttagggtctactgagaaaacaaacaaataggatt

SEQ ID NO: 1037055 - DNA, 120 bp, Artificial Sequence
  ENSG00000226167_1 (sequence is synthesized)
cttaggagaaaaaaaaaatcctctgagaatcacgtggcattcccaaactgaaaactatgaagatgacataagttttatctaggtacactcagaccagtaatcttgttaccaaatgagcct

SEQ ID NO: 1037056 - DNA, 120 bp, Artificial Sequence
  ENSG00000226167_2 (sequence is synthesized)
gtcaagccgggcagggcctgacatacagcttcagtacactgaggacacaaccaaaccaggtctcggaaagtctgcaccaccactacaatacaggccagggtacaagagcacaggattaga

SEQ ID NO: 1037057 - DNA, 120 bp, Artificial Sequence
  ENSG00000226167_3 (sequence is synthesized)
gcctccaggttctcaagaaggaaaaggagcagacacctacctatggcaaagatggcagcctgtgcaaagtccgcagacacatccgtgcagtaccctcgaagctcctctagcacctgctgc

SEQ ID NO: 1037058 - DNA, 120 bp, Artificial Sequence
  ENSG00000226167_4 (sequence is synthesized)
acattctcatcgttcaccagttcacacagcacctccactttctgtagtttgatgtagtggggctccgagtaggagcaaaaaaactttttgtagtggctgctaaagtgacctggtaaacta

SEQ ID NO: 1037059 - DNA, 120 bp, Artificial Sequence
  ENSG00000226167_5 (sequence is synthesized)
tgcaagatctggcgtacatgacaaagagcaacaaaacagagctcacggctctctgaagaacaggcagctagcaaaggtcccttgacccgcacaaggacatcagtttgtacgtggggaaac

SEQ ID NO: 1037060 - DNA, 120 bp, Artificial Sequence
  ENSG00000226167_6 (sequence is synthesized)
atttttgccaagatcagaaaaagtttggtagctcccatcaccacacctgggctactgctcttgaggaaactatccaacagattgagaatgtcaaatagttcttcctcactgcggggttgg

SEQ ID NO: 1037061 - DNA, 120 bp, Artificial Sequence
  ENSG00000226167_7 (sequence is synthesized)
attctatccaaaaaacaaaacaaaagagctattttagcaacaaaattaggaccatttccatgccactgccatatgaccaggtggttgttcatcatagcaaagggagaattcttaaaaata

SEQ ID NO: 1037062 - DNA, 120 bp, Artificial Sequence
  ENSG00000226167_8 (sequence is synthesized)
ggctgtgccataattaagtcacttttcatgtactatttaaagtttacacaaaaaaggcttaaaattccaagatgagttgttaatacaaatgcacactcctctaagaccaaagacatgatc

SEQ ID NO: 1037063 - DNA, 120 bp, Artificial Sequence
  ENSG00000226167_9 (sequence is synthesized)
agcatacactgggtccaggttccttacattttaagacactataaatggcttagtttgggggacatgactagagaagggtagaacctattcccacagtatatttctatttccctatatcaa

SEQ ID NO: 1037064 - DNA, 120 bp, Artificial Sequence
  ENSG00000226167_10 (sequence is synthesized)
acagtatatttctatttccctatatcaataagggaaagtaaggcaaataaaagaaattctctcagtggaatgtgagggagttaatagtggttaactggccgggcgcagtggctcacgtct

SEQ ID NO: 1037065 - DNA, 120 bp, Artificial Sequence
  ENSG00000226167_11 (sequence is synthesized)
gaacccaggaggcggaggttgcggtaagccgagatagcgccattgcactccagcttagacaacaagagcaaaactccgtctcaaataataataataataatggttaactttcttttctac

SEQ ID NO: 1037066 - DNA, 120 bp, Artificial Sequence
  ENSG00000226167_12 (sequence is synthesized)
aataataatggttaactttcttttctaccccacataagttgttcaatactttaatacatcaacaagatcccacaaggtagcagatctcataataaaaagagtgctgaggcatccaaaccg

SEQ ID NO: 1037067 - DNA, 120 bp, Artificial Sequence
  ENSG00000251649_0 (sequence is synthesized)
gaagtaacttgtggaatgctgagaaagaagccatttagattttacagaaatgtagctcctcatacattatattgttcctatgaagaattagattgaataaagctgctttgaataaagctc

SEQ ID NO: 1037068 - DNA, 120 bp, Artificial Sequence
  ENSG00000251649_1 (sequence is synthesized)
ataaagctgctttgaataaagctcgtattaccagctaccacatgtgatggaaagaatccaagttaaacactctcaccagagcatgctccaagacagatgactgagccccaggcttggcca

SEQ ID NO: 1037069 - DNA, 120 bp, Artificial Sequence
  ENSG00000251649_2 (sequence is synthesized)
gtatgccagctactcagaccacgtataaagactagggggattttttgaaaggaaaagaaaccccggcttccacttatactttgaaatttcagatgatgtactgccaacttacagaccttg

SEQ ID NO: 1037070 - DNA, 120 bp, Artificial Sequence
  ENSG00000251649_3 (sequence is synthesized)
ctttaatcagcagccacatgaaaaggctgtttctatttactctaggtcatttaggaaacaagcaataagtaggccttgcaaaatttcagcttctcttaaagttggcatgttttcctcaaa

SEQ ID NO: 1037071 - DNA, 86 bp, Artificial Sequence
  ENSG00000251649_4 (sequence is synthesized)
agaagccatttagattttacagaaatgtagctcctcatacattatattgttcctatgaagaattagattgaataaagctgctttga

SEQ ID NO: 1037072 - DNA, 120 bp, Artificial Sequence
  ENSG00000251649_5 (sequence is synthesized)
gtagaaatatttacaatcctgtcatacatgaattttagccttccttctgtctaacaacaaataggctttttaaagaatgcttagcgttaaactggaggctgttttgtaaaggtgggtctg

SEQ ID NO: 1037073 - DNA, 120 bp, Artificial Sequence
  ENSG00000251649_6 (sequence is synthesized)
tatagatttgaataatgactacgctgctttactgctctagttaaaatttcatcaaatactgactttagctggaaaaagataatttaagcccatcctattttagttttaaattgtgtatat

SEQ ID NO: 1037074 - DNA, 120 bp, Artificial Sequence
  ENSG00000251649_7 (sequence is synthesized)
ataaaaaggtaatcttgcagaacataaagtaacaactacaatattcagaaattcattaatattagaaagataaaaaatgattagggtaccaatatgttctttggtccataatgaatttct

SEQ ID NO: 1037075 - DNA, 120 bp, Artificial Sequence
  ENSG00000251649_8 (sequence is synthesized)
tttctcttggttgttcatactattttgattatcagtgtaatgaagagattttgtgtagtccttaatattgtgacaaagtatcatatttgtattatcaatttttaaaaaatattttcttcc

SEQ ID NO: 1037076 - DNA, 120 bp, Artificial Sequence
  ENSG00000251649_9 (sequence is synthesized)
tttattatgtagagtcaatattacaccattttctgctgtaaacttgcaacttggtatctgacacttcacacttcacaattgtaaaagccttacaacaatacaatttcactgataccctca

SEQ ID NO: 1037077 - DNA, 120 bp, Artificial Sequence
  ENSG00000251649_10 (sequence is synthesized)
ggaagtaacttgtggaatgctgagaaagaaggagaggtatatcgtccctttaggcaaatcggttatatttaatggttcaagaacaatgaaaggcagataatctttacctagaggaataaa

SEQ ID NO: 1037078 - DNA, 120 bp, Artificial Sequence
  ENSG00000251649_11 (sequence is synthesized)
tgctatggactaaattgcatccacccaaatattcatatactgaagccttaccctaaatgtgactatttagagattgggcctacacaaaggtagttaagattaaataaggtaataaagata

SEQ ID NO: 1037079 - DNA, 120 bp, Artificial Sequence
  ENSG00000251649_12 (sequence is synthesized)
gggccctgatcccatagattagtgtccttataagaggagagaacagaggaatgtgggctctctcacccttactcttgctgtctctttttattctctctctctgccgtgtgaggacacaga

SEQ ID NO: 1037080 - DNA, 120 bp, Artificial Sequence
  ENSG00000251649_13 (sequence is synthesized)
gggaagacatctgtctaaaagccaggaagagagcccacattagaaccaaaatgggccagcatttggtgccttgacttaaacttctcagcctccagaactgggagaaaatgaatttctgtt

SEQ ID NO: 1037081 - DNA, 120 bp, Artificial Sequence
  ENSG00000251649_14 (sequence is synthesized)
ataccaatctatggtgttttgttatggcagcttgagctaactgaaatgctatttttcatctcttgtgctactgttgtaatattttaagttttattataactatataactacatttaacaa

SEQ ID NO: 1037082 - DNA, 120 bp, Artificial Sequence
  ENSG00000226163_0 (sequence is synthesized)
taaagtagacaatgcagtgtgcaaaactcagattgcaaggatgcttgaactgcccactatctataggagagtttatgaccagcctttccgtagttcagccttagacaaagaagcagcact

SEQ ID NO: 1037083 - DNA, 120 bp, Artificial Sequence
  ENSG00000251642_0 (sequence is synthesized)
gaacaagcttgtggctgcaggcacagcacagctcaggtcactggatagatggtccctttggatcacgtgctcatccctggcccagtcagctgtgatcagaggagcaagaccgtgagataa

SEQ ID NO: 1037084 - DNA, 120 bp, Artificial Sequence
  ENSG00000251642_1 (sequence is synthesized)
aacctaaggaatttcaaagagggggccatgatgggcattcagcggcatctcaggagggggcagagtaaccagcaggtgctttgcatgctggtctggtgtgtctggaaaaggcatcccgct

SEQ ID NO: 1037085 - DNA, 120 bp, Artificial Sequence
  ENSG00000251642_2 (sequence is synthesized)
aaaacgtttgtcaggaaacttctcatcagcatttccagcatgcaggagcaaccaagagagccacttagataccatttgattataatgtgtttctcagagaaataaatagcccaaatggaa

SEQ ID NO: 1037086 - DNA, 120 bp, Artificial Sequence
  ENSG00000226169_0 (sequence is synthesized)
ctacaagggcataaggaatgagagatgtggttatgaccatctttgaaaaacacaatctgccacattcttcaaaacaactggaaggtgatgaaactgaggctgagaaaggaagattggcag

SEQ ID NO: 1037087 - DNA, 120 bp, Artificial Sequence
  ENSG00000226169_1 (sequence is synthesized)
gcacaggagatgccaggcctaagctggctgttgtaagcatccagcccagtccacagtgggtcacaggagacccacagagaagcccacctgcagagatctagtgtccatggactgagggcc

SEQ ID NO: 1037088 - DNA, 120 bp, Artificial Sequence
  ENSG00000226169_2 (sequence is synthesized)
caatcaacctgcttatctgctcagagctcatcaatacagactcatactgtctcgatttctatctcttcctaaatgccttttcccagcttgatacattaaaaatatattctccagctttcc

SEQ ID NO: 1037089 - DNA, 89 bp, Artificial Sequence
  ENSG00000266541_0 (sequence is synthesized)
ctttttttttttttgttttgtttttttaagacagagtcttgttctgtcaacctggctggaatgcagtggaatgacctcggctcactgtg

SEQ ID NO: 1037090 - DNA, 120 bp, Artificial Sequence
  ENSG00000266541_1 (sequence is synthesized)
atactcagttaaaagggaaaacagcctgggagcaaattcatgtataacagagtattaggaagtgaacacactgttcaaataaataataagaaagaaaataaggatacaagtaggcaattc

SEQ ID NO: 1037091 - DNA, 120 bp, Artificial Sequence
  ENSG00000266541_2 (sequence is synthesized)
atagaagacatgcaagtgactgaaatacagacagacatgatggattatcagtaacaagtcattgtatcggacctaactagaactctgatacccattattattatgcattaataaagctac

SEQ ID NO: 1037092 - DNA, 120 bp, Artificial Sequence
  ENSG00000259094_0 (sequence is synthesized)
gttctcctgccattgttccatctgcaattgagcaccctttctgcagaaagtaaagatggccttgctgagagatcttttgtctctgtgctgactttcctttgtggcaccaatgatgtattt

SEQ ID NO: 1037093 - DNA, 120 bp, Artificial Sequence
  ENSG00000259094_1 (sequence is synthesized)
ctaacaattttgatatttctaacaattttggtggcaatcgtatggggatacattctcctccgggggcatctctagtcctctttcatgaggaggcaccacaccacctcttgcggtggcctc

SEQ ID NO: 1037094 - DNA, 120 bp, Artificial Sequence
  ENSG00000259094_2 (sequence is synthesized)
gcaccacaccacctcttgcggtggcctcaggggtaagggaccaagacccacctggtgcgaggaataacccgagctctcagcaatgcagaaagaaactggccagcaacctagcttaaagga

SEQ ID NO: 1037095 - DNA, 120 bp, Artificial Sequence
  ENSG00000259094_3 (sequence is synthesized)
gcacagaccaaggaaggcaaagccacaggagccggtcttttagcacagatgccgcccttggagtttccagtacatcagcatcagcctggggatcacattctcatcaaaggatagaaagaa

SEQ ID NO: 1037096 - DNA, 120 bp, Artificial Sequence
  ENSG00000259094_4 (sequence is synthesized)
gagactgctgttcgtacagcggaaagggatggacacatgacacctgagtcaagcaagtgccattatcctcagaatcatgggccattgttcctgggtcaagccctaccaaattaaagctaa

SEQ ID NO: 1037097 - DNA, 120 bp, Artificial Sequence
  ENSG00000259094_5 (sequence is synthesized)
ggaaagcttagtctatctttttcctttcctttcctaacccagtgcttaaatccattactattcctaccaccagcaactctaaccccactgtagggcacttctgtggtttaggagcagaag

SEQ ID NO: 1037098 - DNA, 120 bp, Artificial Sequence
  ENSG00000259094_6 (sequence is synthesized)
tcactggaaaggatcctataggcttctttaaggtgcactttgttctccctcctctacctcctacaactgcacctttcccaaacctacaaaatcaaactatgactcgcctcatgccaaatg

SEQ ID NO: 1037099 - DNA, 120 bp, Artificial Sequence
  ENSG00000259094_7 (sequence is synthesized)
acaaaagcaaggtctcagtagtagaaataggagacctatggcaaaccatagccattgaaacagggtataaagatgtaaatgcctggttaaaatagattaaatattctgtttgcactttaa

SEQ ID NO: 1037100 - DNA, 120 bp, Artificial Sequence
  ENSG00000259097_0 (sequence is synthesized)
cctctttgaagatgaaaacaattcaacaaccttcttctccatgcctttcagaatgaatttcttcttctcccggatttttctttcaattcttggctgaagtttcaagctgtgatcactcca

SEQ ID NO: 1037101 - DNA, 120 bp, Artificial Sequence
  ENSG00000259097_1 (sequence is synthesized)
ggcttttaatttcagtctaattcaagtcagcagcatagggcagctcctgggaaattggtttacacatgcggacaagcccagtagcccagagctaacccactcaccatccctgaccacaga

SEQ ID NO: 1037102 - DNA, 120 bp, Artificial Sequence
  ENSG00000259097_2 (sequence is synthesized)
aaatgaggggggcagcaacctgttaatgagactcaagagtgtcaagacccatttttgttatctggattttcaaggccgagttcaaacatgaggatcctggaaaggttggcagacgtctgc

SEQ ID NO: 1037103 - DNA, 120 bp, Artificial Sequence
  ENSG00000259097_3 (sequence is synthesized)
ggaagctaccttctctgttgtaaaagtccacaaatgagaagtggctgcagtgtataaacctgtggacagctcttcttgtactgtcacccactctcatagctcaccatcctcaggcaccct

SEQ ID NO: 1037104 - DNA, 120 bp, Artificial Sequence
  ENSG00000259097_4 (sequence is synthesized)
ggagagtcaaagaattcaggaatcacctttttcaaatgtttcattccctttttccattccttaaaggtaatgaactccccaaaggcagagacgttaatggatgaatgaagaaatgaaatg

SEQ ID NO: 1037105 - DNA, 120 bp, Artificial Sequence
  ENSG00000259091_0 (sequence is synthesized)
agaacatctggaagctggggaaaacatcagagcaagtgaagaatgttcaaatatacagggaccatccagagacatgtggcctgcacgttgatgagcaatgtgaactgaattactgttgta

SEQ ID NO: 1037106 - DNA, 120 bp, Artificial Sequence
  ENSG00000259091_1 (sequence is synthesized)
tctggaggaattccataaaagagagtaatcagtctatttggatcccaactgccttttcctgtccccaaagggcgggaactagtgtgggtggaaaaacccaatgcatcccaaggcagtcct

SEQ ID NO: 1037107 - DNA, 120 bp, Artificial Sequence
  ENSG00000259091_2 (sequence is synthesized)
gccttctaaagcgcccgccaggacaggctcctggtgggttgtaaggagaacggcaggaagaagtgctcccaggaagctgcctagccaccgccaccaccacagggttccatccaactgccc

SEQ ID NO: 1037108 - DNA, 120 bp, Artificial Sequence
  ENSG00000259091_3 (sequence is synthesized)
cagatctccattttaaaccggcagtctgcaaactcagccctgaggacacagccagcccgcttccaggcatctcctgcgagctgctcccaggaaagaacagcaaagcaacctggtccagtg

SEQ ID NO: 1037109 - DNA, 120 bp, Artificial Sequence
  ENSG00000259091_4 (sequence is synthesized)
tagacatgctgttcaaatcatctgtggttgaatgactatttttttaatttaatcttttgcagacatttttggtaaaacattatataaatgaattactagaaaaaaagaaatacaaaagta

SEQ ID NO: 1037110 - DNA, 120 bp, Artificial Sequence
  ENSG00000259091_5 (sequence is synthesized)
aaaacatatgaaatataagccccaatcttttgttattagattcaatacacatagaaataaattttaatacatacaatcaaaacaaacagcatgggataaaataaaagaatcccaaaacca

SEQ ID NO: 1037111 - DNA, 120 bp, Artificial Sequence
  ENSG00000259091_6 (sequence is synthesized)
aagcgcccgccaggacaggctcctggtgggttgtaaggagaacggcaggaagaagtgctcccaggaagctgcctagccaccgccaccaccacagggttccatccaactgacttatggcat

SEQ ID NO: 1037112 - DNA, 120 bp, Artificial Sequence
  ENSG00000259091_7 (sequence is synthesized)
caggagctttgaattgtctcatctccaagactctgaaggtccttacaacactagcaatccccttcatgccttaggggatctctacatgatgtcctgctcagatgatggaaagccagcccc

SEQ ID NO: 1037113 - DNA, 120 bp, Artificial Sequence
  ENSG00000259091_8 (sequence is synthesized)
cttcctcttgcaaactggcttcttgcacagtcacctggccttagactagaaccatggctctcaaatttcagggaaagtatgatcaagcagttcatcaggaagcacaaatgccacatggac

SEQ ID NO: 1037114 - DNA, 120 bp, Artificial Sequence
  ENSG00000259091_9 (sequence is synthesized)
agggcaattctttttcaagaagacccacagacttctcctgcctaggctctgaagaagccacaaaaatctgtccttccactaggctttcaggagagatgagccgtctccatttccatcagt

SEQ ID NO: 1037115 - DNA, 120 bp, Artificial Sequence
  ENSG00000259091_10 (sequence is synthesized)
cactcagctcttccccaacaccacagacaactggccgccttggaggctcttccaagtttcctgtagcagactctttagttgttataatgttccagaaactgaagtgggaatggaagctat

SEQ ID NO: 1037116 - DNA, 120 bp, Artificial Sequence
  ENSG00000259091_11 (sequence is synthesized)
caagttttctgtactccaaaaattgtctccagcacattccctgagaaagtgttgcatccttgccctgaacaccttccaacagaatgactaaggaatactcaatgctagaccattccagcc

SEQ ID NO: 1037117 - DNA, 120 bp, Artificial Sequence
  ENSG00000259091_12 (sequence is synthesized)
tgttcacccaccaagaggtggaacttgtctgaagctacaggaccacaattgaccataccctcccctccttctttgctttatctttttggaacatattctgtttattattaacatttttaa

SEQ ID NO: 1037118 - DNA, 120 bp, Artificial Sequence
  ENSG00000259091_13 (sequence is synthesized)
actatgagacttaaagataatctgttctaagcccctaatcttgtacatgactaaaaaaaatcacaaggacaaatagaatgcatgcacaccatcactctcctatcctctacccacagcaga

SEQ ID NO: 1037119 - DNA, 120 bp, Artificial Sequence
  ENSG00000259091_14 (sequence is synthesized)
gatcactaatcaattaaagcaatcttttctactgcacacaggtgtggccttaaaatccttctggacagaacgcttcaggcagacttttcatatttaatcataaacataaatgacatcaaa

SEQ ID NO: 1037120 - DNA, 120 bp, Artificial Sequence
  ENSG00000259091_15 (sequence is synthesized)
cattaaacccatttgtcaatccagtgttaaatgatgctaaagtagtttgtggtaaaactgggcccatgtctcctctctctcagcttattgacctttctgctacatcacaatgttgtactt

SEQ ID NO: 1037121 - DNA, 120 bp, Artificial Sequence
  ENSG00000259091_16 (sequence is synthesized)
atgttgaaatgtcacactttacatcttctgcaaatattccctctaggtttaacttttccaacaaaatatctcatcatgtttttgtcttttcatttttgttcttgagtaagtaatacattt

SEQ ID NO: 1037122 - DNA, 120 bp, Artificial Sequence
  ENSG00000259091_17 (sequence is synthesized)
acttgtttcaaactcaaagcaatgtaaaggtatactcggggaagtcatgctaccacccaagtctccatccacttcattcctccacttttattagtttattgtttatccttccaaggtttc

SEQ ID NO: 1037123 - DNA, 120 bp, Artificial Sequence
  ENSG00000259091_18 (sequence is synthesized)
tttatgcaaatacatgcaaatcaaatatatattctcattttctgtgctggccatacacaaaatgtagcatattatatatacttgttgtacctttctttttttaacttaacaatataacct

SEQ ID NO: 1037124 - DNA, 120 bp, Artificial Sequence
  ENSG00000259091_19 (sequence is synthesized)
agaaatggatttttctcactttttcgtaggtttataatcatactacttttgacatttaggtcatttgaataagattcaatctataagacctgccttcttaaaccctgttttggtcctctc

SEQ ID NO: 1037125 - DNA, 120 bp, Artificial Sequence
  ENSG00000259091_20 (sequence is synthesized)
tctctactatccagcacatgatatggccaatgtttttattaagaaaataaattttattaaagccactacatgaaatatttcttttgatggacactaaaataataagcatacataaagtat

SEQ ID NO: 1037126 - DNA, 120 bp, Artificial Sequence
  ENSG00000259091_21 (sequence is synthesized)
cataatagcttaataataattcagtattttggagttgccaagtataaaactggaggcttcagaattaattttaaggattgagccctggttattagcagacacatgtctgctttaaaactt

SEQ ID NO: 1037127 - DNA, 120 bp, Artificial Sequence
  ENSG00000259091_22 (sequence is synthesized)
tgtccttttcactattagaaagccaaaggctgctttggctcttagagccttagtagagcctcagaattgacccattaggctagtctctgattaaatggaccccaaagtgttagcctgaac

SEQ ID NO: 1037128 - DNA, 120 bp, Artificial Sequence
  ENSG00000259091_23 (sequence is synthesized)
tcttttgttaattgccttgagtgagtttgcctaatcaaaggaacgtgtgaaacctctgatctgtatggcagccttaagatttctgatcttcattatcttctataaaagtacatcactttt

SEQ ID NO: 1037129 - DNA, 120 bp, Artificial Sequence
  ENSG00000259091_24 (sequence is synthesized)
gtatttttcagttccttttcaatcccctgataagaatgacctgttaatagataaacttaggcacattaaaattttaacaagtttatttgagcattcagcaattcatgaacccagcagtct

SEQ ID NO: 1037130 - DNA, 120 bp, Artificial Sequence
  ENSG00000259091_25 (sequence is synthesized)
cagactacaagtggttcagcactccactgagagggtgcaaggggaaaacttgtataaggtgtttgtggaagcaagacaaagaaaatatctgattgatttaggctgaaaatctctagttac

SEQ ID NO: 1037131 - DNA, 120 bp, Artificial Sequence
  ENSG00000259091_26 (sequence is synthesized)
aggttggttagcaatttctgattggttaaactaaagttttattttagtatttaggttgagttaggttttggtttgcttacaaaggcactggagccatctcagcctagtggacttgaaatc

SEQ ID NO: 1037132 - DNA, 120 bp, Artificial Sequence
  ENSG00000259091_27 (sequence is synthesized)
aattattataatagatcccctacctaagaaagccagcatccctaaaggaaaataaatactgaggactttatgcaaagcaaagaaatggatgtaaagacgtggatcctcattgccctcaca

SEQ ID NO: 1037133 - DNA, 120 bp, Artificial Sequence
  ENSG00000259091_28 (sequence is synthesized)
atacttcttttccttgaaaaaaggctgagaatggataaagataaatttaggcacagtaaggacaaagataaagaatagcaagaacttgtagcttggattattgatgccagagaagtggag

SEQ ID NO: 1037134 - DNA, 120 bp, Artificial Sequence
  ENSG00000259091_29 (sequence is synthesized)
accccatgtggagaatatttttacccgtttcccaccactgcttcccggacagagataatctgggacccctgtgagtatagcccagctggcaaccttgccatatttccatcctgcaaggct

SEQ ID NO: 1037135 - DNA, 120 bp, Artificial Sequence
  ENSG00000259091_30 (sequence is synthesized)
tcattcaggacagcgcaggaacttataggtcagtctaaacactaaacaagaacattagccttaacaacacaaattagtaattcatttcttccttatgtagctgagcacttaatgatccaa

SEQ ID NO: 1037136 - DNA, 120 bp, Artificial Sequence
  ENSG00000259091_31 (sequence is synthesized)
atcttggcgactgagttgggtaatagttcattgctggatgacccatcttgactttcaaagttgctattgtttttacattatcctcaagtgttatcattaagttgtgagcaagactaattt

SEQ ID NO: 1037137 - DNA, 120 bp, Artificial Sequence
  ENSG00000259091_32 (sequence is synthesized)
tcttaatcattcccaatctccccaaccatttttcactgaataatatcatcaacaggctgcacaaattggacatctgagatttagttgaattagtaacacctaaaagatcatttatggctg

SEQ ID NO: 1037138 - DNA, 120 bp, Artificial Sequence
  ENSG00000259091_33 (sequence is synthesized)
cagcaataagcctcccatttcatctaattagagagcaagattatttccctaaatccccactaatattttgagttgacaaacaatgaagcaatcctgataaagtgaataaatgagtttcat

SEQ ID NO: 1037139 - DNA, 120 bp, Artificial Sequence
  ENSG00000259093_0 (sequence is synthesized)
atagcagccactctttcctgaaactgccttccaaccaggtgtgcagtttctgaaattctaccaatggctttacttcctccaggtgtcttctggaggagtaaggaaccgtgaccagacaga

SEQ ID NO: 1037140 - DNA, 120 bp, Artificial Sequence
  ENSG00000259093_1 (sequence is synthesized)
cacaaatacatatggccattagtaatatcattaccaagctaactacaggaatccagggcagtatgcaggcataagaggtccaggaagagcagaacagaagacagttgtgtggagagcaag

SEQ ID NO: 1037141 - DNA, 120 bp, Artificial Sequence
  ENSG00000259093_2 (sequence is synthesized)
tgaagagaggcactgaagacaaactctcccatccttctgactttacctggtcccagtcctgggaggtggaactgatgggattaataagaaaccaggcatgagaagccatgcagatgtaaa

SEQ ID NO: 1037142 - DNA, 120 bp, Artificial Sequence
  ENSG00000259093_3 (sequence is synthesized)
tttggaaatcaacatattgatagttggagtcactggagtaggatgtctgccagctcctctccagccacccattctcatagcgggtgagccagaccacatctgctaatccaggagcacagc

SEQ ID NO: 1037143 - DNA, 120 bp, Artificial Sequence
  ENSG00000259093_4 (sequence is synthesized)
tcaggactagtctatgcggatggaatctctctccagccttttctctatgtcagttttatctacctggcaagaaaaaacaaaaacaaccccaaaacaacccctccccacaaacacaacaca

SEQ ID NO: 1037144 - DNA, 120 bp, Artificial Sequence
  ENSG00000259093_5 (sequence is synthesized)
tgtgtttctgtaaaatcctttcttaggaggtttagtacaggtactacccatcagcaacttagccggccaggtgagttggtgcagaagggcttcggctgaatttataccagagccatcggg

SEQ ID NO: 1037145 - DNA, 120 bp, Artificial Sequence
  ENSG00000259093_6 (sequence is synthesized)
agtgacttggccacctctcccaattaccacaaggaagtcttaaaattgaatttcagtttcagcagatacttcagatttacctgagcaatatcatagacaatgtactcattatatagtaga

SEQ ID NO: 1037146 - DNA, 120 bp, Artificial Sequence
  ENSG00000259093_7 (sequence is synthesized)
caagtgtcattcacaccagatgaaatcccagtcccaagaggaacctctgcaccatccagagtaatactagctgaagggtcaggggtagttttgcccaaacctttgacactgtgcttgccc

SEQ ID NO: 1037147 - DNA, 120 bp, Artificial Sequence
  ENSG00000259093_8 (sequence is synthesized)
ttgggtaacttgctgatatgtgaagcgtgcttcagttcatacattttccaagggcaacttctcccaacaggattaagcctgttgggcctccctgagatgtatggcagtagttggcactct

SEQ ID NO: 1037148 - DNA, 120 bp, Artificial Sequence
  ENSG00000259093_9 (sequence is synthesized)
tggaggccatgtcagcgaaatagatccctttaccaaacatgtagcccgtcatgggcacttcaggcggggctatccaaagaccctgggacaggatcccagcaaagctggtggttgtggacc

SEQ ID NO: 1037149 - DNA, 120 bp, Artificial Sequence
  ENSG00000259093_10 (sequence is synthesized)
cggggcatgggcctttctatcttttgctcttggtttatattttcctatccaccagttcttctttaaaataaatgtatttgagtcaaaacaatagatcaataaaatatactaagtaaataa

SEQ ID NO: 1037150 - DNA, 120 bp, Artificial Sequence
  ENSG00000227485_0 (sequence is synthesized)
ggtgatgaagaagattaagaatgattccataacggtcagtacagtatttcacattcactgaccttttgtgtaatttgatatgctccttcaggaagtcagccatgctaaaccatcattcaa

SEQ ID NO: 1037151 - DNA, 120 bp, Artificial Sequence
  ENSG00000227485_1 (sequence is synthesized)
ggaaatttagttaatttacttttcaaaagcttacattatataaaaagtaaaataaaatctctacataataaaaaaaacaacttaaaaatggagagaagtccaacaagggtctcactctgt

SEQ ID NO: 1037152 - DNA, 120 bp, Artificial Sequence
  ENSG00000266893_0 (sequence is synthesized)
aggcctcctcactctctccctggcctgggagtcggggtctcagagaaacacctagccaaggccagtgtttctgcaggggtgggtcaactgtacagggggcctgcaacagcaaatcaccag

SEQ ID NO: 1037153 - DNA, 120 bp, Artificial Sequence
  ENSG00000266893_1 (sequence is synthesized)
ctttctctgaaacacacacacccctctgcctgcctgttcctgatttaatcatcagagtgtgctgcccgggaccaacctgaggggtcgaatgtcatcacagctctgacccgcccttgttat

SEQ ID NO: 1037154 - DNA, 120 bp, Artificial Sequence
  ENSG00000266893_2 (sequence is synthesized)
aggcagcacgcccgtcttcttccagtgacaccatttgcatcccaagaacaggactactctctggacttctgccctcttttgtgccatgtggagtgctcctcagtaatactgggtgactca

SEQ ID NO: 1037155 - DNA, 120 bp, Artificial Sequence
  ENSG00000266893_3 (sequence is synthesized)
cttgagtgacctttatgccctttaatgtgtctgatatttccctgctcagagtcgcattctgtgactggccaggccagctcttggaattgttaacgatgacattttttcctgtttcatcaa

SEQ ID NO: 1037156 - DNA, 120 bp, Artificial Sequence
  ENSG00000266893_4 (sequence is synthesized)
tgcaccaagcgtcttcttatttctggatgggttccattcctcatgctcaaatcccttctgtgaggctttcacagggctggatcatttccatccattggtcttacttggttctggtgttga

SEQ ID NO: 1037157 - DNA, 120 bp, Artificial Sequence
  ENSG00000266893_5 (sequence is synthesized)
ctggcttaaataggatgcaaatctagtggctcacatatgtggcagcagaggcagtgagagtttcaggaccaggcagcttgattacagcatcaagggcccctgtgttctctgttttctgca

SEQ ID NO: 1037158 - DNA, 120 bp, Artificial Sequence
  ENSG00000266893_6 (sequence is synthesized)
gccatagtgttggcttcttcccaagacttatttttcccatcagtgtcacctgtgctacaagctccttcagtcacatctatttttgatatttgtgggtacctaggaggtgcatatatttgt

SEQ ID NO: 1037159 - DNA, 120 bp, Artificial Sequence
  ENSG00000266893_7 (sequence is synthesized)
gggatacatgagatactctgacacagatgtgcagtgtgcacggatcacagggaaatggggcagccatccatcccttcaagcattcatgatttctttgtgttgtgaacattcccgttgtgc

SEQ ID NO: 1037160 - DNA, 120 bp, Artificial Sequence
  ENSG00000266893_8 (sequence is synthesized)
tctcttagttattctgaatgtacaagaaattattgctgactatagtcaccctgtcgtgctatcaaatactagacctcattcgtggtatctaactatattttgtacccattaaccatcccc

SEQ ID NO: 1037161 - DNA, 120 bp, Artificial Sequence
  ENSG00000266893_9 (sequence is synthesized)
atctcccaccccctacctttcccactatccatcccagcctctggtaaccatccttcgtctatctccacgagttcaattgaattaatttttagctcccacaaattatatagaatatgtgaa

SEQ ID NO: 1037162 - DNA, 120 bp, Artificial Sequence
  ENSG00000266897_0 (sequence is synthesized)
tgagtttgagctcctgggcggagatttttgttgccttgtaactgggattcctagatccagcctccaccctctgattgccctaaggaggttttggggttttgttttgttttgtttgtgttt

SEQ ID NO: 1037163 - DNA, 120 bp, Artificial Sequence
  ENSG00000266897_1 (sequence is synthesized)
ggaagaggaaggaagatacaagcaagggaagtcacaggctgtggtgcctaggcagaccctggtttgaatcttggccttaccactttttgcatgtaagtggtaggggcagcagatagctca

SEQ ID NO: 1037164 - DNA, 120 bp, Artificial Sequence
  ENSG00000266897_2 (sequence is synthesized)
cactttttgcatgtaagtggtaggggcagcagatagctcaggacatatcttgggtttttttgtttgtttttgttttgagacatagtctcactctgttgcagtgagccgagatggcaccac

SEQ ID NO: 1037165 - DNA, 120 bp, Artificial Sequence
  ENSG00000266896_0 (sequence is synthesized)
ctgtttgatattccattttatcaatatgttattatttacctaagcagtccatcattgatgaatgagttgtaatgttccctgatgtagaaaattcctaattattatgctgaaatgaacatc

SEQ ID NO: 1037166 - DNA, 120 bp, Artificial Sequence
  ENSG00000266896_1 (sequence is synthesized)
tttgttcatttgggcacttacgtaaatactcttaaaaagtaaagttctaagacaaaatatatcaataaggtttttttaaatttttttattattattattttttatgagacagggtcttgc

SEQ ID NO: 1037167 - DNA, 120 bp, Artificial Sequence
  ENSG00000266896_2 (sequence is synthesized)
ccatatccagccaagattatgtttttattttcatttctttttttatgtttactagatgtttataattcctttgttaattgcctattaatgtattttctccatttatttcagttttatttt

SEQ ID NO: 1037168 - DNA, 120 bp, Artificial Sequence
  ENSG00000266896_3 (sequence is synthesized)
tcccattggatcattagccttgtttgtgtacatattgctttgttatttgtttatagattttgatttttttttctctttggcttcacatttggagtcattctgaaaagaatctttgctttt

SEQ ID NO: 1037169 - DNA, 80 bp, Artificial Sequence
  ENSG00000266896_4 (sequence is synthesized)
cttcacatttggagtcattctgaaaagaatctttgcttttcaaaattaaaaatatatgtatacattttctctgatacttc

SEQ ID NO: 1037170 - DNA, 120 bp, Artificial Sequence
  ENSG00000266896_5 (sequence is synthesized)
gggattacaggcatgagccgccgtgccctgcctattttttcttcattttccatttacgtcttttgatccaactggaatttatttcatcttgggagtaaggtacagaatctagctttactt

SEQ ID NO: 1037171 - DNA, 120 bp, Artificial Sequence
  ENSG00000266896_6 (sequence is synthesized)
gagtaaggtacagaatctagctttacttttaaaaaaattaatagttattattctgtgtaaacttggacaaacatacaacccaaaaaacaaataagaatgaggccctcgtggattgagtta

SEQ ID NO: 1037172 - DNA, 120 bp, Artificial Sequence
  ENSG00000266896_7 (sequence is synthesized)
gggataattgacatttttcacaatattgaagcttattcagggacacaggttctccccatcttcattcctcaagtcctcccgtgtacgcggcacctccagcctcctaggtggctgctcagg

SEQ ID NO: 1037173 - DNA, 120 bp, Artificial Sequence
  ENSG00000266896_8 (sequence is synthesized)
cagcctcctaggtggctgctcaggcgggaagccttagattcctctcttcgcttcatactcagtccttggaacaggtcttagaaatatgttccacagtccaggcgcggtggctcacacctg

SEQ ID NO: 1037174 - DNA, 76 bp, Artificial Sequence
  ENSG00000266896_9 (sequence is synthesized)
ccgggcgtggtggcgggtgcctgtagtcctgagaatagcttgaacacggaaggcaatgacagagcaacactccgtc

SEQ ID NO: 1037175 - DNA, 120 bp, Artificial Sequence
  ENSG00000250116_0 (sequence is synthesized)
aggaggcctggggaacaatgagtaaggcagagagggaacagaggcttgtaggccactgtgcggactttggcgtttagtctgagctggggacccactggaggattctgagcagagcagtga

SEQ ID NO: 1037176 - DNA, 120 bp, Artificial Sequence
  ENSG00000250116_1 (sequence is synthesized)
catgattgcgcttacatttttaagacttactctggctgctgtgttgagaacagatgaccatggggcatagacagaagcagaaaggttggctggaggaaacggagagaaaatttacatctg

SEQ ID NO: 1037177 - DNA, 120 bp, Artificial Sequence
  ENSG00000250116_2 (sequence is synthesized)
gtggagcataaagaaaccagctagaggactggccttgtcattatctaactgtgttgtgacgaactggcacttcctcatctctaaaagcagggccctgaactagaagaccgccacgtcaca

SEQ ID NO: 1037178 - DNA, 120 bp, Artificial Sequence
  ENSG00000250116_3 (sequence is synthesized)
tgatgaaaaacactcaaactaacacttcttacccttgtgagcagccctactagcagatttaatgtgggaggaggttcacactacgggataaaaatcaagttttaggattccattttatct

SEQ ID NO: 1037179 - DNA, 120 bp, Artificial Sequence
  ENSG00000250116_4 (sequence is synthesized)
aagctgaccaccacaaggcagaggatcaagacttagctaaatacagccctcaggcaagcttcacttccccatctgtgaagggagaataaatacacatgttaagataaatgagagagctgg

SEQ ID NO: 1037180 - DNA, 120 bp, Artificial Sequence
  ENSG00000250116_5 (sequence is synthesized)
tcaagtgtttcgagctctttggcagacaagcctgactttccaaaaaaagacaaaccacaacttcggagccagtgctatttcttctgtgcatggtgaggtgacttccccagttgtaaagga

SEQ ID NO: 1037181 - DNA, 120 bp, Artificial Sequence
  ENSG00000250116_6 (sequence is synthesized)
catgctgaaagaaggtaaatgtctggtcacatttccatgtggtatactcctttcctaactttttggcacaaatttcatgttgatagaacattcattcactccacaaatatctggcaagta

SEQ ID NO: 1037182 - DNA, 120 bp, Artificial Sequence
  ENSG00000250116_7 (sequence is synthesized)
ggtgctgagtgctgtgtatagacgagtgaacacaacacagaccctgccctcattctgtgtagaggacagcagaggagtaggcacagggctctcagctagggcagtaccaccctatgtctg

SEQ ID NO: 1037183 - DNA, 120 bp, Artificial Sequence
  ENSG00000250116_8 (sequence is synthesized)
gggggcatttcggacatttgggaggtgctgtcaattgccaaaatgaatggggaaactctgctagcatttaagggtgggagccgtggtgccacaatgacctgtatgaggaaaaccagctcc

SEQ ID NO: 1037184 - DNA, 120 bp, Artificial Sequence
  ENSG00000250116_9 (sequence is synthesized)
aggcccgcatgactagtgagtgtactgctagacattcataaacatgaaaaactcttttgtgggaaaacagcctgttgcatagcaagagtgatccatcttgaagtaaaactgccatgatga

SEQ ID NO: 1037185 - DNA, 120 bp, Artificial Sequence
  ENSG00000250116_10 (sequence is synthesized)
ccaatgtttgacgcctacaattcaaggtggtccagtagcacagataagccctcacaacctccccgtggtcatgagtttctaaaggaagtcagggatgatgagcttcctgtgtctttaccc

SEQ ID NO: 1037186 - DNA, 120 bp, Artificial Sequence
  ENSG00000250116_11 (sequence is synthesized)
taaaagcttgctatataaaggatactttctggaggttggttgtgagaatccaccatctcttggcctacctagacatcgtttctgtttctaagtctctattaaatatttctttctgagaaa

SEQ ID NO: 1037187 - DNA, 120 bp, Artificial Sequence
  ENSG00000257726_0 (sequence is synthesized)
tcatttgaggcagcagatactcgggtgctaaaaatccctccaaacatctcaacattttttccccctcgggatcagtatggtgtcacgggaagaagtttaaagaatgaatagcatgtccag

SEQ ID NO: 1037188 - DNA, 120 bp, Artificial Sequence
  ENSG00000257726_1 (sequence is synthesized)
ccatcccactgtgtgtctatagatgccaggccagcccaggagatgcactttcagattcctgatggcagccgctataagcaaaagtttcctggaggtgctcctctctctccaatcagcttc

SEQ ID NO: 1037189 - DNA, 120 bp, Artificial Sequence
  ENSG00000257726_2 (sequence is synthesized)
ccagttctacaaaactggacttcaggttgtcacatatagaggttttcaaccactatcagctttggtcttccatggtattcagcaaagaactagcccacatattgtagtgaagactccctt

SEQ ID NO: 1037190 - DNA, 120 bp, Artificial Sequence
  ENSG00000257726_3 (sequence is synthesized)
tcacatgacagtatttgagactggagatgccatgtagtgagtttgttttttttttttgaaatgagaagcgagacatcaactcacgggtaaagtacccatagccgttattttttccctcca

SEQ ID NO: 1037191 - DNA, 120 bp, Artificial Sequence
  ENSG00000257726_4 (sequence is synthesized)
ttcttccctctctcccttcaccccagctaaagacagaatttgacttcaaattaatttgaggccaatgtttttcatactgctagtgctgagagaagaaaggcaacggcttctcacccgtgt

SEQ ID NO: 1037192 - DNA, 120 bp, Artificial Sequence
  ENSG00000257726_5 (sequence is synthesized)
taacttatactttctcttaacccaaggaatcaatactgtatcacttagtcctgggaagagggagtaaaaggtagttgcctgaatgaacctttggcattcatttatctacagaaccctcca

SEQ ID NO: 1037193 - DNA, 120 bp, Artificial Sequence
  ENSG00000257726_6 (sequence is synthesized)
aaaacaaaattcctattgaaaggaaacctgcacagcaccagcttgtaccttgcacctgttctgttaaagtcattcacagagcagaatacattagaatagataaaatgttttggtgtgcaa

SEQ ID NO: 1037194 - DNA, 120 bp, Artificial Sequence
  ENSG00000257729_0 (sequence is synthesized)
ggtgagaaaactgttatccaaataagaaagctgtttgcctagatgagaaaattggttgcttggttaaactggtttatacaaatattctaaagcaaacagtgaagcaagagtaacagccgt

SEQ ID NO: 1037195 - DNA, 120 bp, Artificial Sequence
  ENSG00000257729_1 (sequence is synthesized)
aggtgagggggacttcaggagatccttcccagatggatgccaaattcctttgatagccctgtcattgtcaagaatttcttcaagtttatgtgtataagaataaaatcttgttcaagttta

SEQ ID NO: 1037196 - DNA, 120 bp, Artificial Sequence
  ENSG00000257729_2 (sequence is synthesized)
actgacttcgagaatgaagccacagaccctcgcggttctgagagatcatgtctgtttccacttaagaaaaataaataaaagttttaagggagtaattgagcaagaaaagcagaaaaatac

SEQ ID NO: 1037197 - DNA, 120 bp, Artificial Sequence
  ENSG00000257729_3 (sequence is synthesized)
tgctgaattgcacagaatgagaaggaataaaacaggttcactaactgattaaaggcagaataatagaagaaaaagcatacaaaattattaatgtgccacaagagtcttacaaaagaagat

SEQ ID NO: 1037198 - DNA, 120 bp, Artificial Sequence
  ENSG00000257729_4 (sequence is synthesized)
cccccaaaaagggattgtcaaagtaaatgttacactggataaagttacacagaaggtagtttacaacttgaagaaggatgtcctaaccagagttagtctcctaaactcccacggaagctg

SEQ ID NO: 1037199 - DNA, 120 bp, Artificial Sequence
  ENSG00000257729_5 (sequence is synthesized)
ctcccttccttaatgattacatttcaaagacattatcaaagagataactcccaggcagcaagtgctctccttctgtttttcatgcatgtgggagtctccagcatttacattagcaagagt

SEQ ID NO: 1037200 - DNA, 120 bp, Artificial Sequence
  ENSG00000257729_6 (sequence is synthesized)
ttccacaggcagcaagtgctctccttctgtttttcatgcatgtgggagtctccagcatttacattagattgaaacttgagtgtattaacatcatacaaagcctgaggatgcattaggtct

SEQ ID NO: 1037201 - DNA, 120 bp, Artificial Sequence
  ENSG00000257729_7 (sequence is synthesized)
ggctttgcatttcactaaatatgacgttgggaaatgctgttaagaccacaaaagaagaaacatgaccttcacaacaataaaacagtatcatacatgctggtcaaatacactgagcactag

SEQ ID NO: 1037202 - DNA, 120 bp, Artificial Sequence
  ENSG00000224490_0 (sequence is synthesized)
gcatacttctgcttgttctctggcacttgctatcagtacaagaagaatttcctctgggtagtggctgctacttgttgtgagtctgggggaaacactattggaggtgacaagagtccaaac

SEQ ID NO: 1037203 - DNA, 120 bp, Artificial Sequence
  ENSG00000224490_1 (sequence is synthesized)
tgcaatgatgtgccacattcacccagctgcatctgaactgaagcagggccccagccaagccttgcctgagatcagcagaccctcgatgacccacaaaaattatctgcttaggacacagaa

SEQ ID NO: 1037204 - DNA, 120 bp, Artificial Sequence
  ENSG00000224490_2 (sequence is synthesized)
gtcaattacacccaaaccctggatggaatcagaatcagaatcagccatgcaatgaggaagaagaaatgtaagttgcggcctgtgattccaacagttctctttctggaatggctaccaaga

SEQ ID NO: 1037205 - DNA, 120 bp, Artificial Sequence
  ENSG00000224490_3 (sequence is synthesized)
gaaagtgtcctgcaaatcacagtgtccaacagaatcaacactgctaaacacactcccactggagtacggagaaaggggatccacagaagagcctaatcctgaaccacttccatgtatttg

SEQ ID NO: 1037206 - DNA, 120 bp, Artificial Sequence
  ENSG00000224490_4 (sequence is synthesized)
cccatccatttctcctctctggccaatactcttcatattcaaattctaccagtccttcaaagatcagattaagttccaaaatttcaaaagccttctcagcctactcttacagctgaatag

SEQ ID NO: 1037207 - DNA, 120 bp, Artificial Sequence
  ENSG00000224490_5 (sequence is synthesized)
tgcataccaacttcaattaattataaactcatgtttcattttgtattatttaatagaaacattggaatttaatctttgtgttttttacattttgttttctccactagattaccaacttga

SEQ ID NO: 1037208 - DNA, 120 bp, Artificial Sequence
  ENSG00000224490_6 (sequence is synthesized)
tgacatgaaccacttattagaattcttttgtagcttgtaactgtattaggcacagtttcttgaagaaattaagcacatatttacatgttttaaataactttgtattgatttgcatatgta

SEQ ID NO: 1037209 - DNA, 120 bp, Artificial Sequence
  ENSG00000224490_7 (sequence is synthesized)
tgaaggaggtatgtcatacttggctttagaaaaaagtctcgtctaatattcaaggaaccagtctgtgacctttgtttattatgtaattttttgaaacacaatctatatttacaatcctat

SEQ ID NO: 1037210 - DNA, 120 bp, Artificial Sequence
  ENSG00000224490_8 (sequence is synthesized)
tagctgttactggatatatatttatggaagaatataacactacttcttctttattacatacaatttggatactcttctgccttcgccattaactatacattaagacagttcacataactt

SEQ ID NO: 1037211 - DNA, 120 bp, Artificial Sequence
  ENSG00000224490_9 (sequence is synthesized)
tcaagttgcagggattactggcttgagccactgtgcctggcagtttacacaactttaattgctggtttatgtataaatttccttctataatctagtcagaatctagtcaacctactactg

SEQ ID NO: 1037212 - DNA, 120 bp, Artificial Sequence
  ENSG00000224490_10 (sequence is synthesized)
cataaaaatttgctgaatatctcccaagagctagccctcataaagggttttaaggctctcaataagcttaatatacagaaataaactgcattggctgtatatttgcacaaaagttgtaaa

SEQ ID NO: 1037213 - DNA, 120 bp, Artificial Sequence
  ENSG00000224490_11 (sequence is synthesized)
cttggctgctgcagagcaatttatgtacatacggtacctgtttctttggctgtcctttttttgtgtaacaattactaatatacattcccttttatctaaaaaaatccctatgtactaatg

SEQ ID NO: 1037214 - DNA, 120 bp, Artificial Sequence
  ENSG00000224490_12 (sequence is synthesized)
aaacctctgccagaggatataaggaacacgaaaatagtataagacacatttcttgtgcctgatgaatttacacccttgtcaggaagataaacatatgtataaattgtacctacagaaaat

SEQ ID NO: 1037215 - DNA, 120 bp, Artificial Sequence
  ENSG00000224490_13 (sequence is synthesized)
acataatatagtgtgatcagactgaatgacttggtaactgagaaaaataaaaataaactgaataggaaaaaatgtcctaagcattgcatttaaatatcatacctggattaggactcattt

SEQ ID NO: 1037216 - DNA, 120 bp, Artificial Sequence
  ENSG00000224490_14 (sequence is synthesized)
tatgggcatatatcagtgcaagtagagaacaaagtgatacatcttgtttatttttaatagcctcaaattctcgaagagcttcttgagttttacctgaaaatcaagattatgatatgaaaa

SEQ ID NO: 1037217 - DNA, 120 bp, Artificial Sequence
  ENSG00000224490_15 (sequence is synthesized)
actgttcttagtgcaaagcaagaatttaaaactgatggaacatgtttaatgattaacacgtaccttccattaatgtgccataggcatgataaaacctgaagactggatcacttccatacc

SEQ ID NO: 1037218 - DNA, 120 bp, Artificial Sequence
  ENSG00000224490_16 (sequence is synthesized)
tcttaattccttcactggcaaccagtaatacatgatggaaatatctctcttgacaatagtaattaatcaaagtctaaatggaaataatgaaaaaatgttataaaggaattctggtgctct

SEQ ID NO: 1037219 - DNA, 120 bp, Artificial Sequence
  ENSG00000224490_17 (sequence is synthesized)
gaaatactctaagaagcagataataatctaacatctagaataatgtaaaattcaggcaatgtgacttttttcttccaagtttcttaaaatactattaatggctagaactcaatgctaagg

SEQ ID NO: 1037220 - DNA, 120 bp, Artificial Sequence
  ENSG00000224490_18 (sequence is synthesized)
atgtgactcttcctttcaactctaatgatacaaatttaaatgtgaaattaacaaggtacaatctaatgagtgaaggaaacaaaactgtttctgtaagtctacagattgcttagcaagaag

SEQ ID NO: 1037221 - DNA, 120 bp, Artificial Sequence
  ENSG00000224490_19 (sequence is synthesized)
acccttttctcctctccccactccccacccctacaaccccttcagaagtgttcattaaacagccatgatacagaaacagaaataagaaaacaaacaaacaaaaaaaacaaccaccaggca

SEQ ID NO: 1037222 - DNA, 120 bp, Artificial Sequence
  ENSG00000254298_0 (sequence is synthesized)
ccagcagtttcctctgcctggaacactttccgcagcgctggattacaactgctggtctccctgcctgccttccctgcttcccagagcacgaagaagcttgcctccgcaacccactatttg

SEQ ID NO: 1037223 - DNA, 120 bp, Artificial Sequence
  ENSG00000254298_1 (sequence is synthesized)
tggtccaggaactggactgggctctcctcctgaaagtgggtaaataatgtcaccgacctaatgaggctgttgaggcatggaatctgatcaggcagataaagtgcccctggcaaacctcaa

SEQ ID NO: 1037224 - DNA, 120 bp, Artificial Sequence
  ENSG00000259076_0 (sequence is synthesized)
gcccagagtttgcaagtggcgagaaagtgagcattctcatacacagatgcaggtcgtagcttagatatcaccttccttgggaagccttctctgtctcctctgtccactggacttcaggaa

SEQ ID NO: 1037225 - DNA, 120 bp, Artificial Sequence
  ENSG00000259076_1 (sequence is synthesized)
ggtcccatatctggatcaggccgctctggtgaatgcaactttcctcagccctggtgcccagcccagtgtagcagtggcagcagttcctggagccactggacagaatcttctgcggcaaac

SEQ ID NO: 1037226 - DNA, 120 bp, Artificial Sequence
  ENSG00000259076_2 (sequence is synthesized)
ctgagaaagaaaactgaaattactgctttgaagtgacgggttactcagaaatactgaaatacatattctataaaatgtaaacttttgattttgactctaataaaatgttaagcctttgaa

SEQ ID NO: 1037227 - DNA, 120 bp, Artificial Sequence
  ENSG00000259076_3 (sequence is synthesized)
caaggattccaagaaatcataatgcccagagtttgcaagtggcgagaaagtgagcattctcatacacagatgcagctatctcactgtctgtctcacactcactgagggtgatgtttcagg

SEQ ID NO: 1037228 - DNA, 120 bp, Artificial Sequence
  ENSG00000264072_0 (sequence is synthesized)
tcttgaatacgttaagaaagtcttgtttgtatagaagagtttcaaatcatgtgagtgatgaagggacccttctgttgaaccttggtgtgcattttaggtccattttgggtttactccttt

SEQ ID NO: 1037229 - DNA, 120 bp, Artificial Sequence
  ENSG00000264072_1 (sequence is synthesized)
ctgctctctctgttgccctcctccttccacctggagcatggcccagcatcaggttggcgcatgctgtgatcagctacctccatgtaccacaccaagcaaagctctctgggtgacacagtt

SEQ ID NO: 1037230 - DNA, 120 bp, Artificial Sequence; identical to SEQ ID NO: 827123
  ENSG00000264072_2 (sequence is synthesized)

SEQ ID NO: 1037231 - DNA, 120 bp, Artificial Sequence
  ENSG00000261141_0 (sequence is synthesized)
aaaaaaaataaaggcttagtgaactgtcataaccctgtgtggtgctgaaaataaaaaactatattacattttcaagctagctctcctcaagttttaataagtggtaaaactagttgggca

SEQ ID NO: 1037232 - DNA, 120 bp, Artificial Sequence
  ENSG00000261141_1 (sequence is synthesized)
tcatcccagcactttgggaggccaaggcacgagccacaatgcccagccaactgtttcattttaaaagatacatggggaggaagatttgtagtttaagctaaacgggagagaaaagccact

SEQ ID NO: 1037233 - DNA, 120 bp, Artificial Sequence
  ENSG00000261141_2 (sequence is synthesized)
gcagtgagtgtggaaaagtgagtattaaacatcagagaattctgaataatggcagtaaatgtaaatacactaatttaacatcttcgacttatctcgaaaaccttgccaaaccagtaatgc

SEQ ID NO: 1037234 - DNA, 120 bp, Artificial Sequence
  ENSG00000261141_3 (sequence is synthesized)
acattctcctgaagatgggaagagagaatgcccacaactcttcctgtcactgactgaatgggccctcctgttactctgagagactcttctcagagaaaagcagacttcgcagggtgcggt

SEQ ID NO: 1037235 - DNA, 120 bp, Artificial Sequence
  ENSG00000282876_0 (sequence is synthesized)
ggcggggccgggcggaaggctgtgctggactattaggaactacttaacggaaaagggtgcgcaggtttagtgttgagaatgataaaccgtataattctgttttattaactccgcatcttt

SEQ ID NO: 1037236 - DNA, 120 bp, Artificial Sequence
  ENSG00000282876_1 (sequence is synthesized)
gcttgccatggtactaggcttgagcgccggcgagcatggcggggagttagaacttgaatagattctacaaaaatgtgaaaactatgaactgtattagggagtctaacgactaagctggtc

SEQ ID NO: 1037237 - DNA, 120 bp, Artificial Sequence
  ENSG00000282876_2 (sequence is synthesized)
accaatacaggttgccctgccatcgccattaagatgggaaaccagaagcctgcaactaccaacaggccacccgactacccaggaaagcgctctgtgcctgcctttagaggtgtgtggatt

SEQ ID NO: 1037238 - DNA, 120 bp, Artificial Sequence
  ENSG00000282876_3 (sequence is synthesized)
tgtgaacaacgctgcagcagcctggaagacccaaactgaagattgcagagagctctgacagtttttatttacatttatgtttgtcttcgaatctaggatattaaaacacatacaactcgt

SEQ ID NO: 1037239 - DNA, 120 bp, Artificial Sequence
  ENSG00000223829_0 (sequence is synthesized)
atctacttgacctcctcacagtctccctttctatagtgcaagctcgactagacagttttgacaatagtgatattaaggctctgcttggtgccatgcaatctgcatttggggtgccagcta

SEQ ID NO: 1037240 - DNA, 120 bp, Artificial Sequence
  ENSG00000223829_1 (sequence is synthesized)
gccacaggactcatctggaaaaaaacaacggcccaaccctgagaactttgggattcacgggaaattacagttcccctgatgatgcaggaccggaccaggatttcactcatcaactggcct

SEQ ID NO: 1037241 - DNA, 120 bp, Artificial Sequence
  ENSG00000223829_2 (sequence is synthesized)
agattaaggagaaagaaatctacatttctgaacctggtaacgtctgagcatactcatggaagaaagagctggcctatgagcgtccattaagaacacaataaaatatcttcatgaatgatc

SEQ ID NO: 1037242 - DNA, 120 bp, Artificial Sequence
  ENSG00000223829_3 (sequence is synthesized)
atagttagctgagtgctcctcaggaagaagccacatacccggagcgtaaccaggagacagtcatggaaccgtaacgcagaccatggactgcagcagcttggtttggagctgggtcaaacc

SEQ ID NO: 1037243 - DNA, 120 bp, Artificial Sequence
  ENSG00000223829_4 (sequence is synthesized)
tcacagtaaggctccatctcaggcctggctgcaaagtcaacatctctctgcatccatgttttcacatttacctttctggagcggcaataggaaaatgtttccctaaaagaaaagacagtg

SEQ ID NO: 1037244 - DNA, 120 bp, Artificial Sequence
  ENSG00000223829_5 (sequence is synthesized)
atgctttcatcgaaagaaaaagtaaagaactattgtgtgtgcctaaccaatcttacaggggggaaaagatttatattatcttgaaaacataatttggtcttgttcaggccattgggggag

SEQ ID NO: 1037245 - DNA, 120 bp, Artificial Sequence
  ENSG00000223829_6 (sequence is synthesized)
ggagctgcagcagccatcatgccaacatgagggaaaagctgatggaattgtggagactttggccttgtgattcagccctggatgagttgtctccacattacttatcatataagagaaaaa

SEQ ID NO: 1037246 - DNA, 120 bp, Artificial Sequence
  ENSG00000223829_7 (sequence is synthesized)
cccacaacgataccagtactgagtgatgaagaacattttgctaagttgttctatcgtggtccttgcttaaggggattgttggacggatgttgtgggaactgaacttgaagaaggaagagc

SEQ ID NO: 1037247 - DNA, 120 bp, Artificial Sequence
  ENSG00000223829_8 (sequence is synthesized)
ccatcatttggacacatcttagggcttcccagctgcaccaggttatggacaagggacctggaaccccaacccttccagtcactaaccacatggcctgagatgtcatttcatgcagctggg

SEQ ID NO: 1037248 - DNA, 120 bp, Artificial Sequence
  ENSG00000223829_9 (sequence is synthesized)
ctctttgtgctcatcagcaagtgatgtaaataaagcatgtgaggttagcacaccgtatattctcaaatcctggagctactggtcctcttgtgactattattattattaatattataatga

SEQ ID NO: 1037249 - DNA, 120 bp, Artificial Sequence
  ENSG00000223826_0 (sequence is synthesized)
aaatgtactggaacagctgcctgctccctgctgttctgcatggaattatttcctggtactatccccaccgtgaaacgaatttcactacagcatctccagacaaaataaagaaatggagcc

SEQ ID NO: 1037250 - DNA, 120 bp, Artificial Sequence
  ENSG00000223826_1 (sequence is synthesized)
atacagctgcaatttgtattgcaacaaaatttgtgacctgcctaaattttcaccatcattcatatttctgtcacactctggatcctccatctaccaaaaatgaatatagtgacatggcca

SEQ ID NO: 1037251 - DNA, 120 bp, Artificial Sequence
  ENSG00000223826_2 (sequence is synthesized)
cgcacctgaggaatccttttacttcccacaggaggaagagaattcctcaaatcccacaaaggcaactcttcttcctgaagacagcagctttgccagtaatgagggcaacattcccaatac

SEQ ID NO: 1037252 - DNA, 120 bp, Artificial Sequence
  ENSG00000223821_0 (sequence is synthesized)
ctcccagcctcaagcaatcctcccacctctgtctccatagtagttggcactacagtctttcagccagctctctacatttagtatacttcttcaagggctctggaacagccttggctaatg

SEQ ID NO: 1037253 - DNA, 120 bp, Artificial Sequence
  ENSG00000223821_1 (sequence is synthesized)
aacttcctcatacttcagaacatcgagagctctgcaaatatatgaaagtttcattaacataaggatccatgtcatataaggcagatcaagaacaagattctttgaaataatatcagatct

SEQ ID NO: 1037254 - DNA, 75 bp, Artificial Sequence
  ENSG00000223821_2 (sequence is synthesized)
gcagatcaagaacaagattctttgaaataatatcagatctcagaataaataccaaaagattatcaactgtagtgc

SEQ ID NO: 1037255 - DNA, 77 bp, Artificial Sequence
  ENSG00000197462_0 (sequence is synthesized)
cgacgctcatgaaatttggtgccaaaaccggggattgggggacctcccttaggagatcaatcccttatccttcctcc

SEQ ID NO: 1037256 - DNA, 75 bp, Artificial Sequence
  ENSG00000197462_1 (sequence is synthesized)
catcgacgctcatgaaatttggtgccaaaaccggggattgggggacctcccttaggagatcaatcccttatcctg

SEQ ID NO: 1037257 - DNA, 86 bp, Artificial Sequence
  ENSG00000197462_2 (sequence is synthesized)
gccgattgcctccgaaacctacaggaccatcacagatgctctgggtaactctcacagtggaagacaggaatgtcaggcctctgagc

SEQ ID NO: 1037258 - DNA, 120 bp, Artificial Sequence
  ENSG00000197462_3 (sequence is synthesized)
tgacttcctgaggaagattgacatttgccacacctgcataaagaacccacttggtgaaaacccaagttttcttggagtctgctgctgtgagacacgaggaaaaaacagtacatgtgtaca

SEQ ID NO: 1037259 - DNA, 120 bp, Artificial Sequence
  ENSG00000197462_4 (sequence is synthesized)
cggtagatctggaagggaaagcagaaagtatccaacacttcttgcatgaagaaaacaaaataattggagtctattcctctccacctcgcatctgggatgtaacttgatggacaaatggaa

SEQ ID NO: 1037260 - DNA, 120 bp, Artificial Sequence
  ENSG00000250252_0 (sequence is synthesized)
acattcggccaggttcctcttgcagggcctgtcaatctttatgggattctcttagaggtttcccccttttcattaaaaggggagaaaccgtactttcatttcatacccaaactcaactct

SEQ ID NO: 1037261 - DNA, 120 bp, Artificial Sequence
  ENSG00000250252_1 (sequence is synthesized)
ctccccaaatcttaatgcctctctccccagtcagccttcctcttgctttgatcgggatgatgccaccaagtggaaggagttgttggatacacattttctaaacaggttcttccccgtaat

SEQ ID NO: 1037262 - DNA, 120 bp, Artificial Sequence
  ENSG00000250252_2 (sequence is synthesized)
ccctgctaggaagatgatggggtccccgaacatagaacatgaggtaattgatttgggaataggcatataaccaatgctcaccaaagataggtctggaaatggtttccatactcctgtgtc

SEQ ID NO: 1037263 - DNA, 120 bp, Artificial Sequence
  ENSG00000250252_3 (sequence is synthesized)
ttgagaagaagcaatcatggtaacagcagcttaaacgaagtggaagtttctctttcttacatttcaagaggagtggaatccgtcagtttggggctgatatggtgccatatgttgttagac

SEQ ID NO: 1037264 - DNA, 120 bp, Artificial Sequence
  ENSG00000250252_4 (sequence is synthesized)
actcattccttttccaccctggcatcccttgtttcatggcatcctgcacatcagcagcaacaagaagaaagaagaatacaagaagaaagaacaagatcatgggccaggaaatacttcagt

SEQ ID NO: 1037265 - DNA, 120 bp, Artificial Sequence
  ENSG00000250252_5 (sequence is synthesized)
aaaggcatgattacatgattcccaagaagttcagaagaaactgctgtgtgatttgcttgctatgttcctgctctggggacacaagacattgtttttgaaaggtgacaattctctaatcat

SEQ ID NO: 1037266 - DNA, 120 bp, Artificial Sequence
  ENSG00000250252_6 (sequence is synthesized)
ggtacacagagataaatactttattttcctccagggagaaaaagagatgcagtaaatgcttaatgggtttttcttcaatgccacaaagtcagtagctataaatcttgaacacaagttgaa

SEQ ID NO: 1037267 - DNA, 120 bp, Artificial Sequence
  ENSG00000256458_0 (sequence is synthesized)
gctcatcatccttctccatagggaaaaaaatggcattaacttccaacaagaaactgctgctcttctaccgtatcccctttagaacataaaatattaagaaagggtttctgaagcattcac

SEQ ID NO: 1037268 - DNA, 120 bp, Artificial Sequence
  ENSG00000256458_1 (sequence is synthesized)
aatttgggggatggaggtaacccgtcaacacccgcgacacccctaccctaaggtggggagcaggattccgtcaaacagaaaatgccactctccgccccctccgccatccggaacgctgac

SEQ ID NO: 1037269 - DNA, 120 bp, Artificial Sequence
  ENSG00000256458_2 (sequence is synthesized)
cggcgcggagtgcgggggcggccgagggcgggagcggcgaggaggcgggacgcgacacacgcaccacgccgagaactgcttcaccgcttttttaaaggtcgcagagggagcggcggccgc

SEQ ID NO: 1037270 - DNA, 120 bp, Artificial Sequence
  ENSG00000246774_0 (sequence is synthesized)
agcatctccgagggccacctctctggcctgggccggggccgaagcggggtcggctgcgcaagaggcggcaactttggcttatactgactcagcccagcgccccctttttatcccacataa

SEQ ID NO: 1037271 - DNA, 120 bp, Artificial Sequence
  ENSG00000246774_1 (sequence is synthesized)
aaatggagaaatggcctccgggaggaagatgtgaagcggcacgctctatctctactgatcttcactcaaaagcagccgcaggagctgttgctatctcgctgtggtgcagcgcttttccct

SEQ ID NO: 1037272 - DNA, 120 bp, Artificial Sequence
  ENSG00000246774_2 (sequence is synthesized)
cctccctcactttcccacatgcccagaggcaaagtgtctggccgacgtctgaggagtgaagaagccactgggagccactccctctcactcaccgaactatgggagtaaagaagctgcaac

SEQ ID NO: 1037273 - DNA, 120 bp, Artificial Sequence
  ENSG00000246774_3 (sequence is synthesized)
atttctggaggctcgtccaggtcttcagaaggatgggtaacaaactattttcagcctgcactcctctagagtgcatcctgaatcactgggaatcctttgacctgcagattctgaagagaa

SEQ ID NO: 1037274 - DNA, 120 bp, Artificial Sequence
  ENSG00000246774_4 (sequence is synthesized)
aatgctgtatattcctttgcacaagggcttggccaggttataagcagcaggatggagaagcctggcctctggagggaagtatcaactttaatgctaacctgcagctggaccgtttctgta

SEQ ID NO: 1037275 - DNA, 120 bp, Artificial Sequence
  ENSG00000246774_5 (sequence is synthesized)
aacatggaggcaaatggtctgaggtctcatacatgcaggttttctttgccttgcaggataatctggacctttgctgatattgtaggatagatccagcctgcctagcagtcatctcaggag

SEQ ID NO: 1037276 - DNA, 120 bp, Artificial Sequence
  ENSG00000246774_6 (sequence is synthesized)
aggctgcaaaggacagtcccagggaagtaaaccccagggaagtaaattccagggaagtaaaccccagaggtgcctccagcagggggatcagacccctccagtcctactcctggtccatca

SEQ ID NO: 1037277 - DNA, 120 bp, Artificial Sequence
  ENSG00000246774_7 (sequence is synthesized)
tgtcctccctatccaggttctctctcaagcttgtcctctcctaggaatcctcgtttcaggcaggtcccagcctcactcatggccctacaagagatgccttgtgaatatggccccattaag

SEQ ID NO: 1037278 - DNA, 120 bp, Artificial Sequence
  ENSG00000246774_8 (sequence is synthesized)
acaggacttaagacaaattaggggggatcttggtaagttttcagatgaccctgaagggtatacagaggctttccagaatttaaaccaagtatttgaactctcctggaaggatgttatgtt

SEQ ID NO: 1037279 - DNA, 120 bp, Artificial Sequence
  ENSG00000246774_9 (sequence is synthesized)
acttttgaatcaaactttgactaccactgagaagcaaacagccctgcaagcagcagagaagtttgtggatgagctttgtatctcatacagtgccaagaaagggagaggatatgcaagaaa

SEQ ID NO: 1037280 - DNA, 120 bp, Artificial Sequence
  ENSG00000246774_10 (sequence is synthesized)
aagacagaaaaatctattggccaccctgcaggcttacaaaccccagaatcccaaagatgcacctgttaactgcgacaaatgtggcaaaccagggaatgttaaaaacgactgcccaggcag

SEQ ID NO: 1037281 - DNA, 120 bp, Artificial Sequence
  ENSG00000246774_11 (sequence is synthesized)
catgaggaagccagctcgaccctgtccaatctgtggtggggaccactggagggtggactgtccccagagatgcaggtcactgggtccaaagccagtctcacaagtgtctaacaggattga

SEQ ID NO: 1037282 - DNA, 120 bp, Artificial Sequence
  ENSG00000246774_12 (sequence is synthesized)
tgggccccagggctcctgtccctggctctgacagctcagactgccattaccatccaggagccctgaatgattctggaggtcaaagggaggaaggtgaacttcttcctggatagcagagca

SEQ ID NO: 1037283 - DNA, 120 bp, Artificial Sequence
  ENSG00000246774_13 (sequence is synthesized)
gccatttctattctcctctccaatccaggcctcccttcttcccttagcatgaccatgaagggtgtctcaggaaagcttttaacctgatatttttccaaccccttagttgtagttggggag

SEQ ID NO: 1037284 - DNA, 120 bp, Artificial Sequence
  ENSG00000246774_14 (sequence is synthesized)
acctcgtttttactcatgtctttttaatcatgcccgaaagcccaattcctctgggaggcagggatagtttagcttatatgtgaaccaccatccttatggctccaggacacactccttgcc

SEQ ID NO: 1037285 - DNA, 120 bp, Artificial Sequence
  ENSG00000246774_15 (sequence is synthesized)
tccccctggtggagactgatatcaatccagaaatttgggcaattcaagggaaaattggctgagccacaaccaccatactgatctggatccaccttaaggatcccacctccttccctaacc

SEQ ID NO: 1037286 - DNA, 80 bp, Artificial Sequence
  ENSG00000246777_0 (sequence is synthesized)
ggcagccatgcgcggggaggcggtggcaggggcgggcaccgtccggaccgagggcgcgctggcggcctctgccggctgag

SEQ ID NO: 1037287 - DNA, 120 bp, Artificial Sequence
  ENSG00000246777_1 (sequence is synthesized)
cgctggcggcctctgccggctgaggggcgcagcgcagcaccccgccacgctcgccgattcccctgcgccgtcgcgggtcgggcagccggatgaccgacccgaaagcctaggctttgggaa

SEQ ID NO: 1037288 - DNA, 120 bp, Artificial Sequence
  ENSG00000246777_2 (sequence is synthesized)
tgagactgatggacacaaaagcgccatttatctagagctcaccatgtgccagagtcacacattatctcactgaatcttatctaaccctttcacagatgaggaacctgaagctcaaaaaat

SEQ ID NO: 1037289 - DNA, 120 bp, Artificial Sequence
  ENSG00000246777_3 (sequence is synthesized)
ttaagaaacccacccaaggacccaaggctagaagataacattcggtacttctaatttattccccaaccttggaccattatatcatgaacttggcctaaccctactcaagccctgcattga

SEQ ID NO: 1037290 - DNA, 120 bp, Artificial Sequence
  ENSG00000246777_4 (sequence is synthesized)
aagactagccttaaggaagaccccagaatcctcataaatatcctgcatttccccctcctcctccgaagactaaagactgtgaagtagtgctcttgaccgcagtgcataatacacttggct

SEQ ID NO: 1037291 - DNA, 120 bp, Artificial Sequence
  ENSG00000246777_5 (sequence is synthesized)
ttgctttattaacatgctttttaaaatgatgttttcagggagccagcatttcacaccagaagaggagcccttaatttccttgggggccagctggcaggtgcagagcggggagaaaaataa

SEQ ID NO: 1037292 - DNA, 120 bp, Artificial Sequence
  ENSG00000246777_6 (sequence is synthesized)
aaggaaaggggatggaaaagggaaagagcggagagtaaccgaaggaaaaacatacattccattatcaagcttaattttaggtgtggcctctacttgagggctcttgccattctctatgga

SEQ ID NO: 1037293 - DNA, 120 bp, Artificial Sequence
  ENSG00000246777_7 (sequence is synthesized)
aacaggctaacaagacatttctaaatatcacaaggaagtggaatgtggcagaaaagcaccacctaagtaggtttcagatgagtaggattgtgatcctgatgccaaaaaatctggcggcat

SEQ ID NO: 1037294 - DNA, 120 bp, Artificial Sequence
  ENSG00000246777_8 (sequence is synthesized)
gaattacgggataaaacaaatgggcatatcatctgccaaactggatgtaaggtttaaacaagacgagagtgaaaacccactgagttcctcccttggaaatctgggaaaatcaggcaaagt

SEQ ID NO: 1037295 - DNA, 120 bp, Artificial Sequence
  ENSG00000246777_9 (sequence is synthesized)
gccagaagtcctaaaagggcaagcagtgctgaattttcacaggacagaagatggagatgaaaattacaggagtaccaggtaggcggatgctgcagatacagcaaatgcagatttcaacag

SEQ ID NO: 1037296 - DNA, 120 bp, Artificial Sequence
  ENSG00000246777_10 (sequence is synthesized)
ggcatttgacaattcacatcttagatgcgaaagtgaaatcaatgctggatgatagcactgaggcttattaaagactagcccagaggtggctgatgaagaggagggaccagcagatgaggc

SEQ ID NO: 1037297 - DNA, 120 bp, Artificial Sequence
  ENSG00000246777_11 (sequence is synthesized)
tgctaggggcctgcccaaacctcctgccctggccagccaattcagggtgccatcagtgacttggataagaatacagcagcagtcatggaagttgtggatgacctgaagcaggaagggttg

SEQ ID NO: 1037298 - DNA, 120 bp, Artificial Sequence
  ENSG00000246777_12 (sequence is synthesized)
tgacaaactgagcagagactaaatctaacaagttgaaatttagcaggaactattaaagtcctgtggaagagtttaacaaaaaagcataggaaggccaggtacggtggctcacacctgtaa

SEQ ID NO: 1037299 - DNA, 88 bp, Artificial Sequence
  ENSG00000246777_13 (sequence is synthesized)
aaaaaaaaaaaaaaaaaattagccaggaatggtggcatccgcctgtaatcccagctgcctgggaggctgaagcacgatggagttgaga

SEQ ID NO: 1037300 - DNA, 120 bp, Artificial Sequence
  ENSG00000246777_14 (sequence is synthesized)
ctgggcgacagagtaagactgtcaaataaagtaaaatttaatttaaaaatgcataggaataggataggaaattatttgaaataaaaatgataatctaaacgtcattactgtattaactat

SEQ ID NO: 1037301 - DNA, 120 bp, Artificial Sequence
  ENSG00000246777_15 (sequence is synthesized)
aatctaagagttggtcatgtagaatgccaagaaacatcttagggtagaacccataaaacctcactgatgctaacaaagaagctagccccccatgccagtcaggctggatttcttagggtg

SEQ ID NO: 1037302 - DNA, 120 bp, Artificial Sequence
  ENSG00000246777_16 (sequence is synthesized)
acatttctggacacattttgcaaagacagaggtatccagtggtcagtgactaaactcataaggggacaagacatcgttctgctgcaacatgaagtaactagggctcatcagtatgaagga

SEQ ID NO: 1037303 - DNA, 120 bp, Artificial Sequence
  ENSG00000246777_17 (sequence is synthesized)
taaagatacagagggagaagaagggaaagtgtagacatttctgaaaagctaaagcaaataaacatacaccaaaaagaagtgaacctgactatatgatgtgggagtattcaaagcaactgc

SEQ ID NO: 1037304 - DNA, 120 bp, Artificial Sequence
  ENSG00000246777_18 (sequence is synthesized)
ataattagtctttagaagaagaaactttttttttttcctctaggatactacaataaacaatagaagaggaaacttttttaagagatagggtcttgctcttgtccaggccagagtacagtg

SEQ ID NO: 1037305 - DNA, 120 bp, Artificial Sequence
  ENSG00000246777_19 (sequence is synthesized)
gctcaagcgatcctcccacttcagcctctcaagtagttaggaccacaggggcatgccaccacatccagctaatttttaaatttttttgtaaagataggggtctcactatgttgcccaggc

SEQ ID NO: 1037306 - DNA, 120 bp, Artificial Sequence
  ENSG00000246777_20 (sequence is synthesized)
tgttgcccaggctggtctcaaactccttgcctcaagtgatcctcccacattggcctcccaaagtgctaggattacaaatatgggccaccaccacagccaaggaaacattttaattaacaa

SEQ ID NO: 1037307 - DNA, 120 bp, Artificial Sequence
  ENSG00000246777_21 (sequence is synthesized)
ccaaggaaacattttaattaacaaaatgtcaaatattgatttagtgtatgggaaccttagttaaatagcttggggaactattctttctgaattctggggagggacttttgtaccatataa

SEQ ID NO: 1037308 - DNA, 120 bp, Artificial Sequence
  ENSG00000246777_22 (sequence is synthesized)
aaatactaaaatccaaatgtcccacatagtatttattgcaatataatgtcaaataacatttaaaggctaattcttttctctgtgtcctttaagcttaaggaaaaataaaagcatattcct

SEQ ID NO: 1037309 - DNA, 120 bp, Artificial Sequence
  ENSG00000254968_0 (sequence is synthesized)
cttctataagtaatcatgaaaatatggcaggctaacttgttaccttgtaagtattataaaatatcaggctcttcacagttcttgagaggcacaaagtaggcctgagcctcaagaaagaag

SEQ ID NO: 1037310 - DNA, 120 bp, Artificial Sequence
  ENSG00000254968_1 (sequence is synthesized)
cctggtggaaaaggagggaagaagagaccaggattcaagatacccttttagggatgttacagtgcagacaaagattctggtgcctcacaagatttgacacaagccagcgctttgttgttt

SEQ ID NO: 1037311 - DNA, 120 bp, Artificial Sequence
  ENSG00000254968_2 (sequence is synthesized)
ttctcacctgttggccagaagattatcttggagcaggaaaaggagccaagagaagcctctgaaggattgtaaacagaagaatgatccaattgtgtttgtaaattaaaaggtcaccctggc

SEQ ID NO: 1037312 - DNA, 120 bp, Artificial Sequence
  ENSG00000254968_3 (sequence is synthesized)
gcactcatttccagagagatcctggactggagggacaggagcgtgacccaggctgttcatcatgaatggtagggcccgctgggagcatgctcctctcctaaaatggactcacaactcttc

SEQ ID NO: 1037313 - DNA, 120 bp, Artificial Sequence
  ENSG00000254968_4 (sequence is synthesized)
ctctctgtcaggctggctggggcttccagggagctcaagatcaaatccgggggcaaagagacagaagaactaaaactcagagtgaccaccaatgcagctatgaaacaggtggcaacagcc

SEQ ID NO: 1037314 - DNA, 120 bp, Artificial Sequence
  ENSG00000254968_5 (sequence is synthesized)
aagtggaagaagccaagtgaagggctatggggacctagaagatggagtcgtcacacagtggaagaattgcagatctctgagtcaccatttggacaagaacctactagaacaggtgcctga

SEQ ID NO: 1037315 - DNA, 120 bp, Artificial Sequence
  ENSG00000254968_6 (sequence is synthesized)
acaagaacactggactttgtggatactgctggaagatggacagtgaattgtcagaattcagaagttccaggtcagaggttgactcagccacccctgggctgatggaaccatcagaaggat

SEQ ID NO: 1037316 - DNA, 120 bp, Artificial Sequence
  ENSG00000254968_7 (sequence is synthesized)
aatcggacctgcaattactccttgggactcagggaggagttttaacaagaaaactgcacatcttcagagcaggtggtcttttctgtctctataatcaaacaaaaatttttttcgactgtt

SEQ ID NO: 1037317 - DNA, 120 bp, Artificial Sequence
  ENSG00000254968_8 (sequence is synthesized)
ctataacagactgctgcctgggatcctagaactgttgcgtttttgatcttcctcttcgcagcatggacagtggatccccttgatctgcaagccctgccctgcctctctctgcacgctggg

SEQ ID NO: 1037318 - DNA, 120 bp, Artificial Sequence
  ENSG00000254968_9 (sequence is synthesized)
ggttcagggaggctacacccttggggggcactgggagctgctggagatgtgcacagcgagcagtggagagcagtcgtctcttctgatctacatgcaggggaactggtgagagttgccgta

SEQ ID NO: 1037319 - DNA, 120 bp, Artificial Sequence
  ENSG00000254968_10 (sequence is synthesized)
ggacctctggtgaaattaccttggctactgactagtaaagagatgagaaaggagaggtactatagattttctttaagaaataaatattgtctcctctttctctcttttctctggtaaaca

SEQ ID NO: 1037320 - DNA, 120 bp, Artificial Sequence
  ENSG00000254968_11 (sequence is synthesized)
gtgcccaaatttggaaatatcacgtgtaatttattgtcccactttaaatgtttcttgtaaccatgaattactattcttggatcagattccattataataaactcccacttggactccaaa

SEQ ID NO: 1037321 - DNA, 120 bp, Artificial Sequence
  ENSG00000254968_12 (sequence is synthesized)
gccttgctctattgctcgttggcactgagggaagctctctggggagaggagcccaccaatgcttggctgacaagacctcagtcatgtctgatgtggcttcacctttgctgccgtcttcgt

SEQ ID NO: 1037322 - DNA, 120 bp, Artificial Sequence
  ENSG00000254968_13 (sequence is synthesized)
atcactaggggagccctgtggagtggggtggagttcaagatggattctcaagaagttataggaagctctttatcaattcaattcctgagaagggcccacttcagggatgttacagtgcag

SEQ ID NO: 1037323 - DNA, 120 bp, Artificial Sequence
  ENSG00000254968_14 (sequence is synthesized)
aatcagttaggaggctgtaaagaagtccaagtggaagatgatgatggcccagctaggacggcagccgaatgaatgggagaaggtttatcaattcctctgattttccatctctcaataggg

SEQ ID NO: 1037324 - DNA, 120 bp, Artificial Sequence
  ENSG00000254968_15 (sequence is synthesized)
atcgtggatgctgtatgaagcttaaattcctaagaaccatagacactgttcaaacacaagacagtgccccattagaggaatgaagctctcaatctaggtgggaaacacatagaatcctta

SEQ ID NO: 1037325 - DNA, 120 bp, Artificial Sequence
  ENSG00000254968_16 (sequence is synthesized)
agaaagaagcttactcgtatttacaaagaatagccaagcatggaccgtggtcttccttgtagttaatgagttaggtttgctgggtaatagctcacttgctcctttctatttttacaaaag

SEQ ID NO: 1037326 - DNA, 120 bp, Artificial Sequence
  ENSG00000254968_17 (sequence is synthesized)
cagatgattctgttactaagtattccacagtttaatttgatctgcgtgtccatttgcacttcagaagtattatggacatggccaattttggctcccagacaatacaaaattatcatggaa

SEQ ID NO: 1037327 - DNA, 120 bp, Artificial Sequence
  ENSG00000254968_18 (sequence is synthesized)
agatgcttttagcctgaaaaggagaatagaaatgcattttctctaaacatacaagagcactcatttccagagagatcctggactggagggacaggagcgtgacccaggctgttcatcatg

SEQ ID NO: 1037328 - DNA, 120 bp, Artificial Sequence
  ENSG00000254968_19 (sequence is synthesized)
gagtgagaaacaaacttttattgtgttaagccaccgagattttgggttggtttttatagtagctggtgttgcttacactgactaatacatcttgaaagtaaatgatgcaaaacaattcta

SEQ ID NO: 1037329 - DNA, 120 bp, Artificial Sequence
  ENSG00000254968_20 (sequence is synthesized)
cttattcacagggggtggtatttataagggaaaagaataacagggtggtgtcagtgatgggtcctgataagtaagcaacaacaaggaaggggccccaggtagggaagaacaattgttctg

SEQ ID NO: 1037330 - DNA, 120 bp, Artificial Sequence
  ENSG00000254968_21 (sequence is synthesized)
agagactgttaatcacaaacaacctgctagccccacatcctgttctcaaatactttgctcagcatgtagccccagcagcatgactttgtctgcatgtagaccctccagcatgaccctata

SEQ ID NO: 1037331 - DNA, 120 bp, Artificial Sequence
  ENSG00000254968_22 (sequence is synthesized)
aaatttccctccagccactgcctcttggcagacagtcccttctctgctgtgctgcccactgctttcttacaacgttatctttgtactttctctaataaatctgcctttctttacccacaa

SEQ ID NO: 1037332 - DNA, 120 bp, Artificial Sequence
  ENSG00000254966_0 (sequence is synthesized)
cgacgcggcccccacccttaacccctagcctccagggatcccagacatcctcccggctccctagagccctcccctgttctcagccccgttagaccctcccctcagagcagaacgcgtttg

SEQ ID NO: 1037333 - DNA, 120 bp, Artificial Sequence
  ENSG00000254966_1 (sequence is synthesized)
cgctctatgtccctccgcagcccctccaccgtcctctctgcccccaaaggtacctccccacctccactttagtctcacccctaagtaccccgaagaaagccaatatttccttctctccgc

SEQ ID NO: 1037334 - DNA, 120 bp, Artificial Sequence
  ENSG00000254966_2 (sequence is synthesized)
agcgtcccagatattaaccgttctatctcaatggttttcagattttatcttgcctcttgggtaccctttgggacccttatgtcatccccaccatcagggcacccagacttaaccctaact

SEQ ID NO: 1037335 - DNA, 120 bp, Artificial Sequence
  ENSG00000254966_3 (sequence is synthesized)
agccaggtgtccctggagtcaagtggctcactgtcaccgatttcattccgagccaccactctgaagtagtacttcctgcctgggagcagccccgtcactgtgtacttgttgctgaagaca

SEQ ID NO: 1037336 - DNA, 120 bp, Artificial Sequence
  ENSG00000254966_4 (sequence is synthesized)
cgctcggctgccgtgtaccaggtggctgtgcttgcatcccgcttcatgatgatgtagtgagcctcaccgtcctcctgcacatctgggctgtggttccagccatctgccaagtccgatgga

SEQ ID NO: 1037337 - DNA, 120 bp, Artificial Sequence
  ENSG00000254966_5 (sequence is synthesized)
agataagatggggcaagtctcaggcagctggtgtcttggagtcggaaaactatttctgaagtctgctctgccatttactagcctcgtgacctgggatgaggaaactgaagctcagaggga

SEQ ID NO: 1037338 - DNA, 120 bp, Artificial Sequence
  ENSG00000254966_6 (sequence is synthesized)
aagcagcttgcccaagatggtgggagagctgataataaagtgatactaatctactgcagatgctgagttccaggcaccacgctccaccacctgggcaggtggatgattgacatgggtctg

SEQ ID NO: 1037339 - DNA, 120 bp, Artificial Sequence
  ENSG00000283839_0 (sequence is synthesized)
gtccgttgctgagatgcgtggagctgatgacaatgtagtaacactccatggggcagccgccgcctcctccgccgcagccgccgcttccacgcaccccgcgcccacagccgcagcgcgccg

SEQ ID NO: 1037340 - DNA, 120 bp, Artificial Sequence
  ENSG00000283839_1 (sequence is synthesized)
gggccggcgacggtgggctgggaacccgccacgagggcacgcagccacccccggcacgtcctctggagactggctcactgcacccctctgtgattcgcgtcgggacgacgagccccgcgg

SEQ ID NO: 1037341 - DNA, 120 bp, Artificial Sequence
  ENSG00000283839_2 (sequence is synthesized)
gcgtcgggacgacgagccccgcgggaggattccagcctaggagggggccgggccggcgaaacggaaccgagcgggagtcagtgcccgcgcggtggccgggcggagcggggctgcgggagc

SEQ ID NO: 1037342 - DNA, 120 bp, Artificial Sequence
  ENSG00000283839_3 (sequence is synthesized)
ggcggcggcagcatcccccgcgctcggcgcctgcactcggagttgctgctgctggcaggcatgagtgttattatagtgagcggcgttgccggtccattgcactgagccaatggcagggag

SEQ ID NO: 1037343 - DNA, 120 bp, Artificial Sequence
  ENSG00000283839_4 (sequence is synthesized)
ccactgggctgatactgagagctgtcagaggagtacatctgtcacccgctgcctcccccgcccaccccgccgccgggacccgcggccgcgccagcccgagcgcgagtgggagcgccccgc

SEQ ID NO: 1037344 - DNA, 120 bp, Artificial Sequence
  ENSG00000283839_5 (sequence is synthesized)
gcggcgccgctgccgcagagggccggggacgcgacggccaccgccaagtgggagactcctggaaggataaagctcaatatccagttcaggaaatgggaaacactgatatatgactcatcc

SEQ ID NO: 1037345 - DNA, 120 bp, Artificial Sequence
  ENSG00000283839_6 (sequence is synthesized)
catggaacagaatatagtctacgtggaatgtcacactgtgcttctagtggcaaagtttgcatatatgtatgtatcagtgtatctttaaatttgcctttgtgttgcaagcacttgttatat

SEQ ID NO: 1037346 - DNA, 120 bp, Artificial Sequence
  ENSG00000283839_7 (sequence is synthesized)
ccttcctattattcctattatttaaatcaatttttattttgcaagactactggtaaagattttggaatgaaatgtttctggggaaccgagtcaccctaatttaaaaaataaaaatatctc

SEQ ID NO: 1037347 - DNA, 120 bp, Artificial Sequence
  ENSG00000283839_8 (sequence is synthesized)
tctcagtaatttggacaataggtttaatgtatgaggttaaatatatacctgcttattataaatatgcagaatcatttcttgtttagaaaatatttcaaatattttatggaataattacag

SEQ ID NO: 1037348 - DNA, 120 bp, Artificial Sequence
  ENSG00000283839_9 (sequence is synthesized)
tttgtgttcagttggcaatgttctagccgaacaacttataattaaaaatgtaaataaagaagtgtcattagtctaaaaacttgcagttcatttttgctacaacttcacttcaattttgcc

SEQ ID NO: 1037349 - DNA, 120 bp, Artificial Sequence
  ENSG00000283839_10 (sequence is synthesized)
ctttttgcaactgcaattgccccttcaattcgccatttacaactgcaattcaaatcaagattctttaagttttgctcttatactgatttatcccacttatcttgctttgcttaactcaaa

SEQ ID NO: 1037350 - DNA, 120 bp, Artificial Sequence
  ENSG00000283839_11 (sequence is synthesized)
tttggataataggtttctgctcagcgttgttcctcatctgcttctggctcacacaaaatttcaggacagtgttgtcaccttgacatgtgaaaccaaggtcttgctcctttcctacaccag

SEQ ID NO: 1037351 - DNA, 120 bp, Artificial Sequence
  ENSG00000283839_12 (sequence is synthesized)
cggctagacctctgagttctaaatccctttccagattcattcagtccagctcttccaggagtaggtaaatctttcctgagtttacctactgatgtttaacactatatgttactacctcca

SEQ ID NO: 1037352 - DNA, 120 bp, Artificial Sequence
  ENSG00000283839_13 (sequence is synthesized)
catgcctttccactggactcgctacttcatgtcataaaaatctttggatgcttttactatgtctgaataacttcccatcactcaactgaaaaaatccacaaattagattgacttctgggt

SEQ ID NO: 1037353 - DNA, 120 bp, Artificial Sequence
  ENSG00000283839_14 (sequence is synthesized)
tgtctgggacgtattcatagtcatcactgagtatattttgggattcaaaattttccttttcattactgtaataatcttaagcatatttttatcatctgtataaccatacagctggataat

SEQ ID NO: 1037354 - DNA, 120 bp, Artificial Sequence
  ENSG00000283839_15 (sequence is synthesized)
ttggaacttagtgttgccactatttatcactttggtttacattcatgtttattatcacattggtgcccaacactactgcttttattatttgtgaataataaaaatttaacactcgattgt

SEQ ID NO: 1037355 - DNA, 120 bp, Artificial Sequence
  ENSG00000283839_16 (sequence is synthesized)
tcactctaagttaatgccaagcgatatgatggcatgctgcataaatgaaggtgctacatagttaaattggaaaaagtggtagaggaacagcatcaccatagtgcactcatagtcattgta

SEQ ID NO: 1037356 - DNA, 120 bp, Artificial Sequence
  ENSG00000283839_17 (sequence is synthesized)
aacttcaggcatgtggagattagcgttgacacacaaacactcataaacaaattcatgtttgagataggatttgatttcagcaaagcaacatcatctgttgtattaaattaagttgggaaa

SEQ ID NO: 1037357 - DNA, 120 bp, Artificial Sequence
  ENSG00000283839_18 (sequence is synthesized)
tttggatattttgcctgttgtattttcatttgatttctttttttttggtttgtgtttacataagagctataagcatatggggttgtataattagtttgatgttaacatatttaagtaaaa

SEQ ID NO: 1037358 - DNA, 120 bp, Artificial Sequence
  ENSG00000283839_19 (sequence is synthesized)
ttatgcctcaagtgaacttagtgtattcaagagaatatttaagaaaatgtctatatgatatttagtatgagaaacgctgatctatactagtcatgggatatatattgaataccaaaactg

SEQ ID NO: 1037359 - DNA, 120 bp, Artificial Sequence
  ENSG00000283839_20 (sequence is synthesized)
atattacctgaagatgataatgcaattgtattattttatgggtgatggttaaaattttaaggtaattattagataataatttcctaaaagtagctccatgatcataaccctgtttctgta

SEQ ID NO: 1037360 - DNA, 120 bp, Artificial Sequence
  ENSG00000283839_21 (sequence is synthesized)
ttcaaattcggctgagttgaaatatggtcctgttaaaagcaaggatcaataaattgtcactgattataagacatatataaagatgttacaaacagaaaggcatcttctaatcaaggaagt

SEQ ID NO: 1037361 - DNA, 120 bp, Artificial Sequence
  ENSG00000283839_22 (sequence is synthesized)
gtgaaacctatatttgtgtggattctatcacaattaacaccttattacaaaccactgtaaggcaccttcaactaaaacaacttttgaatattgggcaaataattattcagactcccttaa

SEQ ID NO: 1037362 - DNA, 120 bp, Artificial Sequence
  ENSG00000283839_23 (sequence is synthesized)
cttcacttatttaacctttgaaagaaagggaataagcaagatattatcttatgttttttcaagcttaattatctgattctctggcaacttgcctagagctgatgttgattatgcctggca

SEQ ID NO: 1037363 - DNA, 120 bp, Artificial Sequence
  ENSG00000283839_24 (sequence is synthesized)
gaacagaataccaacttagctccccacttgaagatgtgtctcttgaatagctggtataactgtagaaattgtggaaatgtggaaattgatacaaatgtaaaaaggattagagagaaattt

SEQ ID NO: 1037364 - DNA, 120 bp, Artificial Sequence
  ENSG00000283839_25 (sequence is synthesized)
cataatttttctggattcaaccttaataagtagataaactaatttaattatgcaactttttacatcttaaaagaatgatagagcacttgttaggctgtaaaaaatatttaggtgatattt

SEQ ID NO: 1037365 - DNA, 120 bp, Artificial Sequence
  ENSG00000283839_26 (sequence is synthesized)
atatttttcaagcatttttgccccttactttttaattctaataagtagccttgggataaatgccaaaacaatgcaaactggaaagccaaagctacatttctaatatgttgccaaaaaaat

SEQ ID NO: 1037366 - DNA, 120 bp, Artificial Sequence
  ENSG00000283839_27 (sequence is synthesized)
taatgcaattggatgacatgtaattaatttaccaaaaggaataaatttaagatatattattatgagtaaagaagaaaagatgaacaataactacattcctgtgttttattcccttttttg

SEQ ID NO: 1037367 - DNA, 120 bp, Artificial Sequence
  ENSG00000254963_0 (sequence is synthesized)
ctaatcaatatatttgcctgggtaaacctcagggtgtctgtgcccacagggggctgtgaggcactctctcccagtccatagggtcagtccagccctggagaatggcagggggaagcagga

SEQ ID NO: 1037368 - DNA, 84 bp, Artificial Sequence
  ENSG00000254960_0 (sequence is synthesized)
gtagtgtaacagtatcgcatgagccaagactgtcatgaaactatttggatactgtactctggttccttcatctcctccatctgc

SEQ ID NO: 1037369 - DNA, 120 bp, Artificial Sequence
  ENSG00000254960_1 (sequence is synthesized)
ttggatactgtactctggttccttcatctcctccatctgcatcagcctaaattgtcctatctgtcttttgttacaggagcctctgccatgaacccggggataagtgaggaaagaaatttt

SEQ ID NO: 1037370 - DNA, 120 bp, Artificial Sequence
  ENSG00000254960_2 (sequence is synthesized)
gtatcaagtgccaggccagggcactttgtccaggcctcactgtgaagaaagagtaatgttcaaggatggcagcaggaaggaccctaatgaagaggtttatctgattggtttactggagtc

SEQ ID NO: 1037371 - DNA, 120 bp, Artificial Sequence
  ENSG00000254960_3 (sequence is synthesized)
ctatgtgggatgaatagcttcagcctttgcgcttgcacctctttgctgtccactccaatcaagaacgggggccctcgcaactctctcagttctgaaacaaattaaatctcagtgacagac

SEQ ID NO: 1037372 - DNA, 120 bp, Artificial Sequence
  ENSG00000228255_0 (sequence is synthesized)
gcaggacctattctatcaaggatcggtaattgggaataagcttctcatttcatcctaaaggattctgtcactccactgaaatcttaagagtctccagtgcttgttaggaaagtgtggaag

SEQ ID NO: 1037373 - DNA, 120 bp, Artificial Sequence
  ENSG00000228255_1 (sequence is synthesized)
cttaaggtgagatagccattctggagtcacagccttactcctcctttaatgaagggaaaaaataaattttcctgtatcaaaacctagactggtctaaataaaaattccattaaaaaatca

SEQ ID NO: 1037374 - DNA, 120 bp, Artificial Sequence
  ENSG00000256185_0 (sequence is synthesized)
gaaatttgacatttgatataaatttatatttgttatgtgtatgtttgttaatgcaactggaatatttgacttagacccattccaatatgctgtgatacacgacacggtgcaccgcagagg

SEQ ID NO: 1037375 - DNA, 120 bp, Artificial Sequence
  ENSG00000228251_0 (sequence is synthesized)
tcagaagagggccgtaagcagagtataatgggatcaagtgagcagccttaaacctgcggaagagatgctgagtggatctgggcaggcaaaagagatagcgagaaggcaggtagaagaaga

SEQ ID NO: 1037376 - DNA, 120 bp, Artificial Sequence
  ENSG00000228251_1 (sequence is synthesized)
ggtcagcttgtccagagtaggcttgcaagactgcattccctagatgtcgcagtagataacctcaaggagctcggcgccaggaagcgactgccctcatcaaaccttctggggcaggcacag

SEQ ID NO: 1037377 - DNA, 120 bp, Artificial Sequence
  ENSG00000228251_2 (sequence is synthesized)
atcatatagccccagtggaatgctgagttggtcacatcccacaggcctttggctccctgcaagttcctgtccctgaaagggtctggatcctggtggctttttgtttccatctctagtttc

SEQ ID NO: 1037378 - DNA, 120 bp, Artificial Sequence
  ENSG00000228251_3 (sequence is synthesized)
catgggctgtggtggatgttttcagcccactccacttgcttgagtaagcttgagtggggttctatgccatgcaactaaaagaagtgtgattaaaacagacaaaatggagatccagactac

SEQ ID NO: 1037379 - DNA, 120 bp, Artificial Sequence
  ENSG00000224152_0 (sequence is synthesized)
ggtagcgacaagaagattaaaagagggaagcagaggagttgggagctggcggtcgttcccggggaagaactgctaaaacatgagaccaaggcacagaccttactgtatgagaagcaatgc

SEQ ID NO: 1037380 - DNA, 120 bp, Artificial Sequence
  ENSG00000224152_1 (sequence is synthesized)
tcctcaaaccttctgcgtgctgacatagaccttcccagaagcaaaactgttggcggcgacctgagcgctggaagccgaaggggaagaggaaggagacgcgaagccagggcggccggcaca

SEQ ID NO: 1037381 - DNA, 120 bp, Artificial Sequence
  ENSG00000224152_2 (sequence is synthesized)
aaggcggcggactcgcggcggcagcgcctgcccggccgggagcacaacccacggccctactccagcgaagtcccgcaccggcttctaggaataaagtttacgttctcctgaggccgcacc

SEQ ID NO: 1037382 - DNA, 120 bp, Artificial Sequence
  ENSG00000224152_3 (sequence is synthesized)
ccccacctcccacccaggacggcacatctccgtgtcctcctcccccaaactccactcgggaccccgagaaccaccccagccttccggccaccacaacaaagagccgcaccgaccggcgag

SEQ ID NO: 1037383 - DNA, 120 bp, Artificial Sequence
  ENSG00000224152_4 (sequence is synthesized)
gataaacagcggcggagggcgagagggcggcggggcgagcgcctccacgcagcaactccggagtcccccgcttgcccgagcgcagtttctccgctgctgtttccaccggctttgtaacac

SEQ ID NO: 1037384 - DNA, 120 bp, Artificial Sequence
  ENSG00000224152_5 (sequence is synthesized)
tgggaatttacatcctcacccgcacccctcacgcccgaggattttaaactcacctttactctcgaactgagagttgcggtagatgggatttttgccttttccccagatggttgaaggtta

SEQ ID NO: 1037385 - DNA, 120 bp, Artificial Sequence
  ENSG00000224152_6 (sequence is synthesized)
agtataaagagagttgtagtggaggtgagatttgtgatcgggaaagccttcgactccctccttctccgtcttccgcctctctctctctgattagttcctatccagcagcagattgaagca

SEQ ID NO: 1037386 - DNA, 120 bp, Artificial Sequence
  ENSG00000224152_7 (sequence is synthesized)
ggagatgattcttctcaaggtttgttcagcagcttcacttctaggcgaaggcttcatgaaccaagtgacgtcaaccaacaaggcttctctctctctcctctctctaacaatgaaagttgc

SEQ ID NO: 1037387 - DNA, 120 bp, Artificial Sequence
  ENSG00000224152_8 (sequence is synthesized)
tgttaacaagggaaaaaaagagagagaattgtttataccatttcagttccaataataaatgacctatcagctcctaaaggagccaagggagggggttgcttcttctttccaagaatactg

SEQ ID NO: 1037388 - DNA, 120 bp, Artificial Sequence
  ENSG00000224152_9 (sequence is synthesized)
tagctttgagtttgcaccgttccttgtcccaggaaaaagttaagaaacttaaaatgttttgttttgcttttaaagaagacaggacagaaaacgggatttaaaacttagtttttaaaaaaa

SEQ ID NO: 1037389 - DNA, 120 bp, Artificial Sequence
  ENSG00000224152_10 (sequence is synthesized)
caaaagctacagagtagggagcataggtcaaccatctccacctaaattttttttgttcctaaactcagaattctacaacccaactaaattaatatgccaagattttgcggatgttaaaac

SEQ ID NO: 1037390 - DNA, 120 bp, Artificial Sequence
  ENSG00000224152_11 (sequence is synthesized)
tcaaaaaaagcagtatgcaagacggtcccggggtaaaattctactgcctttccacggacaagttaaactggctgtaatgtttatgcactaagttaaaataaaatttaaataaaagacgtt

SEQ ID NO: 1037391 - DNA, 120 bp, Artificial Sequence
  ENSG00000226956_0 (sequence is synthesized)
atggccctaaggagacaagtacatttgcttggaaaactggtcacctaattcccaaaaggacagagctaacattatatgtctcagcatccagtccatcctagatggatttcgattctatct

SEQ ID NO: 1037392 - DNA, 120 bp, Artificial Sequence
  ENSG00000226956_1 (sequence is synthesized)
agggaatctcatcaaacaaccagggaggatcaaccaccagagaaaagaagagactgggagtcatcaccatgtccccaacagaattttcatctatccttctgaggacagctccaagtgatt

SEQ ID NO: 1037393 - DNA, 120 bp, Artificial Sequence
  ENSG00000226956_2 (sequence is synthesized)
attcctgtgcagccccacctctcaccttcccaaaatgtctgcctcccatcttctgggtccattcattctctcaaatgatttgctgcccctcaaaagaattttccacgttcctcatctctc

SEQ ID NO: 1037394 - DNA, 120 bp, Artificial Sequence
  ENSG00000226956_3 (sequence is synthesized)
ccctcccctgggaaaaagcatatataagcttctataccaccctgggttattgggtaatcattctccagcaattctcccatcctgtgcacatcaaataaattctgtatgcgttttctttta

SEQ ID NO: 1037395 - DNA, 120 bp, Artificial Sequence
  ENSG00000226957_0 (sequence is synthesized)
tttccagaaaaaggcagaaacatagagggctacttgaaattaggcccttcacttttcatttttcttttctggaggatgtgccaccacaagcacacacatactcgcactcacagtgggaca

SEQ ID NO: 1037396 - DNA, 120 bp, Artificial Sequence
  ENSG00000226957_1 (sequence is synthesized)
tttgtttctgaaaacattaggttagcatggtgtcacatttgcaatctccactaagcctgaggacacacttcctgtgtgacctactgaattgagtttaatattttaactaaaaacttcaag

SEQ ID NO: 1037397 - DNA, 120 bp, Artificial Sequence
  ENSG00000226957_2 (sequence is synthesized)
gagtaattaatatgagtgaacttcattaccaagaaaatcatagtatccaagccgggcgcggtggctcatgcctattttatatttgtatttgtttatgtctgtctccccaataaaatgtaa

SEQ ID NO: 1037398 - DNA, 120 bp, Artificial Sequence
  ENSG00000226957_3 (sequence is synthesized)
gctgctgtaatgaaagtggtctgtcctgttcatggctatgttgccaattattaaaacagcacatgcacatagacattcaattgtcagtaaatatttgctggtgggctgcttttaacaaaa

SEQ ID NO: 1037399 - DNA, 120 bp, Artificial Sequence
  ENSG00000226957_4 (sequence is synthesized)
tcttcacaactccaggatcatcctgtatctccccaagtatacaagataacttggcatcacacctaattttaaagttctgttagacagatttcacagtctttctcagtaagaattgccctt

SEQ ID NO: 1037400 - DNA, 120 bp, Artificial Sequence
  ENSG00000226954_0 (sequence is synthesized)
atgatgcttcaggacaggacgcacggggcaaacgcctgggcaccggggacggggcagcgccctcaggcagggtgtccacggggtgccccagggctgccggaacaaagaccccagtactgc

SEQ ID NO: 1037401 - DNA, 120 bp, Artificial Sequence
  ENSG00000226954_1 (sequence is synthesized)
ggggcttaaaacaacagaaacgtgttgtcctccattctggaggccgggagtctgacttcagggtgtgggcagggccgccttccctgcggtttccgggagaagctccttcctgcctcctct

SEQ ID NO: 1037402 - DNA, 120 bp, Artificial Sequence
  ENSG00000226954_2 (sequence is synthesized)
tccggcttcctgcctcttccggcttcctgcctcttccggcttcccgccccggtgtccccaggtgtcctcagcagccgctgcatcgctccggtctctgcatctgtctgcacaaggccatct

SEQ ID NO: 1037403 - DNA, 120 bp, Artificial Sequence
  ENSG00000226954_3 (sequence is synthesized)
tcccgggcacctgtttcctttctgtgtcccctccgcttcctatatggacacgagtcataggactgagggcctaccctgctcctgtgtgacctcatctaaacttaatcactcatatctgcc

SEQ ID NO: 1037404 - DNA, 120 bp, Artificial Sequence
  ENSG00000226954_4 (sequence is synthesized)
aagaatctatgtccagctacagtcacagtctgaggttctggatgaacattttggaaactattcaacccactgcattacccagctgtggctatatatatatatatacatatacatatttat

SEQ ID NO: 1037405 - DNA, 120 bp, Artificial Sequence
  ENSG00000226954_5 (sequence is synthesized)
tttttagtgacagggtctcgcggtgttgcccaggctggagggcagtggctcttcacagacacagtcaccgtgtgctacagcttccaactcctgggctcgaaccatcctcctttgtcagcc

SEQ ID NO: 1037406 - DNA, 120 bp, Artificial Sequence
  ENSG00000226954_6 (sequence is synthesized)
ccatgagtactggggagcacaggtgtggggcactgtgtccggctgtggtgacagatggagcccccgacacaggtttgtaactcaaggcactgacatccaacctgaagggcaagagcaggg

SEQ ID NO: 1037407 - DNA, 120 bp, Artificial Sequence
  ENSG00000226954_7 (sequence is synthesized)
cagcgaaagtgctgcagacggaggccgcttcaagcctggacacctgcgggagagaaacccccaggagccaggatcaccgaacacccaaagacgtcccgctctgaaaagaggctgccgcct

SEQ ID NO: 1037408 - DNA, 120 bp, Artificial Sequence
  ENSG00000226954_8 (sequence is synthesized)
caataaacaggaggagtcacagctgagaaaccagaggcctccataccgtgagttggcgccaggcgcaggcccgtcattgtgtcatcatcaccaccctccacgcaaagaacttctcatcgc

SEQ ID NO: 1037409 - DNA, 120 bp, Artificial Sequence
  ENSG00000226954_9 (sequence is synthesized)
acaaaagcgaaattctgccgggaaggaccttgtatgtcactgccacgcttgatgagagagaacttcttatttctgttttaatcctcgcctcctgttcacacggcagcctgtgctttggaa

SEQ ID NO: 1037410 - DNA, 120 bp, Artificial Sequence
  ENSG00000226954_10 (sequence is synthesized)
ttgctccaaccacagcgtctgcatggcagcctccctacctgctcagctgggaagtgcaggccccccaggggtccagcccaggaggtgggggctgctgggctccacccaaggagaggagcc

SEQ ID NO: 1037411 - DNA, 120 bp, Artificial Sequence
  ENSG00000226954_11 (sequence is synthesized)
tgtgcctgggcccatcccccagccatgccagccacacccagctgggacctgcgggaccctgggcacaggcaggactcacccctggagctgtggcacgggcagaggggccgggcagcagag

SEQ ID NO: 1037412 - DNA, 120 bp, Artificial Sequence
  ENSG00000226954_12 (sequence is synthesized)
gccacctaagtccaattccccagaatagtcactgccacaaagggaggcagaggtggaaatccctcctggacttgggagctttgtgaaatcgacgcttagtcaaggtgattctcccaggag

SEQ ID NO: 1037413 - DNA, 120 bp, Artificial Sequence
  ENSG00000226954_13 (sequence is synthesized)
cctgtgtagctaccggcagatgccgggcactctcctgctggctatgcacagagctttccccactatttatccagtcagcttcttacagtcgtcactttctctaaatgtgaaaaaccacat

SEQ ID NO: 1037414 - DNA, 120 bp, Artificial Sequence
  ENSG00000226954_14 (sequence is synthesized)
gcgtttcatatgtctcttcctcagaaatacctgactgcgaagtggagactctttccctctcagtatgttcattctcttgacaatgcctgctccttgccttcgtgttcaagccgacaatgt

SEQ ID NO: 1037415 - DNA, 120 bp, Artificial Sequence
  ENSG00000226954_15 (sequence is synthesized)
aggcatgagccaccgcgcccggcccaatatttattgacatttcatagaagagccctcagccacaacgctgattctgtgggttaaattagttcatacccctccaagtggcagtgatgttca

SEQ ID NO: 1037416 - DNA, 120 bp, Artificial Sequence
  ENSG00000226954_16 (sequence is synthesized)
cagtgatgttcagatgtgtcgctcatgttcctgtctcatgaaatgcgggtaaaagtgatgcctgcagctgccgtttgcatgtgtttggaaattaagtgtggggttactgatagcccatcg

SEQ ID NO: 1037417 - DNA, 120 bp, Artificial Sequence
  ENSG00000226954_17 (sequence is synthesized)
aagagaaggaattacttattccctgtaatattgagacctttccagtttatcctgtaagaaggctctggaggacgtcaccgtggagagagctgagactgctgttgacctcatgggtcttca

SEQ ID NO: 1037418 - DNA, 120 bp, Artificial Sequence
  ENSG00000226954_18 (sequence is synthesized)
tggggaggcgtgttcagcagatcaacttgttaaaagcatgaggccctggctttgagcaagtggaggatttagagacagaccagagtggactcactgtctgttctcccccaggcagttttg

SEQ ID NO: 1037419 - DNA, 120 bp, Artificial Sequence
  ENSG00000226954_19 (sequence is synthesized)
ctgcttacaagtatttgccttgagatgcctttaatcagctgcttccctgcggttcctgcgggatcagccagctgtgagcatcatcacgtgtgccaggctggctgggtcgtgatgccatct

SEQ ID NO: 1037420 - DNA, 120 bp, Artificial Sequence
  ENSG00000226954_20 (sequence is synthesized)
tctccagtggccccagactcagacgtgtggtccggagaagagacaccaggataggcagcggggcagcaatggctgttctgcttttgaggccaggggatgcagctctggggcccactgcag

SEQ ID NO: 1037421 - DNA, 120 bp, Artificial Sequence
  ENSG00000226954_21 (sequence is synthesized)
ccactcggctgtgggggacagaaaggtctcccaggttccacaccctctgtcctgtcaccttgcagctttgccccccaaaagacatggaggctctttcgtcactcctcgaatctgggctgg

SEQ ID NO: 1037422 - DNA, 120 bp, Artificial Sequence
  ENSG00000226954_22 (sequence is synthesized)
gcctgaggcttactttggccaatagactgtgggggaaagaagaatgtgctgtcgtctggggcctcaaggggccttgcaagtctctgctctctcagacccctgctggacccgggggctggc

SEQ ID NO: 1037423 - DNA, 120 bp, Artificial Sequence
  ENSG00000226954_23 (sequence is synthesized)
ctgctggagaatgagagaggagaggggagtgcccatttgttccagtcaaggacatcctaggccagctgacacccagccgattcccagacacgggagagagcccagctaagtgtggcagaa

SEQ ID NO: 1037424 - DNA, 120 bp, Artificial Sequence
  ENSG00000226954_24 (sequence is synthesized)
ccgccttgggacccacaatggacctcagacacatgagtggacccagctgagaccacacctgcccagctgtccacaaacgtgtgagcagtactacctgtttatcacttcaggccacttacc

SEQ ID NO: 1037425 - DNA, 120 bp, Artificial Sequence
  ENSG00000226954_25 (sequence is synthesized)
gtgggttgcttgttatgcagcagtggctgacggatgcaactgaccactgtgagtggctgcacagataggagtccaggcctagctcatagcaaggtatttctgcagtttgccaggaaggag

SEQ ID NO: 1037426 - DNA, 120 bp, Artificial Sequence
  ENSG00000226954_26 (sequence is synthesized)
aaaggaagaaaaaggagaagaaagggaagtggaggggaggtgcagggctgggcttctggttcaagcccacaggtgctgtcctcacgggtgttctgtggctcccgagagggcgcagtggct

SEQ ID NO: 1037427 - DNA, 120 bp, Artificial Sequence
  ENSG00000226954_27 (sequence is synthesized)
ctgctgggctaggaactgagcgagaactttcctggtgcctgaatattagcaacattccttcccagcactgactgcagagggtaagagccggaaactacaatttggaaatttaattatatc

SEQ ID NO: 1037428 - DNA, 120 bp, Artificial Sequence
  ENSG00000226954_28 (sequence is synthesized)
tccggaagaaatgtatgcttcttagaatgattttattcaaaaagccttcaaaaaatagaacctactttttccctatattgtgattaattcaaaccaaataaaaggaaccgttgaactctt

SEQ ID NO: 1037429 - DNA, 120 bp, Artificial Sequence
  ENSG00000226953_0 (sequence is synthesized)
agactgtcccccttcaggtgtcctggtgcaggctttcagggaagggagagcccctaacctcgccccacctcccaaaacttctccccctgccgtcgggctatggtccctggttcccttcac

SEQ ID NO: 1037430 - DNA, 120 bp, Artificial Sequence
  ENSG00000226953_1 (sequence is synthesized)
gcccccacccccagcctcagctctgtctgggtggaacgaatgtctgctaatgaactaaacaaacaggtctcttaatcttatcatggagctgacccagagactggcacagatatccaaagt

SEQ ID NO: 1037431 - DNA, 120 bp, Artificial Sequence
  ENSG00000226953_2 (sequence is synthesized)
gaggcaaagtggagctcaagtgttactttcccagtaagcaaatcataatgaagtatcatgctggtgactaatttaactaacattgtccaggaaattgctgttgtccaggaagagaagagt

SEQ ID NO: 1037432 - DNA, 120 bp, Artificial Sequence
  ENSG00000226953_3 (sequence is synthesized)
tgagccgagtgtcaactactaggcttctggcaccatcctgcacaagaaattggagcataagggacatttccacattctaactttacatgaagactcaggactttgaaagcccatgagaaa

SEQ ID NO: 1037433 - DNA, 120 bp, Artificial Sequence
  ENSG00000226953_4 (sequence is synthesized)
ctttttatctagactgtgtctttaaagtggtggaaatgaccaattctgtgtcttaggagggaggtggcatgaagccgggaaatgactgaggaagggatactgatatgaaatgatttattt

SEQ ID NO: 1037434 - DNA, 120 bp, Artificial Sequence
  ENSG00000226953_5 (sequence is synthesized)
ctcagttgcatcacagctaacttatagcctaaattgacaggcccacctccaatttattaattccttggtcttaacttcaaaatatatcatctcatgtttactcaattatttattgaacaa

SEQ ID NO: 1037435 - DNA, 120 bp, Artificial Sequence
  ENSG00000226953_6 (sequence is synthesized)
gaactttttgtggattgcccatcaacacaggcaaacattcatgaagcaattcaaaaatctcttctcactgcattataagcatgtccttacgttattcatatatcaagagcatgcccattc

SEQ ID NO: 1037436 - DNA, 120 bp, Artificial Sequence
  ENSG00000226953_7 (sequence is synthesized)
ccaacccacaatggaatgtgagcctaattacatgttcctttggaataagatctcaccagcccaggagtgtcagaaaccctctatcatatatacgtatcttgtttccaaaatgatcttccc

SEQ ID NO: 1037437 - DNA, 120 bp, Artificial Sequence
  ENSG00000226953_8 (sequence is synthesized)
aagccaccctaacaggcccccttcagaatgcttcctgctgacaagtgaatctgctttttgcctttcacccaatctcagctcatgctttctctgtgaaaatatcacagaccacatctgaca

SEQ ID NO: 1037438 - DNA, 120 bp, Artificial Sequence
  ENSG00000226953_9 (sequence is synthesized)
gtggtccagctaattaatgtactccaatgtctagcaagcatttgacaggaaaaataatctatacagtatttattgcaaaatcttcaccaatgtgacaaagatgaatgtaaactttacata

SEQ ID NO: 1037439 - DNA, 120 bp, Artificial Sequence
  ENSG00000226953_10 (sequence is synthesized)
atcatttttcatttgttatccaaagttgaaagtgattttcaaatgctaactttaaaattatgatgaggaagataacagctctgctttaaaactgcttggcaatggaatttctatagtata

SEQ ID NO: 1037440 - DNA, 120 bp, Artificial Sequence
  ENSG00000226953_11 (sequence is synthesized)
gagcccctaacctcgccccacctcccaaaacttctccccctgccgtcgggctatggtaaaggggaaaggacaggactcaggaccttgagggaggcattgagtcagagggcagagaggggt

SEQ ID NO: 1037441 - DNA, 120 bp, Artificial Sequence
  ENSG00000226953_12 (sequence is synthesized)
acaagaaattgggagaatatggaactttcccatctgagaagaagcagcttcggaagtatcaccattttgtatacccattgaaataactgatgtaaataaagatcaccaatagatgctaaa

SEQ ID NO: 1037442 - DNA, 120 bp, Artificial Sequence
  ENSG00000226950_0 (sequence is synthesized)
gcaggtctgggcaccgtaacaattttgcgctttgcttccccagggctgacgcgccactatgtagcgggtttcgggcgggccacgcgtgcgggacaggaacccaaccccagccgaccttga

SEQ ID NO: 1037443 - DNA, 120 bp, Artificial Sequence
  ENSG00000226950_1 (sequence is synthesized)
gctccaggagttcgtctcttacgtctgcggaagtgcagctgcctcagttcttagcgcaggttgacaactacaggcacaagccattgaagctggaatgtcctgttgctggtatttcaattg

SEQ ID NO: 1037444 - DNA, 120 bp, Artificial Sequence
  ENSG00000226950_2 (sequence is synthesized)
acttaagccaactatcccttcagttacaataggaaagtgcctctaataaggccaaatatgcgtactaacttgtagcaaccacgtgtccgtgcagtgccacaggagctagagcagtgacaa

SEQ ID NO: 1037445 - DNA, 120 bp, Artificial Sequence
  ENSG00000226950_3 (sequence is synthesized)
gccccaggaccactccgcccccgctaactcaatgcagctgacccttaccctgaatactctgcagctgcattcctgaaccgttatctaggcgctatagcaaggtcaccagacttgctacac

SEQ ID NO: 1037446 - DNA, 120 bp, Artificial Sequence
  ENSG00000226950_4 (sequence is synthesized)
cgaagccctctgggtggcacgggggaggtcatgagaaacgtggattacacccccttgtaaattcctattttcacaagataatatattgtaagccggtcatgagattatatgtggtaaagt

SEQ ID NO: 1037447 - DNA, 120 bp, Artificial Sequence
  ENSG00000226950_5 (sequence is synthesized)
taattgactaacaaccccagggtctctctcccccatataaacccctcattttgtaagctcagggctgccacctccgactggtggagaagcctggcaggttaataaacttacttggcctga

SEQ ID NO: 1037448 - DNA, 120 bp, Artificial Sequence
  ENSG00000226950_6 (sequence is synthesized)
gcacgtggccagtgggaccggagggttccccggcgtctgtttgtcgccaaggtccgaatccggctccccttaactggaaggaaacatccatgtaggggctcaccaaacaaaacagctgtg

SEQ ID NO: 1037449 - DNA, 120 bp, Artificial Sequence
  ENSG00000226950_7 (sequence is synthesized)
ctgaatacacacccaagctgcaggctcctgcttagccctattttggtttggcctccatgagatcttcagccacaatagcaggagataaaaatcttcctagaagctttcatcagctgcaag

SEQ ID NO: 1037450 - DNA, 120 bp, Artificial Sequence
  ENSG00000226950_8 (sequence is synthesized)
ttttcttacagaatgaaacttttctgctatttttctcatagttaattggctatttgagaaaaccgaatttctggctctcagcatttaattggattctgtgggtgactggatgaccgcttt

SEQ ID NO: 1037451 - DNA, 120 bp, Artificial Sequence
  ENSG00000226950_9 (sequence is synthesized)
gcacatcaccatgggtatcatccttaccttctttaaaccttttgtgccagtcaaaaattcttgctcttgatatgtcatcaccggaaactactttttttttttgtttctcttttgtgacag

SEQ ID NO: 1037452 - DNA, 120 bp, Artificial Sequence
  ENSG00000226950_10 (sequence is synthesized)
agagtcttcccgggattggctgcgggcctcgcgaccctcctgcttccctccccgccccgcgccgcctctctggtttgtgcgcccgtcgcaggtcgcaggcctctttgtcagctggagttg

SEQ ID NO: 1037453 - DNA, 120 bp, Artificial Sequence
  ENSG00000226950_11 (sequence is synthesized)
gtccgtgcagtgccacaggagctagagcagtgacaatgctggtggcaacagggcagtgtagcaggtaaagaaatggattagtgataactcaagtttcatcacctgtgagtatctctgaat

SEQ ID NO: 1037454 - DNA, 120 bp, Artificial Sequence
  ENSG00000226950_12 (sequence is synthesized)
gagaggcttcacatgtataacttttaggcaatgtgacttctggaaagtcacttgtctcttgagatttggtgtcctggtgtaacagttaagaattatttcaaccaaactaggaaaggacca

SEQ ID NO: 1037455 - DNA, 120 bp, Artificial Sequence
  ENSG00000226950_13 (sequence is synthesized)
cagtcgagctgttaagaatataaactcttcatattatttcattgcattgagcctaagaaggttcacaaaatttggcacagaaggagtatctgtcagcatattctgtttttttgtgtgtgt

SEQ ID NO: 1037456 - DNA, 120 bp, Artificial Sequence
  ENSG00000226950_14 (sequence is synthesized)
ggagtcattcttaattcatagcattgttcttacctttttatctaaacttttatgttccatattgtaaagtctagcctcataaatttaggtaattgctcacaagtttggataatgttgaat

SEQ ID NO: 1037457 - DNA, 120 bp, Artificial Sequence
  ENSG00000226950_15 (sequence is synthesized)
ataatgttgaattgtaatcccgatgttagaggaggggcctggtgggacgtgattggatgaaaagggtggatttccctcttgctgttccttgtgatagtgagttctcatgagatctggttg

SEQ ID NO: 1037458 - DNA, 120 bp, Artificial Sequence
  ENSG00000284823_0 (sequence is synthesized)
ggtaatctgctgtggtctttttccacggtttggaagctttatttttttgctctttgcaataaatattgttgctgctaattctttgagtccacactgcttttgtgagttgtagcactcacc

SEQ ID NO: 1037459 - DNA, 80 bp, Artificial Sequence
  ENSG00000284823_1 (sequence is synthesized)
gtagcactcacccgaaggtacgagaggaacgaagaattccagacgcgctgcattaagagctgtaacactcactgcgaagg

SEQ ID NO: 1037460 - DNA, 86 bp, Artificial Sequence
  ENSG00000284823_2 (sequence is synthesized)
tcactgcgaaggtctgcagcttcacttttgaagccagcaagaccacgaacccatcagaaggaagaaactccaaacacatccgagca

SEQ ID NO: 1037461 - DNA, 120 bp, Artificial Sequence
  ENSG00000284823_3 (sequence is synthesized)
gtctgcggcatcacatttgaagtcagtgagaccaagaacccaccgattccggacgcgagcaggttgcttcagggtatagacatttggcacagtactgcagcataaacccatcaagattaa

SEQ ID NO: 1037462 - DNA, 120 bp, Artificial Sequence
  ENSG00000284823_4 (sequence is synthesized)
gtaatcccagcactttggaaggttgagctgagtggaaccctcactcaggtggcgcatcaagattgctgcttgtcaatacagacaactgggataaccgaggcctctaaaccagccagaaca

SEQ ID NO: 1037463 - DNA, 120 bp, Artificial Sequence
  ENSG00000284823_5 (sequence is synthesized)
cactcacggattctgtagtagtcagtcctcaagtttgttggtgtgaccctgaaggcagcgcttcatcctctaacttacctacgcatccacactgggctccatatgaatggcagctggtcg

SEQ ID NO: 1037464 - DNA, 120 bp, Artificial Sequence
  ENSG00000284823_6 (sequence is synthesized)
tctacttcacaatttaacttgggatcaaatgtgctcttctggaagctgactttaaggcagggaatgttcagggtagctgaaatctgcagaagctggcagcctgggagcatggtgcttcaa

SEQ ID NO: 1037465 - DNA, 120 bp, Artificial Sequence
  ENSG00000284823_7 (sequence is synthesized)
tccagggctggccagcagcagtgctgtgatgggggcccaggtgctctttggtgtcctgaaccatgattatgtgtttctgttgagagcttattatataccaggcattgcactgagcattgt

SEQ ID NO: 1037466 - DNA, 120 bp, Artificial Sequence
  ENSG00000284823_8 (sequence is synthesized)
tcatgggttctcagacttagtcttcacaacagttctgtgagcaatcatctagaatcattcttgtttggatgagacactgcagttcataaaggttaacttctcctaagtaataagtggtgg

SEQ ID NO: 1037467 - DNA, 120 bp, Artificial Sequence
  ENSG00000284823_9 (sequence is synthesized)
agctgggccttgagcccaggtgctctgatgttgtctcttatcttccttactctgtcagaacttgacttcagtaatggcgttagagagacatattagtgtcaggtgtaaatacccaccgag

SEQ ID NO: 1037468 - DNA, 120 bp, Artificial Sequence
  ENSG00000284823_10 (sequence is synthesized)
aggcagtgtggtgcagggatcggggacatggactgtggagtcagtctatccaacacacgtgggtttgatcctggccccaaacctcccctgtgtggatgaataaatgacctaactctccaa

SEQ ID NO: 1037469 - DNA, 120 bp, Artificial Sequence
  ENSG00000237512_0 (sequence is synthesized)
agggtagaatccagccccacaagcggcggcgatgctaatcaggccgctaagatggaaaagcatccccgaagaccgggaggaacgccgcggggacctgtggcttagcgcgctccgcccggg

SEQ ID NO: 1037470 - DNA, 120 bp, Artificial Sequence
  ENSG00000237512_1 (sequence is synthesized)
cccaaaaagatcctgcctcagggaaatgcatggagccggcggaaaagcccgcggcgcccccggcggatcgcagaccctaagggggcgggaggtggcgccccagtcccaacctcttgagcc

SEQ ID NO: 1037471 - DNA, 120 bp, Artificial Sequence
  ENSG00000237512_2 (sequence is synthesized)
aacccagtgggtgggaagtgcccttaccctaggccttccgcaaagtgttctctccttgtattattctaattacggtatttttaatttccttaaaaaaataagaaacagaaaagcacagaa

SEQ ID NO: 1037472 - DNA, 120 bp, Artificial Sequence
  ENSG00000237512_3 (sequence is synthesized)
ccctcctcaaacacacatccatcctccggcacacacccagtccatgcctcgcccccacacacacctgacaccccagtgcaacaccacacccaccctcccctccctgcaaactcccacctc

SEQ ID NO: 1037473 - DNA, 120 bp, Artificial Sequence
  ENSG00000237512_4 (sequence is synthesized)
cgcccacctgcttaatacacattctcaccccccacacactccttaatacatactctcacacccacaagcctgccttcttggagaagtgagccgagccgtgcagcgccgcgaagggcatcc

SEQ ID NO: 1037474 - DNA, 72 bp, Artificial Sequence
  ENSG00000237513_0 (sequence is synthesized)
gagaccacgaacccaccaggaggaacgaacaattccagatgcgccgccttagcgagaccacgaaccccacca

SEQ ID NO: 1037475 - DNA, 120 bp, Artificial Sequence
  ENSG00000237513_1 (sequence is synthesized)
agaacccaccaattccggacacagcaggatcccacccacagaaccgccaggtgcacagctgcatatcctcaggggaaaactcccctcccctgccaccttactgataggcttcacttccca

SEQ ID NO: 1037476 - DNA, 120 bp, Artificial Sequence
  ENSG00000237513_2 (sequence is synthesized)
ctgataggcttcacttcccagagaactttcccaatcctgtgcaatgcctgagtggtacattgtattctatgagaatggcgcccccgcctccagagttgtgcaacaagacttccatgaatc

SEQ ID NO: 1037477 - DNA, 120 bp, Artificial Sequence
  ENSG00000237513_3 (sequence is synthesized)
aaagcccatcgctggctgcctcctctagccctgcatagcccagaagctacaacctcagcccagattagcaggctgaggggtcaggaggctgtcactggagctgttgagctcatgaacacg

SEQ ID NO: 1037478 - DNA, 76 bp, Artificial Sequence
  ENSG00000237513_4 (sequence is synthesized)
tctccggtccccttccgggctgtgggctctttgggtccacattgcctttgtgagctgtaacactcacggcgaaggt

SEQ ID NO: 1037479 - DNA, 120 bp, Artificial Sequence
  ENSG00000237513_5 (sequence is synthesized)
cagattagcaggctgaggggtcaggaggctgtcactggagctgttgagctcatgaacacgccgaagttgctgcgctccagaaatgtggaagttggaatgaagagccaccactgctgccac

SEQ ID NO: 1037480 - DNA, 120 bp, Artificial Sequence
  ENSG00000237513_6 (sequence is synthesized)
caacatgaagcttgaccaagcaagccaagaaaagatggccaagagcctctgccttccttctgccttctgcaacgcaatgagaaggctacttggacctaaaggaatgaattaggaagcggt

SEQ ID NO: 1037481 - DNA, 120 bp, Artificial Sequence
  ENSG00000237513_7 (sequence is synthesized)
ctactaccaaagtacaatgaaggtcagttttcttcataccttaatatgaaaaacgttttaaaatgtctcaatttccctatgctaacctctggtcacagaggcttgagggcttcctatagt

SEQ ID NO: 1037482 - DNA, 120 bp, Artificial Sequence
  ENSG00000237513_8 (sequence is synthesized)
accaaagtatgacttgccagttaaaaagaaaacgaattcttgcccccaggggtaaagataacaaatttagaacactatgacatacatctattaatatttgcagaaggagtatatgttgtt

SEQ ID NO: 1037483 - DNA, 120 bp, Artificial Sequence
  ENSG00000237513_9 (sequence is synthesized)
acattaacatacagaaattgcatagttgatccagagggaagtctggagagtacagggatggaaaaaaggaggaggatggaaaagaatgggaactaaaacttaggtgactacgttaaggat

SEQ ID NO: 1037484 - DNA, 120 bp, Artificial Sequence
  ENSG00000237513_10 (sequence is synthesized)
tacccatgagagcaagacacaggataaagtactgaaaacaaaaaaaaaaacttaatgtaaccacttatttgaataaattgattcatatgaatccaatttgatagataaaaaaagatcaaa

SEQ ID NO: 1037485 - DNA, 120 bp, Artificial Sequence
  ENSG00000237513_11 (sequence is synthesized)
acaacttgaagggagtctgggaaatgcagagttaaactttctagcctctctaagctttcaactgttacagaaaggcaacccaggaggagactggaataaatgctgagtgccaatttccaa

SEQ ID NO: 1037486 - DNA, 120 bp, Artificial Sequence
  ENSG00000237513_12 (sequence is synthesized)
ggctcaggggtaatcttgtgttggttctgttcatccccaccaaaatcaagtgcagggcttattctcccttccctaaccatcaggtcactaggggtccagggcctcaccttccttctcaag

SEQ ID NO: 1037487 - DNA, 120 bp, Artificial Sequence
  ENSG00000237513_13 (sequence is synthesized)
agttaatgagcattccaggatgttgtaaggaaggactgtccatatggaatagggaggacacaaacccaacattttgctctgactgttagccaataaacaatgtcctggttgttgcttgct

SEQ ID NO: 1037488 - DNA, 120 bp, Artificial Sequence
  ENSG00000237513_14 (sequence is synthesized)
gtcaggcataagtcctcactagacacctaccagaaggcaactaacccaatggtctggcataggcaaaggggcttactaaaatgtaggctggcactcacttctagccctctcctcctgtcc

SEQ ID NO: 1037489 - DNA, 120 bp, Artificial Sequence
  ENSG00000237513_15 (sequence is synthesized)
ccaccacctctctgtcttatcacttcccttctatctcccctcctccctcagcctagagaatatttttctaacttaggtaaggagctttgctgttattcctgatgttttctcctaaatctt

SEQ ID NO: 1037490 - DNA, 120 bp, Artificial Sequence
  ENSG00000237513_16 (sequence is synthesized)
ttaccagtttgttctctccagttcactaaggatctagaccagtggttttcaatctgcagcctacatctgagtcacctggagggcctgttaaaacacagaacgtggagcccaacccccaga

SEQ ID NO: 1037491 - DNA, 120 bp, Artificial Sequence
  ENSG00000237513_17 (sequence is synthesized)
ggtgctgattcagtaggtctggggtagggcccaagaatttccctttctaacgagtatccaggtgatgctgatgtggtctggagaccatactttgagaaccaccggcccaggcttttgaaa

SEQ ID NO: 1037492 - DNA, 120 bp, Artificial Sequence
  ENSG00000237513_18 (sequence is synthesized)
ctgaaaaactttgctttctgcttgtaagacccatctcttagataggagcaaagaatggtttgtctgttcaaatggggagatggaatagaagaaaaaaaatctagaagaaaaaaatcaaaa

SEQ ID NO: 1037493 - DNA, 120 bp, Artificial Sequence
  ENSG00000280560_0 (sequence is synthesized)
ggctctgcacccttccggccgctaagacaaggcctcagacacggggttctgccctgtctactgtcagcagagccaagctgagaaggatgggcacgagaaaaggttgctaactttggagga

SEQ ID NO: 1037494 - DNA, 120 bp, Artificial Sequence
  ENSG00000280560_1 (sequence is synthesized)
atgaggaactgaggtctttgccaattaccagcaaggaaatgaggcctcctgccaacagccacgtgagtatcctaccttggaaatggaccctctaacttcaatcagccttcaaataactgc

SEQ ID NO: 1037495 - DNA, 120 bp, Artificial Sequence
  ENSG00000280560_2 (sequence is synthesized)
agccccagttgatggcttgactgcaaccttaggagaaaccctgagccaaaaacattgaggaaaaacacccccagattcctatcagaaattgtgtaagataataaatgtttgttgttttaa

SEQ ID NO: 1037496 - DNA, 120 bp, Artificial Sequence
  ENSG00000280560_3 (sequence is synthesized)
ggctgctaagtgaatggcagggaggcttgaggctgcgctgttcactttaggaaacagcgaggtgtctgagctagggaatcctaaaaaggattactgtcacaaattgaattgaaatttaag

SEQ ID NO: 1037497 - DNA, 120 bp, Artificial Sequence
  ENSG00000280560_4 (sequence is synthesized)
aaacacacaaactgaaacaagaccttttaatttgtagccccaaacaggcaaactgctctgttgaaacaattaagcagctgtgatgaggaggggcagcaatacacagcagctgcccggatt

SEQ ID NO: 1037498 - DNA, 120 bp, Artificial Sequence
  ENSG00000280560_5 (sequence is synthesized)
tctttgccaattaccagcaaggaaatgaggcctcctgccaacagccacttctggaggcttggaagtccaagatcaagaggtgaacagatttggtgtctggtgggggcctgcttcctgatt

SEQ ID NO: 1037499 - DNA, 120 bp, Artificial Sequence
  ENSG00000280560_6 (sequence is synthesized)
catagatggcaccatccagctgtgccctcacatggtggaaggaatgaggctgctctctggaatctcttttataagctggaaggccttcaccagatgccggcaccttgatctttgatttct

SEQ ID NO: 1037500 - DNA, 120 bp, Artificial Sequence
  ENSG00000280560_7 (sequence is synthesized)
catcctccagaactgtgagaaatacatttctcttcttcataaatcatccagtctcagatattgtgttatagtagcacaaaatggactaagacaaactttaatgttaagcatccaacaatg

SEQ ID NO: 1037501 - DNA, 120 bp, Artificial Sequence
  ENSG00000280560_8 (sequence is synthesized)
cactctggcaaattgtgggttacttctaccaaaaagtgtgaaatcctggcctgttcctcactgcagcctgaacttagcttataagcagatatttgcaatctatttaaacttgcctcagcc

SEQ ID NO: 1037502 - DNA, 120 bp, Artificial Sequence
  ENSG00000280560_9 (sequence is synthesized)
ccaggccttaggggttcaacctttccccagagcaaatgttttttttttatgaaataacaagaactcagtgttataatcaacagatggtaatagctgagcaagttctaatctcataacact

SEQ ID NO: 1037503 - DNA, 120 bp, Artificial Sequence
  ENSG00000277130_0 (sequence is synthesized)
gcatctctttcaaagatttctaggtttttgttcactaaattttttcttcattagcccttgtttgtatacaagtcactgttcaatgttagacaccaaggaactatttaaaacaaacaagag

SEQ ID NO: 1037504 - DNA, 120 bp, Artificial Sequence
  ENSG00000277130_1 (sequence is synthesized)
accttaggccagttttaccactaaccagcaaatcttctgctatcttttggttgaatttccttgattataaaatgagaaaaatcgggctatatgacctggatggttcttaaaactctagta

SEQ ID NO: 1037505 - DNA, 120 bp, Artificial Sequence
  ENSG00000277130_2 (sequence is synthesized)
ctcagtttctcactgagctaactttaaatgttcctttgaagcattgtactatgataattttgttcttcctgttgctagtggcagttgtgccaggaaaatttgactctgtctcaagaatta

SEQ ID NO: 1037506 - DNA, 120 bp, Artificial Sequence
  ENSG00000277130_3 (sequence is synthesized)
acccattgtaaacgctgtgtggttcctttcctctcactctcttaatatcagctaggctttatcatactttatttggaaagcttgagaaagcagccatttccctgtagagctacagcttaa

SEQ ID NO: 1037507 - DNA, 120 bp, Artificial Sequence
  ENSG00000277130_4 (sequence is synthesized)
tttgacaatttgtaaaccatttgttctttctactttttgtaaggttatttccttgggaaactatttgacataaaataactattttgctgaattttgtaaaataaattatttgccaaaaca

SEQ ID NO: 1037508 - DNA, 85 bp, Artificial Sequence
  ENSG00000277135_0 (sequence is synthesized)
gtaacactcaatgagaccatgaacccaccagcaggaagaaattggacacatctgaagaaacaaactccagacacaccatctttaa

SEQ ID NO: 1037509 - DNA, 85 bp, Artificial Sequence
  ENSG00000277135_1 (sequence is synthesized)
acactcactgcaaaagtccgcgaaggaaggaataaattccagacacactactactgtccctgttcattaatctatttattcggca

SEQ ID NO: 1037510 - DNA, 120 bp, Artificial Sequence
  ENSG00000277135_2 (sequence is synthesized)
cactactactgtccctgttcattaatctatttattcggcaagaaaatattgataacaggcactgtcctgtgtactagagatggacagaatcatgacttttggcttcagggcctcacagtt

SEQ ID NO: 1037511 - DNA, 120 bp, Artificial Sequence
  ENSG00000277135_3 (sequence is synthesized)
cagttggagagagcaacatggcaccagttgattccagggcaacacaattagtgacataacagagacagatgaaagggattgcagaagcagagagagcatcctgactaattgaatctgcaa

SEQ ID NO: 1037512 - DNA, 120 bp, Artificial Sequence
  ENSG00000277135_4 (sequence is synthesized)
gggtgatgctgtgagctgaattgtgtattagtaggaatttctcggttcaacacacagagaaataacaagttttctgttgtaaactattccttactaattaaaaacaaagtggttatattc

SEQ ID NO: 1037513 - DNA, 120 bp, Artificial Sequence
  ENSG00000277135_5 (sequence is synthesized)
ttgacctgactctgaatttaattttttaagaatgtaatcataagtgaagcaactttaaatatagcattatagggcacagtattgataaatgagaggaaaactttttcttaaagagtgtac

SEQ ID NO: 1037514 - DNA, 120 bp, Artificial Sequence
  ENSG00000277135_6 (sequence is synthesized)
cactcacttaccatgccctgaaattaactgagaactcatttgtcaagagagcacctaccctatagagaattcttccaattaacatcaaaagcgatcattcttaacctctcatgcattaag

SEQ ID NO: 1037515 - DNA, 120 bp, Artificial Sequence
  ENSG00000277135_7 (sequence is synthesized)
aaaatcttgtctgcacccaatgttctgttcataatcaatgaagccccttatgtatgttattgcaaatttatcaccttgtatattactaaaatggatgaattaataaatgaatctgctgta

SEQ ID NO: 1037516 - DNA, 120 bp, Artificial Sequence
  ENSG00000285887_0 (sequence is synthesized)
gcacgttcccagacaccttcccaggcgctgccagcctcctcctgcgcacagatcgggaggtccctggacttccacttgttgagctggactcaagccggatcgcctggaggatattctcag

SEQ ID NO: 1037517 - DNA, 120 bp, Artificial Sequence
  ENSG00000285887_1 (sequence is synthesized)
ggcacagcggctgcctgcgcctgagcagtgctgaggagatgccaaggtcaggcatcagctttcagagaatgcagctgcgtcagagatggagacacgcagagccacgtgtcgtggagaatc

SEQ ID NO: 1037518 - DNA, 120 bp, Artificial Sequence
  ENSG00000285887_2 (sequence is synthesized)
taaggaagttcgctggcgccagcagcgggaaaaggccctggcttgatgaggggaactcgcagccttgcagcgcgggtgggagccccgggcggaaccgcagaagcatccccggccgtgggg

SEQ ID NO: 1037519 - DNA, 120 bp, Artificial Sequence
  ENSG00000285887_3 (sequence is synthesized)
ttttctcctccagctggagacgtggagggagtggagcagagatgagctgtgagctcagcagttcacacaggacgggatgggggaggagaacccagggatgggagagattggagaacaagg

SEQ ID NO: 1037520 - DNA, 120 bp, Artificial Sequence
  ENSG00000285887_4 (sequence is synthesized)
agctgctgggtctcagcctcgtgtagacgacagggcctgtggggatggccacgcgtgaatctggtcctggcggggagcgtccggcgcgatgggagggacctgcagccagtgatcctcccg

SEQ ID NO: 1037521 - DNA, 120 bp, Artificial Sequence
  ENSG00000285887_5 (sequence is synthesized)
tggcatcgcttctagagttgagaggagaaagccagtagctgccggtctctggtgggtctcacagatgctggagcaggtgtaggaggaagcgcctccagcaggagtgacacccccatgccg

SEQ ID NO: 1037522 - DNA, 120 bp, Artificial Sequence
  ENSG00000285887_6 (sequence is synthesized)
cccaggaaggtgtcgcgcctgttaggagggaaaggactcaggatgtgcgttgcatggggttgtgagtgagtcagtggcagcccccccgcctcctcctcctgctttgacctgatgcaggat

SEQ ID NO: 1037523 - DNA, 120 bp, Artificial Sequence
  ENSG00000285887_7 (sequence is synthesized)
ggactcagcaccccgccgaaggcactcccattcccctctgcatatggttttcatcatgtggaccttcaatagctatttttgattgatgggtattcagtgggattcaacatccgtaaacgt

SEQ ID NO: 1037524 - DNA, 120 bp, Artificial Sequence
  ENSG00000285887_8 (sequence is synthesized)
tctgacccaagtcctgttgatcaatggcgtcaccgcacggcctttttgacccaagtctgcaccattctgtctttcctggagtcacccttcgagtgctctatgtgaccgtggcctcctgcg

SEQ ID NO: 1037525 - DNA, 120 bp, Artificial Sequence
  ENSG00000285887_9 (sequence is synthesized)
gagtctgcccttggctcacggctggacagacattggctcttggcgtctctcatgttggtcacccctccagctgctctgcagcaacaatgcccctttccattcatagaaggtcgttatcgt

SEQ ID NO: 1037526 - DNA, 120 bp, Artificial Sequence
  ENSG00000285887_10 (sequence is synthesized)
gcttgcactcgggactgagttcacattgccttctacctgccagagaagctctgagctcctggaggaatgttccttttcttctgatgaaaaatgacgaggtgaacccctcgtgcctcggcg

SEQ ID NO: 1037527 - DNA, 120 bp, Artificial Sequence
  ENSG00000285887_11 (sequence is synthesized)
taatgtggtcatcagaggtcgtgagaagagcacagaaatgcgtgtttctcataatcgcctggatgctaatcactgcgtcaaaacctcccgtgagccgctttctccacagaatggaggtgg

SEQ ID NO: 1037528 - DNA, 120 bp, Artificial Sequence
  ENSG00000285887_12 (sequence is synthesized)
gactccgtctcaaaaaaaaaaaaaaatggtggaaatgccccttcctctaactgcagctgtgcacatccccctggggacagacccaaggcgccttgagatgctgaaaggcgttctctgtgt

SEQ ID NO: 1037529 - DNA, 120 bp, Artificial Sequence
  ENSG00000285887_13 (sequence is synthesized)
ttgagatgctgaaaggcgttctctgtgttctgagtggaagtacagcctggaaagtccacggagactctgctctgagtgagccgagctggacagaggggcttttgagtcaaagttttctcc

SEQ ID NO: 1037530 - DNA, 120 bp, Artificial Sequence
  ENSG00000285887_14 (sequence is synthesized)
tccttgcactttgccagaaaatctcaattgctagtgaggaattcttttcctttctttccctaacgaaggagatataagtgacagccacctggtggtcaggagaacaaactgccgccgtgt

SEQ ID NO: 1037531 - DNA, 120 bp, Artificial Sequence
  ENSG00000285887_15 (sequence is synthesized)
ctaaaggccaagcaggcttcacacactgccaaagtccaggtgaccagagagtatgaccggacacaaaggtgggacaagccgtttctcattgttactgagaagcaactgtgagtgaacaaa

SEQ ID NO: 1037532 - DNA, 120 bp, Artificial Sequence
  ENSG00000285887_16 (sequence is synthesized)
gcttacagagagatccgagatcagatgggtacccatggcaggaggggaggcgtttatgagagtccccggtgggcacatattaaaaaaagctaagtagaaaaatcactgagaactcataac

SEQ ID NO: 1037533 - DNA, 120 bp, Artificial Sequence
  ENSG00000285887_17 (sequence is synthesized)
tggtcaatgagttcaggtagacaatgagggagggtttggaggatggcgaaagatcaaaggggccctgatggagtgggaggttcagagggaggagacgctgccatgttcagcctccaggag

SEQ ID NO: 1037534 - DNA, 120 bp, Artificial Sequence
  ENSG00000285887_18 (sequence is synthesized)
ccaccacaggttgtgcataggtgctgtgttgacttctgctgaggaaattcacaaaatatacttcccccagagaaggaggaatgtggagcaggcgttaaaaagcagcctgcactcaccttc

SEQ ID NO: 1037535 - DNA, 120 bp, Artificial Sequence
  ENSG00000285887_19 (sequence is synthesized)
ggaggccctcggtgggatgtcctcttcccagccctttcctttctctccctcgggtgccttttcctgcctggtttccttggttattgtgtttggaatgcaactttgactagttgttgaatg

SEQ ID NO: 1037536 - DNA, 120 bp, Artificial Sequence
  ENSG00000285887_20 (sequence is synthesized)
gtgaagtggcaaatggtaggtggattctggcttgccgcacccatcccacaggtggaggtcttgtgagaacgactccagcagcctccagacaaatgactgttgactaaagtgaaatgttat

SEQ ID NO: 1037537 - DNA, 120 bp, Artificial Sequence
  ENSG00000285887_21 (sequence is synthesized)
gcacatgaaatgcaagagatgactagacacgcactggatggaattccacagcaggtgggagacttgggaaagatccttgttttcgtaagaaaacacaatctcagctgggtgcggtggctc

SEQ ID NO: 1037538 - DNA, 65 bp, Artificial Sequence
  ENSG00000285887_22 (sequence is synthesized)
tgaaaccccgtctctactaaaaaatatgaaaattagctgggcctggcggcacctgtggtcccact

SEQ ID NO: 1037539 - DNA, 120 bp, Artificial Sequence
  ENSG00000285887_23 (sequence is synthesized)
aaaaaagaagagaaagaaaaagaaaacacggtcttcaaatcccataacctgagcacaaaagactcttggctcgctgattcgtctcccacctcctcctccccgcacagggacagatactga

SEQ ID NO: 1037540 - DNA, 120 bp, Artificial Sequence
  ENSG00000285887_24 (sequence is synthesized)
gtctcccacctcctcctccccgcacagggacagatactgaccgggtgtgagagtaaggccccgtgaagacgaaccttggggagctcactggggtccctacttggaattttaaagcaaaac

SEQ ID NO: 1037541 - DNA, 120 bp, Artificial Sequence
  ENSG00000285887_25 (sequence is synthesized)
catgttgctggaagtgaaatcctcttcagatttacgaattatggggctccattggaggaaacaatccctatgggccaatgacctcgtttcatcccaaattatcctctggttttacaactg

SEQ ID NO: 1037542 - DNA, 120 bp, Artificial Sequence
  ENSG00000285887_26 (sequence is synthesized)
gttagtttcttgtatttccaggatttataaattgcaagtttgcttgtgaagtggtagaatccatttttgaatttgtttcttaactattgatagggctagtaaaattcaaatgattgcata

SEQ ID NO: 1037543 - DNA, 120 bp, Artificial Sequence
  ENSG00000285887_27 (sequence is synthesized)
aaccttagaaactaaggtcagttcagtgaacattcttggtgctatttcaacaatccttgaaggtttaacacgtctgtgatattactgtgtgatttcgtgttatcactgtcttatgtgcat

SEQ ID NO: 1037544 - DNA, 120 bp, Artificial Sequence
  ENSG00000285887_28 (sequence is synthesized)
tctaagcatgaaactgtgtccagtagctgtttttgaggaccctactaattatacagctgatggtagcatcagccgtttgttcaatgttaaattattttgtattttctaaacaactgacat

SEQ ID NO: 1037545 - DNA, 120 bp, Artificial Sequence
  ENSG00000285887_29 (sequence is synthesized)
tttctcctagcaaactactgataggaaattgtatgtgccatgttttcttccaacagtcttgaatatgccactgcattcctgcctgggtaaaagagtgagaccctctctcaaaaaaaaact

SEQ ID NO: 1037546 - DNA, 120 bp, Artificial Sequence
  ENSG00000285887_30 (sequence is synthesized)
aaaatgaaaaggcccaggatgaaatagagtgtttcaaaacccacagctactccccatcctttttctatcccaagagctgtgcctcagggatgtaataaaataaacatacaaactttctaa

SEQ ID NO: 1037547 - DNA, 120 bp, Artificial Sequence
  ENSG00000285886_0 (sequence is synthesized)
gcccttccgggaccggaagtgccggtcgaagtccccctgcagggtgtgtgtgtgatcgcgcacctgccgggctagggagtgcgacgctgcgggcgcacctgctgggacaaaaagactcac

SEQ ID NO: 1037548 - DNA, 120 bp, Artificial Sequence
  ENSG00000285886_1 (sequence is synthesized)
cccccacgctggccataattatgtgtctctgtttattgtcttatcttcctctgccatgtgtcctccaatggctgtgttctcagggaggatttttctgtgtaatggcagaaaaggtcctag

SEQ ID NO: 1037549 - DNA, 120 bp, Artificial Sequence
  ENSG00000285886_2 (sequence is synthesized)
caactccaggtccacaatgtggttcatgatacctgccactcaccctgcaccagtaaccacattagtcccagagccaagcaagaaagcacacggggtatttgggtacctgaaatgggccgg

SEQ ID NO: 1037550 - DNA, 120 bp, Artificial Sequence
  ENSG00000285886_3 (sequence is synthesized)
gaaatgggccggtttggccaaattaaatgatgtagttatgatccaggcctcaaagccacaataacggttttgtttttgcttttgatgaggtcccactccgtcacccaggctggagtgcag

SEQ ID NO: 1037551 - DNA, 89 bp, Artificial Sequence
  ENSG00000285886_4 (sequence is synthesized)
tccgtcacccaggctggagtgcagtggcaccgtcatagctcactgcagcctcgaactccagggctcaagtgatcctcccacttcaccct

SEQ ID NO: 1037552 - DNA, 120 bp, Artificial Sequence
  ENSG00000285886_5 (sequence is synthesized)
tctcaccatgttgcccatggatggtctcgaactcctggcctaaagtgatcttcccacctcggcttcccaaagcagtgattacaggcatgaaccactgtgcccagcgaggattttgttctt

SEQ ID NO: 1037553 - DNA, 76 bp, Artificial Sequence
  ENSG00000285886_6 (sequence is synthesized)
ttgagataaatggtagtcctcttaagggttttaagtcatggagtgctgtgttcatgtatacttctttaaagatcag

SEQ ID NO: 1037554 - DNA, 120 bp, Artificial Sequence
  ENSG00000285886_7 (sequence is synthesized)
ggttgcagtaagctgagattgtgccaccgcactccagcctgggggatagagcaagcttctttccccaaaaaataaataaataaataaataatcagtctggttacagtgtggggatatagg

SEQ ID NO: 1037555 - DNA, 120 bp, Artificial Sequence
  ENSG00000285886_8 (sequence is synthesized)
tggggatataggatggaggggacagagttgaggcagggagagaccaatgggggtcatggcagtcacctaaacaagaactggtggcctggactgagttggtggcagtggagttcggttgaa

SEQ ID NO: 1037556 - DNA, 120 bp, Artificial Sequence
  ENSG00000285886_9 (sequence is synthesized)
gttggcagtgtgaccgctaagttaaatccacagaacttgctcaggaaaaaggacaggtcgagaataactcataggttttcagtttgggcagttgacacaatgctgctgtgtcttttggta

SEQ ID NO: 1037557 - DNA, 120 bp, Artificial Sequence
  ENSG00000285886_10 (sequence is synthesized)
ggatggggaaacctggggtggtggagtgaacaacggccacccagagagagcaggtcctaattcctagagcctggaaatgtcaccttctatggaagagatctgtaggagtgatcaggggaa

SEQ ID NO: 1037558 - DNA, 120 bp, Artificial Sequence
  ENSG00000285886_11 (sequence is synthesized)
ggatttggagagaaggttatcctggattatctgggcaggtcctgcatggcatcacaagtatccctataagagagaggcagaggaaggcctctcttatagggagaagcgcagtgggtcaca

SEQ ID NO: 1037559 - DNA, 72 bp, Artificial Sequence
  ENSG00000285886_12 (sequence is synthesized)
gcactttgggagactgaggctggtggatcccttgagcccaggagttcacaaccagcctaagtgcacgcctgt

SEQ ID NO: 1037560 - DNA, 85 bp, Artificial Sequence
  ENSG00000285886_13 (sequence is synthesized)
actaaaaatacaaaaatttgctgaagttaagggaattgcttgaacctgggaagtggcggttgcagtgagccgagatcacaccact

SEQ ID NO: 1037561 - DNA, 120 bp, Artificial Sequence
  ENSG00000285885_0 (sequence is synthesized)
ggcctctgaggggacttggcacggcggctggttctgagagggccaaaagaagctggaggcgggagccagggctctcctctgctgcttaagcgacgctggcaggagctggaaacagcagcc

SEQ ID NO: 1037562 - DNA, 120 bp, Artificial Sequence
  ENSG00000285885_1 (sequence is synthesized)
gctcttacagatgctgtatttccgatccactatctccttcttggaattgaggaaggtgaacggcgggcagcagtgtatgctgaagtgttcggagtacttctggtttttggagagtctggg

SEQ ID NO: 1037563 - DNA, 120 bp, Artificial Sequence
  ENSG00000285885_2 (sequence is synthesized)
accctccttggccggtttctgactcatctcactggaaatcgccgatgcaaggagacaggaggagacataaacgcacatcaggaaagggagccctctactctggaagccccctgctactcc

SEQ ID NO: 1037564 - DNA, 120 bp, Artificial Sequence
  ENSG00000285885_3 (sequence is synthesized)
agccccctgctactcccataatccaaggtctcactctgtagcccattctagagtacagtggtgcaatcacagttcactgcagcctcaaccacctgggctcaagcaatcctcctgcctcag

SEQ ID NO: 1037565 - DNA, 72 bp, Artificial Sequence
  ENSG00000285885_4 (sequence is synthesized)
tcaagtagctgggactacaggtgcgtgctactacacccagctaattttttttttcttctgtagagacaggct

SEQ ID NO: 1037566 - DNA, 120 bp, Artificial Sequence
  ENSG00000285885_5 (sequence is synthesized)
aaatgcttcatatatgtacatttatggctataaccttttccattgtgcaacttcagctgcatgccacaaatattaaaataatttttaatcttcattttaattatggatgagttcttcttc

SEQ ID NO: 1037567 - DNA, 120 bp, Artificial Sequence
  ENSG00000285885_6 (sequence is synthesized)
aattcatcagttattacaaaatctattgtaaaatttccaaatatatggagatatttttgttacattggcttctcattttaatgcagttagagaaagcagtcgctatgacagtgactccaa

SEQ ID NO: 1037568 - DNA, 120 bp, Artificial Sequence
  ENSG00000285885_7 (sequence is synthesized)
cagttgttcaaatttgctttatgaccttgttctacgtgtgcttgcaaagactgtgcatttctggaaacaatttgggattgtctagtgaggataaaaatgtgcacaaactgtagtctagca

SEQ ID NO: 1037569 - DNA, 120 bp, Artificial Sequence
  ENSG00000285885_8 (sequence is synthesized)
gtttactcctgggtacaggagccatcttggaccacagctcaacttcacaggtgaagccacttcctgtgaggtggtggagcaaaaataccagaggagcctgaatcctggaggactgtggag

SEQ ID NO: 1037570 - DNA, 120 bp, Artificial Sequence
  ENSG00000285885_9 (sequence is synthesized)
tttgttgtttcaggcctggactcttgaactctgaacacctcttatatgagagacaaacttccaccttgcataaaccactattatttcagttacaagtaaccaaatacattcctaattggt

SEQ ID NO: 1037571 - DNA, 120 bp, Artificial Sequence
  ENSG00000285884_0 (sequence is synthesized)
ggcgtagcgtcctggtagacatgctgcagccccgccgtccccggcttctccgtgaggtccccgggactcctcgccaccacctggcactggcccccggctgcctgctcctggagtcgcgcg

SEQ ID NO: 1037572 - DNA, 120 bp, Artificial Sequence
  ENSG00000285884_1 (sequence is synthesized)
gggccccctctccgtccctgcccaacccgcggaggcttacctcactctctcttcgggttgcattcgccataagagagccggtagacccctgaaatcccgggaccgcctcccacgcaaaac

SEQ ID NO: 1037573 - DNA, 120 bp, Artificial Sequence
  ENSG00000285884_2 (sequence is synthesized)
tgatctcgactcactgcaacctccactgaagaaggaattcatgaattttacaagtataatcaaagaccaccaagaaatttttactttttccttcaaaagctaagtgtagtgtagcacccc

SEQ ID NO: 1037574 - DNA, 120 bp, Artificial Sequence
  ENSG00000285884_3 (sequence is synthesized)
taactgcctgtttttctttctgtgttgtgagccttatctgttctcaccagtttcacattccttgaggctcagtgagttcctgcgcacctccctagcacagctgcaaagttacaaggttga

SEQ ID NO: 1037575 - DNA, 120 bp, Artificial Sequence
  ENSG00000285884_4 (sequence is synthesized)
tatgcatatgttacagaaacatagtttcccaaggatgtggaacatgtagtatagataaatgtaaaagactgatcaactgcctttgttctcgcttgtgtaagtagacttcatgaatcacat

SEQ ID NO: 1037576 - DNA, 120 bp, Artificial Sequence
  ENSG00000285884_5 (sequence is synthesized)
agctcccggccactgactgcttaaaaggtggctgcattctttctccagggctcagactttcctggacgctagtcctactgagccaggtgatccccttaataaaggctttcctgaactctc

SEQ ID NO: 1037577 - DNA, 120 bp, Artificial Sequence
  ENSG00000285883_0 (sequence is synthesized)
gaagcggcagacacaatggctgtagggtctctccaagttttgatttctacaaaaaggcaccagaaagcgtagcgaaagaacgaggatactctaagtctggcttgaagggactggaccatt

SEQ ID NO: 1037578 - DNA, 120 bp, Artificial Sequence
  ENSG00000285883_1 (sequence is synthesized)
tccagagtgttccacagccaaacatgagcacacagagaaagcagaccagaaaagacagacaaatgacggacctggaaattatcttcatgtctcattgagtctgagttaatacgtgagaca

SEQ ID NO: 1037579 - DNA, 120 bp, Artificial Sequence
  ENSG00000285883_2 (sequence is synthesized)
ccaataggctggtttagaattacatgtcttcatgatttcatctttatgtatttactttttggggttgcctcatattaaagaacttcaacttcatcattttgttaaagaaacttcagcaag

SEQ ID NO: 1037580 - DNA, 120 bp, Artificial Sequence
  ENSG00000285883_3 (sequence is synthesized)
caaaaacatagactatccactaatcttgcataaaaaatcaatattgcatttgcatcgacttctcagatctaatttacactgcatatagagtatcccccagtgaagcttagcccaaaggaa

SEQ ID NO: 1037581 - DNA, 120 bp, Artificial Sequence
  ENSG00000285883_4 (sequence is synthesized)
gacagaagaacgcagaaggggaggaggccgggtcacggatcaaggccaggtcagaaggggacagctggtggtacacacagaagcaagaggaaggtcatcatccgaaattctaggactgca

SEQ ID NO: 1037582 - DNA, 120 bp, Artificial Sequence
  ENSG00000285883_5 (sequence is synthesized)
gaaggagggtgtgtttagagattctgatttctccaacgggggaagcagaaaaagtccagaatcttaaataatgggcttgggtcagcctcatgcattccatcaggtcagagggagacaggg

SEQ ID NO: 1037583 - DNA, 120 bp, Artificial Sequence
  ENSG00000285883_6 (sequence is synthesized)
tgtgtgcctgaggatccaggcagagtttcaggtggtataaatcaagcccagttgatagtagttggagaagattctagagaaggaaataggaaattgcattcctgggtcagaaacgggcag

SEQ ID NO: 1037584 - DNA, 120 bp, Artificial Sequence
  ENSG00000285883_7 (sequence is synthesized)
tcaggtctttactactataccctcaagaaatgactgtgaattccaggacggcgtcttcctatgctctgccctacccattacttactctcctgcagggtattagatacttcctgtgcacca

SEQ ID NO: 1037585 - DNA, 120 bp, Artificial Sequence
  ENSG00000285882_0 (sequence is synthesized)
ggacatttgaacagtcagggctgttagttacaagtgacaaaatcccaacttaccacctcaagcaaaagtgagaatttattggcttgcaaagttgaaaagtccaagagtgtatgtgattat

SEQ ID NO: 1037586 - DNA, 120 bp, Artificial Sequence
  ENSG00000285882_1 (sequence is synthesized)
attcaggttctcacaaaagatgccaggccggtgcagtggctcacacctggaataccaacacttcgggaggctgagaagtgtgaatcacctgaggacttaggtttgtgaaacacagagatc

SEQ ID NO: 1037587 - DNA, 120 bp, Artificial Sequence
  ENSG00000285882_2 (sequence is synthesized)
taaacttctcaaagacaaaagcaagagaaagacttgtttctctctgtttctgcaactcctttcctacgataatgactgcttatttgtccaaaaggaggaagcacccccaggtaaaaggaa

SEQ ID NO: 1037588 - DNA, 120 bp, Artificial Sequence
  ENSG00000285882_3 (sequence is synthesized)
ttgcagggatgagataagcagccgagatggaaactacctaggctgtccaagtacactgagcacactcagctctggggagccctactctaggccaatcgattcagaatctcagggaatggg

SEQ ID NO: 1037589 - DNA, 120 bp, Artificial Sequence
  ENSG00000285882_4 (sequence is synthesized)
tctggagaagtaacattaaaaaacgaacaaacaaaacaaaaccctgaaatcctgtaggtgattctgatgcactgaaataatgggagccattggtctacatcagaagtacggaaacttttt

SEQ ID NO: 1037590 - DNA, 120 bp, Artificial Sequence
  ENSG00000285882_5 (sequence is synthesized)
ccgtgaagtctctgtggcaactactcaacttggctgtcgagacatagaaaaaaaaatgagtgtggttgtgtttcaataaaaccttattcacaaaaacaaatggcagccacattgggccca

SEQ ID NO: 1037591 - DNA, 120 bp, Artificial Sequence
  ENSG00000285882_6 (sequence is synthesized)
tggactgcaatattggcctctgagccaatagcacccaagagtttctatcataatactttaacaagcctgcaatttaggactgtcccagtcaaaccatgatctctgatcacattaagcatc

SEQ ID NO: 1037592 - DNA, 120 bp, Artificial Sequence
  ENSG00000285882_7 (sequence is synthesized)
atggtcattctccatggatgatggcttaagaatccttgcccgatctcgggagagtctgcttcagtgggtctgggcctgggagtctgcattataatgcaggtcattaagatgtaggtagta

SEQ ID NO: 1037593 - DNA, 120 bp, Artificial Sequence
  ENSG00000285882_8 (sequence is synthesized)
gaccttatggaccacactggaagaatcactgatctactgatgcataattgttcctggcaagcagcaaaagcttggctgaagaagcagaactggctcttattcaaaaatcctttaagatca

SEQ ID NO: 1037594 - DNA, 120 bp, Artificial Sequence
  ENSG00000285882_9 (sequence is synthesized)
cagataggcattctgtgccccccgcctgccttatgttccagcatcctgcctccagcgttctgaaacctttcacgccccagcatcaaaccctcccagactgaatgttgacagagaagaaag

SEQ ID NO: 1037595 - DNA, 120 bp, Artificial Sequence
  ENSG00000285882_10 (sequence is synthesized)
aaagctatcccttctctttaactctgaaattagtcaaagaccaaagtccttgtctatttcagaatattgaaaaagaaagtggctgtttaaccacctacataataaaactgatgctggcat

SEQ ID NO: 1037596 - DNA, 120 bp, Artificial Sequence
  ENSG00000285881_0 (sequence is synthesized)
gagccaggctgcactgtgggcactcaaaaaccagaagggcagatagaaaaaaatagtggatcctctgaaagtgcccagatgaggaagagagcctggggccatggggatgcgcagaacagc

SEQ ID NO: 1037597 - DNA, 120 bp, Artificial Sequence
  ENSG00000285881_1 (sequence is synthesized)
ctgtctgtctctctcagtcaattctgatgactccttgcacccgtagggtgacagccaacttcacagggaggcccagaagtctggactgggtactctgaagtccagattgaggacaggact

SEQ ID NO: 1037598 - DNA, 84 bp, Artificial Sequence
  ENSG00000285881_2 (sequence is synthesized)
ctggactgggtactctgaagtccagattgaggacaggacttgcctgaagtctcgcagcaagctggagtgcaatggtataagcca

SEQ ID NO: 1037599 - DNA, 120 bp, Artificial Sequence
  ENSG00000285881_3 (sequence is synthesized)
gtgcgtcactgtgcccggccccatcatcatttattgagtactgattctgggcagggggacacactaactgctgaaaggacaccagatctgaatccgtccctgtcctcaagaagctccagg

SEQ ID NO: 1037600 - DNA, 120 bp, Artificial Sequence
  ENSG00000285881_4 (sequence is synthesized)
cttagggagggatgagacatacgcgtgagaaagctcagaccccagtcacaacagcctgggtgtgaatctccactctgcatttcctgctgtgagtcatcaagcaaaccacgcaacctctga

SEQ ID NO: 1037601 - DNA, 120 bp, Artificial Sequence
  ENSG00000285881_5 (sequence is synthesized)
gtccctaccctgacatcacacttccaaggcacaggcactgtctgtcctgagcacctcatttcaggctccaagctcaggaaacgctcgctcgctactggaggaatgttacatcttgaagca

SEQ ID NO: 1037602 - DNA, 120 bp, Artificial Sequence
  ENSG00000285881_6 (sequence is synthesized)
gccttggctctgtctggggaggatgacgtcacagctgctgaggaagaaaccacgcccagccggcagaaccccagagggcccacccgagagctccaaagaagtaggaggaaccagaggtca

SEQ ID NO: 1037603 - DNA, 120 bp, Artificial Sequence
  ENSG00000285881_7 (sequence is synthesized)
catcgctcaggaggaagaaacctgcattggccaagagaggcatcctacagagaggcccagtgatggctatactgagaccagaggtgtcaaattaagagttgtactggcttctgtcgtgtg

SEQ ID NO: 1037604 - DNA, 120 bp, Artificial Sequence
  ENSG00000285881_8 (sequence is synthesized)
gaaacagctgtgctctggtggcaggggcaatgccctttgccagagaaaacctggcctgccccaccgcttccgggctggtgacttgggcctgtggctcggcttccttaaggctcagtgttt

SEQ ID NO: 1037605 - DNA, 76 bp, Artificial Sequence
  ENSG00000285881_9 (sequence is synthesized)
acttgggcctgtggctcggcttccttaaggctcagtgtttttgtctgaaattgagatgtgactgaggcggaaggat

SEQ ID NO: 1037606 - DNA, 120 bp, Artificial Sequence
  ENSG00000285888_0 (sequence is synthesized)
aaatgctgggattacaggcgtgaaccagcgtgcccagccatattcacagttctgtggctgtccaccctggttgggctgcctgaagtcactgcagatgtcacttgtcacctgctggccttg

SEQ ID NO: 1037607 - DNA, 120 bp, Artificial Sequence
  ENSG00000285888_1 (sequence is synthesized)
tggccttggctcctaaccccttagcacagggccaacaaaagctgcggtccagctgactgtgacttctggggccggcacccaagagaacaggcttattgggtgtgggaaaatgaaatgggc

SEQ ID NO: 1037608 - DNA, 120 bp, Artificial Sequence
  ENSG00000285888_2 (sequence is synthesized)
ttctgcagaccaccaaatgaacaccttatctggcatacaaaggctcaggacagaggcctaacctaggaggcagcaaagtgggcagaaaagaccttcggctgtggggtgagcagccctggc

SEQ ID NO: 1037609 - DNA, 120 bp, Artificial Sequence
  ENSG00000285888_3 (sequence is synthesized)
tggcagtctcagctcttccaagtactaggtctgttgccccgagcaactggcttaaccctcagacactcccctcctttccaaattgagaaaaatcacagccactttggagctgctgtgcaa

SEQ ID NO: 1037610 - DNA, 120 bp, Artificial Sequence
  ENSG00000285888_4 (sequence is synthesized)
gtaaactatctccacgtacagtcagcgctggacacatgttgctctgttcctgtctaaaacactccatccctttatccaagctcctgtctctcaaacaattcccatgcttcttgaaaatat

SEQ ID NO: 1037611 - DNA, 120 bp, Artificial Sequence
  ENSG00000285888_5 (sequence is synthesized)
cagctccatgaggcccgggatttttgtttgtttgtttcctgctgtatcttcagcttctagaacagtgcctagcctatatcaggtgctgtatacatatttgttggctgactgagagctcct

SEQ ID NO: 1037612 - DNA, 120 bp, Artificial Sequence
  ENSG00000285888_6 (sequence is synthesized)
cgtgagtcacacagctggtcagtggtgatgccaggagtcagtgacctgggcctctggacacctagagccacaatgacagagccagatatgtgtgagcctgggcaagccagcagggatgag

SEQ ID NO: 1037613 - DNA, 120 bp, Artificial Sequence
  ENSG00000285888_7 (sequence is synthesized)
agacaccagccaaaacgccaggctgcccccacggcataccaactagctctatctatagtttcctcccagctgagctgcaaggtctgcctcctaatgagcctctgcctggcagggggaagg

SEQ ID NO: 1037614 - DNA, 120 bp, Artificial Sequence
  ENSG00000285888_8 (sequence is synthesized)
tttccctgcggcttacaagtcccgagggctgacaggccctgaggggttttgccttaaatggacttgagtcagtccaacactcaactcttcaggaagaggagcatcagggcctcatctggg

SEQ ID NO: 1037615 - DNA, 120 bp, Artificial Sequence
  ENSG00000285888_9 (sequence is synthesized)
gcaggcagtgagactggcagcaatctcggcccccaggttgcactgcgcaacaccgggcagtgccgcggtgaccgtgcctcccgtctgagcctcagcttctgcatgtgaataccgagaacg

SEQ ID NO: 1037616 - DNA, 120 bp, Artificial Sequence
  ENSG00000285888_10 (sequence is synthesized)
gtacgatgcccttcatcgaggccatctgtggagatgcctgatagggcgcctggccctcctgggagctcatctgtggccggatgcaaaagagaaggaactcacacatcaagggtgccaggc

SEQ ID NO: 1037617 - DNA, 120 bp, Artificial Sequence
  ENSG00000285888_11 (sequence is synthesized)
agaagtgggaagctgcggtgactcctttcctctctccaggctggcaggatgtatccctaggatcttgactccccagtctgttggccaggaattgggaccagctgcctctgcctgcatcaa

SEQ ID NO: 1037618 - DNA, 120 bp, Artificial Sequence
  ENSG00000285888_12 (sequence is synthesized)
caccctgcttccctgctgccatctgctcctccactgggaacaatgaaaagacaagctgctgaactccaggcctgggcacccgggacacccatctgggtttccctggaatcctgggcactt

SEQ ID NO: 1037619 - DNA, 120 bp, Artificial Sequence
  ENSG00000250938_0 (sequence is synthesized)
cctggtcgcgctgtgccgggtgtgacactacggagagcagattacattatcaaaagcaccaagttgaaacatttgcaaggtgtgcatcatttcacaattattggcaatggttcaatggtt

SEQ ID NO: 1037620 - DNA, 120 bp, Artificial Sequence
  ENSG00000250938_1 (sequence is synthesized)
tcatctgctttgaacggtttcttctctatcattaagaggtgaggaaactgagcactaagacactaaataacttgcccagggtcatacgacagacatgagaggtttatatcaggcagtctc

SEQ ID NO: 1037621 - DNA, 120 bp, Artificial Sequence
  ENSG00000250938_2 (sequence is synthesized)
agaccggaccccagatcgccgaagaccatttggacacacttctatcaaatcctggcggtctccttctaacaggtatgcagttttctctgtagacccttaatacacagataagacttgaag

SEQ ID NO: 1037622 - DNA, 120 bp, Artificial Sequence
  ENSG00000250938_3 (sequence is synthesized)
gaatttatctgcattccctgattggtgtggcaatggaagtcccgccctgcatcccgacactgagcacagctgcagctttcgcttgttcattcattcagtagatattattttcatgcctac

SEQ ID NO: 1037623 - DNA, 120 bp, Artificial Sequence
  ENSG00000250938_4 (sequence is synthesized)
cctttggttctttccttggcccatgaagagtctcttagcctcactgaacctattttcctcctctgtacaatgttcacaattaagtccttgcttaatgcacagtagtgtggggaaaatatt

SEQ ID NO: 1037624 - DNA, 120 bp, Artificial Sequence
  ENSG00000250938_5 (sequence is synthesized)
agaataccatttacatttgtatgatctttgataactaatgaaacccttctcctctggtttttctttttttctcatacaaatgcaatgaagtagttggcctaggcaaagaatttatgactg

SEQ ID NO: 1037625 - DNA, 120 bp, Artificial Sequence
  ENSG00000250938_6 (sequence is synthesized)
actgatctcaaaagcaaatgcaacaaaacaaaaatagacaaatgagactcaaactgaaaagcttttccacagcaaaagaaatagtcagcagagtatacatatgtaactaacctgcacaat

SEQ ID NO: 1037626 - DNA, 120 bp, Artificial Sequence
  ENSG00000250938_7 (sequence is synthesized)
aaaataaaaccaaaaaataaaaaaaagagaaaaatctatttttcctgccatgatggaattttgaaaaacagaaatgtctaaagcagaagtttgaaggttttgttagtgaggcatgcaatg

SEQ ID NO: 1037627 - DNA, 120 bp, Artificial Sequence
  ENSG00000250938_8 (sequence is synthesized)
gaaggttttgttagtgaggcatgcaatgtgaaaaaagtgtgcatgttcatgcttgtacatgagaggtttatatcaggcagtctccacccctgttccgaagtcaagaggctgactcgggtt

SEQ ID NO: 1037628 - DNA, 120 bp, Artificial Sequence
  ENSG00000250938_9 (sequence is synthesized)
gctacttcttgacagaccggaccccagatcatgtcagttttaagacttgagaagtgaaaaaagaagagggaaaagataaatactgctgaattccagctacatggaaaggtgtctgacaga

SEQ ID NO: 1037629 - DNA, 120 bp, Artificial Sequence
  ENSG00000250938_10 (sequence is synthesized)
acagaagtagacacagcatgtgcatgaagccagagtgctccagacttgccacaaggtttagaagtgaatttcaaattccaagagttgttttctttgaggtgcttcgagggatttgatgag

SEQ ID NO: 1037630 - DNA, 120 bp, Artificial Sequence
  ENSG00000250938_11 (sequence is synthesized)
agagaaaactttcgactacaggtttgtaaaaaacccgaggagattttttaaagtattcataattgcacaagttgtacatatttcatgtttattttgctcttttggctttactttatttgt

SEQ ID NO: 1037631 - DNA, 120 bp, Artificial Sequence
  ENSG00000250938_12 (sequence is synthesized)
ccccatgtgtacactatggtgctgcccaggaatttataaattttgatgggaacctggaatttttaaaattaaaaaaaagtatgtaaatgttaacctttagggccctttttcttgcattta

SEQ ID NO: 1037632 - DNA, 120 bp, Artificial Sequence
  ENSG00000250938_13 (sequence is synthesized)
gcagttggtggacctggtcgcgctgtgccgggtgtgacactacggagagcagattacattatcaaaagcaccaagttgaaacatttgcaaggtaggtgagaaaaaaagcattcgtcagca

SEQ ID NO: 1037633 - DNA, 120 bp, Artificial Sequence
  ENSG00000250938_14 (sequence is synthesized)
tattttggattttatcattttgactttattgcctatggtcagttctgccagtttttgtctccttctaaaaattgtttcaatctgctgaatctatggaaatttaatattttccatagtgaa

SEQ ID NO: 1037634 - DNA, 120 bp, Artificial Sequence
  ENSG00000250938_15 (sequence is synthesized)
ggctgataagacatctgaggaagaattaaaaacagatgatctctaatttaagaaacatttgatgctaattacttcttaccttttcacacaacttaaatattggttaatatataggattac

SEQ ID NO: 1037635 - DNA, 120 bp, Artificial Sequence
  ENSG00000250938_16 (sequence is synthesized)
attactttttaagtgagattttaaagctaaattgataaagtagagatctagtgagataattagatgttcatacaagatttgaaaaatacagacattcttagtcacacaaaaataccaaaa

SEQ ID NO: 1037636 - DNA, 120 bp, Artificial Sequence
  ENSG00000250938_17 (sequence is synthesized)
agcattgtgataattcactttttcttattctaatttgtaacagcattttaatatggtcagtagaatggcttcagcatatttacaatcttaaagtttttaactagaaaacagtttgatgta

SEQ ID NO: 1037637 - DNA, 120 bp, Artificial Sequence
  ENSG00000250938_18 (sequence is synthesized)
ttgatgtatagatctgttactcagcaacattttagatttaaaacttaatttaattttatagctaatttaattttatagcaaatttaattgtatagcatgtaaggcagtttacatttgatt

SEQ ID NO: 1037638 - DNA, 120 bp, Artificial Sequence
  ENSG00000250938_19 (sequence is synthesized)
ttaacacttaggcttttatgatagctttctaactcaggtatcagtgattttcagaatgcagagattttcaaactgaaattttttttgtcatgatgctcttgtggctaagtttatacttgg

SEQ ID NO: 1037639 - DNA, 120 bp, Artificial Sequence
  ENSG00000250938_20 (sequence is synthesized)
acacacacacacacacacacaccccataatatgaaaaaataaagtctgaaagaaaatatacaaatacattactattttttggacagtgtatagatttgagtgatctgtagaaccttcttt

SEQ ID NO: 1037640 - DNA, 120 bp, Artificial Sequence
  ENSG00000250938_21 (sequence is synthesized)
agtgtatagatttgagtgatctgtagaaccttctttattgtattatacaggcttaaatttttaatgattactttataattcggtagagtatagctattttcattttcaaaaacatatata

SEQ ID NO: 1037641 - DNA, 120 bp, Artificial Sequence
  ENSG00000250938_22 (sequence is synthesized)
aataattttttcctatcctcttgaatctgtaaaaacctgccagagcaaatatcctgttctttccttggcattactaatttgttcatggtattgatataaaccactcagtggaagttacag

SEQ ID NO: 1037642 - DNA, 120 bp, Artificial Sequence
  ENSG00000250938_23 (sequence is synthesized)
tgtaataactgtaaactgcaaggggtatgttatgcttaaaggatcccaggaatgatccaagacaaaccacagacatggtaaacagaaattatacctctgcaggatcttaggactcctcta

SEQ ID NO: 1037643 - DNA, 120 bp, Artificial Sequence
  ENSG00000250938_24 (sequence is synthesized)
cactgttaacaattattgaagacccttgcaaagaactttgtttatgcaggttatgttggtatttatcatattagaaattgaaacagaaaaatttaaaaaatatttactaaatcatttaaa

SEQ ID NO: 1037644 - DNA, 120 bp, Artificial Sequence
  ENSG00000250938_25 (sequence is synthesized)
aacaatgaaaacatattacatgttaacatatgtaatatagtttttctgaaacaaaataaacaaatatgtatgtatacatatatagcgagaagagtggcactgttttacatttttgtaaat

SEQ ID NO: 1037645 - DNA, 120 bp, Artificial Sequence
  ENSG00000250938_26 (sequence is synthesized)
gtctttaatataaggcttaatagaagacagctgaattctcttacctgcttctgcattcaattggatgcaatatggtattttgtttaaagtaaaatctgtctttacacaaatatgtaatta

SEQ ID NO: 1037646 - DNA, 120 bp, Artificial Sequence
  ENSG00000250938_27 (sequence is synthesized)
tagaaggaaggagtattttaataactttttcagttgattgtggatattctttaatattacagtgaatctcaacaaatgatagtctgttacagattagttgcattgtgaaatctgaaacca

SEQ ID NO: 1037647 - DNA, 120 bp, Artificial Sequence
  ENSG00000250938_28 (sequence is synthesized)
tataaatcaacttttcagacttttgaacctagcctgtttcttaaggaagatttctgaaaggtgtctaacttttgctttaaaaaaataaattgtaaaatttaaatcatagtaagacaatct

SEQ ID NO: 1037648 - DNA, 120 bp, Artificial Sequence
  ENSG00000250938_29 (sequence is synthesized)
caagcacattctgaaggatattttaagtttacttttcatcaaagttactttataaaatattcaagcactgcttaagtctctgatcctgatttcttaatgtttagattaattgaatttaaa

SEQ ID NO: 1037649 - DNA, 120 bp, Artificial Sequence
  ENSG00000250938_30 (sequence is synthesized)
gtttattatttattagatgttctagctcttaaagtctttgctttgtgactttctggaggtaagtttttgtatattaattaagcagatgtaaacagcataggaaaaaataaaggtttgatt

SEQ ID NO: 1037650 - DNA, 120 bp, Artificial Sequence
  ENSG00000250938_31 (sequence is synthesized)
agtgattttttggcatggtgctccactattctagatttctgttaagtactaaagaaagtaatttccaaacaaaacctttgcttgagcttgagaaccgaaatactgatttcaaaaaaaaaa

SEQ ID NO: 1037651 - DNA, 120 bp, Artificial Sequence
  ENSG00000250938_32 (sequence is synthesized)
taaggtcacctcaccaaagaggcccatcaacatggaagaatatttcagtgaatcttgactcaccaagctcagtgacttttcattgaaaagggagagcagattacattatcaaaagcacca

SEQ ID NO: 1037652 - DNA, 120 bp, Artificial Sequence
  ENSG00000250938_33 (sequence is synthesized)
tcctggcggtctccttctaacagggagtgggatgctgctctaatgataccccgaaatgtggaagtgaccttgaaactgtttaacaggcagaggttggaactgtttggagggctcagaaga

SEQ ID NO: 1037653 - DNA, 68 bp, Artificial Sequence
  ENSG00000250938_34 (sequence is synthesized)
agacaggaagatgtgggaactcatatgaacaatgaagtacaggctgaggtgttttcagatggaaatga

SEQ ID NO: 1037654 - DNA, 120 bp, Artificial Sequence
  ENSG00000250930_0 (sequence is synthesized)
ccgcctactcattgaacatggctgctatctctgtcttctggaaacacggctccaatcctgcaacaactctatacaagagctcccagtgaaagctttcactagaccttgatggcactatgg

SEQ ID NO: 1037655 - DNA, 120 bp, Artificial Sequence
  ENSG00000250930_1 (sequence is synthesized)
tcattatcttgtcaaaactgtggtggatttgaagagctagtgatgaagaatggaggtttcctgtcctagaaataaccaaaggcccaggcttggaggtggcagaaaaagtggcacttaagg

SEQ ID NO: 1037656 - DNA, 120 bp, Artificial Sequence
  ENSG00000250930_2 (sequence is synthesized)
aaaatcagatcagccgtgtaatcaccctgctacaataaaaggagctcagtgtgctttatggcaaccacaccagtcaagggctctctctggcaccaagggagccataagggccccctgcca

SEQ ID NO: 1037657 - DNA, 120 bp, Artificial Sequence
  ENSG00000250930_3 (sequence is synthesized)
agtggagctgagggatgctcgaggccagggtctggaccttctcactataaaaagaatagtgaagtatacagatatttacctactgagttatgtttgggctgataaaaatgctcagatgtc

SEQ ID NO: 1037658 - DNA, 120 bp, Artificial Sequence
  ENSG00000250930_4 (sequence is synthesized)
ggaggttgaaagaaacttaagagatgtggcaactaattgcaacgtgtagattgtatttagctcatgattcacacaaactagatatttgttattaaagaattatggttgtttttggtgtga

SEQ ID NO: 1037659 - DNA, 120 bp, Artificial Sequence
  ENSG00000250930_5 (sequence is synthesized)
agtgaagtaactgactggacatcccaaagttaggtggtcctgagagccaggtgctgacagctgcctcaccttaagagtctcctttcgttatggcatctggaaagatctcacatggcaggc

SEQ ID NO: 1037660 - DNA, 120 bp, Artificial Sequence
  ENSG00000250930_6 (sequence is synthesized)
ctgcttctagttccttcttcctagtgtgtctgaggaaatccaatctctcccactccagcccgcctactcattgaacatggctgctatctctgtcttctggaaacacggctccaatcctgc

SEQ ID NO: 1037661 - DNA, 120 bp, Artificial Sequence
  ENSG00000250930_7 (sequence is synthesized)
ttaaaaatctagcttatgagatacctcagatcaatcaatccctggcagtgggtctgctaaacatcagatacagacaaacaactgcatagatctccaactagattgaagaacaggaccctc

SEQ ID NO: 1037662 - DNA, 120 bp, Artificial Sequence
  ENSG00000250930_8 (sequence is synthesized)
cagagagcttccaagaagacaccaacctaggcatgggtttatgttcctgacaaagaataaggattgttatgaagaatgttctattttgaattgtgaaaataattatttaaagctgtacaa

SEQ ID NO: 1037663 - DNA, 120 bp, Artificial Sequence
  ENSG00000250930_9 (sequence is synthesized)
ggcaggtggaacaatcgtgcggtcagctccacctgccacaacccttcctgaaagatccaggcccacagaaaagccaggatcctgtctttaaagactgctctgctctcccacctcatcctg

SEQ ID NO: 1037664 - DNA, 120 bp, Artificial Sequence
  ENSG00000250930_10 (sequence is synthesized)
ccaagcgtggcctgcagcacctctccaggcctctgtgctgacagctgcctcaccttaagagtctcctttcgttatggcatctggaaagatctcacatggcaggcctgcttctagttcctt

SEQ ID NO: 1037665 - DNA, 120 bp, Artificial Sequence
  ENSG00000250934_0 (sequence is synthesized)
agtggtgtcctggcctccctcctagttggtgctggtggaaagcatctctgaagaggaggtgtgaacctgccacgtaagaggcctcgggttctcctttgccaagatccctccgcggtgagt

SEQ ID NO: 1037666 - DNA, 120 bp, Artificial Sequence
  ENSG00000250934_1 (sequence is synthesized)
gagtattcacttagcacccaggatctttaaaccaaccagtgcattcccttctgaagagccttcaacttcactttaaaaaatcctgtgatggggcgggcgtggtggctcatgcctgcaatc

SEQ ID NO: 1037667 - DNA, 120 bp, Artificial Sequence
  ENSG00000250934_2 (sequence is synthesized)
tgtctaaaaaaaaaaaaaaaaaatcctgtgatggcaaagacgttctcaggctaaattcaactcatgtattttttacatacataatatttgaagggtcttatatgtgtatgtatatcttct

SEQ ID NO: 1037668 - DNA, 120 bp, Artificial Sequence
  ENSG00000250934_3 (sequence is synthesized)
tcttattgaatttaagaatactttatatatttcagatcttaaaatatccacaaatgttgaaatttttaaactatttttttttcattccatcatttattttaaggcctttaccatgtggaa

SEQ ID NO: 1037669 - DNA, 120 bp, Artificial Sequence
  ENSG00000250934_4 (sequence is synthesized)
attttagtttttatgggaaatcaaccttttctgctggctgacaacagccttctctatgccaagtttatagaattcattttccatattttattctaattcctttaaggttttatttttaaa

SEQ ID NO: 1037670 - DNA, 120 bp, Artificial Sequence
  ENSG00000250934_5 (sequence is synthesized)
gtcttaatatttatttcttctggaatttattcttatggataggtatgtggaagaaatctaacttttactgattttggccataaagcccaatgttatttaccaaatgcaggtgactcttga

SEQ ID NO: 1037671 - DNA, 120 bp, Artificial Sequence
  ENSG00000250934_6 (sequence is synthesized)
acaacaagggtttcaactgcaagggtttgccacttataggcaaattttcacccgcctctgccacctctgagacagcaagaccaacccttcctcttcctcctcctcctcagtctacttaac

SEQ ID NO: 1037672 - DNA, 78 bp, Artificial Sequence
  ENSG00000250934_7 (sequence is synthesized)
ccaacccttcctcttcctcctcctcctcagtctacttaacacaaagatgatgaggatgaaggttttcccttcctcagc

SEQ ID NO: 1037673 - DNA, 120 bp, Artificial Sequence
  ENSG00000250934_8 (sequence is synthesized)
tgtaagaatacagtgcataatacatataacatgcataatatgtgtaaatcaactgtttatgttatcagtaagatttctggtcaacaataaactattagtagttaagttttgggggagcca

SEQ ID NO: 1037674 - DNA, 120 bp, Artificial Sequence
  ENSG00000250934_9 (sequence is synthesized)
ttgatttggaatgccacttttatcacctactaaagggccgggcatgcaagacactggttttgtttctctgtactcctgcattgctctatttgccttttcctgtgccctgaagaattcttt

SEQ ID NO: 1037675 - DNA, 120 bp, Artificial Sequence
  ENSG00000250934_10 (sequence is synthesized)
caatcactgtgcttttataatatgatatcgcatctgataatacaaataaccacattgcttttttttgtttcaaaaatatctgaactattttcaaacatgtattcctgccgattaaattta

SEQ ID NO: 1037676 - DNA, 120 bp, Artificial Sequence
  ENSG00000250934_11 (sequence is synthesized)
gaatcaaccattgaatttcaaatcacttccatttgaatggacttgaaatgaatcagtagattaatttaaaagaaattctgtctctaaaatgttgaatctccttttccaggaatctggaaa

SEQ ID NO: 1037677 - DNA, 120 bp, Artificial Sequence
  ENSG00000250934_12 (sequence is synthesized)
gtcactgcttatttaattctctttatatgcctttagttgacttttattgttattgtttccctacattggtttgcgcccatttacttaatttttttctaacagctttattaagatacaatt

SEQ ID NO: 1037678 - DNA, 120 bp, Artificial Sequence
  ENSG00000250934_13 (sequence is synthesized)
catgtgccatgcaactcactcattgaaagtgtgcaattaaatgtttttaagtatattcacaaagttgtgcaactattaccagattcaattacagaacattttcatttcctcagtaagaaa

SEQ ID NO: 1037679 - DNA, 120 bp, Artificial Sequence
  ENSG00000250934_14 (sequence is synthesized)
cctggtacactttagctactatcccaccccagccccatctgctatccctacagaccaaagcaacagggctctttgacatttcatgtaaatggaatcatataatatgtgatcctctatgac

SEQ ID NO: 1037680 - DNA, 120 bp, Artificial Sequence
  ENSG00000250934_15 (sequence is synthesized)
tggcttctttcacttagcatgatgttttcaaggttcaatcatattgtatgaagcatgtattagtacttggttcctttttatgaccaaataatattcctattgtatggataaaccacattt

SEQ ID NO: 1037681 - DNA, 120 bp, Artificial Sequence
  ENSG00000250934_16 (sequence is synthesized)
tgtttattcatttattatttgatgagcattttggttatttttacctcttggctattacaaatcatgctgctatgaagattcatgtacaagtttttatgtggacatatttcagtcgtcttg

SEQ ID NO: 1037682 - DNA, 120 bp, Artificial Sequence
  ENSG00000250934_17 (sequence is synthesized)
gaaaaagtactgctggtctaatggtaactccacatttaactttttgagaagctgccagactgttttccaaagcagctgctccatttttcattctcacaagcaatctatgaggattactgc

SEQ ID NO: 1037683 - DNA, 120 bp, Artificial Sequence
  ENSG00000250934_18 (sequence is synthesized)
tcaaccctgctaacacttattattgtctgactttgtgattagagctattatatagtgggggtgtgaaatggtatctcattgttgtcttgatttggatttctctgatgtctaataatgttg

SEQ ID NO: 1037684 - DNA, 120 bp, Artificial Sequence
  ENSG00000250934_19 (sequence is synthesized)
atcactgtttcatttgcttaatagacatctatatatcttctttgaaaaaatgtttattcagatcctttattcatttttaattgggttgtctttttattattgagctgtgttctttatata

SEQ ID NO: 1037685 - DNA, 120 bp, Artificial Sequence
  ENSG00000250934_20 (sequence is synthesized)
ttctagatacaagtttcttatcaaatatatgatttgcaaatattttcacccattctgtgggattttttttcactttcttgagagtgtcctttgaggcagaaaggttttcgatttagatga

SEQ ID NO: 1037686 - DNA, 120 bp, Artificial Sequence
  ENSG00000250934_21 (sequence is synthesized)
aaggtttctcctccagcccagggagccaggggctggcattctgtgtccaggacttcgggccctctgtgagcctctgtccgccaaggcgatggagctgtgtttggagtccctcgccactgc

SEQ ID NO: 1037687 - DNA, 120 bp, Artificial Sequence
  ENSG00000250934_22 (sequence is synthesized)
cttcagagaaggtgacagagggccatgtctgaaacattctcccacaaccaggaaccctcagcagccgctgaagaggaaaggcagttaaatggaaagacttctgagcaagtggaggaaaag

SEQ ID NO: 1037688 - DNA, 120 bp, Artificial Sequence
  ENSG00000250934_23 (sequence is synthesized)
ccacttgaaatttcagaggatggcagaaacctacttacaaggaaatgaaagagggcacagcaaccttaagaccagagcagcccacgatattttttaatgagggcaaaaatagaagacttg

SEQ ID NO: 1037689 - DNA, 120 bp, Artificial Sequence
  ENSG00000250934_24 (sequence is synthesized)
caaaagacccctgaaaataatgcctggaagctgcgaaacatcagactgacaccgcacaaaagaggtccagctgagcaggagaaaagcttgagaagcatccagaacaatgtaggtggagag

SEQ ID NO: 1037690 - DNA, 120 bp, Artificial Sequence
  ENSG00000250934_25 (sequence is synthesized)
gctaagaagaaagaggagcccacatggaatgaataaccaaggtcgggacagaggaaggttcgccagaactgggagggctgaaattggacattgagataaattaaagagtgttctttaaaa

SEQ ID NO: 1037691 - DNA, 120 bp, Artificial Sequence
  ENSG00000250934_26 (sequence is synthesized)
cctctgtccgccaaggcgatggagctgtgtttggagtccctcgtctttggcagcggctggggccaaagcccgggcaagaccaacgccttcggcacccggactcaggctccgtcctctctg

SEQ ID NO: 1037692 - DNA, 120 bp, Artificial Sequence
  ENSG00000250934_27 (sequence is synthesized)
atacagcaggcctgtgaaacccacaggtgcaattgcttaaaatgaggctaaggtagacgtgtgaatggttaataatgagttgattaaaatattcagaaatcatctactggagacgggcaa

SEQ ID NO: 1037693 - DNA, 120 bp, Artificial Sequence
  ENSG00000250934_28 (sequence is synthesized)
actgcaaaatggtagcatgggagcaactgatgttcgagaaagcccaggctccggcaagccgtgggtttgaatttacacatgcgcacataatgggtatgaataaacctttcttcaaaaaaa

SEQ ID NO: 1037694 - DNA, 120 bp, Artificial Sequence
  ENSG00000250934_29 (sequence is synthesized)
cttctggatacctcctgaaggacttgtctgagactgttttacagcagctatttttttttaaataagtagaaggagtacatgctaaaaaccacaattaaaatagaatatagtaaataaagc

SEQ ID NO: 1037695 - DNA, 120 bp, Artificial Sequence
  ENSG00000250934_30 (sequence is synthesized)
catggggactagtgctggaatgggacgctgctggaagcaagaggtcttaggagtgtcctccctggctcctccagtggtgtcctggcctccctcctagttggtgctggtggaaagcatctc

SEQ ID NO: 1037696 - DNA, 120 bp, Artificial Sequence
  ENSG00000250934_31 (sequence is synthesized)
gggcgctttcttctgcccctactcccggctgtccgcttcctccccagccccctcctgtgagctctgggagctacagaataaggacactccttggccccaagccagccccagcttgctcgg

SEQ ID NO: 1037697 - DNA, 120 bp, Artificial Sequence
  ENSG00000250934_32 (sequence is synthesized)
gagcctgggtttccccctccgtccccatcaccgcgagggtctgtgcatgggaatctgctccagaggctccctcaggcgccgcgccgcggggatacgcctttcaccgccccagcaattgga

SEQ ID NO: 1037698 - DNA, 120 bp, Artificial Sequence
  ENSG00000250934_33 (sequence is synthesized)
aagtcaaggcagttatttgctgtgggcaggtgccaaggctggctgcttcagtccccacgcgagtcgcccccgagcctgcttctgcagcccagcctggaaagtgcaaggcacttggaaagg

SEQ ID NO: 1037699 - DNA, 120 bp, Artificial Sequence
  ENSG00000250934_34 (sequence is synthesized)
agccacgcccaacgccctgtaccagcggcctcccggacaccaacagcgtcctctgcgcctgctgcagcttgtcccttagtcctccctggacagagggcgtgaagttggctgcgccaacag

SEQ ID NO: 1037700 - DNA, 120 bp, Artificial Sequence
  ENSG00000250934_35 (sequence is synthesized)
gacgcggcccgctcacttcggggctcattgtcctggacacacagtcagggctggacgcctccagcagccccacgcttcaccccaaggtccgcaaacctgacaacttcggaggtagggata

SEQ ID NO: 1037701 - DNA, 120 bp, Artificial Sequence
  ENSG00000250934_36 (sequence is synthesized)
tcttgacacagtctgaaaacaaaccatttaaaactttttttctcaaaaaattaaaataatttttttctgcttacaaaatctataaattcagttcaatatcaatgaaaatcgcaacaggat

SEQ ID NO: 1037702 - DNA, 120 bp, Artificial Sequence
  ENSG00000250934_37 (sequence is synthesized)
gttgacacttgagaagctgatttgaaagttcatctgaaagagaaaatatataggaatcctgaagatgatttcgaaaacctccaaaaagacttcagtaattcacacagaaaatccagaaac

SEQ ID NO: 1037703 - DNA, 120 bp, Artificial Sequence
  ENSG00000250934_38 (sequence is synthesized)
gctttggggaaaactcactatccattttgaaaccaatgttagaatcttcttaccatttgcaagaataaactccaggtgtattaaagagctaaacatttaaaaaatctataaaagttttaa

SEQ ID NO: 1037704 - DNA, 120 bp, Artificial Sequence
  ENSG00000250934_39 (sequence is synthesized)
agccaaatatggaagaatatttttaaaatcctatggtgaagaaggcttttactaagcagcaaacaaaacctggaaaccgtaaaggaaatgactgacagatttgaatattgcaagaactaa

SEQ ID NO: 1037705 - DNA, 120 bp, Artificial Sequence
  ENSG00000250934_40 (sequence is synthesized)
atgaatgcctccttaaacaaattaaaggacaaattccaggcagggagaaaatagtttacaatagaagtaatgtgccaatggttaatatctgtgttgcataaacatgtctttccaatcaat

SEQ ID NO: 1037706 - DNA, 120 bp, Artificial Sequence
  ENSG00000250934_41 (sequence is synthesized)
aagaaaagagtaggaaatgggtaaggatttaacaggcaattcacagaagacaaagtaaccggcccctaaatgggagcatatcctcaacttcactagtaataaaggaaacgaatttaaaag

SEQ ID NO: 1037707 - DNA, 120 bp, Artificial Sequence
  ENSG00000250934_42 (sequence is synthesized)
acgatacatttctcacttcttctctccttatagctgtattccacctttgaccatacagcctgtttttatttatcgtaagcataggttaataaatacagggcttaccatgttaatatcttc

SEQ ID NO: 1037708 - DNA, 120 bp, Artificial Sequence
  ENSG00000250934_43 (sequence is synthesized)
tttctatggatgcgtaacaacttattttatcattccgtttgtgactgaaattgaatttctttctgtaaacctgaaaatatctgagacaagcctcgatcaacttagaagtttactttgcca

SEQ ID NO: 1037709 - DNA, 120 bp, Artificial Sequence
  ENSG00000255375_0 (sequence is synthesized)
agttctctggccatgcctccctgatgggagtccacctgaaccgtggactgagaatgaaaagggtgatttctcacagagatactggacagtcaaaacatgtccatcacagcttcttctttc

SEQ ID NO: 1037710 - DNA, 120 bp, Artificial Sequence
  ENSG00000255375_1 (sequence is synthesized)
tttctctatggaccagttttctgtgttttcagtcagtatggtagaagaaatattgctatgcccagctcaagttttactttctctctattcaagaacactagaagtccctgggagactctg

SEQ ID NO: 1037711 - DNA, 120 bp, Artificial Sequence
  ENSG00000255375_2 (sequence is synthesized)
actagtgaagctcatacaactaactgtgatggtggagatgaggatagtcttaaaggtaacacggttgcaacagactcatctatgcgaatataaagactcttccttctgcagcaagtagaa

SEQ ID NO: 1037712 - DNA, 120 bp, Artificial Sequence
  ENSG00000255375_3 (sequence is synthesized)
tggccaacatctgaacataaattctcatcagtccaccttcataagcagacggggagggtctccagggataacaggaatttaaccaacttcagcaatgagcctggtttacagcctcctgcc

SEQ ID NO: 1037713 - DNA, 120 bp, Artificial Sequence
  ENSG00000255375_4 (sequence is synthesized)
ctgcagcctgttcttccacaaaccctgggtaaaatgcagtcaccttgttggtttaaaccagctcttgacagacccccggcaacatacagatgaacgcaagtgaactttctcatgaccacg

SEQ ID NO: 1037714 - DNA, 120 bp, Artificial Sequence
  ENSG00000255375_5 (sequence is synthesized)
ctaaagtctccaccctgggcaacctgtagcttcattaccatgacatgcaacctatgcgctgacgtaatgactcactgcatctgtgcaactagacctctcctcgtcatgcaatgatgctcc

SEQ ID NO: 1037715 - DNA, 120 bp, Artificial Sequence
  ENSG00000255375_6 (sequence is synthesized)
ctgtctcctctccattgcgccataaaaccctcctgtcactttccctcggaaagacactgctttggagaatacccccagtgtcacccttacttgagttaaataaaactcctattgatcaaa

SEQ ID NO: 1037716 - DNA, 120 bp, Artificial Sequence
  ENSG00000255375_7 (sequence is synthesized)
ttccttcatcttccaccatgattgtgaagcctccccagccgtgtggaactgtgactccattgaacttctttcctttataattacccagtctcagaacactagaagtccctgggagactct

SEQ ID NO: 1037717 - DNA, 120 bp, Artificial Sequence
  ENSG00000255371_0 (sequence is synthesized)
acctttccagagatcttatgaagtgctgcctgtcagctaatggcctagtgtgtcagccttgtgcaggacgcagatgctgctcctaaagctttcttggactgagaagacttttctcatttc

SEQ ID NO: 1037718 - DNA, 120 bp, Artificial Sequence
  ENSG00000255371_1 (sequence is synthesized)
tttcacgatataaaacctaatctacacagctgtatgttgtttgggactcagttaacttagaattgattctcttcctctgtacagtccaggcaattgaaataagttaaatgtttttttcca

SEQ ID NO: 1037719 - DNA, 120 bp, Artificial Sequence
  ENSG00000255371_2 (sequence is synthesized)
acatagccacccacatttaaggcatggtgacctaaagtctttccttgagaactcgcacctctgaaaacctgatactttgtagaggcatatggagaaactcagtgtagcatacaaggtatg

SEQ ID NO: 1037720 - DNA, 120 bp, Artificial Sequence
  ENSG00000255372_0 (sequence is synthesized)
aggatagcctacgaacttccctttaaagaaagctacgtagaagcaggatgagtaaaaatttacaaactgaaacaggaacattttcaaggtggagcacagtggcgtgatctcagcacactg

SEQ ID NO: 1037721 - DNA, 120 bp, Artificial Sequence
  ENSG00000255372_1 (sequence is synthesized)
gattacaggcatgagccaccatgcctcgccaattgagagctaatggttttaaagtgtggcacttccccatgcactctctctctcctgctgccttatgaaaaacgtgtttgtttccccttt

SEQ ID NO: 1037722 - DNA, 83 bp, Artificial Sequence
  ENSG00000255372_2 (sequence is synthesized)
ggttttaaagtgtggcacttccccatgcactctctctctcctgctgccttatgaaaaacgtgtttgtttcccctttaccttct

SEQ ID NO: 1037723 - DNA, 120 bp, Artificial Sequence
  ENSG00000225378_0 (sequence is synthesized)
aactgtgggacccatgcctttgagagtgttctcagcacccactgaggttcgccggtgtgggggtgatgaatctgggaggagaaaaaggtcaaacctgccctttgcaaagtgcctgctgcc

SEQ ID NO: 1037724 - DNA, 120 bp, Artificial Sequence
  ENSG00000225378_1 (sequence is synthesized)
caggttctgcccagaagccagctgcaggaaagtaatttgggcaagaatgacttttcttcatcctgtagatgaggacgatgaagctctgaggggcacagaggtactaagtggggcccaagt

SEQ ID NO: 1037725 - DNA, 120 bp, Artificial Sequence
  ENSG00000225378_2 (sequence is synthesized)
gaaataagagcatcccaatgccaggaagaatgttacagatcacctgtcagtgacgcaagcccctcatgtgaccaacaaggaaactgttgcccagagaggggaatggacaagcccaaggtc

SEQ ID NO: 1037726 - DNA, 120 bp, Artificial Sequence
  ENSG00000225378_3 (sequence is synthesized)
actcagccagctatggccaagctggactttggatcccagatctctggattccccatctgcatctctctcactggatcaaactgcctttagacccgtgcactggggtgggactgtcctatt

SEQ ID NO: 1037727 - DNA, 120 bp, Artificial Sequence
  ENSG00000225377_0 (sequence is synthesized)
gccgcccctgggggaggtcaccttcacggcgtcgtgagcatgggcgatgggagggggcgctgaggcctcgcccttgggaagcaggagctgggagacatttatgcagtgtgtgattctttc

SEQ ID NO: 1037728 - DNA, 120 bp, Artificial Sequence
  ENSG00000225377_1 (sequence is synthesized)
taaaacaactccctggaagagaggacatttaattcaacaatttattggccacctactgtgcaccaggcagtgaacttggaactggggctactgggttacagcagtgaccaagacagaggt

SEQ ID NO: 1037729 - DNA, 120 bp, Artificial Sequence
  ENSG00000225377_2 (sequence is synthesized)
ccctgttcttaaggagcaagtgagggcaacagaaaagagcagtcagctgtcatgcgagggcactcaagcagccctgtggaaagctctacgtggtgagaaactgaagcctcctgccaacac

SEQ ID NO: 1037730 - DNA, 120 bp, Artificial Sequence
  ENSG00000225377_3 (sequence is synthesized)
caacaaggaactgagacctacttccaacagccatctgagtgatcgatccatcctggaatcagatcctccagccccagtcaagtcttcagatgactgcagccctgaccagcatctcaactg

SEQ ID NO: 1037731 - DNA, 120 bp, Artificial Sequence
  ENSG00000225377_4 (sequence is synthesized)
caacctcgtgaatgaccctgagccagaaccatgcaactaaactctgcgtggattcatgacccacagaaactgtgagatggtagctgtttgctttgttaagcctctaagtctggaaagaat

SEQ ID NO: 1037732 - DNA, 120 bp, Artificial Sequence
  ENSG00000225377_5 (sequence is synthesized)
gtcttaagcagtagcagacaatgaacacaagattattattcagctgttgaattggaagaggaggggaagaaaaaattttcagatcacaaaatattcattgtgtaaaacttcaaaaattct

SEQ ID NO: 1037733 - DNA, 120 bp, Artificial Sequence
  ENSG00000225377_6 (sequence is synthesized)
tgtaaaacttcaaaaattctgaaatttaaggaaaaaatatcatttgttgggaatttgttgggattcattgtctcagtgccaagagacacccactctttttttttttttgagacagagtcc

SEQ ID NO: 1037734 - DNA, 120 bp, Artificial Sequence
  ENSG00000225377_7 (sequence is synthesized)
cccggccgagacactcactcttaacattttggtatattttttctctctgcacattttttatccagctgactttattttgtctcctgaaatcttcatttttaaattatagcttcagcattt

SEQ ID NO: 1037735 - DNA, 120 bp, Artificial Sequence
  ENSG00000225377_8 (sequence is synthesized)
aagaaaatgtgtctaacaaagtcttcgcaagcatacatttttcccatagttagtatacttagaatttatttgtcaagcaattttgaagggctttcactatgaaaaactttagggcttatt

SEQ ID NO: 1037736 - DNA, 120 bp, Artificial Sequence
  ENSG00000225377_9 (sequence is synthesized)
ttcactatgaaaaactttagggcttattgatattctctttaagtagaagtatgttttttattattacaaaagttatatatgtatatatatggtgtttgtgtttgtgtgtgtgtgtgtgtg

SEQ ID NO: 1037737 - DNA, 120 bp, Artificial Sequence
  ENSG00000225377_10 (sequence is synthesized)
caggcatgagccactgcgcccggccttatactgaattatataaggcgaaaagtgaacgtctcctgtaatctagaaaaatggcattataatgagtaaattttaaattttaatgtaattttc

SEQ ID NO: 1037738 - DNA, 71 bp, Artificial Sequence
  ENSG00000225377_11 (sequence is synthesized)
tataatgagtaaattttaaattttaatgtaattttccagaattttttttttttgagacctggctcaccgca

SEQ ID NO: 1037739 - DNA, 86 bp, Artificial Sequence
  ENSG00000225377_12 (sequence is synthesized)
ttggcctcctaaagtgctgggattataacgacaaggtctctccctgtcacccaggatggggtgcagtggcgcaatcacagctcact

SEQ ID NO: 1037740 - DNA, 120 bp, Artificial Sequence
  ENSG00000225377_13 (sequence is synthesized)
cactgcagcctcaacctcttgggctcaagtgatcttcccacgtcagtgtcccaggtagctgggactacagacgcgtaccaccacacagggctaattttttgtattttttatagagactga

SEQ ID NO: 1037741 - DNA, 89 bp, Artificial Sequence
  ENSG00000225377_14 (sequence is synthesized)
accaccacacagggctaattttttgtattttttatagagactgagttttgccacgttgcccgagctggtctcaaattcctgggcttaag

SEQ ID NO: 1037742 - DNA, 120 bp, Artificial Sequence
  ENSG00000225377_15 (sequence is synthesized)
acttaaatgcttataatcacatgcacacatagttttttttacacaagtggaatgttactatatgtaatttctagtaacctgcttttttcacatctcttttctctttccatgtagtgcgta

SEQ ID NO: 1037743 - DNA, 120 bp, Artificial Sequence
  ENSG00000225377_16 (sequence is synthesized)
agtgcgtaggttctcgtccaggtctgccgagtatattgtaattcatttaatcagttcttttttttttagagacggagtttcactctttttgcctgggctggagtgcaatggcgtgatctc

SEQ ID NO: 1037744 - DNA, 120 bp, Artificial Sequence
  ENSG00000225377_17 (sequence is synthesized)
gcaaactctgcctcctgggttcaaatgactctgctgcctcagccttccaagtagctggaattacaggcgtgcatcaccacgcctggctaattttgtgttcttattagagatggggtttca

SEQ ID NO: 1037745 - DNA, 120 bp, Artificial Sequence
  ENSG00000225377_18 (sequence is synthesized)
gatctgcccacctcggcctcccaaagtgaatcagttccttcttgaaagacattttgattgttttacccctttttgctattataaacaatatggcagtgaacacctttgtatgtatgtttt

SEQ ID NO: 1037746 - DNA, 89 bp, Artificial Sequence
  ENSG00000225377_19 (sequence is synthesized)
cttgaaagacattttgattgttttacccctttttgctattataaacaatatggcagtgaacacctttgtatgtatgtttttggccaccg

SEQ ID NO: 1037747 - DNA, 81 bp, Artificial Sequence
  ENSG00000225377_20 (sequence is synthesized)
tcctgagtagctgggattacaagtgtgcgctaccacacccagctaatttttatttttttttgagacggatgtcggctcact

SEQ ID NO: 1037748 - DNA, 120 bp, Artificial Sequence
  ENSG00000225377_21 (sequence is synthesized)
tgacaggcgtgagccactgcacccggcctgtctgttatttctttaggaaaaattcatacacagagactccacaatataacagaacagacatttaaactggctgtcccccaaacacaacag

SEQ ID NO: 1037749 - DNA, 120 bp, Artificial Sequence
  ENSG00000225377_22 (sequence is synthesized)
cacaacaggcttgggcctacctcagggccctcattcatgctgtctcctttgtctggaactcttttcacccccatccccacatgggctggagcatctactcatcctagcttcggctcaaac

SEQ ID NO: 1037750 - DNA, 120 bp, Artificial Sequence
  ENSG00000225377_23 (sequence is synthesized)
gggctccccagagaggactgtcctgaccactctctgccgtttcccgttcatctccctctgtctcaggtatacagaatcgcttcatctgcgacacattctcattgttgcctgtgattccct

SEQ ID NO: 1037751 - DNA, 120 bp, Artificial Sequence
  ENSG00000225377_24 (sequence is synthesized)
cactttatgcttgtgtgggttttttttagagacctggtcttgctctgttgcctgggctggagtacagtggtgcgatcatagctcactgcatcctggaacttctgggcccaagtgatcctc

SEQ ID NO: 1037752 - DNA, 120 bp, Artificial Sequence
  ENSG00000225377_25 (sequence is synthesized)
ctgcctcagcctcccaagtagttaggactacagatgcatgccaccatggctggctaatttcgaaaaattttttttgtagaggcaggttctcactatgtttcctaggctggtcttgaactc

SEQ ID NO: 1037753 - DNA, 90 bp, Artificial Sequence
  ENSG00000225377_26 (sequence is synthesized)
ctgggctcaagcgatttacaggtgtgagccaccatgcctggccctgtgtgtatttatttttacataacataataaaaatctgtggagtca

SEQ ID NO: 1037754 - DNA, 120 bp, Artificial Sequence
  ENSG00000225377_27 (sequence is synthesized)
tcttttcttaggttaggggttggaggaagggtaggggacgcgagcctgcttccatctgacgctggacgcttgtccctgccccgcgttgccttttaaattttagctcattccgagacacct

SEQ ID NO: 1037755 - DNA, 120 bp, Artificial Sequence
  ENSG00000225377_28 (sequence is synthesized)
acacacggttggaggttctgcttggagtcacacggcacacaagattgctgtcaagaaagcctgtccataaatagtggctgtacaccctcctcacttacaattcagggaaaagaagagcgg

SEQ ID NO: 1037756 - DNA, 120 bp, Artificial Sequence
  ENSG00000225377_29 (sequence is synthesized)
ggaaggaaaggaggaaaaacaacaacaacaaaagccacgacagagaacgggaaaaggcagagactgaaagcgaaggaccgtcggaggaggagggcgagagacatttatgcagtgtgtgat

SEQ ID NO: 1037757 - DNA, 120 bp, Artificial Sequence
  ENSG00000225377_30 (sequence is synthesized)
tcacgcctgtaatccctgcactttgggatgccaaggcgggagaatcgcttgagcccaggagtttcagaccagcctgggtaacatagagaaatcccacctccacaaaaattcaaaaattag

SEQ ID NO: 1037758 - DNA, 120 bp, Artificial Sequence
  ENSG00000225377_31 (sequence is synthesized)
ccgggcatggtagcaagcacctgtcatctcagcttctggggaggctgaggtgggaaaacgcttaagccagagattttgaggctgtagtgagctatgatggtgccactgcaccccagactg

SEQ ID NO: 1037759 - DNA, 120 bp, Artificial Sequence
  ENSG00000225377_32 (sequence is synthesized)
ggtgatggaaagaagggagggaggggctgggcaaggtggctcacatctgaaatcccagcgctttgagaggctgaggtgggcagatgcttgagcctagaagttcaagaccagcctaggcaa

SEQ ID NO: 1037760 - DNA, 88 bp, Artificial Sequence
  ENSG00000225377_33 (sequence is synthesized)
tgagcctagagcctgtctctacaaaaaatacaaaacagccaggtgtgatggcctgtgcctttagtcctagctacttgggaggctgagg

SEQ ID NO: 1037761 - DNA, 120 bp, Artificial Sequence
  ENSG00000225377_34 (sequence is synthesized)
agtgagctgtgatcgtaccactgcaccccagcctgtgggacagagtgagaccctgtctcaaacgacaatgaaaagaaaacaaggtaatgagagagtgagtgactgggacgggggatgata

SEQ ID NO: 1037762 - DNA, 120 bp, Artificial Sequence
  ENSG00000225377_35 (sequence is synthesized)
gatagagatgggggagagtttagatctcaagatgacgaagaaccatccatgtaaaacattccaggcagaggaaacagcaagtgcaagggactggagatgggaaggagactgggacgaggt

SEQ ID NO: 1037763 - DNA, 120 bp, Artificial Sequence
  ENSG00000225377_36 (sequence is synthesized)
tgccaagaccagagatgggggagtgtacatgaggaatacgatgcgtttatgttgagctggagctgaagggcaatacggtagttggtcctcagaagccaagttatggagttccctgggttg

SEQ ID NO: 1037764 - DNA, 120 bp, Artificial Sequence
  ENSG00000225377_37 (sequence is synthesized)
tggggagccagggacagtttttttattgcaggatgacatgatcagaggtacgcttcagcaagattaaggagtttcatgtgttgtagttggattggaggagggaaatttggggggaaagat

SEQ ID NO: 1037765 - DNA, 83 bp, Artificial Sequence
  ENSG00000225377_38 (sequence is synthesized)
ttgtagttggattggaggagggaaatttggggggaaagatcagctggaaattttcttgtgtttcaaaaacatgttcacaaatt

SEQ ID NO: 1037766 - DNA, 120 bp, Artificial Sequence
  ENSG00000225377_39 (sequence is synthesized)
tttaatgttccttccttcaaaaggaagagcctaattcctcctccccttcccagttaagtgtgaacttgcctctaactaatagaatatggcagaagtgatggtttgtgatatctaagattg

SEQ ID NO: 1037767 - DNA, 120 bp, Artificial Sequence
  ENSG00000225377_40 (sequence is synthesized)
gcggagggtgcggccagcgcggtacccgccccggcgaggcgctggggaggcccgggtggggagaagaaatggggcctgggggacggtaggagcctccgtgcggagaccactgttcaaggc

SEQ ID NO: 1037768 - DNA, 120 bp, Artificial Sequence
  ENSG00000225376_0 (sequence is synthesized)
atagtgaagttatgatatgagaagcaccaacttggcacaagacttgggaaaggcaatgaggcagcaggcaagctttaagggatgacacttaccttgagggagcaaggacaagttgtgacc

SEQ ID NO: 1037769 - DNA, 120 bp, Artificial Sequence
  ENSG00000225376_1 (sequence is synthesized)
aggggctgccaacaagatcaagctgcagaggaaacagccacctggggcgtgttcttacgttgcctggaagctgcacaagaggccaagtcaaaacatgcagaattccagttgcccatgatg

SEQ ID NO: 1037770 - DNA, 120 bp, Artificial Sequence
  ENSG00000225376_2 (sequence is synthesized)
tcacaggctgaggcccacactccagagacactgtggactgactggcacctatgagctgacctaataacagttacaccattacagctccgattctacagaacaatacatatccagttctta

SEQ ID NO: 1037771 - DNA, 120 bp, Artificial Sequence
  ENSG00000225376_3 (sequence is synthesized)
ggtctgctgggagacttcctgaaactgctcttcctggaaggagggaaacaaacaaaacaacaacaaaagaactttacaagagaaagctttttatcccagccccttcctactcccattgaa

SEQ ID NO: 1037772 - DNA, 120 bp, Artificial Sequence
  ENSG00000225376_4 (sequence is synthesized)
tgccttctccagacctcttgccaggtgagaaaattaaatgtcatcattgcttaagcccctgggagactagattctgttacttgccactgaatgcatcctaatgctgtaactgtctcttgc

SEQ ID NO: 1037773 - DNA, 120 bp, Artificial Sequence
  ENSG00000225376_5 (sequence is synthesized)
actgaaaccaacttgcaaaatttacagcacaaactctgcccatgtatgaagagaatgtaaaaaagcattgcaaacatctcttttgggaaaataaatggataacaccattttttcttttca

SEQ ID NO: 1037774 - DNA, 120 bp, Artificial Sequence
  ENSG00000225376_6 (sequence is synthesized)
aactgccttctccagacctcttgccaggtgaagaaattgagacccagagtgattatatgacctgcccaaggtggtcacgtcgttaggccatggcagagatctgaaataaaaggtcaggtc

SEQ ID NO: 1037775 - DNA, 120 bp, Artificial Sequence
  ENSG00000225376_7 (sequence is synthesized)
aaaggacacagactctgagaaatgaacatgaactagggcttagatgaataaatggagctacaacaatagttatattttagtgcaacttctgaaaattaaactaaaggatccacgggtgtg

SEQ ID NO: 1037776 - DNA, 120 bp, Artificial Sequence
  ENSG00000225376_8 (sequence is synthesized)
gaagacacaataccagggtgtgagtcaggggatgagtgctcaagaatgttctgtgtttcccaaatccactatatgaatggcacgaccactttcccaggcaactcagtctaaaacactagt

SEQ ID NO: 1037777 - DNA, 120 bp, Artificial Sequence
  ENSG00000225376_9 (sequence is synthesized)
tagttctaacttctcacctccacgcagtcacttcctaatcccacctctacggcctcttttattatgcctctcttttcccctcgccttccccttgtcaagctttcctccctgccacactct

SEQ ID NO: 1037778 - DNA, 120 bp, Artificial Sequence
  ENSG00000225376_10 (sequence is synthesized)
agttcctcctcagcacctccaagccagctgattgcaacaggctcctaacagagcttctgacctccagaatgagcaacacaagccaaaagatctaggtccaattctcgtcccaacactcac

SEQ ID NO: 1037779 - DNA, 120 bp, Artificial Sequence
  ENSG00000225376_11 (sequence is synthesized)
taatttgatcaatttgtataaaaaaatcatttatctctctgagcctattttatttctctgtgaaacaggaaaataaaagatacttcaaccaggcgcggtggctcacaccggtaatcccac

SEQ ID NO: 1037780 - DNA, 120 bp, Artificial Sequence
  ENSG00000225376_12 (sequence is synthesized)
cagatcagcaagcttctgtcagcaaggaggggtggacaatgaaactgggttcagcttgatttgttttttgagacaggtatggcaaggggctgccaacaagaattccagttgcccatgatg

SEQ ID NO: 1037781 - DNA, 120 bp, Artificial Sequence
  ENSG00000276663_0 (sequence is synthesized)
cactgctggtgccctattagcctgagtcagtcccttccagcctctgaatctatgcttattagatgttttcaggagtactgggctgtttgtttctaagacaaactgcagtaagcctttact

SEQ ID NO: 1037782 - DNA, 120 bp, Artificial Sequence
  ENSG00000276663_1 (sequence is synthesized)
taagtattacattgtgctacattaaaaattgcaggcagcttgatgttttctctttttaaaattaactctccaaattgatttcaatgtccttaaagaaacaagcaagtccttaaaaacagt

SEQ ID NO: 1037783 - DNA, 120 bp, Artificial Sequence
  ENSG00000276663_2 (sequence is synthesized)
catgcctggattaggtgctatttcaaataatgcattaaaaaaatgtttttagtatggacgttttcaaacatgcacaagagaaaaaagagtagcaaaacgaacttcccatcacccatcttc

SEQ ID NO: 1037784 - DNA, 120 bp, Artificial Sequence
  ENSG00000276663_3 (sequence is synthesized)
aacgattaagaatgactgactgatctagtaagtccaaacagaagaaaacacactcggcacgtttgtgacatgaacgttcaatgtcatgactccactttaataaaaacttgttctccaggc

SEQ ID NO: 1037785 - DNA, 120 bp, Artificial Sequence
  ENSG00000276668_0 (sequence is synthesized)
tccagagtgctcaccattacacgatggcaccacttacttctcaaaaaaatccagcaaactataacagatcagtagttatcaaccaggggcaattttgtccccagggacagtatcagaaga

SEQ ID NO: 1037786 - DNA, 120 bp, Artificial Sequence
  ENSG00000276668_1 (sequence is synthesized)
atgctgctaaacatcctacaaagtacaggacagcctcccacaacaaagaatgatcccacccaaaaggttaatagtaccaacaatgagaatccctggcgtagatccaggtatagtaagtct

SEQ ID NO: 1037787 - DNA, 120 bp, Artificial Sequence
  ENSG00000276668_2 (sequence is synthesized)
gcaaaagccaggatctacatgcagccaggcctccgtatctgcaagttccatgtcagcagattcaaccaactgtggatcaaaaatatttggagaaaaataaaaacaataaaaataacagta

SEQ ID NO: 1037788 - DNA, 120 bp, Artificial Sequence
  ENSG00000282057_0 (sequence is synthesized)
cctgctagtaatcgacgacattaggcaagagaaacagcggctcctcaagtcctgcccaaagaccgtccagaaaccccagcctcccgtcgccttctcgccgcctccgctgggagccgcaga

SEQ ID NO: 1037789 - DNA, 120 bp, Artificial Sequence
  ENSG00000282057_1 (sequence is synthesized)
tcagtccaagttgacggacaggaggcgaaatgtgcaaatgtttatggtttcatctgtatggaaaaggagctctggtaactttggccaagacttttcagtaggaaatgcttcaaaatacaa

SEQ ID NO: 1037790 - DNA, 120 bp, Artificial Sequence
  ENSG00000282057_2 (sequence is synthesized)
agcaagagctattttcaagaaagaccttctaaatttatattaggattaagcgtctgtaacgttgccactcgtcgctgaggctcctggtttcagcatgtctccttggttcccagccagctc

SEQ ID NO: 1037791 - DNA, 120 bp, Artificial Sequence
  ENSG00000282057_3 (sequence is synthesized)
tgggtgttcaggtagcagctgtggctgggagtgtctctccagtccacattccttggccatgaattttgcagccctgtttatctgatgaagacctcccagtagtgaattgctcatgacatt

SEQ ID NO: 1037792 - DNA, 120 bp, Artificial Sequence
  ENSG00000282057_4 (sequence is synthesized)
gtcacacagaccttaatgaatgatatggaaagatactgaatatttttcctcccggaatgccaaccaagcttcagtgtcccagcgccttcattccagctgatcatggcaaaggcttggtac

SEQ ID NO: 1037793 - DNA, 120 bp, Artificial Sequence
  ENSG00000282057_5 (sequence is synthesized)
tgagatccagtgagacctttgtcctacaaaaaccacattctcactggatgcctacaagtcctctctatgggactgttacccaagcctgtttacagaattttcaacaattacatctgccca

SEQ ID NO: 1037794 - DNA, 120 bp, Artificial Sequence
  ENSG00000282057_6 (sequence is synthesized)
tttgctgagtctcacttctctgcactaattgttgacttcaatttatatttttaatgtacaaatgctatcaccaacttcagtgcatgaagacctctctttcttctcttcaaacccatgact

SEQ ID NO: 1037795 - DNA, 120 bp, Artificial Sequence
  ENSG00000282057_7 (sequence is synthesized)
ttgcttggaataacagggatggctttatggcatggctttctcattatttcatgtgtcttcattttgctttcccaagccagattgtaaattccttgaaagaggagaccctgaaaactagaa

SEQ ID NO: 1037796 - DNA, 120 bp, Artificial Sequence
  ENSG00000282057_8 (sequence is synthesized)
atacctatacagacagatagacagtaaaaaaaaaaaaaaaattggacagaaagacatctgttgctctaagtaatccagaaaatttgccttaacacgttcagaagacatatttggctataa

SEQ ID NO: 1037797 - DNA, 120 bp, Artificial Sequence
  ENSG00000282057_9 (sequence is synthesized)
tatacaactcctctcctttcccccgcctgccctctgctggaactgctaatgagcagtaagatggcaaaagcaggacattgtatgggaaatgtgggaaaacaggggctagtctgactagaa

SEQ ID NO: 1037798 - DNA, 120 bp, Artificial Sequence
  ENSG00000282057_10 (sequence is synthesized)
ggtgagttgagtaactgtgatttgtgagtccacaatgggaatctttgaagtccttcatgatgtgcctttgtatgactagcaatctcctcacaagactctatggttcactgtgcacaaaga

SEQ ID NO: 1037799 - DNA, 120 bp, Artificial Sequence
  ENSG00000282057_11 (sequence is synthesized)
tgaaccaggtactgccccttcccaaacacaaatgccctccccattcaccattccctagagcgttcacttccttcatctatgaaaggcaattactagggtctagcaagactgccaatttgg

SEQ ID NO: 1037800 - DNA, 120 bp, Artificial Sequence
  ENSG00000282057_12 (sequence is synthesized)
taatgcaaagcaggagataagtgtgaaactctagactggttttctgtttcaaagggcagcaggatgtgacagctgctgaggcagccctttgcccttggagaggagaagcaggagtgtgat

SEQ ID NO: 1037801 - DNA, 120 bp, Artificial Sequence
  ENSG00000282057_13 (sequence is synthesized)
cactagatgacctctccctcctgctgtctcctgggtggtagggacagtctctctcccaacactactcttggtcaggtggctacatattatgaaaaagaggaggaaaaacatgtttttgct

SEQ ID NO: 1037802 - DNA, 120 bp, Artificial Sequence
  ENSG00000282057_14 (sequence is synthesized)
tttaaaattattattaagagagagtactctttggggaagcagaatccattagctgaattcatttcagtagctatgtttaattaagttaggcagccttaatgcaattttattatgtagcct

SEQ ID NO: 1037803 - DNA, 120 bp, Artificial Sequence
  ENSG00000282057_15 (sequence is synthesized)
ttaagagctgttctggtaaatgcccatcctataaatactagcactactttatatgtgtgatatcctttttggaagggcaaatctgaattattatccagatattaatctgcacacaaccct

SEQ ID NO: 1037804 - DNA, 120 bp, Artificial Sequence
  ENSG00000282057_16 (sequence is synthesized)
atccagacaatgcaaagatgcttcctcatattctggacattgttcaatacattcagaagggggaaaaaactgctcagatatgaccttctacattttaagtcagtggataagccagcctgg

SEQ ID NO: 1037805 - DNA, 120 bp, Artificial Sequence
  ENSG00000282057_17 (sequence is synthesized)
ttgcatcccaaaacatacttttgaacatcagtttcaccttactactgaccaagtaattgatttctgcatttcattatgtaaattaaacactagactttgaattactagaaatacacagtt

SEQ ID NO: 1037806 - DNA, 120 bp, Artificial Sequence
  ENSG00000282057_18 (sequence is synthesized)
agccaataaacctttcttataaaatgacagtattttaatttattagatgcgttggcatgtattcatgcctaagatttcatcaatcaattttccattttaaaaagctgtctctggaagcaa

SEQ ID NO: 1037807 - DNA, 120 bp, Artificial Sequence
  ENSG00000282057_19 (sequence is synthesized)
cagtggagagatgctgagttccaaaagcaatgttgtgaaaggcagcaggtctagcgttccaggcacatgcttaactaaattctagtcaataaccatgtggctccaagtataagcccacat

SEQ ID NO: 1037808 - DNA, 120 bp, Artificial Sequence
  ENSG00000282057_20 (sequence is synthesized)
tttttaaagtatctaccttctgaactgactcttttggaatgtcagaattttaaaaagaaaatatttaaatttctctatttaagaggtgtgcaatgtttgttcaatattggagcaacctct

SEQ ID NO: 1037809 - DNA, 120 bp, Artificial Sequence
  ENSG00000282057_21 (sequence is synthesized)
gatattattttaaaatatttattttgccactttgacagccttctacactgcccttgggttttaattttgtttacagtactaaacttcaatagttggcttcagattaaatgaatattagta

SEQ ID NO: 1037810 - DNA, 120 bp, Artificial Sequence
  ENSG00000282057_22 (sequence is synthesized)
tctgatggatggcagacagctgaaccaggacatagtgagaagaaagccatctgaaaaccaggaagagagccctcaccagaatctgaccatgctggtgccctgatcttggactttcagcct

SEQ ID NO: 1037811 - DNA, 120 bp, Artificial Sequence
  ENSG00000282057_23 (sequence is synthesized)
cttaaatggaagtctatacaaagcacagcaagcctgtaggagaaggacgtgagccggatggggtaggagtgggcactgcggattatggattcacagagagagcatctgagccgagacctg

SEQ ID NO: 1037812 - DNA, 120 bp, Artificial Sequence
  ENSG00000282057_24 (sequence is synthesized)
tttcatctgtatggaaaaggagctctggtaactttggccaagacttttcagtaggaaatgcttcaaaatacaaagcaagagctattttcaagaaagaccttctaaatttatattaggaca

SEQ ID NO: 1037813 - DNA, 120 bp, Artificial Sequence
  ENSG00000282057_25 (sequence is synthesized)
aattctggtgtggtgtgaatgctgtggctcagtccgaacatgtttttttctgtaattttatcattattacacgattgcaatatcagttttgttttttaattggaaagcaacattttctac

SEQ ID NO: 1037814 - DNA, 120 bp, Artificial Sequence
  ENSG00000282057_26 (sequence is synthesized)
tgttgaaagacgttttttgacaaattgacccttcctagtattgagtactaagttgaggactgcatctacttgttttttacattatagagaataaaatactattgatttgaaaaatacata

SEQ ID NO: 1037815 - DNA, 120 bp, Artificial Sequence
  ENSG00000282057_27 (sequence is synthesized)
ggagcgttgcgggcggcggggtagacccgggcagtttggccccagtcctcacccctctgagggccgaagtccgccctgcgctgcgtgggaggctggcgcggagggcgccgcggcccagtt

SEQ ID NO: 1037816 - DNA, 120 bp, Artificial Sequence
  ENSG00000282057_28 (sequence is synthesized)
gtgtcacttttcccgtccgcccccctgttgactagtcctcccagcggggcagcgagttgccgtgctgtgccagacgtagagggccccagtgtgtgatgttccctttcctgagtaacacca

SEQ ID NO: 1037817 - DNA, 120 bp, Artificial Sequence
  ENSG00000250670_0 (sequence is synthesized)
gaagatagagactatgactattttgcaaattcccaggactcaggagggagactgaaacacagcaggtctgggaacagcatgaagaagcagaattggcggctccaagctaactggggcagg

SEQ ID NO: 1037818 - DNA, 120 bp, Artificial Sequence
  ENSG00000250670_1 (sequence is synthesized)
ggatcagtagcagctgcggtttttcttctaacagtgaggcccctcttctgcacgtctgctggagtttgcgggaggtcctctccagaccctctgtgcctgggtatcaccagcagaggatga

SEQ ID NO: 1037819 - DNA, 63 bp, Artificial Sequence
  ENSG00000250670_2 (sequence is synthesized)
ttcttctggaagcttcatcccagagggtcacccaccagaatccagctggagctctcctgtatg

SEQ ID NO: 1037820 - DNA, 120 bp, Artificial Sequence
  ENSG00000250670_3 (sequence is synthesized)
cctcctgagtagttgggattacctcagtagaattcagttgggtatttactttattctaattttacttgccttctaatgtaaatgattatataaagtatttcttccagttggtgtgtatgg

SEQ ID NO: 1037821 - DNA, 120 bp, Artificial Sequence
  ENSG00000268499_0 (sequence is synthesized)
catagtaattttcttaaatatatatatatatattttatccactagagctacttagtgaagtttctacagatgaaatacaaagacatctagaatttgatttaaaatattccaggttgggtg

SEQ ID NO: 1037822 - DNA, 120 bp, Artificial Sequence
  ENSG00000268499_1 (sequence is synthesized)
gccaagaattcgagaccagcctgggcatcgtagcgacaccctgtcactacaaaaaaatttattttacttatttattttttagagtctcactctttcacccaggctggagttcagtggcgt

SEQ ID NO: 1037823 - DNA, 120 bp, Artificial Sequence
  ENSG00000268496_0 (sequence is synthesized)
accatgaccacaggggcctcttccctgtcccccctcgcctacccccgtctgtcctccatgcagcagccagccagccaggtgatccttttaaaacacaatccgatcaagttcttcctctgc

SEQ ID NO: 1037824 - DNA, 120 bp, Artificial Sequence
  ENSG00000268496_1 (sequence is synthesized)
ttaaaacgctcagtgattcccctcagacatggattaaaatccctgttcctcgccctgacctacaagggcctgggtggtcagtcctggatctgtctgcctctggcctcagcccctcccagc

SEQ ID NO: 1037825 - DNA, 120 bp, Artificial Sequence
  ENSG00000268496_2 (sequence is synthesized)
ctctgcacagccctctgcctggctccttcctggaggacccatccctgctagtggggttacccgacctacccctgccctgcactgacccccgccctcctacctcgttgcacaccagcctct

SEQ ID NO: 1037826 - DNA, 120 bp, Artificial Sequence
  ENSG00000268496_3 (sequence is synthesized)
gagatgaccttctcggtcctgtttaccgaagtttcctggtactgggggcagcgcctggggcagagcaggctctgtcaacccccactgaatacatacgctgtgcaggtgcttagcactcgg

SEQ ID NO: 1037827 - DNA, 120 bp, Artificial Sequence
  ENSG00000244040_0 (sequence is synthesized)
agagcgccaagaagcagcccaggcgatcccaaggcgcacaagtgctctcaccaggctgcgcgctggcgggtcggtgcacagggacggggtcgccgcccacgcgcgcttggttcagggagc

SEQ ID NO: 1037828 - DNA, 120 bp, Artificial Sequence
  ENSG00000244040_1 (sequence is synthesized)
ccaggctgtccctacccgcggctacaaaagctcgccgagtcttcctgtccacccaatcgccccacatgtcagcggttggtcgcctcgcggtgcagtgctgggcacgcgagcccctcccgc

SEQ ID NO: 1037829 - DNA, 120 bp, Artificial Sequence
  ENSG00000244040_2 (sequence is synthesized)
agtcattctcagcacaagcaccagcctggagccccgcagcgacagagctgagagcccccaagccgcagaggtcgtgcggagcagaagaaacacacgtgttcttgtgtgtaaacccagtcc

SEQ ID NO: 1037830 - DNA, 120 bp, Artificial Sequence
  ENSG00000244040_3 (sequence is synthesized)
atggaagagaccgtctgcttgtccctcctgatctctgggcccagacaaccagtagtcaccattccaagtgaggggtggctgcaactctacagccccgttcgtctctcctcactgtcaaag

SEQ ID NO: 1037831 - DNA, 120 bp, Artificial Sequence
  ENSG00000244040_4 (sequence is synthesized)
ctgctgagaccccagactcgacacttgaaagaaacccatgtctgtgaagcacttgtggaccattcaagattgtggaagaatcactcaagagaaggagataggagacggctgctgctgttc

SEQ ID NO: 1037832 - DNA, 120 bp, Artificial Sequence
  ENSG00000244040_5 (sequence is synthesized)
cagtctctccttaggcagacttgagtttctacccactcttcccaagcagccgcccctccgcacccgagcgagccaaagacctggcgggctgagtactcactgcgcgctggacacatgctg

SEQ ID NO: 1037833 - DNA, 120 bp, Artificial Sequence
  ENSG00000244040_6 (sequence is synthesized)
agccggcactgcagggacacagggcgagccgctggatgcagacctgtggccgcggcagttgggcttatcttgcccatgaagttgcctctgaagaaccaagtccaactgtgtatgctgaga

SEQ ID NO: 1037834 - DNA, 120 bp, Artificial Sequence
  ENSG00000244040_7 (sequence is synthesized)
tgtctggctacttcctgattgacagttctggcaaggtggcattgggccctggcttttcctctggaggcatcatcacttataggaaaatgtcccctgaagtccaaggatcaaagctgctgg

SEQ ID NO: 1037835 - DNA, 120 bp, Artificial Sequence
  ENSG00000244040_8 (sequence is synthesized)
aacactgagaagctgaacaaaggagaactgtttctcatcaaacccagacttccagacttccaatagggtagaatgagcaagtcagcaaatcatcttccttggaaacagtgataaaactag

SEQ ID NO: 1037836 - DNA, 120 bp, Artificial Sequence
  ENSG00000244040_9 (sequence is synthesized)
atgacattgtcaacaacagccatttcagaaatctagaaaatgaccaaaggcaaacaacaaactgagaagcatttttttttccatgaaaaatcgctctatttctgcaaaaatagtgggagt

SEQ ID NO: 1037837 - DNA, 120 bp, Artificial Sequence
  ENSG00000244040_10 (sequence is synthesized)
ctatggcttctcatccagggctgtttctctccccaccccagctcagtcagtacaaaggttctggcagcatgaggcagactgaacagacctgaagtttgattgctggaagaaactgactcc

SEQ ID NO: 1037838 - DNA, 120 bp, Artificial Sequence
  ENSG00000244040_11 (sequence is synthesized)
aggtttggcagagggtgagaaacctactcccagccatgttgtctggtgacacagtgaccttagggacaagtgaatagggaaggccagtgattcattaacctgaggttgcagtcctggttg

SEQ ID NO: 1037839 - DNA, 120 bp, Artificial Sequence
  ENSG00000244040_12 (sequence is synthesized)
gggaaagcatcagaatggcagataagctagaaatttagtagggatatgctggaaatgagacaaccccaaaggggcttgaccccaaagttgtccacacaccccagctgccttctgagcaga

SEQ ID NO: 1037840 - DNA, 120 bp, Artificial Sequence
  ENSG00000244040_13 (sequence is synthesized)
tgtagggagagaccagagaaggcctaggctatccacacatctctggctaacccaggctgtaaacctgtggaggagacacaagaggtggattgattgctaatgggcatatgggggatctta

SEQ ID NO: 1037841 - DNA, 120 bp, Artificial Sequence
  ENSG00000244040_14 (sequence is synthesized)
ctggttgataggaacattctcaaattggattgtggtgatgcttgcacaactctaagtttatcccaaattgctaaattttacactaaaaaggggtgaactttagggtatataaattataca

SEQ ID NO: 1037842 - DNA, 120 bp, Artificial Sequence
  ENSG00000244040_15 (sequence is synthesized)
agctctttaggatcctccttgcttgataacagaatcactttctttcttacgtttgtcatccagaagtctaaagtcagtagcagtaatggaaagttgggctaatgtggagatattccaaac

SEQ ID NO: 1037843 - DNA, 120 bp, Artificial Sequence
  ENSG00000244040_16 (sequence is synthesized)
agagcaagagcaaatgggattcttggcttgtctctcatcgtgatcctgattgaagaccactggacacatctgtcaagactctaaccgcaatccattggaaatcactggagagccaaagga

SEQ ID NO: 1037844 - DNA, 120 bp, Artificial Sequence
  ENSG00000244040_17 (sequence is synthesized)
ggaaatcactggagagccaaaggaaatgaagtctcagacatattgtccaggctggaatgtagcggctattcacaggcatgatcatagtgcactacagcctcaaactcctgggctcaagca

SEQ ID NO: 1037845 - DNA, 120 bp, Artificial Sequence
  ENSG00000244040_18 (sequence is synthesized)
tagctgggactacagatgtgtgttagcggctatggcagccatcttgtgaccaggaggaagcttctgagaatcacagagatgcaacctctgaagctgccaaaccactgccagcagctgcct

SEQ ID NO: 1037846 - DNA, 120 bp, Artificial Sequence
  ENSG00000244040_19 (sequence is synthesized)
aaccactgccagcagctgcctatctccagacatcttggttggtctaattgaaggcaatggagaagtaagtctttatggatcaaaatcttagctctagaaaaggcctaaggcaatagctaa

SEQ ID NO: 1037847 - DNA, 120 bp, Artificial Sequence
  ENSG00000244040_20 (sequence is synthesized)
ttgagactatgcatcactattaaggcatcttcactaaagggcgctgtggaaacgctgcctgagatgcagacacctgtcagaagggggctaaatttcaaacaaggaacgtggtgttgcatc

SEQ ID NO: 1037848 - DNA, 82 bp, Artificial Sequence
  ENSG00000244040_21 (sequence is synthesized)
ggtctcgatctcctgacttcatgattcagaagaaacacacgtgttcttgtgtgtaaacccagtccatggaagagaccgtctg

SEQ ID NO: 1037849 - DNA, 120 bp, Artificial Sequence
  ENSG00000244040_22 (sequence is synthesized)
ttctgtcagaacaataattaactatttctgattatagatattggtcatctacaatgatttattcagtcttttatgtcccgcataagggcttagaatgctttaaatttctaagaccatcaa

SEQ ID NO: 1037850 - DNA, 120 bp, Artificial Sequence
  ENSG00000244040_23 (sequence is synthesized)
tagccaggactcacctgaaaactatatatatttttaaaaagacgtatgctctgggacaccatatgctaacatttgttgagcacacagtttgctacagaggttaagaggtgtactatttaa

SEQ ID NO: 1037851 - DNA, 120 bp, Artificial Sequence
  ENSG00000244040_24 (sequence is synthesized)
atctaacttcctcaaggggctcacactattacaatagtaagctaaagagatagaagaaaagtttatatataaaatctcagtacagggatggggttggtaacaaataagatgctgccactt

SEQ ID NO: 1037852 - DNA, 120 bp, Artificial Sequence
  ENSG00000244040_25 (sequence is synthesized)
acacttgataaattataaaatatctattgcattcattattggaggctgacccttataaaaaccttgtgggtactgcaaaagacagggaaaccgaggctcagagtggttcagcaacttgtg

SEQ ID NO: 1037853 - DNA, 120 bp, Artificial Sequence
  ENSG00000244040_26 (sequence is synthesized)
gggaaaccgaggctcagagtggttcagcaacttgtgtgaggtcacatacctcatgtcaaagctgagatttaaatgtgtgtggctaggctggacatggtggctcacacctgtaatcctagc

SEQ ID NO: 1037854 - DNA, 120 bp, Artificial Sequence
  ENSG00000244040_27 (sequence is synthesized)
gagttcaagaccagcctggacaacataatgagacctcatctctacaaaaaataaaaaattagctgggtgtggggccacgcaccccaaggttctcaggaggctgaggcaggaggactgctt

SEQ ID NO: 1037855 - DNA, 71 bp, Artificial Sequence
  ENSG00000244040_28 (sequence is synthesized)
gatcatgccactgcactccaaataaatgtgtgtggctgattctcatgcaaatattggtgaagatctggtag

SEQ ID NO: 1037856 - DNA, 120 bp, Artificial Sequence
  ENSG00000244040_29 (sequence is synthesized)
gtggctgattctcatgcaaatattggtgaagatctggtagtgatgtaaattggtagaacctcagtgggagataactttgcaatagctatcaaatgaaaactgtgtatattctttgtttca

SEQ ID NO: 1037857 - DNA, 120 bp, Artificial Sequence
  ENSG00000244040_30 (sequence is synthesized)
ggaatttcacttctaagatgtttttaatatagcagaaatggttatccataaagaattagttcaatacattttatctgtaaaatggaatgcaatgcggccattaaaaaggaggcatatctg

SEQ ID NO: 1037858 - DNA, 120 bp, Artificial Sequence
  ENSG00000244040_31 (sequence is synthesized)
gcatcttggccccggccggcgcgtttttcctcccccgccttgtcgctctctgggactggaagggttaacgctctgctctcagcccgggagccccttgatcttgattaattcagccttcgc

SEQ ID NO: 1037859 - DNA, 120 bp, Artificial Sequence
  ENSG00000244040_32 (sequence is synthesized)
gcttaggcccgccagacgggcgggggctctcgctcgctcacagagagaaaaacagtaaaagcaaaggaacaatatgcagacaagattcagccgaggatcagataaaagcaaagatttctc

SEQ ID NO: 1037860 - DNA, 120 bp, Artificial Sequence
  ENSG00000244040_33 (sequence is synthesized)
accactggacacatctgtcaagactctaaccgcaatccattggaaatcactggagagccaaagaactctctttcattgtcctggctggaagcactggattcctcctttcaaatgaactaa

SEQ ID NO: 1037861 - DNA, 120 bp, Artificial Sequence
  ENSG00000244040_34 (sequence is synthesized)
aatattttccaagatgtcaagtcaatctgggcaaactttctcaacataaccatccctacattccaatatccctctttttcatttttcctttaaaaataaacgtgcatttttttctcaaaa

SEQ ID NO: 1037862 - DNA, 120 bp, Artificial Sequence
  ENSG00000244040_35 (sequence is synthesized)
ttcagaagaggagaccaatggggagcattggaatgatttggttgcaagcatactacactacttgtaaactgcagacacaggcttaaaaaaagtgaaaaactaaccatgcaataaagaatg

SEQ ID NO: 1037863 - DNA, 120 bp, Artificial Sequence
  ENSG00000244040_36 (sequence is synthesized)
gataggtgatgggatctagcttctgatggtttctattttattgaatgtctaatagggcaagaatttgaaaaacgagaatgtttgccatgcaggaggacctgggaaggagataacacattt

SEQ ID NO: 1037864 - DNA, 120 bp, Artificial Sequence
  ENSG00000244040_37 (sequence is synthesized)
acagggagaaagattgggattcagttgggaggagtaactgaggaaaggggtcactcaaaatattttgtattttaggtcctttttctattaaggaggaatggattatcaaagccttaacat

SEQ ID NO: 1037865 - DNA, 65 bp, Artificial Sequence
  ENSG00000244040_38 (sequence is synthesized)
ctcaaataagataggcctcccaggttaactaatttcagagcaatttttcagatttagaaaattgg

SEQ ID NO: 1037866 - DNA, 120 bp, Artificial Sequence
  ENSG00000244040_39 (sequence is synthesized)
agttcaagaccagcctggccaaaatgagtttttctctgtcacctagattgaagtgcaatactgtgatcatggcttactacagcctcagcttcccaaacgatccttctaatctcagcctcc

SEQ ID NO: 1037867 - DNA, 120 bp, Artificial Sequence
  ENSG00000244040_40 (sequence is synthesized)
cagcctcctgagtagctgggaccacaggaatgtgccatcttgcttgtctaactaaaaaaaaattttttattttagacatggagtctcactattttgcccaggctggtgtcaaactcctgg

SEQ ID NO: 1037868 - DNA, 120 bp, Artificial Sequence
  ENSG00000244040_41 (sequence is synthesized)
tcaaactcctgggcccaaggaatttacttgttttggcctcctaaatccccttggattataggtatgagccactgtgcccagtctaagtagaattttaaaaatctccttttctaaagaaaa

SEQ ID NO: 1037869 - DNA, 120 bp, Artificial Sequence
  ENSG00000244040_42 (sequence is synthesized)
attgggaagttatattgaaatgtgtctggtgcaaccagtggagtttaaattatttttgaccaaaatggattctgaagaaatggtatggatagaaaacaaagaatatttgattaagtgaaa

SEQ ID NO: 1037870 - DNA, 120 bp, Artificial Sequence
  ENSG00000244040_43 (sequence is synthesized)
aatatagaatggtctgcaagatatattaacttttttacaaaagctgttccccacacttcttcgtgttgtttgaaaagacgtgaaggctcagacaggccttcattgtgacttgcccaggat

SEQ ID NO: 1037871 - DNA, 120 bp, Artificial Sequence
  ENSG00000244040_44 (sequence is synthesized)
gagtagcagggctggaattcctactcaggagtccagatttataggcttcctctttgctttatcctatttcatagctgtctctgttgccagagccatggaagggctttaaggagtggaaag

SEQ ID NO: 1037872 - DNA, 120 bp, Artificial Sequence
  ENSG00000244040_45 (sequence is synthesized)
gttggtaattgggttttcctttttgaaagaccatgaggaacaatgtggaggacggactggagttgacctaagtggaggctcagactctgggtagaaggtttttatagcagttcttatgag

SEQ ID NO: 1037873 - DNA, 120 bp, Artificial Sequence
  ENSG00000244040_46 (sequence is synthesized)
aactgattacttcactagggcattggccctagaacttctgaggaggagaagggtgtggatttacttagcaggcagcaatggcaggacctggtgatgatcatatttgaggtggtacaagac

SEQ ID NO: 1037874 - DNA, 120 bp, Artificial Sequence
  ENSG00000244040_47 (sequence is synthesized)
aaggagtcaacaataagtcccgagtttcagacttggatacctgggtagatggtagggctgtttgctgaacaagaggaaacaggagaaagagcagttttaggggaaacaatcatgggaata

SEQ ID NO: 1037875 - DNA, 120 bp, Artificial Sequence
  ENSG00000244040_48 (sequence is synthesized)
gatttgaaatgtcttccagaagcaggtgggaaatgccggcttagaatgcagaagagctcagggatggagctaaatacaaggaagtcgtcatcagaggttgaaggattgctgtgaaaggat

SEQ ID NO: 1037876 - DNA, 120 bp, Artificial Sequence
  ENSG00000244040_49 (sequence is synthesized)
cttttcttttgggttccttggcccctacccctgagtgtgatttccagggtttcttattcgaaggccatgagcagaaacttctcacggcacgtcacctcatccaaatgccacagaaatgaa

SEQ ID NO: 1037877 - DNA, 120 bp, Artificial Sequence
  ENSG00000244040_50 (sequence is synthesized)
aagtgaaaccactggggacagactcagaaatcaaaacaaaacaaattctcctctcagaggcttggtttccatttgtgccagtgtaattaaacaattctttctttcttttacttggaactc

SEQ ID NO: 1037878 - DNA, 120 bp, Artificial Sequence
  ENSG00000244040_51 (sequence is synthesized)
ttcatttgaccaccaggaacttccctctggcaggggcaacagccactccaaggacttaccccagagatttcagagcagaagcaacggcgtttcctcttgaactgttatttctctgcccaa

SEQ ID NO: 1037879 - DNA, 120 bp, Artificial Sequence
  ENSG00000244040_52 (sequence is synthesized)
ggaatcttcttgactgtcattccactaacccttcatgggaaatttgacctctgggctctataacagatctcaaattcatagtgaaactgtggaagactcccattcattaaaaatcccatt

SEQ ID NO: 1037880 - DNA, 120 bp, Artificial Sequence
  ENSG00000244040_53 (sequence is synthesized)
catactgtgcatgtgaagtcaagaaaccacattttgggttgtagaggcagccactcaaaatgaccctcctgaccagttgttcctgttataatgtacatttcctgtgaattccaaggaatt

SEQ ID NO: 1037881 - DNA, 120 bp, Artificial Sequence
  ENSG00000244040_54 (sequence is synthesized)
catgaatagtggaaaaaaagaagtattttcttatttcactttttatatagacactaaagctttgttgggaggttacatgggcatgggccagggacattttctcagtggcagctatcaact

SEQ ID NO: 1037882 - DNA, 120 bp, Artificial Sequence
  ENSG00000244040_55 (sequence is synthesized)
gggactatgataaagtatcatgggtgcagaatttgtctggattcaaggtatctagagattgtttacttgctacaaacaggatctaatgctgactagattggtgaccttggcaagccactt

SEQ ID NO: 1037883 - DNA, 120 bp, Artificial Sequence
  ENSG00000244040_56 (sequence is synthesized)
catctttccaggcttcattttttttttctctaagtaaaagagaaatgggatcaagtgattactaagttcccttctgggcctaaaaagttatgattttataaatgacactaaactaattag

SEQ ID NO: 1037884 - DNA, 120 bp, Artificial Sequence
  ENSG00000244040_57 (sequence is synthesized)
acaaatatgttttgagagcctattatgtgcctgtcactctgctcggtcctggggaaacttacgacaaaggccatagtacattgccctggtgggctacaagatcatgtgttccaggagcag

SEQ ID NO: 1037885 - DNA, 120 bp, Artificial Sequence
  ENSG00000244040_58 (sequence is synthesized)
caacagcctgagctttctatttctctctgtcacattcttagtttgctcagtgtaaaatggaatcaaattccaactctttattatctgtcttctccactagtgtggagggcagcacttttg

SEQ ID NO: 1037886 - DNA, 120 bp, Artificial Sequence
  ENSG00000244040_59 (sequence is synthesized)
tttcttttattctttgctgtgtctccaatacttggaaaaatgcccaaaacattttttgtgattgatgtacatggtgcaatgatgaggtacaagtttgaaggatacatctaaaggtcatgg

SEQ ID NO: 1037887 - DNA, 120 bp, Artificial Sequence
  ENSG00000244040_60 (sequence is synthesized)
aagaatgagctacaggaatggtctttacactgcagtatgcttatctcaaaagagtttacaaagactttccatggatgtgtgggcatggatagctttgggggaatcaatttccagatccag

SEQ ID NO: 1037888 - DNA, 120 bp, Artificial Sequence
  ENSG00000244040_61 (sequence is synthesized)
aacttccacatgaacaatttcccaaagttgatctgtctgaatgtccactgagagagttgtcctgtcggcttctttcccctcttaactttctacacttgctctcctctcacttaaagaact

SEQ ID NO: 1037889 - DNA, 120 bp, Artificial Sequence
  ENSG00000244040_62 (sequence is synthesized)
aatgaatttttttttctagtcttactgagatgcattctctcaggtggtaaaaagaaacagaagaaacccttggtggtataggtacaggcttgggtcagtaaatggctataatgactggct

SEQ ID NO: 1037890 - DNA, 120 bp, Artificial Sequence
  ENSG00000244040_63 (sequence is synthesized)
aataagatcctgccactgcactccagcctaggtgacagaccgagcccctgttgcaaaagaaaaacaacaaacaaacccaataatttttgataatagatcacaatgtgattttggtatata

SEQ ID NO: 1037891 - DNA, 120 bp, Artificial Sequence
  ENSG00000244040_64 (sequence is synthesized)
attcaaaggaaactcaaagaattgattgacattgccgtagcaagatttttcccatttccatctacttattttaaagttttctcaaggtttacatctataaaaacaaataatagaaataga

SEQ ID NO: 1037892 - DNA, 120 bp, Artificial Sequence
  ENSG00000244040_65 (sequence is synthesized)
attgatggagaactctgtctcattctgtcaataaataatattaatcaacagatacataagtgaattggaaagacaataggcttctttttcaacaaaaggcacattttcaatacagttttc

SEQ ID NO: 1037893 - DNA, 120 bp, Artificial Sequence
  ENSG00000244040_66 (sequence is synthesized)
gtctttatggatcaaaatcttagctctagaaaagatttgattaagtgaaacaaagccccagctgctggagcagaggttccacttgggttccacagacacccacagcccaaatccctggag

SEQ ID NO: 1037894 - DNA, 120 bp, Artificial Sequence
  ENSG00000244040_67 (sequence is synthesized)
acagggcgagccgctggatgcagacctgtggccgcggcagtcatctttgaggaaggagtgctcacattcactctcctcctgctcttggcttcagaacctggaaggtaaagccactgactt

SEQ ID NO: 1037895 - DNA, 120 bp, Artificial Sequence
  ENSG00000244040_68 (sequence is synthesized)
cctgaaaacctagcagctccatttgcagtggcgtgtaaggtccatatgtatggatggcttgcatgactggcctggaaactgacgccaaaggaattcccatgaaaatgcttttgtcttgag

SEQ ID NO: 1037896 - DNA, 120 bp, Artificial Sequence
  ENSG00000244040_69 (sequence is synthesized)
ccaaggagcctggggtaactttgagtaaagaatgaccatgaccacttgtttcagaaattttaagtagctttggctacttaagatttggctttcattttctagtgtgatgtgaaagaaatg

SEQ ID NO: 1037897 - DNA, 120 bp, Artificial Sequence
  ENSG00000244040_70 (sequence is synthesized)
ctgcttgcccaattaattggtagtagaggaaaatccatgcaagcacctgaaatgagagtgatttgtatgtgaacttcctactttctttaaaattcagaattctcagaaggacgagtgagt

SEQ ID NO: 1037898 - DNA, 120 bp, Artificial Sequence
  ENSG00000244040_71 (sequence is synthesized)
gcatttgtccccagctagcaagtactgatgctctaaaagcatcatgtgaagtcaaggcaattgggatgttttacaggagcagttaactatctcgacaacaactctttgatgattttatag

SEQ ID NO: 1037899 - DNA, 120 bp, Artificial Sequence
  ENSG00000244040_72 (sequence is synthesized)
ccaagaattcttgacaatgagcagaatttaggaagtgacacacatgtgtgtacttttaaaaaaaggaagtaggcattttgacttttcagtggattggagagggcattattaatacaatat

SEQ ID NO: 1037900 - DNA, 120 bp, Artificial Sequence
  ENSG00000244040_73 (sequence is synthesized)
tggcacactgtctgtctatgtaaattaggggaccgaactgaaagaaatgagagattttgcatgttcttactcatatgtggcagctaaaaatttaaaaagttgaattcatggagatagagt

SEQ ID NO: 1037901 - DNA, 120 bp, Artificial Sequence
  ENSG00000244040_74 (sequence is synthesized)
agaatgaggttacaagaggctgggaaaggtagtggggagtgggggacaaagtgaggatggctaatggagacaaaaatatagttagaatgaataagatctagtatgcagtagcacaatagg

SEQ ID NO: 1037902 - DNA, 120 bp, Artificial Sequence
  ENSG00000244040_75 (sequence is synthesized)
gtgactacagttaacaataatctattgtttattttaaaataattaagagtggagctggaatgcttctaacacaaagaaatgataaatgcttgaagtgatggatatcccaattaccctggt

SEQ ID NO: 1037903 - DNA, 120 bp, Artificial Sequence
  ENSG00000244040_76 (sequence is synthesized)
atctcataaagatatacaactattatgtacttgtaataattaaaaataaaaataaataaataagaaggaaataagaatgagacagaggagaccggaaatacaatttagattcaaaaccaa

SEQ ID NO: 1037904 - DNA, 120 bp, Artificial Sequence
  ENSG00000244040_77 (sequence is synthesized)
gatgaattagctaggactctttcttgtaaggagcaaatgaacaacacatttcaaaggtggccaaaaaagtataattcaaaactttcgtgttttattgtttattgttgactgtgccccttc

SEQ ID NO: 1037905 - DNA, 120 bp, Artificial Sequence
  ENSG00000244040_78 (sequence is synthesized)
tctccaaaccacattcatttatttacactttttgcattattcttgcttacgtgtttgtgggaaggtagccccccagatcagcttgggaagtaagggaacctaaaaagaagtttgtagttc

SEQ ID NO: 1037906 - DNA, 120 bp, Artificial Sequence
  ENSG00000244040_79 (sequence is synthesized)
gggaggttgaggcaggaggattgctttaagcctggataccagcctcagctacaaagtgagacctcatctctacaaaaaattaagaaaaaaacttagccaagcatagtggcatgtgcctat

SEQ ID NO: 1037907 - DNA, 87 bp, Artificial Sequence
  ENSG00000244040_80 (sequence is synthesized)
tcagctacaaagtgagacctcatctctacaaaaaattaagaaaaaaacttagccaagcatagtggcatgtgcctatagtcctgaagc

SEQ ID NO: 1037908 - DNA, 120 bp, Artificial Sequence
  ENSG00000244040_81 (sequence is synthesized)
gcattccagcctaggcgacagagcaagacactgtatctaaaaaaaaaaaaaagtttttatatattcacatattgccccctaattcattaaacctcaggtatttagccccttcaaagctgc

SEQ ID NO: 1037909 - DNA, 120 bp, Artificial Sequence
  ENSG00000244040_82 (sequence is synthesized)
cgctgacaaatgccctgtaagccttagcacacatggggtgggcctggctctgagcttcactgggtcccactgtagtgcctgaagaatgtcctcacaggaaactgaagattggtgacagac

SEQ ID NO: 1037910 - DNA, 120 bp, Artificial Sequence
  ENSG00000244040_83 (sequence is synthesized)
gggcctgtcagtggctctagtttttactctcatggaagcaaaacccaccaggcacttttttggctaatgggttcaaggcaccaaaatgcatttagaggtgttggccgtggcaagggctgc

SEQ ID NO: 1037911 - DNA, 120 bp, Artificial Sequence
  ENSG00000244040_84 (sequence is synthesized)
agtggcgctgccaagttctgcagatgctgtcccaggtccccctggcctctcactgagcagctctcccattcctcagtcctcatgttcagccaggtttcctctcctgctcttatgctgtcg

SEQ ID NO: 1037912 - DNA, 120 bp, Artificial Sequence
  ENSG00000244040_85 (sequence is synthesized)
ccctgaaggcccagcgctctcacttgcagtgtggtgagactggtttgcaaactccaaaaagccccatgtctgtcttactcccactcttagtttagccagaactgcagggagatagattta

SEQ ID NO: 1037913 - DNA, 120 bp, Artificial Sequence
  ENSG00000244040_86 (sequence is synthesized)
ttactcccatacaaacatccccacacctaattattcttcctgaagcattcattacttcccttaaaaaattacttagagcacccgactggtgttctattctcaatctgatttgcatcagag

SEQ ID NO: 1037914 - DNA, 120 bp, Artificial Sequence
  ENSG00000244040_87 (sequence is synthesized)
acaatgacacattctcaagtcagccttcttgagcagcagggacaagagtccttcactttgatggaaggaggaagtggatgctttctgataaatagtgaagccctttctccccagtgcctg

SEQ ID NO: 1037915 - DNA, 120 bp, Artificial Sequence
  ENSG00000244040_88 (sequence is synthesized)
taaaggtcaacatcattttcaccttgaaccctcacctcgaaattgctctcaaggtgaagtatggattcctggctgactttcacatgccctaatacatggggatgttatgtgacctaaaaa

SEQ ID NO: 1037916 - DNA, 120 bp, Artificial Sequence
  ENSG00000244040_89 (sequence is synthesized)
actcctgcacaaggtgagatgacacgtcattacagactgtaatttctactgcgaactaacacacatctggaaggaagtaactttatgaggcagaaaattaaagcactcacttccagcttt

SEQ ID NO: 1037917 - DNA, 120 bp, Artificial Sequence
  ENSG00000244040_90 (sequence is synthesized)
gcctatgctttaccacagtcagaatacacaccactattttctgaaaagccaaaaaagcaaataaggtattgattgaatataaaagaaaagagaatttggtagtaaataataaacaagaaa

SEQ ID NO: 1037918 - DNA, 120 bp, Artificial Sequence
  ENSG00000244040_91 (sequence is synthesized)
gtttgaatgcctagtctggagggtgaaaataaaatcactttccccataagtatcactttactaccttgtactcttgtactgtggtgcagggaagtggattcagtcgtttttaaaacaagg

SEQ ID NO: 1037919 - DNA, 120 bp, Artificial Sequence
  ENSG00000244040_92 (sequence is synthesized)
actgtgttacaaccataggcagaacattgttctagaacagagaaatgtacaaaaagaagtttgctacaaaaaagaatttcttatgaccaattagtcttggtgaatcatttctttccaaag

SEQ ID NO: 1037920 - DNA, 120 bp, Artificial Sequence
  ENSG00000244040_93 (sequence is synthesized)
ctaccaaatgaaatggctttaggatactcactcagaaattaaaaggacattttcattttgcacagccagaacattaattcatgaattatttaatataatgttaatttatactgacaactg

SEQ ID NO: 1037921 - DNA, 120 bp, Artificial Sequence
  ENSG00000244041_0 (sequence is synthesized)
agactactgacttggaccagcaggggaatggctgtgacaataaataagattgggaaaacaagaagtcctttccaggacactgaaggctgcagaggtgtgactggatgctggtggagggat

SEQ ID NO: 1037922 - DNA, 120 bp, Artificial Sequence
  ENSG00000244041_1 (sequence is synthesized)
gcatggcggggaagctgagtcagatcctgaaatcctccaagcatgcgcctgaaatgaccaagggaaatgaaggcggaggctgctgtcgcctggtggcctgggaagggccaagagccaggg

SEQ ID NO: 1037923 - DNA, 120 bp, Artificial Sequence
  ENSG00000244041_2 (sequence is synthesized)
agctggagggaggagagaacgtgcgacctcagcacggagcactgtaggggaggcggggctggagggagatggcgccgcgctcccggatgaacagagaaagcgacagggtgagtcgcaggg

SEQ ID NO: 1037924 - DNA, 120 bp, Artificial Sequence
  ENSG00000244041_3 (sequence is synthesized)
cacagtgtgggatgagtcaccgacagcaaggcatggactccgggaagaaggggagacgagccgggaaagacttgcatcggggatgtgagctgagctgcacccagacaaaagcggctcggg

SEQ ID NO: 1037925 - DNA, 120 bp, Artificial Sequence
  ENSG00000244041_4 (sequence is synthesized)
gctcctgaaagcagcaggcaccgccggtcctgccaaggggctacttcctgcgcggagtaggagagtaggagaccccaggccagtcccaatccccggcccgtccgggatgaggggggctgc

SEQ ID NO: 1037926 - DNA, 120 bp, Artificial Sequence
  ENSG00000244041_5 (sequence is synthesized)
gggagctgcgggggcctcctccagggaggacggttgcagggtccctcggccgccgcccactcccgggggcgttccttcctcccagctgcgcccggagcgcctgctgcctggcgagagccc

SEQ ID NO: 1037927 - DNA, 120 bp, Artificial Sequence
  ENSG00000244041_6 (sequence is synthesized)
ctgctgcctggcgagagcccgcccctctgcaaccagcccgctgcagcggagggcgcctgggtgccctcggccgagccagcagcccacggtcggcgccgcactgtcccctggtggcggagc

SEQ ID NO: 1037928 - DNA, 120 bp, Artificial Sequence
  ENSG00000244041_7 (sequence is synthesized)
cacgcctgggaggggtccaggaggacgcggctgggacctgggggctctcagggtggggccttgggggatgaggctggggcccgcgggaaaccgggctggggcgaggaggctcgcaggact

SEQ ID NO: 1037929 - DNA, 120 bp, Artificial Sequence
  ENSG00000244041_8 (sequence is synthesized)
tcctgccacagaatgtttcgatgctttttttaattctgcaaatgtaagcctttccactttaagtccaagctcagcgcagaggactgttctataatacatacaatttagtttaaaaatgtt

SEQ ID NO: 1037930 - DNA, 120 bp, Artificial Sequence
  ENSG00000244041_9 (sequence is synthesized)
gcaaatgttaacatgtgtcacaaactcaagcaatccagtattatagaaagcaaagaatgaaatgtgctgcttctttctcccccagacgcccttgcatacattaagatatgtatatatgga

SEQ ID NO: 1037931 - DNA, 120 bp, Artificial Sequence
  ENSG00000244041_10 (sequence is synthesized)
aatgttaccgggagtcccggttatcccaaaaagggttgtttcctgttgcgtggtgaggccaatgcacgaaaccgaaagggagtgtgtcaagcagtgcaggctgtattcaatggctatgga

SEQ ID NO: 1037932 - DNA, 120 bp, Artificial Sequence
  ENSG00000244041_11 (sequence is synthesized)
gtagggtgtctttaatgaaggggctgggcattaagagcacgggggggaatattcgtgctttccttgggaaagaacggagatttttcccggaatcaagaaacccctttttttctgtccctt

SEQ ID NO: 1037933 - DNA, 120 bp, Artificial Sequence
  ENSG00000244041_12 (sequence is synthesized)
cttggtctcttccagtcgttgtcatggcgacatgttgtttagcatgagaacaggatgatgataaagccagaggctcttcagaggcgccatcttggatttcgccagcttcagctggtttcg

SEQ ID NO: 1037934 - DNA, 120 bp, Artificial Sequence
  ENSG00000244041_13 (sequence is synthesized)
tcctaagaaggaacttcgaaacacaggcattctttttcctgaaaataagcagagttacagctgagtaggaatttagctctgtcccatatgctatcgcattgggcagcaaaagcagggtgg

SEQ ID NO: 1037935 - DNA, 120 bp, Artificial Sequence
  ENSG00000244041_14 (sequence is synthesized)
ggtccagcgaaatcagcaggcactgcaatgagtaacatacccagccacgtttatgcagcatttttacgaaaatgaaaccatactacctgtaaaggaagatatgctaacaaacaacaaaac

SEQ ID NO: 1037936 - DNA, 120 bp, Artificial Sequence
  ENSG00000244041_15 (sequence is synthesized)
tggcaggaaccaagattcctactgacactacccttagttttaattttccctgacaacaaatgaggttaacagagcataattatctaccgtgaccccttcaaaaagacaggctgtatacat

SEQ ID NO: 1037937 - DNA, 120 bp, Artificial Sequence
  ENSG00000244041_16 (sequence is synthesized)
ttgcactaagagaagaaatcgtgtaatgtcagcaaatttcccccacttaaagcttctctatttaaaaagcttcacgcacacatgcacgcatatgtcttcaagatgaccacaatttatttt

SEQ ID NO: 1037938 - DNA, 120 bp, Artificial Sequence
  ENSG00000244041_17 (sequence is synthesized)
gcagtcattctttgcaccagttcccaatttttcccactagcttgcaagctccgtgactcgaggagaccgggggatcagagtttgtttttgcggagaagtgagtcctttatgccccaaata

SEQ ID NO: 1037939 - DNA, 120 bp, Artificial Sequence
  ENSG00000244041_18 (sequence is synthesized)
gtgactgacatagagaaggtactcagtaaacactttttaaaggaatgcctgcctgactgaagcttaatgatgtgaggcttctagtgggataccctaccttgttttaacctgaagtgactc

SEQ ID NO: 1037940 - DNA, 120 bp, Artificial Sequence
  ENSG00000244041_19 (sequence is synthesized)
tgggataccctaccttgttttaacctgaagtgactcttccttagctaagagagccagacggactccatcgtgactccttcactcgcagccccttacccacccccttcctcaaggacttaa

SEQ ID NO: 1037941 - DNA, 120 bp, Artificial Sequence
  ENSG00000244041_20 (sequence is synthesized)
agctatatccgcagttcccaggaattcgcccggttaatagcacccagagcccctgcgtttgtgtccggttgataacgcccaaagcccggcgtccatcaccttaggatagacttaaagcct

SEQ ID NO: 1037942 - DNA, 120 bp, Artificial Sequence
  ENSG00000244041_21 (sequence is synthesized)
acctggaactgtttactttcctgtaaccgtttatccttttaactttttgcctactttacttctgtaagattgtttcaactagactccccctctcccctgtctaaaccaaagtataaaaga

SEQ ID NO: 1037943 - DNA, 90 bp, Artificial Sequence
  ENSG00000244041_22 (sequence is synthesized)
tcccctgtccttcttcggggccaagagaatttcgagcgctagctgtctctcggctgccggctaataaaggactcctgaattcgtctcaga

SEQ ID NO: 1037944 - DNA, 72 bp, Artificial Sequence
  ENSG00000204780_0 (sequence is synthesized)
atcctccctgtctgcatctgtaggaggcagagtcaccatcacttgccgggggaaaactcctaagctcctgat

SEQ ID NO: 1037945 - DNA, 120 bp, Artificial Sequence
  ENSG00000275465_0 (sequence is synthesized)
cttggagactgaaagttggactcgtaggtactgagcgtcttgttgtggagaccagatgcaatgcctgggcctcctgctccagctcccatccagccctgggtcaaagcctgcaggcgaagg

SEQ ID NO: 1037946 - DNA, 120 bp, Artificial Sequence
  ENSG00000275465_1 (sequence is synthesized)
acaggacagcagagtgagctccaggatgtggaggaaggaagatgagaaataattccctgactggtgtcccttccgtttcgggatgaattgtcctccagctgctcctgattcctgcgttaa

SEQ ID NO: 1037947 - DNA, 120 bp, Artificial Sequence
  ENSG00000275465_2 (sequence is synthesized)
agtcctggtgtgatggctcacatctgtcatccctgcactttgagagttctggaggccacaagtgtgaaatcaagatgtcagcagtgccatactctctctgaagtctgttggagagaactc

SEQ ID NO: 1037948 - DNA, 120 bp, Artificial Sequence
  ENSG00000275465_3 (sequence is synthesized)
ttctttgtctctcccagtttctggtggtttccagcaatccgtggcttccttggcttgtcgtcgcatcattccagtctcagtcatcatgcggcctcctcactatgtgtctgtctgtgttta

SEQ ID NO: 1037949 - DNA, 120 bp, Artificial Sequence
  ENSG00000275465_4 (sequence is synthesized)
cattttcctcttctcataagggcagcagtaaatggattaggcatgctagtatatcttcttcgcttgatggcatctgcagactctgtttccaaataaggccttgttcatgggtactggggt

SEQ ID NO: 1037950 - DNA, 120 bp, Artificial Sequence
  ENSG00000275465_5 (sequence is synthesized)
taggacttcaacacctcatttctagtctcctatatcaccatgaagaaagctatgctagaaagctatgtctttgttacttatacaaagtggtattgataatagctacttactcaaaactac

SEQ ID NO: 1037951 - DNA, 120 bp, Artificial Sequence
  ENSG00000275465_6 (sequence is synthesized)
tcagaataagatcagtttctagcatgacagtatgaggagccgcctgacccactcctccaggtaaactggtaaaaacagccatttaaggcttctggaaatagtcccaaggaaaaacagcaa

SEQ ID NO: 1037952 - DNA, 120 bp, Artificial Sequence
  ENSG00000275465_7 (sequence is synthesized)
aggaaggaacctgtattcaagaaaatgtactaatttggtagaagaggtgaatctgtgggatttgaaacaagaccacttctttcctccccactcccagctcagcacggtggcaatttccct

SEQ ID NO: 1037953 - DNA, 120 bp, Artificial Sequence
  ENSG00000275465_8 (sequence is synthesized)
ccagacagctactgctgaaacacaggtctcctctcctcccagcacagagggcctccttccagggaggagtaggatggcagtgtccttcatcctgcccccagctccctgttgctgaggctg

SEQ ID NO: 1037954 - DNA, 120 bp, Artificial Sequence
  ENSG00000275465_9 (sequence is synthesized)
tctcagatgaatgcagttgagaggtgggggctgccacccctacctgctactcatggaaggagactctaccttgggtgtgacatgctgagaagactgtggccctggtcacttttgccctgg

SEQ ID NO: 1037955 - DNA, 120 bp, Artificial Sequence
  ENSG00000275465_10 (sequence is synthesized)
ctcttgaggtggtgtttccatgccagaaggctcaagttaagaagaccactggctatccccaactcctccaccaagcacccagcccctaggcagggggtgtcactcagagaaaagcttacc

SEQ ID NO: 1037956 - DNA, 120 bp, Artificial Sequence
  ENSG00000275465_11 (sequence is synthesized)
gagctctggttcagatattttgttgcaaggtaggggagaagaagcagttcagagaaaaaaaggtaattcttaatctcttcccaagggaactgacttcattttcaacagagcttggagaaa

SEQ ID NO: 1037957 - DNA, 120 bp, Artificial Sequence
  ENSG00000275465_12 (sequence is synthesized)
attaagcctaagtatgctctgaaaacacagtggaggttgtggtgaagggcaattgggagaggctagtttgcaggagagaacccagaataaaccactgggaaggaacccttctgggggtca

SEQ ID NO: 1037958 - DNA, 120 bp, Artificial Sequence
  ENSG00000275465_13 (sequence is synthesized)
gaacaaatatcaaacactgacctcagaaactattctttcaaaggagccacagtttaatggggttagtttgtggaacactttatgccccaggatattgttgaaaacaatagggcaattggc

SEQ ID NO: 1037959 - DNA, 120 bp, Artificial Sequence
  ENSG00000275465_14 (sequence is synthesized)
caccaattaatggagcttaacagctggatgtggttagggaagtgccagagagccctagcaaaaccactgtcatcccagcacgactgtgggcatatgcaaagctgaacctctttagggagc

SEQ ID NO: 1037960 - DNA, 120 bp, Artificial Sequence
  ENSG00000275465_15 (sequence is synthesized)
aatatgagaggcttaacgctttgggagggaaaatatacagttgacctttggacaacacaggtttgaactgcgtgaatccacctatacatgaatttttttccaccactgccaaccttgaga

SEQ ID NO: 1037961 - DNA, 120 bp, Artificial Sequence
  ENSG00000275465_16 (sequence is synthesized)
caagactgacccctattcttctccctcctctgcagcatactctacatgcagatgttgtggataaagatctttatgatgatctacttccacctaatgaatagtaaatgtattttctcttcc

SEQ ID NO: 1037962 - DNA, 120 bp, Artificial Sequence
  ENSG00000275465_17 (sequence is synthesized)
ttaggattttcttaataatatgctcttttctgtaacttattttactgaaagagtacagtatataatacatataacacacaaaatatatgttaattgactagctgtgttatcagtgaggct

SEQ ID NO: 1037963 - DNA, 120 bp, Artificial Sequence
  ENSG00000275465_18 (sequence is synthesized)
ccttctggtcaacagtaggctattagtaaagttctggggcatcaaaagttatacacaattattttactgcataggcagtcaatgcccataacccctactttgttcaagtgtcaactttac

SEQ ID NO: 1037964 - DNA, 120 bp, Artificial Sequence
  ENSG00000275465_19 (sequence is synthesized)
ttcatgaaaataaaccaggcagtcactaaaaacaatcaataagcaaataacaataacaagtcctgaaggagggaaagaccaatatccagagtcagtagaatatattatctaaaatgtcca

SEQ ID NO: 1037965 - DNA, 120 bp, Artificial Sequence
  ENSG00000275465_20 (sequence is synthesized)
gtttctcacaaaaaattacaaggcatgcaaacaaacaagaaagtataatatgatccatacacctgaaaaaaagcagagaaagaaactaactttaagaatgataagacataggctgagtgt

SEQ ID NO: 1037966 - DNA, 86 bp, Artificial Sequence
  ENSG00000275465_21 (sequence is synthesized)
agaaactaactttaagaatgataagacataggctgagtgtgcctgtaatctcagcactttgagggtgaggctaggcatctatcaca

SEQ ID NO: 1037967 - DNA, 120 bp, Artificial Sequence
  ENSG00000275465_22 (sequence is synthesized)
atccagccctgggtcaaagcctgcaggcgaaggacaggacagcagagtgagctccaggatgtggaggaaggaagatgaggtgtggtggggaaaggatggagtctcgctctgtcgcccagg

SEQ ID NO: 1037968 - DNA, 120 bp, Artificial Sequence
  ENSG00000275465_23 (sequence is synthesized)
aaagaaaaaaaaaaaaccctcaaaaaacctgttataagcatgttcacagagctaaaagaagggatgatgaccatgttccatcaaatagagaatgccaacagagagacagaataatcaaat

SEQ ID NO: 1037969 - DNA, 120 bp, Artificial Sequence
  ENSG00000275465_24 (sequence is synthesized)
ggaaattctggatttgaaaagtacaataattgaaatgaaatattcactaaaggggctcaaaagtagatttgaactggcagaagaaagaatatgtgaaattgaagatagatcaatagagac

SEQ ID NO: 1037970 - DNA, 120 bp, Artificial Sequence
  ENSG00000275465_25 (sequence is synthesized)
tatgcaagctgaagaacagaagaaggaataatgaaaagtgaagagcacttcagaaaatgtgagacaccattaagtgcaccaacatacatgtaatggaagtatcagaaggaaaggagagaa

SEQ ID NO: 1037971 - DNA, 83 bp, Artificial Sequence
  ENSG00000275465_26 (sequence is synthesized)
tgagacttcacctctgttaaaaaaaatagctgggtgtggtgatgtgcacctgtagtcccagctattcagaaggctgaggtgga

SEQ ID NO: 1037972 - DNA, 120 bp, Artificial Sequence
  ENSG00000275465_27 (sequence is synthesized)
agctgggtgtggtgatgtgcacctgtagtcccagctattcagaaggctgaggtggaagatttttttaagctcgggatttctgcactacagtaagctatgatcgtgccactgcactccagc

SEQ ID NO: 1037973 - DNA, 120 bp, Artificial Sequence
  ENSG00000275465_28 (sequence is synthesized)
gaccctgtctcaattttttttttttctgaagaactagtgtctggaagctccccaaatttactgatagatatttgtctgtagttttcttttcttgtaatgtctttttctgcttttggtact

SEQ ID NO: 1037974 - DNA, 120 bp, Artificial Sequence
  ENSG00000275465_29 (sequence is synthesized)
aattggtatagtttcttcctgaagtgttggtggaattcaccaatgaactcatctgggcctggtactttctgttttagaaggttattaattattgattcaatttctttaataaatataagc

SEQ ID NO: 1037975 - DNA, 120 bp, Artificial Sequence
  ENSG00000244619_0 (sequence is synthesized)
tgggcaaagaagccaagctgtagaagaaaagataagcgtcactgccaaatgcctagactgggaaccttgccagtagctctcagacttatctgaggcagaagacaaggagagcaagcagga

SEQ ID NO: 1037976 - DNA, 120 bp, Artificial Sequence
  ENSG00000244619_1 (sequence is synthesized)
taggccgggtctgaaccacctccaagaggctctgcgtggacagaagagtagttttctacatgcatcctataacccagctagcctcaccccacattatatcaaagccagcccccaaataga

SEQ ID NO: 1037977 - DNA, 120 bp, Artificial Sequence
  ENSG00000244619_2 (sequence is synthesized)
ataaataacctcctgctacttaaaggaaagaaactgaggcaggaatggcggcagtggaacactaggatcctgctgcctgatggagatgccttcgttctgaaaaagcccacgggtggccct

SEQ ID NO: 1037978 - DNA, 120 bp, Artificial Sequence
  ENSG00000287108_0 (sequence is synthesized)
cattacagtagcacagcatgtactacaggacctagaacattcacctcctcctgtccttgcagatgcgaacttcagcctctccagtcttgggactccaggacttgcactattggccccttg

SEQ ID NO: 1037979 - DNA, 120 bp, Artificial Sequence
  ENSG00000287108_1 (sequence is synthesized)
gttctcaggccttcggtctccaactgagagttacaccatcagtttccgcggttctgaggcttttgaacttggactggggcaccctaccggccccactgggtcaccagcgtgcagacagcc

SEQ ID NO: 1037980 - DNA, 120 bp, Artificial Sequence
  ENSG00000287108_2 (sequence is synthesized)
tgtggtggaacttctcagcctccataattgtgtgagccaatccccctcataaatcccctctcgtgtatctatacccagtcatgcatcacttcatgaggggaatacgttctgggaaatgca

SEQ ID NO: 1037981 - DNA, 120 bp, Artificial Sequence
  ENSG00000287108_3 (sequence is synthesized)
atgaggggaatacgttctgggaaatgcattgttaggccatttcatcattgtgtggatatcatagcatgcgtacttacacaagcctagagggtccagcctactacacacctaggctatatg

SEQ ID NO: 1037982 - DNA, 120 bp, Artificial Sequence
  ENSG00000287108_4 (sequence is synthesized)
ctaagctacaaacctgtacagcacattactgtactgaatactgtaggcaatgtatctaaacatagaagaggtccagtaaaattataatattataatctggctgggtgcagtggctcacgc

SEQ ID NO: 1037983 - DNA, 64 bp, Artificial Sequence
  ENSG00000287108_5 (sequence is synthesized)
tctactaaaaatacaaaagaattagctgggcctggtggggtaaggcagaggttgcggtgagccg

SEQ ID NO: 1037984 - DNA, 120 bp, Artificial Sequence
  ENSG00000287108_6 (sequence is synthesized)
ataataataataataataatataatcttttgggaccactactgtggttcatcattgattaaaacatcattatgaggcacatgactgtatatataagtattttatatacatgtttaatttt

SEQ ID NO: 1037985 - DNA, 120 bp, Artificial Sequence
  ENSG00000287108_7 (sequence is synthesized)
tgactgtatatataagtattttatatacatgtttaattttctgtctctccggagaatcctaatacttcctggactgcctaaaatgaattaaatgtatgaaatgaaggattgcgctaattt

SEQ ID NO: 1037986 - DNA, 120 bp, Artificial Sequence
  ENSG00000287108_8 (sequence is synthesized)
atatgtgtcacagcaatgtgacggcctctccaagtcgccacatttactcagtgttgcctcgcacctggctcacctcatgtgtttgcaatgtatacccctgtaagtgccagacaggtgatc

SEQ ID NO: 1037987 - DNA, 120 bp, Artificial Sequence
  ENSG00000287108_9 (sequence is synthesized)
tctggactgaatccagcttttccatggagttgtggaaggaagaggccgctgctctatagcagttcagcaatgggagaagtgaacacagcatgctgctgatctctgtacagcttcggggag

SEQ ID NO: 1037988 - DNA, 120 bp, Artificial Sequence
  ENSG00000287108_10 (sequence is synthesized)
tgcaggacttggaggttggctgactcagcggtgggagtttttagggattaaaaaacctttagaagcatggtccctgagggaggctgttgctgattggctggccttcagaagcatgtgtac

SEQ ID NO: 1037989 - DNA, 120 bp, Artificial Sequence
  ENSG00000287108_11 (sequence is synthesized)
tgacagaaggaagttgtcaccaaaggactggggtagctttaaaagcagttctcacttattactaggacaaaggaacagtaagtcttttcctttctaggaactacttctaaaaactatttc

SEQ ID NO: 1037990 - DNA, 120 bp, Artificial Sequence
  ENSG00000287108_12 (sequence is synthesized)
tagagcaattcattctcagtaggatgccttacttatttaaatatagcatgaatcagatcaaatcactggaaaggcttgttgtcacagctcactgcagccttgacctcccatggccaagca

SEQ ID NO: 1037991 - DNA, 88 bp, Artificial Sequence
  ENSG00000287108_13 (sequence is synthesized)
catgcaccaccatgcccaactaattggttccttaaaatcccaggctcaagagatcctcccacctcaggagtgtcagagcattcaaacc

SEQ ID NO: 1037992 - DNA, 120 bp, Artificial Sequence
  ENSG00000287108_14 (sequence is synthesized)
agagatcctcccacctcaggagtgtcagagcattcaaaccacagcgactccatcttgaacaggggctgggtaaaataaggctgagacctgctgggctacattctcaagaggttaagcatt

SEQ ID NO: 1037993 - DNA, 120 bp, Artificial Sequence
  ENSG00000287108_15 (sequence is synthesized)
cttagtcacaggatgagatagaaggtcgtcaagactggtatcacaagataaaggtcacaaagaccctgctaataaaacaggatgtggtaaagaagccgatcaaaaccctcaaaaccaaga

SEQ ID NO: 1037994 - DNA, 120 bp, Artificial Sequence
  ENSG00000287108_16 (sequence is synthesized)
tggcggtgaaagtgacctctagtcgtcctcactgctcactcctcattttatgctaattataatgcattagcatgctgaaagccactcccaccagcaccaatacagtttacaaatgccatg

SEQ ID NO: 1037995 - DNA, 120 bp, Artificial Sequence
  ENSG00000287108_17 (sequence is synthesized)
gcaacatcggaaagtcatcctacatagtctaaaagggggagaaaccctcagttccaggaattgcctaccctttcccagaaaactcatgaataatccacccgttgttgagcatgcaatgat

SEQ ID NO: 1037996 - DNA, 120 bp, Artificial Sequence
  ENSG00000287109_0 (sequence is synthesized)
attacaggcgtgagccacagcacctgccctggttgtcctactttcaatgatgctaagattaatcagtgtttcaggtgataacagactgatccttccattgtaaagctccaatcaacattt

SEQ ID NO: 1037997 - DNA, 120 bp, Artificial Sequence
  ENSG00000287109_1 (sequence is synthesized)
actgatccttccattgtaaagctccaatcaacattttgtctaatgattttagccattaataatcataccctaagtcaattacatgctgcaaatgatgattagattctattattttttcat

SEQ ID NO: 1037998 - DNA, 120 bp, Artificial Sequence
  ENSG00000287109_2 (sequence is synthesized)
tatctattttctttgacattcattagcttgaattctataaagaagaacttttccttctaagttaaggctatgtggttacacatacatgcctaaaagaaagcagaataaagataagtattt

SEQ ID NO: 1037999 - DNA, 120 bp, Artificial Sequence
  ENSG00000287109_3 (sequence is synthesized)
attttgattgccaaatatcagggtaaggagtaactgacctagttaattctaatggtgaccaaagtgtgatgacttttaaacattttattgattttcttttttgtatctttataattaatg

SEQ ID NO: 1038000 - DNA, 120 bp, Artificial Sequence
  ENSG00000287109_4 (sequence is synthesized)
cattttgaaataaattcaacacatttaaatcaattgcattcagtatatgttttctcttttgactctcatcttgcctccagtttggctaaagaaagactttttaggttaattcctttgtcc

SEQ ID NO: 1038001 - DNA, 86 bp, Artificial Sequence
  ENSG00000287109_5 (sequence is synthesized)
tttggctaaagaaagactttttaggttaattcctttgtcctttgggcacaatctcattagtctttgatagctaccttgctttctaa

SEQ ID NO: 1038002 - DNA, 88 bp, Artificial Sequence
  ENSG00000287109_6 (sequence is synthesized)
tcttgaattgtaatccccataatccccatcatccccacgtgtaaagggagagacgagatagaggtaacaatcatggtggcagtttctc

SEQ ID NO: 1038003 - DNA, 85 bp, Artificial Sequence
  ENSG00000287109_7 (sequence is synthesized)
cacaagatctgatggttttataaagagctcttcccccttcacttggcattgtccttcttgccaccacttaccatgattttaagtt

SEQ ID NO: 1038004 - DNA, 120 bp, Artificial Sequence
  ENSG00000287109_8 (sequence is synthesized)
ctcttttcttcataaattacccagtttctggcagttccttatagcagtgtgaaaacagactaatacaccagggcaacaaaccgtcccaggctcatcttaaattgcctaaccttaaaactg

SEQ ID NO: 1038005 - DNA, 120 bp, Artificial Sequence
  ENSG00000287109_9 (sequence is synthesized)
actggagtcaggtgtccctccaaagtttcctagtcattgttagtgtggaatggtatttagggattatagtctatatgctaagtatgctcattttcaaggggttgtagaatagtttatatt

SEQ ID NO: 1038006 - DNA, 120 bp, Artificial Sequence
  ENSG00000287109_10 (sequence is synthesized)
attatcctcaactcctaactcccttctcatttattattgtatgatttctagggcctcccagcaggcagaacacaattctccatcccagttccacgtttggccacgtgatgtgctttgacc

SEQ ID NO: 1038007 - DNA, 120 bp, Artificial Sequence
  ENSG00000287109_11 (sequence is synthesized)
aatgggcacatatcatgttaagtagaagcttttagagctgttaaggacagagctaagctttgtcctttgcttttccctaggccacaaggacagtctgttccaaacagggtcaattgcttc

SEQ ID NO: 1038008 - DNA, 120 bp, Artificial Sequence
  ENSG00000287109_12 (sequence is synthesized)
gaggtttttaaggttatctgttacttcttcaaagctgattgatacaggctgtgatgtcttctgggcctttttagtagacagataggaaaagcagctttgaaaagaggaaagcattgtgag

SEQ ID NO: 1038009 - DNA, 120 bp, Artificial Sequence
  ENSG00000287109_13 (sequence is synthesized)
ttcaaactcaattcaaatagaacatttccaaatcagatagaacattataggacctgtacttaatttttaaaaactttatacatatatctcttttttctacactaaaaatcttaatttcta

SEQ ID NO: 1038010 - DNA, 120 bp, Artificial Sequence
  ENSG00000287109_14 (sequence is synthesized)
tgtatttcctataatataacatagtgtcaaaataacaaaatcattattttaaagtactaaagtttaaaacatatttgtagctatttttgtccttaagatatattctactgtttggtggaa

SEQ ID NO: 1038011 - DNA, 120 bp, Artificial Sequence
  ENSG00000287109_15 (sequence is synthesized)
gatatattctactgtttggtggaatattatgtttttaggttcagattgaaataattatttcctttatgtggttatatcactaatttgatatacagtaggttcatttccttatttcttttt

SEQ ID NO: 1038012 - DNA, 120 bp, Artificial Sequence
  ENSG00000287109_16 (sequence is synthesized)
ttttcttttagagacagcatctttctctgtcacccacgctagagtgcagtagcacaatcacagctcaccacagcctcgatctcccaggaccaagcaaacctcccacctcagcctcgtgag

SEQ ID NO: 1038013 - DNA, 120 bp, Artificial Sequence
  ENSG00000287109_17 (sequence is synthesized)
tagctgagactacaggcatgccaccatgcccagctaatttttatttatttttcttttttgtagaggcgtggccttcctatatggcctaggctggtcttgaactcctggtcttaagcaatc

SEQ ID NO: 1038014 - DNA, 120 bp, Artificial Sequence
  ENSG00000287109_18 (sequence is synthesized)
ttcctgcctgggcctcccaaagtatggggattacaagtgtaaaccaccatgcccagctcatatgtatttaggaagtttcacaatgtgaagaaagcgaagagtaaaaacagcaggtgactg

SEQ ID NO: 1038015 - DNA, 120 bp, Artificial Sequence
  ENSG00000287109_19 (sequence is synthesized)
cattgacaaaatgaaagcaagcaaattggacaaacctagcataaagaagacagaccaggttatgcatttttactccttacaaatataaagacaagcccgtcctaaattatcccagtagaa

SEQ ID NO: 1038016 - DNA, 120 bp, Artificial Sequence
  ENSG00000287109_20 (sequence is synthesized)
aattttgacaactacaacaaaacagaaaacccaacaaaacaaataaaaatttgatgctgatgacatgcgataaagaaaagcagagctctccagtaaaaaccaaaattcctgtctgttaag

SEQ ID NO: 1038017 - DNA, 120 bp, Artificial Sequence
  ENSG00000287109_21 (sequence is synthesized)
tttacaaggattcttccttaggactttctgagccaagacaatggacagctaagagggcagctcttgaaatactttcacaggatttgcttctctgctcataaaatgtaggaacaattcaaa

SEQ ID NO: 1038018 - DNA, 120 bp, Artificial Sequence
  ENSG00000287109_22 (sequence is synthesized)
ctggagagcatttcctacccattcactggcctgaagattcatagagtagggttttgtgttgctgtcagcaggcatttatctgagcacacatccatccatcctccctctctctctctctct

SEQ ID NO: 1038019 - DNA, 120 bp, Artificial Sequence
  ENSG00000287109_23 (sequence is synthesized)
ccttctctctctctctctttccccccacacccgatgcatgcatacactcacacactttggaacttagaaggccactcttctgaatatcaaatcaagtaaaatgaccattctaagggtgac

SEQ ID NO: 1038020 - DNA, 120 bp, Artificial Sequence
  ENSG00000287109_24 (sequence is synthesized)
aactcagggaaactctggaaacactggaaacaaatactgaaaataaacttacgtgtgggagagagaataacattgaaagaaggtatacatagtaaccaaaagagctactgtttcatgttt

SEQ ID NO: 1038021 - DNA, 120 bp, Artificial Sequence
  ENSG00000287109_25 (sequence is synthesized)
ataggttgggaactgaacagaaagttgaaaacacagcacacatgattaaaaaattttttccttaaaaaccaaagagccatttttcttaaattcctgatcagatttaattaactacatttc

SEQ ID NO: 1038022 - DNA, 120 bp, Artificial Sequence
  ENSG00000287109_26 (sequence is synthesized)
aaatgcagtcatgcactgcataatgacattttggtcaacaatgaaccatatcagtggtcccacagattataatggagctgaaaaattcttatcatctagtgatgctataacgcccgtact

SEQ ID NO: 1038023 - DNA, 120 bp, Artificial Sequence
  ENSG00000287101_0 (sequence is synthesized)
gcagtgcttcactccgcaaaacaagaaacaacaacatgggacttttctagtacattccttgggaaacttggtatgtcctgcttgaaagaaaagcccaaataagactgccaagatcatcca

SEQ ID NO: 1038024 - DNA, 120 bp, Artificial Sequence
  ENSG00000287101_1 (sequence is synthesized)
gagggacagccagaacaggaagccagtctaactgcactctgatgacactggcttatgatgaactggattgattgcacagcagatagaaactactatgtaactgcccagggtgaagcaagg

SEQ ID NO: 1038025 - DNA, 120 bp, Artificial Sequence
  ENSG00000287101_2 (sequence is synthesized)
attcatctcacattgaggaaatctatttccacccatggctctcagaagctggtcttctgcttgctgttgagcccagaagataccttcaaattttcaggaaagaagagatgactgggaaag

SEQ ID NO: 1038026 - DNA, 120 bp, Artificial Sequence
  ENSG00000287101_3 (sequence is synthesized)
tttccagaatggtggtttttgtaacatctgtagcctcagaacttaagaagagcaagcataaaatgtgtttttgcaaatgtttttcatggatttaagacctaagctgtttaacagattgtc

SEQ ID NO: 1038027 - DNA, 120 bp, Artificial Sequence
  ENSG00000287101_4 (sequence is synthesized)
ttgcttaagaaatatgacttgttttagctgacaagatggattttatgaactgattgatcccagctgccaattgtcaaagccagaggatgttccaaattggcagtccccaaagacctggag

SEQ ID NO: 1038028 - DNA, 120 bp, Artificial Sequence
  ENSG00000287101_5 (sequence is synthesized)
tggattgatttaaggtggggaaaggaagatttggaggtggagaaaatagagttttataaaactaatatgattctgaaagtatttgaaacacaaatatccattagaacacacaaaaagtta

SEQ ID NO: 1038029 - DNA, 120 bp, Artificial Sequence
  ENSG00000287101_6 (sequence is synthesized)
aaatagttcaagcttcattctactttgtgagctgttctaataccttctaaggctgtaggtgccctcttcaccttttgtttgcttctcattggacttttaatagtaaatagcacaaaggat

SEQ ID NO: 1038030 - DNA, 120 bp, Artificial Sequence
  ENSG00000287101_7 (sequence is synthesized)
agagatatatatccaagattttatgtatgtataaaatcttcacagcttcaaagtttgaattatgtactttctgaagaaggaactgtttcgagttcatgaaattattctctgtattttgac

SEQ ID NO: 1038031 - DNA, 120 bp, Artificial Sequence
  ENSG00000287101_8 (sequence is synthesized)
gaggcagctgtttgaaattcaatttttaaattttattctgatatctaagtccatctttgagcacattattgatattaacaatgctaataatgctgttaataataccacctattggctatg

SEQ ID NO: 1038032 - DNA, 120 bp, Artificial Sequence
  ENSG00000287101_9 (sequence is synthesized)
caactttagctctttgtgccttacatcccatgttggtacttacctcatggacttgtaaagataaaatgagttaacccaggcaaagtgcttagaataatgcttgtttcataattaatgctt

SEQ ID NO: 1038033 - DNA, 120 bp, Artificial Sequence
  ENSG00000287101_10 (sequence is synthesized)
taaaagtgttattacaatgacaaatcataacagtgtgggggtaatgctataaatattgctgatcaagtacctaataagcttctccattagctgctaaggtgtaggttagccaaaaacatc

SEQ ID NO: 1038034 - DNA, 120 bp, Artificial Sequence
  ENSG00000287101_11 (sequence is synthesized)
atttgctgttgttcagaggttcacatgcctagtcttttaaacaatgtttaggagagatcatctatgatgggtcaaattgtatgatgagattacaaatgtatagtttatgcgtattgatat

SEQ ID NO: 1038035 - DNA, 120 bp, Artificial Sequence
  ENSG00000287101_12 (sequence is synthesized)
ttccacttgcaagtgggttttgtagttgaagttgccatgatactgggtttcattcaggcactgaatttatgagatgaaactctcatgatagcataagcttccaaagcaccaattaggcaa

SEQ ID NO: 1038036 - DNA, 120 bp, Artificial Sequence
  ENSG00000287101_13 (sequence is synthesized)
ctaattatttggattggtgatatcttttttatttgccttcttattgcttaaaggtagtgaccatctctcttaattaatttacatggcctcattggaagaagagtcaagtaaaaacttttg

SEQ ID NO: 1038037 - DNA, 120 bp, Artificial Sequence
  ENSG00000287101_14 (sequence is synthesized)
acaatgaactaggttaacaatgaggggcattgtcagcactgctaagctagatactgtaagttctaaagggaaaatacaaaatgacagctgactctccgtcttctttcactttcctcaaag

SEQ ID NO: 1038038 - DNA, 120 bp, Artificial Sequence
  ENSG00000287101_15 (sequence is synthesized)
aaaagtttcagtgaagggaaaatcttatgaaatatattggacaataaatattttaaggaaccaaggcatctggagacccacttcccagaagaaagaaagtatcttgtattaagtgagatg

SEQ ID NO: 1038039 - DNA, 120 bp, Artificial Sequence
  ENSG00000287102_0 (sequence is synthesized)
aggaacatgctgcttgcccaaaattctccacaatcctccacctccgctcttccatttaggatataaaagagggttttctcagaccttctgccaatgcgcagacagatgaaagacgacaca

SEQ ID NO: 1038040 - DNA, 120 bp, Artificial Sequence
  ENSG00000287102_1 (sequence is synthesized)
gaggttctcatcattctgctgaggaactgaaagcgggtttcccactccaatgtcttagtttggaatcacggcttttgtcccctctccgagaatgaataatcaccaagaaaagagaggccg

SEQ ID NO: 1038041 - DNA, 120 bp, Artificial Sequence
  ENSG00000287102_2 (sequence is synthesized)
tggtaggtgaaggaatgcccaattcagccgaaaagaagtcaatccctcctgcctccttcagcttggagtttagggtagggagagagctttgttcgtgtacacgcggttttcattcttgtc

SEQ ID NO: 1038042 - DNA, 120 bp, Artificial Sequence
  ENSG00000287102_3 (sequence is synthesized)
actcagttttattaggaaaacaatttgccaaacaaactaaaaggctattattcctaacttctcctgcagctaagagggaccagacaaagttcaagctgatgagctgtgagcagaaggact

SEQ ID NO: 1038043 - DNA, 120 bp, Artificial Sequence
  ENSG00000287102_4 (sequence is synthesized)
gagagggtctttggggagggtgcttaggtggaactgacacagctgtgcggcccctttgtccttctttcctcctcctttccctctgaaaagcagtcaccgtgggccctgagacagccttca

SEQ ID NO: 1038044 - DNA, 120 bp, Artificial Sequence
  ENSG00000287102_5 (sequence is synthesized)
ggatggaaaccagctatgaagatgctggggcagaaagattcatgctggctgactgccttggggggccatccaggagcagcagggagcccacctccagagctcctttattggagaaagaaa

SEQ ID NO: 1038045 - DNA, 120 bp, Artificial Sequence
  ENSG00000287102_6 (sequence is synthesized)
taactctttctctctcttctctgtggtgctgttattctgggttttctgctatgtgtaggcaaaactaatcctaaccaagataccagcttttcattgaatctgtgtgtgaacttgaaccag

SEQ ID NO: 1038046 - DNA, 120 bp, Artificial Sequence
  ENSG00000287103_0 (sequence is synthesized)
aggtacaaagtggcaccaggagggaccagccactgtgctttgcacccagcctcactgcaccttctggtgcatctggaaggtcctgaaggaggagttccagggccccggctgccatgggcc

SEQ ID NO: 1038047 - DNA, 120 bp, Artificial Sequence
  ENSG00000287103_1 (sequence is synthesized)
tgggcatgggaatagagccaagcatttgagaggcagggaccaggcagatgtcagaaacaagaaccagcagacgtccaaagaaggcatctgtctgaaggccaggatgcaagatacagtaag

SEQ ID NO: 1038048 - DNA, 120 bp, Artificial Sequence
  ENSG00000287103_2 (sequence is synthesized)
taggctgccagctgcaagccaggaagagggccctcaccagaagccaactatgatggcaccctgatcttggacttcccagtcttcagaactgtgagaaataaatgtctgtggtttaagcca

SEQ ID NO: 1038049 - DNA, 120 bp, Artificial Sequence
  ENSG00000287104_0 (sequence is synthesized)
ggggacgcgcgccgacaggcggagagccagcttctgccttaaagatcacccgagagctgagaaacgtgttgccaaaagaaattgcacaaaaatagtcgcactagtgagctctgggtggcg

SEQ ID NO: 1038050 - DNA, 120 bp, Artificial Sequence
  ENSG00000287104_1 (sequence is synthesized)
gggtgattgtgagcagtttttacgggctaccgtggctcctgtttttcacaaagtattaacaggtgggtttaaaacgtcagggagcacacaaaacactcagagaagccgaacaggcgcccc

SEQ ID NO: 1038051 - DNA, 120 bp, Artificial Sequence
  ENSG00000287104_2 (sequence is synthesized)
ggggctgccgggagggagacggaagctggcgggacagcgcccttcagatggcgcggtacgctgtcgatgagacctcaggtttttaaaaacagtctttaaacttcgaccctacaccataag

SEQ ID NO: 1038052 - DNA, 120 bp, Artificial Sequence
  ENSG00000287104_3 (sequence is synthesized)
gactacgtcgggtcaaaattacttctggtcagccgcgggccccaggtcccagggctgagcaagtccggtctgcgacaacacgaggctctcccgtgacggggcctagcccaaggctccccc

SEQ ID NO: 1038053 - DNA, 120 bp, Artificial Sequence
  ENSG00000287104_4 (sequence is synthesized)
tcgccggcagacaggtctccatcagaggaagcctgtgacggccgccaggataaaataaaaaggacaatggcaagtgatagcaaagacttagagaagctggaattctcctaaatccttggt

SEQ ID NO: 1038054 - DNA, 120 bp, Artificial Sequence
  ENSG00000287104_5 (sequence is synthesized)
aggagtgtaaaatggtgcagcttcttctataattcagcatcccctaccatactccctggaacccacccaagagaaatacgaccagagagacttgcatgcaaacattcctaacagcattgt

SEQ ID NO: 1038055 - DNA, 120 bp, Artificial Sequence
  ENSG00000287104_6 (sequence is synthesized)
ccacgccaaccagaacgtccaccaaccgcggatgcatgagcagcagggaaatggccatgaaaagaaactgctgagacatgggcctacatggatgaacctcaaaaacgctaggccaggtga

SEQ ID NO: 1038056 - DNA, 120 bp, Artificial Sequence
  ENSG00000287104_7 (sequence is synthesized)
aagatgccagacaagaaaattccattattccatttatgtgacacttcttaaaaaggtaaatctctagagaggaagcaaattcatgtttgcctgggggtgagagtgggatcaactgcaaac

SEQ ID NO: 1038057 - DNA, 120 bp, Artificial Sequence
  ENSG00000287104_8 (sequence is synthesized)
aggcacgaaggaacttttttgggtgatgaaaaataaaactttggatgtcgaacatattttgaaactagattgcaatgatagttgcataactgtatacatttattaaaatcgtggaacact

SEQ ID NO: 1038058 - DNA, 120 bp, Artificial Sequence
  ENSG00000287105_0 (sequence is synthesized)
agtgcgcagtcccactggctcttctgaagcaagctaattcagatgggtggggtgggtcaagaacggagccgaacttaaagacactcagtaagcttcttttagggattcatgtggttttag

SEQ ID NO: 1038059 - DNA, 120 bp, Artificial Sequence
  ENSG00000287105_1 (sequence is synthesized)
agaagctgaggccattattgctccagagatgggacacatgacctacacaagtcaatcagcacatcccagcaatctggctacagtgattggtttccggtgggcatgtgagctaatccagac

SEQ ID NO: 1038060 - DNA, 120 bp, Artificial Sequence
  ENSG00000287105_2 (sequence is synthesized)
cagtcagaccgaatcctaggtcttcttcttggagttggaggacaaagtgtgttaaaactgtgacctatcaatttggaagtcaagaagctgtgagctgtgagaagagaagtttcaggagga

SEQ ID NO: 1038061 - DNA, 120 bp, Artificial Sequence
  ENSG00000287105_3 (sequence is synthesized)
aacaagcaggtggcctgtggcacagacagaaaagtgcattaccaacctcatgatcatgatggcccaaggagaccttctctcgattgtgaagggtggaaagagagaaaacagcaggaaagg

SEQ ID NO: 1038062 - DNA, 120 bp, Artificial Sequence
  ENSG00000287105_4 (sequence is synthesized)
ccaggtcatggcatgagtgctgacccaagaagtgaagataatcagcctggaaggatggcgtacgtgcttcaaatctgctttcaaaaaactgaataatgtatgtttctctattgactctaa

SEQ ID NO: 1038063 - DNA, 120 bp, Artificial Sequence
  ENSG00000287105_5 (sequence is synthesized)
attttggagctctagcttactcaaattgcttgtgttgagtatctggaaaagcactagaaaggtggtaaaaatacttcatgtgtatcaacccctgccattctgcagtggattctatacaga

SEQ ID NO: 1038064 - DNA, 120 bp, Artificial Sequence
  ENSG00000287105_6 (sequence is synthesized)
agaataaggtggggaaaggctacaaaagcaggagaagtctcctgatgcctgaagggacccaagggatggtccccagctgggctggctgaatgggttcgagttgcagcttggcagctgctc

SEQ ID NO: 1038065 - DNA, 120 bp, Artificial Sequence
  ENSG00000287105_7 (sequence is synthesized)
acattctgtctcccagacatctcctttggctgaggtatgtggacttagaggatggcttgaagagatggtttctcagtgtgttttagtatttagtggactggttactactgtactgtaata

SEQ ID NO: 1038066 - DNA, 120 bp, Artificial Sequence
  ENSG00000287105_8 (sequence is synthesized)
tgcccacatccagaactgggttaagaccctgaatctttcatatctaactacctttgacttgatttcttttctttgtgaatcaagaacaacctatcaccttttgcctttagtggtgtactg

SEQ ID NO: 1038067 - DNA, 120 bp, Artificial Sequence
  ENSG00000287105_9 (sequence is synthesized)
tctgtcctacctttaatcatttcactaacagttttggtatcatattctcctgatgcattaagaacttcttatacaatgaagttttctgggtcttcgtctctactaatataacaccaggtg

SEQ ID NO: 1038068 - DNA, 120 bp, Artificial Sequence
  ENSG00000287105_10 (sequence is synthesized)
taattgggctcttcactactgttagaaaggaaaaaaaaaagcaagcctagtttttaaatgtataattcacacatggatacctcatctctatccatatacttaattatagattgtaaaact

SEQ ID NO: 1038069 - DNA, 120 bp, Artificial Sequence
  ENSG00000287105_11 (sequence is synthesized)
aattatgtacactttggcatttccctctgatgctccttcagatattctacattcatcttcacaacatctttgtaaggtatgaccaaaagatcaattattttcctctaatgggaagaagaa

SEQ ID NO: 1038070 - DNA, 120 bp, Artificial Sequence
  ENSG00000287105_12 (sequence is synthesized)
atggaaagtagtttgccaaggtcactcatcgttagtgctggaacttggtggcctgaagcccaggtctcatgattgttgctccagtgctcaatccaggaagtcatgttgcctccccaacca

SEQ ID NO: 1038071 - DNA, 90 bp, Artificial Sequence
  ENSG00000287105_13 (sequence is synthesized)
accaagtatattagtccattttcacactactgataaagatatacctgagactgggcaatattgcacatggcttgggaggcctcacaatca

SEQ ID NO: 1038072 - DNA, 120 bp, Artificial Sequence
  ENSG00000287105_14 (sequence is synthesized)
tggcctcaggcaaagacagtgcttgtgcagggaaactcccctttttagaaccatcagatgtcatgagacttattcactatcaggagaacagcatggaaaagacctgtctccatgattcaa

SEQ ID NO: 1038073 - DNA, 120 bp, Artificial Sequence
  ENSG00000287105_15 (sequence is synthesized)
ttacctcccactaggtccctcccacaacacataaaaattcaagatgagacctgggtggggacacagccaaacaatatcagcaagccagagaggatgcaaccaagtgcatggtcaaacctg

SEQ ID NO: 1038074 - DNA, 120 bp, Artificial Sequence
  ENSG00000287105_16 (sequence is synthesized)
ttctcacccttcaaccagaaagcagcatatacgcaatagattacacaacaatcaagaagcagcccccatctccatccagtgcaacagaccatgctggagcacctctgccttataaagccc

SEQ ID NO: 1038075 - DNA, 120 bp, Artificial Sequence
  ENSG00000287105_17 (sequence is synthesized)
ttgttgttacaatgatagcaaaagcagaggtgctatgtcacattaatggcatagtcagtcacattaagctccttaaaaataaagtttaatgtatgtaaggctctaaggtatttctcatgg

SEQ ID NO: 1038076 - DNA, 120 bp, Artificial Sequence
  ENSG00000287105_18 (sequence is synthesized)
ctcatcccatttaatccttacaaaaaattatgaggtaaatataataaccctgatatagaaactggcaagtgccagagtgaggttctaaacccagttctgttcactctaccctcccattgc

SEQ ID NO: 1038077 - DNA, 120 bp, Artificial Sequence
  ENSG00000287105_19 (sequence is synthesized)
tagagccggaggctctttgtgggatgtcacaaagcaggtcactaccacttttggggacaggagagacaaactcgagtaaatgactcttggaggccagctcagtagagaagagcaagcaaa

SEQ ID NO: 1038078 - DNA, 120 bp, Artificial Sequence
  ENSG00000287105_20 (sequence is synthesized)
gtggaacaaattgcccttgagttacctctcgactgtggtactaatttaactttgtgaccttggcatagtcaagcccagtgacgaagtgattccatagccatacaaatgatttctgactaa

SEQ ID NO: 1038079 - DNA, 120 bp, Artificial Sequence
  ENSG00000287105_21 (sequence is synthesized)
aatgggcacctggagggtgaaaaataatgaatttccatatgaatgagcggattatgggatatgcctctccagtgggctgggcctcactctcactttttgtcactcttttctcctcatcac

SEQ ID NO: 1038080 - DNA, 120 bp, Artificial Sequence
  ENSG00000287105_22 (sequence is synthesized)
tgctgcatttttaagggccttaaataactcctgcattctagatatacactccagtgtaaatatgcagaacattttgacacttaaaaatatgtccatagcgaagtaggacaggttggaatt

SEQ ID NO: 1038081 - DNA, 120 bp, Artificial Sequence
  ENSG00000287105_23 (sequence is synthesized)
atagtagcctggaggcataaggaagagaaaggagtaatactttactttctgaagttacaaggaatagttttaccagccaattgctgcagagggaggataaaattactaatcaaatcaaca

SEQ ID NO: 1038082 - DNA, 120 bp, Artificial Sequence
  ENSG00000287105_24 (sequence is synthesized)
aatgcataggctagaaaacaaataaattatttcagcactatttcagaaacccatgtttcatcaatgataaatcactaagtagaagggaagctacgagtactgtacttattttaaagactc

SEQ ID NO: 1038083 - DNA, 120 bp, Artificial Sequence
  ENSG00000287105_25 (sequence is synthesized)
aaaatatgactcaacatcttcatggagtgatatattcatttattcaaaagtgaaccatcataatatatgaatgggtataccgcatttacatataatatgccaggcagtgataaatcagaa

SEQ ID NO: 1038084 - DNA, 120 bp, Artificial Sequence
  ENSG00000287105_26 (sequence is synthesized)
ctacgaacacccactgcctcagttccccgatgatagcctcaactaatttctgcctgataaagcaaacaagtaaacaaaatgattgtcccggtttcctaaagagtcttgtactgaatcctc

SEQ ID NO: 1038085 - DNA, 120 bp, Artificial Sequence
  ENSG00000287106_0 (sequence is synthesized)
gttttcaactcactacttttgtctgtgctattctttcattcaggataccgccccaacctctccacctggctaaatcactcatcctttgagatgcagaagccaaagagatcctcagcacat

SEQ ID NO: 1038086 - DNA, 120 bp, Artificial Sequence
  ENSG00000287106_1 (sequence is synthesized)
acctccagaaagccagttactgcaggggatgcgtacggaccagccaggatccttaaagcataaaggcaagagccaagtctcagtaaactctgcatgggccacagctcggaaaagaaaaaa

SEQ ID NO: 1038087 - DNA, 120 bp, Artificial Sequence
  ENSG00000287106_2 (sequence is synthesized)
acctgttatatcatgggagctcagtgcttgctgaactgaactgattcacatcatgacttgggattcatgaaccagaagcacaggaaattaataaaaactgaaaacgagccaaagagaagg

SEQ ID NO: 1038088 - DNA, 120 bp, Artificial Sequence
  ENSG00000287106_3 (sequence is synthesized)
gaaaggctctcttaccactgttgagaatgttatgtttaatccctgcaagcagtagagactcagtgtacttccatgaagtgctgcttgggcattcatgaggcattaagggagaaagaattt

SEQ ID NO: 1038089 - DNA, 120 bp, Artificial Sequence
  ENSG00000287106_4 (sequence is synthesized)
ttaaaatctttgtcttctcaaaagggaataccacgatggggccatgtctagagcaaggtgtctaaggtgattctagggccctcgcccaagaaacgaaagcagcattgaacatgtccagga

SEQ ID NO: 1038090 - DNA, 120 bp, Artificial Sequence
  ENSG00000287106_5 (sequence is synthesized)
aggatgtgaagcctgaagccaatgcagaagacaaagctagataacccctgtctctaagacatagggacttagaactcttaccctgatgagcaacattgaacattggatgtgttcaccaga

SEQ ID NO: 1038091 - DNA, 120 bp, Artificial Sequence
  ENSG00000287106_6 (sequence is synthesized)
atggaaggagacacactcctgccgaaatcatgaagggcaaactgacccagaaaagggacaggtcaaggaaggtattacctctgcatagttctaggtgtcctgcttaactcattcaggaat

SEQ ID NO: 1038092 - DNA, 120 bp, Artificial Sequence
  ENSG00000287106_7 (sequence is synthesized)
aaaacagaaaaagtgcttgaagaactggaaggaacagtgatcattcttgtcagatggaatcttaaaatccagtgggtttcaaaggatgagcaggagctggacatgaagggattggaggat

SEQ ID NO: 1038093 - DNA, 120 bp, Artificial Sequence
  ENSG00000287106_8 (sequence is synthesized)
ggggactggaaatggggagttcattgcaatcagaaggaagagcaagaaaggaacaaaaagcaagcagtgtttggggagaccaggatgtgattccagtttggccaaaatatagggtatact

SEQ ID NO: 1038094 - DNA, 120 bp, Artificial Sequence
  ENSG00000287106_9 (sequence is synthesized)
gggagaatctattgaggttttgggagtgtatttgtttgtagtttgaaaacacctaagcaattttgaagagaagcagactctttaagtcagatgctgggttctccagtccaaatatgccaa

SEQ ID NO: 1038095 - DNA, 120 bp, Artificial Sequence
  ENSG00000287106_10 (sequence is synthesized)
tataattgtgtctggtcaatgtctatcctgtccatccctcctgagtgccagatctaaatccaggtgccaatggatgacttccacttgggtgccccacaggcgtcatgaattcagtatgac

SEQ ID NO: 1038096 - DNA, 120 bp, Artificial Sequence
  ENSG00000287106_11 (sequence is synthesized)
tgaaaaggactcctcctatcttcagcgatggttccactacacaatacactgtccaagccagaagtcccaaactagccttctgtccttccttctccattcaccacgcctgtcatccccttc

SEQ ID NO: 1038097 - DNA, 120 bp, Artificial Sequence
  ENSG00000287106_12 (sequence is synthesized)
agagctgttggccaaatcttgttgattttaccaagtatctatcaaaatgtttcctcttcctccctgtactcactgcaatcacttttgctcaagggctcatcatttcgtgcctgggtgact

SEQ ID NO: 1038098 - DNA, 120 bp, Artificial Sequence
  ENSG00000287106_13 (sequence is synthesized)
agagttgtttcccagcaggtctccccaccctcctttctcacatggctgccagaacggtcttctgaaaggcaaatctgaccattcgacaactctgctctaaattcctcctatggatcccca

SEQ ID NO: 1038099 - DNA, 120 bp, Artificial Sequence
  ENSG00000287107_0 (sequence is synthesized)
ggggatcagaggcgacactcattgtagcagagaggcaggaccaactgggagagggtccttctgtgacaactattgcatcaccgggctgtgtgaagtgactcagctgccagaactcacaca

SEQ ID NO: 1038100 - DNA, 120 bp, Artificial Sequence
  ENSG00000287107_1 (sequence is synthesized)
atatcattctacaccaaacctcacgggaaaaatggtcacacttaaattggcaaaatagcaacgtgcagacagcaccttgtctcatttgaacaagacatctggagcctggagatcccaggg

SEQ ID NO: 1038101 - DNA, 120 bp, Artificial Sequence
  ENSG00000287107_2 (sequence is synthesized)
gtttcttccctgccttcctcagcatgttaacctttcagcttcacatccgcatcctcatggtcacaagatggctgacaagctccagctctcccatccctagaaagacttcagctggcaaag

SEQ ID NO: 1038102 - DNA, 120 bp, Artificial Sequence
  ENSG00000287107_3 (sequence is synthesized)
caacgcaaatggctgagcgtcgaggatagaagtggctgaacagcgagcagagaagcaactgagcatcggaggttggagatagatgcagctaacttcagatactgtggttttagagagggg

SEQ ID NO: 1038103 - DNA, 120 bp, Artificial Sequence
  ENSG00000287107_4 (sequence is synthesized)
cctggccagagacggctgggttccagggacagaccaccttcccatcccctttccagcctccctttccactgagagctgctcgctgctcaataaagtcttctacattcatcacccttcaaa

SEQ ID NO: 1038104 - DNA, 120 bp, Artificial Sequence
  ENSG00000254139_0 (sequence is synthesized)
cttagaagaaggctgactattcctatgggagagaccacacagaaactaaaaatacttggaagaggagaggggctcagttgagcccaaccttccagccaactccagcagggtggcaagtat

SEQ ID NO: 1038105 - DNA, 120 bp, Artificial Sequence
  ENSG00000254139_1 (sequence is synthesized)
gagagtgaggatatcttggagcctcagcaacctgtgctatccaatagctatcagccacatgtgactactgagcactcaaaatgtggagcatcctgcatgattctatagcactcaacaggt

SEQ ID NO: 1038106 - DNA, 120 bp, Artificial Sequence
  ENSG00000254139_2 (sequence is synthesized)
gtctgccaagcggacagactacagacccctctggccgcatgatgctgagcttccccttggacacatgaagattaagttagtcaagcatggagattcctccctctccttcacaaactccag

SEQ ID NO: 1038107 - DNA, 120 bp, Artificial Sequence
  ENSG00000254139_3 (sequence is synthesized)
atgtttggcatctccccaatatcctaagacctcctggactgggaacaaaatgagcgtagtgaaagaggaagcagctttagagaaagcaccacagggaacaaaccaataaaaaagcaggaa

SEQ ID NO: 1038108 - DNA, 120 bp, Artificial Sequence
  ENSG00000254139_4 (sequence is synthesized)
actcagcacaagcctgatttatgtcactgcacttctctactctcagccccattcccccaaactcccagcaagcacacaagcacacacaggcacacacatgcacatgcgcacacacacatg

SEQ ID NO: 1038109 - DNA, 120 bp, Artificial Sequence
  ENSG00000254139_5 (sequence is synthesized)
cacatacacaacacacacacacacacatgccttctgccagcagctctctttctcactctcacttttcttttcaaatgctggcatttgaaaaaatcccctattttgtttcaccctcctttt

SEQ ID NO: 1038110 - DNA, 120 bp, Artificial Sequence
  ENSG00000254139_6 (sequence is synthesized)
ctgcctccctaaagagcttccgaagaggagttttgatggtgcatctgagtgttaatagattcgggagtgtgaagctgttgcctgaatctcattccctgagagtgcctttctctttttaat

SEQ ID NO: 1038111 - DNA, 120 bp, Artificial Sequence
  ENSG00000254139_7 (sequence is synthesized)
agctgagaaagaattgatcaagcctctgttttagtctctgtttctaaacagaaagaaagaaagaaaaaggaaggaaggaaacaaggaaggaaggacatacaacgtaaaaacaaaaacatt

SEQ ID NO: 1038112 - DNA, 120 bp, Artificial Sequence
  ENSG00000254139_8 (sequence is synthesized)
tttacgacgatccctttttcaacagctaggggcaatccagtgtgttcagttgtgttagttctgtgtctgtcaggagaaaaagccatgtagaagtgatgatttagttttcttggtgggaac

SEQ ID NO: 1038113 - DNA, 120 bp, Artificial Sequence
  ENSG00000254139_9 (sequence is synthesized)
acaagggaagctagttgaaagcaatggttgtggggtcttgaatggacaggcaagtccggtagtcagaagaagattttgattagaaacagaggaatttcttccaggaaaatacattgtctt

SEQ ID NO: 1038114 - DNA, 120 bp, Artificial Sequence
  ENSG00000254139_10 (sequence is synthesized)
ttgttcaattgaaacactttcctgaagccaattgttgcaggctgccagccaccttcagtaccagccacccctccgtcctccccagggccggtataaggggtgcatgagagacacgtgcat

SEQ ID NO: 1038115 - DNA, 120 bp, Artificial Sequence
  ENSG00000254139_11 (sequence is synthesized)
gcagaagactccaccatgatgcctggctcccattgcactgtcccagagcggcgtagtggcagctggggttagtgctatctgtcatgaaagggcattctactccggttggcagagaacact

SEQ ID NO: 1038116 - DNA, 120 bp, Artificial Sequence
  ENSG00000254139_12 (sequence is synthesized)
cacacacggggaagctgagccatcagtgcaggagttaattcccgtttgcaataatactaaggatgtcgcattcatatatactcaatgagcactaaaggaatcataggaatatgctctcac

SEQ ID NO: 1038117 - DNA, 120 bp, Artificial Sequence
  ENSG00000254139_13 (sequence is synthesized)
aggagataatgtagccacagtagataaaggaggatgtcctggaagaaggggaaccttttttaagccaagggagaaaaccactgaaaagtaaatctttgcatgtagctgtgcagctctgca

SEQ ID NO: 1038118 - DNA, 120 bp, Artificial Sequence
  ENSG00000254139_14 (sequence is synthesized)
gatctaaaatctgtgctttttaaaagtatactctgtggagtagcagtccacatcaaaaggtcacagtttaaaagttttgtattgtgcttgggttatcccttaagatgttagttatatcat

SEQ ID NO: 1038119 - DNA, 120 bp, Artificial Sequence
  ENSG00000254139_15 (sequence is synthesized)
cacaaaagaacaagagtaaactgtaatttactatttttggagtatttttttgttgttaggcatttgaaggatgaggtgcacagtgcccaagagtatgtcacagcggcaatttccacttta

SEQ ID NO: 1038120 - DNA, 120 bp, Artificial Sequence
  ENSG00000254139_16 (sequence is synthesized)
tgcagaattaatactcaattacttatctgcttacctggaccttgagtgaataatagattcctaataaagggtttttgagcaaatggacaaattggatgcatttatgttatagcagccaca

SEQ ID NO: 1038121 - DNA, 120 bp, Artificial Sequence
  ENSG00000254139_17 (sequence is synthesized)
acagcaaaagaaaatcaaacacttacaaaacagaagtcaatcaagttttaactagaggagacaccaaagtatcatacagtggaggaaaaattcaaatgttctgcgccaagctcctatcat

SEQ ID NO: 1038122 - DNA, 120 bp, Artificial Sequence
  ENSG00000254139_18 (sequence is synthesized)
gccaattgtacatgtttgtgcgtatgtagggtagctagggttggatgtgtaatcatccctaaaattcatttggtgaagaaaaatacattttatttgaaatcattgtctatttttattcct

SEQ ID NO: 1038123 - DNA, 120 bp, Artificial Sequence
  ENSG00000254139_19 (sequence is synthesized)
gccaatattttgtataacatagaagtctgccccagagtgtaaataaataatgaggaaggtcacagatctaaatatactatcttggttcaataataaaaagagaattttttcctcgtaaga

SEQ ID NO: 1038124 - DNA, 120 bp, Artificial Sequence
  ENSG00000254138_0 (sequence is synthesized)
tttttgctgtttccagagagctccagggcccttttctttgctgggaaaccactagtcctctttgatagtggagttgagagagttgggtagggctggcccacccaaaagagcagcaagaag

SEQ ID NO: 1038125 - DNA, 120 bp, Artificial Sequence
  ENSG00000254138_1 (sequence is synthesized)
gtgcaggtttgctacataggctcgatgatttctgggggccttttgaaataccatcctgacttgcagaagtcatagtttgatattgctgcttgctggcttaagaagagttttgatcagagc

SEQ ID NO: 1038126 - DNA, 120 bp, Artificial Sequence
  ENSG00000254138_2 (sequence is synthesized)
atttgggtaaagccattgaagcacattgagacaagagaagtctgcagcctgcacacggaagaggaccctcaccagagcctgaccttgctggcaccctgatcttggacttctggcctccag

SEQ ID NO: 1038127 - DNA, 120 bp, Artificial Sequence
  ENSG00000254135_0 (sequence is synthesized)
aattgtgcagaaaatccacagaactcgtgagcaactccttagtggattgggctgaaagaaaatcaaacccgtgaaagccctgaattgatgtggttatgaaagcgcattggccaagctggc

SEQ ID NO: 1038128 - DNA, 120 bp, Artificial Sequence
  ENSG00000254135_1 (sequence is synthesized)
tttccttcctctgacccccatctaactatggtgaacgccctcgtgttcaagatggggggcccctgttattgcatcttcacacatgatgtccaaagcaggaagacaggaagagaagcaaaa

SEQ ID NO: 1038129 - DNA, 120 bp, Artificial Sequence
  ENSG00000254135_2 (sequence is synthesized)
agtcactaggaaagagcagtagagatgccacagttgccttagcctggctggatttgttccctcaggctggacccagaaccacctgataaaactcaggatttaacaaactaagaaggatgc

SEQ ID NO: 1038130 - DNA, 120 bp, Artificial Sequence
  ENSG00000254135_3 (sequence is synthesized)
cagctccaggaatgggcttaaggaaacctatctatttgcttaaggattgagcttgccgtcctgatccagccaactcaccaactgtgctccttccattccagtattctctcccaggaaaaa

SEQ ID NO: 1038131 - DNA, 120 bp, Artificial Sequence
  ENSG00000254135_4 (sequence is synthesized)
atttttcttctactatggttctggctttgtgatctgtgtacatttaatcattcgtgcagagctttaaaatttatagtgtgcttccatgtgtattataaaatttgaatgttaattttacaa

SEQ ID NO: 1038132 - DNA, 120 bp, Artificial Sequence
  ENSG00000254135_5 (sequence is synthesized)
atctaactatggtgaacgccctcgtcagtgggatgaggctcccaggctcctgatagcaggtagaggagagaacgagaccgcaaagagggaagccgagaggagtgatgaagaccctggccc

SEQ ID NO: 1038133 - DNA, 120 bp, Artificial Sequence
  ENSG00000254135_6 (sequence is synthesized)
taccatctactcaggctgtctttgcagccacactgtgagcccaggctggttaacgcttcctcctggaggagaaaagctaagagagaaaacaaaatccatgcagcgcgctccccctcggcc

SEQ ID NO: 1038134 - DNA, 120 bp, Artificial Sequence
  ENSG00000254135_7 (sequence is synthesized)
tttccaataactgcatttgacgggcctgttacctcctcatctcagctcacctttcccagccatgaagcaggtggcccagtgcttgctcactggcctggcatctcccggtggagtcaccag

SEQ ID NO: 1038135 - DNA, 120 bp, Artificial Sequence
  ENSG00000254135_8 (sequence is synthesized)
ggatgcagggccatagggatgtgtgtgtgaatactggtgttcacagaatgcaaaggactgtgggccaagccagcaaggaaataagccaggcagccattataacacaggtgacttggatgt

SEQ ID NO: 1038136 - DNA, 120 bp, Artificial Sequence
  ENSG00000254135_9 (sequence is synthesized)
acaggcaccaagatatattaactgaggagattccatatcctcagttccatagctgaatggttgacacacctgaagcagtcgataacatttgatgaataaatgaacgaatgaaaagataca

SEQ ID NO: 1038137 - DNA, 120 bp, Artificial Sequence
  ENSG00000254135_10 (sequence is synthesized)
atctaactatggtgaacgccctcgttgatcgaatggcacacatctgtgaatagacagccacatctctgctgccagaatacagctgctgaggtgtttggggcttacttggagaaatgagga

SEQ ID NO: 1038138 - DNA, 120 bp, Artificial Sequence
  ENSG00000254135_11 (sequence is synthesized)
ccttcctctgacccccatctaactatggtgaacgccctcgttcccacaggtctaagaaagtcaaggacttgatatttaccattcattggctctacacaaatggggatctgcactcagaag

SEQ ID NO: 1038139 - DNA, 120 bp, Artificial Sequence
  ENSG00000254135_12 (sequence is synthesized)
ccacagaaaaagaagaaaatgcagttcaccacctcccagcagtcctggtggtgtaggaggatgcgccgaggccaatctttgatggctgctggttacttcctcatgagcagtgttaggctg

SEQ ID NO: 1038140 - DNA, 120 bp, Artificial Sequence
  ENSG00000254135_13 (sequence is synthesized)
ttggagagtgtcttgaccttcacagatgtcttgcaaaaggaagtcagtatattgcgtatctctgaagatgagaattttggtgaagtttctgaaaggtcacagagcttccgaatgcccaac

SEQ ID NO: 1038141 - DNA, 120 bp, Artificial Sequence
  ENSG00000254135_14 (sequence is synthesized)
agtttgtccagtattacacactcttctgcctctcttgcttgtatcccctttcttctctctaacccctgcagtttgctcctccccccatattgcttctctttctttctctcctttttagtg

SEQ ID NO: 1038142 - DNA, 120 bp, Artificial Sequence
  ENSG00000254135_15 (sequence is synthesized)
gtacacatacaaagtactgttcacttctttgctaaggttttatgtacactctgaggatatcagagaattcggagaaaatccatggcacagattggatgcataatacatgtacgtacttga

SEQ ID NO: 1038143 - DNA, 120 bp, Artificial Sequence
  ENSG00000254135_16 (sequence is synthesized)
tagaaagcccctgtgtcccggatatgcttgtagaaaaggggtaaacagtggttaaaagcatgaacattggagtgaggaagacttacctgagacttattccccatcacttactagctgcgt

SEQ ID NO: 1038144 - DNA, 120 bp, Artificial Sequence
  ENSG00000254135_17 (sequence is synthesized)
gacctccagcagtgccttcatgtctgaatgagcccgggttttatcatccataaaatgggaacgataatagcccctactttgtacagttgttttaaatatttaaaaaatagtggatgcaaa

SEQ ID NO: 1038145 - DNA, 120 bp, Artificial Sequence
  ENSG00000254134_0 (sequence is synthesized)
ccaggtgccctgtctttggagcagctacaggagtcaggcccagactagaagagcccacactgaccttctgcatcacttatgctctctctggccactacatcacaaacagtgcttatgact

SEQ ID NO: 1038146 - DNA, 120 bp, Artificial Sequence
  ENSG00000254134_1 (sequence is synthesized)
ggcctgaatctgccagcccaggaaagggctggaatggatggggtgcattggtagtgatggtgggggtcctactagcctgtggcaaatggaagcatctcttttttatcagactgaataata

SEQ ID NO: 1038147 - DNA, 120 bp, Artificial Sequence
  ENSG00000254136_0 (sequence is synthesized)
tttacttgtaaagaaaactaaaatgaagctcagcgctttccttacatgcaggaaagatgggtccaggccatggcccttgccccttaagtcgtcctagggtgtcccctccacaccctccag

SEQ ID NO: 1038148 - DNA, 120 bp, Artificial Sequence
  ENSG00000254136_1 (sequence is synthesized)
tccttagtccgaggaggactggcccagcggtagcttttgagagtcacaggctgcaatggtgcgggagggagccgcggctagcggaaagcgagaccacccggtccaccaccgcatcctaga

SEQ ID NO: 1038149 - DNA, 120 bp, Artificial Sequence
  ENSG00000254136_2 (sequence is synthesized)
ggggcactcagaaaggcccagagctggaacgtcatgcctggactccctcactatttggaaagacttctttggagtcctgtcatctaagctacaataaagctttgttcttcattggaaaaa

SEQ ID NO: 1038150 - DNA, 120 bp, Artificial Sequence
  ENSG00000254130_0 (sequence is synthesized)
ggcaacctgctcagtttctctctgcagtgtggaaggtttgttcttttgctgtttgcggtaaatcttgctgctgctcactgttttggtttgcattccctttatgagctgtgacactcaccg

SEQ ID NO: 1038151 - DNA, 120 bp, Artificial Sequence
  ENSG00000254130_1 (sequence is synthesized)
caaaggtctgcagtttcactcctgaggccagtgcgaccacgaacccacagggaggaatgaacaactcccgacaggaggaatgaacaattccagacgcgcgccgccttaagagctgtaaca

SEQ ID NO: 1038152 - DNA, 120 bp, Artificial Sequence
  ENSG00000254130_2 (sequence is synthesized)
atcagaaggagaaaacttcggacacaccgtctttaagaactggaacacttataccatgagggtctgcggcttcattcttgagccattcaacatagtgcatcagaagtgatctttcaacac

SEQ ID NO: 1038153 - DNA, 120 bp, Artificial Sequence
  ENSG00000254130_3 (sequence is synthesized)
atccagtacatgaataaatgaaaaacgcaagttacaaaacattacagaggtaaaatcataaatatagtccctgaatttcatggccacctgaccttcacatgaagctcatattaaagccat

SEQ ID NO: 1038154 - DNA, 120 bp, Artificial Sequence
  ENSG00000270540_0 (sequence is synthesized)
ggtgattcaggtcatacacatatcaaagccataaagaaaaaaaaaaagaaaaaagcgaacgtgagccgcagatatctgtgctgtggagagcccatctttcctgcatcgcctgcacaccac

SEQ ID NO: 1038155 - DNA, 120 bp, Artificial Sequence
  ENSG00000270540_1 (sequence is synthesized)
agagctctagtgtgtctgtctgaaaaaagtcacaattgaacctcatttagcagtgagagtagacgtcggtgaaaactggcagggccttaaaggtgatcctttagatccatgaaacacact

SEQ ID NO: 1038156 - DNA, 120 bp, Artificial Sequence
  ENSG00000270540_2 (sequence is synthesized)
tgcactgactcctgaaaggctgcctctgtttaggacctagtaataggagcctgtgggtaaaaggcaagtggtagccctagcccgttctctaatttgattaatcgtaattgcaggtacttg

SEQ ID NO: 1038157 - DNA, 120 bp, Artificial Sequence
  ENSG00000270540_3 (sequence is synthesized)
ctttgcctattatctccccagctcattgcctgtatgtccttcagcccagcactgctaagcaggcacgcagagagggtgcagaagtgctctccctggtagtactttgtgtgctggtgggtg

SEQ ID NO: 1038158 - DNA, 120 bp, Artificial Sequence
  ENSG00000270540_4 (sequence is synthesized)
cactatcaaaatgaaactgtgcccactcagaattctcagtaggaaaagttaaggagcactgtacttttgatgacaaacaggaacacactgtccaaaccagcaagcggtgcaagctgcttt

SEQ ID NO: 1038159 - DNA, 120 bp, Artificial Sequence
  ENSG00000270540_5 (sequence is synthesized)
ggaaaaggcacatccgcgcacgccgagtctttacctaatggccagattccgtacaatgtgatgagctgtctgacatccaggagggagggcatgggttctatggacacctggcgaagagta

SEQ ID NO: 1038160 - DNA, 120 bp, Artificial Sequence
  ENSG00000270540_6 (sequence is synthesized)
tcggagaatacaaattgaacatttcagagcaaagagaatcctattaggagagtcattatgaagaacacatcttttctcagataaaggtttgaagaaaagctatccaggcaagaaagccct

SEQ ID NO: 1038161 - DNA, 120 bp, Artificial Sequence
  ENSG00000270540_7 (sequence is synthesized)
gctctactagctagagtaaactgggaatgatgttgactattatattagcctcctaatactttctaaaacaacatttgaatatagagttatgtgaaatgggacaaagtgctaaaaagaagg

SEQ ID NO: 1038162 - DNA, 120 bp, Artificial Sequence
  ENSG00000270540_8 (sequence is synthesized)
acacacaaaaaaggctgaaatatagggggctctgctttatttatattccaatagattatgtataacatttgtgcaaactttataaataagttatttaagatcgatgtagaatttgtattg

SEQ ID NO: 1038163 - DNA, 120 bp, Artificial Sequence
  ENSG00000270540_9 (sequence is synthesized)
gagcagtgtaaatctgagtgtaaaatgcagtcatttgaaaggaagggtatgagtctaatttaggataaatagaaacatctccttttgagggtaatattcatttacatttttatcattttt

SEQ ID NO: 1038164 - DNA, 120 bp, Artificial Sequence
  ENSG00000270540_10 (sequence is synthesized)
aagagagtaccaaaggaataatgcagaaataaatctttacaggtttaattagaagatatcaaagggcttaattgtaactagtcataaatctgaagtgttattttctaactaatttagata

SEQ ID NO: 1038165 - DNA, 120 bp, Artificial Sequence
  ENSG00000270540_11 (sequence is synthesized)
aggtcaccaagaaaattagtttggctgtctccatttgtcatgaggacggacctttataggttcatatgattctctcttgatctgtatctgaatctggagtaaaaatattcaatgaacgaa

SEQ ID NO: 1038166 - DNA, 120 bp, Artificial Sequence
  ENSG00000278719_0 (sequence is synthesized)
ggcctgaaaccctctgaggcgggtggccggcagaagggccccctccaaggggtccccaacccctgggctgtggaccagtaccaatccatggcctgttaggaaccaggccacacagcagga

SEQ ID NO: 1038167 - DNA, 120 bp, Artificial Sequence
  ENSG00000278719_1 (sequence is synthesized)
ggcgagcggcaggcaagcgagcatcaccacctgagctctgcttcctgccagagacattgcactccacatagactcgctctgtacctagtctggaatgcagtggtgtgatcacggctcagt

SEQ ID NO: 1038168 - DNA, 120 bp, Artificial Sequence
  ENSG00000278719_2 (sequence is synthesized)
cctcaaactcctgggctcaagcaatcctactgcctcagcctcctgagtagctggaaccacaggcatatgccaccatgcccagatgagggatgcaacgttaaaagatgttaaaatgacata

SEQ ID NO: 1038169 - DNA, 120 bp, Artificial Sequence
  ENSG00000278719_3 (sequence is synthesized)
catatccacaagagacagtcagaaaaacatagagactgtcttactacaatgtttccctctgactatcaagatgctgaaaacctttgagaagaagcaggggcccagatgtaaactgatctg

SEQ ID NO: 1038170 - DNA, 120 bp, Artificial Sequence
  ENSG00000278719_4 (sequence is synthesized)
aagcaactctgggaagcagtacaaatacagagttccatgagacaacacttaagagttcctcttggacaggaaagcacatgcaaacactgtccaacatgagtattcagacatgcagagaaa

SEQ ID NO: 1038171 - DNA, 120 bp, Artificial Sequence
  ENSG00000278719_5 (sequence is synthesized)
tcttataccaagtataaccaaccataaatgggcaatatagcatttttactgaaaaggtaaatatagcctaatttactctgcttaagcatgatgctcagataggagaactaatctaccgtg

SEQ ID NO: 1038172 - DNA, 120 bp, Artificial Sequence
  ENSG00000278719_6 (sequence is synthesized)
tccacagaccagtgaatttactgtggggaaacagtaaacagttgaggtgacgtctatggtctaaggcctgcagaaattgagcaatggtaaagcctcaagaggagaatgttacaggttaag

SEQ ID NO: 1038173 - DNA, 120 bp, Artificial Sequence
  ENSG00000278719_7 (sequence is synthesized)
agagaaaaggagcagggtagtgtaccccttagtttgctcgacagatgaacagtctacaaagtagaaacatgacattcaggagagccaggcaccagaagacccagagggccagagatcatt

SEQ ID NO: 1038174 - DNA, 120 bp, Artificial Sequence
  ENSG00000278713_0 (sequence is synthesized)
gcccgccaaggcccctcgccctctcgttcggcccggggccgtgggcagcactcaccgatgaggttgggcacgaacaggaagatattttcgtctggcatcgcggcgcctcccttgctgccc

SEQ ID NO: 1038175 - DNA, 120 bp, Artificial Sequence
  ENSG00000278713_1 (sequence is synthesized)
cctgctctggagatgccagtgctgtcccagccccgcagcgcggcctcagcctccggcccggcgcatcggccgcaccacctgcgccctggaccccgccgccccaacctggccccagatgct

SEQ ID NO: 1038176 - DNA, 120 bp, Artificial Sequence
  ENSG00000278713_2 (sequence is synthesized)
gggcgcgcgcagtccgcccttcctacccgcaacctccctcgcctctgccagccccgcaggcgctccgggcctccagctgcggtcgccgctgctccagctgcgcgtggcttccgggaacct

SEQ ID NO: 1038177 - DNA, 120 bp, Artificial Sequence
  ENSG00000278713_3 (sequence is synthesized)
cctcctccgcgcccgtcgttgcaaaattggagagaggaaaaagtggcttaaaaaaatagttgcggcccctttaaggcctgtcggcttcctttcccttttcctccctccgcccctctccct

SEQ ID NO: 1038178 - DNA, 120 bp, Artificial Sequence
  ENSG00000278713_4 (sequence is synthesized)
tggctcgtaccaaagcgcagaggaggagagggaggaaggaaccattaacgtcaagcaaagttagaaacggaaaaggaaagggtaaaagagaagaccgaataaaaatctctgctttccttt

SEQ ID NO: 1038179 - DNA, 120 bp, Artificial Sequence
  ENSG00000278716_0 (sequence is synthesized)
actagggtgggccctaaatccaatctgattggtagtttttaggagaagaggagagacaggcaggaaaggccacgtgaagacaggcgagagtgtagccgtggcagccacagccacgcagcg

SEQ ID NO: 1038180 - DNA, 120 bp, Artificial Sequence
  ENSG00000278716_1 (sequence is synthesized)
cccacacccaccgggagtgggaatgaggcaggaaggacctacctcctttagagccttctgtgggggcacagccctgcccacccctggatttcagacttctgggcttcagaactgagagag

SEQ ID NO: 1038181 - DNA, 120 bp, Artificial Sequence
  ENSG00000278716_2 (sequence is synthesized)
aagaaagatctgtggctttatgctatttgcagtcctgtgttatggtgggccctggagacatacaggtgggggtggtggcagatacctgccttggcctgctggctgctgctccagcctccc

SEQ ID NO: 1038182 - DNA, 120 bp, Artificial Sequence
  ENSG00000278716_3 (sequence is synthesized)
ttgcgctagatgttgagaggctgaggggcccaggagcacctcatgttttctgtgttccctggaggagacaacgttctataaatcaacaagagctgctaggtgctcatgtgggcaggtggg

SEQ ID NO: 1038183 - DNA, 120 bp, Artificial Sequence
  ENSG00000278716_4 (sequence is synthesized)
cacccctgggccttcgtctcctcatgtgtaaaaggggcagcagggtagagcaggtgatgtccgcagaagcgcccattcctgcacccccttcagaggtctagatcctcaacttgacctccc

SEQ ID NO: 1038184 - DNA, 120 bp, Artificial Sequence
  ENSG00000278716_5 (sequence is synthesized)
aggcccagggcatcgtagccagaaggaatgatgatgtaggaggctgtcaccatggtccgcctgcctggctcccaggccagcccctcgctcgctagctcctgctgctcctgaggaggtgcc

SEQ ID NO: 1038185 - DNA, 120 bp, Artificial Sequence
  ENSG00000278716_6 (sequence is synthesized)
cggtcaccgcagagaggcaccccgagtggaggcggccacaccacgagtggatgctgtggctgccccgactttgatcccagggcgggaacggagagcactgtgactccagccctggctcgg

SEQ ID NO: 1038186 - DNA, 120 bp, Artificial Sequence
  ENSG00000278716_7 (sequence is synthesized)
agcaccatgtccgtcaatagaagaggaaggctttgtgcagcagtagcgtggggcctgccgggcaattgatttaaatcattttatagagaacctatgtaaaataaaaagcctttaatcaca

SEQ ID NO: 1038187 - DNA, 120 bp, Artificial Sequence
  ENSG00000205444_0 (sequence is synthesized)
aggaaatgttcttccttgatgctctgagctctctaagaagttaccacaaaaccaaacccatcagaagtttgcaggacgtccttgtttagagctgggaaataaaccacgaaacagcgcaaa

SEQ ID NO: 1038188 - DNA, 120 bp, Artificial Sequence
  ENSG00000205444_1 (sequence is synthesized)
ggagagtccaggcctgccaatgcttccgcgaactcctcgccccgacctcatccttctccagctcctacctgcaggcctcaggcctcctgacctccaggctccttaccctcccgctggcct

SEQ ID NO: 1038189 - DNA, 120 bp, Artificial Sequence
  ENSG00000205444_2 (sequence is synthesized)
ctgctctacactcatctttgtgccctgcttccaatcatgccaggcctcggggtccctgtctctaacttcaccatgagactcaggtgcttctctacactccaccctctccaacactgtttg

SEQ ID NO: 1038190 - DNA, 120 bp, Artificial Sequence
  ENSG00000205444_3 (sequence is synthesized)
gaatctcaggcttggtcccaatcctatgggctaactttgaaaagaccgctgttcataaggagagagaaaggaggaagagatgagaaaggaagacagagaaagaaactctatgatcacggt

SEQ ID NO: 1038191 - DNA, 120 bp, Artificial Sequence
  ENSG00000205444_4 (sequence is synthesized)
gagttccagagaatgaatgctgacgactaagcaccagcctccactccctgccccatagtgagtatccctcctctgtgtgctcatgctgtgaatcccccccattctaccacttctcccctc

SEQ ID NO: 1038192 - DNA, 120 bp, Artificial Sequence
  ENSG00000205444_5 (sequence is synthesized)
atcactggcttgctgtaggatcagaagttccttaagaacaagaaccttctcccagtgtatccccagcacctaatacagaaggtaataaggaggaggcatctgctaaacgcttgttgaagg

SEQ ID NO: 1038193 - DNA, 120 bp, Artificial Sequence
  ENSG00000205444_6 (sequence is synthesized)
agtgaaattgagagaccaggaagggcctgcaggcattgtggtgagcctgcctgttgtccacgtggctgcagcaagcaaacatgggttttccttggaaggactgtgggccatcaacccatt

SEQ ID NO: 1038194 - DNA, 120 bp, Artificial Sequence
  ENSG00000205444_7 (sequence is synthesized)
aattgccgagttgcttctatcagggcaaggctgtggaatcctgttatcctagacaatgaggtacagggtgcaagcagatctgtgtgctgctgtcttccggtaaacggaccaagttctcac

SEQ ID NO: 1038195 - DNA, 120 bp, Artificial Sequence
  ENSG00000205444_8 (sequence is synthesized)
ttcccatcctcctccccagtctcacccacccgtgctcccaagagagcaattcatcatgtcagtgtctggtgttttcttgaaggcctgtgctaaataaagtggattgtttataaagtggga

SEQ ID NO: 1038196 - DNA, 120 bp, Artificial Sequence
  ENSG00000232031_0 (sequence is synthesized)
atctatgtcacttagcctgaatcctctggaaagccgagcctgaagcaatgattatgattctaatagtttattttccagatacaatcacatcacaggatgttgagcctcctcaccccatgt

SEQ ID NO: 1038197 - DNA, 120 bp, Artificial Sequence
  ENSG00000232031_1 (sequence is synthesized)
tggctctggggatatagcagtgcaagacagaaatgcagctcatggagctggcgttctgatggtgagatgcaagcaccaaacaaaggaaatacgtagatgtcactgctacacgtgttgaga

SEQ ID NO: 1038198 - DNA, 120 bp, Artificial Sequence
  ENSG00000232031_2 (sequence is synthesized)
aagaagatcatgctccttgaatcctttcttgtgcaagacctttgattccctcggtaccatccgttctatcccattccctggaccaaatgtttgcaatatataacacttctttaaacttta

SEQ ID NO: 1038199 - DNA, 120 bp, Artificial Sequence
  ENSG00000232034_0 (sequence is synthesized)
aacccaaagggctaagtcttctttcttaatttttaaaacaagcatgtgttttgttctttacatgaatcgtcggttctcccagtgtgatcacgacactgtcccatgctgattccatgcacg

SEQ ID NO: 1038200 - DNA, 120 bp, Artificial Sequence
  ENSG00000232034_1 (sequence is synthesized)
gtgcaactctttcccaagagagattctaactcaggacacctgggagaggacccgagctgcatttctcacagctaccagatgctgcacgctggcaaggttttgggatgcactgaatccagt

SEQ ID NO: 1038201 - DNA, 120 bp, Artificial Sequence
  ENSG00000232034_2 (sequence is synthesized)
tcagccatctgcctgaggtcacacagccacagtttggacctgagccatcaatcatccaccaaaagcctgcattgaccctagaagattccattgcatgttgtcaaggcgcttagtttctct

SEQ ID NO: 1038202 - DNA, 120 bp, Artificial Sequence
  ENSG00000232034_3 (sequence is synthesized)
cttgtgtctccccaaaacataaacctggaatggaagagagccacttactctatagatgcttttagctcagaacgcttcaagcttttggagtatgagaaataataacaatcattccattct

SEQ ID NO: 1038203 - DNA, 120 bp, Artificial Sequence
  ENSG00000232034_4 (sequence is synthesized)
ttcctggagtttgatctcagctgttggtgatattgttgggactgatttgctatctataaagccaaatttgagaaaagacaggttaaaaataaacagggaggatgatggtagtaaaaataa

SEQ ID NO: 1038204 - DNA, 85 bp, Artificial Sequence
  ENSG00000232035_0 (sequence is synthesized)
gccttcactgtatgaatcaaacctgaatccagccatgttccaatgtgtcatagataccctggtttgagtgggatataatgaaacc

SEQ ID NO: 1038205 - DNA, 120 bp, Artificial Sequence
  ENSG00000230015_0 (sequence is synthesized)
catcaagcaaagaacttgtaatacgctgaatgctgcatagaaggttttgaaactacttacctgctgtggaacacctgtataactttaaaatgcatcaatcaatctcgagagtatgatcat

SEQ ID NO: 1038206 - DNA, 120 bp, Artificial Sequence
  ENSG00000230015_1 (sequence is synthesized)
ctctacatgctcatgtttgccagattcagtggcctcctgaaacctggccctagctaataagttaaaaagctctaagtaatcccgagctgcatttgaatctccaagatcacttgttcatgg

SEQ ID NO: 1038207 - DNA, 120 bp, Artificial Sequence
  ENSG00000230015_2 (sequence is synthesized)
gttggtaatactttaaagagccatttgtttaactgctaatctggatcttatattctgagccccagcttttttctaaagcaaagaaaatacaaaataaaagtaagaccaaatgcctttgta

SEQ ID NO: 1038208 - DNA, 120 bp, Artificial Sequence
  ENSG00000253358_0 (sequence is synthesized)
atcagattaaaaaccacttaagagaaaaagagctcaaatataatatttccctgcatcttttctcagaaagcaaagagtagatgtgctccaccaaaatgaaggaataaactaagaactctg

SEQ ID NO: 1038209 - DNA, 120 bp, Artificial Sequence
  ENSG00000253358_1 (sequence is synthesized)
acacgacccttgtaccttctggttggattggcaatgcaggctgagctggttgttcttcagaaataagcattactgggccaaggttaattatccgtctactgtgaaaagagaaaggaaaca

SEQ ID NO: 1038210 - DNA, 120 bp, Artificial Sequence
  ENSG00000253358_2 (sequence is synthesized)
acttcactatcccacaaatggactgagagcaaaacctgcaacatatggccaaaaatatgaaatgtgctatacttgtttcataaattaagtgaattaaatgtcaagctggaggcaaaacta

SEQ ID NO: 1038211 - DNA, 120 bp, Artificial Sequence
  ENSG00000253359_0 (sequence is synthesized)
atgttgtttgggctgagctgggctttcctttttactattttaagaggtgtgcagtatgaggtgcagctggtagagtctgggggagacttggtacagctgtggtggggttgggggtgtcct

SEQ ID NO: 1038212 - DNA, 120 bp, Artificial Sequence
  ENSG00000253359_1 (sequence is synthesized)
agtgctagtggtggtagcctatactatgcagacactgaagggtagattcaccatctctagagacaatggcaagaacatgctgtacttgcaaatgaacagtctgagagatgaggactcggc

SEQ ID NO: 1038213 - DNA, 120 bp, Artificial Sequence
  ENSG00000253354_0 (sequence is synthesized)
gactgcttaataagtatgggatttttggtggggtgttgatgcaatgttttgcaactagatagggatgatggctggctgcacagcattctgattgccaaaagacttaagctaagtgtctca

SEQ ID NO: 1038214 - DNA, 120 bp, Artificial Sequence
  ENSG00000253354_1 (sequence is synthesized)
tggagaagggaaacaactattatgagtcatctacaccttactgccaacaaatctcatgtcatttcccgacaatgggtttagaggagaagaatgacatagcccaatgaagataggaaacta

SEQ ID NO: 1038215 - DNA, 120 bp, Artificial Sequence
  ENSG00000253354_2 (sequence is synthesized)
aaaaaaacaaaaaaaaaaaaacaagttttctgtatttcttctagatgggagaagacaaggaatgaaaaaggaaaccaagataatttcatactagagaggtctaggctctggaaaggaggt

SEQ ID NO: 1038216 - DNA, 120 bp, Artificial Sequence
  ENSG00000253354_3 (sequence is synthesized)
aggaggtgactaaacccctggatagatctggagattctgagatcagggagtatcagtgacacacctcgcagacctgatccttcctgaaaccagtctagcaaactggggaaatcaaggaaa

SEQ ID NO: 1038217 - DNA, 120 bp, Artificial Sequence
  ENSG00000253354_4 (sequence is synthesized)
atgaaatgactatgtggtatatctgagaagatgggccagaggcacctttgtagagttacccatagcatagaaagatcgagaacagaaggatatattctgtgtgtccaagcctagtgcaga

SEQ ID NO: 1038218 - DNA, 120 bp, Artificial Sequence
  ENSG00000253354_5 (sequence is synthesized)
catggggcgtgaagccagggcccacacacaaaaggccctgtggctgccttgaaggggctgcagggggtacctggaggaatagaggaagacaccaaagacaaaatgctcactcttgaacca

SEQ ID NO: 1038219 - DNA, 120 bp, Artificial Sequence
  ENSG00000253354_6 (sequence is synthesized)
tgagcctctacataaaaaggtccttgaacttactgggactaagttttcattacctgacaaaattgggaatcaaagtatagattaatattagttatagaaaataaaaaaaattcgtaccca

SEQ ID NO: 1038220 - DNA, 120 bp, Artificial Sequence
  ENSG00000253354_7 (sequence is synthesized)
agtggtagagggaggaagaaatgggaactgactgcttaataagtatgggatttttggtggggtgttgatgcaatgttttgcaactagatagggatgatggctggctgcacagcattgatg

SEQ ID NO: 1038221 - DNA, 120 bp, Artificial Sequence
  ENSG00000253354_8 (sequence is synthesized)
gagttcaatggtgcaatcgcggctcacggcaactagaggagttataacacaagatttggggtgacggcatggaaattaaaagctggtgaagcacatggcctttagatctggatgtacttg

SEQ ID NO: 1038222 - DNA, 120 bp, Artificial Sequence
  ENSG00000253354_9 (sequence is synthesized)
atgccgacaaattgaaagaagctttaggagtcagatcctgatagagaccagacactgctggaattctcactccaacaaaagattacttcaaggtcggaacccaaacctgggtgaagaata

SEQ ID NO: 1038223 - DNA, 120 bp, Artificial Sequence
  ENSG00000253354_10 (sequence is synthesized)
actcacttataacctggcaggatccatgatggtgccagccccttcaccaaatgtgaccataattcaaaaggatcacacagcaagtcataccacctggcacctctgagccccccttgcctc

SEQ ID NO: 1038224 - DNA, 120 bp, Artificial Sequence
  ENSG00000253354_11 (sequence is synthesized)
ttctgcattccagaccctgctttaaaaacccctgtgttcccaccacagattgaaggtggaattgtttactgctcttcctctgctagcatagagaataaaggaaaatgtcgctccctctta

SEQ ID NO: 1038225 - DNA, 120 bp, Artificial Sequence
  ENSG00000253355_0 (sequence is synthesized)
ccctttgaaggcaaggactatgtcctattccaccttgaattctcatcaccaagcggaacgcctgacacctaatctagtcagtgcttactaagtgctcattatcaatgcaagaataacaga

SEQ ID NO: 1038226 - DNA, 120 bp, Artificial Sequence
  ENSG00000253355_1 (sequence is synthesized)
gctatggaacctggcagccacctcttttctttgggcctcagtcttctcatgcagaacttgggattggactaaattggatctcctaggctgcctctgactctaacaattctctgatttaaa

SEQ ID NO: 1038227 - DNA, 120 bp, Artificial Sequence
  ENSG00000253355_2 (sequence is synthesized)
taatccaccttgcttttccatcccaggctctgttctcactcatggctgatgggcaaaggcgactaaggaggcacggctccgtgaggatgtccttacaactttgcaacccccaaggaaaaa

SEQ ID NO: 1038228 - DNA, 120 bp, Artificial Sequence
  ENSG00000253355_3 (sequence is synthesized)
gaggttgttttcccaatatctactgtaaaacctaagaggaaaatttcacgttgctgcagcttggatcatgcatttatcatttggaccacctctgaggacagggagttgcagtctgtgagc

SEQ ID NO: 1038229 - DNA, 88 bp, Artificial Sequence
  ENSG00000288172_0 (sequence is synthesized)
agattccggccagacccgatagctctcaaccagctgcttcttgatctctctggctaccctggtggtcttcaatgctctgcttctccaa

SEQ ID NO: 1038230 - DNA, 120 bp, Artificial Sequence
  ENSG00000288172_1 (sequence is synthesized)
tctggctaccctggtggtcttcaatgctctgcttctccaaggagtttatggaacatgggcctagtcaagcctgttccaagtcatcaagtatgggattaaaagtatttcagggattgaaat

SEQ ID NO: 1038231 - DNA, 120 bp, Artificial Sequence
  ENSG00000288172_2 (sequence is synthesized)
atatatgcaagcaaatatgaatatggagtctcatttctccctttcgcataaaagagatggaatctgcttatgttacccaggctggtctctaactcctagactaaagtgatcctcctgtct

SEQ ID NO: 1038232 - DNA, 120 bp, Artificial Sequence
  ENSG00000288172_3 (sequence is synthesized)
ctcccaaagtactgggattacagacatgtccccggccacatttatcttaattcataagctcagggggcagaaaacaagaatctatgaattcatactcctgagataaataaataaagggag

SEQ ID NO: 1038233 - DNA, 120 bp, Artificial Sequence
  ENSG00000288172_4 (sequence is synthesized)
ggaggaagcatttcaatacagtagctttcaaatgatggatgaagaaagaacgatggggttgaacattggcatccactacagtaatacttgtttcaggccagattcatccatggaggctaa

SEQ ID NO: 1038234 - DNA, 120 bp, Artificial Sequence
  ENSG00000288172_5 (sequence is synthesized)
acaccacatgaaccaagatcagagctaacatccccagttaacagggacaaatcaacaccgcgtagtgtgatgctctgagaaggcataacatccctgctggtgctatggtgttcctgctaa

SEQ ID NO: 1038235 - DNA, 120 bp, Artificial Sequence
  ENSG00000288172_6 (sequence is synthesized)
aaatccctaacttgaatttgatcatgagaaacattatacacactcaactgagggacattttacaaaataactgcttttacttttcaaaataatcaagaccatgaaagacaaaggaaaaac

SEQ ID NO: 1038236 - DNA, 120 bp, Artificial Sequence
  ENSG00000288172_7 (sequence is synthesized)
agaagatcattccagcttcaggcagactaaagagatgtgacaaataaatgaaacatgccatcctggaatggattctggaccaggaaaagaacattagtgggacagttggtgaaatctgag

SEQ ID NO: 1038237 - DNA, 120 bp, Artificial Sequence
  ENSG00000288172_8 (sequence is synthesized)
taagattagatgatgctattttatcaaggtcaatttcctgatttcaataattgcactgtggttatgtaagagagtgtccttgtttttaggaaatatactctataaaatatttagagatta

SEQ ID NO: 1038238 - DNA, 120 bp, Artificial Sequence
  ENSG00000288172_9 (sequence is synthesized)
aaaaaacatgatggctctgccttactctcaaatttttcaggaaacaaattgaacttatacacacctatgtttgtatatatgagagagaaaatgatgtgcacaggggacaaaatgttaagg

SEQ ID NO: 1038239 - DNA, 120 bp, Artificial Sequence
  ENSG00000288172_10 (sequence is synthesized)
tttggggaagctggtatatagaaggtggatgggaatcctttgtgctactccttcaaatttttgtaagtctgaaactattccaaaagaataagttaaaaatgagcattattctacaatata

SEQ ID NO: 1038240 - DNA, 120 bp, Artificial Sequence
  ENSG00000253357_0 (sequence is synthesized)
cagacgcttaagcgaacacacattgattatcctacggttctatagctcgagaagcctggaactctgtggtcctgcacctccccctacaccccccaacaaaaattagcctccaatcagctc

SEQ ID NO: 1038241 - DNA, 120 bp, Artificial Sequence
  ENSG00000253357_1 (sequence is synthesized)
gttcctgccaggcagttgtcaggaggagatatttgttacattcaaatgtggacacaagctcctacgaaggcaaacacttgtcatttaaagggacatctgaatatggcagcatgtttccag

SEQ ID NO: 1038242 - DNA, 120 bp, Artificial Sequence
  ENSG00000253357_2 (sequence is synthesized)
tgataacccaatttcattttacagccttttccttccctttctcttgggctctgggcctccttaccaacacatcctgttggccagcctgctctatcacagcagtatagttgaaaacctagg

SEQ ID NO: 1038243 - DNA, 120 bp, Artificial Sequence
  ENSG00000253351_0 (sequence is synthesized)
agacatgggagggcaggggcaagaacggcagcctctccctagctcacatctcaccagggttggctaagcagtcctccccttgccccacgagtggcaggacagctcccaacacttctctag

SEQ ID NO: 1038244 - DNA, 120 bp, Artificial Sequence
  ENSG00000253351_1 (sequence is synthesized)
gcttaaagtacatgtggaagggcgagcctcccaggattctcaaacagaagcagcctgccaggctgagccatccagaagaccccctccctcttccctgagctctgtttcttccatgaggtt

SEQ ID NO: 1038245 - DNA, 120 bp, Artificial Sequence
  ENSG00000253351_2 (sequence is synthesized)
gaagaaaaatgccgtcgtggtcccctgcctgcttactcagcgtgtcaagcaggagttctcagctccagtgtgccatggagggccttgggaagaggtcacataccattcccatccccaggt

SEQ ID NO: 1038246 - DNA, 120 bp, Artificial Sequence
  ENSG00000253351_3 (sequence is synthesized)
ccttgtgttgactacaggagaaacttgagccaacacctgaccttgggctagctccctcctcacatctgctttggagattccagtctcctcctgcccaggcctgtctcttagcagggccag

SEQ ID NO: 1038247 - DNA, 120 bp, Artificial Sequence
  ENSG00000253351_4 (sequence is synthesized)
caggatgggctggggaattcctgcaccccaacagctgcgtccccagctcagtacctggacaacatgaatccacccccatcgtcaataagcgtctttcagagctgccagctccctctgggg

SEQ ID NO: 1038248 - DNA, 120 bp, Artificial Sequence
  ENSG00000253351_5 (sequence is synthesized)
aaagccctttccactcgttctttgaggcccaaagctgattctggtctaattataactgtattcccagcaggtgtgacacaaagcaggtgcataataaagattcctggatggatgactcaa

SEQ ID NO: 1038249 - DNA, 120 bp, Artificial Sequence
  ENSG00000253351_6 (sequence is synthesized)
gtgtcagtgggctgccctccctccggaggctccaggggagaatctattcctcgcctcttccaattgctggtggctgatggcacaccttggcttgtggccacaatactccaatttctgcct

SEQ ID NO: 1038250 - DNA, 120 bp, Artificial Sequence
  ENSG00000253351_7 (sequence is synthesized)
ccatggtcacactgacttcatttcttctgtgtgcatcaaatttctctctgctctgtgattgcatttagggcccctggatcagcaatgtcataaaagaccccagttcttcccctgtctcct

SEQ ID NO: 1038251 - DNA, 120 bp, Artificial Sequence
  ENSG00000253351_8 (sequence is synthesized)
ctctgccgtctttggggtgttgatttgacccttaaactaattttccttatggccacaagatagctgccactgtgtcaaatattacatgcagtctcaatgaaggctagagataaaatagaa

SEQ ID NO: 1038252 - DNA, 120 bp, Artificial Sequence
  ENSG00000253352_0 (sequence is synthesized)
gtttcctcctctgcctatcaatgtgtgtggggttgaaatcgctttgtaaactataaagcgtgggtgtacgtaaaggatggttattgtttataattttttttgagttgtaagaaaacttag

SEQ ID NO: 1038253 - DNA, 120 bp, Artificial Sequence
  ENSG00000253352_1 (sequence is synthesized)
cagttccccaatccttgggttttgaacctgggaaccttggattggagttggggatccccaaacttcctgaaattgtgggaatgtgcggtttgggggaatgatgggaatttgtgggaatgt

SEQ ID NO: 1038254 - DNA, 120 bp, Artificial Sequence
  ENSG00000253352_2 (sequence is synthesized)
gcgttttaggggaatgatgatccatcgctagcaagttttccaagggggctgtgacccagaagagttaagaatcacaatttcttcatgctacagagaggaaactgaggcctagatgtcatt

SEQ ID NO: 1038255 - DNA, 120 bp, Artificial Sequence
  ENSG00000253352_3 (sequence is synthesized)
tgggacccttcacaaccattttgaagccctgtttgagtccctgggatatgtgagctgtttctatgcataatggatattcggggttaacaacagtcccctgcttggcttctattctgaatc

SEQ ID NO: 1038256 - DNA, 120 bp, Artificial Sequence
  ENSG00000253352_4 (sequence is synthesized)
cttttctttcaccatggggtgcctgaagggtggctgatgcatatggtacaatggcacccagtgtaaagcagctacaattaggagtggatgtgttctgtagcatcctatttaaataagcct

SEQ ID NO: 1038257 - DNA, 120 bp, Artificial Sequence
  ENSG00000253352_5 (sequence is synthesized)
attttatcctttggcccgtcaactctgttatctgctgcttgtactggtgcctgtacttttctgactctcattgaccatattccacgaccatggttgtcatccattacttgatcctacttt

SEQ ID NO: 1038258 - DNA, 120 bp, Artificial Sequence
  ENSG00000253352_6 (sequence is synthesized)
acatgtctaggctgtgtggttggtggtgaataggcttctttttacatggtgctgccagcccagctaattaatggtgcacgtggacttttagcaagcgggctcactggaagagactgaacc

SEQ ID NO: 1038259 - DNA, 120 bp, Artificial Sequence
  ENSG00000253352_7 (sequence is synthesized)
tggcatggaattcctgaagatgtttggggtttttttctttcttaatcgaaagttaacattgtctgaaaagttttgttagaactactgcggaacctcaaaatcagtagatttggaagtgat

SEQ ID NO: 1038260 - DNA, 120 bp, Artificial Sequence
  ENSG00000253352_8 (sequence is synthesized)
tcaaagctaaactttttccttggccctccttgtgttctaattgcttgcaagtgtaatactaggatgtccaagatgccagtttttgcttctttgttagttgtcagctgcttttatcaaatt

SEQ ID NO: 1038261 - DNA, 120 bp, Artificial Sequence
  ENSG00000253352_9 (sequence is synthesized)
tcaggccattatccaacaaacactataaaaatgtttgaacaattggatttcaaacattttcgttttgtggagtggtgctcaccaagtggtacagccctaagcaagtgaacacaaacacat

SEQ ID NO: 1038262 - DNA, 120 bp, Artificial Sequence
  ENSG00000253352_10 (sequence is synthesized)
ttaagtgtattttgtctgattagatgttagccagttatgctatttcattcaaatgtctgaaaaaatcaattgactattcccttttcctaaagggcagagacagataatctcacttccaga

SEQ ID NO: 1038263 - DNA, 120 bp, Artificial Sequence
  ENSG00000253352_11 (sequence is synthesized)
gaaatgacttggagaaaaaaaagtgttggtctttttgctcttttgtaattaaatccggatgtacctcaaaagacttaagactgtggtgataagatgctttcctcagcagaaaggagggaa

SEQ ID NO: 1038264 - DNA, 120 bp, Artificial Sequence
  ENSG00000253352_12 (sequence is synthesized)
aaaaaacaactggaactcaaagcttgaaattctgtggcaaaacatgagatgtccaggattggaggttgaaaagatttcactacagtgttctgcaatagttggagcagataactttcagtg

SEQ ID NO: 1038265 - DNA, 120 bp, Artificial Sequence
  ENSG00000253352_13 (sequence is synthesized)
tagccacagccatggactccagatttccagattttcaagacctggacctggaacccgaaagagcttgtcacgatgcggcaggaacactggaggtagatttttttttatttttgaattttg

SEQ ID NO: 1038266 - DNA, 120 bp, Artificial Sequence
  ENSG00000253352_14 (sequence is synthesized)
ggactgttgaccttgctgtgagaaaagagacaacgactgagcaagcactaccaccagcactgttactgggaattagaagacctgagtttctgtccagaccctcagtgcaaactgaggatg

SEQ ID NO: 1038267 - DNA, 120 bp, Artificial Sequence
  ENSG00000253352_15 (sequence is synthesized)
ctccatccaaagtgaattatgcctacagacctggtacctggatttttgcccgagatgattcctaccaccttactactgacgaagacacccattccagtggaccactgtgacccaggaggc

SEQ ID NO: 1038268 - DNA, 120 bp, Artificial Sequence
  ENSG00000253352_16 (sequence is synthesized)
attcagccatcatgatgtggcctttacctccactcctgtcttgttctacccagattcagcacagccctttatagtgaagtcagagtcctcaagccaaatagctaaagctgttttatcaca

SEQ ID NO: 1038269 - DNA, 120 bp, Artificial Sequence
  ENSG00000253352_17 (sequence is synthesized)
acaaaggcctagtttgttccatgagtgtgcatttcatttcttcagttaaagccttcagagacacacaataaatttggaccaggggattttttagttattaatgctctctgaagaaaggca

SEQ ID NO: 1038270 - DNA, 120 bp, Artificial Sequence
  ENSG00000253352_18 (sequence is synthesized)
acatctttttgagagcagcattggaccacaccccacaatctcaaatgattgaaattcatgaacatctaggatcccgtgaaggtcactggaccctgttttttctacttcaaatcctgtagt

SEQ ID NO: 1038271 - DNA, 120 bp, Artificial Sequence
  ENSG00000253352_19 (sequence is synthesized)
agcctactgaatgagaaaacatattctgacccattgggatcaaatcaaaggcacagtgaactcctcatagcatcttctttggaattactcaggaaccagaactttttacacaaatgtaag

SEQ ID NO: 1038272 - DNA, 120 bp, Artificial Sequence
  ENSG00000253352_20 (sequence is synthesized)
aaattctaccaaggagtccccttacctaacagcatctcacaaggctgcaccagattccagaaaaggcttctcttgatacatcaaggtagaacctctatgcattttgtgaccgacttattc

SEQ ID NO: 1038273 - DNA, 120 bp, Artificial Sequence
  ENSG00000253352_21 (sequence is synthesized)
ttagatcattggttttccaaaggctttgtggccatgaagccctttgagtgaaaactgtgcagaagcccagagtaaaagtgaagctgctctggatgaagtagtgaagcaagagtaggggcc

SEQ ID NO: 1038274 - DNA, 120 bp, Artificial Sequence
  ENSG00000253352_22 (sequence is synthesized)
tgaatcctgctacaactatcttcctttaccaccgtggtgacacctaaggggacttccttacaacaccttgaactcttccgaacacagtttgaaaaccactgccccagacagcaatatgtt

SEQ ID NO: 1038275 - DNA, 120 bp, Artificial Sequence
  ENSG00000253352_23 (sequence is synthesized)
tgacctgaatggcattccaatcttttctgtacctccactcagcacagttcatgttcagtagatgctgaacattcttagaaatactgtgtgtgaacttagaaaagtgcaagaagacaggca

SEQ ID NO: 1038276 - DNA, 120 bp, Artificial Sequence
  ENSG00000253352_24 (sequence is synthesized)
tgtctttgaccccaggaatgatcatttgctgaagatggtgtcaagtgaacctagattaacagccctccactccagatggatatccagtgattcctagaatgggatatagccagagaacaa

SEQ ID NO: 1038277 - DNA, 120 bp, Artificial Sequence
  ENSG00000253352_25 (sequence is synthesized)
caacaccagatgctctactggtacttgaagtacatgactttgaagtcttgaccctccatgaatacctgaattatcagcaagcgggttttgaagctggtgcctcattgaggccatattaga

SEQ ID NO: 1038278 - DNA, 120 bp, Artificial Sequence
  ENSG00000253352_26 (sequence is synthesized)
gcaacttgtacatttgacctcttgttatcagccatggtactctacttcgtgtgcaagagataactatgaaagccaaattcaaatactggcaacatttcctaaaggggctcaatatctatc

SEQ ID NO: 1038279 - DNA, 120 bp, Artificial Sequence
  ENSG00000253352_27 (sequence is synthesized)
attcgtcttcttttccaaactacacatcactgtatgactcaaccagtagcagttatattgccccttggtttttattcagtttaactactgtttccaagataaatgagctaataagcttta

SEQ ID NO: 1038280 - DNA, 120 bp, Artificial Sequence
  ENSG00000253352_28 (sequence is synthesized)
aaaaaaaaaaaaaaaaaggctgaattcttttttcttcatcactggcatatctgcctattctccagaattattatgactattcagctcactttaacagttgaacttcaagcgacaatcttt

SEQ ID NO: 1038281 - DNA, 120 bp, Artificial Sequence
  ENSG00000253352_29 (sequence is synthesized)
gaacaccccttctcatgtgatttaaaatgaaaccatttggaaaagtttcttctagccagtaatagattttttttttaattgctctgccttgtgccgagagatgttcttttaagatgaatc

SEQ ID NO: 1038282 - DNA, 120 bp, Artificial Sequence
  ENSG00000253352_30 (sequence is synthesized)
ttttgatgtctgataccaccaaatataggtggtagggagagttggaggctggccctttgagcaggccattagcttacttgctgggcatttccgatagcttattgcctacctttttgctgg

SEQ ID NO: 1038283 - DNA, 120 bp, Artificial Sequence
  ENSG00000253352_31 (sequence is synthesized)
aaacaaactgatttgaaaaacaaaatctatgaagactgcagctaaggattttatcggtagacttaagagcttttgtccttgtggatattttagtggaaccacatcagtctcaatactgtc

SEQ ID NO: 1038284 - DNA, 120 bp, Artificial Sequence
  ENSG00000253352_32 (sequence is synthesized)
attttacactgactcagagcagctgacttcattccttgccatgatatatatttaaggcaggcattgtaacagacataaagacaacttatctgtttcagcaggaaggattcagtttatgaa

SEQ ID NO: 1038285 - DNA, 120 bp, Artificial Sequence
  ENSG00000253352_33 (sequence is synthesized)
ctctcagaccagatcatgttgaacaaggagactttgatgtgtgtcatgagaaaactcattctttacttcccagtcaatttaaaggccagctatcctgagctactcgaatgaatgcactgg

SEQ ID NO: 1038286 - DNA, 120 bp, Artificial Sequence
  ENSG00000253352_34 (sequence is synthesized)
ttaaacattggaaatagtttgtttatatccttgtctctctctaggccaattgtgattacatgactcgactctacatctcgtcaaacaaggcctaggtctggttgctgtagactgctcgcc

SEQ ID NO: 1038287 - DNA, 120 bp, Artificial Sequence
  ENSG00000253352_35 (sequence is synthesized)
ctcaacaaataaaatctggttgactagcctccttgtatatacaactattatttgttaagaagaaattatcgtcaattttctactaccttccaattgtcagctctttttttcctctctggt

SEQ ID NO: 1038288 - DNA, 120 bp, Artificial Sequence
  ENSG00000253352_36 (sequence is synthesized)
ttttcctatactttacagaaaaagacattgatctatactgccattccctctaatcctgccatactcagtcaaaaggaatgacttaagatgaagatgatcatctgctcgagtctaaaatat

SEQ ID NO: 1038289 - DNA, 120 bp, Artificial Sequence
  ENSG00000253352_37 (sequence is synthesized)
acattgtatataagaattggtgattagaaaagcaaaaaacctaaaacttaaatctaggagtctgtatactgtctccatgtctccatgcctcagatctcatctaaatctttgaacagcacc

SEQ ID NO: 1038290 - DNA, 120 bp, Artificial Sequence
  ENSG00000253352_38 (sequence is synthesized)
attcaaccaatctgaggccttgacttgcttgtaagatgattctcagagatcggctgagttaaaaaagatgacgacttgattaccaaagaaagtagggccaactttgacaaatctggctct

SEQ ID NO: 1038291 - DNA, 120 bp, Artificial Sequence
  ENSG00000253352_39 (sequence is synthesized)
gctgaccctgtcactcccagatgtagcatagactcctaaacagaacctcaagtctgattgaggataaggccttctcctgagctgaaagttctttggcagatgagcaagaaactgaaagct

SEQ ID NO: 1038292 - DNA, 120 bp, Artificial Sequence
  ENSG00000253352_40 (sequence is synthesized)
gatgtacctgactggctctgtaagatcagaaaactgtatccagaataagccctatggattaacccctgagtacccagagtaaaaactaatttacagaacttccttattgatctgctggtt

SEQ ID NO: 1038293 - DNA, 120 bp, Artificial Sequence
  ENSG00000253352_41 (sequence is synthesized)
cttccagatcatattctggctattggtatggctggcctttctgaaggtaccctgcttgtctattttcctgactcagctcttgcctgcctttttcacatgttgctgcaattagactcaccg

SEQ ID NO: 1038294 - DNA, 120 bp, Artificial Sequence
  ENSG00000253352_42 (sequence is synthesized)
tgaggactacagtcaatttcagtctatcttgtgcccaatacaacaaggatttttaatagtaacaacccacacctcacccactaggactcaatgttcacaacaggaaggaccattgctgca

SEQ ID NO: 1038295 - DNA, 120 bp, Artificial Sequence
  ENSG00000253352_43 (sequence is synthesized)
tactccttgaccagcaacttttttgaagatatttttaagtgcagagtaggcctctattcctgtatgtaattgttcattttcagcacctggaacctcatctatcgggtctggaaggaatac

SEQ ID NO: 1038296 - DNA, 120 bp, Artificial Sequence
  ENSG00000253352_44 (sequence is synthesized)
agcagttcgaaagccgcgtccatttctctccttcagtagtgcagaaatgagtccgattcaccagtacacacagaactgtaccagttcaacctagcaaaagaagaaaagtttccactgtac

SEQ ID NO: 1038297 - DNA, 120 bp, Artificial Sequence
  ENSG00000253352_45 (sequence is synthesized)
ttaaaatttacagctgactcaaattgcctcacagaattatttgatgtagaaggctagttgtcttacttcagatcagcaggacagttgggctctcagactcatgaccactgagtttgcttg

SEQ ID NO: 1038298 - DNA, 120 bp, Artificial Sequence
  ENSG00000253352_46 (sequence is synthesized)
tgttgaaactgtggtttcatccaacatatgctattggacatgattattattccattcaaatggattacagacttcttgaggacaggacaaacttatctctcatggtgtttttttagaata

SEQ ID NO: 1038299 - DNA, 120 bp, Artificial Sequence
  ENSG00000253352_47 (sequence is synthesized)
cttttataaccaaggaagaaaccatgccagctgttaccattcaacttcttaagcagagattaagctttttcatatctgttcttatcctggacatcagtagtttttaattgcccagcatcc

SEQ ID NO: 1038300 - DNA, 120 bp, Artificial Sequence
  ENSG00000253352_48 (sequence is synthesized)
gttccatcttgtaacaactccctgatgtttcttaaaaccacctcttcctattttcagtctgtggtttggacagtctgacccaaccttgagctttgtgggtgaacatgtaattcagacctc

SEQ ID NO: 1038301 - DNA, 120 bp, Artificial Sequence
  ENSG00000253352_49 (sequence is synthesized)
atcaatcagcaaatccatctgaactgtggaggagaagctctctttactgagggtgctttagctttgtaggatgaaaacctcaaactaacagggcctaccatgtagagaatgaagccagtg

SEQ ID NO: 1038302 - DNA, 120 bp, Artificial Sequence
  ENSG00000253352_50 (sequence is synthesized)
caggggaaagcagagccaaaatatggagagacttgaatcctgatgacagcgtttgtgcccctggatccaaccgtgcctgaagctagaatatcccctggacttttcagttatgtgaaccaa

SEQ ID NO: 1038303 - DNA, 120 bp, Artificial Sequence
  ENSG00000253352_51 (sequence is synthesized)
gtttcaaagcacttgtacgtacatttatctcaattatcaaaataacagtgaattataatccctttttggaaatgagggaatgtaaattttaaaagttaagcaattatccaaggtgacaca

SEQ ID NO: 1038304 - DNA, 120 bp, Artificial Sequence
  ENSG00000253352_52 (sequence is synthesized)
gctgtgaaagtggtagaggccaggctttctgacacccagtccagtactctccttggaattagcctccattttacccacagtgttaaaatggctgggtattgggaacctcaggaaattttc

SEQ ID NO: 1038305 - DNA, 120 bp, Artificial Sequence
  ENSG00000253352_53 (sequence is synthesized)
ctgatctggtgcccctagtcacataggatgtgtgatcacgtgatagctacatctggaccagaatcccatggcaatatcccacggtttaagggcataatatctccgtggtggtagattgtc

SEQ ID NO: 1038306 - DNA, 120 bp, Artificial Sequence
  ENSG00000253352_54 (sequence is synthesized)
aagtcaaaaacgggacatgttctaacagcaaagctacccaatatgaaacacaaagctacttttagattttttaagacttactgatattcctgggccctaagagcttgtctatggtcctat

SEQ ID NO: 1038307 - DNA, 120 bp, Artificial Sequence
  ENSG00000253352_55 (sequence is synthesized)
ctttgcaaactagtatttacacaaaatgagccacctggtttttttaaagtcagtattgtgtgtgtgtgtgtaaatatgacatggagaaagcttctgttacctagtaagatagtaaagtat

SEQ ID NO: 1038308 - DNA, 120 bp, Artificial Sequence
  ENSG00000253352_56 (sequence is synthesized)
gtaagacatggcccttcccccagtctacattgaggtatagtgtattaaaggatctcaggagacttgcagcaaattactactgcttctgtgcttaaattcagaagtctgaaaaaaaaaaaa

SEQ ID NO: 1038309 - DNA, 120 bp, Artificial Sequence
  ENSG00000253352_57 (sequence is synthesized)
aaagacttctagtaaagagttccattttgctgtttaaccctttgtgtcctaagtttaatcaaacacagaaggatatttttttgcatcattccatctaatggaatgcagaaactgctctag

SEQ ID NO: 1038310 - DNA, 120 bp, Artificial Sequence
  ENSG00000253352_58 (sequence is synthesized)
agcagtataaccagtgcttcctgattgccagcagattgccctggacaccccagaataaacagcatcttcaaaatccccctttctcataccttcttattaatggttgaattagtatgtctc

SEQ ID NO: 1038311 - DNA, 120 bp, Artificial Sequence
  ENSG00000253352_59 (sequence is synthesized)
tgtcatctgagagtcttgcatcttgaccattacctttattttctgtcaagggaatccctagaagatgtatggggagacataggaaaggaatggaagaaagttaattcaccccaaattgga

SEQ ID NO: 1038312 - DNA, 120 bp, Artificial Sequence
  ENSG00000253352_60 (sequence is synthesized)
taaattccatgacatttagcaatatacttctgtatccctagaattgtatcataactttagttcaaggacattgcatctcaggtgggttaaggaggttgggaaggggagaaaagggatgag

SEQ ID NO: 1038313 - DNA, 120 bp, Artificial Sequence
  ENSG00000253352_61 (sequence is synthesized)
gagatattttcttgagatttatctccttgagataatgcttgagaagtcatccagccatggacttcttggagtaatacttacaaagaattggatgcattttgcatccttaggcaaaaaccc

SEQ ID NO: 1038314 - DNA, 120 bp, Artificial Sequence
  ENSG00000253352_62 (sequence is synthesized)
cagtgctgttacaactgaaaatcattagccttgttctctgatagatacttacaagcccaactgcaggcaatcaaaatttatagcagatgagttctaactccatcaacctgtaatgtggtc

SEQ ID NO: 1038315 - DNA, 120 bp, Artificial Sequence
  ENSG00000253352_63 (sequence is synthesized)
gacgcagccgggacggtagctgcggtgcggaccggaggagccatcttgtctcgtcgccggggagtcaggcccctaaatcgaagaagccctggcgcgccctccccccctcccgggtctgat

SEQ ID NO: 1038316 - DNA, 120 bp, Artificial Sequence
  ENSG00000253352_64 (sequence is synthesized)
agcagactccttgaaagcagggtccttgtttagtgcatctttgcccacatacaccacaacatatcaagatgcatttattaggaaggaggagtttagagagcaggctatcagaataaccac

SEQ ID NO: 1038317 - DNA, 120 bp, Artificial Sequence
  ENSG00000253352_65 (sequence is synthesized)
ctctgtggcttttcatctgtcaaaactgccattttctcagtatccaactcttatgccctcttttccatgagtctcctaactagccagaatagagctttaaagttttatgacatttcgtta

SEQ ID NO: 1038318 - DNA, 120 bp, Artificial Sequence
  ENSG00000253352_66 (sequence is synthesized)
ggagaaaagtcgctagatatggatcatgtttatgttttaatgttttttaattctaaattttgatctagggagccctcagacataaggagaaaccaatatgttgaatgatggggtattaca

SEQ ID NO: 1038319 - DNA, 120 bp, Artificial Sequence
  ENSG00000253352_67 (sequence is synthesized)
tacagaaggaccaagaccttattttctcctacttaagatggaatcttgttaagatgaaaggacagctttttaaaaggagaaggtcataagacagtttgaggaaggcattggaagaggaag

SEQ ID NO: 1038320 - DNA, 120 bp, Artificial Sequence
  ENSG00000253352_68 (sequence is synthesized)
aggggcaatgtctcctttgttttattgttggtatataaacttaaaatctcagttctttttatggcacttgtggagccacttcctctcctcaccaaaaaatgcccagtaccctgaatccga

SEQ ID NO: 1038321 - DNA, 120 bp, Artificial Sequence
  ENSG00000253352_69 (sequence is synthesized)
tcaaattactctcctaaagtataaggcttagtttctgtgtgctgcttcgcgagacagttcccacaaatcgagagtgttaatcagacttttgtgttttcttttttggattgctgttgtttg

SEQ ID NO: 1038322 - DNA, 120 bp, Artificial Sequence
  ENSG00000253352_70 (sequence is synthesized)
ttttcatttatcatttgtctttgcctaagccaggctcatcaagaattaacagccatcaggctgccgatgtgctgacagcagacccacttagagtcctgtgtttgtaattccatgcatttg

SEQ ID NO: 1038323 - DNA, 120 bp, Artificial Sequence
  ENSG00000253352_71 (sequence is synthesized)
ttattttacctgttttgtccctgccccttctagtcctgtgcctcctgattgctgagtgttcacctggaccttctgactaccttccctgtgctattccatcagcctacagacctggtacct

SEQ ID NO: 1038324 - DNA, 120 bp, Artificial Sequence
  ENSG00000253352_72 (sequence is synthesized)
gcagccgggacggtagctgcggtgcggaccggaggagccatcttgtctcgtcgccggggagtcaggcccctaaatcgaagaagccctggcgcgccctccccccctcccgggtctgtcctg

SEQ ID NO: 1038325 - DNA, 120 bp, Artificial Sequence
  ENSG00000253352_73 (sequence is synthesized)
gggacggtagctgcggtgcggaccggaggagccatcttgtctcgtcgccggggagtcaggcccctaaatcgaagaagccctggcgcgccctccccccctcccgggtctgcctacagacct

SEQ ID NO: 1038326 - DNA, 120 bp, Artificial Sequence
  ENSG00000253352_74 (sequence is synthesized)
acgcagccgggacggtagctgcggtgcggaccggaggagccatcttgtctcgtcgccggggagtcaggcccctaaatcgaagaagccctggcgcgccctccccccctcccgggtctggta

SEQ ID NO: 1038327 - DNA, 120 bp, Artificial Sequence
  ENSG00000253352_75 (sequence is synthesized)
gggcgaaggaacgggcgtgcggtcgatcgagcgatcggttggcggctctttctcctgctctggcatccagctcttggggcgcaggcccggccgccgcggcgcgcgcccggtggccgttgg

SEQ ID NO: 1038328 - DNA, 120 bp, Artificial Sequence
  ENSG00000253352_76 (sequence is synthesized)
cgctcgcgccgcgtctttcttctcgtacgcagaactcgggcggcggcctatgcgtttgcgattcgacgaggagtcgtccgggtggtcggcggcggcgggcagctgctccgccccgctccg

SEQ ID NO: 1038329 - DNA, 120 bp, Artificial Sequence
  ENSG00000253352_77 (sequence is synthesized)
gatttggagcggccggggaggcgggggtggccggggccggcttggaggcctggcgccacccttcggggcctgcaaggacccagttgggggggcaggagggggccggaggatggttggttg

SEQ ID NO: 1038330 - DNA, 120 bp, Artificial Sequence
  ENSG00000253352_78 (sequence is synthesized)
caggagggggccggaggatggttggttgtgggatttctactttgccttttcctccttatgccgccttagtgaggggcgggagctctggcggcagccccggggtggggagacgagctccgg

SEQ ID NO: 1038331 - DNA, 120 bp, Artificial Sequence
  ENSG00000253352_79 (sequence is synthesized)
gacagatccaagtatttattaagctagaggtcatggtcactgaaattactttccaaagtggaagacaaaatgaaacaggaactgagggaatatttaagatcccacagaagcgtaaaaatg

SEQ ID NO: 1038332 - DNA, 120 bp, Artificial Sequence
  ENSG00000253352_80 (sequence is synthesized)
acatggtagaaagtaatagaaaacctaaatgtctgtcattaaaggataggttaaggtgtggttcagccatataggaatatctcgtatctgttaaaatgaataaagtacattcattgtgta

SEQ ID NO: 1038333 - DNA, 120 bp, Artificial Sequence
  ENSG00000253352_81 (sequence is synthesized)
tggaaaaatggccatgatacattaggtgaaacaagttattaatagaaaagtgtacagtgtgaactcattttaaaatgtgtgtgcttatgtttataaatgcatagaaaggtctattcacag

SEQ ID NO: 1038334 - DNA, 120 bp, Artificial Sequence
  ENSG00000253352_82 (sequence is synthesized)
acagctttctttgaacagtgtagatcacatgaaactttcaactttatacatttctgtattaatattttacactacccacattatttttaaactttattttaaataaagaatttttaaaat

SEQ ID NO: 1038335 - DNA, 120 bp, Artificial Sequence
  ENSG00000253352_83 (sequence is synthesized)
aacagtaccgggggcgggccgagcgacgcagccgggacggtagctgcggtgcggaccggaggagccatcttgtctcgtcgccggggagtcaggcccctaaatcgaagaagccctggcgcg

SEQ ID NO: 1038336 - DNA, 120 bp, Artificial Sequence
  ENSG00000257449_0 (sequence is synthesized)
accacaaggcgcactcgttattagaggccagagagggacagatgcttggtgggaattgtagtgcgaagccaagaggctcccccctcccccccttcccccctgccccaagtgcttagaccg

SEQ ID NO: 1038337 - DNA, 120 bp, Artificial Sequence
  ENSG00000257449_1 (sequence is synthesized)
agcttcattttccttgtcaacaaaatggggataatcacatctaccttggaattgttatgaggatcacatggagaaacacaagtgaaatgctctgtagatataaagcatgtatcaacgatg

SEQ ID NO: 1038338 - DNA, 120 bp, Artificial Sequence
  ENSG00000257443_0 (sequence is synthesized)
aataacaccgctccagccgggggcctacgcgcgggagaaagtggagctgagattgtaggaaattcagagttatattttccagcctctccagccagaagtctccactacgtcgtgggaaac

SEQ ID NO: 1038339 - DNA, 120 bp, Artificial Sequence
  ENSG00000257443_1 (sequence is synthesized)
atatatcaaatggagttgaaaggcaaaaggaagtgatcagcgccacaagatgttgaaactaatggagaccgcagagatcatgtgctaaggggccttcctcctctggggtgggagaaggaa

SEQ ID NO: 1038340 - DNA, 120 bp, Artificial Sequence
  ENSG00000257443_2 (sequence is synthesized)
tcaccttcagggaggtgcagagagtgctggaatggagggttaattgaccatggtggaaaagagagaaacattttgaggtttgtggattacccagatgtaacagtgacttgcacatattcc

SEQ ID NO: 1038341 - DNA, 120 bp, Artificial Sequence
  ENSG00000257443_3 (sequence is synthesized)
tcatggtgttgtatacaaatggatcagcaagaatcagatactacacatcacagataaaatccatagcaaccaggaagcaagatggtcacatgggaaaataggggatggaattttatggac

SEQ ID NO: 1038342 - DNA, 120 bp, Artificial Sequence
  ENSG00000287816_0 (sequence is synthesized)
gggcatcggcccctgcggaggagttcaccgcctccccacgggtgatttcttatccgccccggatacgtcctgggaaacaggacacgggaagaatgggtgttctgtgggcaaagatgaggc

SEQ ID NO: 1038343 - DNA, 120 bp, Artificial Sequence
  ENSG00000287816_1 (sequence is synthesized)
ttggctgtgaatccatctgatcctggactttttttgaacccaatacatgtagcaataatgatggtattgacaatattaacctccacaacaaccttaatgacaacatgaaggcagagatct

SEQ ID NO: 1038344 - DNA, 120 bp, Artificial Sequence
  ENSG00000287816_2 (sequence is synthesized)
gatggggtgcactgaaaacagaagaatctcttcattttgaccggagatgtctgtggcttactagaaaagatttttggccactttggaaaaactagaagattggcaataattgacggagta

SEQ ID NO: 1038345 - DNA, 120 bp, Artificial Sequence
  ENSG00000287816_3 (sequence is synthesized)
tgtgcgttccaggtcattgcagtttgccaaccttaccccatgtactcctgctctctcagacctgaccttgccactcctctcattcttggaacactgctattactacatgaagattcacat

SEQ ID NO: 1038346 - DNA, 120 bp, Artificial Sequence
  ENSG00000287816_4 (sequence is synthesized)
tccagcccatcttccctcatctagcacagtcctgagagacctggcccgtcttgatcccttccttttctaatgcgttcctgggaaaccaggttagttctgggactgccctgatccagtatc

SEQ ID NO: 1038347 - DNA, 120 bp, Artificial Sequence
  ENSG00000287816_5 (sequence is synthesized)
aatgaattaatgaacaaatggtatttctgttactcgttgtctgatgttccacactgcacaatgtagcatgtaatccctaaagatccactcttatgcctaaccctcctttgggacccaagg

SEQ ID NO: 1038348 - DNA, 120 bp, Artificial Sequence
  ENSG00000287816_6 (sequence is synthesized)
aaatgctgcttccagcctcttgtcttgtgtcctttggaacaaaaggcagttgcatccatgatggtttgtggattgcaccaccaccggagatggacactgcttccgaggattagagtggta

SEQ ID NO: 1038349 - DNA, 120 bp, Artificial Sequence
  ENSG00000287816_7 (sequence is synthesized)
gaagtgcttaggtaagagaaaagacaagttacttggacatgttaacatgtcaagttcttcctcttactattattcctagttgtgtggaaaatccgttttgttgcttctctttgtgtgtca

SEQ ID NO: 1038350 - DNA, 120 bp, Artificial Sequence
  ENSG00000287816_8 (sequence is synthesized)
atctgtgggtctgaaagccttcaattaagatagtatttgcaatagttgcacatggcaacggagtaatacttgaaatattaaagaattcatgttgtggtccaatatggtaaccttagccac

SEQ ID NO: 1038351 - DNA, 120 bp, Artificial Sequence
  ENSG00000287816_9 (sequence is synthesized)
gtgtgacttttgggcacctgaaatgtgtccagctgagaagtgttataattgtaaaatatacttttgtgtgtttttcaattttgaagacagtataaaaaaatgcaaaaaattttaatatat

SEQ ID NO: 1038352 - DNA, 120 bp, Artificial Sequence
  ENSG00000287816_10 (sequence is synthesized)
atatattaaaataaatactaacaatatgttaatgttttcttttaaatttttctaatgtggaagaacttttaatgtaaaaaatttagaagttgtatatgtggcttgcactgtatctattgg

SEQ ID NO: 1038353 - DNA, 120 bp, Artificial Sequence
  ENSG00000287816_11 (sequence is synthesized)
tgtatctattggacaatgctgatctagctatgacatatataaaatgtgatattgattcttatattgaaaactagatgaacatttaatgctagaattgtgaatagttttatttttatgaaa

SEQ ID NO: 1038354 - DNA, 120 bp, Artificial Sequence
  ENSG00000287814_0 (sequence is synthesized)
agattctaatttgtttctcaatcagttgcttcctcgtgtgaaatgaggggacagacagctgatctttctgagctgcccatggctgggaccactgcctccattcccaacaccctgctgggg

SEQ ID NO: 1038355 - DNA, 120 bp, Artificial Sequence
  ENSG00000287814_1 (sequence is synthesized)
accccgccttccaaagaacatgccccaggcacacaggtgagctcccgccatgcactccccgtgaaagggaagccgtctggaggcagtgtggcacctgaagacgctggagctgctgctgtc

SEQ ID NO: 1038356 - DNA, 120 bp, Artificial Sequence
  ENSG00000287814_2 (sequence is synthesized)
agggacacacgccctgcccattcatctgccttctgcgccgggagcccccgcagatgcggaagatgcagggaatgattcagccccagccttaaacatcaaatagcaaatgaatagcatcat

SEQ ID NO: 1038357 - DNA, 120 bp, Artificial Sequence
  ENSG00000287814_3 (sequence is synthesized)
aagaagtcaagagaaagaccatggaagaaagaagaaactttaacagcgcttttttcatgatctttgaacaaggagctctaaattatcattttgcactggctctgtcccagctcatgtttg

SEQ ID NO: 1038358 - DNA, 120 bp, Artificial Sequence
  ENSG00000287814_4 (sequence is synthesized)
ttgagtgaataaataaataaataaatgcatacatacatatttattagtacatggaacacactgattatcttccatttcctaacaacactgtatgtaatcaggattgcaggcatgttatga

SEQ ID NO: 1038359 - DNA, 120 bp, Artificial Sequence
  ENSG00000287814_5 (sequence is synthesized)
gcatcaatgtcctcatctcaccccagtcctagttctagtcttagtggaatagattgtatcagactaatcctctgacagacaacaacgatcaactgtggatgaaattttaaaacaactatt

SEQ ID NO: 1038360 - DNA, 120 bp, Artificial Sequence
  ENSG00000287814_6 (sequence is synthesized)
taaaaatgccagagagcaaacaaaagcagacaagttagagggacttcaacccacgaaatcaataaacgtactgactgagactcatgcacacacacatgacagagggacagaagctctatg

SEQ ID NO: 1038361 - DNA, 120 bp, Artificial Sequence
  ENSG00000287814_7 (sequence is synthesized)
agaggaggacccttatccattttgttgatggcacatagtatatgttcaataaatttttgttgtcaaatgaatgttttgtttggccaacctcacttattgttttttcagttttactgaggg

SEQ ID NO: 1038362 - DNA, 120 bp, Artificial Sequence
  ENSG00000287814_8 (sequence is synthesized)
atgatttatgtaaaataaaattcacactttttaattgtaccattttatgagtttcacaaatgtatacagttgtatatctgccactatgatcaagatgtagagtatttccatcgccataga

SEQ ID NO: 1038363 - DNA, 120 bp, Artificial Sequence
  ENSG00000287814_9 (sequence is synthesized)
aagttcctttatgcccctttgctgtttatcccttccccagccccagcacctggcaatcgctgacctgatttctatagctttgccttttccagaaagttgaataaatggaatcacactaaa

SEQ ID NO: 1038364 - DNA, 120 bp, Artificial Sequence
  ENSG00000287815_0 (sequence is synthesized)
gggcgggcggaaaacgcggagcaacctcttccccctctccccgctccatctccttcccttcccaggccgcagctgtcctttgtggggcgtccagggttcgcccacatccacctccgcgct

SEQ ID NO: 1038365 - DNA, 120 bp, Artificial Sequence
  ENSG00000287815_1 (sequence is synthesized)
gggcacctggtggtgcttacatcgcgtttggtgaaacgcatcctccagccatgctatgcttgcaaagatgtctctggtcattgggaaggacggcagcttgggaaggaggatgtccgtgaa

SEQ ID NO: 1038366 - DNA, 120 bp, Artificial Sequence
  ENSG00000287815_2 (sequence is synthesized)
tgtcatcagtgagccggcgcctgtccccctctaccctggagctgaaggcagcttctacacaaaccctcctggggcctgctccgtgactcagtttccctgtcatgtgctgctgctgctttt

SEQ ID NO: 1038367 - DNA, 120 bp, Artificial Sequence
  ENSG00000287815_3 (sequence is synthesized)
ttttctctttcattagggcttcccctccaccctccctgcagggtcactgggctggtgccctgggcagggaggaacaccagcatgtggcctcagacctcagagtcctttctgctcgctcat

SEQ ID NO: 1038368 - DNA, 120 bp, Artificial Sequence
  ENSG00000287815_4 (sequence is synthesized)
ttgggaatcgccccacccccagactgtgagcacaccaagggcatgatccatctgtccaggccacccttgtgtgccactggatgcatgaaggaatgttgacatcagcctaaggtcctgcgt

SEQ ID NO: 1038369 - DNA, 120 bp, Artificial Sequence
  ENSG00000287815_5 (sequence is synthesized)
cagctcccagtagcctgatgtcaggacctcaaatgcaggctgagaagagaacataggagatgggccttttataaggccaaccagaaggtcagaagacttgggctccagccggatgcggcg

SEQ ID NO: 1038370 - DNA, 88 bp, Artificial Sequence
  ENSG00000287815_6 (sequence is synthesized)
agaggatcactcgaggcctgaccccatctctaaaaaaattaaaaaattagctgagtgtgatggtgcatgcctgcagtacccgctattc

SEQ ID NO: 1038371 - DNA, 86 bp, Artificial Sequence
  ENSG00000287815_7 (sequence is synthesized)
caacacagtgagaccccatctctaaaaaaattaaaaaattagctgagtgtgatggtgcatgcctgcagtacccgctattcaggagg

SEQ ID NO: 1038372 - DNA, 120 bp, Artificial Sequence
  ENSG00000287812_0 (sequence is synthesized)
ggggggcgcctgtgaacccgggctgcggttcagacgcggccgcgcggcctcgtccctgggtgctatttaccggcttttaatgacggcagggtaatcaccctaatgaaaaacgccctcggg

SEQ ID NO: 1038373 - DNA, 120 bp, Artificial Sequence
  ENSG00000287812_1 (sequence is synthesized)
gctcagagcagccagactgcgatgagaaaaccgggaggcatctcggagcagccggtgagtcacagtgagtatgcagcgctgggcgcgaaggacgcccgggtgccctcccagccgcgcgcc

SEQ ID NO: 1038374 - DNA, 120 bp, Artificial Sequence
  ENSG00000287812_2 (sequence is synthesized)
actcccgcgccgcccctggaacgcggagagcgtggctgcgtgctgcagggccgcagggtctacgccccgggcaccccgacccaccctgggaaacccggcgcacaccagccaagcctcctg

SEQ ID NO: 1038375 - DNA, 120 bp, Artificial Sequence
  ENSG00000287812_3 (sequence is synthesized)
cagacccgacttctccactgcaacttttagtcaggcctgcaaggggttccagcactaccttcctccctactcatggcctgggctccccaggggcctggattttgaaggggccactctctg

SEQ ID NO: 1038376 - DNA, 120 bp, Artificial Sequence
  ENSG00000287812_4 (sequence is synthesized)
gtgtgttcaagacacccctgaagattccaagctctgctgggcttcacattcgctctcctaaggaccatttttctgccagtgcctcagtttccccaactgagtaccagtagcataagattc

SEQ ID NO: 1038377 - DNA, 120 bp, Artificial Sequence
  ENSG00000287812_5 (sequence is synthesized)
tccccaccaccctccgcaccctgcccccgggtggcaagagtattcattacagtttgttcctggctttgaagatgagaagtaccaaggatcattaccactcaattaacggagctgttacca

SEQ ID NO: 1038378 - DNA, 120 bp, Artificial Sequence
  ENSG00000287812_6 (sequence is synthesized)
ctggagtttaggtctgattaatctgccccctgccccctgccttggagccatgttgccccctgacaccccttccttggactcccgcaggctcctcctttctcctggatttcatacctggag

SEQ ID NO: 1038379 - DNA, 120 bp, Artificial Sequence
  ENSG00000287812_7 (sequence is synthesized)
ttagcccctttcctgttcctgccagtactctcgggtcctgaaagagtgtctgccacattcagtcttcaacaagtattgttgagctcccccagagccaggggctagatgctgaggcagggc

SEQ ID NO: 1038380 - DNA, 120 bp, Artificial Sequence
  ENSG00000287812_8 (sequence is synthesized)
agtgaaggtcacagacccaagccttcctggagctcaccttctggtaggtgcccaaatgtctatgtgggatccagtgtatgtccagggcttccttctgccttccacctctccctccagggt

SEQ ID NO: 1038381 - DNA, 120 bp, Artificial Sequence
  ENSG00000287812_9 (sequence is synthesized)
tccttgttcagacaacaagcgatgggcaggcctaggcctaggccaggcaccacagtcccgggtggacagtgctaacgggttctagtttcagagatgaaaacaacaaagttaacataaaga

SEQ ID NO: 1038382 - DNA, 120 bp, Artificial Sequence
  ENSG00000287812_10 (sequence is synthesized)
ggaggggaaatgatcacagcaccttacatggaacaccccccacccttcctctcctctccccttctaatggcctcagcccctcctcaaggtcttggtcacacgccccctcttctatagggc

SEQ ID NO: 1038383 - DNA, 120 bp, Artificial Sequence
  ENSG00000287812_11 (sequence is synthesized)
cttcccctcgccctgaacatctctctcttccaagcctgcggtggtccttaccaactggaacttcctgcttgtacctcctctggacgtgcatcatgtcttatatgtgatatttccactgag

SEQ ID NO: 1038384 - DNA, 120 bp, Artificial Sequence
  ENSG00000287812_12 (sequence is synthesized)
acacttctcattaaactgtctgctgcctgacagcagaatccaagtctcaagtttgtttccttccaccaagaatgcacgggagttctccgtagatgttgccctcattgaaatgagagagct

SEQ ID NO: 1038385 - DNA, 120 bp, Artificial Sequence
  ENSG00000287812_13 (sequence is synthesized)
aaggcctagaccgggaacgctgcgcccgccgcaaaatggaattctggtggtcaagaggccccccatcctgtgctgtgagggttaggagagtcgggggtcatggggatagaagtaaaagga

SEQ ID NO: 1038386 - DNA, 120 bp, Artificial Sequence
  ENSG00000287812_14 (sequence is synthesized)
ccaggtgggaaggacaaagtggattagactcctactccaatcaatcatccatcagaatcaccaactaggacacttgaattgggtccacaagttcttactgagtactgcttggggccgggc

SEQ ID NO: 1038387 - DNA, 120 bp, Artificial Sequence
  ENSG00000287812_15 (sequence is synthesized)
acagtgctaggcactgcggagacaaagatgagtgagattcagtccctgccgctagggatcttggataccatctcttgtcttcagtaactttctgggtgaccctaggccaagtaattatga

SEQ ID NO: 1038388 - DNA, 120 bp, Artificial Sequence
  ENSG00000287812_16 (sequence is synthesized)
gcaacccaaataattctcagcgtctgagagagatcacgcccctcttccttcgcctatgcaccatgagccctggcagggaagcccatgccatcagtcagagcttcctagccaacgtgcagc

SEQ ID NO: 1038389 - DNA, 120 bp, Artificial Sequence
  ENSG00000287812_17 (sequence is synthesized)
cctctagtggattccagttgggccaatattggcctcaggggccagaggcagccttggttctttactgcagtggctgtaaaaagtttcattttctatgagaactacagcatgacaaaggtc

SEQ ID NO: 1038390 - DNA, 120 bp, Artificial Sequence
  ENSG00000287812_18 (sequence is synthesized)
aggaagcgctgcctaagtcatctggtgaaagaggatgcaaatgccaccaaggagctccaattctgggccccaaagagtcattaactgctgttccctggatcccagagttttgactgcaca

SEQ ID NO: 1038391 - DNA, 120 bp, Artificial Sequence
  ENSG00000287812_19 (sequence is synthesized)
gaacagcaaagaagaaaccagaagtcgggctccatccagttcctcacctgggtggatgaggccagcacctgattgttttaggctgagtaggctcctgaagctgagagctgataagagaca

SEQ ID NO: 1038392 - DNA, 120 bp, Artificial Sequence
  ENSG00000287812_20 (sequence is synthesized)
ttgatctagggtttgcaactctctctggtttcccgaagctgtttctcacagggcagggagaagaggaatctgccagcctttggatcagcgtctgtcccatgggcaaagcctttatccagc

SEQ ID NO: 1038393 - DNA, 120 bp, Artificial Sequence
  ENSG00000287812_21 (sequence is synthesized)
aagaagccagctgtgtggcaagcaatggagccacaatggggacaaaggatggagttaagagcattcgttttaaagtcacacaggacgaattcaactgtcagaccagccaggtagcctcca

SEQ ID NO: 1038394 - DNA, 120 bp, Artificial Sequence
  ENSG00000287812_22 (sequence is synthesized)
gtaagctacttggactcttaagacttgaaagggcagccctaaagccttcctctcacaggattgttgtaaagaatgaagaaaattatggcctgaaacagtggctcatgcctataatcccag

SEQ ID NO: 1038395 - DNA, 120 bp, Artificial Sequence
  ENSG00000287812_23 (sequence is synthesized)
cactttgggaagctgagtcaggagtatcacttgaggcgaggagttggagaccagcctgggcaacatatcaagaccccatctctactgaaaaaaaaaaaaaagtttttaattagctgggca

SEQ ID NO: 1038396 - DNA, 120 bp, Artificial Sequence
  ENSG00000287812_24 (sequence is synthesized)
tagtgacacccacctgtagtcccagctactgaggaggctaaggcaggaggattgtttgagccaaggagattaaggctgtagtgagccatgatcatgccattgcactccagcgtggacaac

SEQ ID NO: 1038397 - DNA, 120 bp, Artificial Sequence
  ENSG00000287813_0 (sequence is synthesized)
tcaatacaggaggactttcgcagcaaagtagaggtacaagtgctcacacattcctcggttcattgaatcagggggccacacattcagtagcagcctacttctagctctggcttcatcact

SEQ ID NO: 1038398 - DNA, 120 bp, Artificial Sequence
  ENSG00000287813_1 (sequence is synthesized)
attttcctcagtttctcctcagctaagacatggagtttatcaggacattatttccttttgcagaggttgctgtgagaaagtggtctctgtttcaattataagcagcatttgcaaagctct

SEQ ID NO: 1038399 - DNA, 120 bp, Artificial Sequence
  ENSG00000287813_2 (sequence is synthesized)
tcttttgagccaggggctgtgctagaagctgaacgatggtcagagatgaaaggacccaatcctgcctctgacaagttcagcttaagtgtgatggaggcacagagcctagtaatttcacac

SEQ ID NO: 1038400 - DNA, 120 bp, Artificial Sequence
  ENSG00000287813_3 (sequence is synthesized)
tgagaaatgcatgctgtgagggatgctggataccatgtggtggggaaggctgggaagatctgagaaggcttcctggaggacaccacccctatgctaacctggcaatggactgcaaaaaat

SEQ ID NO: 1038401 - DNA, 120 bp, Artificial Sequence
  ENSG00000287813_4 (sequence is synthesized)
gctctgggaggaacgaagtacgatgggaaagatgccgtttcctaaaaagcgttcctttgactgctccagaatttctgagcagagtcatttagccccctctgaggggtatgctttcttgtt

SEQ ID NO: 1038402 - DNA, 120 bp, Artificial Sequence
  ENSG00000287813_5 (sequence is synthesized)
catttccagtccctggagatttctggtcttttatcccaactgcaactccctacagatcgagagttattcccccactcaaatgcaacgctcttgtctagatctctgctcagatccctgatc

SEQ ID NO: 1038403 - DNA, 120 bp, Artificial Sequence
  ENSG00000287813_6 (sequence is synthesized)
ataaccgatggcaaatgcacaaatagacagaaatatctgtattcgcagcagtctgactccaaatgcaaatatcccctcaggaaattgtttcccattacacacagaggggaaatgactgtc

SEQ ID NO: 1038404 - DNA, 120 bp, Artificial Sequence
  ENSG00000287813_7 (sequence is synthesized)
tgctcttaggcaaagttggaatgaggtttggagctcatttaaaaatcagtacaagctaaagattttgtaaggttcaccgtaacacagaaaacatatctggcttataatgcagcatctagc

SEQ ID NO: 1038405 - DNA, 120 bp, Artificial Sequence
  ENSG00000287813_8 (sequence is synthesized)
tacagactatttcacatttcagatgcagacgtactgtgtagaattcctataatacagtgtaggcagcgaaaacctggaaaaaacgtggaacttgagagcattacagatgaaaggaacagg

SEQ ID NO: 1038406 - DNA, 120 bp, Artificial Sequence
  ENSG00000287813_9 (sequence is synthesized)
cagagggattaaacaaagatctttcttccttgtgaccaacaccttcttaggagaatctgttatccgtgtagaagaaatgtcagaaacctctgggaggaaatgtagctgcatttgtattct

SEQ ID NO: 1038407 - DNA, 120 bp, Artificial Sequence
  ENSG00000287813_10 (sequence is synthesized)
gctgagaaaatgtcatcacagatctgtttaccttaactgtggaccatgattcagccgtgacaactgtcttgcatactgatcaatttatttgcagcaaaatttctagcattaactgcttag

SEQ ID NO: 1038408 - DNA, 120 bp, Artificial Sequence
  ENSG00000287813_11 (sequence is synthesized)
gttctgaaaaatcggttacttggatttcctatgaaaccataacaaatgcatatttgaaaaatctagattcttatccaaacattttagtgagagataataaaggatttttcttgaagtcca

SEQ ID NO: 1038409 - DNA, 120 bp, Artificial Sequence
  ENSG00000287813_12 (sequence is synthesized)
agcaagggagggtccctcttacttctggaatgaagacagggcacatgattcccaaagggcctccatggggtagcatttttatagcacaatgtacagaaaatcattagactgagaatcaga

SEQ ID NO: 1038410 - DNA, 120 bp, Artificial Sequence
  ENSG00000287813_13 (sequence is synthesized)
gaactctgactgcagatccatgctcggctttaaccagccgtgagatcctctgtaagacattcttttctgatcagcaggctgggccaaggtctctgcaatagagaagaggatggccactgg

SEQ ID NO: 1038411 - DNA, 120 bp, Artificial Sequence
  ENSG00000287813_14 (sequence is synthesized)
acctgggaaagcaagaagaggccaggtcctgtctcctctggctggtgcttccagcctggataccgagccctggatgcctgcctgagccccttctagtaggcaggcaggttttggcattag

SEQ ID NO: 1038412 - DNA, 120 bp, Artificial Sequence
  ENSG00000287813_15 (sequence is synthesized)
ggaattgaaaccagtcccaaggcagcccggggagatgccctcccacctcagctaacagtgctggctcaggtagagctctggctctcctctggaacaggggcactgcactacagcacacta

SEQ ID NO: 1038413 - DNA, 120 bp, Artificial Sequence
  ENSG00000287813_16 (sequence is synthesized)
tggtgtcactccccatgttcccactagtgtccgaacccactaactccagcttccttctccaccctgtgggctgaagtcctgtaatctctgtgctgaaatttgtaaaaggagtaaaaataa

SEQ ID NO: 1038414 - DNA, 120 bp, Artificial Sequence
  ENSG00000287813_17 (sequence is synthesized)
aacagacccagcaagaagatgggtaaccagtaattccaatggaagaaaagtggagaggctgctgtcaaggatatgattctggagcaagacaacaaggatgagtgacccattcaacctgcc

SEQ ID NO: 1038415 - DNA, 120 bp, Artificial Sequence
  ENSG00000287811_0 (sequence is synthesized)
ggcgagtgcgggagaaggtctccattggccgaccgctctagctgtagcggagacccccaagtagggaaattggggcaaaacgcggagcgctccaggctcctacgggctgtgcggtgccag

SEQ ID NO: 1038416 - DNA, 120 bp, Artificial Sequence
  ENSG00000287811_1 (sequence is synthesized)
ggctcgactgctgagcgtcgtgggctccgagagggacgcgggcggagggcaaagagcgtcagatcaggattgctgaaggagagctgagaatgaaaccaccatttattcagcactcagaat

SEQ ID NO: 1038417 - DNA, 120 bp, Artificial Sequence
  ENSG00000287811_2 (sequence is synthesized)
gctccaggcagtgtaatctcattccatcttcattcatgactccagacaggtattgttattcattgtttatacttgagaaagcagattcagagaagttaaagtatctaccacaaggtacga

SEQ ID NO: 1038418 - DNA, 120 bp, Artificial Sequence
  ENSG00000287811_3 (sequence is synthesized)
aagtagtaagtagtaatgccagagtacaagcctaggtctgcttccaaatttcgtggtttcggatttagtgccttcattgtgtttcacctacaggttaagaagttgttggtaagcaagaaa

SEQ ID NO: 1038419 - DNA, 120 bp, Artificial Sequence
  ENSG00000287811_4 (sequence is synthesized)
atatttaagacgctgggagaatccaaaaaattgtctagttgtgtgtaacatagtctcaggattcttacagtgtgcaattttattcaccccctcatattcaaaataacagtatcagtttga

SEQ ID NO: 1038420 - DNA, 120 bp, Artificial Sequence
  ENSG00000287811_5 (sequence is synthesized)
aaaagttttatgacattacatggttttatatattatttttgatagggctagaattttctaagataccatttgacattttatttcagtaccacacaggattctgcttttcagaaataaagg

SEQ ID NO: 1038421 - DNA, 120 bp, Artificial Sequence
  ENSG00000287811_6 (sequence is synthesized)
aaacaaagttatcaaaaccacatttatatttctgccacttgaaattatagttaacagaaatcagactcttgtttttaaagattttgtttatgaaacaaattctgcaatggtcattaagca

SEQ ID NO: 1038422 - DNA, 120 bp, Artificial Sequence
  ENSG00000287811_7 (sequence is synthesized)
ctttggagttttatttttaatatcctgggcttcttccattgatactgcaatatctccagatttgctacattgctaactgaatgttcattttctgtaggactttgattggcttctttattg

SEQ ID NO: 1038423 - DNA, 120 bp, Artificial Sequence
  ENSG00000287811_8 (sequence is synthesized)
ccatatggcaatgatgtagatgttataatgtaactaaaatattcctacaaatgcttactagtaggattattctcattttcctttggggaaactagtgtcgagtttgaatggttggttaga

SEQ ID NO: 1038424 - DNA, 120 bp, Artificial Sequence
  ENSG00000287811_9 (sequence is synthesized)
agtttcaaaaaagtaataggtagataaatagactctctaactgtagacagagaaattacaatgaccataatttgtaaagtggggggacatactatatatagtatcttggaaagcacataa

SEQ ID NO: 1038425 - DNA, 120 bp, Artificial Sequence
  ENSG00000287811_10 (sequence is synthesized)
gtataattatccttagctaaagttcagtcatctatttcataccattctacaaaagaagaaaagcagtgtcacaattttatataatttacagaaatgtgatacataacaaaaattcaaaaa

SEQ ID NO: 1038426 - DNA, 120 bp, Artificial Sequence
  ENSG00000287818_0 (sequence is synthesized)
atttgcaactttaccaggtagtaaataacctcctgaagcaaagaaccaagagccttcttcttgggctcccgggaatgggttagatgcaagcggcttctggttctcacttgcttcattgtc

SEQ ID NO: 1038427 - DNA, 120 bp, Artificial Sequence
  ENSG00000287818_1 (sequence is synthesized)
accaagaataaattcccaaacatacactagagtccacctgagagtctaaaatggggcacaaaacaattaacaaaggactctagatgagtgctgctttgtcaactgtggctgcttacagga

SEQ ID NO: 1038428 - DNA, 120 bp, Artificial Sequence
  ENSG00000287818_2 (sequence is synthesized)
gctggaaccatttagacatttggagatttcacaaaagtccttgcaatcccacagcaaggtaacgcaatttacgttgcctgagacacacttctatctctattgaaaatatacaattttcag

SEQ ID NO: 1038429 - DNA, 120 bp, Artificial Sequence
  ENSG00000287818_3 (sequence is synthesized)
gctgcttgagaaaagactattacacagtcatatatatatttatatatgtatatacacacatgccagcatctttacagtctctgaaatattgagaatgcaacatcagcactactcaagagg

SEQ ID NO: 1038430 - DNA, 120 bp, Artificial Sequence
  ENSG00000287818_4 (sequence is synthesized)
acgagatgttcaagataaatggagcactaaaggctattaaaaaatcaccagtcagaacccagtgggccccgaagagcctgctaagaaaaagaggatgttagtatgttagaagcataatta

SEQ ID NO: 1038431 - DNA, 120 bp, Artificial Sequence
  ENSG00000287818_5 (sequence is synthesized)
taaacaaacagaagttttgcaaactgtttcctccccacaacaggtccattttcttaattcaaacacattattttctcaagcttccttacttgaagccaagattgcaaaatggtagatcca

SEQ ID NO: 1038432 - DNA, 120 bp, Artificial Sequence
  ENSG00000287818_6 (sequence is synthesized)
gaaaccattgctcattttatacctaagacttcaaataaacttcttgcccgctaaattagttccctggaggtatgagtcagactttctgaaaaaacacaaaataacaaagaagtaaaaaca

SEQ ID NO: 1038433 - DNA, 120 bp, Artificial Sequence
  ENSG00000287818_7 (sequence is synthesized)
tgcattttggaaaaaatgtcagtgcttttcctgaccaaagactaagagagaaggagagactgacaaatggacagactgacactggtctcccctgataaccaaatgccttatctacctctc

SEQ ID NO: 1038434 - DNA, 120 bp, Artificial Sequence
  ENSG00000287818_8 (sequence is synthesized)
tccagctctcagtatcctaatcccttatgctacatgttttcagttctctgcctacgaattatttatttcatataattttctgttttgaaacacacgaacctcttccaaaaaaggcgaaag

SEQ ID NO: 1038435 - DNA, 120 bp, Artificial Sequence
  ENSG00000287818_9 (sequence is synthesized)
aactagaattacttctttatgtgccaacaaaaacagatcattatttattcattcagtcatctcttgagctcctactaaattattaagtgcaaagccttgttgctggcccacaagttacaa

SEQ ID NO: 1038436 - DNA, 120 bp, Artificial Sequence
  ENSG00000287818_10 (sequence is synthesized)
agaggaacccagagtctggtgagatgagacacagtttgatctttctagttacctttcttgacctcaaatcctattatttggaaataaagtaaaattacccactcctaaaatgtaaatgct

SEQ ID NO: 1038437 - DNA, 120 bp, Artificial Sequence
  ENSG00000287818_11 (sequence is synthesized)
ttacatatctcctattcacttaagtatcaagatcattttaagctaaacagaacttacatgaaatgtagacctgcgtaatttttttcaacttagaaactttcctgtctttgaaatttttca

SEQ ID NO: 1038438 - DNA, 120 bp, Artificial Sequence
  ENSG00000287818_12 (sequence is synthesized)
aaagatggtatttctctgtctctagtgtaagtcaaagggaaccctacctttggtttgttgacacgcacattttttaatgtttatgttcttgcttgctaattgcatagacagatccttcaa

SEQ ID NO: 1038439 - DNA, 120 bp, Artificial Sequence
  ENSG00000287818_13 (sequence is synthesized)
gggaatgggttagatgcaagcggcttctggttctcacttgcttcattgtcaccaagaataaattcccaaacatacactagagtccacctgagagtctaaaatggggcacaaaacagaatt

SEQ ID NO: 1038440 - DNA, 120 bp, Artificial Sequence
  ENSG00000287819_0 (sequence is synthesized)
agtgaagttcagctccgaattctggtaaccgttcaagccctgtcagtccggtaaattgggttaacttagcaactcggtggtgcaaagcctccccaaagacaagaccgcattcagggagaa

SEQ ID NO: 1038441 - DNA, 120 bp, Artificial Sequence
  ENSG00000287819_1 (sequence is synthesized)
gagaaccagcctcatgcctgagccgatctttcttcctttggttgtcctccttcattattattctgcaatgcgcagcaatccctagtctaactaagcccttgcagcacttgagccgggggc

SEQ ID NO: 1038442 - DNA, 120 bp, Artificial Sequence
  ENSG00000287819_2 (sequence is synthesized)
tgccctcctgctggcctttccgtcgtcgttgaacggatctgggggacggggacgttgcagaggagccacaatccccactcgttgtttccccaatgtgctttccgaactccccgagtgcgt

SEQ ID NO: 1038443 - DNA, 120 bp, Artificial Sequence
  ENSG00000287819_3 (sequence is synthesized)
cttcatcgtgacagcagtggtcgcagcgccactggccatctggagtcctgggaacattaaagcgctgttacccgccaggcgtttccgcctaggacacactcacacccaccctcggagact

SEQ ID NO: 1038444 - DNA, 120 bp, Artificial Sequence
  ENSG00000287819_4 (sequence is synthesized)
cctaaaggtttctccgtgtcaattcatgtgtcctcctcccagcagcacacacgcacacacgcacatcaacagccaagtcagccacccagtttcaacttcgggttgtccatgaaaattcag

SEQ ID NO: 1038445 - DNA, 120 bp, Artificial Sequence
  ENSG00000287819_5 (sequence is synthesized)
ggaggctgatcttcttgaagaaattaatgagtattcccacaggaaatagatgtaagggaggggcgcctgtccaaactacagcaggagggggccctgactcaaatacaaaggttacctttc

SEQ ID NO: 1038446 - DNA, 120 bp, Artificial Sequence
  ENSG00000284957_0 (sequence is synthesized)
accagaagccgagactgagccagcatcactcgatggacacaaaccaaactccaggagcaggaggcctccagtggtatgctgagttgatcacgaccctcatactttcagccttcaacaccc

SEQ ID NO: 1038447 - DNA, 120 bp, Artificial Sequence
  ENSG00000284957_1 (sequence is synthesized)
caacactccttatctaggagccagggtgaagagcacagccccaccgttcatggatccatgtccaaaagggaaaaaacagccagctgttcaaagaagcccagttctcctgaggttgagatc

SEQ ID NO: 1038448 - DNA, 64 bp, Artificial Sequence
  ENSG00000284957_2 (sequence is synthesized)
tcctcatcaatcaaaagaaaatgatacatttacagaatgactacaaggcttgcagcgagccgag

SEQ ID NO: 1038449 - DNA, 120 bp, Artificial Sequence
  ENSG00000284957_3 (sequence is synthesized)
tccatcttaaaaaaaaaaaaaaagaatgactacaaggaagagcaaaattacaaatatcaatgcattataaagccataataattaaaatagtgtggtatcaattaactcaggaatatacag

SEQ ID NO: 1038450 - DNA, 120 bp, Artificial Sequence
  ENSG00000284957_4 (sequence is synthesized)
ctagatcaatagaattgaatagaatgacccatgcatatattgaaataaagcgtattaaaatgttggcattttcaaccatcagagaaaggataaatgatgcaataaacagctcactacatg

SEQ ID NO: 1038451 - DNA, 120 bp, Artificial Sequence
  ENSG00000287785_0 (sequence is synthesized)
gcctcagccaacactacatcagaggcacattgtggatggaggaaatgagtttagtcaagccagctgtgacttcaaaggggctgctctcccagagaacagtgagaaagggttcccccttca

SEQ ID NO: 1038452 - DNA, 120 bp, Artificial Sequence
  ENSG00000287785_1 (sequence is synthesized)
gtgaagactgcaaagttcagccagcgccaacccaaagggaatggactccaggaaggggcaaattacattcaacatacaagaaagaatattttccttcatgaagtggctgtgacagtctga

SEQ ID NO: 1038453 - DNA, 120 bp, Artificial Sequence
  ENSG00000287785_2 (sequence is synthesized)
agaggaaggaaaatgacaaaaaagaaagaaaactacacatttctttcaaattacttacttcacacaaatttactgaggaacaatagggtggaccctgcatattcgaagacaagatcgtct

SEQ ID NO: 1038454 - DNA, 120 bp, Artificial Sequence
  ENSG00000287785_3 (sequence is synthesized)
gtgttccagttcaaaagaagaagctagacacataaactgaagattatggtattgagtgataagccttggagcaggaatcccaaagtgtgatcacatgaccagcagcagcaacatcacctg

SEQ ID NO: 1038455 - DNA, 120 bp, Artificial Sequence
  ENSG00000287785_4 (sequence is synthesized)
gatttaacaagcccttcaagtgattcaatgcttgctaaaactggagaaccaccttgatagtgaagggacaaaaggacttttgtgcagagagctaacacatctgaactaaccttgagatcc

SEQ ID NO: 1038456 - DNA, 120 bp, Artificial Sequence
  ENSG00000287785_5 (sequence is synthesized)
tctgccatctataaatcacttctcaatctcttcccgataagattctaaataggtggctctctggcaattcaagggatgatacacgcgtgtgtgtcttctctctttatgtaagttataaga

SEQ ID NO: 1038457 - DNA, 120 bp, Artificial Sequence
  ENSG00000287785_6 (sequence is synthesized)
tctgaatgacagaggcacattcttcttttatgttttctttcctttctcctcctatttttagggccagtacgtggaaaatgcggaaattggaacttactataagtaactaattcagaaatc

SEQ ID NO: 1038458 - DNA, 120 bp, Artificial Sequence
  ENSG00000287785_7 (sequence is synthesized)
aggctggcagaagtgttatacattcactggaagaaattggtgaatatatggaaaacataaatgttatgtatcctggaacttaaaataaaaattaataataaaaaatgttatctctcccaa

SEQ ID NO: 1038459 - DNA, 120 bp, Artificial Sequence
  ENSG00000287783_0 (sequence is synthesized)
agagaggaaggttcatactggcaagaagtaaattcagtaggcaggagaaatcttcatggctaaaatctcatgcagggtcaaactgtctgggtttgaattctggatctatcacttactagc

SEQ ID NO: 1038460 - DNA, 120 bp, Artificial Sequence
  ENSG00000287783_1 (sequence is synthesized)
tgatgattgtacctctgaagtctcaaagcatcttacagagccatttgggagattttttgagtccatttatgtagggcacatagcacagttcctggcatattagcgccaccctgtaaatgt

SEQ ID NO: 1038461 - DNA, 120 bp, Artificial Sequence
  ENSG00000287783_2 (sequence is synthesized)
cagctactatcagtagaggtggtggagaaccctatatgaaatggatttgaatgccaaaatgagaagtcagaacttgaccttctaattacaatgctaattagcccagtttacggggactgc

SEQ ID NO: 1038462 - DNA, 120 bp, Artificial Sequence
  ENSG00000287783_3 (sequence is synthesized)
tgtgcatttgtacacgagggttctttgtttgatctgctacatcataagcttaccagcacggagggatagcatgtatcgttgaacgtggaagaacacaccttcatttgtgttaatgaagaa

SEQ ID NO: 1038463 - DNA, 120 bp, Artificial Sequence
  ENSG00000287783_4 (sequence is synthesized)
aactactgaaaaccaacagactaattaagggtaacgatgaacaattttgatcagcaattattttttaatatcgaagttcgctcctggaaagagtagaatggggaagttcatcttccagct

SEQ ID NO: 1038464 - DNA, 120 bp, Artificial Sequence
  ENSG00000287783_5 (sequence is synthesized)
ttctacccagaaaagtagtgagagagagatcctgcttcatttccaattcttctcccacaaactgttttaacatataatttaatcgatgcctttatttcaaaagaaaaaaataattataga

SEQ ID NO: 1038465 - DNA, 120 bp, Artificial Sequence
  ENSG00000287783_6 (sequence is synthesized)
gcttgttgggatcattttctgaagagaggacattatgcgtgcatgaattccatcggtgatctgaggaggagcaggctgcttggaccattacccatcattgtcgaacagcagagtaattaa

SEQ ID NO: 1038466 - DNA, 120 bp, Artificial Sequence
  ENSG00000287783_7 (sequence is synthesized)
ttgggcaaatacgtctagatctggtgaattcacatgcacagtaactgggcagcagcaacacacactcttttactgtgaataaaatagcaatagttttatgtgcctttgtgctatgtaaaa

SEQ ID NO: 1038467 - DNA, 120 bp, Artificial Sequence
  ENSG00000287783_8 (sequence is synthesized)
tgtctttttttttcctcttggctttatccattccagattattttgtccatctttatgtactcatttgaaaagaggttgcttattacaaaggaaaaagatatctagatgagcaagtttgaa

SEQ ID NO: 1038468 - DNA, 120 bp, Artificial Sequence
  ENSG00000287783_9 (sequence is synthesized)
ttccatgtctctgtttatttttaaaggaatgaattgggttcattattctttcactaatttttaaaataatttaatattttcactaaaatgagttaaatgagcatgaggaaatagtatttt

SEQ ID NO: 1038469 - DNA, 120 bp, Artificial Sequence
  ENSG00000287783_10 (sequence is synthesized)
ttaaactagttccaggaatggacaagctcctaaaaaaattattaaggccttctaattaccgtacaatattaattcaaaaatttaattttttatttaagtgtcatctacagaggtaaaaaa

SEQ ID NO: 1038470 - DNA, 120 bp, Artificial Sequence
  ENSG00000287783_11 (sequence is synthesized)
taaggcacagcatttgtcctggagaaacttcttataatagtcctctgtaaagtatagataatcaaacaatctaacactgtttatttgaacatcaaaaagtggacaaatatttagaggaaa

SEQ ID NO: 1038471 - DNA, 120 bp, Artificial Sequence
  ENSG00000287783_12 (sequence is synthesized)
taatataattgttttaatgcaaatcatctctgatggctaagtccaaatgtaataagaaagcttaggttttgatttaaaaggaagtcaattttccagcatctccccttctgaagaggttaa

SEQ ID NO: 1038472 - DNA, 120 bp, Artificial Sequence
  ENSG00000287783_13 (sequence is synthesized)
atgatgattctttttttttttttttccgatcacattttaatccagatgacagaggacttgcactcctaattcagactttctggtaaagctcagcttgtcacaatgtatagctttcttttc

SEQ ID NO: 1038473 - DNA, 120 bp, Artificial Sequence
  ENSG00000287783_14 (sequence is synthesized)
cttaccaggtctcactattcagaaaggtacagacatggcaccatgataaaaagggtcatttaaaagacttcgcagaggctctgtactgtgaaggattgaattttcacttgaatgcctaca

SEQ ID NO: 1038474 - DNA, 120 bp, Artificial Sequence
  ENSG00000287783_15 (sequence is synthesized)
ttttcacatctttttctttgcagaaatattccttttgaatggcagactgcaattgggtaggtttttttttttttaagtcactgaccaggaatatataaaatattagaaggcatttgtccc

SEQ ID NO: 1038475 - DNA, 120 bp, Artificial Sequence
  ENSG00000287783_16 (sequence is synthesized)
agtggaagaacacagttcactaccaggtaccaggtggttattaagaaagttatacaactttatctcttcagattgaagagctccttcagataaaagccttaagttcagtcaaggtggaag

SEQ ID NO: 1038476 - DNA, 120 bp, Artificial Sequence
  ENSG00000287783_17 (sequence is synthesized)
gaacactaaggtctgtcacttctaaatgacagacaatttaaataacttgtgaaatcattagcctcaaagccatctacctagtaatttttcataatcacatccaatgtgtattcttaggaa

SEQ ID NO: 1038477 - DNA, 120 bp, Artificial Sequence
  ENSG00000287783_18 (sequence is synthesized)
cacacaagcagactccagtttatctttctatctacttcaatatttgatcacaacattttgagaaatatgctcatgactaattttaaaacctctaatttttctttaatggttttatatttc

SEQ ID NO: 1038478 - DNA, 120 bp, Artificial Sequence
  ENSG00000287783_19 (sequence is synthesized)
ccaaatacacttaaaggggtggggaggagagaaaagtctattaaatacactgaaactttttaatattggttactggattccctaaggagttagtgtaaattcagttcagttgaatgaaac

SEQ ID NO: 1038479 - DNA, 120 bp, Artificial Sequence
  ENSG00000287783_20 (sequence is synthesized)
agatatttcttcatctcctactatcagtatggtattgtgctgggattacggggagaaataggaatgaataaagcaccttctctacgcttaaggattctagaatctataaaaaaagtaagg

SEQ ID NO: 1038480 - DNA, 120 bp, Artificial Sequence
  ENSG00000287783_21 (sequence is synthesized)
tgcataaccataataaaagctagaatatgatgaataagaacagaaagtcacaaaattctgtcagaatatatcaatgagattttgtctggctgtatcaaggatgacatcatagaggagaga

SEQ ID NO: 1038481 - DNA, 120 bp, Artificial Sequence
  ENSG00000287783_22 (sequence is synthesized)
gcacttaaacactgccttgaaagatgcattcagttggcctgcagtggagaaggacagaatagtctgatagaattgctacattctggaaaggaaaatgccaagagaaaaagcatccaggtg

SEQ ID NO: 1038482 - DNA, 120 bp, Artificial Sequence
  ENSG00000287783_23 (sequence is synthesized)
ggaaaaatgcaggaatgttggtgtgacatggagtccaatataagcgagacagagggggaatataagttgcttgaggaggagtgatgaaaatcaagtgtgaacaactatgttgacacttga

SEQ ID NO: 1038483 - DNA, 120 bp, Artificial Sequence
  ENSG00000287783_24 (sequence is synthesized)
tgttactaaggagtttggttgtgattctacaggcaattgagagcttcagagcaacacaatgtctaacagaactgtgatttgtgtagcttgtaaaatattgtttctttcttctcatgtata

SEQ ID NO: 1038484 - DNA, 120 bp, Artificial Sequence
  ENSG00000287783_25 (sequence is synthesized)
atttatctgttttttcctatactgttaacgatttttcttgaactttaattctatttttttccctttcctgttggaactaaaccagaggactatagatgtcatggacaatatatcccccac

SEQ ID NO: 1038485 - DNA, 120 bp, Artificial Sequence
  ENSG00000287783_26 (sequence is synthesized)
tcaagtattcatgtccaaactaaattgttaagaaacttcacactaacaataatgattttataactctaagtctagtggcaattgtgtattgttattttaaaaaatacttagaattactta

SEQ ID NO: 1038486 - DNA, 120 bp, Artificial Sequence
  ENSG00000287783_27 (sequence is synthesized)
attacttctgagttatgtggaatcagaaatacatttctttgaaagtgaaacaggatatcttgttcatattgtataacaaaactggatgaaaaggtattttttgggcttttaagaaataaa

SEQ ID NO: 1038487 - DNA, 120 bp, Artificial Sequence
  ENSG00000287783_28 (sequence is synthesized)
tgttttttagtggatttgagatatgatatagatgatgtttcagtaagattgatctggtggcatttatggtagaggatgagttggagaaaggaagcaggaggacgggaaggcagctgggag

SEQ ID NO: 1038488 - DNA, 120 bp, Artificial Sequence
  ENSG00000287783_29 (sequence is synthesized)
gttactggcatagttggggcgtgaagcactaaaagtctgcacagagaaattttaaagagaaaaaatcattgggatactggatcttaatcatttggggtcataggcttcctagtctatctc

SEQ ID NO: 1038489 - DNA, 120 bp, Artificial Sequence
  ENSG00000287783_30 (sequence is synthesized)
acaaaaactatggatcctcttctcacaaatgtgcatatactgttgcacacgagcacaaaaatctgcatgcaatttcaggggttcaagaagccctcccttagaacccagatgtagggaata

SEQ ID NO: 1038490 - DNA, 120 bp, Artificial Sequence
  ENSG00000287783_31 (sequence is synthesized)
aaagaaaaggcagagaatgaatgtactatcatgaagaagtacaataataatataataaaataaaaacagcagtatgataaagtgaatctaatagattacattggatatataatattgcta

SEQ ID NO: 1038491 - DNA, 120 bp, Artificial Sequence
  ENSG00000287783_32 (sequence is synthesized)
ctttgtatttatgtttgggaactgtttcgtaattttagtttgccccacagagatggacatatttttatatctcaactgtaataattgtattttctttcatctttgattttttttcctaaa

SEQ ID NO: 1038492 - DNA, 120 bp, Artificial Sequence
  ENSG00000230300_0 (sequence is synthesized)
ttgacataaataaggtagtagtttaaagggaaagtaatgattagcaaaacttatgaagacaggagcgatcaacgcacattaaatagtgtgtaaattacctaatcctaggcttgctgaatc

SEQ ID NO: 1038493 - DNA, 120 bp, Artificial Sequence
  ENSG00000230300_1 (sequence is synthesized)
tgatctctgaatgttcaagaaaataatactatgggcttgcttacatgggcagaaggaagatctccagtccgcggggaacggcagcacttttaaaactttgagattgatgagtggttaatt

SEQ ID NO: 1038494 - DNA, 120 bp, Artificial Sequence
  ENSG00000230300_2 (sequence is synthesized)
agaccctcagccactcctatggtaagtcatgatggatgccaagacagcagtaaggggttgtgattttctttgttttcttccttgtgcaccaaagacacagagatggagctggtctcttgt

SEQ ID NO: 1038495 - DNA, 120 bp, Artificial Sequence
  ENSG00000230303_0 (sequence is synthesized)
agaaccacctgctggagaaagggagctacgggggccgggcagggtccaaacgcctcacgtgggcggcggcgccacggtcttcggggtcacagggaagagaagggctctcctcaagcgggt

SEQ ID NO: 1038496 - DNA, 120 bp, Artificial Sequence
  ENSG00000230303_1 (sequence is synthesized)
ggaaggagggaggcctcccgagggaatgagactccaggccactcccccgcagcaaggcaggatcacctgcgtcgcggagagcagttagaggtccctggagtggaaaagggcagtgggacc

SEQ ID NO: 1038497 - DNA, 120 bp, Artificial Sequence
  ENSG00000230303_2 (sequence is synthesized)
tggtagcttgggttccctgcaacttggggttcgacctccaggcaatgaagtagggatggtcctgcaagtcaagattccagtagcaagagtgcatcagatctctgtaaggaaaataactaa

SEQ ID NO: 1038498 - DNA, 120 bp, Artificial Sequence
  ENSG00000230303_3 (sequence is synthesized)
cattgctcagttccctgtagagttgcagggcgctttgacgttatctcccttggttctccatcaggtcgtagtggactaattttacaggcgaagttaagtgacttacccaaaacctcacag

SEQ ID NO: 1038499 - DNA, 120 bp, Artificial Sequence
  ENSG00000230303_4 (sequence is synthesized)
ctaataaacggcagagccggcacccagctgtactggcttccagcgcatcccattatctccataaatccccctgattcaactaatattagacgccccacagagtctcgctgctcaaaacgt

SEQ ID NO: 1038500 - DNA, 120 bp, Artificial Sequence
  ENSG00000230303_5 (sequence is synthesized)
ggtcagtggcccagcagcactgacatgaggaccttagttggaaactcagaatctcaggctccaccccagacctgctgaaccagcatcttcaacttaacaagaacccgaagagatttgtgc

SEQ ID NO: 1038501 - DNA, 120 bp, Artificial Sequence
  ENSG00000230303_6 (sequence is synthesized)
caaaaagtttgagaagctctgatctagctggaccctggacacggtgactctgattcaattatgcagatgaccacaagcctctggggttggcagagccacaagaaagaaggtgcctggatg

SEQ ID NO: 1038502 - DNA, 120 bp, Artificial Sequence
  ENSG00000230303_7 (sequence is synthesized)
aaggagagctacccactgacctggacacccaattataggatagacagtgaagtgcaactacagcccgcaaatgaaaatgaataaaattaatccagcccctcaaggcagtcatctgtctta

SEQ ID NO: 1038503 - DNA, 120 bp, Artificial Sequence
  ENSG00000230303_8 (sequence is synthesized)
gagctattggaatcctggatcattgtgggaaatgaaaagaactggtttttagcaaggagaccaagaaactctactccctaggggctagcaatgagagaaaggaagccttgagtctttgag

SEQ ID NO: 1038504 - DNA, 120 bp, Artificial Sequence
  ENSG00000230303_9 (sequence is synthesized)
cacagggtgacagtttgggtcctatgtgagatgatcaaatccacagcaacagaggaaaggacaaaaggaaaagatacttcgatggaatcagcagccattgatccaatgccaactccaaga

SEQ ID NO: 1038505 - DNA, 120 bp, Artificial Sequence
  ENSG00000230303_10 (sequence is synthesized)
ctggaacgtcgcaatgatagttccaaggcggaaatttgacgtaattcttttcgacacagttttacaggtctggatgcccattttaattcttctgaaagcatgcctccttctggcttcagg

SEQ ID NO: 1038506 - DNA, 120 bp, Artificial Sequence
  ENSG00000230303_11 (sequence is synthesized)
actccatctccagccttatgatctaaaaataatccccaaaccaaaaaattagatattatttcctcaaaattaggtgttttaatcaaaacatcttaacataaatacattattatcacccaa

SEQ ID NO: 1038507 - DNA, 120 bp, Artificial Sequence
  ENSG00000230303_12 (sequence is synthesized)
aggtcataggtgctgcaatctagagacaaaatattccttacactgccagatacttgcaaactaaggggaacgagcttccctctgaatgtttatgaaggagagaccactgtggatagacag

SEQ ID NO: 1038508 - DNA, 120 bp, Artificial Sequence
  ENSG00000230303_13 (sequence is synthesized)
gtttctgttttattctcattacctaacatatgcccactggggggtgctaaagaactatgaattggaggtctggatgcccattttaattcttctgaaagcatgcctccttctggcttcagg

SEQ ID NO: 1038509 - DNA, 120 bp, Artificial Sequence
  ENSG00000230303_14 (sequence is synthesized)
gccccacaggtaagatgcttcagagttagaggggagttgaagatacctttgccttcaaagaagtaaggaatgaaacaaagataaaacagacaataaaagacaaaccatgataggtgccac

SEQ ID NO: 1038510 - DNA, 120 bp, Artificial Sequence
  ENSG00000230303_15 (sequence is synthesized)
gtgaaaagtggcagagtactgccgggaatcaaagaaccgtgtatatctgtcttggggataaggaaagaaacgcagcatgaaggagtaggcatttgggattgaccttgaaggagacaggga

SEQ ID NO: 1038511 - DNA, 120 bp, Artificial Sequence
  ENSG00000230303_16 (sequence is synthesized)
gagttttacagcaagaagggatagcatgagaatatatatgaaggcgaatcagtgaaagttgtgttggggaaagagcaaagactccaggtatgttgagaggtagaaaagacaaaggagtat

SEQ ID NO: 1038512 - DNA, 120 bp, Artificial Sequence
  ENSG00000230303_17 (sequence is synthesized)
ggggcctaagataccaaatggatgaatttatatttaattcagtattttgagtttttatggttcagaagtttgggggaagaaaaggaaggttttttttttctttatgctagtgatttatct

SEQ ID NO: 1038513 - DNA, 120 bp, Artificial Sequence
  ENSG00000230303_18 (sequence is synthesized)
gtgaagggaagcagaaatcagaggtggaaaaactgacagatctactgtaggccaggtaaaaggtaatgatgagtctgacctaaagggacagccaggggaatttaaagagcatagttgaga

SEQ ID NO: 1038514 - DNA, 120 bp, Artificial Sequence
  ENSG00000230303_19 (sequence is synthesized)
aaagtggaggttttgagtttctagataattgcaagagagaaaagagacaattacaaaggaaaggagaaggagctacttcttgagagaagatcagtttagatttagacattttaagaattc

SEQ ID NO: 1038515 - DNA, 120 bp, Artificial Sequence
  ENSG00000230303_20 (sequence is synthesized)
aaagggttgtcaagacagccagacggacatggacactaataagttagaaataaaggttttgtaatatgggaaagaggactgagctagaaaatagactcatagataatcagcctaggagtg

SEQ ID NO: 1038516 - DNA, 120 bp, Artificial Sequence
  ENSG00000230303_21 (sequence is synthesized)
ccaaggcggaaatttgacgtaattcttttcgacacagttttacaggtgtgacaccatgaagtcgtcccacatttcccacaacctgaatttgggatgacagtcgactgagattttgtaaac

SEQ ID NO: 1038517 - DNA, 120 bp, Artificial Sequence
  ENSG00000230303_22 (sequence is synthesized)
tgtgttcttaagctgcttgctgaactgtccatttctctttctcttccacttaatttcatactttcaggtctggatgcccattttaattcttctgaaagcatgcctccttctggcttcagg

SEQ ID NO: 1038518 - DNA, 120 bp, Artificial Sequence
  ENSG00000230303_23 (sequence is synthesized)
atgattgtaggttccattacccttaaagtcttgaccttctctttccttggctgctcaggtcataggtgctgcaatctagagacaaaatattccttacactgccagatacttgcaaactaa

SEQ ID NO: 1038519 - DNA, 120 bp, Artificial Sequence
  ENSG00000230303_24 (sequence is synthesized)
ttccaaggcggaaatttgacgtaattcttttcgacacagttttacaggcatcttgcatgtgaataactcacaactttaattcatggaacaaattgagaaatagtcttttgggggtttggt

SEQ ID NO: 1038520 - DNA, 120 bp, Artificial Sequence
  ENSG00000230303_25 (sequence is synthesized)
actccctggaaacataagagtgctttgggcacctctggtgcctttccatgcctgccttctctgctgttcttgctactagtgaattctaaatcatggccaagtgatgccagcactggataa

SEQ ID NO: 1038521 - DNA, 120 bp, Artificial Sequence
  ENSG00000230303_26 (sequence is synthesized)
agggtaatgcagaatcatcaagacaaggtaaattggactttcacaaaaacggggctggaaggagtgttgctcaacaatatccaaaaccacagaggttgaaaagcacaaggaaagaagctg

SEQ ID NO: 1038522 - DNA, 120 bp, Artificial Sequence
  ENSG00000230303_27 (sequence is synthesized)
taacattttgcagtctatttgttatagcagtttagcctactctaggtaatgtagtccttaacggaaagtattgagaaaaaaagagagaagggaggtgaaatcagagtttatgagtgaggg

SEQ ID NO: 1038523 - DNA, 120 bp, Artificial Sequence
  ENSG00000230303_28 (sequence is synthesized)
agagtgaactgactaaagaacatggtaaagtttccaggcattactaagagccccattgaataagtggtcatgaatttatagtgaggctagccacttggttatgcaattttctctagccat

SEQ ID NO: 1038524 - DNA, 120 bp, Artificial Sequence
  ENSG00000230303_29 (sequence is synthesized)
attcagttgctcatgtgcaggcactgagtaggcagttttggcagtaaccaggactgagatttgaccaggcaagtataaggggaagataagggcagagttggtggtggtagaggcaaagga

SEQ ID NO: 1038525 - DNA, 120 bp, Artificial Sequence
  ENSG00000230303_30 (sequence is synthesized)
ggccttataatttcagaagtggtaagaagtaaagctatgagaggagtgaagaatggtggaaagacggtagagtgactgaattggtgtttttgatgaggttgaagaattgttgaagtttag

SEQ ID NO: 1038526 - DNA, 120 bp, Artificial Sequence
  ENSG00000230303_31 (sequence is synthesized)
ttactatatgcaatgaccttggaacgataagagatggttggagagtggaggcttgaattaaattagaggaggagctgtagttaccagtaatattacagtgtaaggaatgcatatgagaat

SEQ ID NO: 1038527 - DNA, 120 bp, Artificial Sequence
  ENSG00000230303_32 (sequence is synthesized)
ggataattgaggtaccagagggtacaagatcctttgaaaggaggtaaaggaattgagacacagtaaggattttgaagtgaacatccacatagttatatatatctattatacatacataca

SEQ ID NO: 1038528 - DNA, 120 bp, Artificial Sequence
  ENSG00000230303_33 (sequence is synthesized)
tacatatatacacatacccctcacaaagaattaccgcaagagtgattccacagtagtgttgtagtagtgagtagttttggagagagtgatagcagccctagtactaaaatctttaatcta

SEQ ID NO: 1038529 - DNA, 120 bp, Artificial Sequence
  ENSG00000230303_34 (sequence is synthesized)
tgagtgaggggttgaattcttcaaattaggctgcacagggacatcagtggtttaatatgttaaactcttgcaaatatcacatttcattaaacagatgcttttacgttttatgttgctaaa

SEQ ID NO: 1038530 - DNA, 120 bp, Artificial Sequence
  ENSG00000230303_35 (sequence is synthesized)
gtgagatttctaattgcttctctctgacctctcaaattacgatggtaactgccttcttttacaggaaatgcccatctgtctgtattataaaccagacacatgccaggttttccaatttaa

SEQ ID NO: 1038531 - DNA, 120 bp, Artificial Sequence
  ENSG00000230303_36 (sequence is synthesized)
atgacagtgctttaaaacttgtcatagactactctgtcctacctccaatgtgtatttcaagtagatacatctacagatgctagctctgccacatcaaacaatgcacagtgaatgttcaaa

SEQ ID NO: 1038532 - DNA, 90 bp, Artificial Sequence
  ENSG00000230303_37 (sequence is synthesized)
tagctctgccacatcaaacaatgcacagtgaatgttcaaaatctacattaaaaaccttggttataaagagctagataccctgttttagta

SEQ ID NO: 1038533 - DNA, 120 bp, Artificial Sequence
  ENSG00000230303_38 (sequence is synthesized)
tattcatctgtcttagagctattggaatcctggatcattgtgggaaatgaaaagtaagtaagtacatgcctatgatttgttgttggtaagtgtggtgtggggtccaaggaatggttcgtt

SEQ ID NO: 1038534 - DNA, 66 bp, Artificial Sequence
  ENSG00000230303_39 (sequence is synthesized)
tgttggtaagtgtggtgtggggtccaaggaatggttcgtttaaaaatatgacacttcagaccacat

SEQ ID NO: 1038535 - DNA, 120 bp, Artificial Sequence
  ENSG00000230303_40 (sequence is synthesized)
ccacactggacttgaaaaattataccttgctttatatatgtacttaataagcttgaaaacacaataatacagtatacaaataaggttttaaaataattccttttctactttagttatata

SEQ ID NO: 1038536 - DNA, 120 bp, Artificial Sequence
  ENSG00000230303_41 (sequence is synthesized)
tagttttaaatttccaagaatcattaagtatacattttaaaaaaatatttaattttctattcttttctgttgtgaatggttttgttccttgggcatatagggatcttgctcattataaca

SEQ ID NO: 1038537 - DNA, 120 bp, Artificial Sequence
  ENSG00000230303_42 (sequence is synthesized)
gactatgagattgttgttttttcctcttaaagtactgtagataactcaatagagctgtgtgttacaattaaccagtagaacataatatctaagtcttattcaatatatttgggttcaaat

SEQ ID NO: 1038538 - DNA, 120 bp, Artificial Sequence
  ENSG00000230303_43 (sequence is synthesized)
tacactgttagcatttcaaatagtgccaattctgttgactcattgcagaaattcctagaaggaaatataaaaacagacaaatgagaactatgcaaaatatcaaaagccatcattataaca

SEQ ID NO: 1038539 - DNA, 120 bp, Artificial Sequence
  ENSG00000230303_44 (sequence is synthesized)
tcaactttttctgggatttcttttcataatttcctttgttctaattacctccatgttggagtcatgttggggtcaacatgaaagccattataaaaatcaaacactattccagtgtttgat

SEQ ID NO: 1038540 - DNA, 120 bp, Artificial Sequence
  ENSG00000230303_45 (sequence is synthesized)
gctttctctttgtatgcagtacattccagggaatggaaggaatcgcagcagtcaaccttggtgtaggcaataaggggtgcattgtttacagataatttaaaaacaacaaaacctatgaaa

SEQ ID NO: 1038541 - DNA, 120 bp, Artificial Sequence
  ENSG00000230303_46 (sequence is synthesized)
agtcagcctgcttttatcagcagcaatgacagtgataaaatacttctccttattgggcagaggctccccagtaccctacccttggtgtacttctgccaacataagctcaaaagtactaca

SEQ ID NO: 1038542 - DNA, 120 bp, Artificial Sequence
  ENSG00000230303_47 (sequence is synthesized)
catatctcgagggaaaactctgggacttggcattatatgtgtgggaatctggccttggttggcactcccagcatgatagcagggttctgctgtctgaatgtactctggggtgtgcgccac

SEQ ID NO: 1038543 - DNA, 120 bp, Artificial Sequence
  ENSG00000230303_48 (sequence is synthesized)
aatttctgtcatcgaaatggagatgagagaatatgcccttggtggggacaccccactggaattagagtgaagagatcaaagctagaggttcttaaatcaaagaatgtctaatagcaaaga

SEQ ID NO: 1038544 - DNA, 120 bp, Artificial Sequence
  ENSG00000230303_49 (sequence is synthesized)
caaaaacttgcttaagagaaatgcatacaggtactagacctaatatgatgaaaaatgctaacttcaacatattgatgcatgcttagtatacttttagtcctgcaaagacaaaagtttttt

SEQ ID NO: 1038545 - DNA, 120 bp, Artificial Sequence
  ENSG00000230303_50 (sequence is synthesized)
caggcatgagccaccgcacctggcccagtcctgccaagacaaagttttaaaacacaggttgcacattggcagctctcaagccaaatctggcccatagacatggtttgcttggcctataat

SEQ ID NO: 1038546 - DNA, 120 bp, Artificial Sequence
  ENSG00000230303_51 (sequence is synthesized)
ggcccatagacatggtttgcttggcctataatgttagtaatacttgacccaagatttaaaatttgaaaagtttcatataaaaatatagatttacagcttttctagaaaaactataagagt

SEQ ID NO: 1038547 - DNA, 120 bp, Artificial Sequence
  ENSG00000230303_52 (sequence is synthesized)
taacagtttctgaattgcaacagcagctggaacaccgttgccactgaccatttagatgactgctgcagtccccacggctcactctggttcaggtaggggttctagtttgtaacccctggt

SEQ ID NO: 1038548 - DNA, 120 bp, Artificial Sequence
  ENSG00000230303_53 (sequence is synthesized)
ttaaaacataactgactctctagtttttaaaattctctcaaaatcaaataacctgaactagcaaatgatctagatcctcgtacatggaactcatactaagttgaccacagacagtggctc

SEQ ID NO: 1038549 - DNA, 120 bp, Artificial Sequence
  ENSG00000230303_54 (sequence is synthesized)
agtggctcccaaactctgcagtacatcagagtcactgggaagctttaaaaaatcctgctccctagctgggtgcagtggtttatgcctgtagccccagctacttgagaggctgaggtggga

SEQ ID NO: 1038550 - DNA, 82 bp, Artificial Sequence
  ENSG00000230303_55 (sequence is synthesized)
actctaaaaaaaaatcctgctccccaggtgacagtatctgggggaaggagtaaggcatcttattttcaaaagatcataagaa

SEQ ID NO: 1038551 - DNA, 120 bp, Artificial Sequence
  ENSG00000230303_56 (sequence is synthesized)
ggaaggagtaaggcatcttattttcaaaagatcataagaaaagaggctcattgctgaggctcactccggagcccacttggattcttcacaagaaagtttccctcttccagaattttataa

SEQ ID NO: 1038552 - DNA, 120 bp, Artificial Sequence
  ENSG00000230303_57 (sequence is synthesized)
ttgagggaaccgactagggaaagattaatttgcccaaggtcaaacaactagtaaaagaagtaaggattccaacccagatcttttgactctattatccttacatatagttttatagtgatt

SEQ ID NO: 1038553 - DNA, 120 bp, Artificial Sequence
  ENSG00000230303_58 (sequence is synthesized)
taaattgatacaaggataggtttaaatacaagtagaatgcaggttcatataaaactgattttatcctcatgttagaaaacatatacactgtaacagagggatgaccatcaagtgaccaag

SEQ ID NO: 1038554 - DNA, 120 bp, Artificial Sequence
  ENSG00000230303_59 (sequence is synthesized)
atattttagtcaaaagatgaatttttctgcaattggagaatgccaaaaatattcaaagaaaatataagtcttgtaggcagtcttctatcaaaacccactgaaccgctgggcacggtggct

SEQ ID NO: 1038555 - DNA, 120 bp, Artificial Sequence
  ENSG00000230303_60 (sequence is synthesized)
ggacaaaaggaaaaggtctgtagcagcactacatcagaaaaaatggattccgcaaggaagtgggtgactctgaatacttcgatggaatcagcagccattgatccaatgccaactccaaga

SEQ ID NO: 1038556 - DNA, 120 bp, Artificial Sequence
  ENSG00000243081_0 (sequence is synthesized)
gtttggaaactatctcccctgtctggtgtccttgcagctgtgcatctgtcagtctgtgctgtcatcttcttcagggtaacctcaaatgttccaaggtcttacacctactcatcatattca

SEQ ID NO: 1038557 - DNA, 120 bp, Artificial Sequence
  ENSG00000243081_1 (sequence is synthesized)
gggaactgagactccacacacctcactttgaggctggaatatgctgaaactgcctccacaaactcattattctggaccaagacttacagcctaaagtgaaggacatttccaaagaaattt

SEQ ID NO: 1038558 - DNA, 120 bp, Artificial Sequence
  ENSG00000243081_2 (sequence is synthesized)
tctcctcactgatgcctctcctgctgcaatgcaatgaccctggctatgtacaagacatactttggcttgctcctgggaaacctttgctctgtaaagagcactgagctgttgctaccattg

SEQ ID NO: 1038559 - DNA, 120 bp, Artificial Sequence
  ENSG00000243081_3 (sequence is synthesized)
ctggcttcaagcactttgtccccattcatttccaaggtcagacctaatgccaagactttgttgaaggagaagtggggagtctcagctactgctgccagaaaggcagatgttttcattgtt

SEQ ID NO: 1038560 - DNA, 120 bp, Artificial Sequence
  ENSG00000243081_4 (sequence is synthesized)
tgctgcaacttgtttgtcttatagtggtttctcaagatatccaggaaggaagaaaaacaaatacctcaccctgccctaggaaagtgacagactgtgatgacacttccatcacaaaacagg

SEQ ID NO: 1038561 - DNA, 120 bp, Artificial Sequence
  ENSG00000243081_5 (sequence is synthesized)
cctggactctgaagcaagtgtctcctctaacacacccatgttaaaaccagtctaagtttcgccttctcaggcatacttccactacattgtgtttacaatgtttttttttctctattatta

SEQ ID NO: 1038562 - DNA, 76 bp, Artificial Sequence
  ENSG00000243081_6 (sequence is synthesized)
acattgtgtttacaatgtttttttttctctattattattttacttaagcagtggcgctatctcggctcactgcaag

SEQ ID NO: 1038563 - DNA, 120 bp, Artificial Sequence
  ENSG00000243081_7 (sequence is synthesized)
cgtgagccaccgcgcctggccttaaaatattttaatacacattttcatttattggagaaatgtgtcattgcttaagttgttctgtttaaacaatgtgatacaggtctcatttaatttaga

SEQ ID NO: 1038564 - DNA, 86 bp, Artificial Sequence
  ENSG00000243081_8 (sequence is synthesized)
gcctgtgacacagcctcaggaggttctgacaacatgtgtccaaggcggtcagagcatagtttggttttatacattttagggagaca

SEQ ID NO: 1038565 - DNA, 120 bp, Artificial Sequence
  ENSG00000243081_9 (sequence is synthesized)
ggttttatacattttagggagacatgagatgtcaatcaacatatgtaagatgaacattggttcaatctggaaaggtgggcaactttaagcaaaggcaggaagacttgaagtcatgagggg

SEQ ID NO: 1038566 - DNA, 89 bp, Artificial Sequence
  ENSG00000243081_10 (sequence is synthesized)
aggtgggcaactttaagcaaaggcaggaagacttgaagtcatgaggggccttccaggtcataggcagataagagaaaaatgattgtatt

SEQ ID NO: 1038567 - DNA, 120 bp, Artificial Sequence
  ENSG00000230309_0 (sequence is synthesized)
actatagtttcaataagaaataatgggagcatgaactttgcagaaaagataaaaatggaatgaagacagaactctgtgagagaaagaacatagtaactattctaatgatgttgggatcct

SEQ ID NO: 1038568 - DNA, 120 bp, Artificial Sequence
  ENSG00000230309_1 (sequence is synthesized)
ttgctaatacaggatgggagagagaatgatgtgtgagtgtctgtgatgaagatgtcacacttacagcagaaactgagaaacagtggataacttctgaaatctttgggtataatcatctat

SEQ ID NO: 1038569 - DNA, 120 bp, Artificial Sequence
  ENSG00000230309_2 (sequence is synthesized)
cttgtgtgatctaataatttaagaaagaagtgattatgctgttgaaatcgtgaagattttacaggtaacacttcctttccttcctttgttttgataacagatggagatatttacaatttt

SEQ ID NO: 1038570 - DNA, 120 bp, Artificial Sequence
  ENSG00000243083_0 (sequence is synthesized)
ggctggtttcaaactcctggcctcaagtgcttctcctgccttccaaagtgctggaattatagacatgagccaccacacctggccaaaacatttttatttttattttagagctggatcctc

SEQ ID NO: 1038571 - DNA, 120 bp, Artificial Sequence
  ENSG00000243083_1 (sequence is synthesized)
agctggatcctcactctgtgagaccaggctggagtacagtggtgttatcgtagctcagctgcaccttcgaactcctgggctcaagcagtcctccttcctcagcctcctacatagctagga

SEQ ID NO: 1038572 - DNA, 120 bp, Artificial Sequence
  ENSG00000243083_2 (sequence is synthesized)
ctacaagtctgcaccaccatgccttgctaacttttaaaaaatctttcgtagagggggttcttgctatgttgctcaggctggtctagaactcctggcctcaagcaatcctcccacttgagc

SEQ ID NO: 1038573 - DNA, 120 bp, Artificial Sequence
  ENSG00000243083_3 (sequence is synthesized)
tgtgggattataggcatgaaccacagtgcctggttagtgttcttttaatactcaggtaatgaatccaaatccatcctgtgacgtgcacaaaactgattttgttatcgttcactggattcc

SEQ ID NO: 1038574 - DNA, 120 bp, Artificial Sequence
  ENSG00000243083_4 (sequence is synthesized)
cagtaatttctaaaactcagcagtggggacagttggtccacaaaatcacatgaacatggtcagttgcctcagcaccatcctcactcagtctctcaggaccctacaccatctacctgcggg

SEQ ID NO: 1038575 - DNA, 120 bp, Artificial Sequence
  ENSG00000243083_5 (sequence is synthesized)
gaaagtggatttgcacccacccaccctccatccatgcccagctacttacacagctccactttaagcccatggaccctaaagccgctgccagagcccagcttccaatgggtttttttaatt

SEQ ID NO: 1038576 - DNA, 120 bp, Artificial Sequence
  ENSG00000243083_6 (sequence is synthesized)
gaagtagaagtgcctgctaagagacctcccaaagatcccctgccttcagcccagacaagtcttcttctcattgacaacaacactcgttctgtgggctgtagtggctttatttgcatagcc

SEQ ID NO: 1038577 - DNA, 120 bp, Artificial Sequence
  ENSG00000243083_7 (sequence is synthesized)
tcatttcctctgttctaatgcaccaattgtgggaatgcatactgcaaatttagtagtagaattttgtggaggaaaaaaatctatcatattgaatatatatgttgattttttatgatatca

SEQ ID NO: 1038578 - DNA, 120 bp, Artificial Sequence
  ENSG00000243083_8 (sequence is synthesized)
aatttattgaggtgtttatatgtagtttatatatagtttataaactataaaatgcacccattctaactgtacatttcaattagtttggttagtttatacccctgtatagccatgaccaca

SEQ ID NO: 1038579 - DNA, 120 bp, Artificial Sequence
  ENSG00000243083_9 (sequence is synthesized)
attaagacatggaacatttctgttaccccagaaagttcccttgtgtctcattccagataattccctccacccctgtccctgggaaactcctgatctgctttctgtcatttagattgaatt

SEQ ID NO: 1038580 - DNA, 120 bp, Artificial Sequence
  ENSG00000243083_10 (sequence is synthesized)
tgtgttttctagagttttctatatggaatgccataatatgtctgcttttgtgtctagattctttcgctcagcataaggtttgagattcatctgcagggtcaaatagaaggtatcaagcat

SEQ ID NO: 1038581 - DNA, 120 bp, Artificial Sequence
  ENSG00000243083_11 (sequence is synthesized)
gaccatagttcattccttttcattgctgaatagtattcctgtctctttgttttgatatgttgcttttcttttgcattttccaactttattaaagaataattaacatatactaaattgcat

SEQ ID NO: 1038582 - DNA, 120 bp, Artificial Sequence
  ENSG00000243083_12 (sequence is synthesized)
ataaaatgtgtacaatctaaccagttttaacatatgcgtatatccatgatgtgcacacagacttttatgaatcagaactataacaaaacagtgcagcttagatcattgaaatattaggtt

SEQ ID NO: 1038583 - DNA, 120 bp, Artificial Sequence
  ENSG00000243083_13 (sequence is synthesized)
gaataactcttttattcaagtcctttccagaactctgggttagtatttgccttgcatttggcaaaccaaagaatcattgattattttcctccaaaacacatctgctctaaggagacttgc

SEQ ID NO: 1038584 - DNA, 120 bp, Artificial Sequence
  ENSG00000243083_14 (sequence is synthesized)
tacctctgaggaagaacattttagtctctctgctgcaaaacaaacaaacaaaaaacctaaaacaaaaagcaatgcttatagtgcatctcactacatttgatatttctatgaaaggactct

SEQ ID NO: 1038585 - DNA, 120 bp, Artificial Sequence
  ENSG00000243083_15 (sequence is synthesized)
gaactgcagtgacatgaacgtaacccaaactggctcaagaagaaaaaagcagggagacgggcaggatttattgactaacatagatgaaagcgtgagggcttcaggcatagctgtatccag

SEQ ID NO: 1038586 - DNA, 120 bp, Artificial Sequence
  ENSG00000243083_16 (sequence is synthesized)
gagctaaaacatcatcaggactccgtctctcttcctctttttccctctctctagaggctgctttcctccctgttagcttcattttctccatgtggtggactgtggcagaagccactttgg

SEQ ID NO: 1038587 - DNA, 120 bp, Artificial Sequence
  ENSG00000243083_17 (sequence is synthesized)
atgtttaccttgggggaaattgaatgcagggaattggttacagagatgatggagctgctgagaagacagcatggccatgttgaataacccagggattagtgataggaggaaggcactgcc

SEQ ID NO: 1038588 - DNA, 120 bp, Artificial Sequence
  ENSG00000243083_18 (sequence is synthesized)
tcctttatatcagagagacaaagagggaaggatggtgtaactggaacccaggggtttggggatacctgagagaagctggagccagagtagggcagcctggtggggcactggagccgcaga

SEQ ID NO: 1038589 - DNA, 120 bp, Artificial Sequence
  ENSG00000243083_19 (sequence is synthesized)
ggaactgcagctgctgccggagatgcctcccaaggccagcagggagagggaggaatagccccgcttctctctactttcaccctcagcctcccccagtgcctttcttggcccaacccagct

SEQ ID NO: 1038590 - DNA, 120 bp, Artificial Sequence
  ENSG00000243083_20 (sequence is synthesized)
ggaagccagatggcaagaatgcccaggaaatgcaggctgcaggggttagccccagggataccaacaagacagaggaagaggaaggaagtgggagacacagtctgagggcaggagacccac

SEQ ID NO: 1038591 - DNA, 120 bp, Artificial Sequence
  ENSG00000243083_21 (sequence is synthesized)
cccagcacaatccccttggaaagtgagcttgtgaatggttccaacagaagtctgggaacagagtctgatgtgtacaggtgtggttatcaggccccctccagaggtaggaggctggcagag

SEQ ID NO: 1038592 - DNA, 120 bp, Artificial Sequence
  ENSG00000243083_22 (sequence is synthesized)
gatggggaaccagcaacacagacaccaagcagagccggagagacccaaagcaaagtcaaagtgctcttccctgacatggatgtggggctgacaaacaccggtgtccaccacatgctgctc

SEQ ID NO: 1038593 - DNA, 120 bp, Artificial Sequence
  ENSG00000243083_23 (sequence is synthesized)
agaggccacacaattgcaaatggcccagctcaggctgtttccacagaggagaacttcaagtttgctgtgatgccaaaccatggccaaggtcaagaccttactgatacatttctggtccct

SEQ ID NO: 1038594 - DNA, 120 bp, Artificial Sequence
  ENSG00000243083_24 (sequence is synthesized)
gggaaagcaagaaggggaagaaaacgatgaagcagcactatttctgccccttccaatgaggcgccctgattcccaagcctggagtttgcagcatgaggcccagggcccaggtgggaagag

SEQ ID NO: 1038595 - DNA, 120 bp, Artificial Sequence
  ENSG00000243083_25 (sequence is synthesized)
tggcttaacatccaggccccgggaaatgcaaaaagcaaatgactcactggtcttcaatagcacattaccttctaaaggagacactttgcaacccaaatatcgaggccagaggatttccta

SEQ ID NO: 1038596 - DNA, 120 bp, Artificial Sequence
  ENSG00000243083_26 (sequence is synthesized)
cgagtcttttatgatctctaaaaatttcaagagagagaattggtgagcaactgggctctgtcactgtcgggctcgctgattgaacgtgcctttaatggagtctccggcagccataaaaat

SEQ ID NO: 1038597 - DNA, 120 bp, Artificial Sequence
  ENSG00000243083_27 (sequence is synthesized)
gtatgaaaacagccttctggccacaagcaagcctgatagatggggcagtgacactcaggaaaagccagatggcctgggcttgtcctcatgcctgttgaagaggatacatcttggtctctt

SEQ ID NO: 1038598 - DNA, 120 bp, Artificial Sequence
  ENSG00000243083_28 (sequence is synthesized)
tgcctgttgaagaggatacatcttggtctcttaagatagaacttgtgtttggagacacattaggcattcgacatacaatttctccacaggggaagatacatacacacacacacacacaca

SEQ ID NO: 1038599 - DNA, 120 bp, Artificial Sequence
  ENSG00000243083_29 (sequence is synthesized)
cacacacaatcaaaacattgcatgaggatagctttacatgacagtgtaccccagtagttaaaggcttgggcaccgtagtgagttaaatagtgttcctctcccaaaaaaatttctgtccac

SEQ ID NO: 1038600 - DNA, 120 bp, Artificial Sequence
  ENSG00000243083_30 (sequence is synthesized)
ccaggaccacagaatgtgaccttatttggaaatagagtctctgtagatgtcattttccataccattttaaagtctgtttgttccactacacactgaggatattaataatgatacccacag

SEQ ID NO: 1038601 - DNA, 120 bp, Artificial Sequence
  ENSG00000243083_31 (sequence is synthesized)
acaaaatgagcagaggataaagagcatgtatgatcatctaataaatgcacaagctatgtgtcgactgttgttactacgtatgagaaaaaagagaaagagggaaggaaggagggaggaaaa

SEQ ID NO: 1038602 - DNA, 120 bp, Artificial Sequence
  ENSG00000243083_32 (sequence is synthesized)
aggggaggaaggaaggaagctattaaaagctggctaattcacatcataaccctgaaataatagaagagcatcctaaaagagatctcgcttagcagacaagttgccttccttctccataac

SEQ ID NO: 1038603 - DNA, 120 bp, Artificial Sequence
  ENSG00000243083_33 (sequence is synthesized)
cctctaattatagcacttcagagccctcttaacttaaatctcctagagaagggtgcacatgctcatgacattctttcctgccttctgctgtgatgaagctgcaccgctagcttagcccta

SEQ ID NO: 1038604 - DNA, 120 bp, Artificial Sequence
  ENSG00000243083_34 (sequence is synthesized)
gacaccccctgtcccagtcagatggtcacctgatggtgcaagccggccagaaagttcaggagtccaattcaacactcagatatgaaaatgcacagaacccctttattcctgacatgggca

SEQ ID NO: 1038605 - DNA, 120 bp, Artificial Sequence
  ENSG00000243083_35 (sequence is synthesized)
tatggtacaaatcatttggcatgcactaaatcattagaatactcgtttattttggaacgtatatgaagtgagcagaataaggcatgtactgttttcaagagaactcatttcctctgctgg

SEQ ID NO: 1038606 - DNA, 120 bp, Artificial Sequence
  ENSG00000243083_36 (sequence is synthesized)
gggcaaaagaccgctcttggcaaggtattctttgaaagtaaattatcttcagaggaaagcacgtgctgttctaaaggagaacgtagctccctacagattctcaagttcaaggggtgtctg

SEQ ID NO: 1038607 - DNA, 120 bp, Artificial Sequence
  ENSG00000243083_37 (sequence is synthesized)
tgtaggtgcatgcacacatatatgtattacatgcaacaacaattaatatatgtattacatgcaacaattaatggttggaaaaccattaatcatatttatttaaaattgaaaagacatata

SEQ ID NO: 1038608 - DNA, 120 bp, Artificial Sequence
  ENSG00000243083_38 (sequence is synthesized)
tattcaaaataacagttttaataagttcgaaagttttgctcacacataaataagagaaatccagagacagatagtttagtgatagtatggtggctccatggtgtcatcagatatgcaggc

SEQ ID NO: 1038609 - DNA, 120 bp, Artificial Sequence
  ENSG00000243083_39 (sequence is synthesized)
tcatgtctttatgctttgttaaactcaaagtgagtgtcttccttctttagagtaaccctctggcccaagatggctgctggagcctcagctactacatgtggattccaggccagaagtaga

SEQ ID NO: 1038610 - DNA, 120 bp, Artificial Sequence
  ENSG00000243083_40 (sequence is synthesized)
gggaggggaaaacaaaggagtataccttccggggatatcagcttttttgtatcatcttcctgaggtcctgtgcatttccatagtcacatatatgcccctaaccgtcttctcaggccttaa

SEQ ID NO: 1038611 - DNA, 120 bp, Artificial Sequence
  ENSG00000243083_41 (sequence is synthesized)
atgtttgggcgtgttgtgaatctccaagactgagccacaagatgcagcattttcctaatgacctcaggccctttttgaatgggcacttttgggaatcagcgttctgcaaagcataccttg

SEQ ID NO: 1038612 - DNA, 120 bp, Artificial Sequence
  ENSG00000243083_42 (sequence is synthesized)
ggaagccacagagagcttttccctgaagcagggtttctcaacctgtacgttgttggcatttggggcaggataattcttagttgtgggcggctgtcctgtgcattggagggtatttaccag

SEQ ID NO: 1038613 - DNA, 120 bp, Artificial Sequence
  ENSG00000243083_43 (sequence is synthesized)
catccctggcctctgctcaccagatgccaatagcaattcctcccccaccctgttgtgacaaccaaaagtgtccccaggtattgccaaatgttccctgctggcaaaatggccctcagatga

SEQ ID NO: 1038614 - DNA, 120 bp, Artificial Sequence
  ENSG00000243083_44 (sequence is synthesized)
gaacctttactctagggaaatttctagaatcaagaaaatacattgcaatgataggagagaccactctctcaggtatgaatattcagctgactgttagagtccttggcaataagattgtta

SEQ ID NO: 1038615 - DNA, 120 bp, Artificial Sequence
  ENSG00000243083_45 (sequence is synthesized)
ttttttaaaagagacagtattactggtgaagattcatttcaaaaatggaaatgaaaataaaagttgctgtttctatgataactaagtcaaaaacttatggaaatttatggaacaagtgcg

SEQ ID NO: 1038616 - DNA, 120 bp, Artificial Sequence
  ENSG00000243083_46 (sequence is synthesized)
acgcttccagatggacagtcccaaagagaatggtttgtttcctttcgtcttcctccacgatgcattttacgattgcagagggtcctgcttgccatgtgtttgcttctaatctactcgttt

SEQ ID NO: 1038617 - DNA, 120 bp, Artificial Sequence
  ENSG00000243083_47 (sequence is synthesized)
atggaacgcacacgctgtgccaggcattgtgcacagagagacccagttcctgccctcttggagtttatatgacatgagctgaagacagacaagaagcaagtgtaagagctaccagaggga

SEQ ID NO: 1038618 - DNA, 120 bp, Artificial Sequence
  ENSG00000243083_48 (sequence is synthesized)
ggaaagtggaagctaccagacggaggaagcataaaccaggtcctgatccctgattaattgagaatcagccagcttgggaaggggatggctgcgcaagcccacagaacgcagactcccaga

SEQ ID NO: 1038619 - DNA, 120 bp, Artificial Sequence
  ENSG00000243083_49 (sequence is synthesized)
ggaggcaggggtaggaaagctcttggccgtggcctgattgtctgggagacgggagtcaagatggcttggtttcaacaaactggctttgattacttggcgtttggctctgtgctctctggc

SEQ ID NO: 1038620 - DNA, 120 bp, Artificial Sequence
  ENSG00000243083_50 (sequence is synthesized)
caggtcagcctgacccacggttgtcaccccagaggactgtgaaataacaagtgcagttaactggccactgctgatctgcgcctagaagacaacgtctcagttgttaaggcttttgttggc

SEQ ID NO: 1038621 - DNA, 120 bp, Artificial Sequence
  ENSG00000243083_51 (sequence is synthesized)
gctctgtgctgggcttgtggggtgagagaggagacagaatagggagaaggaggagaggggaggctgtaccttgtaggtggatattttaaggctctaatgttagctgtggttggaattgac

SEQ ID NO: 1038622 - DNA, 120 bp, Artificial Sequence
  ENSG00000243083_52 (sequence is synthesized)
caagggaggcactagcaagaggttggagggccggaagaggaaagaaaccagagtttctctccaactcctctctctctttctctgcctcagatggtcaaaattttaaggagacagaatcca

SEQ ID NO: 1038623 - DNA, 120 bp, Artificial Sequence
  ENSG00000243083_53 (sequence is synthesized)
acagggctgggattaggatgaagtgagtgaggctgagctgtgcaaatacgaggtcagatcctgaccttgttcatcatggaatttttgcattaatgttgatattttttaaatattgtgttg

SEQ ID NO: 1038624 - DNA, 120 bp, Artificial Sequence
  ENSG00000243083_54 (sequence is synthesized)
aaatatttatcttgattactgagctttttgacatttccttagactttatcccaaagcaagagccttgcttgtttcaccctggtcctggccttgccttccagtgtgtcggacacatttacg

SEQ ID NO: 1038625 - DNA, 120 bp, Artificial Sequence
  ENSG00000243083_55 (sequence is synthesized)
cacagagaaaaataggcaatccaaatggtccaactctattggatattctctatgctgctttcattcactcaataatgtgtagctgagcacttttctgtgtcaatgaatatagttccacat

SEQ ID NO: 1038626 - DNA, 120 bp, Artificial Sequence
  ENSG00000243083_56 (sequence is synthesized)
gttgcagcttcagaagcctgtatttgtggacagagctcttccgaaggttccaggaggatgaaaacatccagtgactcccagatgttgctgggctggatatatttatttctaataatgctc

SEQ ID NO: 1038627 - DNA, 120 bp, Artificial Sequence
  ENSG00000243083_57 (sequence is synthesized)
agttgcacagggctttatgcctggcaagggcaccccttgctgtgtgcatcccagaggaggcacgtctgaagtctgcagaggaagcttctatcttcccttccaacgaattcctgctcaggc

SEQ ID NO: 1038628 - DNA, 120 bp, Artificial Sequence
  ENSG00000243083_58 (sequence is synthesized)
aaccccccactgatgcatctagcaggatctgtccatgccctgcccatatctctaacatttctatgtgctccagccaaactccactgccagctctgcatttctgagtggaaagtctcgttt

SEQ ID NO: 1038629 - DNA, 120 bp, Artificial Sequence
  ENSG00000243083_59 (sequence is synthesized)
cagatctgcagaatgccatgctgcctatcatttcagcaggggaaactgccatagaattaacatctgccaggaatagctcttgaccaatgactaaggggggactggtgtgtaaatacccca

SEQ ID NO: 1038630 - DNA, 120 bp, Artificial Sequence
  ENSG00000243083_60 (sequence is synthesized)
gctcccttgcccattgggtgggacaactcaggtgtgtgctgtacactatatcccagagctctctccatgggtacaagctccagttgcccacagtagtgcttggcttaattacctgccttg

SEQ ID NO: 1038631 - DNA, 120 bp, Artificial Sequence
  ENSG00000243083_61 (sequence is synthesized)
attggctgcctgtccttctccatatcacttttcctttccctcctggggctgtctacaaccccaacccagtaacaactgcacttgaatctttgtctcaggatctgcttccgttaagatgga

SEQ ID NO: 1038632 - DNA, 120 bp, Artificial Sequence
  ENSG00000243083_62 (sequence is synthesized)
cattccgattattttgaatttttcagtgttaacatgttcaccacccatatggattttggcatattaatagctgccaccccctcctttggggatgtggtccatacaaagcaagggtaacag

SEQ ID NO: 1038633 - DNA, 120 bp, Artificial Sequence
  ENSG00000243083_63 (sequence is synthesized)
aagaaggtaaagtagagaaaagagacagaaactctgaaatgctaccatgcatctcagagttatgtcctataaaatgagccttttcagtatgtgctgtggcatcaaaagtgttgagaagca

SEQ ID NO: 1038634 - DNA, 120 bp, Artificial Sequence
  ENSG00000243083_64 (sequence is synthesized)
ttgttctcactggtcaggctgtgccttcacctctgtagctccaatgagtgacacatagtagataatggataaatatgtgttgcatgaataaagggaggagtaattggttcatgctctgag

SEQ ID NO: 1038635 - DNA, 120 bp, Artificial Sequence
  ENSG00000243083_65 (sequence is synthesized)
cctctgccaagctgagtatatgagaccttttgatttacctgagcaattgagcatctgtgcctcaggactctctagttctaccatcaagacagagaatggtgtgatactcaggttaacaag

SEQ ID NO: 1038636 - DNA, 120 bp, Artificial Sequence
  ENSG00000243083_66 (sequence is synthesized)
gtgagtccaggagtgttgccctggaggcataaaacaggggcccagcctttggagataaagcatgctctggtcctaaatggcagcaggagaagaatcttcccaaagtgagagtcaggccac

SEQ ID NO: 1038637 - DNA, 120 bp, Artificial Sequence
  ENSG00000243083_67 (sequence is synthesized)
aatacctcccctgggaggacgtctgtgcctgtgtatgttggagagagaaggagctttttcatcccaagtgagtagagaggttacatcctctgactgcttccccctctctctgtctttctc

SEQ ID NO: 1038638 - DNA, 120 bp, Artificial Sequence
  ENSG00000243083_68 (sequence is synthesized)
tctctcctgctgtgaaggccaagtatgacttcacagaatccctaagctccataaatcagttctagatccatcccttgcagctgtaatgaaagcaggattttaataaaaactggatacttc

SEQ ID NO: 1038639 - DNA, 120 bp, Artificial Sequence
  ENSG00000243083_69 (sequence is synthesized)
tgacactgaggctaattcagattgtgtgctgttgtcataagaaggaaacagaagccatacgcaatgacatccctagttctgacctgtgccagacactgatgtttgtgcttatatatatta

SEQ ID NO: 1038640 - DNA, 120 bp, Artificial Sequence
  ENSG00000273153_0 (sequence is synthesized)
tgctgggattacaggtacgaggcactgagcccggccagtggaaccactttctatagtgtgcccatactgggccttggacatctttcctagtttggtacctgctgtttacttaacagcatg

SEQ ID NO: 1038641 - DNA, 120 bp, Artificial Sequence; identical to SEQ ID NO: 162374
  ENSG00000273153_1 (sequence is synthesized)

SEQ ID NO: 1038642 - DNA, 120 bp, Artificial Sequence
  ENSG00000273156_0 (sequence is synthesized)
aggtgatccgcctgcctcggcctccctgtgtgctgggattacaggcgtgagtcaccgcccctggcctccaagtgatcttaattgcatactaatgtgttaaggactttaatgtgttaactc

SEQ ID NO: 1038643 - DNA, 120 bp, Artificial Sequence
  ENSG00000273156_1 (sequence is synthesized)
tttaagatagagttaaacacactgtttcctaagggtttgtttttacatcttctgtaaaaacaaaggtatatgttttactaaaccagcattttagttgtggaccctaagtctaccttgaaa

SEQ ID NO: 1038644 - DNA, 120 bp, Artificial Sequence
  ENSG00000273156_2 (sequence is synthesized)
aaaaaaatgatatgatttttaacattctaatgagtacaagatgacagtgaacaacagtaatgtaccaagtcagggaaagtaggtggtgggggtggctacaggctgggaacatggtgagtt

SEQ ID NO: 1038645 - DNA, 120 bp, Artificial Sequence
  ENSG00000273156_3 (sequence is synthesized)
gcttggtattgttttaaaattctctacagccaatacactccccttattgtctgtatcttgcctctgccctgatcttagccatccattgcattattatgaattggtaatcaacaactctga

SEQ ID NO: 1038646 - DNA, 120 bp, Artificial Sequence
  ENSG00000273156_4 (sequence is synthesized)
tagaaattgacttgctattttctctaattgggctggttatatattgccctattgtccttagcgccttttcgattctcaagaaggttgcataattccagcagccttccatgtaaatggcag

SEQ ID NO: 1038647 - DNA, 120 bp, Artificial Sequence
  ENSG00000273156_5 (sequence is synthesized)
tagtatagagtagctgagataaagaatagtctccaggggactgactatataatataggaagttgaagcagtagggtagttcctaaatgttaataaatttcccccagtaagccctgtaaag

SEQ ID NO: 1038648 - DNA, 120 bp, Artificial Sequence
  ENSG00000273156_6 (sequence is synthesized)
ctttataggatttagagcctaagtaggagcatggtgttcttgtaatagcaatccaaatctgttattttagttgttaagggagaaattctttaaaagtcttcaaagaaattagagataggc

SEQ ID NO: 1038649 - DNA, 120 bp, Artificial Sequence
  ENSG00000273156_7 (sequence is synthesized)
attaatttattaaacagtgataatagaggttattggaatctattttgggaaactttaagtcatttggtattgggaagagagtacttcaaggttaatttgtataaatttaattttgttata

SEQ ID NO: 1038650 - DNA, 120 bp, Artificial Sequence
  ENSG00000273156_8 (sequence is synthesized)
agaggctgtactctgtttgcactctagaattaggaaggttactttcctgacttttgtatttctcaggaaaaaaagaattggaagaaacttaagaggtctgttaatgccagtacctaaacg

SEQ ID NO: 1038651 - DNA, 120 bp, Artificial Sequence
  ENSG00000273156_9 (sequence is synthesized)
tgacatttaacatggcatggaagctatgctttgaataaacacttgagaaaaggaattacataatttcttttttgttgtatggatggctttggattatacagagcttaacatttatataaa

SEQ ID NO: 1038652 - DNA, 120 bp, Artificial Sequence
  ENSG00000273156_10 (sequence is synthesized)
acaccagtctgagactgatgaagtgaaaacctttttattataaaataaaaattggaagaatggcattttattacagtatagttaagagattggctaaggcagtaaataaaacttagaaat

SEQ ID NO: 1038653 - DNA, 120 bp, Artificial Sequence
  ENSG00000273156_11 (sequence is synthesized)
gctcaaatttattgtaaattgcttttataatcattgatatataaagcatgctactgctaatcaattagttttatgtattaagacctatcagcatgtcttttttttagtatctggttgact

SEQ ID NO: 1038654 - DNA, 120 bp, Artificial Sequence
  ENSG00000273156_12 (sequence is synthesized)
taaacatgatgttctctgtaccatttaacattttcaagacatattctccccaagcaaattctgttggaaccaagtgtttccagttctagaagtttacttctagagtcttcatatgaaatt

SEQ ID NO: 1038655 - DNA, 120 bp, Artificial Sequence
  ENSG00000273156_13 (sequence is synthesized)
tacagttgggctttcatagggttttaatttgcactgaatccttccttctgaaagatgacttatgtttaaagtataatgtagcagtgcttttgtcttacaattaaactcttacagcactca

SEQ ID NO: 1038656 - DNA, 120 bp, Artificial Sequence
  ENSG00000248965_0 (sequence is synthesized)
gacgcggcgcaagatttacccctgaacctctctgggagtgtgagcttcatgggcctcagtaggaggagacggtggagaagaaaaagactttaccaggctgtctgcagacacccttgtcct

SEQ ID NO: 1038657 - DNA, 120 bp, Artificial Sequence
  ENSG00000248965_1 (sequence is synthesized)
ccctggagtgggacagctgggtggctcctcggaagactccacaaccccttggtactcaatgattaagtgatgaaagaaagtgcttttaattgtgttcgttggtatgaggggaaaaaccca

SEQ ID NO: 1038658 - DNA, 120 bp, Artificial Sequence
  ENSG00000248965_2 (sequence is synthesized)
aaaccttgggtaatctactgtcagaaaactgagaatcatcagtatcaagaaggttcttctcctgaaaggagccccttgacacatttgcaaaataaacggttttcattggtcagacgaaaa

SEQ ID NO: 1038659 - DNA, 120 bp, Artificial Sequence
  ENSG00000248964_0 (sequence is synthesized)
agaacctcgtcagttcataaatttaaagcaactccatttcctttgcttttgaacaatccaaactagatggtggatatacattggaacaatcagaaagcattcccagacagcttattacga

SEQ ID NO: 1038660 - DNA, 120 bp, Artificial Sequence
  ENSG00000248964_1 (sequence is synthesized)
tgcataacatttgactaacataaattcaaagtcgagcaaatgaaggcaaaaaggcagaagggaagagtgaaaatggacccagaaatagggcgaagcatgtctgccacactcgtctacctg

SEQ ID NO: 1038661 - DNA, 120 bp, Artificial Sequence
  ENSG00000248964_2 (sequence is synthesized)
ctgaccatgggtgaacctcatggtgagctgttgaccacaggattcaccacagaattcactctccagaagacaaaaactgctgtggagattggaaaatttatcttaaaatattaaggtcag

SEQ ID NO: 1038662 - DNA, 120 bp, Artificial Sequence
  ENSG00000248964_3 (sequence is synthesized)
acaagaacctctgtcaaggaacaggaagtcgtgccctgaggagacaagtagaggctgtagccatgggtggctttggggtagtagctgttggctgtgcctagaaggacatcatgaaagttg

SEQ ID NO: 1038663 - DNA, 120 bp, Artificial Sequence
  ENSG00000248964_4 (sequence is synthesized)
taagtgctgctaattgacgtcccccaattcatatgcggaagtcctggcccctagtacctcaagatgtgcttggttttggagctggggtctttaaagagttttgcaactacaaagggccca

SEQ ID NO: 1038664 - DNA, 120 bp, Artificial Sequence
  ENSG00000248964_5 (sequence is synthesized)
gagtttcccttgtgaatgagctcagcatcctcacgtttccaagaggaatcaacactgcaattcctcggaccacggtggctctcttcccagcacacctttgctgtgacctgcacccctgca

SEQ ID NO: 1038665 - DNA, 120 bp, Artificial Sequence
  ENSG00000248964_6 (sequence is synthesized)
ttgtcctcaaagacacactaagaaaacacatttcagaaggaaggacgtaacggagctcatgatccagttctgcatttggcgtggccccaaagacactgtgtgcagagtcagaaatatgct

SEQ ID NO: 1038666 - DNA, 120 bp, Artificial Sequence
  ENSG00000248964_7 (sequence is synthesized)
tgttctaataggctcttcttttccagagttttttattttccctggcattttgtgttttggtaattgcctacaagaatagttctataacagaaatcaacaatgaaaaccaaattacccctg

SEQ ID NO: 1038667 - DNA, 120 bp, Artificial Sequence
  ENSG00000248964_8 (sequence is synthesized)
cccacatcctttcattcctttttcatctctaatgatattttctgtatgatgactaacccagactgacgtaatttatcaattgatcttgacgatgtacattagaaaatgcattctgcaggc

SEQ ID NO: 1038668 - DNA, 120 bp, Artificial Sequence
  ENSG00000248964_9 (sequence is synthesized)
cccagcaggccatcttccatgtgcgccacgtagctttagaaaacctattagtgcaacagaaatatctaaagcccagcctttttgctaagaatattagaactggtgctaattactttatta

SEQ ID NO: 1038669 - DNA, 120 bp, Artificial Sequence
  ENSG00000248964_10 (sequence is synthesized)
atcataaagtgaaacagccgtgctatgtcaccacagccgtaaaataagtggttttatggcaaaagtagttaaagagaaaggacagattggatttatatactcagctggttaaaaaaaaga

SEQ ID NO: 1038670 - DNA, 120 bp, Artificial Sequence
  ENSG00000248964_11 (sequence is synthesized)
aattatgcataccagcaattttctttctttggttaaatgttcattaaatgtgtaccactaaaaaccatttgtaactaattccctagtgggtccatgccttaaaataatttattttaaaat

SEQ ID NO: 1038671 - DNA, 120 bp, Artificial Sequence
  ENSG00000248964_12 (sequence is synthesized)
acaaattaaggcttaaatttgcctttttattaaaaataggtataatgagtcaacatatctcctaagagaaaggagcgttgcagacatgctgatgagaggaatcttgtcgccaaaacctgg

SEQ ID NO: 1038672 - DNA, 120 bp, Artificial Sequence
  ENSG00000248964_13 (sequence is synthesized)
aggccatgctggtgttggggacttaggctatcctgcaggtgcctgtcaccattaagggcggcagaattcagaggctttggtccaggttaaagcacagaggtggccactgtctgaagacag

SEQ ID NO: 1038673 - DNA, 120 bp, Artificial Sequence
  ENSG00000248964_14 (sequence is synthesized)
ggacaccacaatgaccatcattgagggcgatgtttatgcttccattgttagtttagatattttgttttctttaaagtcagtattgtctctgagtaaataaaaacaatctccagtttctgc

SEQ ID NO: 1038674 - DNA, 120 bp, Artificial Sequence
  ENSG00000248964_15 (sequence is synthesized)
gaacaatccaaactagatggtggatatacattggaacaatcaggaatcatcaaagtgtttttcacagtggctgtgccatttgacattcccaccatcagtgtacaagggtatggtagctta

SEQ ID NO: 1038675 - DNA, 120 bp, Artificial Sequence
  ENSG00000248964_16 (sequence is synthesized)
tttttatgacttacgtaggtatcagacaggatttggtgaggaacacagaagccactgtatgttctgcacataaagggtttaaaagtcaagcaggagcttatacacaagttagaagactta

SEQ ID NO: 1038676 - DNA, 120 bp, Artificial Sequence
  ENSG00000248964_17 (sequence is synthesized)
ggagactgcagatgagagaagctgctgccagcatttggggaattgtccctgaaagtcaaaggagttaccctgaaatctcagcctgcagccccaaagcagctggtttttaaaagcttgcct

SEQ ID NO: 1038677 - DNA, 120 bp, Artificial Sequence
  ENSG00000248964_18 (sequence is synthesized)
agaattcttgagattcccgaggagcccccaacaccaaccgtctcagcctgcaatgatgaggggcttgccaggaatccgcagggaatctctcatctgtccacacatccagctgcaaccatc

SEQ ID NO: 1038678 - DNA, 120 bp, Artificial Sequence
  ENSG00000248964_19 (sequence is synthesized)
tctgaagactgatggcttccacttcctttcagccttccaaatatcatacaagttcctctcattaaaaaaaagcaaacatatacagaagggggtcttgggaagcacagttcccattcttag

SEQ ID NO: 1038679 - DNA, 120 bp, Artificial Sequence
  ENSG00000248964_20 (sequence is synthesized)
aagggagaggtagtggtgcctgctgacaacagcacacattatactcttctttattctagaaggcattccagggatcttataacgatgcatcaaatttgaccaacagaaatttgacagcat

SEQ ID NO: 1038680 - DNA, 120 bp, Artificial Sequence
  ENSG00000248964_21 (sequence is synthesized)
taattcagttaaaatgaggttgttattatgggccccaatccaatatgactgttgtttttataagaagagctgattaggacacagacatgtagaggaaagaccatgggaagattcagggag

SEQ ID NO: 1038681 - DNA, 120 bp, Artificial Sequence
  ENSG00000248964_22 (sequence is synthesized)
aaggtggccatcttccaaccaaggagagatgggcctgaagagcccagccctgctgacacctcgatcttggacttcccggccttcagaactgtgaggaaataaatttctgttgtttaagcc

SEQ ID NO: 1038682 - DNA, 120 bp, Artificial Sequence
  ENSG00000248964_23 (sequence is synthesized)
tgattgtaagtttcctgaggcctcctgagccatgcggaactggctgcagtggcacctgctatatgaggctgagaggagaggctgctcagacgcagagagcccagttgaaatctacccaca

SEQ ID NO: 1038683 - DNA, 120 bp, Artificial Sequence
  ENSG00000248962_0 (sequence is synthesized)
tcatttcttctccagtattgttctgcttacagagcataaataagagcttcaaataaccccagagtgctcctgacaatgaaacaaagtgccggcccgatttatctttctcacattcttcag

SEQ ID NO: 1038684 - DNA, 120 bp, Artificial Sequence
  ENSG00000248962_1 (sequence is synthesized)
gagcccttctctcctacacccaccccaccttttattttgttgttgttgccggaacttaatatttttttttattcactacccctatcatcattcaacagctttgaatttcttcttcaccct

SEQ ID NO: 1038685 - DNA, 120 bp, Artificial Sequence
  ENSG00000248962_2 (sequence is synthesized)
aaaatgtgaaactggaaatctctatgacagtcacacagaaccatcccctttctttggcataatttggaaacaaattatttcagattagtggaagtttgtcaatattgtgtagtatattac

SEQ ID NO: 1038686 - DNA, 120 bp, Artificial Sequence
  ENSG00000248962_3 (sequence is synthesized)
ctttttttttcttttaacttctaggaattttcatggaaattttcctaaattttatgacgtatttctcttctgcgaatcagttctgaagagtggggttcagtgggttgctccctgtggccc

SEQ ID NO: 1038687 - DNA, 120 bp, Artificial Sequence
  ENSG00000235358_0 (sequence is synthesized)
gcctgccgacccgggtccgggggcccagttggcgcccggaccagctctccggtctgcgtcctgtagatgggaaaactgaggcctgagagggcgcgagggcggggacgaggccgaggactc

SEQ ID NO: 1038688 - DNA, 120 bp, Artificial Sequence
  ENSG00000235358_1 (sequence is synthesized)
gggttcgaatctcgaggacgccagtagcccgctctgaggccgcgtggggctggtggaggagccaccggtcgggcccccaagaccggctgacgtgggcctcgcctcgggcgactcccgccg

SEQ ID NO: 1038689 - DNA, 120 bp, Artificial Sequence
  ENSG00000235358_2 (sequence is synthesized)
accttgggcgagttacttcgcacagccacccaggggcctcttctccaacacgatagcactgcacccggagggccttcagacctgagctgaaatctacaccaccggctctctgactatcag

SEQ ID NO: 1038690 - DNA, 120 bp, Artificial Sequence
  ENSG00000235358_3 (sequence is synthesized)
gctttggactatactttgggctttcctgggtctcttacctggcagacagcagattttggaacttttcagcctccataatcatttcccagaagaaccacaaagcataaatttccccaaaag

SEQ ID NO: 1038691 - DNA, 120 bp, Artificial Sequence
  ENSG00000235358_4 (sequence is synthesized)
gggaattttgttgatggctttagtctattccctcctaaaagaccagctacaaccaaatgaagtgaacataacctcaagggtgtattgtcttcataataaaagatgaagcttagaactgga

SEQ ID NO: 1038692 - DNA, 120 bp, Artificial Sequence
  ENSG00000235358_5 (sequence is synthesized)
gaggagagctttctgacaacaggagctgtccaacaaggagtgggctgctgtcaccgaggagctgaagcggccgacggctgaccttccactgggcactaggcagggcctggatggagggag

SEQ ID NO: 1038693 - DNA, 120 bp, Artificial Sequence
  ENSG00000235358_6 (sequence is synthesized)
ctctgaaaaccagcctcactccctaagctgatgtatttccagaagcagggcctgagctgccacatgcaggccctgaggacttgaggcacatcgttctttttttgggtctcatctgtgaat

SEQ ID NO: 1038694 - DNA, 120 bp, Artificial Sequence
  ENSG00000235358_7 (sequence is synthesized)
cagccactcaaacctagtggctctcagcctgcaagttcattcatgcaatgcagggcttctccactgctcccccaaacctcctcaggccacccctgcgtgtgcacccaccgatatggcctg

SEQ ID NO: 1038695 - DNA, 120 bp, Artificial Sequence
  ENSG00000235358_8 (sequence is synthesized)
ttctgaacaggtgaccctcagctgccagcatcactgcccttcaaaacctgacttatctctcgtgttttacagttaccatagcagaaagatttatcttcatcttttaccatttaaaaatac

SEQ ID NO: 1038696 - DNA, 120 bp, Artificial Sequence
  ENSG00000235358_9 (sequence is synthesized)
taatggaattactgtttttgtctgtttctgttttgaagccatacgatttttctctcactgccaccacatttgtgatggccttaaaaattattcttaaagataaatataattctagaaaaa

SEQ ID NO: 1038697 - DNA, 120 bp, Artificial Sequence
  ENSG00000235358_10 (sequence is synthesized)
ctgactatcaggctttggactatactttgggctttcctgggtctcttacctggcagacagcagattttggaacttttcagcctccataatcatcaactctgtgagggattgttatctcca

SEQ ID NO: 1038698 - DNA, 120 bp, Artificial Sequence
  ENSG00000235358_11 (sequence is synthesized)
ttttatggatgaggaagctgactctgagagatgactttccaaattcatccaactggaagaaaaaggaagtctctggggacttgaatccagaactgtccagctccaagtccagggctcact

SEQ ID NO: 1038699 - DNA, 120 bp, Artificial Sequence
  ENSG00000235358_12 (sequence is synthesized)
ggaggccacagaaggccctaagccctcttttgttctctggaagagagtgccatttcttggcccttcccaaggccttgacaactgaagttcccagaagaaccacaaagcataaatttcccc

SEQ ID NO: 1038700 - DNA, 120 bp, Artificial Sequence
  ENSG00000235358_13 (sequence is synthesized)
tgcacccggaggataaagaaccactgaggatatgagttattcttcctacagttgtacagcttgtgaacagtagagctggggtccgagccaggtctctgactctgcagcctacccttgtcc

SEQ ID NO: 1038701 - DNA, 120 bp, Artificial Sequence
  ENSG00000235358_14 (sequence is synthesized)
attttatggtttcaaagtgataaccatgtaatattttaattgattctcagcccattttgtagatgaggaaactgaggctcacagatctgatgacttcctaattgtggcaaactaccagct

SEQ ID NO: 1038702 - DNA, 120 bp, Artificial Sequence
  ENSG00000235358_15 (sequence is synthesized)
acacagtagctgggctggcttcgaaccaggtcttttgaccccagagtctgtgcagctcacaaataaagctgattctttgacaagttaagcctcttctcttggattcatttttccagtctg

SEQ ID NO: 1038703 - DNA, 120 bp, Artificial Sequence
  ENSG00000235358_16 (sequence is synthesized)
tgaaaatgagggattggattagattagtaggcaatcactagttcccaggcccttttatttaaagaaaaaaaggagaacccatagagtctggcaacttaaacttttgctaagtatgaacac

SEQ ID NO: 1038704 - DNA, 120 bp, Artificial Sequence
  ENSG00000287389_0 (sequence is synthesized)
agactcttacttgtgccagttagctacaaatttgggattatagtcagtccactgctcctccagataaatctgaggcaaaatctactgcattagctctaatagagtcctttgcaagcttga

SEQ ID NO: 1038705 - DNA, 120 bp, Artificial Sequence
  ENSG00000287389_1 (sequence is synthesized)
cctaacctggtcaggatctgttctgattgaattgtaaagcctgttatgtctcttgctgtacatttctcttgctgctaaagtcttcatgtttagtcggatatactaattcttccaagatcc

SEQ ID NO: 1038706 - DNA, 120 bp, Artificial Sequence
  ENSG00000287389_2 (sequence is synthesized)
tggccatctcagccctaccatcggtctaccctttgaggtgtttgggatttaacaaaaatgaactacttctcttgcccatggattaccggcatgacaataaggctcattattttcagaagc

SEQ ID NO: 1038707 - DNA, 120 bp, Artificial Sequence
  ENSG00000287389_3 (sequence is synthesized)
ttgtaactatgcaggagaatttatatgtacttctgtgtgatgaagaattggatgcagtctctttggaagctgtgcaccaacaaaagatgaagaatagacaagcccactcttcatcaggtt

SEQ ID NO: 1038708 - DNA, 120 bp, Artificial Sequence
  ENSG00000287389_4 (sequence is synthesized)
tgaagatgcagctccagaatgcaattcccttgttctaacctcctcatttaccacccacccatatggtctctgctgtgaaaaaagtatagacagggtcaggcactgtggctcacgcctgta

SEQ ID NO: 1038709 - DNA, 120 bp, Artificial Sequence
  ENSG00000287389_5 (sequence is synthesized)
ctgtaatcccagctactcgggaggcctgagtcaggagaatcctttgaacccgggagacagaggttgcagcgagccaagatcgctccagcggagattgtactccagcctgggagacagggt

SEQ ID NO: 1038710 - DNA, 120 bp, Artificial Sequence
  ENSG00000287389_6 (sequence is synthesized)
gacagggtgagactctgtctcagaaaaaaaaagaaaaaaaaaaagtatagacaggtctcattttctaatggctcccttctagttcaataagttgtaatattttatcattaataatttatt

SEQ ID NO: 1038711 - DNA, 120 bp, Artificial Sequence
  ENSG00000287389_7 (sequence is synthesized)
atcattttaaatggttctctgtaaagaaaaaagagggttaacttgcactgttccgctaaggacttgagtagtataatgtataatctttctaatttgctagacggaagtaattgtattgta

SEQ ID NO: 1038712 - DNA, 120 bp, Artificial Sequence
  ENSG00000287389_8 (sequence is synthesized)
tcatgttttaatttgcattggggttgtaaataaagtgaacatttaataccctagtaaagtgatttttaatgtcaatatttagaagattattgattaccgaaatttagctttaaaaattat

SEQ ID NO: 1038713 - DNA, 120 bp, Artificial Sequence
  ENSG00000287389_9 (sequence is synthesized)
ctccatctcaaaaaaaaaaaaaaaattatctttgattgtggcaggcatactttatatttcatgtaatgtatgcatccctcaaaattatttcagataactttttgtagaccactatttgta

SEQ ID NO: 1038714 - DNA, 120 bp, Artificial Sequence
  ENSG00000287389_10 (sequence is synthesized)
tatgcatccctcaaaattatttcagataactttttgtagaccactatttgtatcgttaatgaaaatatatattttccttattctacatttttagtttttaaaaactatcatgtattattt

SEQ ID NO: 1038715 - DNA, 120 bp, Artificial Sequence
  ENSG00000287389_11 (sequence is synthesized)
acattgaaaggcattttattctcttgttgagtatagatatggccctaattaaccattataaaacttatacatacccatagaaaaagaacattcaaaatataaataaaaaatagccccagt

SEQ ID NO: 1038716 - DNA, 120 bp, Artificial Sequence
  ENSG00000287389_12 (sequence is synthesized)
gatttttttctgtttaccagggtgcatatttgaaattacattactttagtgaaaaaatgctagccaaacatctttatagtatttgtaaaaatgtaaatgtcagagaataaataaagctca

SEQ ID NO: 1038717 - DNA, 120 bp, Artificial Sequence
  ENSG00000287389_13 (sequence is synthesized)
tttctctggtcagcttggaattttttttcaggatcataactcattgttaaatttcatgtaaactgattagcatattttatttaattatgtattatccatgtttctctttgctaattgagt

SEQ ID NO: 1038718 - DNA, 120 bp, Artificial Sequence
  ENSG00000287389_14 (sequence is synthesized)
ggtttttgaattatgtttgtaaaataatgtaaaatgtttccatgagaataatagtaactatgaaactcacttccttgcaaaagcaaatttaaataatgaattcatgtaactactggtaga

SEQ ID NO: 1038719 - DNA, 120 bp, Artificial Sequence
  ENSG00000287389_15 (sequence is synthesized)
atatgctacaaaaaagtacttgtgtatttatttacatttgtgaaaacaaagtgtactcatagaagctgctaacagatcacccttggagattgcatgttcactttagagtctgttaggttt

SEQ ID NO: 1038720 - DNA, 120 bp, Artificial Sequence
  ENSG00000287389_16 (sequence is synthesized)
gccctgcatgaacgtctaagatcttttcaaaaaattgttattgtaataaggactcttaaaatgagatttgttctattaacagatttttaaatgtacaatacagtgtcattatccataggc

SEQ ID NO: 1038721 - DNA, 120 bp, Artificial Sequence
  ENSG00000287389_17 (sequence is synthesized)
taaacgttgtataacaaatctctagaatgtacttattatgcataactaaaattttataataccagcagaaaacaaacaaaaaattaccaatcacggaataatgttgttattacacattaa

SEQ ID NO: 1038722 - DNA, 120 bp, Artificial Sequence
  ENSG00000287389_18 (sequence is synthesized)
aatgaaagttttctatgtgatgttgaacaaatcagttcaaatatttgagattcaatttgcttattagccaaataagaagacttagtatgattatcttcaaggtagcattccactgtcact

SEQ ID NO: 1038723 - DNA, 120 bp, Artificial Sequence
  ENSG00000287389_19 (sequence is synthesized)
ctccctgattccaacagataagaacaagaattaggatggtttgagcctttgactttggaaaatagcattgctctcatgcttttgaatgcatttacaaactttaagagtcctcaccacagt

SEQ ID NO: 1038724 - DNA, 120 bp, Artificial Sequence
  ENSG00000287389_20 (sequence is synthesized)
tactgctaacaacgaataggctacttctgacttcagcatagattcctgaaggttgtagagtggtcaagagaggcaagtatgtttttgaggaatataatataattcttacctccctctact

SEQ ID NO: 1038725 - DNA, 120 bp, Artificial Sequence
  ENSG00000287389_21 (sequence is synthesized)
tattgacggatactcaccaaatgcatgcccacgtcatagaaacttgcacactctagagagtgttagtagatgttagtagaacatctttagagagatgttagtagaaagagtcaaattgca

SEQ ID NO: 1038726 - DNA, 120 bp, Artificial Sequence
  ENSG00000287389_22 (sequence is synthesized)
gcttaaatatgtcaataaatgtatattttagaaagcttaggaagtaattcaactagaagttaaacataagatcttttgttggtgttctcttctaagccatcctatgttcttattttcaat

SEQ ID NO: 1038727 - DNA, 120 bp, Artificial Sequence
  ENSG00000287389_23 (sequence is synthesized)
catatggttcttaagcaaattaagtcgtagattatacacaattgtatgtggataaaacatatcatcttacttttattactagaatagacagaaaatcattttacttaaagagatacaatt

SEQ ID NO: 1038728 - DNA, 120 bp, Artificial Sequence
  ENSG00000287389_24 (sequence is synthesized)
tttttttctggtcatagcattaaaaagtaaacaataaaatgatataaattttgatgatcttgcccaagatcgatgaacactaaactaaaatattaaaaccattttttgatggaaaatatt

SEQ ID NO: 1038729 - DNA, 120 bp, Artificial Sequence
  ENSG00000287389_25 (sequence is synthesized)
cagtatgtaaatagaaaagggttaagtaagcatagaaatataaactgtgttctgttacacaattacaatcattacagaaataatatagaagcctgaaaatgactttttttaatgtccagt

SEQ ID NO: 1038730 - DNA, 120 bp, Artificial Sequence
  ENSG00000248969_0 (sequence is synthesized)
acagcaaaaaatctacactcaaaagaaataatcgtttattgcttggacttctctgagctctagtacctgaatcagagggtttcatggcaaagcagatacgatctgcaaaactcttgagga

SEQ ID NO: 1038731 - DNA, 120 bp, Artificial Sequence
  ENSG00000248969_1 (sequence is synthesized)
gcttccaggggcaagagtccagccagctgttcagtcagtggctccacagcaaggtaatagaacctgactttattcacatctgggtaaaagaagtcaagcttggtatgggagaagaagcgg

SEQ ID NO: 1038732 - DNA, 120 bp, Artificial Sequence
  ENSG00000248969_2 (sequence is synthesized)
gtgggcaaaaccaggagctgtcacggaatgggctctgcgttggggcccagtttcaagaaggcctcagaacaactttggaagatgaattgatcctgttgcatgagcctggaagccttgtta

SEQ ID NO: 1038733 - DNA, 120 bp, Artificial Sequence
  ENSG00000248969_3 (sequence is synthesized)
agtcacttgacctccagtcaggtcagcgtatggttagctacccggacacatctttctaccagacactctggccttcagattccagaggagccagtgggcaggggtgtctgtttttcactg

SEQ ID NO: 1038734 - DNA, 120 bp, Artificial Sequence
  ENSG00000248968_0 (sequence is synthesized)
acacagaggatgccataggacattctatttttcacaacaatcgaaggagccaaatgaattgcagaagtcaccatttttaatgaggaaacactgaattggcaaagctaacgtgaaataaga

SEQ ID NO: 1038735 - DNA, 120 bp, Artificial Sequence
  ENSG00000248968_1 (sequence is synthesized)
cctgactccaaaatctaaaatgtccttgaagaacacttcaaggtctagcgccttgccaggcaccgttctccttgaatctcacagcagccctgtgagtaggcactactgttaccaccgtca

SEQ ID NO: 1038736 - DNA, 120 bp, Artificial Sequence
  ENSG00000248968_2 (sequence is synthesized)
tccatcagtgtgcctccactatccctattccttaagatcgtgccaaaggctgagtcacttgcactaagtagcctagaacagtctctggggaaacgcgcccgccgacaaggatcgccagaa

SEQ ID NO: 1038737 - DNA, 120 bp, Artificial Sequence
  ENSG00000248968_3 (sequence is synthesized)
ccggcgcgggcaccgcgcggcgaccaggagctctggtcaccgaaggccaggctggaggccagagcagccgcccgcacccggtcaccgcctcgacagtggagacctcagctgaccgcgagc

SEQ ID NO: 1038738 - DNA, 120 bp, Artificial Sequence
  ENSG00000248968_4 (sequence is synthesized)
ccccggcccgcccgcaccccttctcatgcccccaggaacccgccaagccgctccagcctcacctcctcctccctccatcgcgagatttccaacagcgtttttaaaaaaaaaaaaaaaaaa

SEQ ID NO: 1038739 - DNA, 120 bp, Artificial Sequence
  ENSG00000285410_0 (sequence is synthesized)
ttaaggcgccgggtttccggggctcctggccccgcttattccgcgggggtcggcggggtcggcctgggcgcccgcgccgccgctgcgctttgtccgctgggcacactgcttctgggaggg

SEQ ID NO: 1038740 - DNA, 120 bp, Artificial Sequence
  ENSG00000285410_1 (sequence is synthesized)
ctgggcacactgcttctgggaggggcgggcagacatggtggcggccgccgccccctcctcggccctagcatgccgcggccgcctcgcggctacccggcttgccggtcccgagcggcagcc

SEQ ID NO: 1038741 - DNA, 120 bp, Artificial Sequence
  ENSG00000285410_2 (sequence is synthesized)
gaggcagcggaggttctgcgggcgactggaggttggcagtgggcgggagaaagaggaaggcaggcgcggctgggcctcggcctctggcgccgcggtaccctttgtctcggcagcctgacg

SEQ ID NO: 1038742 - DNA, 120 bp, Artificial Sequence
  ENSG00000285410_3 (sequence is synthesized)
cgccgggctctccggagaggggaacgggcggcgagggtggcgggtcctgggcgccctgtgctgcggggccgagaggcgctcgggtcgcggcgggatcggccggaccagacagggttaatg

SEQ ID NO: 1038743 - DNA, 120 bp, Artificial Sequence
  ENSG00000285410_4 (sequence is synthesized)
aatggaagagcctggccagtcccgcgcggggcccccgcagcgacagccttggccgcggggactggagtcctgagggggagaagcctgccgttctgaaggctcgggacttctgccccaaag

SEQ ID NO: 1038744 - DNA, 120 bp, Artificial Sequence
  ENSG00000285410_5 (sequence is synthesized)
acttcgccgccgagaactgcgggtgcactgcctcagggaagaagttgagaattttgccaggtcatctctgccagggcacagttcatcactgtgtgtttagtgtgtttcggtgaagctctc

SEQ ID NO: 1038745 - DNA, 120 bp, Artificial Sequence
  ENSG00000285410_6 (sequence is synthesized)
caagtgtgttgaatcagcgtgcctagcctcaagggtgcatcgtgaaaactgaaaccaaaggaatgatacaggcctgctttgtgtgtgtcttcccactttaagcttgttttcagtacaaat

SEQ ID NO: 1038746 - DNA, 120 bp, Artificial Sequence
  ENSG00000285410_7 (sequence is synthesized)
actcttgctttaaacctgattggactgtggcgagcggacatctgttcaaaggaggggccgagaccacagtacttctgaagggggcttgataatgtggaaacattttaagttttctctccg

SEQ ID NO: 1038747 - DNA, 120 bp, Artificial Sequence
  ENSG00000285410_8 (sequence is synthesized)
gactgttttgctctctcaattcaggcaagttactgaagtacgttttttatctagaaaaaggtttgatgtagtctgtaaatggtccttgtaaagtacattgccatctcagaattaaaagat

SEQ ID NO: 1038748 - DNA, 120 bp, Artificial Sequence
  ENSG00000285410_9 (sequence is synthesized)
ccactctcatttattatgcagaagttagtggtcattctttcctgtagatagtttatctcatgtaaagacccacccagcttggtttaaatttttttctcactgacgtataaccatcagctt

SEQ ID NO: 1038749 - DNA, 120 bp, Artificial Sequence
  ENSG00000285410_10 (sequence is synthesized)
tgatacttccattttcaggctcagactttgaatttaaggaaactaaagatgactttattttcttttctcttggttttttttttccaaaaacaaaaaataaatccattacatgttaacata

SEQ ID NO: 1038750 - DNA, 120 bp, Artificial Sequence
  ENSG00000285410_11 (sequence is synthesized)
gatgataagagtgacatcttgcatttttgcaaatctttttaatgcctggtttaatagaagattctcagatctacgtcagactgttgtggttagcacaccatgtaacctctggaacactcc

SEQ ID NO: 1038751 - DNA, 120 bp, Artificial Sequence
  ENSG00000285410_12 (sequence is synthesized)
actgtacactcatacttttttaaaaaaaaaaccaaaaaacagaaatgtgtcattcttaccgtgctttcaccatacaagtcaaatcaagctgttatgcaagacacattttaacaagactga

SEQ ID NO: 1038752 - DNA, 120 bp, Artificial Sequence
  ENSG00000285410_13 (sequence is synthesized)
ataagattgattcccatactttttttactgggctctaacttttttaaaagttggaatttaggtgactaaacaaaatcacagatgaagactgcataatctgcctatgatctcggagactca

SEQ ID NO: 1038753 - DNA, 120 bp, Artificial Sequence
  ENSG00000285410_14 (sequence is synthesized)
ggaacattcgaagatattcttaagtgattaaaacatttaattctattacatatttataatgatttacacaagtaacacgtgaattccacatatgctatcaacacttgtgtaaatgttatc

SEQ ID NO: 1038754 - DNA, 120 bp, Artificial Sequence
  ENSG00000285410_15 (sequence is synthesized)
tttaaagatagaacatgttgaaaattataggaggtacagattttacagaaaattaattctgcagtgaatcctttggtgaaacgaacagtttgcagagacatatccttagagttctttgtc

SEQ ID NO: 1038755 - DNA, 120 bp, Artificial Sequence
  ENSG00000285410_16 (sequence is synthesized)
tctctgaatcattctgggttttctaggttgggagacaattatacttattgggagacaattatacttaattgattaatgcataaaaatttaaggccgtattttaatggctttgaaaggaag

SEQ ID NO: 1038756 - DNA, 120 bp, Artificial Sequence
  ENSG00000285410_17 (sequence is synthesized)
ctaagtttgtttccagttgtttctgtgaactgtagtctgaatctgtcagtctatagttctctactgttccatcaacaggaagcatctggtcattcttcgtgtaattgttagaaaatacca

SEQ ID NO: 1038757 - DNA, 120 bp, Artificial Sequence
  ENSG00000285410_18 (sequence is synthesized)
ggtgtacttttaatgtttgctgttcaaacgaaaatagattggatcttggttaagttcacttggtttggccaggcacagtggctcacgcctgcagtcccagcacttggggaggtggaggcg

SEQ ID NO: 1038758 - DNA, 75 bp, Artificial Sequence
  ENSG00000285410_19 (sequence is synthesized)
ctgaggcaggagaatcgcttgagccagagaggcaaaggttgcaataagccaagatagcgccattgcattccagct

SEQ ID NO: 1038759 - DNA, 120 bp, Artificial Sequence
  ENSG00000285410_20 (sequence is synthesized)
aaaaaagtatgcttggttttagtgtgttttttcccataacattgtgtcattgtaatggaccacatctcctgtaccatgaatttttttttacttttttcttttgcccctcagtaccagaaa

SEQ ID NO: 1038760 - DNA, 120 bp, Artificial Sequence
  ENSG00000285410_21 (sequence is synthesized)
tattaacaggtaacaggtaaagtgcacgtcatgaggaattcagaaattcagaaattacatgaagttttgcatcatgaatttatttttgagggtgcacgaggcagttacccagtctctgtt

SEQ ID NO: 1038761 - DNA, 120 bp, Artificial Sequence
  ENSG00000285410_22 (sequence is synthesized)
tgcaagtagcctgagttcagatgaactcactgatggcctccatctcttctgactttgcaaacgttgaaaaacaaacccacacaaaatcttgaagttgagagcaacttagtttccttagtg

SEQ ID NO: 1038762 - DNA, 120 bp, Artificial Sequence
  ENSG00000285410_23 (sequence is synthesized)
agctagtaatcacaatgtttctatagctctgatgtgcctacattgggatagctacaattagtattatagttttctgaagatgtttgttccatcatgctttctagaaggtaaatctagcac

SEQ ID NO: 1038763 - DNA, 120 bp, Artificial Sequence
  ENSG00000285410_24 (sequence is synthesized)
tagatgagatcagtattagggcctgtgttttttctcagtgttgacatcacagtgctctatacaaagaagatgctttggtgcaatcagctgtcagttcagttggtgggctagtgcaccttt

SEQ ID NO: 1038764 - DNA, 120 bp, Artificial Sequence
  ENSG00000285410_25 (sequence is synthesized)
ctccctccctccctccctccctccctctttcctctctccttctccctctgtccctctccctctctctccttccctccctgttttcccctttgcacctcttctttctttgacagggtcttg

SEQ ID NO: 1038765 - DNA, 120 bp, Artificial Sequence
  ENSG00000285410_26 (sequence is synthesized)
gggtcttgctttctctgttacccaggcttagtgcagtggtgcgattatacttcactgcaagctccacctttcaggctcgagcgatcctgcctctgcctcagcctcctgagtagttgggac

SEQ ID NO: 1038766 - DNA, 85 bp, Artificial Sequence
  ENSG00000285410_27 (sequence is synthesized)
gcgatcctgcctacctgccaacatgtctggctaattttttaattttttgtagagacgagatctcactgtgttgcccaggctggtc

SEQ ID NO: 1038767 - DNA, 120 bp, Artificial Sequence
  ENSG00000285410_28 (sequence is synthesized)
ccaagtgttgggattataggcgtcagccaacacacccatctgtgaataattctgaagttggtagaacagcttattgacagagcaaggtgttagccccactttactgtgtactagttatat

SEQ ID NO: 1038768 - DNA, 120 bp, Artificial Sequence
  ENSG00000285410_29 (sequence is synthesized)
tatatttggggtattgtgttggctttttgggtagcatactatcataagtgagaccttgtattcattctcagactttatcagaatcatctggagagctaataaaaagccacacagaggccc

SEQ ID NO: 1038769 - DNA, 120 bp, Artificial Sequence
  ENSG00000285410_30 (sequence is synthesized)
aaacttaagtagggtaggaacggaccttaatttttctcatttccaaggtggtagacacctaagtgtcaaaatcacttatctgtagagcataaacgaggaccttgatcatgagagaaatgg

SEQ ID NO: 1038770 - DNA, 120 bp, Artificial Sequence
  ENSG00000285410_31 (sequence is synthesized)
aaatgagaaaaagttgaaaaaatgggatgtttgacctaaagaagaggagcttcttttaagaagtaacagccacttttaaggatttggagttctgtcatgcagaaggatcagatttgactt

SEQ ID NO: 1038771 - DNA, 120 bp, Artificial Sequence
  ENSG00000285410_32 (sequence is synthesized)
gaccagaaggaactagggtcagtgggtggaagtttaaaagaagcagatttcaattctctttcaagataaatttcctcaaaattgtgaaaatagaatgagttgttttgggtggtaggctgt

SEQ ID NO: 1038772 - DNA, 120 bp, Artificial Sequence
  ENSG00000285410_33 (sequence is synthesized)
tcctgttcactgacaaattggggattctagagtagaggaatcgtactgaaggagaatttgagctaggtgtcttcaagttacctataaactttgaggttttattaaatatgccgaggttta

SEQ ID NO: 1038773 - DNA, 120 bp, Artificial Sequence
  ENSG00000285410_34 (sequence is synthesized)
caggtggaagaacaaaaagctaattgagtgaaacaaactggttaacttgataatagtttttgccttcctggataaagagaaatgagtattaagtgagaaggctatttaatgaagggcttt

SEQ ID NO: 1038774 - DNA, 120 bp, Artificial Sequence
  ENSG00000285410_35 (sequence is synthesized)
aaaccacactgtaatttggtagattcagcagctttaaaaattggcataccttctgacatggaaattccctttaaagaattttttttttgatgtagtaaagatgtgtgtgaatatttaatt

SEQ ID NO: 1038775 - DNA, 120 bp, Artificial Sequence
  ENSG00000285410_36 (sequence is synthesized)
gtgagcatactagatgcagtattgttgattataaaagctgtgtattaatgcctttaagccccacggtaatcatatgaagtgggtagtactatttctgcttttcagaagaaaaaacaggca

SEQ ID NO: 1038776 - DNA, 120 bp, Artificial Sequence
  ENSG00000285410_37 (sequence is synthesized)
tagagaaatgaggttgcttgctcaaggtacctgagttagttaagtgttagggccaggacttgaatccaaccagtgtgactctagagccagtactattgatcattatatggtaaaattgta

SEQ ID NO: 1038777 - DNA, 120 bp, Artificial Sequence
  ENSG00000285410_38 (sequence is synthesized)
aacaacctaaatgtttcacagtgattgttagggtccatccctacagtggggtactgccttctcagccatgaaaatgatgatagaataatataaagacatgaaaggatgtcttggtatatg

SEQ ID NO: 1038778 - DNA, 120 bp, Artificial Sequence
  ENSG00000285410_39 (sequence is synthesized)
taagtgagaaaaaataaatttaaaaacatgattccattttggtaaaaaaacccaaaaatatattatgtctggaaggatatgtgccaaattgttaaatggttatttctgagtgtagtttta

SEQ ID NO: 1038779 - DNA, 120 bp, Artificial Sequence
  ENSG00000285410_40 (sequence is synthesized)
caggtgattgttttctttttgcttatccaaattttctaacttctacaatgaatataaattatctatcatgttgtaattaagatattaagatgtaacttttcaataaaaaattaaatgtgt

SEQ ID NO: 1038780 - DNA, 120 bp, Artificial Sequence
  ENSG00000285410_41 (sequence is synthesized)
tagcataagctgagaaatttgggttttatactctgcattttaagcaagtttgtagaaattgtacatgagaatttgtaaatgcatgtagtgttttgtaattttttgtttgattccttattc

SEQ ID NO: 1038781 - DNA, 120 bp, Artificial Sequence
  ENSG00000285410_42 (sequence is synthesized)
tagaagtaatatcaattgagtagagaaacatatcactcctaccaccctaccataatcaattattttgttgtgtgttgttactcttatgtgtaatattttaaatattcatcccagtgtcat

SEQ ID NO: 1038782 - DNA, 120 bp, Artificial Sequence
  ENSG00000285410_43 (sequence is synthesized)
cccagttagtcatactctagctgtgtgattttaggcagtttacttaatctctccgtggctcagtttccttctttgtaaaatgtggattattataatacttagctcatgatgattggaaag

SEQ ID NO: 1038783 - DNA, 120 bp, Artificial Sequence
  ENSG00000285410_44 (sequence is synthesized)
attaaatgttatttcatataaagtgaacagaacagtacctgaaacataacagttaatagctcaataaatgttagcaattataggatcacagtccaccattcaaactcttagggtctaata

SEQ ID NO: 1038784 - DNA, 120 bp, Artificial Sequence
  ENSG00000285410_45 (sequence is synthesized)
ggttatggaattaggaattttttttttatatgggcaaggtagtaatgtgtagccttccaatagagtccagtgcaatatcccccttcaaaagtgttactgtttctgcaacaaaatgtatga

SEQ ID NO: 1038785 - DNA, 120 bp, Artificial Sequence
  ENSG00000285410_46 (sequence is synthesized)
atgttcgcactaaataggataaagactgtaaatagcttcatatcagtttgggtaaggtttaccacaagatgagttattttgggtttcagaagttttttggatttttggaattgaagataa

SEQ ID NO: 1038786 - DNA, 120 bp, Artificial Sequence
  ENSG00000285410_47 (sequence is synthesized)
ttggatttttggaattgaagataaggaacctataaaatattaattttgagtcctattttataatattaaaacatcttttcatggtattttatagttttatagtgcatggtaaattaaagt

SEQ ID NO: 1038787 - DNA, 120 bp, Artificial Sequence
  ENSG00000285412_0 (sequence is synthesized)
tctcttcggcaaatcagaaggctctgcataaatactgccaattgttaaacatttacctgcacatactgggctcatcttcattattggtaaaatgagctagatgctattttccattagctc

SEQ ID NO: 1038788 - DNA, 120 bp, Artificial Sequence
  ENSG00000285412_1 (sequence is synthesized)
acactccaattccaatcgacctgaccatcagaagagacaaaaagggaaaatcctggccagttctcccctacctgatcaaccagtagcataatcagatttgcaagacctcaagaaaagaaa

SEQ ID NO: 1038789 - DNA, 120 bp, Artificial Sequence
  ENSG00000285412_2 (sequence is synthesized)
agagtctcactatgttgacaccctggacaacactcttgaagtactcttttcccagggaggacacagtcatggcatgcaagacgagataccgatcctcagagaatctaagtgatttgctca

SEQ ID NO: 1038790 - DNA, 120 bp, Artificial Sequence
  ENSG00000285412_3 (sequence is synthesized)
ggttcacagttagtaagtggtaaagcaaggaactgaggtgtcggggctcacaacatgataacccaaaataatggcaccttggcacagggctcagccatgaaccttgtgatggatgaggaa

SEQ ID NO: 1038791 - DNA, 120 bp, Artificial Sequence
  ENSG00000285412_4 (sequence is synthesized)
aagatattctttttctccccttacagtttctggcagccaacatggggtggctgtgacaccccactagttccagaacctgcagatgagatcctgggacaaccaataaaaaaacaacaaaaa

SEQ ID NO: 1038792 - DNA, 120 bp, Artificial Sequence
  ENSG00000285412_5 (sequence is synthesized)
gggccagtgggaatttatagccaaggagcagtgtgggggtcagtggatggaaaattactcaaaggaagcgttggggtaaggtggatctggctaaacctaacaggattctcactgaagaca

SEQ ID NO: 1038793 - DNA, 120 bp, Artificial Sequence
  ENSG00000285412_6 (sequence is synthesized)
ggccagggtgatcagacatcacctgggggatggtgcaggatgagaaacctggtcagacattgaggcgatcggatgttgatgttgctggttcttggtaaaacgacttagctagtgtccttt

SEQ ID NO: 1038794 - DNA, 120 bp, Artificial Sequence
  ENSG00000285412_7 (sequence is synthesized)
ggacgtgcacaaacaggcctagcaggagattcagaagcctgactaaaatttggccaaggaaaaaaatccttgtcaccaggaaagtgaggactattgtcaccaaattcagactgccaattg

SEQ ID NO: 1038795 - DNA, 120 bp, Artificial Sequence
  ENSG00000285413_0 (sequence is synthesized)
gtttccaacggttgcagtagctgactagtcagtggcttcagcaacacacatttattctcctatagccctggaggtcagaagctccgatccaggtgttggctgggttccactcctcctgga

SEQ ID NO: 1038796 - DNA, 120 bp, Artificial Sequence
  ENSG00000285413_1 (sequence is synthesized)
ggcgctaggggaggatctgtgtccctcttaccatttctaggatccgctgcaccccttggctcaggcctctcttccatcttcaaagtcagcagcctctcctcccctctgaccttggcttcc

SEQ ID NO: 1038797 - DNA, 120 bp, Artificial Sequence
  ENSG00000285413_2 (sequence is synthesized)
tctgcccgactctgaccccttgccttcctcttacaaggaccctgtgatgacctggcgcccacccagctaatccagggaggagaagagaatactgagcgtcttttcgtttctgctctgcca

SEQ ID NO: 1038798 - DNA, 120 bp, Artificial Sequence
  ENSG00000285413_3 (sequence is synthesized)
gtagtttacagccagaggcaaagcaaaccaagaacacagagccatctacagggaaaaatcctgggtaactacttcttctcagaaaagcccatcaccatctccacgctcaagagaatagtg

SEQ ID NO: 1038799 - DNA, 120 bp, Artificial Sequence
  ENSG00000285413_4 (sequence is synthesized)
ctggacccctacctcacaccatgtaccaaaactaactcagaacagaccaacaaccctaatgtaacagcaaaaaatatagaactctcagacaaaaacccaggggaaaagcttgacaacatt

SEQ ID NO: 1038800 - DNA, 120 bp, Artificial Sequence
  ENSG00000285413_5 (sequence is synthesized)
gcttttggcagtgatttctaggatatgacaccaaaagcacaagcagcaacagaaaaaaacattaaatttaaaccatctgtgcaccaaggacactgaacagtgaaaacacaaccatgaaat

SEQ ID NO: 1038801 - DNA, 120 bp, Artificial Sequence
  ENSG00000285413_6 (sequence is synthesized)
gggagaagaagtgtccgtgacagtcgctgtcatggaagtcacctccccagcaccacaagggagagccatccttcctgcagggcggccacgtggccacctaggctggtcccgggagacctt

SEQ ID NO: 1038802 - DNA, 120 bp, Artificial Sequence
  ENSG00000285413_7 (sequence is synthesized)
ggacccaggctggtgcctgccccagctcctgtcccgagacgtggctgaaggtgtggaactgcagggtgctatggcaattgtttagctttgcgaggaatcaccagaccatttcccacagca

SEQ ID NO: 1038803 - DNA, 120 bp, Artificial Sequence
  ENSG00000285413_8 (sequence is synthesized)
gctgcaccatttcacactcccaaaaggaatgtgtgccgagcgggtgctgtttcaagctgctaagtttctggaaacccgagtgaaggctgagtgccccatgagggacccgggctctgacac

SEQ ID NO: 1038804 - DNA, 120 bp, Artificial Sequence
  ENSG00000285413_9 (sequence is synthesized)
agacagactgtcccggctggagtccagctcctggacgacctgggtctccccgttctgcactggtatcgcgcggtgaggcggcgctgatcagaacctcaaaagacctgaccccgaacaccg

SEQ ID NO: 1038805 - DNA, 120 bp, Artificial Sequence
  ENSG00000285413_10 (sequence is synthesized)
tcatcccaaatcctgagctcctgaaagatcaaaacctaacatgttggtgttctgaccagtttctctgtgaatggttcatctgcacataactcatatccacgtgactgaatgagcacacct

SEQ ID NO: 1038806 - DNA, 120 bp, Artificial Sequence
  ENSG00000285413_11 (sequence is synthesized)
gtgtgtctgtgctggagaaaatgttatgatcaccgactttattgggatgtcagcattcagaactgtgtcccaggatcgtggcccagacccacagggcaggggcgtgcacttttgagggtt

SEQ ID NO: 1038807 - DNA, 120 bp, Artificial Sequence
  ENSG00000285413_12 (sequence is synthesized)
ctgaagacgactcaacagggtgcctgacctgctggtaaggactcaggagacctcacctgtcctcgtcacactcatggaaggggactccagatccctggcgtagctggtctgggaactggg

SEQ ID NO: 1038808 - DNA, 120 bp, Artificial Sequence
  ENSG00000285413_13 (sequence is synthesized)
gagggatgggcagtgcccggtatagggtgcaacctccagtgcccacattagcacgtctgttgctgtgagattctatcctgtggacacctgtggctgtaacacacaccttcccactgctgt

SEQ ID NO: 1038809 - DNA, 120 bp, Artificial Sequence
  ENSG00000285413_14 (sequence is synthesized)
agtggctcacgcctggaatcccagcacttcgggaagtcaaggcaggaggatcgctggaggccaggagtttgagatcagcccgggcaacatagtgagacctcatctctatttaagaaagaa

SEQ ID NO: 1038810 - DNA, 120 bp, Artificial Sequence
  ENSG00000285413_15 (sequence is synthesized)
catctctatttaagaaagaaaaagaccactggtcctcccagtgtttacaagatttttccattaaaacaggagggatcataatgagcggcctaacaaagacatttaaagacacgccaagaa

SEQ ID NO: 1038811 - DNA, 120 bp, Artificial Sequence
  ENSG00000285413_16 (sequence is synthesized)
ggggcgcagacaggagtcctgagatgcagtcatgggaacccgcacctgttttcccgccctgggcacccagcgtggacaggctggccggtgccagggtgagcagggcaggctgaggtctcc

SEQ ID NO: 1038812 - DNA, 120 bp, Artificial Sequence
  ENSG00000285413_17 (sequence is synthesized)
agtgggtggggacaggttagggggcagcaattcagtgaccctgtccaggactgggtcccttgcagaaggtgaggtcagccaggggtgggggtggtggctgtggaatccgttgtctggtct

SEQ ID NO: 1038813 - DNA, 120 bp, Artificial Sequence
  ENSG00000285413_18 (sequence is synthesized)
atagggggtccccctaccgaagccctaaccctctccccttcaccaccccagtgatctcctggcccaggctgctgcctccagcagctccccagcccccaggacagtccttcaggactctag

SEQ ID NO: 1038814 - DNA, 120 bp, Artificial Sequence
  ENSG00000285413_19 (sequence is synthesized)
ggggagtcccgtctacaaggacggctcaccagtctcccgccacagccagtgaggatggggtcctgcagccgaagtggtgtgtgcccagtgtggtgtccctggcaggctgggagggtgccc

SEQ ID NO: 1038815 - DNA, 120 bp, Artificial Sequence
  ENSG00000285413_20 (sequence is synthesized)
ccagctgccagttagtgaggctgggttagcacgagggcaaggagcttggattctggggctgacagcctgagctcaactccagcgccccatcttgctggggctcctccgcctggaggcggc

SEQ ID NO: 1038816 - DNA, 120 bp, Artificial Sequence
  ENSG00000285413_21 (sequence is synthesized)
tcctccacctgcctctgcctccgtttctgcagcagttgcctgccggactccagcccgaggcgggggccacggctgacccagctggagaacgccccactggcccagtcagtgctgtcctct

SEQ ID NO: 1038817 - DNA, 120 bp, Artificial Sequence
  ENSG00000285413_22 (sequence is synthesized)
gcacctgatggcttctcttggcagggagggctcccccgcccccgggctctgtgccagccagaggttccgcaggagctgctcacttcctcccgccggcagaggcagcctgcggggcggctc

SEQ ID NO: 1038818 - DNA, 120 bp, Artificial Sequence
  ENSG00000285413_23 (sequence is synthesized)
caacctggagaaaccaaaatcagggcaagtccctggctgcttccctggaaagccccgacggagtccccgctccttcccgccggttctcagggtgctttatttcagaaggggatttcttcc

SEQ ID NO: 1038819 - DNA, 120 bp, Artificial Sequence
  ENSG00000285413_24 (sequence is synthesized)
tcctgagaatctgatggccacagggtgcctgtcacatgtccacatcgggccctcctggctgtcaccaacttgtccaactgtcagaggtgtttgaaccagagcgactccgtcttgaatagg

SEQ ID NO: 1038820 - DNA, 120 bp, Artificial Sequence
  ENSG00000285413_25 (sequence is synthesized)
ggctgggtggaatgaggctggggcctgctggactgcgttcccgggagggtaaggcattcttagtcacaagacaggaggttggcacaagatacaagtcacgaagaccttgccgataaagca

SEQ ID NO: 1038821 - DNA, 120 bp, Artificial Sequence
  ENSG00000285413_26 (sequence is synthesized)
ggttgcagtaaagaagtggccaaatcccaccaaaaccaagatggtgactagagtgacctctggtcgtgctcgccactcattatacacaaattctaatgcattagctgctaagagacactc

SEQ ID NO: 1038822 - DNA, 120 bp, Artificial Sequence
  ENSG00000285413_27 (sequence is synthesized)
ccaccagcgccatgtccacaaatgccatggcaacgtccgaaagttaccctgcacggtctaaaaaggagaggaagcctcagttctgggaattgaccaccctttcccagaaaattcatgaat

SEQ ID NO: 1038823 - DNA, 120 bp, Artificial Sequence
  ENSG00000285413_28 (sequence is synthesized)
aatccactccttgtttaacatataatcaagaaatgaccaaaataagcataagaatattcagctgagcagcccagccctccgcactgcctctggagtagccattctttattcctttactct

SEQ ID NO: 1038824 - DNA, 120 bp, Artificial Sequence
  ENSG00000235875_0 (sequence is synthesized)
ccggggagcaggcgctccagcagcctgcagaggaccaccccatccttcagcgacgcctgcagaaagccctccgggtccgagatggtttttttgggcgactccagcacccccagagtgatg

SEQ ID NO: 1038825 - DNA, 120 bp, Artificial Sequence
  ENSG00000235875_1 (sequence is synthesized)
agccacgtaacggtggcggggacaggctgaaaacgagacgtttgtttcgctttgctaccttgcaagccggtcatgacggaacagaaatgatggttccatctgaagccatatgggtctgaa

SEQ ID NO: 1038826 - DNA, 120 bp, Artificial Sequence
  ENSG00000235875_2 (sequence is synthesized)
tcgggaggaaccgactctccggagcgcggcgccgacctcaccggcagggcaggggcctgcgcgactctgctctagacggacggtgacgcttcagaccctgccgggggaaggtcaaggaaa

SEQ ID NO: 1038827 - DNA, 120 bp, Artificial Sequence
  ENSG00000235875_3 (sequence is synthesized)
cggcgtggcctgaagtggggctgtgcagagggccgggccgggccgggccgggcgcctggctgcgtctcggggacgccgaagatctgggctgtgaaagcagcaggccgaacctggagagcc

SEQ ID NO: 1038828 - DNA, 120 bp, Artificial Sequence
  ENSG00000235875_4 (sequence is synthesized)
cagacggcaagtgtcgcgtcatgcgcgagcttcctcgaacaactgatgacacgcacacattgacatgcgaggaagaaatggagcctcttcttaaaaggacacgagtctccactcactcca

SEQ ID NO: 1038829 - DNA, 120 bp, Artificial Sequence
  ENSG00000235875_5 (sequence is synthesized)
acccgcgggcagtttaacaagcaaagcacttagtctatgccaggcacatacattaatccattcaatgacaaaggctagaaagcatataaagcttccaaaaataatcagaggcttaagtcg

SEQ ID NO: 1038830 - DNA, 120 bp, Artificial Sequence
  ENSG00000235875_6 (sequence is synthesized)
tctccccctgccttctgccggtggatttctcttgcaatcactaattgcttttatttctagccttgagttaagtggttaaaattttctttgcaaatacaaaaaatattcaaatggcagtat

SEQ ID NO: 1038831 - DNA, 120 bp, Artificial Sequence
  ENSG00000235875_7 (sequence is synthesized)
gaattctggattacgaggacaatgtgctcagtgataacagcgactggttaggaaccgtcacaaagtgctgtctactgcctcgcctcccatcatggtccccttttactgatcagatgccga

SEQ ID NO: 1038832 - DNA, 120 bp, Artificial Sequence
  ENSG00000235875_8 (sequence is synthesized)
acaagtggcagagataagacccaaagctcggctcctaccaggaaaggcatacctaacccgtttcctactgctgccctataagctttctaggaaacaggagggcaattaacagctacatca

SEQ ID NO: 1038833 - DNA, 120 bp, Artificial Sequence
  ENSG00000235875_9 (sequence is synthesized)
aggcttgtacccagtgtcttcgtggaaggaaagatgtcaacccggggcgtggttgtacaccgagacttctgttcactttccttactgctgaattagagaaataatttaatgcagtcctta

SEQ ID NO: 1038834 - DNA, 120 bp, Artificial Sequence
  ENSG00000243550_0 (sequence is synthesized)
gattaactgacctcttccatgttcaaaccatatgtaattgtaattgaatggaagttaaacatctggaaaccgttaggattgaatagcaatgaaaggcaggaagcacaagactatggaaag

SEQ ID NO: 1038835 - DNA, 120 bp, Artificial Sequence
  ENSG00000243550_1 (sequence is synthesized)
tgattttgaacaaccaggtggtcccaaagataaccaattgtttagagcctagaggaaagggaagaacccacatctaccatgaatgaataaatggcgacctggaagcatacttctggtagc

SEQ ID NO: 1038836 - DNA, 120 bp, Artificial Sequence
  ENSG00000243550_2 (sequence is synthesized)
cagaatgaagacacataatccctattagagtggaagacttaaaatcgagtttgagacccaccttctgaaactgcaggctcttgggagcctgatttccggtgaagagtgttgctgctttgc

SEQ ID NO: 1038837 - DNA, 120 bp, Artificial Sequence
  ENSG00000243550_3 (sequence is synthesized)
atttttcacacttgaacacagtgaagaagatgaacattaattaggattatagtgccatggaggcttactgtgctgtgagaactcacaagaaataaaatgccatttctttttttggatgca

SEQ ID NO: 1038838 - DNA, 120 bp, Artificial Sequence
  ENSG00000243550_4 (sequence is synthesized)
ggcccttttctcttgatctctttctttcctaagcagctccttcaccttcatcaagactcagctcaggacaaaccccttccagaaagtttgttctggtttcttgctctgtgagtttggggc

SEQ ID NO: 1038839 - DNA, 120 bp, Artificial Sequence
  ENSG00000243550_5 (sequence is synthesized)
ctcaccttgtgactgcctttatcaaagagcctatcactctgtgtctctgctcactaggcgacctggaagcatacttctggtagcaatggggacacgggtcaaaggggacttgaggttatc

SEQ ID NO: 1038840 - DNA, 120 bp, Artificial Sequence
  ENSG00000287752_0 (sequence is synthesized)
ggaagcaaggatggaacgggagcggccccattgatcaatggcctcccggtaggcccggccctgtcctccacagcgaccaccagcggctgctgcattggaaggcgctggcatttagagggg

SEQ ID NO: 1038841 - DNA, 120 bp, Artificial Sequence
  ENSG00000287752_1 (sequence is synthesized)
agggtccaagcgccttgcatggggccttcgaacagcctgctggggagagggcgctctctactctccccattgtttagaatccccacccccggtcccgcacggaggcctctttccccaagt

SEQ ID NO: 1038842 - DNA, 120 bp, Artificial Sequence
  ENSG00000287752_2 (sequence is synthesized)
aaacccagggctgcagtcctcacagaaaaatggaaagaaacacatctgcccagcagggctggaactccaccatgcaagagtaacagctggggctgtaggttgcagagggtccctgggcct

SEQ ID NO: 1038843 - DNA, 120 bp, Artificial Sequence
  ENSG00000287752_3 (sequence is synthesized)
ccatctcacctgcccctcagcctgggcctgctgagcagagatccagtctccctgccctgccacacaccacggctcctaacgcttgatcaaatgaatgagaatacaccttcagctgctggt

SEQ ID NO: 1038844 - DNA, 120 bp, Artificial Sequence
  ENSG00000287752_4 (sequence is synthesized)
gctgggggctgggacctctgcccctacattgagcagatacaatccaggatgctcaagaactgccgagaacatcaattgagacagaagcgcttcaggtgtggcccctggaccagcagcatc

SEQ ID NO: 1038845 - DNA, 120 bp, Artificial Sequence
  ENSG00000287752_5 (sequence is synthesized)
attcagacgcatgctctgccacaggcacaaggtgacaggtgtcaagggaacacagaaagacagagagacgaaggggagctactggcagtaccaacagccaagacctggggccctctcctc

SEQ ID NO: 1038846 - DNA, 120 bp, Artificial Sequence
  ENSG00000287752_6 (sequence is synthesized)
ctgcctccaggaggcctgattttcccttccctgcctccctgcagaagttcaaggctgttctttatgaaagaacttacaggtggcctcaggccccctgttgaaggtcatggtatcttccct

SEQ ID NO: 1038847 - DNA, 120 bp, Artificial Sequence
  ENSG00000287752_7 (sequence is synthesized)
cttgtcctttcccagtccaggagcactcggccgtgacccccgagagatccatgccctgtcatgcgcctgcctctcagcctctccccaggctaactgctgcagtgccaaggagggccctgc

SEQ ID NO: 1038848 - DNA, 120 bp, Artificial Sequence
  ENSG00000287752_8 (sequence is synthesized)
cctttgcctctgtgcccccattgccagggtttcctgttcagctgtgaagggctccctcgattgctccagagtctggaatttgggaacacttcaagcagaaagtttataattcacctccca

SEQ ID NO: 1038849 - DNA, 120 bp, Artificial Sequence
  ENSG00000287752_9 (sequence is synthesized)
attctttcagccctgtgaactgcctactgcttgaaaaacaaaaaacatcaagtgactgctgattatggactagaacagaaatcatgcaaatattcttactttggctaagttaaaatagat

SEQ ID NO: 1038850 - DNA, 120 bp, Artificial Sequence
  ENSG00000287752_10 (sequence is synthesized)
tccaaggcacaggctttggcatggcagaagccagggccctccatccagattggctgtaccaggtgacttccctgagcccgcagttttctcactgaaaataataataattgctattactgt

SEQ ID NO: 1038851 - DNA, 120 bp, Artificial Sequence
  ENSG00000237655_0 (sequence is synthesized)
acagagcagctatgtcaacagaaggaaaagagatggagtggaccttcctgggatccaggctgaacagggctctcctcactctaagaacatgagccacattcaacttccacacatcatggt

SEQ ID NO: 1038852 - DNA, 120 bp, Artificial Sequence
  ENSG00000237655_1 (sequence is synthesized)
cgttacagaattccacagatttgcggaagaccttttccaccattggataattttcaagattccagtagatttttgcctgagccatcaacacaggaatgtatttctccatggtttcatcat

SEQ ID NO: 1038853 - DNA, 120 bp, Artificial Sequence
  ENSG00000237655_2 (sequence is synthesized)
cttgatggcagcttgcaggcggaggacccggctgtggtaggcggggttatccaggagaaggaaggcgacccgagtggcctccggataaaggcaggccttgtacagggcctgggcctggta

SEQ ID NO: 1038854 - DNA, 120 bp, Artificial Sequence
  ENSG00000237655_3 (sequence is synthesized)
caggcggtactgctccagttccgggtgcagctggcccagctgctcatagcactcggccgccagcgcgaactcctgcaggcggtagtagcagtagcctagcagcgacaggccggcacggct

SEQ ID NO: 1038855 - DNA, 120 bp, Artificial Sequence
  ENSG00000237654_0 (sequence is synthesized)
agaggtaatgagcacagaggctactgtatttctctcacaactggctttagataagggccttgtgcagattcagctgggctgccatgcaaaggcctgttcctttaagttctgtttactgta

SEQ ID NO: 1038856 - DNA, 120 bp, Artificial Sequence
  ENSG00000237654_1 (sequence is synthesized)
gtgatacacctttaagtcttgaagaatgaagatgaaatattccaaactatgctgcacaagaggatgtgaacagaaacatctggacggagaagatcttttttatattcagccatgccaatt

SEQ ID NO: 1038857 - DNA, 120 bp, Artificial Sequence
  ENSG00000237654_2 (sequence is synthesized)
tatgaagaagctcatccctgtggacctttctcttgaatgcctactatgagtcactcagcaagagaggcacccagctccctcaaggtctgcagtgcctcggaggtattcatactgagcttt

SEQ ID NO: 1038858 - DNA, 120 bp, Artificial Sequence
  ENSG00000237654_3 (sequence is synthesized)
catcccccagaatccagtgaggatttgatctccatcagccagagggaatcacatctcgccatggatatgatgacttctgccctgccaaagccaaggttgatctcaggtctctcgtcctcc

SEQ ID NO: 1038859 - DNA, 120 bp, Artificial Sequence
  ENSG00000237654_4 (sequence is synthesized)
accctgcactcaggcaacaaaagcattcgatcagatgctgtgttacacagctctgatgtgccgggctggtcctgggtgccaaggatacatctatctgtcaataaacaagggaggcaaaag

SEQ ID NO: 1038860 - DNA, 120 bp, Artificial Sequence
  ENSG00000237654_5 (sequence is synthesized)
caaatggtcccatggaattaggctctcaggccctggccatcacggcactatctgtgtaaggaacttctgcaaagccttcctggctccttgatggattggctttttggcttatgcctgtaa

SEQ ID NO: 1038861 - DNA, 120 bp, Artificial Sequence
  ENSG00000237654_6 (sequence is synthesized)
caggaggattgcttgagcccaggagtgcaagaccaacctgagcaacattgtagaacgtcatctctgcaaaaacaaacaaacaaacaaaaattagctgggacaggacagtccagagagaac

SEQ ID NO: 1038862 - DNA, 120 bp, Artificial Sequence
  ENSG00000237654_7 (sequence is synthesized)
gggacaggacagtccagagagaaccaacagcctttgcctgagctctgctccagagctcctccagccccgtgatcaggcactaactataacaactgaaccgatggaagtaaatcctacccc

SEQ ID NO: 1038863 - DNA, 120 bp, Artificial Sequence
  ENSG00000237654_8 (sequence is synthesized)
agcggggcactggcaggattaaagcaggtagtggatagcgtcttgcacagtaccatatacagagtaggatctcctacacgtggtaggattcttgacttgaatagaaacagaacccacata

SEQ ID NO: 1038864 - DNA, 120 bp, Artificial Sequence
  ENSG00000237654_9 (sequence is synthesized)
gcacagcaataagaaaaataagattctgcagacaccaatgctagtctcagggctgccactaactaggtatgtgactttgaccatgccccttcacctcctgtccgtgattttctcgcgtgt

SEQ ID NO: 1038865 - DNA, 120 bp, Artificial Sequence
  ENSG00000237654_10 (sequence is synthesized)
aaaatgaggcactattgtttagatttctcaagggcttccagctgtaacattctacagtcctgtgcattgctggaattgcaggggaacaggggagggagggtaaacctcacatgttcatgt

SEQ ID NO: 1038866 - DNA, 120 bp, Artificial Sequence
  ENSG00000237654_11 (sequence is synthesized)
tttaaaatttcaaatgaagaaagttgttgttttctcctcttcccttctccccagtggtagcaaacaagcaataaatatggaaatcctaaaagccagagaaaatagtgagtgttctccatt

SEQ ID NO: 1038867 - DNA, 120 bp, Artificial Sequence
  ENSG00000237654_12 (sequence is synthesized)
ttgctgacaaagtacacagaggctgcgtcacaaaatgaatgtgcttatccctcttgtgtgctgcatgaattcctcccggcccgagcatggctggaccactcacaggacagctgtcctttg

SEQ ID NO: 1038868 - DNA, 120 bp, Artificial Sequence
  ENSG00000237654_13 (sequence is synthesized)
ttctgtcagtacagggtcccctgcttgtgtgctgaccagcgcagcactgggtgactactgcagagtgaaggtgtgtgttccttctccagggagccccgaacagatggaatccatgcttag

SEQ ID NO: 1038869 - DNA, 120 bp, Artificial Sequence
  ENSG00000237654_14 (sequence is synthesized)
tgcagtgactggaaggaggtagaaacaatgcaggtgaattgggagggcagtgccgggagacagcggaagaaaagagaaaaacaaaggcaaggtagagcattccagctgcaggcagccaaa

SEQ ID NO: 1038870 - DNA, 120 bp, Artificial Sequence
  ENSG00000237654_15 (sequence is synthesized)
gcctctcctgccaagggacaggtagctggttttcaaaattgtgcagacatactcagtaattgctctgcaccatcttgtctgccttttaagcacaagcgaggattgcatctgactcccatt

SEQ ID NO: 1038871 - DNA, 120 bp, Artificial Sequence
  ENSG00000237654_16 (sequence is synthesized)
accagcaaatgtcccaggaaggaccttaagtaataagagccttttgaagctgatcttcagaagcctcttcccaagatggcacctgggaggaggtgtggttgtttagcggctctgtcagcc

SEQ ID NO: 1038872 - DNA, 120 bp, Artificial Sequence
  ENSG00000237654_17 (sequence is synthesized)
agcgttgtcctagaaaatactgagtaattgtttcatgcgtatacatcatgtttcctcaagtagaatctacctttatacaatcaaaagtgtcagattgatggatgagtagcagaacaagaa

SEQ ID NO: 1038873 - DNA, 120 bp, Artificial Sequence
  ENSG00000237654_18 (sequence is synthesized)
ccctcctcctatggctgttggggtgcaagtacccatttgcctattggaactgccttagggaagatacggttaaacacagaccccaccccgcaagttattctattgaggaaaagtggaaat

SEQ ID NO: 1038874 - DNA, 120 bp, Artificial Sequence
  ENSG00000237654_19 (sequence is synthesized)
acccaaccacccaacccacacctctgttacaatactggctttttgacaaggaagcattcattctttctggcaaaacattgtccactcttagcagttcttccacggatatcagacctatat

SEQ ID NO: 1038875 - DNA, 120 bp, Artificial Sequence
  ENSG00000237654_20 (sequence is synthesized)
gccagtggcaacacagtaagtcagtagcattctataagcactcgttcaaccatgttttcggcgtggtttctatgtgtcagtcattatcccaagcggtggccaaggagaagctacagaagc

SEQ ID NO: 1038876 - DNA, 120 bp, Artificial Sequence
  ENSG00000237654_21 (sequence is synthesized)
agattcgaccaggccctttctttgaatagtctgtggtcccatgagggaggcaggtgagaatcaaggctctgtgataactgttccaagggagatacacacagagcatgtggcatgctaagc

SEQ ID NO: 1038877 - DNA, 120 bp, Artificial Sequence
  ENSG00000237654_22 (sequence is synthesized)
tcctcttggggtaattgcaatgtttgccttctttcctttgaggacttaagtgtgaagcctgtgcacctggaatgggaggggacagggattctcataagaacctttatgccatttgtatag

SEQ ID NO: 1038878 - DNA, 120 bp, Artificial Sequence
  ENSG00000237654_23 (sequence is synthesized)
cagttaacagactgacaagaatttcaaaatagcatcagacgaggcgatgagcataggggtccttagaaatatttgcttgttttatggtcagaggcctgcaggaagcagctaataactgat

SEQ ID NO: 1038879 - DNA, 120 bp, Artificial Sequence
  ENSG00000237654_24 (sequence is synthesized)
ctcttcccatagcccctaatgtcctctccgtttcaatcatggaccagagtatagtgtgacatttcccatattattgatttgagttgttatttatttcttttattgccatataactgttta

SEQ ID NO: 1038880 - DNA, 120 bp, Artificial Sequence
  ENSG00000237654_25 (sequence is synthesized)
cacccttggctagaatttaagatgccggaagacaagatagtgccttgttcccctgcctccactagcacagcacctgactcacagtaggcaatcaatgcaccgattaattaagtcctcctt

SEQ ID NO: 1038881 - DNA, 120 bp, Artificial Sequence
  ENSG00000237654_26 (sequence is synthesized)
ctgctgagggcccatcgtcctttggctgtcccagagagctaacacctgtccccgggaccaccctagacacaatggcacgcagacgaacgagcctccttcgtctaccttccctccgcgagc

SEQ ID NO: 1038882 - DNA, 120 bp, Artificial Sequence
  ENSG00000237654_27 (sequence is synthesized)
agcatcaaggacctgagaggcaaactcaaggtgaattttaaaacaccttcagtggtggttgcagagcaaacctgcctgcaagaaaaggattttttccatctttcttcagcgccactggag

SEQ ID NO: 1038883 - DNA, 120 bp, Artificial Sequence
  ENSG00000237654_28 (sequence is synthesized)
cggctccttccattgaaaatacagggatttgtgctgcatgattgtgcagggagtgggggccgagtccacgccagtcatcaagggctcagcatgctcagaagggctttgtgctccaggcac

SEQ ID NO: 1038884 - DNA, 120 bp, Artificial Sequence
  ENSG00000237654_29 (sequence is synthesized)
tccagcagcctggcttggccttagcacatcccccttcctgaagaggccacagtacaaccacttcagcaagtgacttttcagtaatggctctgtgtgcccaaaagggaaatcaatgtgacg

SEQ ID NO: 1038885 - DNA, 120 bp, Artificial Sequence
  ENSG00000237654_30 (sequence is synthesized)
gttagaaaagtttctttttttcttccagtcctgtgctgtccccaaaatatcagaataaggtttgttatctgggcaaaggaacaagcgcaagattttcttttatgttgggtgaggagctaa

SEQ ID NO: 1038886 - DNA, 120 bp, Artificial Sequence
  ENSG00000237654_31 (sequence is synthesized)
aggactaaacatttttgaaaacctatgatgtaccagagactgtctcacatcctgccctatttaatgttaccaggagatcgttggtaaggtgttacccccatcttaaagaggaggggacca

SEQ ID NO: 1038887 - DNA, 120 bp, Artificial Sequence
  ENSG00000237654_32 (sequence is synthesized)
agattcagggatgcttcacaagctaataactaaaacttaattctaaagtgtgtggggtgcgtgtgtgtgtgtgcatgtgtgtgcatgcatgtgtgcatgtgtgtctggtctgatgtctta

SEQ ID NO: 1038888 - DNA, 120 bp, Artificial Sequence
  ENSG00000237654_33 (sequence is synthesized)
gtgttcatatccatgagcatcaggagagcttccacttcacccatgtttcaaactctagagaggctgctccccctgctgagtagcctggtcgtggccgtggctgggtgatggctgtttgga

SEQ ID NO: 1038889 - DNA, 120 bp, Artificial Sequence
  ENSG00000237654_34 (sequence is synthesized)
tgctctcagaaatgtcgtaagcagttcacttattattcagggaaacatccaacaaagtgatggcttctttccttgctatcactatctactgccagctgttcacttgaattgaaggatatg

SEQ ID NO: 1038890 - DNA, 120 bp, Artificial Sequence
  ENSG00000237654_35 (sequence is synthesized)
agggactgaatgctgaattcacgaatgcagctaaccgcccccctccagaccccagaggagccattaggatgagtgtttatggagcagcactgcctggaaatgccaaggcccagtaaggaa

SEQ ID NO: 1038891 - DNA, 120 bp, Artificial Sequence
  ENSG00000237654_36 (sequence is synthesized)
tgagaggtgaacggagaaatacacgcgtccctggatccctccctgggtggggaagactgtgtcgtgggacagggggcttcaaatctatgggaaaacacagcaaatacacttctagttctt

SEQ ID NO: 1038892 - DNA, 120 bp, Artificial Sequence
  ENSG00000237654_37 (sequence is synthesized)
ttaagtgttaattgtagaatctagtgatgggtttatgggtcttaactgtaaaaatctttcatcttttctgtatgtttgataactttcatataaaaataataaaaactttagtttatcttc

SEQ ID NO: 1038893 - DNA, 120 bp, Artificial Sequence
  ENSG00000259877_0 (sequence is synthesized)
acttccgcctccagcctccgggccgaagctttggcctatggtgcggggaggtagtagtttcttccgcgagggtgcgggagggccccggggcgcccttgggaaccgggctggaggcagaga

SEQ ID NO: 1038894 - DNA, 120 bp, Artificial Sequence
  ENSG00000259877_1 (sequence is synthesized)
caggcccggaggaccaggcggacgtaaggatcaggcctctggacgcaactgcggagccggaacagaccaggagggcgcggttgggcgggtacagccaggaagtgctcgtcgcgagcgcgg

SEQ ID NO: 1038895 - DNA, 120 bp, Artificial Sequence
  ENSG00000259877_2 (sequence is synthesized)
cccgcggttcggtcacagcgagaagcccgcgggtgctgggagtgctcggtcttctctcgatctctgcagggagtcactggccccgttcctttttatctgtctgaacatcacgccgaactt

SEQ ID NO: 1038896 - DNA, 120 bp, Artificial Sequence
  ENSG00000259877_3 (sequence is synthesized)
ttaacagttgattccactgcattttcaatgtggtattttttttttctgtaaatgttcatctatttttcgcttcaaatatgcgtttctgttacttttctaatgtaccgtaggagccaagac

SEQ ID NO: 1038897 - DNA, 120 bp, Artificial Sequence
  ENSG00000259877_4 (sequence is synthesized)
cacctatactacgttgcaaaatagcactgataccaggggttctcccaaggttcattcagaaatgtcacatgattccagtaacaatacgaaaaggttttttttttggaaccaggcatattg

SEQ ID NO: 1038898 - DNA, 120 bp, Artificial Sequence
  ENSG00000259877_5 (sequence is synthesized)
atcctggagttcacatggaggaacaaatgtctcataacgcagacgacgcggacaaacaaaagcgcaatgcccgacagatgcgaaaacagcctctgtcattaaaactgtgtgctagtgaca

SEQ ID NO: 1038899 - DNA, 120 bp, Artificial Sequence
  ENSG00000259877_6 (sequence is synthesized)
catgaacaggaaacaaatggaatatccagacatcaacccagtaacatggaaatttggttcataaacataatttcagagcggtggaacaaacatgcagtttataatgaaaggtgctaagac

SEQ ID NO: 1038900 - DNA, 120 bp, Artificial Sequence
  ENSG00000259877_7 (sequence is synthesized)
aaatggttagccgtctgagaaatgatgaaattaattctggatctcacagggataaactccaaacggatcaggagtctaaatgtgaaaaacaaaacaaaaccacatgtgaagtgttcacgt

SEQ ID NO: 1038901 - DNA, 120 bp, Artificial Sequence
  ENSG00000259877_8 (sequence is synthesized)
gatttcgtggctgattaagaaacaagatgtgcccaggaggtggcggtggcgcacaagctttgacaggttggagggtgagggagtctcacgcaccatgagattacccacaggcttcgaatt

SEQ ID NO: 1038902 - DNA, 120 bp, Artificial Sequence
  ENSG00000259877_9 (sequence is synthesized)
gggggtcactactcagaaaagagaaaaaaatgagcgtgggcggggggcgcgcagagaactcccagagaagaaggagatcagacagggggagggctgacgtgactagatcacgtttctcag

SEQ ID NO: 1038903 - DNA, 120 bp, Artificial Sequence
  ENSG00000259877_10 (sequence is synthesized)
acggcttgcagtctttagagccccaggatttatcttatctatggctagcagagattggacacaatttcacgaagtatacaaagcaaccacatgctaaatggttcaacactatgagtgttt

SEQ ID NO: 1038904 - DNA, 85 bp, Artificial Sequence
  ENSG00000259877_11 (sequence is synthesized)
aagcaaccacatgctaaatggttcaacactatgagtgtttgggatgtgttttatttattatttattaattttgatacggagtctc

SEQ ID NO: 1038905 - DNA, 90 bp, Artificial Sequence
  ENSG00000259877_12 (sequence is synthesized)
cggcctcccaaagtggtgggattacagacgtgagccactgcagccaccgtgcctgcccttgggatatggtttttttgagacgaagtcttg

SEQ ID NO: 1038906 - DNA, 73 bp, Artificial Sequence
  ENSG00000259877_13 (sequence is synthesized)
tttttcttttaattttgttttgttttgtttttttgagacgaagtcttgctctgtcgaccaggctggagtgcag

SEQ ID NO: 1038907 - DNA, 120 bp, Artificial Sequence
  ENSG00000259877_14 (sequence is synthesized)
ctgagattacaggcgtgagccaccgcacggatatgttttaagtaactgaatgtattaaaatttgactttggcaccagcaggctattgtgaataatgttgctttgagcatcgtgtgcaaaa

SEQ ID NO: 1038908 - DNA, 120 bp, Artificial Sequence
  ENSG00000259877_15 (sequence is synthesized)
atatcctggacccttgttctcagcacttttggatatatatgcaaaagtggaatggctgggtcacatgataattctgtctgatgttttgagaaaccactgtcctgttttccagagctgctg

SEQ ID NO: 1038909 - DNA, 120 bp, Artificial Sequence
  ENSG00000259877_16 (sequence is synthesized)
caccattttgtattcccatgagcaggtgcacaaggttccaactttaccacatccagccaacagttacctcctatttaatggctaagagccatcaccaccggggtaatgtgatctcactgt

SEQ ID NO: 1038910 - DNA, 120 bp, Artificial Sequence
  ENSG00000259877_17 (sequence is synthesized)
ggcttttgttttcatttccctaatgtttagttatgttgatcatcttttcatgttcttattggccatctgttatcttctttattataagtccttttctgaattaaattggttttgttgtta

SEQ ID NO: 1038911 - DNA, 120 bp, Artificial Sequence
  ENSG00000259876_0 (sequence is synthesized)
tactgcactgccactcatcaaaaagattttttgggctgggtgtagtggctcacacctgcaatcccagcattctgggatgccaaggagaatgggtcatttgaggtcaggagttcaagatca

SEQ ID NO: 1038912 - DNA, 120 bp, Artificial Sequence
  ENSG00000259876_1 (sequence is synthesized)
atcagcctagccaacatagtgaaatgctgtctctactgaaaatgcaaaaattagttgggagaggtggtgtgttcctgtaatcccagctacttaagaggctgaagcaggagaattgcttga

SEQ ID NO: 1038913 - DNA, 120 bp, Artificial Sequence
  ENSG00000259876_2 (sequence is synthesized)
tcaaccattcagcatctccaccctcttctgaggttcttcccatctctctgaagctgtaatcccatcgtcacttcctctggcaacacggggactgcctgccatgccctaactcctccttgt

SEQ ID NO: 1038914 - DNA, 120 bp, Artificial Sequence
  ENSG00000259876_3 (sequence is synthesized)
gcttttggccttcgcctaagagttccttggagtttcttcacagcatctgtagccatctgaagtgtcatcttctgtactatattgccagtgcctacaattacgactggtatactcaaccag

SEQ ID NO: 1038915 - DNA, 120 bp, Artificial Sequence
  ENSG00000259871_0 (sequence is synthesized)
agattaataataaataacagataaatgatggatggatggatggataaatgaacatgacagatattgttagagatagatgataggtagataatagtctatgatatggtagccatgtatcta

SEQ ID NO: 1038916 - DNA, 120 bp, Artificial Sequence
  ENSG00000259871_1 (sequence is synthesized)
tctatctgtctatatatcatatctatatgatagtccttggatagtcatatatggataggtaatagatagtctctcccttagggaagatagagagacagacagatagatggataggcaggt

SEQ ID NO: 1038917 - DNA, 120 bp, Artificial Sequence
  ENSG00000259871_2 (sequence is synthesized)
gctcatgactataaatatatgtcacctatacaatcattgttaacaaaacataggaccatattgtgtggatgcatcaaagtatttaactattcttgttagctatttagattgcatctaatt

SEQ ID NO: 1038918 - DNA, 120 bp, Artificial Sequence
  ENSG00000259871_3 (sequence is synthesized)
tttcactgttacaaataacacagtgataggcatctctgtacacatgtttaattatattcttggggatatattcctagaagtggcattggtagttcaaaatgtatgcacattttaaagata

SEQ ID NO: 1038919 - DNA, 120 bp, Artificial Sequence
  ENSG00000259871_4 (sequence is synthesized)
gaattactttttattatacaaaataatgcaggtggcttttggaggcagtgaatatgtttatcagtgtgattgtggtaatggcatcacaggtgtatgtatgtgtccaaactcatcaaattg

SEQ ID NO: 1038920 - DNA, 87 bp, Artificial Sequence
  ENSG00000259871_5 (sequence is synthesized)
gccttaaacacttgcagtttttaaaatatacaattatacctcgataaagctgatttttaaaaatgtatgtggactacaaaaaaaggg

SEQ ID NO: 1038921 - DNA, 120 bp, Artificial Sequence
  ENSG00000259871_6 (sequence is synthesized)
accacagtagtggactgttttccagctatgtatactgtgatggccatgagaatgcaccacgcagacctcctactaccagggccatgattgactgagggccccaggttttgtgtttgaaac

SEQ ID NO: 1038922 - DNA, 120 bp, Artificial Sequence
  ENSG00000259871_7 (sequence is synthesized)
tcttcacttcatttgcattcccaggtaatgacagagcgacctggagtactaaggcaggcatattcctgggagacacaagattcctttggtggtgaacttggctgaaggaggccccaatgg

SEQ ID NO: 1038923 - DNA, 120 bp, Artificial Sequence
  ENSG00000259871_8 (sequence is synthesized)
gcctgctgaacttgccttaggctgcaggatgatctaggacgcctccaccctctccttcacatggcatcacacttgcatcatagtctgactataatagggaacattatgtcatttatgttc

SEQ ID NO: 1038924 - DNA, 120 bp, Artificial Sequence
  ENSG00000259871_9 (sequence is synthesized)
ataaactcccacagaactacactctgtatttctataaacgcatatatctgtaaatagagattaaaaggcctggaaagatacacacgaaactgataacagagaggacttcagggattgggg

SEQ ID NO: 1038925 - DNA, 120 bp, Artificial Sequence
  ENSG00000259871_10 (sequence is synthesized)
gaaatggcctcaaggcagaattttagatttgtctgtaatgcttgatttttttaaaactatgatcatatattcatgtattacttgtgcagctaaaaatacagagctatttttaaaatgaaa

SEQ ID NO: 1038926 - DNA, 90 bp, Artificial Sequence
  ENSG00000259870_0 (sequence is synthesized)
agataaggaaataaaagcaggccacccccgagccagctggggcaatctgcttgggtgcccttccgccagtaagttttggtgctgcttgca

SEQ ID NO: 1038927 - DNA, 120 bp, Artificial Sequence
  ENSG00000259870_1 (sequence is synthesized)
acttgggtccgtgccacctttatgagctgtaacactcactgcaaaggtctacagcttcattcctgaagcccgcgagattacaaacccaccaacccaccaacccaccagcaggaaagaaca

SEQ ID NO: 1038928 - DNA, 87 bp, Artificial Sequence
  ENSG00000259870_2 (sequence is synthesized)
caaacccaccaacccaccaacccaccagcaggaaagaacaactccagatgggaggaactaacaactccagacgcaccacctttatga

SEQ ID NO: 1038929 - DNA, 85 bp, Artificial Sequence
  ENSG00000259870_3 (sequence is synthesized)
ctgcaaggggccccgagcatccttaacatcccagcaccccctctcctgctgcaattcagtccaattagcccctggcccaaaatct

SEQ ID NO: 1038930 - DNA, 120 bp, Artificial Sequence
  ENSG00000259870_4 (sequence is synthesized)
ctgctgcaattcagtccaattagcccctggcccaaaatctaattgtgtgcaaagcacaaattaacactaaaccggatcagtgttgtttctttttaatgctgaaacagttcagggctcact

SEQ ID NO: 1038931 - DNA, 120 bp, Artificial Sequence
  ENSG00000259870_5 (sequence is synthesized)
catcctacttcatcagctagattgcaagctccatgtagggattttctcccttttatttaaaccaccaggctgccccttttagtggacctgatgcgccctaaacactcctgggccatgagc

SEQ ID NO: 1038932 - DNA, 120 bp, Artificial Sequence
  ENSG00000259870_6 (sequence is synthesized)
taagactcaaagaatattggtcacatgagtgtctgaagatgacttctgtgagtgcctgcagatttcctcatacatcccgcaaggaagagcaatgccccatgtccatgaacggggaccatg

SEQ ID NO: 1038933 - DNA, 120 bp, Artificial Sequence
  ENSG00000259870_7 (sequence is synthesized)
actccccactctggctgcgaccttcttttttattctcaccttgctgaaaataatcaactcatctcagtcttcctgaggctttgcaagttttagcactgacagttccatgagctgggaacc

SEQ ID NO: 1038934 - DNA, 120 bp, Artificial Sequence
  ENSG00000259870_8 (sequence is synthesized)
aatgaattaaggttttgcatcctgaatctttatcctctggttgaaatgttcttatcccatggttagcctttcaaggccaggttcaaatgctcttcccctcactggacattcccttatcac

SEQ ID NO: 1038935 - DNA, 120 bp, Artificial Sequence
  ENSG00000259870_9 (sequence is synthesized)
atcctttacatgcctccctcctgaagagtctggccaagtcacatggcctggcaccattactaattgcccactgacccatggtctagttctcagtataactgcttcccttctggatgattc

SEQ ID NO: 1038936 - DNA, 120 bp, Artificial Sequence
  ENSG00000259870_10 (sequence is synthesized)
ttacaggcagggtgtctgtcatgcacatcgtatgcacatgcttgcttccccagcaaacccagcactgttccttgcaccagcacatcgtcaaaattggcagacgcttgatcagcatttgct

SEQ ID NO: 1038937 - DNA, 120 bp, Artificial Sequence
  ENSG00000259870_11 (sequence is synthesized)
gattgattgattggttctgatccctagaacaggcccaatctagggaagcccaaagccaggcagcagtacagtggagaatctgcaactagctgcactcattccactccagctgaaaactct

SEQ ID NO: 1038938 - DNA, 120 bp, Artificial Sequence
  ENSG00000259870_12 (sequence is synthesized)
cagtaaataacactaaaatcttcaactggcagagcacctagcttctctgttcaatgtctagggctgtctataaaccattagtggtgtgttagtgttttttctgcatacagacctaagtct

SEQ ID NO: 1038939 - DNA, 120 bp, Artificial Sequence
  ENSG00000259870_13 (sequence is synthesized)
ttgctgatttatgtagaaaggagtccacagcagggcagaatgcatcccaggaaaaggaaacggttctcatacaactatgctaggtcattcagaatagttatcattatatgccctgcttgg

SEQ ID NO: 1038940 - DNA, 120 bp, Artificial Sequence
  ENSG00000259870_14 (sequence is synthesized)
gaaattgcagagaccatattttttaaatgaatataaagtctgaaaggaattttgacaggtcagatttacaaaaatcaaagtaggccaccctgatttgcactgtcaataaggtgttaggga

SEQ ID NO: 1038941 - DNA, 120 bp, Artificial Sequence
  ENSG00000259870_15 (sequence is synthesized)
agatactaggagattaacaccctttcatgatgacctagctgttcccttgaaggtggtaacacccagtcaggcccaggatgaggaacaaagagggactgggggtgacactggaagctttca

SEQ ID NO: 1038942 - DNA, 120 bp, Artificial Sequence
  ENSG00000259870_16 (sequence is synthesized)
aatctaaggagccacagatctcttactcatttttttaatgacgtttattatttttttaatgtcagtagcattgctttccaatccatatcaaccacaataaagaaaaattttcattggtta

SEQ ID NO: 1038943 - DNA, 120 bp, Artificial Sequence
  ENSG00000231019_0 (sequence is synthesized)
aaaaacaggttacctgagtaggttttggcagcctgtgtatttgtcacatcgaaggctcgttatttactaaagtatctgtatgaacatgatctagtttgcacttgtgagtggtgttggtag

SEQ ID NO: 1038944 - DNA, 120 bp, Artificial Sequence
  ENSG00000231019_1 (sequence is synthesized)
aggggacatatacgaagatttaattgttggtaattatagtgagaacagaggggacttgaaattgctgaactgtctcatgcctggaggactctggaaacattgtgtggcatgcagataccg

SEQ ID NO: 1038945 - DNA, 120 bp, Artificial Sequence
  ENSG00000231019_2 (sequence is synthesized)
taagtgtcttgtgttaccaaataacagtggtcatcagagaaaatacagatattagaaacaaactgtacttgtcagaaaaatattttatactatcatatacaatttaactagaagtttatt

SEQ ID NO: 1038946 - DNA, 120 bp, Artificial Sequence
  ENSG00000231019_3 (sequence is synthesized)
gatgaatttgatttattttcctggagttaactattgccagatggtacatactctttgaatatgattgatgagccggggaagcctcttgctagcagctcttgcttctgctcactacataca

SEQ ID NO: 1038947 - DNA, 120 bp, Artificial Sequence
  ENSG00000259878_0 (sequence is synthesized)
agagcaaatctctgtcaccccaccagtgacaattctcaggccctctggctcttgtttggctacactctgaggcaacagtagggaccctcaaagatcaagagtctgaaaaggtcagagaag

SEQ ID NO: 1038948 - DNA, 120 bp, Artificial Sequence
  ENSG00000259878_1 (sequence is synthesized)
ccctgatggggcctttgaaagtatatgacatcacagtgggtaccaggagaggccatgcctggaaaaaggagcaataataataacagctatattgatagctgtgcaacagataactattga

SEQ ID NO: 1038949 - DNA, 120 bp, Artificial Sequence
  ENSG00000259878_2 (sequence is synthesized)
gagggagaggactggtctgccaagagagccaaccctaaggaggctaaaacggggaaaagagctcatgaccccaggataaaatccattcttttgtaacgtggtgtaaaggcccttgcatct

SEQ ID NO: 1038950 - DNA, 120 bp, Artificial Sequence
  ENSG00000259878_3 (sequence is synthesized)
gtcttcacttccactcttgccactgctgccccctgaggcagtgctgcagccataaggaactttattttttccctaaatgtgctccacccctcacaggtactgttccttccactggaaaga

SEQ ID NO: 1038951 - DNA, 120 bp, Artificial Sequence
  ENSG00000251517_0 (sequence is synthesized)
cctgaggcaagtgtgttggggtaactaagagtaatctttttcaaattggtttataatcaagcaaatttctcactggaactcaaagagagggagacaagctccttcttttctcacacctcc

SEQ ID NO: 1038952 - DNA, 120 bp, Artificial Sequence
  ENSG00000251517_1 (sequence is synthesized)
agttggggtatgtttttttctcgttacgaagaaatattcaatacttttaaaacttggccaattgccagattcatgatgccactgtaaaggtttacaacggatttttggagagtcagcaga

SEQ ID NO: 1038953 - DNA, 120 bp, Artificial Sequence
  ENSG00000251517_2 (sequence is synthesized)
gaggctacaactgaggagctttcataaatcacaaatcacaggatttacaatttggggaactataagaggagataaacaacaaactgaggtttttgagatattgggaatgttgctgacctg

SEQ ID NO: 1038954 - DNA, 120 bp, Artificial Sequence
  ENSG00000251517_3 (sequence is synthesized)
taatactgattcctattgtgaattccttttattatgtacttattttttcatagtagtagatattatactgcctatattcctttctgataattttgggaacatagaacagcaagattttga

SEQ ID NO: 1038955 - DNA, 120 bp, Artificial Sequence
  ENSG00000251517_4 (sequence is synthesized)
agtggcttagagaaggcagatatttatttctctgtcaattaacaggaggcagaagcaggcagtttaataaagagacaccacaatcaggtgggactaaggtttgttctaccaggtcttttt

SEQ ID NO: 1038956 - DNA, 120 bp, Artificial Sequence
  ENSG00000251517_5 (sequence is synthesized)
gtcaccctaacatggtttccaactcaaactccaagatagctgctccagatggagacctcacatctgcactccctgcaggaaggaggaagggtctgacctttcctttaagggggaacactt

SEQ ID NO: 1038957 - DNA, 120 bp, Artificial Sequence
  ENSG00000251517_6 (sequence is synthesized)
cctgtagctggtacacaacacttctacttagatctgactggccagaatttagtcctatggccatgtgtctctataaggaagactaaaatgtaaattttattttggacaaccatatgccca

SEQ ID NO: 1038958 - DNA, 120 bp, Artificial Sequence
  ENSG00000251517_7 (sequence is synthesized)
gctaaaaattagtggttccattaccaaagaagtaggagaggatgaatattgggaaacaattagccgtctctgcaataaccttttaatagtttgctctagatgctatagaggctagatttt

SEQ ID NO: 1038959 - DNA, 120 bp, Artificial Sequence
  ENSG00000251517_8 (sequence is synthesized)
tccattttgttttgtttcttattgattttcttaaagaaaaatactagatatttacgtataaacaatactatttttttctgtcatatttgcgactaataaatttcaatgctactttttaaa

SEQ ID NO: 1038960 - DNA, 120 bp, Artificial Sequence
  ENSG00000251510_0 (sequence is synthesized)
agaaaaaggaaaaaggcagatatacatgccacagtacagtgctgagacaacataaatcacaagcaaccaagtacaaagtgaattatacagaatctggttttcttctgtttggatttgata

SEQ ID NO: 1038961 - DNA, 120 bp, Artificial Sequence
  ENSG00000251510_1 (sequence is synthesized)
ctgagctatactggattcactgacaagaagagtttgaattagcagcatgctgagaatggacacagtgtttgaagagactgataaagaaagtacaggaggagttttatttttggaagaaga

SEQ ID NO: 1038962 - DNA, 120 bp, Artificial Sequence
  ENSG00000251510_2 (sequence is synthesized)
aatggtccttgggcacagaccccatatgagttttcctttcagcgttctctgctcagctgttctctgctgtggtgaggcgcctatgctttgtatatgtctgaaattaattgaaaagctagt

SEQ ID NO: 1038963 - DNA, 120 bp, Artificial Sequence
  ENSG00000251510_3 (sequence is synthesized)
gacagattctgatgtcatttgccatgagctttattgttgtgcaggtaattttggatcaaatcaccctaacgtttttcaacaaagactttagaagaaataaagctgcattactttttcttg

SEQ ID NO: 1038964 - DNA, 120 bp, Artificial Sequence
  ENSG00000251510_4 (sequence is synthesized)
gcgcattcttcctttaggacctatagtgaggacccacccaacagtggcctcagcttggggacatctggagtcgcatccaccatgaggacgaagcctccttctcttctggacctgcccagg

SEQ ID NO: 1038965 - DNA, 120 bp, Artificial Sequence
  ENSG00000251510_5 (sequence is synthesized)
agtggccgttgctacaagacctctgttgctacgtccagggtgagaataaagacttctcctcaggactctcccaggagaagacatggcattgagacatctggtggccagggagacatgaga

SEQ ID NO: 1038966 - DNA, 120 bp, Artificial Sequence
  ENSG00000251510_6 (sequence is synthesized)
aggacgcacaacttgaaaatagccatggtgcaggtctgggctttcaagttacaggaaactttggaaaatagtggaaagtgaccaattcaagtctatttcatgggatgagaatggaacttg

SEQ ID NO: 1038967 - DNA, 120 bp, Artificial Sequence
  ENSG00000251510_7 (sequence is synthesized)
catagtgattaatgaagaactcttcaagaaagaaattttggaaacaaaggctccttacagaatatttcaaactgatgctatcaaaagttttgttcgacagctcaacctttatggatttag

SEQ ID NO: 1038968 - DNA, 120 bp, Artificial Sequence
  ENSG00000251510_8 (sequence is synthesized)
taaaattcaacagaattttcaaagatctgcctttctagccacctttctgtcagaagagaaagaatcgtctgtcttaagcaaggtatttgacatatttgagttaccactttatgtaaagta

SEQ ID NO: 1038969 - DNA, 120 bp, Artificial Sequence
  ENSG00000251510_9 (sequence is synthesized)
tatatgtaattttactttgtacatcagtaaatatgttaatacatgcagtaagaccagcttttgaaaattatataaaatattaaggtagaaattttgttttgaaattattgtgttcagctt

SEQ ID NO: 1038970 - DNA, 120 bp, Artificial Sequence
  ENSG00000251510_10 (sequence is synthesized)
gagcgttaaccttttagtgttttaagaaattttgctaacaactttgaatcttaccagtgaattccaaataaatgtaccaaagccacttaatgaaatattactattaatatataacatgtt

SEQ ID NO: 1038971 - DNA, 120 bp, Artificial Sequence
  ENSG00000251510_11 (sequence is synthesized)
ttcacttgagggcttaacaacttgagtggtttttcacaataagcacattcttaaaaatagtaaacgatgtttatgagttatttgatgacattaaatttgtgtgatgaaagagaaatctga

SEQ ID NO: 1038972 - DNA, 120 bp, Artificial Sequence
  ENSG00000249700_0 (sequence is synthesized)
acgactggaatcacacatacactgccacaagaggtctgcagtgaaggtcccaaagtcccagacaacggagtctctctctgtcgcccagggtagagtgcagtggtgcaatcctggctcact

SEQ ID NO: 1038973 - DNA, 79 bp, Artificial Sequence
  ENSG00000249700_1 (sequence is synthesized)
accaggatctttctgctgatgcagctgttaagagtgtttcataaactgtgacaacactaagcaaaatcatagaaggaaa

SEQ ID NO: 1038974 - DNA, 120 bp, Artificial Sequence
  ENSG00000249700_2 (sequence is synthesized)
cataaactgtgacaacactaagcaaaatcatagaaggaaactctatggacaatttcagatggagaagaagaaaggactggaagttcaatttggccatgacaattagacttgaagaagctg

SEQ ID NO: 1038975 - DNA, 120 bp, Artificial Sequence
  ENSG00000249700_3 (sequence is synthesized)
agggcatgactgatgtgtataaggagcatcatatacatgatcatctacagtccactgaggagaatagcagacgagaggccaggtgcagtgcatgtaatcccagcactttgggagactgag

SEQ ID NO: 1038976 - DNA, 120 bp, Artificial Sequence
  ENSG00000249700_4 (sequence is synthesized)
accagcctgggcaacacagcaagaccttgattctactaaaaaaaaaaaaggatccttcaacttcaacaataataacacaagggaagtgaagaaaaacactttctaaggaaatctctctct

SEQ ID NO: 1038977 - DNA, 120 bp, Artificial Sequence
  ENSG00000249700_5 (sequence is synthesized)
gagctaccatcctgctagggagagcctgaaagcagaatgctgacttgactagctctggtcaatgaaagaaatcaccagtggaaaggctaccagggggctttctcaaaagagagggacagt

SEQ ID NO: 1038978 - DNA, 89 bp, Artificial Sequence
  ENSG00000249700_6 (sequence is synthesized)
aaagtcccagacaagtcccctcttacagctcacatcagcctcgacctcccgggctcaagctatcctcctacctcagcctcccaagtagc

SEQ ID NO: 1038979 - DNA, 120 bp, Artificial Sequence
  ENSG00000249700_7 (sequence is synthesized)
gtaccactcagacagaggaatgagactcttctatgctcgccccagacagttcttatctggtgttcctctttcaaagttgtcatgctgtaaagttgtgttttcactgatttgctggagtgc

SEQ ID NO: 1038980 - DNA, 88 bp, Artificial Sequence
  ENSG00000249700_8 (sequence is synthesized)
catgctgtaaagttgtgttttcactgatttgctggagtgcagcagcatgattacagctcacatcagcctcgacctcccgggctcaagc

SEQ ID NO: 1038981 - DNA, 120 bp, Artificial Sequence
  ENSG00000249700_9 (sequence is synthesized)
agtatcttcccttgtggactacaccagtgtcgaaatgttcttgctaaaaatgatgcagggagaaagacaaagttacaaagttggcatccacaatttttccatcttgccccacttcccaat

SEQ ID NO: 1038982 - DNA, 120 bp, Artificial Sequence
  ENSG00000249700_10 (sequence is synthesized)
taaaatgaaggaaaaaaaattggtgaggtctccatccctgtctgaagcaggcatccattatcctgcccaggtcagttgctgcaatgggaagcatgacttcatgttttgtcagatgtacca

SEQ ID NO: 1038983 - DNA, 120 bp, Artificial Sequence
  ENSG00000249700_11 (sequence is synthesized)
aattttcaagagaaaagccagagagctgaatatttgtgtgaaatttcctgatttttaaaagttggcaattgtatcaaattaggattatactccactaaatataacataaaatcgaaaaga

SEQ ID NO: 1038984 - DNA, 120 bp, Artificial Sequence
  ENSG00000249700_12 (sequence is synthesized)
acatgcagcataaatgagagaaatgttttccttcattagaggcagttcagtggctccacagagatcagggacccaggttccttccagctttctgctctatcattcctagggggtgacctt

SEQ ID NO: 1038985 - DNA, 120 bp, Artificial Sequence
  ENSG00000249700_13 (sequence is synthesized)
aataactaatacagtgatgtttgaacaaagacttgaagaagctgagtgagaaggccatgcagatatcttggagaagtgcattccaggcagaggaaaagccagtgcagagacactgaagca

SEQ ID NO: 1038986 - DNA, 120 bp, Artificial Sequence
  ENSG00000249700_14 (sequence is synthesized)
cagatgatgcggggctaagctctggcaagggacaggcgagctggtctcccactggtggtcctggcaatgtccatatgcagagccctttcctgtctttggagccgcagccattgctgtcct

SEQ ID NO: 1038987 - DNA, 60 bp, Artificial Sequence
  ENSG00000249700_15 (sequence is synthesized)
aaactccatctcaaaaaaaaaaaaaaaaacatatcaattgcttgagcccaggaattcaag

SEQ ID NO: 1038988 - DNA, 73 bp, Artificial Sequence
  ENSG00000249700_16 (sequence is synthesized)
catgatggtgcgcacctgtaattccagccactcaggaaggtgaagcaggaggatcacctgaacccagagaggt

SEQ ID NO: 1038989 - DNA, 120 bp, Artificial Sequence
  ENSG00000249700_17 (sequence is synthesized)
ggacatgatggtgcgcacctgtaattccagccactcaggaaggtgaagcaggaggatcacctgaacccagagaggtcaaggctgcagtgagtcgtgatcatgccactgcactctagcctg

SEQ ID NO: 1038990 - DNA, 120 bp, Artificial Sequence
  ENSG00000249700_18 (sequence is synthesized)
gcggcgcgggccctcctcccattggatccggcgctcccggcaggcctacagaattgggcatgaaacagcaaaggatggcctctgcttccaccaccatcagaaatgttatattttcaccag

SEQ ID NO: 1038991 - DNA, 120 bp, Artificial Sequence
  ENSG00000249700_19 (sequence is synthesized)
tgcaccataatgtagcagtctctccataatgtagcaggtgaggtatcacctggagttcttcgtctcatgaccaagaaaattaaggagcgtggatgcaaaggatgaagttgcagcgaaagt

SEQ ID NO: 1038992 - DNA, 120 bp, Artificial Sequence
  ENSG00000249700_20 (sequence is synthesized)
catggcccagtgtgactgcaagagctctagcatccaagttcccagcagaaggatggaggactggctggaaaaacaaggagacacagggtatgcatcagatatgaaatttatgtcatacaa

SEQ ID NO: 1038993 - DNA, 120 bp, Artificial Sequence
  ENSG00000249700_21 (sequence is synthesized)
tttctttaccaatagataagactgaaagcaacaccagccagtcttgggaaatataaagtcacaaataaattttgataatttttcatttcgtaaaggatctttctgctgatgcagctgtta

SEQ ID NO: 1038994 - DNA, 120 bp, Artificial Sequence
  ENSG00000249700_22 (sequence is synthesized)
ttttttccccttactgcgcatgtgtcaggggatggaattttccactgcagaagtatctgggcaagtcatctgggtaggctttcatatctgtgtggctgtgggaatgtcttagtcaaggcc

SEQ ID NO: 1038995 - DNA, 120 bp, Artificial Sequence
  ENSG00000249700_23 (sequence is synthesized)
acctgtgcagatccccttatctgtgcctgcagcttgatttttcaggctgttcttttgtttgaaagaatttaaccaaggacccaccctaactgatgcctgaaaggtttcttcctttctcct

SEQ ID NO: 1038996 - DNA, 120 bp, Artificial Sequence
  ENSG00000249700_24 (sequence is synthesized)
ctctcagtatcttcccttgtggactacaccagtgtcgaaatgttcttgctaaaaatgatgcagggagaaagacaaagttacaaagttggcatccacaatttttccatcttgccccacttc

SEQ ID NO: 1038997 - DNA, 120 bp, Artificial Sequence
  ENSG00000249700_25 (sequence is synthesized)
gaggtgcggcgcgggccctcctcccattggatccggcgctcccggcagggggtgacctttatcttcatggcccagtgtgactgcaagagctctagcatccaagttcccagcagaaggatg

SEQ ID NO: 1038998 - DNA, 120 bp, Artificial Sequence
  ENSG00000249700_26 (sequence is synthesized)
atctgtatatgtatctgtttttaggattattttttgaactggttccaacatcttagtggttcctttattagtgagttaagtaaaatctttggcacatgttcattttatatttatatgaga

SEQ ID NO: 1038999 - DNA, 120 bp, Artificial Sequence
  ENSG00000249700_27 (sequence is synthesized)
gggccctcctcccattggatccggcgctcccggcaggatgggctgcccacactccagggctttctcacaggaaggactcctggccaaattcagtcatctcaacatatgaggcagtgagga

SEQ ID NO: 1039000 - DNA, 120 bp, Artificial Sequence
  ENSG00000249700_28 (sequence is synthesized)
cttctgggctacagctgcaggatgctgaagcaccagctgctgagcatgcagtggttcaggggcaaggcagcaaagctatttggcagaagatgtaacataaatggagatagagcattggcg

SEQ ID NO: 1039001 - DNA, 120 bp, Artificial Sequence
  ENSG00000249700_29 (sequence is synthesized)
agactgagtttcaggagtggaaacactcaaagcatcatcttccactttcttctccggctgctaggaagaagggaaaaacacagaccttctgaggacctgcggagcaaaccactggcttca

SEQ ID NO: 1039002 - DNA, 120 bp, Artificial Sequence
  ENSG00000249700_30 (sequence is synthesized)
gaaaagcaaacagggacttccctctgcgcagcaggaagcagttagcctagtcggaggcttgactgaagaaacaaatgagggaaggcagaagttgagacgcagccagtagaggaaactccg

SEQ ID NO: 1039003 - DNA, 120 bp, Artificial Sequence
  ENSG00000249700_31 (sequence is synthesized)
atgggaacaatcacaggaactaagcggcaacaaaatggctccccaccccctctgcaaatcccaactccatgcaagcactctcccttccctcattttcttttctttttttttgagatggag

SEQ ID NO: 1039004 - DNA, 120 bp, Artificial Sequence
  ENSG00000249700_32 (sequence is synthesized)
gtgtaagcgaccacgcccggccttttaaaatcgacttgagtctcatctcctgaaatgcaaaatgcattgggcctgtctcttacttctgcatgtctcataatgcttagcacagcacaagcc

SEQ ID NO: 1039005 - DNA, 120 bp, Artificial Sequence
  ENSG00000249700_33 (sequence is synthesized)
ccgagagcgcatcatacaccctggggtggggagctcctggcagggctggatccactcaccattcctgccatccattggcacttggctcagcacagttaggccaacaaggacataatagac

SEQ ID NO: 1039006 - DNA, 120 bp, Artificial Sequence
  ENSG00000249700_34 (sequence is synthesized)
aagtccaaaacagtactgcacgacgtgaatcatgacattggagaagacactgacgtagaggcactcgaagagtcttcgtaagctgtgcagccacagaaatactagcactaagaatgcaga

SEQ ID NO: 1039007 - DNA, 120 bp, Artificial Sequence
  ENSG00000249700_35 (sequence is synthesized)
cagtgccagctcccctcctacaattcagaaggcaacagggtcagcatttctcttctgggattaatccaaagttttgtttttctgtactgttaagcaaagtattaaatcccatctaacatc

SEQ ID NO: 1039008 - DNA, 120 bp, Artificial Sequence
  ENSG00000249700_36 (sequence is synthesized)
catggcccagtgtgactgcaagagctctagcatccaagttcccagcagaaggatggaggactggctggaaaaacaaggagacacagggtatgcatcaggctggagtgcagcagcatgatt

SEQ ID NO: 1039009 - DNA, 120 bp, Artificial Sequence
  ENSG00000249700_37 (sequence is synthesized)
ggagccaagggggaaccctaaaaagctgattcaagtaagagaaccaaggatcatgcaattccacatggccacctcgaagcaggaatccgttaatgatagtaaaggactgatgaaaatcca

SEQ ID NO: 1039010 - DNA, 120 bp, Artificial Sequence
  ENSG00000249700_38 (sequence is synthesized)
gactggaatcacacatacactgccacaagaggtctgcagtgaaggtcccaaagtcccagacagatctttctgctgatgcagctgttaagagtgtttcataaactgtgacaacactaagag

SEQ ID NO: 1039011 - DNA, 120 bp, Artificial Sequence
  ENSG00000249700_39 (sequence is synthesized)
ttgctctgttgtccaggctggagtgcagtcgtgcagtcatggctcactgtagtctcaaccttccaggcccaggcaatcctcccatctcaaactgcccagtggctagtaccacagtgaaga

SEQ ID NO: 1039012 - DNA, 120 bp, Artificial Sequence
  ENSG00000249706_0 (sequence is synthesized)
ggcttttgggttatgttcctattaatataaatcatcgtctccatttcagaagaagaaccaaaacacatctgatctgctcttaaaggaaactcaattgtgacaagcagaggaaactaaaga

SEQ ID NO: 1039013 - DNA, 79 bp, Artificial Sequence
  ENSG00000249706_1 (sequence is synthesized)
ctgcctcccaggtgcaacgcctggcccatggcaggagctcaggaaatgtcagataaatgattgaatttacaagaacaag

SEQ ID NO: 1039014 - DNA, 120 bp, Artificial Sequence
  ENSG00000249706_2 (sequence is synthesized)
caggaaatgtcagataaatgattgaatttacaagaacaagcccaacagttaagaaaacttcagctcctgcctcctgcccatgcagcccagaagggccagtttcatgccatgtttgattgc

SEQ ID NO: 1039015 - DNA, 120 bp, Artificial Sequence
  ENSG00000249706_3 (sequence is synthesized)
gggagtcttggcacacagttggtgctcagtggacattggaatgtttcaacagccatgtctccttgttgctgaactgagcaacatccatggacatccatgggacagatggttctctctcca

SEQ ID NO: 1039016 - DNA, 120 bp, Artificial Sequence
  ENSG00000249706_4 (sequence is synthesized)
gcatggaatcagaaggcctggtttcaagttccaggactgtgcctcattcattgtgtgttgctggctgagtcacttaacctgcctgagcaaagaacagagaagcagtcagatttggaatcc

SEQ ID NO: 1039017 - DNA, 120 bp, Artificial Sequence
  ENSG00000249706_5 (sequence is synthesized)
actggggaggcagggtttgtaaaacttgttgattaaatgaacaagagtatgtgggaatgagaagaatcaaaatctaagccaagcatctggcctgaacagctgggtggtcagtgaacccat

SEQ ID NO: 1039018 - DNA, 120 bp, Artificial Sequence
  ENSG00000249708_0 (sequence is synthesized)
actgcaaggagatcggggctgacgtggctggccaattcacaacctgtctctaatgtattcccatttgagaaactgatcatggacagctaagtgaaatgtctgacttctctcctggaggct

SEQ ID NO: 1039019 - DNA, 120 bp, Artificial Sequence
  ENSG00000249708_1 (sequence is synthesized)
tatcatctatatccctgctaacttcctgtactgcacatattggaggactcagtcaccgacttgcctgtggttgctatgagtcgcctacagaactgaaaatgggaagcagaactaggctgg

SEQ ID NO: 1039020 - DNA, 120 bp, Artificial Sequence
  ENSG00000249708_2 (sequence is synthesized)
ttgtactcctaaccacaaggacactctcctcctcaaatgaaaaggctctaattaaaaggcaggaaagatcaggtatctctggagttcacttttaaaattgtcaaaaaaaacctcaaagtc

SEQ ID NO: 1039021 - DNA, 120 bp, Artificial Sequence
  ENSG00000233021_0 (sequence is synthesized)
ctcaagttctggctggcacagctgtagtcacagacttaaaacagccatctcattcgttttgtgcagttttacagttgtttatggcagaggtgtgatttgggtccctgttatctcatcatg

SEQ ID NO: 1039022 - DNA, 120 bp, Artificial Sequence
  ENSG00000233021_1 (sequence is synthesized)
gctagaagcagaagttttggcaaattattcttgtatctttacatttgaaaattaagggaaagtttcacccatggaatattagcattgtgacaatgctaatgagagtttctccagaaacta

SEQ ID NO: 1039023 - DNA, 120 bp, Artificial Sequence
  ENSG00000233021_2 (sequence is synthesized)
agatctaaccactgttaccaacaaccaagaaaaatagagccgcctggacagcttccgtgtggacgtctgaaacggagagagctcagtcactcagtgctcagctgaggtcccagaggccaa

SEQ ID NO: 1039024 - DNA, 120 bp, Artificial Sequence
  ENSG00000233021_3 (sequence is synthesized)
gctgcaccctcctctctgtccctgcagcacagttcatccaccttctgaaactcaccaacagatgggtgggcgaggaaagaaaatcagtgtttacaattccagtaaagacattaaaattca

SEQ ID NO: 1039025 - DNA, 120 bp, Artificial Sequence; identical to SEQ ID NO: 883879
  ENSG00000233029_0 (sequence is synthesized)

SEQ ID NO: 1039026 - DNA, 120 bp, Artificial Sequence; identical to SEQ ID NO: 883880
  ENSG00000233029_1 (sequence is synthesized)

SEQ ID NO: 1039027 - DNA, 120 bp, Artificial Sequence
  ENSG00000233029_2 (sequence is synthesized)
gcaggctccaggaatgcaaataatttctcactgggttttggcgggggcgcggagctgcggagaagcgcgcgcccgacagctttcgccgcagctgggtccccgggcgctggcggctgcggc

SEQ ID NO: 1039028 - DNA, 120 bp, Artificial Sequence
  ENSG00000233029_3 (sequence is synthesized)
ccccagatacgggcggaggctgcaatatgcacatgcggccacagtgtggctccaggggcccgccgcgggacacgctcggagcgcgacgccccatcccatcatttacggatcaaaccaaat

SEQ ID NO: 1039029 - DNA, 120 bp, Artificial Sequence; identical to SEQ ID NO: 883883
  ENSG00000233029_4 (sequence is synthesized)

SEQ ID NO: 1039030 - DNA, 120 bp, Artificial Sequence
  ENSG00000233029_5 (sequence is synthesized)
tattttgtctccaaactacagcccaagtatgagagcagcgtatcctgaagctaattagtaaccagaaaatcaggaaggtaaagcaaatctctggaggcaagatctggactctatgatatc

SEQ ID NO: 1039031 - DNA, 120 bp, Artificial Sequence
  ENSG00000233029_6 (sequence is synthesized)
gccgcttctccccacttgaagcgtctctttgcagtgccgcacttggagatttggacttaatcgttaaacaaaaagaacagttacattctgccttcctacagggcaggggcctaggactgg

SEQ ID NO: 1039032 - DNA, 120 bp, Artificial Sequence
  ENSG00000233029_7 (sequence is synthesized)
caacatttttgttgtctctagaaatagaggggttatgagagagcctcaaaagagagggcaagaataacacatccatttctcatcatgagttacccccttgtatgcctagaacgcgtatgg

SEQ ID NO: 1039033 - DNA, 120 bp, Artificial Sequence; identical to SEQ ID NO: 883887
  ENSG00000233029_8 (sequence is synthesized)

SEQ ID NO: 1039034 - DNA, 120 bp, Artificial Sequence; identical to SEQ ID NO: 883888
  ENSG00000233029_9 (sequence is synthesized)

SEQ ID NO: 1039035 - DNA, 120 bp, Artificial Sequence
  ENSG00000233029_10 (sequence is synthesized)
tatgacaagggtgatgaaatgtcactcttgggattgctacattatgtaagactctatcttagcagtctggatggaaagtctcctcctgaacttgaagaggtaagctgccacgccaggaga

SEQ ID NO: 1039036 - DNA, 120 bp, Artificial Sequence
  ENSG00000233029_11 (sequence is synthesized)
gggcctgcaagagtgccacaaggcaagggcctctaggagctgagagtggccccccactgatgggcagcaagaaagcaggaacctcagtcctacaaccacaaagaactgaattctgccagt

SEQ ID NO: 1039037 - DNA, 120 bp, Artificial Sequence; identical to SEQ ID NO: 883891
  ENSG00000233029_12 (sequence is synthesized)

SEQ ID NO: 1039038 - DNA, 120 bp, Artificial Sequence
  ENSG00000233029_13 (sequence is synthesized)
gaaactggaagatcttaaatgtatgttgttgctaaatttgttacacagcaatagaaaacaaatacactccaactcttgacaaatttgttaataggaccacgcatcctgagacaaacacac

SEQ ID NO: 1039039 - DNA, 120 bp, Artificial Sequence
  ENSG00000233029_14 (sequence is synthesized)
atcaatgatatcactagcaaaacaagctccaagtcaatgggtttttcctttcgacaaacacctctacacataaccaaaaatgcttcaactacttttcttttctccagaggcagttggttt

SEQ ID NO: 1039040 - DNA, 120 bp, Artificial Sequence
  ENSG00000233029_15 (sequence is synthesized)
ggctaagtaaaaatggggttcttaggagactaaggcggaaaagagacaatagtgcctttttcccctccagaacttatctaagaatggaagacaggtgtttctatgctatacatagcatga

SEQ ID NO: 1039041 - DNA, 120 bp, Artificial Sequence; identical to SEQ ID NO: 883895
  ENSG00000233029_16 (sequence is synthesized)

SEQ ID NO: 1039042 - DNA, 120 bp, Artificial Sequence
  ENSG00000233029_17 (sequence is synthesized)
tgctttatatatccaaaagagtgggaaatgctgtcacatctccatcagaaactgtcaaacactagtaatggtagaaaatatctgaatgacacaattaataggcttgattttgtggatgct

SEQ ID NO: 1039043 - DNA, 120 bp, Artificial Sequence
  ENSG00000233029_18 (sequence is synthesized)
ctactttagaaagaaaattcatatgcttttcaaacacacatgcaatattagaaaaattaagtgtgaactagaccacaaagcaattttcaacaaatactaatgaactgataccatgtttaa

SEQ ID NO: 1039044 - DNA, 120 bp, Artificial Sequence
  ENSG00000233029_19 (sequence is synthesized)
cacaaattctaaccaaagtgctataacattagaaatcaataacaaaaaactaccctccaaaaaacatctaagtaattcatgaataaaataatgtataatggaaatttatgagtttttaaa

SEQ ID NO: 1039045 - DNA, 120 bp, Artificial Sequence
  ENSG00000233029_20 (sequence is synthesized)
cttaagtggtaatggtagtattatatatcaaaactcaagagatgcagcttttagcagacattactaatttcctactcaacaatcattcccctaccttcatgactttggtgtcagccatat

SEQ ID NO: 1039046 - DNA, 120 bp, Artificial Sequence
  ENSG00000233029_21 (sequence is synthesized)
gattagggctcgggtccaccaaccagctgcattttcttggtcttagcatatactgattaaattgaaatgactaagagtcagtgagctgcaattgaattccccatggctgactgtggcgaa

SEQ ID NO: 1039047 - DNA, 120 bp, Artificial Sequence
  ENSG00000233029_22 (sequence is synthesized)
acattttaaaatagggcatagacagcaccaaccaaaaatgttggtgtattgtactgtagtaaaattaacaagtcttgttcattgaaaacaaacaaaactttaatattatagtgaaaagaa

SEQ ID NO: 1039048 - DNA, 120 bp, Artificial Sequence
  ENSG00000233029_23 (sequence is synthesized)
aagccacagagtgggagaagatatttaagactcttgaaaaaggacttatatccagaatatataaataactcctataagtcagtaagaaaaagacagacaatagaaaaattatcaaaaaga

SEQ ID NO: 1039049 - DNA, 120 bp, Artificial Sequence
  ENSG00000233029_24 (sequence is synthesized)
ccttacaaaaaaggatacccaaataggtaataaatgtgaaaaatggtcaatatcatagtcattagggaaatgcttaatttgcatttgtatatccaaaagagtgggaaattgtaacatacc

SEQ ID NO: 1039050 - DNA, 120 bp, Artificial Sequence
  ENSG00000233029_25 (sequence is synthesized)
tccatcagatactgttgaacattagtaatggtagaaaatatttgaaacatgtaaacaaaaatatccacagcattactatttgtaagtggtcaaaaccagaagcaacccgagcccctcagc

SEQ ID NO: 1039051 - DNA, 120 bp, Artificial Sequence; identical to SEQ ID NO: 883905
  ENSG00000233029_26 (sequence is synthesized)

SEQ ID NO: 1039052 - DNA, 120 bp, Artificial Sequence
  ENSG00000233029_27 (sequence is synthesized)
tcccataccgtagccctttatatgaagttcaaaaacaggcaaaaaacctatggtgctggaagtcagtgtcaggggtggactagaaatgggcaagaaggagtttctgaggtgctggaaatg

SEQ ID NO: 1039053 - DNA, 120 bp, Artificial Sequence
  ENSG00000233029_28 (sequence is synthesized)
tctaaaatagatctggatgctgtttactttgaaaaaatttactgtggcgtacatttatggcttattgtacataagttatatttcaatgaaaattcacattaaaatgtaatgtaaaaaaga

SEQ ID NO: 1039054 - DNA, 120 bp, Artificial Sequence
  ENSG00000244493_0 (sequence is synthesized)
caccatccatgtaagatgtgacttgctcttccttgcctcctgccctgattgtgacgcctccccagccatgtggaactcagaggaagctccgtttagaaatagctccttggtcacatgctg

SEQ ID NO: 1039055 - DNA, 120 bp, Artificial Sequence
  ENSG00000244493_1 (sequence is synthesized)
ttggtttctttgacttgcctggtgttgtgaggaggggtcctccttcagattttcatccaggtccacgccaactctgttaaacaaaaccaaaaactggtcaatcccctgctgcagaaggaa

SEQ ID NO: 1039056 - DNA, 120 bp, Artificial Sequence
  ENSG00000264340_0 (sequence is synthesized)
tccaagccaagacagggcctttgttgtcggtcgctcctcgtccataaagtttccctttaaaaaggggagaagaatgttcagagaagtgtggacacctctgccatgcgaattacatttgat

SEQ ID NO: 1039057 - DNA, 120 bp, Artificial Sequence
  ENSG00000264340_1 (sequence is synthesized)
tcacaaatgaaagaaaaccagcctcagtgaaccgatcggtagactttgagagccgcctctctgtgcattcttttttttttttttttgatgaagtctcactccgtcacccaagcagaatgg

SEQ ID NO: 1039058 - DNA, 120 bp, Artificial Sequence
  ENSG00000267922_0 (sequence is synthesized)
cactgacctgatgctgcacagagaccaagataactatgagaggaatttaacttatagttcaacttgcagacaagggaaactgaccctccttcttgtccagagattgaagccacattcata

SEQ ID NO: 1039059 - DNA, 120 bp, Artificial Sequence
  ENSG00000267922_1 (sequence is synthesized)
gggactgcagggcccagcatgtctctgcaggaaggcagggcatcccacgatatcaccagctcctctaggagtataggagccaaggagctgctgagacctgctgatcacccactcactccc

SEQ ID NO: 1039060 - DNA, 120 bp, Artificial Sequence
  ENSG00000203635_0 (sequence is synthesized)
attgcccacagccggatccacggtgactaatctccgggaaggcgtccagcgtgagccgtgaggcctgcacctgcgccggacttcaccactcaccaggagtctctgcccgccgcccccagc

SEQ ID NO: 1039061 - DNA, 120 bp, Artificial Sequence
  ENSG00000203635_1 (sequence is synthesized)
gcggttctcttccctgctagacgtaaagtcctggggacaagcacagcccagggcactttctggagagaagatttcgatggggaaagataagagagcatttggatatctacgcactgtcaa

SEQ ID NO: 1039062 - DNA, 120 bp, Artificial Sequence
  ENSG00000203635_2 (sequence is synthesized)
cagaaatgaggcttcaggccaaggcttctaaaatgcaggattcccaaagtggcagtcacataagacgggtccctccatcgccttctagaatattgagaagatcatcacgcctgggactgg

SEQ ID NO: 1039063 - DNA, 120 bp, Artificial Sequence
  ENSG00000203635_3 (sequence is synthesized)
ctcacagcactgatctttttcttgttagcagagactccaggaagcagatgagcagacctatgggcctgctatgtgcaccgcggcccacactgccgcctgcctgggatcctgcatcacccg

SEQ ID NO: 1039064 - DNA, 120 bp, Artificial Sequence
  ENSG00000203635_4 (sequence is synthesized)
agtcttcctgcggaccaccctgggtggtgcacatgcggtcatcattgtgcaaaggaagctttagttctataatgaaagcccctttagtaagtgatgctccttgaagactcggtcagcgtc

SEQ ID NO: 1039065 - DNA, 120 bp, Artificial Sequence
  ENSG00000203635_5 (sequence is synthesized)
tcgttcacctctttatccccagacttagcacaattccagccccaaatcggcaacggacctttgaccaagtgacatgtcagtgcttcagggagcttcactgatcaggacagaagtgagtga

SEQ ID NO: 1039066 - DNA, 120 bp, Artificial Sequence
  ENSG00000203635_6 (sequence is synthesized)
ggtgtgacgacatcctgtctgactgctgggccttaccggtgtgttctctgctggagccgtgacagtttgagttgaggacattttacatcaatcactgaactgcacgaaagatggaaatcc

SEQ ID NO: 1039067 - DNA, 120 bp, Artificial Sequence
  ENSG00000203635_7 (sequence is synthesized)
agcaagggaccccgtcggacctgattgaccgcagagctaccttttgctctttctggatgccacacggcctcctcctcccacctgtccttggagcttgtgttggtccactttcatgctgct

SEQ ID NO: 1039068 - DNA, 73 bp, Artificial Sequence
  ENSG00000203635_8 (sequence is synthesized)
agaggttcggaagttgaaaggcacgtcttacatggcggcaggcaagagagaatgagagccaagcaaagggggt

SEQ ID NO: 1039069 - DNA, 120 bp, Artificial Sequence
  ENSG00000203635_9 (sequence is synthesized)
ggcggaagttgaaaggcacgtcttacatggcggcaggcaagagagaatgagagccaagcaaagggggtttccccttatagaaccatcagatcagctgggcgcagtggctcactcctgtaa

SEQ ID NO: 1039070 - DNA, 120 bp, Artificial Sequence
  ENSG00000267924_0 (sequence is synthesized)
attgtgaactgtgcatgtgagggatgtaggctgtacactatttatgagaatctaatgccttaggatctgtcactgcctctcatcacccccagatgggaacatttagttgcaggaaatcaa

SEQ ID NO: 1039071 - DNA, 85 bp, Artificial Sequence
  ENSG00000267924_1 (sequence is synthesized)
gacgggaatccagaacaacgccgtatggacccctctgcaggtagcgcggaaaagctgcagcattgttactgtaagcaaataggtg

SEQ ID NO: 1039072 - DNA, 120 bp, Artificial Sequence
  ENSG00000267924_2 (sequence is synthesized)
gcggaaaagctgcagcattgttactgtaagcaaataggtgtgagaccccaagccaggagagacccatgacctcaggtgccatcaggagaacttaaacctgaagaagggatcagctatccc

SEQ ID NO: 1039073 - DNA, 120 bp, Artificial Sequence
  ENSG00000267924_3 (sequence is synthesized)
acaacccagtgcccctcccagacagcacaacagaatctaaggggctacaggatgattccaggaacagtgcactacaggaccacgttgcaggaatcgtgccttggattcaccacagttggc

SEQ ID NO: 1039074 - DNA, 120 bp, Artificial Sequence
  ENSG00000267924_4 (sequence is synthesized)
tgaaactggtagcccaagacaagtggaccagccagaaggacccaggccatccaacccagctgatcctatgatgggaccgaggtgccaatgaagactacaacagccctgctctggtcactt

SEQ ID NO: 1039075 - DNA, 120 bp, Artificial Sequence
  ENSG00000267924_5 (sequence is synthesized)
cagaagctgaccagtctacacacggtggaagcttgaggaaacaacagccctgttctagtcaccccagaagctgactcgtctatgtacggccaaagctcgaggcatcatcaggaaagtaaa

SEQ ID NO: 1039076 - DNA, 120 bp, Artificial Sequence
  ENSG00000267924_6 (sequence is synthesized)
agtggttagaaatcttacgtctggaaactttccttgtaatattaattgttttactattgtcctgttgctttgctcaacctcctcctctaggaaaggacctcttctctccatgctaggtat

SEQ ID NO: 1039077 - DNA, 120 bp, Artificial Sequence
  ENSG00000267924_7 (sequence is synthesized)
aaacatgttattcattacttttgctattccctttaaccacgttaaagggagaatccttagaaggatgcccccactgcactgacaatacgtagacaggaagcaccatgactagaaccctgt

SEQ ID NO: 1039078 - DNA, 120 bp, Artificial Sequence
  ENSG00000267924_8 (sequence is synthesized)
tctaccacttattataggtatgcagggacccattgaggaacttgtacacacaaccagataacctactcaatctgcaacccaggaagtggccagccttatatatgttatgacccaaagtcc

SEQ ID NO: 1039079 - DNA, 120 bp, Artificial Sequence
  ENSG00000267924_9 (sequence is synthesized)
ctagttggaggttcatgtcaggtcaaaagaaataaaaggggaataaccataaagaattaaagataatgaatggccacctgaaagaataatgcaatactatggcccagccacatgggcaga

SEQ ID NO: 1039080 - DNA, 120 bp, Artificial Sequence
  ENSG00000267924_10 (sequence is synthesized)
tggatcatggagataccgcacccctatttacatgctaaatcacatcatatggttgcaggcagtactggagatcattacgaatgatactgcaagagccttaaatttgctggctcggaaatc

SEQ ID NO: 1039081 - DNA, 120 bp, Artificial Sequence
  ENSG00000267924_11 (sequence is synthesized)
tacagaaatgagaaatgccgtttatcaaaatagactggctttagactacctcctagcccaagagggaggagtatgtagaaagttcagcctaactaattgctgtctaaaaatcgatgacaa

SEQ ID NO: 1039082 - DNA, 120 bp, Artificial Sequence
  ENSG00000267924_12 (sequence is synthesized)
cggaaaggtcgtcaaacaaaaagctgcaagaatccaaaaattagcccatattccagtcaagacttagaaaggatggtctccagattccctcttcaggggttagttctcatcccttgcaga

SEQ ID NO: 1039083 - DNA, 120 bp, Artificial Sequence
  ENSG00000267924_13 (sequence is synthesized)
atttaaaaccttagtaagaatagttctagccatattaggagtctgcctcatactcccttgtctcttacccctccttgtcaaaaacatctaaatggccacagaggctcttgtaaccaggca

SEQ ID NO: 1039084 - DNA, 120 bp, Artificial Sequence
  ENSG00000267924_14 (sequence is synthesized)
aactactacacaactaatgaccctaactaaatatcagcctttgccaaatgaagaaaacttgccttttcatgaaaaattaagtcatagtgatgctattaaacgtcatttataaaaagcgtc

SEQ ID NO: 1039085 - DNA, 120 bp, Artificial Sequence
  ENSG00000267924_15 (sequence is synthesized)
aaagggggaaatgaagtagaggatgtaaagaaaactagtccttatcccctctcctcccatagagcaatgatgggaaaaacaatttttcctcctctcctagcttcctcctccccttagtaa

SEQ ID NO: 1039086 - DNA, 120 bp, Artificial Sequence
  ENSG00000267924_16 (sequence is synthesized)
tccttccttagtgaaactcaaggttacttcacaacaactccagtttctctgttctggataacatgacaaggttacaagacgagcttgagtaagacatgtaccagctgcaaggcctgcttt

SEQ ID NO: 1039087 - DNA, 120 bp, Artificial Sequence
  ENSG00000267924_17 (sequence is synthesized)
agtttgataaattcatgtttcccttccagtgaagctgcaaggtcagcataacctgtcactgtttgattaactgcctctgttctgcttctgtgagcctgcttacttgcaccacgagctttg

SEQ ID NO: 1039088 - DNA, 120 bp, Artificial Sequence
  ENSG00000267924_18 (sequence is synthesized)
cgccactagatggcccatgcatgtataaaagacaagccctgtcttagtccaaggctcagctttttggatgcgaatccattgtgccagggtgcaccttaataaaatcctccagtttcacct

SEQ ID NO: 1039089 - DNA, 120 bp, Artificial Sequence
  ENSG00000275248_0 (sequence is synthesized)
ctgagttgcttcctgcagaagttagcccaatagcatataaccgtgcctcttttttccccattctcttcagcgctgttttaatagtgttaaatatttgtacctcgtgatagtgcaaaatta

SEQ ID NO: 1039090 - DNA, 120 bp, Artificial Sequence
  ENSG00000275248_1 (sequence is synthesized)
tgtccccatgtttcaatcctctctcctttgattactagaaatgttgaagtgttttcattattaagcacaggtgtaaatccatttctacagttttgctaacttttcttggtttggtaatgt

SEQ ID NO: 1039091 - DNA, 120 bp, Artificial Sequence
  ENSG00000275248_2 (sequence is synthesized)
atttttctgaatcattagataagttataattttgttaattatatgtgttggcccacagaagtttaaaattgctatgtactcaaaatttttccattgtggtttacttaatacattttcaca

SEQ ID NO: 1039092 - DNA, 120 bp, Artificial Sequence
  ENSG00000275248_3 (sequence is synthesized)
cttagaaatttcttccttgtctggtgttgcttatgctttcttagaatttattatgtccttatgtatttaatgcttttattttgataaatggtgaaaataaaaatcaaaacacttcttccc

SEQ ID NO: 1039093 - DNA, 120 bp, Artificial Sequence; identical to SEQ ID NO: 650129
  ENSG00000275249_0 (sequence is synthesized)

SEQ ID NO: 1039094 - DNA, 120 bp, Artificial Sequence; identical to SEQ ID NO: 650130
  ENSG00000275249_1 (sequence is synthesized)

SEQ ID NO: 1039095 - DNA, 120 bp, Artificial Sequence; identical to SEQ ID NO: 650131
  ENSG00000275249_2 (sequence is synthesized)

SEQ ID NO: 1039096 - DNA, 120 bp, Artificial Sequence
  ENSG00000275249_3 (sequence is synthesized)
agaggaagataatttcttttgatggatgcattgcacagctcttcttcttacactttgctggggcttcggagatgttcttgctcacagtgatggcctttgacctctacactgctatctgcc

SEQ ID NO: 1039097 - DNA, 120 bp, Artificial Sequence; identical to SEQ ID NO: 650133
  ENSG00000275249_4 (sequence is synthesized)

SEQ ID NO: 1039098 - DNA, 120 bp, Artificial Sequence; identical to SEQ ID NO: 650134
  ENSG00000275249_5 (sequence is synthesized)

SEQ ID NO: 1039099 - DNA, 120 bp, Artificial Sequence
  ENSG00000275249_6 (sequence is synthesized)
gtgtttgattgctctgttaatgtcctatgccttccttctggccttgctcaagaaactttcaggctcaggtgagaataccaacagggccatgtccacctgctattcccacattaccattgt

SEQ ID NO: 1039100 - DNA, 120 bp, Artificial Sequence
  ENSG00000275249_7 (sequence is synthesized)
ggtgctaatgtttgggccatccatctacatttatgctcgcccatttgactcgttttccctagataaagtggtgtctgtgttcaatactttaatattccctttacgtaatcccattattta

SEQ ID NO: 1039101 - DNA, 120 bp, Artificial Sequence; identical to SEQ ID NO: 650137
  ENSG00000275249_8 (sequence is synthesized)

SEQ ID NO: 1039102 - DNA, 120 bp, Artificial Sequence
  ENSG00000213600_0 (sequence is synthesized)
caagggcccacaggcccaccacaggattggtgaccagcattgaggggacactgagaaaagttcttcaggctgtttcttcccagccccgccacaggctatgctggcacctgagagagttct

SEQ ID NO: 1039103 - DNA, 120 bp, Artificial Sequence
  ENSG00000213600_1 (sequence is synthesized)
ccctgtgcggaactcctgctgagcagagtggctttgtattcttccttccaactcaggctgttggtgcactgctagagggctgctgtctctgacactgcagtagccacagtcgagcttgag

SEQ ID NO: 1039104 - DNA, 120 bp, Artificial Sequence
  ENSG00000213600_2 (sequence is synthesized)
ctggctggtccagcaggggctgctccgcagccctggggctcagaccagagcaatgctgtgagagtcctggtactggccagtgcagagactgcacatagcaagggctcaatgaagtttacc

SEQ ID NO: 1039105 - DNA, 120 bp, Artificial Sequence
  ENSG00000236013_0 (sequence is synthesized)
aggttaagtaaagggcactgaacaagtgaagctgtgctgaaaacaacagtggccaaggcagagatattcttatacctcaacccgttgtgcagatggaagtctggccaaaaaaccataaag

SEQ ID NO: 1039106 - DNA, 120 bp, Artificial Sequence
  ENSG00000236013_1 (sequence is synthesized)
catcaagtctgactattggtttgccatggctctttgaaacagttactcttgtcctcattgtagagatggcgatactaaggcagaatatgtttctcttgctcatcggaccaaagtttggaa

SEQ ID NO: 1039107 - DNA, 120 bp, Artificial Sequence
  ENSG00000236013_2 (sequence is synthesized)
tcacgtctcatcttcgtgtattttgaaaatctaacaaatctagaagatggtgtgaatgtgcatatatttagacaatttaaaattttgtcaaggacatgaaagaaagacatgttttctaac

SEQ ID NO: 1039108 - DNA, 120 bp, Artificial Sequence
  ENSG00000236013_3 (sequence is synthesized)
ttaacattgcttaaagaactacagaactatggtggcaaagtgagtatgtcatacaaggtaggctatgtaaatctatgtgtgataattgtgtactattcattgataggggatgtactttct

SEQ ID NO: 1039109 - DNA, 120 bp, Artificial Sequence
  ENSG00000236013_4 (sequence is synthesized)
acttaacacatgttctcctcctagataccttacctataggtacagaagtatctattatattggtttaggctgattctaagggatatttctcttaatgtaagctgaagcagagagaaactc

SEQ ID NO: 1039110 - DNA, 120 bp, Artificial Sequence
  ENSG00000236013_5 (sequence is synthesized)
tattggcagatgcaagtgacttttttaacacaatgagttactgaaggatggattcttaagctatggaatattgctgaaatcaaagctgctataatgcagttatactttcataagtctgaa

SEQ ID NO: 1039111 - DNA, 120 bp, Artificial Sequence
  ENSG00000236013_6 (sequence is synthesized)
tagaaaaaaaagtcacatcatggaaaagagaactcaatcaaatatcggacttccacactatttatgtgtactatgtgtactatgtgttcttaataaatattctcataaatacctgcaaaa

SEQ ID NO: 1039112 - DNA, 120 bp, Artificial Sequence
  ENSG00000236013_7 (sequence is synthesized)
atggcgatactaaggcagaatatggctagcctggacttctttttgtggagactggattccaagattgaaagtagaagctacatgttttctccaagcagggctttcagacttcacttctgc

SEQ ID NO: 1039113 - DNA, 120 bp, Artificial Sequence
  ENSG00000236013_8 (sequence is synthesized)
aacattttattgatgaaagcaagtcacaagaccagactgattcaaggggtggagaaatagaccctacttcttgatggagggaggagtagagttacattgcaaagggatctggacaaaaaa

SEQ ID NO: 1039114 - DNA, 120 bp, Artificial Sequence
  ENSG00000236013_9 (sequence is synthesized)
accacaatccccagcgcaactgcctgttagctggatccagaaatgtctacgactactgcaatgccacttggccttaggggtgatgtgacccagtgtaaagagatggtggtcttaaccaat

SEQ ID NO: 1039115 - DNA, 120 bp, Artificial Sequence
  ENSG00000236013_10 (sequence is synthesized)
cacagttaagatagtttagttttggaaggtataaaaaatatgtaacaacatgaatgcacttttagggtcagacaagagacttggaaagagcctgcaaaatggaggagccctgaggcctaa

SEQ ID NO: 1039116 - DNA, 120 bp, Artificial Sequence
  ENSG00000236013_11 (sequence is synthesized)
gtctcatgagtgtcaatgcttacctgtatctagacactggcatcccccttttgataaggccaagattgattgttttccttttctacctaccctatatctaatccatgtacaaacactgtt

SEQ ID NO: 1039117 - DNA, 120 bp, Artificial Sequence
  ENSG00000236013_12 (sequence is synthesized)
gacacacaaaagaaccctaaattcaacaatctgtgaagaatttttgcactaacatgttagttcaaaaactcaacattgcttgctaagactattgcaataaactcctctatgatcccctaa

SEQ ID NO: 1039118 - DNA, 120 bp, Artificial Sequence
  ENSG00000236013_13 (sequence is synthesized)
aggaaatgaagaaacacaggagctttctctctctccatgctcaggtactgaggaaagatcatatgagcacacagcaaaaaggggccttttagaaaatctcacaccacttcctagttggag

SEQ ID NO: 1039119 - DNA, 120 bp, Artificial Sequence
  ENSG00000236013_14 (sequence is synthesized)
caattaaacaatagagaagatgggtattctggagcagaatttaatgaaacagaactccaccatctatggcaagtttgactgcttgagtctccagaggataatagttggaggccactgagg

SEQ ID NO: 1039120 - DNA, 120 bp, Artificial Sequence
  ENSG00000236013_15 (sequence is synthesized)
cccaaattcatcagtccggccattgaaggacacaagtgaacaaaggaggacggcaaagacagaactgtgatattcaaacactcaatagctcacagtgtcggggttcattatgacacttac

SEQ ID NO: 1039121 - DNA, 120 bp, Artificial Sequence
  ENSG00000236013_16 (sequence is synthesized)
taagcacatgccatatttctgacactgtgctaagagtttcatgaacattaactaaattaaccccataaaaacgccattagaaagatgcagttttgtacccccttacacagatgaagaaaa

SEQ ID NO: 1039122 - DNA, 120 bp, Artificial Sequence
  ENSG00000236013_17 (sequence is synthesized)
atccactgtgtgtgtcctggggctgtctatgaacacatgatttcatatttttgtcctctgtaaacttcagcattgatgatgaacattatttcaaggaaatatcccactactttatctctg

SEQ ID NO: 1039123 - DNA, 120 bp, Artificial Sequence
  ENSG00000236013_18 (sequence is synthesized)
acttcactcttatcagctcatttggtgagatcagaatgtgcctgaataactctgaaggttaaaatatgttgactgaattttctgctgccaccattcagcagcagctaggctatgcctctc

SEQ ID NO: 1039124 - DNA, 120 bp, Artificial Sequence
  ENSG00000236013_19 (sequence is synthesized)
gcacgctggggcatatgttgggcttccctttgattaacagggaggaggttgggcttgatgacctctgcaggaggcttccagctctgtaatactaggatcttaattctgacgaatggtcct

SEQ ID NO: 1039125 - DNA, 120 bp, Artificial Sequence
  ENSG00000236013_20 (sequence is synthesized)
gatggtaactagaaccaagctactcccccaccctttagttcaaaacttaagacaaatcacacactcatgcaaaatattttttctccctactaattcatagggtaaaatatcaatttctgc

SEQ ID NO: 1039126 - DNA, 120 bp, Artificial Sequence
  ENSG00000236013_21 (sequence is synthesized)
taagcattgttatgttctgatttagtcatgagtgtgagttgatgaaaggacctatcttatttacactgttgtttggaaattctacggggattttgaactgggggaaggacacagcgggaa

SEQ ID NO: 1039127 - DNA, 120 bp, Artificial Sequence
  ENSG00000236013_22 (sequence is synthesized)
gtttggttccagctcagtgaatgacatgtttgtactggacaatgtagcatagtttctcctaagcttccaatctgggcatcagctgactacactcacaaaataagctgatgatatttagat

SEQ ID NO: 1039128 - DNA, 120 bp, Artificial Sequence
  ENSG00000236013_23 (sequence is synthesized)
ttaacaaagtgattttgtgtagtttcttttgttaaattagtttttattgtcattccaatgccttgattcttggttcataggaagaacaataacctcatttgattgtaattaaataagggg

SEQ ID NO: 1039129 - DNA, 120 bp, Artificial Sequence
  ENSG00000236013_24 (sequence is synthesized)
gaaaacattttacttttttgttattattgcttctgaactccgaaggaaggaaatgacatactttaaataaggacagaagattctctgagtggaactatgatagcagttactgtgtatcag

SEQ ID NO: 1039130 - DNA, 120 bp, Artificial Sequence
  ENSG00000236013_25 (sequence is synthesized)
attttcttgagcattaaaatcttcttttagaagtatgtttatcaccctacaaacctttctggaggtttaatgtaaacttggagtagctggtagaggtgctgggatttgaaaaaggtttct

SEQ ID NO: 1039131 - DNA, 120 bp, Artificial Sequence
  ENSG00000232774_0 (sequence is synthesized)
ctcatttctaggggaagaagcataggaataagaatcaaaagattcacattctaatcttggcccagcctccaaacagcagtgtgacgtggtccaagaagtggcgctgccctaaacactcat

SEQ ID NO: 1039132 - DNA, 120 bp, Artificial Sequence
  ENSG00000232774_1 (sequence is synthesized)
tacatcttcacagcatgaacaggaacctgatgaaatgcctggtctaacaggaggatgcagagaaagttatgaagagaggatcctgaggaatttgctcctgggccatgaagatgggaagct

SEQ ID NO: 1039133 - DNA, 120 bp, Artificial Sequence
  ENSG00000232774_2 (sequence is synthesized)
cctcaggatgtcctgtgatagcagcctgacctgtcaaagccatgcgaataccatctgttcagttatataacttgagatctgggaagaattctcaacgtaggatttgctgcccaaatcaaa

SEQ ID NO: 1039134 - DNA, 120 bp, Artificial Sequence
  ENSG00000232774_3 (sequence is synthesized)
tcattttcagaaaggagattaagcattctttgctgggaaaaggagaaattaccagaaaaaattatcatttcactgagtataaacaaacctttgtccaaaatacacaaatgaaaatgacaa

SEQ ID NO: 1039135 - DNA, 120 bp, Artificial Sequence
  ENSG00000232774_4 (sequence is synthesized)
gctcataagaagaacccacaacccacagacaccccctcactcaactagagacctcacccacctgtttgcagagtcacccaccttgggctacttcttttctactatttaatcttctgggaa

SEQ ID NO: 1039136 - DNA, 120 bp, Artificial Sequence
  ENSG00000232774_5 (sequence is synthesized)
aacagaggtcttctatttggagataaaaatgacaaaggagaacctcctgaacagcatccagtttgcttttagctttagccatctctctgacctcagtgctgctggactcagttccaagat

SEQ ID NO: 1039137 - DNA, 120 bp, Artificial Sequence
  ENSG00000232774_6 (sequence is synthesized)
ctaactgtcaaatgctttaggggaaacgggaagagaagtccctggagtaacccatgtgcgcagcctggcactgttttcacttgcctttggaaatgaaggtgcagaaaccatgggaggaac

SEQ ID NO: 1039138 - DNA, 120 bp, Artificial Sequence
  ENSG00000232774_7 (sequence is synthesized)
aagtgcaaagtaaaatcttaattaggaacaatggaattgttaatttaatgaatcttaattttgtttagatcattagcctgcagtataatgtcccaagcagaatttggggtggggagcttg

SEQ ID NO: 1039139 - DNA, 120 bp, Artificial Sequence
  ENSG00000232774_8 (sequence is synthesized)
gtggtggaagaggaagtgctcatttctacagacatgacaagattattaacactaaagaatgacttttctttcatgggaggggaagatatctgacccaccagcagtcagacagaaaccctg

SEQ ID NO: 1039140 - DNA, 120 bp, Artificial Sequence
  ENSG00000232774_9 (sequence is synthesized)
acttgtgattttaacattaccttatatgacccatggtcaccttgtatgaccaaagaaaaccatttatgaaatagctgtccggagttcaagatttaaatggtaactttgtagactaggttt

SEQ ID NO: 1039141 - DNA, 120 bp, Artificial Sequence
  ENSG00000232774_10 (sequence is synthesized)
tctctcatcatctaatttacttgccttaacgcttgtttctttgcccttattcctactggctctcgagtataatatcctgagaatttatgttgaacagcactaattttttcacttggagct

SEQ ID NO: 1039142 - DNA, 120 bp, Artificial Sequence
  ENSG00000232774_11 (sequence is synthesized)
agcacatgtttatgactagtacaagtttataactacaaaaaacagagattttgtcatcttaaactgaatttactgggaataaaatcagtcaattcagaaaagtataacaaaggaaataaa

SEQ ID NO: 1039143 - DNA, 120 bp, Artificial Sequence
  ENSG00000232774_12 (sequence is synthesized)
aatcaccacaactcctactacctgaagattaaatggttaaagtgttttgtatattcttctgtaatttttacacctacatgttttttaaataaaaattaaccctacctataaaccaaacaa

SEQ ID NO: 1039144 - DNA, 120 bp, Artificial Sequence
  ENSG00000232774_13 (sequence is synthesized)
gaagagtgagtctggaaaatactgcccctactttcaaatgggagaaagcctcccttgtactaagtttgcaatcattagaaaactgttgatatacagcaaaagaaactaccatcagagtga

SEQ ID NO: 1039145 - DNA, 120 bp, Artificial Sequence
  ENSG00000258831_0 (sequence is synthesized)
tccaataaaaccaccaattatatgcctttcaaaggatgtcatcttctgaaagcgttccacatggctataatcttattacctctggttgaagtagtcacagaccaaactaaacggaactgg

SEQ ID NO: 1039146 - DNA, 120 bp, Artificial Sequence
  ENSG00000258831_1 (sequence is synthesized)
accaagggaagaggacacagaaggtaaaaggaagccagaccagcatgttctcccactctagtgctcctaccaagaggctttgataagcaatcacaattgtccccagtgacatgaaagaaa

SEQ ID NO: 1039147 - DNA, 120 bp, Artificial Sequence
  ENSG00000258831_2 (sequence is synthesized)
aagtgaagcaccctgtagggatgcatagcatgacatctacgtagacttgggtcatggaaggaaactgtcaccacatacaagttcaagggaaatgttcagcctccaggccgctgaatgaag

SEQ ID NO: 1039148 - DNA, 120 bp, Artificial Sequence
  ENSG00000258831_3 (sequence is synthesized)
ttgaaccagaaatacccacgttgtactccgacatgaacaagaaatagatttctattatattaagcaacagaaattttcagatatatcagttctcgcagcaggaaggatgtattgataatg

SEQ ID NO: 1039149 - DNA, 120 bp, Artificial Sequence
  ENSG00000258831_4 (sequence is synthesized)
gcaacatggatggagctcaaaacatcacatttaatgaaaaaagagacttacataaaaaaattatagactatattattacattcaaatgaagttcaagaacaagcaaaagttgtggaaaaa

SEQ ID NO: 1039150 - DNA, 120 bp, Artificial Sequence
  ENSG00000258831_5 (sequence is synthesized)
tatcagaaaacttgcttctgctggaggggtaggatgggatttgactgggaagaggcctaggggaacatgctggaatgatattaatgttctatttcttgatggaggtttgggttccacagg

SEQ ID NO: 1039151 - DNA, 120 bp, Artificial Sequence
  ENSG00000258831_6 (sequence is synthesized)
tgtatgtatttgctaaaagttagcaaatgtagagttaaggtttgtgttcttccttgtgcaatacattttacaccaaaggaaaggctgtaaacaaatattgaactgtagttaatcatatgt

SEQ ID NO: 1039152 - DNA, 120 bp, Artificial Sequence
  ENSG00000258835_0 (sequence is synthesized)
atgaaggcattaataggaatcttgctgggcttcctgtggatacagatttgctcgcaaatgaaagtggagcagagtcctcacgtcctgatcctccaagagggaagaaattcattcctggtg

SEQ ID NO: 1039153 - DNA, 120 bp, Artificial Sequence
  ENSG00000258835_1 (sequence is synthesized)
ttcaggaatacagcaaaaaagaagactaaaatccgcagtcaaagctgaggaactttatggccacctatacatcagattcccagcctgaggactcagctatttacttctgtgctgtgggga

SEQ ID NO: 1039154 - DNA, 120 bp, Artificial Sequence
  ENSG00000258837_0 (sequence is synthesized)
gagaacaacctctaggagttgagagcagtccctggctgataccaagaaaacaagacttcagttctaaagctgcagaggaatgaaatctgccaataaaaggaatgatcttggaagaggact

SEQ ID NO: 1039155 - DNA, 120 bp, Artificial Sequence
  ENSG00000258837_1 (sequence is synthesized)
atgagctccagtttttcttccagctctcatggaaacaagcactgccacagccccttgatgagccagcagagtccagtcatctggcaacaatgacaggtatctggcatctgagaggaatat

SEQ ID NO: 1039156 - DNA, 120 bp, Artificial Sequence
  ENSG00000258837_2 (sequence is synthesized)
cccccttagattctgcatttccacttgcttgattcagtaattgttttgttttgaatgttgtgtaaatgaatgctacagccctatgcaatttttaaaccactttgctgtgtgtctcatatg

SEQ ID NO: 1039157 - DNA, 120 bp, Artificial Sequence
  ENSG00000258837_3 (sequence is synthesized)
gagctcaacaatgttactgctggcatgagtgcaccataaagcatatgactccctgatgtaacattttaaataaggatacatttctcatccaatgtgacattatgcaggaaaatttcactt

SEQ ID NO: 1039158 - DNA, 120 bp, Artificial Sequence
  ENSG00000235097_0 (sequence is synthesized)
aaacagttgagaacagactccaccttgtaggacagtggcatttctgaaagttcagaacaattccccgagcaactttacctcacaatctcattggaacggctgcatctgtggggccctggg

SEQ ID NO: 1039159 - DNA, 120 bp, Artificial Sequence
  ENSG00000235097_1 (sequence is synthesized)
agagactcagcagcagacagggtctccagagcacacgacaagaggaagaatgcatgaaggtccaccggcagtcgaatcagccaaagcacaagacaaacacaaagtcttgctctgtcgccc

SEQ ID NO: 1039160 - DNA, 86 bp, Artificial Sequence
  ENSG00000235097_2 (sequence is synthesized)
gtgcagtggtgcgaccttggctcactggtttggggcatgttcctgggtgtgtctgtgaggagcaagaaagccagttcaggcagcct

SEQ ID NO: 1039161 - DNA, 120 bp, Artificial Sequence
  ENSG00000235097_3 (sequence is synthesized)
ggcagccttaagtctgtggctgaaggcctgagagaccctggcaaatcactgatataagtccaaaagctgaagaacttggaatctgatgttggaatctgatcttggcccatccttgaagaa

SEQ ID NO: 1039162 - DNA, 120 bp, Artificial Sequence
  ENSG00000235097_4 (sequence is synthesized)
tctgggggtaataaataccctgaacattgatgaacccaaagggaagccagaaggtcagatgtcagctgtcgggaagaaaggctggataggaaataggaaaaagcagggcaaacaaggagc

SEQ ID NO: 1039163 - DNA, 120 bp, Artificial Sequence
  ENSG00000235097_5 (sequence is synthesized)
ttcaaggactgaaacccttaagaaccacttgactctgtctctcaccacctccagccttgatgacacggtgacatatagaagaactgatgccctttgctttgagctgcacaaaaacctggc

SEQ ID NO: 1039164 - DNA, 120 bp, Artificial Sequence
  ENSG00000235097_6 (sequence is synthesized)
gctggacttggagaagctgaaagacaggacccggcaggagcctgaggagctgcaggctgctagcctgtagaccaccgtgctgtgttagccactgcagctgggaccattctgacactcaga

SEQ ID NO: 1039165 - DNA, 120 bp, Artificial Sequence
  ENSG00000235097_7 (sequence is synthesized)
gcctggaaatggctgctccctcctgcctgctatccaagtatcctgtggatacttggcttttctcttgtgggcaacactaacctgaaactctttggggaagggaattgaggaaatgtagtt

SEQ ID NO: 1039166 - DNA, 120 bp, Artificial Sequence
  ENSG00000235097_8 (sequence is synthesized)
aaattgatattttggggaagattaatcttctgctgagtaaaatataacaggttggaggaagatgaaaatggagagagtagagtgtaattaaaagtttgttggaggccgggcacgggatta

SEQ ID NO: 1039167 - DNA, 83 bp, Artificial Sequence
  ENSG00000235097_9 (sequence is synthesized)
tgggcggatcacctgaggtcaggagcttgagatcatcccggccaacatagtgaaaccctgtctctaataaaaatacgtcagct

SEQ ID NO: 1039168 - DNA, 120 bp, Artificial Sequence
  ENSG00000235097_10 (sequence is synthesized)
gactctgtctcaaaaaaaaaaaaaaatttgttgtagtagtccaggtgtccgggtgttgttaccagggcacccatgatgaaataactgggagagtccttttttctgactggttttcttcag

SEQ ID NO: 1039169 - DNA, 120 bp, Artificial Sequence
  ENSG00000235097_11 (sequence is synthesized)
ttctgactggttttcttcagtccctttatctacaggcacaactgctgaagaaaccagatggcctgggatggcaccagagcttttttacccttgaccagatactagagggaattaagaccc

SEQ ID NO: 1039170 - DNA, 120 bp, Artificial Sequence
  ENSG00000235097_12 (sequence is synthesized)
cacaagtgggcacgaactggaactggcgacccctagttgccttcagatcattaacacatcattataatgctaaaattccctgccattttgtgaacatgggttgcatgaagacgtaagttt

SEQ ID NO: 1039171 - DNA, 120 bp, Artificial Sequence
  ENSG00000235097_13 (sequence is synthesized)
atgaattgcctctgcacacctagagtcccaccctgtacaggctaacattcctccctacatgcacccccccacaaacacaccctgcctcccccagtccttagaaaccctatgcctggccgg

SEQ ID NO: 1039172 - DNA, 120 bp, Artificial Sequence
  ENSG00000235096_0 (sequence is synthesized)
ggcaagagaatcgcttgaacccaggagacaatgaagaaagaacatgaaaagaataaagcttggtttcatgtgctcaagagttcacagctagttaagacaggaaaagtctcatatatgaag

SEQ ID NO: 1039173 - DNA, 120 bp, Artificial Sequence
  ENSG00000235096_1 (sequence is synthesized)
gtcaacccccattccacagccacgtgtctgaagaacatatgctttcagaatggcgtttatgatctcaatgccatcttgctgcaagccttccagctaggatgttccctgtagttgaaataa

SEQ ID NO: 1039174 - DNA, 120 bp, Artificial Sequence
  ENSG00000235096_2 (sequence is synthesized)
acggaaaggaagtttctgagttgaagtaaaccgaaaggaaggagggtcacagccccgcggcacagttcccaggatgactgctgtgccactcacaaaatgagccttttgactgactccagc

SEQ ID NO: 1039175 - DNA, 120 bp, Artificial Sequence
  ENSG00000235096_3 (sequence is synthesized)
agcaggacgggactgtcgtttcacgaggtgagctacgggcagacagatgtatccgaatcgcattaattggaacatcttgtcacaggataagagaatttccatttctctgcggatgcctgt

SEQ ID NO: 1039176 - DNA, 120 bp, Artificial Sequence
  ENSG00000235092_0 (sequence is synthesized)
aggacaagggctttggggcacagccctttctcggccggggaggcaggcgaaccgatcgcccgggcactggtgttacccaggcggcgccagcgcgagttggctggtggacaggattctgtg

SEQ ID NO: 1039177 - DNA, 120 bp, Artificial Sequence
  ENSG00000235092_1 (sequence is synthesized)
tgaagaatacagagacagacgttccatttcaaagaaaaaagagcaacacgaaggccctctttaaggagagagtaaacattcactttagtcaccatgtaacaaatgcagacatctctgaga

SEQ ID NO: 1039178 - DNA, 120 bp, Artificial Sequence
  ENSG00000235092_2 (sequence is synthesized)
tcaccatgcagtgaggaagtctaagctggtggcatgaagaggccacatggaaagggctaaaaaaggggccagcctcagtcatcccagctgagcacctggctgggaataaaagaggactcc

SEQ ID NO: 1039179 - DNA, 120 bp, Artificial Sequence
  ENSG00000235092_3 (sequence is synthesized)
gtggatgtccagcccagtaagatgacctcagccccagccaccaactgaccaagcacacaagacatcgtgaggctgcctgctggagcctggccagtgggactgtagagtaactcattgtcg

SEQ ID NO: 1039180 - DNA, 120 bp, Artificial Sequence
  ENSG00000235092_4 (sequence is synthesized)
tgcaggaactcctgggatggtgttgcccagtgacacaatcccagtgtggccatttctgatcccgagaaagcagtcaggagtgggtggatgcagttacagttcatcaagtcctgctagttc

SEQ ID NO: 1039181 - DNA, 120 bp, Artificial Sequence
  ENSG00000235092_5 (sequence is synthesized)
aagtcatgagtcctgaattctccaggaggagccactaaagaaatgcagaagcaggcaatccttgcaataaggccagcaaactgccagtgtgaaggatgcccaggtaacctgcccatgcca

SEQ ID NO: 1039182 - DNA, 120 bp, Artificial Sequence
  ENSG00000235092_6 (sequence is synthesized)
gaacggccaggagatggtggaaccagaatctaagcccacgcccatctgacctcaaagtctgtgctcctgaggttcgcaccgagttgcctcctaagacttgctgaaactggatcacgtcca

SEQ ID NO: 1039183 - DNA, 120 bp, Artificial Sequence
  ENSG00000235092_7 (sequence is synthesized)
tttacccatctctgagagaaatgcaagctttaaaaaaggaaatatttactatggatattttacaatagttccaaaacatgaaagttttaaataagatattcttaaccatcctcaccacat

SEQ ID NO: 1039184 - DNA, 120 bp, Artificial Sequence
  ENSG00000235092_8 (sequence is synthesized)
cttcaggttcccttacagccactgtgttttgacgattgcccattagaaaaaaagactatgctttctgtaggttttaaaggaatggtggtgaaataaggagcattccctgagcagatcttg

SEQ ID NO: 1039185 - DNA, 120 bp, Artificial Sequence
  ENSG00000235092_9 (sequence is synthesized)
cctgcgggcacacctctgagcattggaccaggcgagaagagcccatgtgttggctgctttgggatcccagcactgccaatggcaggtgggctgtggcccagggagagaacctagcctttt

SEQ ID NO: 1039186 - DNA, 120 bp, Artificial Sequence
  ENSG00000235092_10 (sequence is synthesized)
gcattctcttgccccatttgaaaatggagacgatagtggcgccccgctcagtgttattttgaggatttgaatgtatctcagatgtagtacctggaaaaatataagtgctcagtaaatacg

SEQ ID NO: 1039187 - DNA, 120 bp, Artificial Sequence
  ENSG00000235092_11 (sequence is synthesized)
gttgccagataaaatgcaggaaacctatttaaatttaagttttggctggacaatgaatagaataatttttcttagtatgagtatgtccttatatttcatctgctaaatttagcaacctcc

SEQ ID NO: 1039188 - DNA, 120 bp, Artificial Sequence
  ENSG00000235092_12 (sequence is synthesized)
tcagtaaacgatcactacaattgcagaaacgccttatgacagatatagtaaatctgtaaagaaataggaacttgcatttatttttactaagctctgactggttaagataactgggcaaga

SEQ ID NO: 1039189 - DNA, 120 bp, Artificial Sequence
  ENSG00000235092_13 (sequence is synthesized)
gaagatatcttcgactaaacttgcagcacatagagtatagagattcaaatttgaagtcctataggactagaatggccagaggtgaactgtagcgagcttatctaaagaggaccaatttca

SEQ ID NO: 1039190 - DNA, 120 bp, Artificial Sequence
  ENSG00000235092_14 (sequence is synthesized)
aaagttcctcagagacttaaatgggcccacagacccctcctgtgtctttgcataagccagctcgttatatcagttataagttgatttccagagaaatgtaccctggagatccctctccca

SEQ ID NO: 1039191 - DNA, 120 bp, Artificial Sequence
  ENSG00000235092_15 (sequence is synthesized)
cttgaaataggactggccaatccagatgtcccccaggtgatgttggctcaaatggagctccatatattggagaatctattcaagaaaacaagcaaaagtatttgtgactgagttagctaa

SEQ ID NO: 1039192 - DNA, 120 bp, Artificial Sequence
  ENSG00000235092_16 (sequence is synthesized)
tgccagctggtatcttgaacaaacccagatctctaacatgctagtttatttcgtagtgtaaaatgtgtgttactgatgggcagacagctctcattcaagcagtgacagatgtaagctctt

SEQ ID NO: 1039193 - DNA, 120 bp, Artificial Sequence
  ENSG00000235092_17 (sequence is synthesized)
tttgtggccccattgtattcggcgtgtggcttccaagttgcctgggatcatctccacccagactaaggaagaggaaagagcttggacaactgcacttggctggtttttatggatcaggca

SEQ ID NO: 1039194 - DNA, 120 bp, Artificial Sequence
  ENSG00000235092_18 (sequence is synthesized)
aggaattggctccaacacattagctcacattccattggttagaactgggtttctcaactattagtacagggtgagtgtagggttttggcaccatgggcatttgagctggccaaaggctaa

SEQ ID NO: 1039195 - DNA, 120 bp, Artificial Sequence
  ENSG00000235092_19 (sequence is synthesized)
tcagagttagaacaaagccacaaagcctgtgaatggtgtttattgttgtgaggagctgtcttgtgcattgtggaatgttcagcaggatgctctctggcctcagagactcactagattccc

SEQ ID NO: 1039196 - DNA, 120 bp, Artificial Sequence
  ENSG00000235092_20 (sequence is synthesized)
atagaactctcctctctcctctagttgtgacaaccacagttgcctcctctccagacattgctagatgtccccgggaggcaaaattgtcctggttgagaaccactgtgttagaactcggtc

SEQ ID NO: 1039197 - DNA, 120 bp, Artificial Sequence
  ENSG00000235092_21 (sequence is synthesized)
acatggccatacctaactgcaagggagggggctggaagatctagacgagtagtatgccaggaagaaaatagaactgatttagaggctgctggccagtcactttcagtgaccttcagcata

SEQ ID NO: 1039198 - DNA, 120 bp, Artificial Sequence
  ENSG00000235092_22 (sequence is synthesized)
cttattcctctgcagctgtcaggacactcatgcctgtttctgagatgtttcctgtgtgaggggacatagtgactattggaggggtgacatgttggacttgggtagggtgaagaggattgg

SEQ ID NO: 1039199 - DNA, 120 bp, Artificial Sequence
  ENSG00000235092_23 (sequence is synthesized)
aaaccaccatcatgtttggcagcattgaatgtttatgactatttgaatagttgtgacaagggtacagtgaaggaggaagtaaccatttttgaatacccttttacaatttgcaaagcactt

SEQ ID NO: 1039200 - DNA, 120 bp, Artificial Sequence
  ENSG00000235092_24 (sequence is synthesized)
ttaaaggtaagagtgagttcctagaccatattagggtgagaatggacattgttggctgccatatcattgggcaggggctttgagatttttgtcttcagaaggcagattagatttggagta

SEQ ID NO: 1039201 - DNA, 120 bp, Artificial Sequence
  ENSG00000235092_25 (sequence is synthesized)
gaaggagaaatgtaaagacctggtatctgagtgtgtttgcagaggggaattgtcgtttggaagcacaagaaagggaatggcccgttggcacatatggtacattgtgttttcatataatta

SEQ ID NO: 1039202 - DNA, 120 bp, Artificial Sequence
  ENSG00000235092_26 (sequence is synthesized)
tacctgaatgaaagcaagaggaaacgtgtaggaagctgtttacatagtccttttaataatgtttacatgagttaatgaacatgcaaacgtatctgatgaaaacatgtcagtagtgaaaca

SEQ ID NO: 1039203 - DNA, 120 bp, Artificial Sequence
  ENSG00000235092_27 (sequence is synthesized)
gccttgtgaagaatcagatcttacctcaggctggaaaaaaggactggttttccaagctcacaaattgcagccagtgtgaatagtagcacaaatgactgagctttaagacatccatccatc

SEQ ID NO: 1039204 - DNA, 120 bp, Artificial Sequence
  ENSG00000235092_28 (sequence is synthesized)
catctatccatcccctcatccatccatcccctcatccatccacccatccatccatcccttcatccatcactccatccagccatccgtcccttcatcaatccatccatcccttcatccatc

SEQ ID NO: 1039205 - DNA, 120 bp, Artificial Sequence
  ENSG00000235092_29 (sequence is synthesized)
catccgtccatccatccatccatccactcattcatcccttcatccatccatccatccatccttccttccttccattcatcccttcatccatccgtccatccatccatccacccattcatc

SEQ ID NO: 1039206 - DNA, 120 bp, Artificial Sequence
  ENSG00000235092_30 (sequence is synthesized)
catccgtccatccatccatccacccattcatccatccattccttcatcaactcatcccttcatccatcgtctaccattcattcaccccttcatccatccattcatttatccatccgtcca

SEQ ID NO: 1039207 - DNA, 120 bp, Artificial Sequence
  ENSG00000235092_31 (sequence is synthesized)
tttacttccatccatccctttatccatccattcacccattcatccctttatccatatgtccattcctccatccatccatccatccatttactcttcatcccttcatccatttttccatcc

SEQ ID NO: 1039208 - DNA, 120 bp, Artificial Sequence
  ENSG00000235092_32 (sequence is synthesized)
attcatccattcatcttttcatccatccatccattgatctatccatccatccattgctccatccaaccatccatccatcccttcgtcccttcatccatccatccattcatcccatcatcc

SEQ ID NO: 1039209 - DNA, 120 bp, Artificial Sequence
  ENSG00000235092_33 (sequence is synthesized)
attgatcacttcatccatccatccttccatccttccatccattcttccattcatccatccatgtgttcagcaagtatttactgaatgcctattatgtgccaagcactctcctcagaactt

SEQ ID NO: 1039210 - DNA, 120 bp, Artificial Sequence
  ENSG00000235092_34 (sequence is synthesized)
ccgccggcccgcgcgcacctgcagacgctaacggcccccctctccgccctgggggagccgggaggatgtgcagccccagtcctcctgctcggcggagcctcgcgcgcgcagagcctagcg

SEQ ID NO: 1039211 - DNA, 120 bp, Artificial Sequence
  ENSG00000235092_35 (sequence is synthesized)
gcctcgcgcgcgcagagcctagcgcgattcgcgccctcattactactacaaagcgcgggccagaccaatcccctttctaatgcaccattttcgactgagaacatcaagaggccagaaact

SEQ ID NO: 1039212 - DNA, 120 bp, Artificial Sequence
  ENSG00000235092_36 (sequence is synthesized)
tccaagtcagcttgcagacgcagacgcctcctggggtcctggctttaagaaccagatgccaacactcccggacagtttatggcatccggatccctcaagggtgctcatctgcagttgaga

SEQ ID NO: 1039213 - DNA, 120 bp, Artificial Sequence
  ENSG00000235092_37 (sequence is synthesized)
gtctaataaatggcattaacaaagcgtttcagcgactaccacggcttcacagtggctcctcccctgccctgccaccattcaggctgtaattccttccaggattcccgcaccatcctgtgt

SEQ ID NO: 1039214 - DNA, 120 bp, Artificial Sequence
  ENSG00000235092_38 (sequence is synthesized)
gcccagagctctctagagcaccaggattctgtgtgaagaatacagagacagacgttccatttcaaagaaaaaagagcaacacgaaggccctctttaaggagagagtaaacattcacttta

SEQ ID NO: 1039215 - DNA, 120 bp, Artificial Sequence
  ENSG00000235092_39 (sequence is synthesized)
ggctgcccccatttcagagaggaagaaacgcaggcacacgtgaatgacagactcctctgtggtggcctagactccagccaacacttcctaggacagcctgccattgtgcaaagtcaccat

SEQ ID NO: 1039216 - DNA, 120 bp, Artificial Sequence
  ENSG00000235092_40 (sequence is synthesized)
gcgagcccagctggggtggtaaatagagtacagtacagattctgtgtgaagaatacagagacagacgttccatttcaaagaaaaaagagcaacacgaaggccctctttaaggagagagta

SEQ ID NO: 1039217 - DNA, 120 bp, Artificial Sequence
  ENSG00000235092_41 (sequence is synthesized)
ttggtgagtgaatcacataggttattagaaggtgataaaggtgtaggtgataaaggagaagtgccaggagcaaggattgggtacagttgtgaataaggtggccccaataggttgcactga

SEQ ID NO: 1039218 - DNA, 120 bp, Artificial Sequence
  ENSG00000235092_42 (sequence is synthesized)
gaaggtgacatttgcacagagacttgaagaaaggaaggagagaacatgactgtacctgggtaacagcatttgtggaagagggaacagccagtgtaaaagttccaaggcatgagtgcctgg

SEQ ID NO: 1039219 - DNA, 120 bp, Artificial Sequence
  ENSG00000235092_43 (sequence is synthesized)
tacatacatggaacatcgaggccagggtggcagaaacgcggtgagtccaggaagggaataggaactaagtgtaggaaggtgtacagtggggtggtgtgggggtggaattgtggcagccag

SEQ ID NO: 1039220 - DNA, 120 bp, Artificial Sequence
  ENSG00000235092_44 (sequence is synthesized)
atggtgttggcctaaggcctcttggcccttgttaggacttggtttaccatggcgcaacacatccatgagattggcaaaaattaaaaagtctgacaacagaaaatctggtaatctggtgag

SEQ ID NO: 1039221 - DNA, 120 bp, Artificial Sequence
  ENSG00000235092_45 (sequence is synthesized)
gatgtggagcagtgggaattctccaatactgccagggagcatgggcatcaatcccaccacactggaatgcaaaggggcattctgagtagaactgaagatgtgcccatccttgaccccaca

SEQ ID NO: 1039222 - DNA, 120 bp, Artificial Sequence
  ENSG00000235092_46 (sequence is synthesized)
gttccagccatgggcatgcgcatgaatgtgcacacgtgttgactgcggcatttgtttgtcattatgaaaacatctaagtttccatctatgggagaggggataatgtgggagtgcccaaca

SEQ ID NO: 1039223 - DNA, 120 bp, Artificial Sequence
  ENSG00000235092_47 (sequence is synthesized)
gtggagttctagagagcagtaaaaataaatggactagagctgcacacgtcaaaatggatgaagataaaagacataaggatggaagaagaccacctggccacagaagtatatgtccaatat

SEQ ID NO: 1039224 - DNA, 120 bp, Artificial Sequence
  ENSG00000235092_48 (sequence is synthesized)
gtagcaattatttatctgtcctggagaggagttcctgaacataaatgtcctctgctggccctaaagctgggggcggaggctgtgtgttgtggggtgggggttggggggccgaatgttccc

SEQ ID NO: 1039225 - DNA, 120 bp, Artificial Sequence
  ENSG00000235092_49 (sequence is synthesized)
tcagcgcgcgcgcccagctgatcaatgcctgcgaggcccggcagtcccaggctcgcccaggcccggccgccggcccgcgcgcacctgcagacgctgcacgtcttaagtttcgaaacggcc

SEQ ID NO: 1039226 - DNA, 120 bp, Artificial Sequence
  ENSG00000235092_50 (sequence is synthesized)
gggggcgcgtctcaaggtcctccctgcacatctggcgcaatggggagcgttcgcctttctttcccgggttttgttctcacagctgtgtccattccgcccgtgaccccgcgagtgatccct

SEQ ID NO: 1039227 - DNA, 120 bp, Artificial Sequence
  ENSG00000235092_51 (sequence is synthesized)
acaaacaacacaacactactcattgtttccaacgtgagtatgaaagtatggagcagtgcggagggccaggagtgctgaatccacatggttacttctccaggcgggggccgaggaccaggg

SEQ ID NO: 1039228 - DNA, 120 bp, Artificial Sequence
  ENSG00000235092_52 (sequence is synthesized)
ctggaggtttactccaggagcttcagtggtgcatgctgaatgtgctgtttcttgggctgggggacagagatgtgcatgctgttatacactctatattgaaatgattgtataacaatatac

SEQ ID NO: 1039229 - DNA, 120 bp, Artificial Sequence
  ENSG00000235092_53 (sequence is synthesized)
gtcccggtccctgggacgggctagggcctggccgggacgcgcttgtcctgggcacaggacaagggctttggggcacagccctttctcggccggggaggcaggcgaaccgatcgcccgggc

SEQ ID NO: 1039230 - DNA, 120 bp, Artificial Sequence
  ENSG00000235092_54 (sequence is synthesized)
actggtgttacccaggcggcgccagcgcgagttggctggtggacaggtttttcaatagtttgaactccttcttccccttgccgcatctttaaggcgtttactcccagattcagccctctc

SEQ ID NO: 1039231 - DNA, 120 bp, Artificial Sequence
  ENSG00000235092_55 (sequence is synthesized)
ctcataataatgacagtttgcagacttttcctttccagttagagtgcgtgcgcgggtcctgcaagatcccagccgcgcgtcaccgcgaaccattctgcgggaggggcaggacctaaggct

SEQ ID NO: 1039232 - DNA, 120 bp, Artificial Sequence
  ENSG00000235092_56 (sequence is synthesized)
gcatctccaggagggaacgtggagacaccgcgggcggaggggacctggaggagttcctggaggagcagtcctaggcacggggcgaaggatttgcgctctagctggtggagcgcacatcgc

SEQ ID NO: 1039233 - DNA, 120 bp, Artificial Sequence
  ENSG00000235092_57 (sequence is synthesized)
cctggttagctctgcggtgggtcctgggctcatcccggcctcttcctgcctccgctgacatcagggcctctcctgtttagtcctaggcctgcccttcatcaggactccgcagaaaaggat

SEQ ID NO: 1039234 - DNA, 120 bp, Artificial Sequence
  ENSG00000235091_0 (sequence is synthesized)
agaaaacatctgtggctggggtggatgaagccaggctgtgagctccccgaggacgacgccccctctgcttacaccacctgcaggcgctccagccccggcactggaaggccttggccaccg

SEQ ID NO: 1039235 - DNA, 120 bp, Artificial Sequence
  ENSG00000235091_1 (sequence is synthesized)
acacagcagcctcatcttctggctggattagacccagaatcttctggtcaccccactcctgcggggaacaaataggaaaaggacatcagggctctgagcgccccctccacacatgggaag

SEQ ID NO: 1039236 - DNA, 120 bp, Artificial Sequence
  ENSG00000235091_2 (sequence is synthesized)
gcagggtggagttaccgtgggtccctcgcatcagacatctgcctgcggaccagacacctgctctcctccaaggagcctcaatgtccagagaagggatcctgcggtgaccgagggacaggc

SEQ ID NO: 1039237 - DNA, 120 bp, Artificial Sequence
  ENSG00000235091_3 (sequence is synthesized)
ctgtcttctgggtcaccacatcttggcatttattatttgcccccaggaaggtctgaaggattttacttttaaaaaccatagtcagccgggcgcggtggctaacgcctgtaatcccagcac

SEQ ID NO: 1039238 - DNA, 69 bp, Artificial Sequence
  ENSG00000235091_4 (sequence is synthesized)
tctgaccaacatgcagaaaccctgtctctactaatactacaaaattagccaggtgtggtggtgggcgcc

SEQ ID NO: 1039239 - DNA, 120 bp, Artificial Sequence
  ENSG00000235091_5 (sequence is synthesized)
ggcctggctccaggcttcggccacagtcttccaccaggatgtgactgaaggcctggccgaggtctgcaggccacctggagggcacctggagagccaggagcgttgctgggccctgggtct

SEQ ID NO: 1039240 - DNA, 120 bp, Artificial Sequence
  ENSG00000235091_6 (sequence is synthesized)
accccacgacccctctgcctctccccaggctgtgagctccccgaggacgacgccccctctgcttacaccacctgcaggcgctccagccccggcactggaaggccttggccaccgacacag

SEQ ID NO: 1039241 - DNA, 120 bp, Artificial Sequence
  ENSG00000235099_0 (sequence is synthesized)
aggaattttgtgtgaagtgatagtggagccaggacagcagtgtggcagaaaccagtgagtgacacttcaaggaggccagatggccaagcagcatctggaatcgctttgcctgcagttaac

SEQ ID NO: 1039242 - DNA, 120 bp, Artificial Sequence
  ENSG00000235099_1 (sequence is synthesized)
agcatattttatctctgctacacgagccaaccttcaactatccatgtaaatggaagacaaaactactgaagataaaattgatacccccaagaaaattccaaatctacactgaaatcaact

SEQ ID NO: 1039243 - DNA, 120 bp, Artificial Sequence
  ENSG00000235099_2 (sequence is synthesized)
actttcattccctaagtatttttcatagaaattccaagttatgtgtgagtagtatttccataatttaaccaacttcctgtagtcatccttcttttgttgaaaagacctaatctaaaattg

SEQ ID NO: 1039244 - DNA, 120 bp, Artificial Sequence
  ENSG00000235099_3 (sequence is synthesized)
acccaagttcactgaccatgtaaattctataatttgccttgcataagtaggaatttatgatattaacaatcaggagcctagaaaacattccaggagaaattgagttaaaattaaatcagt

SEQ ID NO: 1039245 - DNA, 64 bp, Artificial Sequence
  ENSG00000235099_4 (sequence is synthesized)
gaaaacattccaggagaaattgagttaaaattaaatcagaggtggatcatgaggtcaggagatc

SEQ ID NO: 1039246 - DNA, 120 bp, Artificial Sequence
  ENSG00000269191_0 (sequence is synthesized)
gtcccatctgcccctttctgggcttagcaaagtcagggctgctgaccccatccctcctagggagccaattgatggcgcagagcacaaggtagccaggagacaaaaggttctggaaggaag

SEQ ID NO: 1039247 - DNA, 120 bp, Artificial Sequence
  ENSG00000269191_1 (sequence is synthesized)
tcatgagggtcttcacaagctgaccaggacccttcagcaggtccaaacttgtatgaagctacacaagcagccactcctgctgcccccaggaggatactacccccaggttgagaacaaagc

SEQ ID NO: 1039248 - DNA, 120 bp, Artificial Sequence
  ENSG00000269191_2 (sequence is synthesized)
cttcaaaaacaggaactgcatcttctccctcttcatatttctctgcagaactccgcacacagtatgtccttaataaatcccagctggagggagccccacctcaggcttttcagaaacaca

SEQ ID NO: 1039249 - DNA, 120 bp, Artificial Sequence
  ENSG00000269194_0 (sequence is synthesized)
gcaagaagagtggagggcggagggcagaagggactggggaaggggcgaggcctggaagaatagaggcagaggcgggagcggccgatcttggcggatcccgcctcctcgcgactcggcccc

SEQ ID NO: 1039250 - DNA, 120 bp, Artificial Sequence
  ENSG00000269194_1 (sequence is synthesized)
caggtcacatccctccgtcggtgcccgccacccactcaccgtggggctcccgtgcggcaggtacaccgggtagtcgcgagcggtctgcggcggcagggaccccaccagccaggggagcag

SEQ ID NO: 1039251 - DNA, 120 bp, Artificial Sequence
  ENSG00000269194_2 (sequence is synthesized)
gctgccaccacccggccggacaccaccagactgacgaaggtcgtgcccgcggcctcagcgaacccggagagggcttcctgggtacgggaggcaggaggactgggagtcagcagacaagcg

SEQ ID NO: 1039252 - DNA, 120 bp, Artificial Sequence
  ENSG00000269194_3 (sequence is synthesized)
tagggggtggcagcgacttcccagatgggcagggaatggggagaaacccacagccagccccgagctcgcgcagtggccatgctcctacgtctcaccctctctgagcctgagttccttcac

SEQ ID NO: 1039253 - DNA, 120 bp, Artificial Sequence
  ENSG00000223511_0 (sequence is synthesized)
gcctcccaaattgctgggatgacagacgtgaaccaccgtgcctggccgacagtcacctttagaatgtgaacagtggacactgtgttggggtctcctacctgtgcctgtgatgtggactgg

SEQ ID NO: 1039254 - DNA, 120 bp, Artificial Sequence
  ENSG00000223511_1 (sequence is synthesized)
ggcgtgagccaccgcgcccggcctgagacggctttccaaggctgcagaaatgaagtctgcaatagcagatcctctttgcctgggtttgcacgtgatccagcaaaccacccaccgacccgt

SEQ ID NO: 1039255 - DNA, 120 bp, Artificial Sequence
  ENSG00000223511_2 (sequence is synthesized)
tgatccagcaaaccacccaccgacccgttgcctcatgtgagacatcctcagggaacagcaagtctcgctgttcttggaagggacttccagcctggaaagaaaagggagggataagagagc

SEQ ID NO: 1039256 - DNA, 120 bp, Artificial Sequence
  ENSG00000223511_3 (sequence is synthesized)
tttgcctgggtttgcacgtgatccagcaaaccacccaccgacccgttgcctcatgtgagacatcctcagggaacagcaagaattttgaaggtccctgataagacatctttgaggtcaggc

SEQ ID NO: 1039257 - DNA, 120 bp, Artificial Sequence
  ENSG00000223511_4 (sequence is synthesized)
ataaatcatcacttcacatcttgacggcaatgcaacgaagacaagtatctgtctctttgggtctgtctaacaaggagcaaagcctggcctcccaccagcatccagacaatagtggattcc

SEQ ID NO: 1039258 - DNA, 120 bp, Artificial Sequence
  ENSG00000223511_5 (sequence is synthesized)
gcaggtgaaatgagctctggtccacaatgcaacgcaggctgtgcagaaaatcaaagaggaaccaacccagaagtatcccccaggacaaatcattaagggggaaaagatataagaagggcc

SEQ ID NO: 1039259 - DNA, 120 bp, Artificial Sequence
  ENSG00000223511_6 (sequence is synthesized)
ctaaatgcaatgacagctgttctaagagacagaagaggagacgcagacacagaggagaaggccacgtgtagacagaggcagagactgcagtgatgtggccacaagcccagggatgcctgg

SEQ ID NO: 1039260 - DNA, 83 bp, Artificial Sequence
  ENSG00000223511_7 (sequence is synthesized)
tctagagcctccagaaggaactggatacaattggaatgggttatatggtgatccccaaaatatatgtttatttccttttcccc

SEQ ID NO: 1039261 - DNA, 120 bp, Artificial Sequence
  ENSG00000223517_0 (sequence is synthesized)
tccccccgagttggtagaattagaaactgctggagtttgaactctgcactgtgttgtcctgtgaaggtcctgatgtgcctgcaattgtcttctttgttaggttgttcaagaggatgcttt

SEQ ID NO: 1039262 - DNA, 120 bp, Artificial Sequence
  ENSG00000223517_1 (sequence is synthesized)
gagaagaaacagaataagaggtggatcgagtgcttatagtttttcttcaggaagactcactggctccaaacagtcacacacacacacaacccacattgcagtgcctcacttttatttgct

SEQ ID NO: 1039263 - DNA, 120 bp, Artificial Sequence
  ENSG00000223517_2 (sequence is synthesized)
cagagtctcactctgtcacccaggctggcatgtagtggcaaaatatcggcttgctacagcctctgcctcctggttccatgtaattatcctgcctcagcctcctgagtaggtggaactaca

SEQ ID NO: 1039264 - DNA, 89 bp, Artificial Sequence
  ENSG00000223517_3 (sequence is synthesized)
gctacagcctctgcctcctggttccatgtaattatcctgcctcagcctcctgagtaggtggaactacagatgcacaccaccacaccctg

SEQ ID NO: 1039265 - DNA, 120 bp, Artificial Sequence
  ENSG00000223516_0 (sequence is synthesized)
gatattactactttagcactgattgggtctcagttatttgtgtgttatcatgcatgtatttaattgagcagctactacatgcaaggagctgtgagaaatgaacatgaggccaagatattg

SEQ ID NO: 1039266 - DNA, 120 bp, Artificial Sequence
  ENSG00000223516_1 (sequence is synthesized)
gtatgagagctacacagagaacatgacgggaattcaaagaaagtactactcctttctttcagtgaagggtccagagtggctctgaggttcattttgaacatgacgggaattcaaagaaag

SEQ ID NO: 1039267 - DNA, 120 bp, Artificial Sequence
  ENSG00000223516_2 (sequence is synthesized)
tactacacctttcttgcagtgaagggtccagagtggctctgaggttcattttgtacatgaagagatgagaaaggacaatctaagtggaagatacaggagaaacacggaaacaaacaaaag

SEQ ID NO: 1039268 - DNA, 120 bp, Artificial Sequence
  ENSG00000261430_0 (sequence is synthesized)
gctgaaaggtaaagattaggaaccttgatggaggttgaatttgagtttctcttgggactgaatgtgcttggggtttcctgtctgtctttgcaaatagaagagttgattttttgggaaata

SEQ ID NO: 1039269 - DNA, 120 bp, Artificial Sequence
  ENSG00000261430_1 (sequence is synthesized)
gttatttccagcaaggaatagcctgagaagcacggcaggccttgagtggcgttagagagaagtgctgacatcttgagtgatggagagggtggccctctgggcagggtgtgtcccacaggg

SEQ ID NO: 1039270 - DNA, 120 bp, Artificial Sequence
  ENSG00000261432_0 (sequence is synthesized)
agttagagttctgatactcatactagctctgtgaccataggcaagtcagtctccactctctggccttcgtttctgtttataaaaagaaagggaaagaaccaatgatttctaagtcttctc

SEQ ID NO: 1039271 - DNA, 120 bp, Artificial Sequence
  ENSG00000261432_1 (sequence is synthesized)
ctggatctacatttccaggattctttattgcagtgtcaacaaaggcacctactctggggcagagactgtattggggctttacacatactgcatctattttatcctcacatctcctcaggt

SEQ ID NO: 1039272 - DNA, 120 bp, Artificial Sequence
  ENSG00000261432_2 (sequence is synthesized)
tagattttaatatttccaacagttctatgtttcctacaaggaaaatgcaaggtgttggtgggccggggcggggtgtaatctttctgaagttgtgtagatataaaagtcatcaatggattt

SEQ ID NO: 1039273 - DNA, 120 bp, Artificial Sequence
  ENSG00000261432_3 (sequence is synthesized)
aaacccaggcggcctgattctcacatctcccctggcctcaaaattatttccatattcatatgaaaaaccccagccagtcacaagagcccatacagtgtccagtgtctgtcactagcagaa

SEQ ID NO: 1039274 - DNA, 120 bp, Artificial Sequence
  ENSG00000261432_4 (sequence is synthesized)
ggaatgaaagggaatttatctgcagaatgaggaattacaactggagtaaaaagagaatggtctgaaggtttctaggcagcagagtcaaaacaaggacagcttcatgcttaaagacacaga

SEQ ID NO: 1039275 - DNA, 120 bp, Artificial Sequence
  ENSG00000261432_5 (sequence is synthesized)
tggccatagctcaaaatgtttgattctggtccaggctggacttggaggcatagattagaagacctgaaagccacttttcatgtttgaagaaaagaataaaagttaggaaatgaagatctg

SEQ ID NO: 1039276 - DNA, 120 bp, Artificial Sequence
  ENSG00000261432_6 (sequence is synthesized)
cagagtgagaagccagaccattcatgatggtctttatctttgtaaagattttcttgataattttttttaaaaaaccaagtcccttaattttagagtatatcttttattaaagaagctgtt

SEQ ID NO: 1039277 - DNA, 120 bp, Artificial Sequence
  ENSG00000261432_7 (sequence is synthesized)
tcataactatgtctcacctacttgcaagaaaattatttccactagatagaaacattattaaccacattatgtctatgagaaaactgaggccaagtgaggaaagatgaaattagaaacatt

SEQ ID NO: 1039278 - DNA, 120 bp, Artificial Sequence
  ENSG00000261432_8 (sequence is synthesized)
atctcctgatgcccagattcatagactccatacctcactgatatggcagagactactggatgcctacccaatagccttgttcccttaatagaagagcctagttttatttgaagcagcaaa

SEQ ID NO: 1039279 - DNA, 120 bp, Artificial Sequence
  ENSG00000261432_9 (sequence is synthesized)
gcatcaagcaaaaagattatattcccaagcctccctttcaactagagttgatcatgcaaccaagttctggacagacagtgagtacttttgtgggagaattccataaagtccttttaaagc

SEQ ID NO: 1039280 - DNA, 120 bp, Artificial Sequence
  ENSG00000261432_10 (sequence is synthesized)
aacctgagttaatgaaggtggatcatttgttcccttcttcttttttttcttcctgctccctgccgatgaaaaactaaagctccatccactatcgtgggctaacagtgagcttgagtacaa

SEQ ID NO: 1039281 - DNA, 120 bp, Artificial Sequence
  ENSG00000261432_11 (sequence is synthesized)
aagatgaaatataatgggagcctgggctcctgagcatctcaaggctgccataccaaccctggcttgccttcttctgaaattctcatatataagaaagaaagaaatgatttttataaagcc

SEQ ID NO: 1039282 - DNA, 120 bp, Artificial Sequence
  ENSG00000261432_12 (sequence is synthesized)
acattatttgcagggcttcttttttatgcagctaagcctaatcctaaaggttacaatgagatggcttaatttgagaaatgatgcagaaagaagacactatctgctatcagacctggttcc

SEQ ID NO: 1039283 - DNA, 120 bp, Artificial Sequence
  ENSG00000261432_13 (sequence is synthesized)
ttcccttggcccacatggtcataagaaggaaggaaggaataatgaatgaaacacagttcatcagattggaatgccatcaactgcatgacatgctataattttatgcatcaccaacaaaga

SEQ ID NO: 1039284 - DNA, 120 bp, Artificial Sequence
  ENSG00000261432_14 (sequence is synthesized)
aaaaaatgttgccaattaaactatgacatgtcattgattgtgagatgcaaatcaatttcataaatgctaaaatgtgaggggaaaaaaagccaacctgtgaaatatggtgtgctgaggatt

SEQ ID NO: 1039285 - DNA, 120 bp, Artificial Sequence
  ENSG00000261432_15 (sequence is synthesized)
tagcaaagcacagttaggatttaaagttcatcagatcaatgcatcctcccatccctatcttaaagaacaggacaccaacaccaaggtccagcaaggggcagtaatttgtcctataaaatt

SEQ ID NO: 1039286 - DNA, 120 bp, Artificial Sequence
  ENSG00000261432_16 (sequence is synthesized)
cagggatagagacaagatgagaatcttgacagcaaattgagagctctttaataggtcccaatagataccaaatatttgtttgtgttaccttgaccactagcaacacgtttatttaatcat

SEQ ID NO: 1039287 - DNA, 120 bp, Artificial Sequence
  ENSG00000261432_17 (sequence is synthesized)
ccacctgttcctgtttttccctttaaaatatgcagtgctgaatagcagaggcaaaggccctcacccctcccacacacaaatggactcagcagtcacaggagatgatgcagacagatttcc

SEQ ID NO: 1039288 - DNA, 120 bp, Artificial Sequence
  ENSG00000261432_18 (sequence is synthesized)
cagtaaattcatgctcacacagggcatacacctgagtcagtggctctgaaggagatgaagaacaccaggtggctatggagaactgcaggtaggagtctctgaaacacaggaaattgagat

SEQ ID NO: 1039289 - DNA, 120 bp, Artificial Sequence
  ENSG00000261432_19 (sequence is synthesized)
ggcatagcagtggctgatggctggggcctgaggaatattcagctcaaatctctccttccttctcttacaagggaagaaacaccatggtgaatggcgctttcccaagggatatccagaacc

SEQ ID NO: 1039290 - DNA, 120 bp, Artificial Sequence
  ENSG00000261432_20 (sequence is synthesized)
tagactcccagtttatcagagatggagggcccaaagagatcatgcatcagtctagcctgcattaaagataaaaattcttctaatctctcataatctgttgtgggttttagaaagaccatg

SEQ ID NO: 1039291 - DNA, 120 bp, Artificial Sequence
  ENSG00000261432_21 (sequence is synthesized)
cttctgacagtactgttgattccggaggcaaggagtgaagtaagaaggacacttcagccatccaggtaaagagaacagcaggtcctggactaaagcagaaaagacggagtgagtaggaaa

SEQ ID NO: 1039292 - DNA, 120 bp, Artificial Sequence
  ENSG00000261432_22 (sequence is synthesized)
gatggtccaatcaaacatcaacgaagcttcaaaaacatcaagcttctgaagtcattttcctgttcttggtactgtttcctcctctgttcccaaatataccctatgccctcgctctcaaca

SEQ ID NO: 1039293 - DNA, 120 bp, Artificial Sequence
  ENSG00000261433_0 (sequence is synthesized)
ggaactgcaagttcccacgtccacccccgccacacccacagcctgccctgcatacaccactgctggagatgtagccaggacagcttgccctgtcccctgaccccacggaccttgttaaca

SEQ ID NO: 1039294 - DNA, 120 bp, Artificial Sequence
  ENSG00000261433_1 (sequence is synthesized)
ccgctgctcccctcggtgatatttacctgtccgtggctgtcctgaccaatactcccaaggagacagtgcatcactgggccaacagggcagagccccaggggaccactccctttacgacat

SEQ ID NO: 1039295 - DNA, 120 bp, Artificial Sequence
  ENSG00000261433_2 (sequence is synthesized)
gacatgtcagtctcacctggagggagaggggcagtgggtgggggcaacgctcagtggctggtggacaggcaaggggtgagtgagccctgcccaactgactccattggcggccactggcct

SEQ ID NO: 1039296 - DNA, 120 bp, Artificial Sequence
  ENSG00000261433_3 (sequence is synthesized)
tgcctggcattcacggaacaggcgcttcataaacttgttgcttcaatgtgaaatcacctcaattttgtaaatgcgtctgtagcatccacaggactcatcatctagaattcaaacccttaa

SEQ ID NO: 1039297 - DNA, 120 bp, Artificial Sequence
  ENSG00000261434_0 (sequence is synthesized)
atcacagaaactgcacaaaataagcagcccatgaaaaacaaccgagaaaaagaggcgaaaaatgaacagcaaaccggaccctgcttcctccagcaggaggctcccacccactgctggtca

SEQ ID NO: 1039298 - DNA, 120 bp, Artificial Sequence
  ENSG00000261434_1 (sequence is synthesized)
caacccgctgtctggacctgccgcttacgggatgaggtgggcctgcagggaacgcggggcttctggttgctgttagtggtggcttttcttctcactttgtgtagcccccagaaccgtgag

SEQ ID NO: 1039299 - DNA, 120 bp, Artificial Sequence
  ENSG00000261434_2 (sequence is synthesized)
accgcgccactgtttctcaccaacattcactgtgtcctgcggggcttgaggcttagactgacgggagctattccgggtgtttaattgaaggtctagcacttgaccagcccctggaggagc

SEQ ID NO: 1039300 - DNA, 120 bp, Artificial Sequence
  ENSG00000261434_3 (sequence is synthesized)
tgacaaccacctaagacacatttggacttggtgtccaccaagagtgactttgtgcaaagaaatggctgagcactagaataactaaatgcaaataaaatgcgtctttcagtgcagttcaga

SEQ ID NO: 1039301 - DNA, 120 bp, Artificial Sequence
  ENSG00000261435_0 (sequence is synthesized)
tgctttatcactgggagtttccttattattttaaaaataagttagtgttttggaggaggaaataacatttccccgagatttaggggaacactgcagctaacaaggccctctgaaacggca

SEQ ID NO: 1039302 - DNA, 120 bp, Artificial Sequence
  ENSG00000261435_1 (sequence is synthesized)
ccaaacagaagaacatgttaagacactatccttattaggatggtggggcgcttcctctgtctcgtggttaattccgggcgcttctctccttcagattcctgacttcctctgatggcattt

SEQ ID NO: 1039303 - DNA, 120 bp, Artificial Sequence
  ENSG00000261435_2 (sequence is synthesized)
gagggggagaggataagccaagggaagaggaaaatcaaaatgctttcagcagcacggcttccgcatgctggagaggtggtgtatggggttgcggcttggcctgttttctgaaacctgcaa

SEQ ID NO: 1039304 - DNA, 120 bp, Artificial Sequence
  ENSG00000261435_3 (sequence is synthesized)
ggtagcaccctgaaggtagcttgtaaccctccactctcacaccaaggtaatacctccttcctgtctggccacctgtcacagccagtggaagtagggtttggagggatggttgggacatcc

SEQ ID NO: 1039305 - DNA, 120 bp, Artificial Sequence
  ENSG00000261435_4 (sequence is synthesized)
ttacacaatgttaggtggagacttagtgatggcttcgggggaaggcagagggagtctctcttgcgtcaggggggtggaagcaccgctgccatgatcaagccctttggatgaaaggagggc

SEQ ID NO: 1039306 - DNA, 120 bp, Artificial Sequence
  ENSG00000261435_5 (sequence is synthesized)
tgtgagatttgctgcccagatgtgggtttgcaaatgaccttgttggtctgttaccctggcctagctcatagaagctttcttctcctgtggcttgggagagagccaccgtaaaagacaagc

SEQ ID NO: 1039307 - DNA, 120 bp, Artificial Sequence
  ENSG00000261435_6 (sequence is synthesized)
tgtggctagtaagcatcttctatgtgctctggactgtctcatgcaagagctagggcataggatcctcatgatggcccttcaagaggggttaatcttgtcgttgttgcacttctatgagga

SEQ ID NO: 1039308 - DNA, 120 bp, Artificial Sequence
  ENSG00000261435_7 (sequence is synthesized)
aacagaccatgtgaggctaagtaacttgctcaaggtcacacaggggtgattgatggggtcacccagactgtctgactcttgtgtgggtatggctgccctccttgtcagccggcggggtat

SEQ ID NO: 1039309 - DNA, 120 bp, Artificial Sequence
  ENSG00000261435_8 (sequence is synthesized)
tccttcttcccaaaggaaagttgagctcattttggaaagaaagcaaacagccgttctcctctggggctctatccggggacagggcagaaaggaaatccagtacactgcggaaggagtcat

SEQ ID NO: 1039310 - DNA, 120 bp, Artificial Sequence
  ENSG00000261435_9 (sequence is synthesized)
tttttggcctggttctcaccacccatctctagttcaaaccctgcttttagcatatctgtgttgatggggcagggcctgggaatcacgatttgcctttaagaagtggatgcacttggagag

SEQ ID NO: 1039311 - DNA, 120 bp, Artificial Sequence
  ENSG00000261435_10 (sequence is synthesized)
gctggcgcttccaccaaccaggaagagctgggggcaccctgcttgctctccgaaacttcacagaaagccccaagagctggggatgtgggttctgttctggatctccaagagacgacgtca

SEQ ID NO: 1039312 - DNA, 120 bp, Artificial Sequence
  ENSG00000261435_11 (sequence is synthesized)
tgctagaatgttcccttcatttttgaaaactgcactcctgcctggggccatctcgtgtcttcaatggctaaagtagatgctgatttgggcaaccagctttcttttctgttttgaaaatta

SEQ ID NO: 1039313 - DNA, 120 bp, Artificial Sequence
  ENSG00000261435_12 (sequence is synthesized)
atgcacctgtgtagtcacccaggcttgatagttgcaacaataactcatggacaagttgtgtgactggtggtagtgactccatttgctcacacctccttggattcagtccctggtgtagtt

SEQ ID NO: 1039314 - DNA, 120 bp, Artificial Sequence
  ENSG00000261435_13 (sequence is synthesized)
ccctcccacactgactgtgggtttggccaggtgacttgctttggccaatgggacaccatcaaccatgattagcagaggtttgaaaagtgcttgtgcattgagatttgccctctcacgctg

SEQ ID NO: 1039315 - DNA, 120 bp, Artificial Sequence
  ENSG00000261435_14 (sequence is synthesized)
ttcttgggacccttacaactgccaacatgtgaatgtgcctgggttaggcaggtggaggtatgtggcccagtcaccactgccacccagctgacaaccagcaccaaccaccagacacactgc

SEQ ID NO: 1039316 - DNA, 120 bp, Artificial Sequence
  ENSG00000261435_15 (sequence is synthesized)
atgaggccatcctagaccattcggttcccaggtgacctgccagctggtcacaggtgagtccagcagaagaactgcccaacccagcccagcccaaattgcagatctgcagaatcatgggct

SEQ ID NO: 1039317 - DNA, 120 bp, Artificial Sequence
  ENSG00000261436_0 (sequence is synthesized)
ggagcccagcgagggtgcctacaagaggagtcaaagggcaaaggatgaaaaaattgaggctcaaagaagtccaccaaattgagagtgaagtaggggaaacagcatttaacgcttacattc

SEQ ID NO: 1039318 - DNA, 120 bp, Artificial Sequence
  ENSG00000261436_1 (sequence is synthesized)
taatgatttgtgtaagagcagcaggacaagctatacaaagaaaaaggtggaattatcaggatggaattaaagatgcttccaaacagaggggatatctcaagccatgactcagagagttct

SEQ ID NO: 1039319 - DNA, 120 bp, Artificial Sequence
  ENSG00000261436_2 (sequence is synthesized)
ccccacattattaatggtatgggaattaggagaaggtcatctgactcacatggatcaccatataattccttctggagaacagaaaaaatgcagaagaggaaaacctccatatgtgaagct

SEQ ID NO: 1039320 - DNA, 120 bp, Artificial Sequence
  ENSG00000261436_3 (sequence is synthesized)
atggcaagggagtctccccaccccgcgctccaacagagtctggagataaaccctcagagactcaggattcatgtggctccataaacatggcccaatctattgtcaaaccagaatggtaga

SEQ ID NO: 1039321 - DNA, 120 bp, Artificial Sequence
  ENSG00000261436_4 (sequence is synthesized)
aatatagaaacatatggacttccaaacttgttcacttgctatggaagcaagaggtgtttaactgaagatgcagaaaatttcaattgaggaatgctagtcacaattatacccacagctgat

SEQ ID NO: 1039322 - DNA, 120 bp, Artificial Sequence
  ENSG00000261436_5 (sequence is synthesized)
gagaagtaacatcagaaatctgccgtctgtttcctccttcaatatttaagaatttcactttttaagtctttttgatttgagaaataacatgtttaactatcgttaatatttgaatgtcat

SEQ ID NO: 1039323 - DNA, 120 bp, Artificial Sequence
  ENSG00000261436_6 (sequence is synthesized)
acaggtgaacacactgttatttacaacttgatttcactctgccatcattctactacctccagacaattagaagctaggagaaatgtacaggattagtgttcaccaaaacattttattgag

SEQ ID NO: 1039324 - DNA, 120 bp, Artificial Sequence
  ENSG00000261436_7 (sequence is synthesized)
acaacctgcatttaaagaaaatattatgaaattctcattgtgccaaaatttttaataatattgcatatttcataaaacaaaactctataagagaataaataagatttaggatttttgtgt

SEQ ID NO: 1039325 - DNA, 120 bp, Artificial Sequence
  ENSG00000261436_8 (sequence is synthesized)
attttaggataaccaatgctatgaattatcctgaatgaaaaccctgggattaatctatagctattccatgtttaatttggttatttcggtaatattttaaataaatgtcataatggcaac

SEQ ID NO: 1039326 - DNA, 120 bp, Artificial Sequence
  ENSG00000261436_9 (sequence is synthesized)
ttcacttcaacatacaagttgaccatggcatgctctgggctccagtcctctacaaagatgtagggcaggaactaccagttgtcagcacagcaccatcccacattgctcttctaatggaga

SEQ ID NO: 1039327 - DNA, 120 bp, Artificial Sequence
  ENSG00000261436_10 (sequence is synthesized)
agcaggtcccttttagtggaaagaaagcctcagttgaaaaggaagaagccaatgtaaaaatgtgaaatcaaagctcttctgatatggttgaaaacaagtaacacactataaaaagctgca

SEQ ID NO: 1039328 - DNA, 120 bp, Artificial Sequence
  ENSG00000261436_11 (sequence is synthesized)
ttccccattatctcccaaacactgtcatttggctgcatgcagatttcactctggctttggcaaatgtgtccctttatgtaacaataaacaattatattgaaaagcaagattggagaaaaa

SEQ ID NO: 1039329 - DNA, 120 bp, Artificial Sequence
  ENSG00000261436_12 (sequence is synthesized)
gaacctaaaactcaaaagatagttcattttaggaatgaaaatgggtctgcagcctgtgtgaacccataaatcatggtattataggaccagtgctcttcctgccaacattttccctaactg

SEQ ID NO: 1039330 - DNA, 120 bp, Artificial Sequence
  ENSG00000261436_13 (sequence is synthesized)
ccagcttgtgggtgccaagcactctcttgcattataggatttaacacaggacctgacttaatatagcaatgttttcttatcatgtctcatcatttcttctttcttctggatacaccaacg

SEQ ID NO: 1039331 - DNA, 120 bp, Artificial Sequence
  ENSG00000261436_14 (sequence is synthesized)
ttttgtcctccttttttttttttctgttgtaaatgggaaaaagcttgaaaaagactcgatggctatcatttcaatacatagaataaatagttccattcaatttatttcaattgaatagac

SEQ ID NO: 1039332 - DNA, 120 bp, Artificial Sequence
  ENSG00000261436_15 (sequence is synthesized)
aggagcccagcgagggtgcctacaagaggagtcaaagggcaaagggtgagacccttccaccggttcccctggactctagcctcagggacgtcctgctcctgggggcagatgaaaaaattg

SEQ ID NO: 1039333 - DNA, 120 bp, Artificial Sequence
  ENSG00000261436_16 (sequence is synthesized)
agcttcagaagatgtttcaaatctggttgtggagtcattctatttccaattaagcagtggggggattcaattacaagctgtgggaagcgaagagtttgtgtcaataaaccagcagtggta

SEQ ID NO: 1039334 - DNA, 120 bp, Artificial Sequence
  ENSG00000260779_0 (sequence is synthesized)
agaatcagtgcttactgagcatcctccacaagatagcaaggtatcttagatatggagagatgtagcggggatcctgcagagagtagtgtgggagaggagtgccctcaggcctccctgatg

SEQ ID NO: 1039335 - DNA, 120 bp, Artificial Sequence
  ENSG00000260779_1 (sequence is synthesized)
tcagaaccatctgcacaggctaaacagagatcgattcttggaccttgtccctgtatcagagtctcagggcctgagccatgaggattcagcatctccaagatgttcagcctgagtgagttc

SEQ ID NO: 1039336 - DNA, 120 bp, Artificial Sequence
  ENSG00000260779_2 (sequence is synthesized)
gcaaacaggagtttgccgacttgaggctcggtgccagcccatctcttggaaagcaagctgccaagctgtgctacagcgcctttgcatggccaccccacaggcttttccagaattctgctc

SEQ ID NO: 1039337 - DNA, 120 bp, Artificial Sequence
  ENSG00000260779_3 (sequence is synthesized)
caggagctcagctctttcgacctttcctgggactcaaggcacatcctcagcttctcttcttgagccccccacccaacccctgctctctagcagctctgggggctgcaccagtctctccat

SEQ ID NO: 1039338 - DNA, 120 bp, Artificial Sequence
  ENSG00000260779_4 (sequence is synthesized)
ggactgacaatagaaacacctgggagaaaatgcccatgaggaagatggactcatcttgaggaagatgcccatgctgcagacgtggagacatgtgagatagatgaggccggcacactcccc

SEQ ID NO: 1039339 - DNA, 120 bp, Artificial Sequence
  ENSG00000260779_5 (sequence is synthesized)
acatcctggagaaaggcgggaactcaccaaatcccaaccccttagcctttcggatcccgcagtcgggcctgaggtgcagagctgggcttgaggcaggggctttgctaagagctgcaggag

SEQ ID NO: 1039340 - DNA, 120 bp, Artificial Sequence
  ENSG00000260779_6 (sequence is synthesized)
ggccgaggcccgggaggtgtgtccttgcctgccacgcacattattttgctggtgttactgcattgcccagaggaatgagaattagaaatgtgaatgtgtgcaaagaaacactggggggaa

SEQ ID NO: 1039341 - DNA, 120 bp, Artificial Sequence
  ENSG00000260779_7 (sequence is synthesized)
gaaagactttggggaaaatcttctcccaactcaaaaaatccccctgaatctctccatttctttctctaaacacaattctttattattttatgttgtgcacactattcatgtttactattg

SEQ ID NO: 1039342 - DNA, 120 bp, Artificial Sequence
  ENSG00000260779_8 (sequence is synthesized)
aaacattttttaacctatgaatttgtttatttcaccttgtgtcttctagtcagtaataagacacttgtagaaatcatgacactattgttcagatactcagatttctcaggtaaattaaca

SEQ ID NO: 1039343 - DNA, 120 bp, Artificial Sequence
  ENSG00000260779_9 (sequence is synthesized)
ttcccatcttgaccaataactcctttgttgcaaacattaaatctacagccaaagacaaatggaaaagtaggaatgaccaacaaggatagactaggaatgagacacccatttatactttat

SEQ ID NO: 1039344 - DNA, 120 bp, Artificial Sequence
  ENSG00000260779_10 (sequence is synthesized)
cattatcttaatgctggtactgtacttcacaccccaaaaagttacttgggagcagtctttgttttcagctattttcacttgtctatccataaaagaatggatgtataactagcagatgga

SEQ ID NO: 1039345 - DNA, 120 bp, Artificial Sequence
  ENSG00000260779_11 (sequence is synthesized)
ctttgggactcgctcacatagcatggtggtttcctgctaccgggaagcacaggtggttctgagcactggccacgccccactgagcagcacttaccctgtgtgtccatctctacatatgga

SEQ ID NO: 1039346 - DNA, 120 bp, Artificial Sequence
  ENSG00000260779_12 (sequence is synthesized)
agatgagaaaagtaatacccgccccctgggtttgcggtgagcatggatgagatcatgtacgtacagcacttagcaagggtcctgcccccatgaaaactacaatgcatgttgtttctctgg

SEQ ID NO: 1039347 - DNA, 120 bp, Artificial Sequence
  ENSG00000260779_13 (sequence is synthesized)
gaccagggggcacacagcagaaagtgccttagcctctctgtcaaacgttcttttctggcgatttcatcaaggttgggaacagagagacaaccttcactttggaaggtaatttctcccctt

SEQ ID NO: 1039348 - DNA, 120 bp, Artificial Sequence
  ENSG00000260779_14 (sequence is synthesized)
tgtggggttgagaaccaagtggccgaaccaaggagggtgagtggattgcacgagctccccaggacagggtggagctggagggctgtcttcccttcgacagtagcagctttgaagcacatg

SEQ ID NO: 1039349 - DNA, 120 bp, Artificial Sequence
  ENSG00000260779_15 (sequence is synthesized)
tgggtactgttagtgcaaatggcatggagcatctggtgaagggcagggtaagatttcaccagctgtcagtgtcaaatgtccccaagtctcattttgattgagatagaaaagacatcaaaa

SEQ ID NO: 1039350 - DNA, 120 bp, Artificial Sequence
  ENSG00000260779_16 (sequence is synthesized)
cctaatctgttaaagcattgaccttaataatagtcgtatttttctatatcatccgtatcggtaagcatttttgtattcatgtgagctaatttgtgagatgatcaaggaatatggaaagac

SEQ ID NO: 1039351 - DNA, 120 bp, Artificial Sequence
  ENSG00000260779_17 (sequence is synthesized)
caggccaccaagcatgaaagtctgattctgtggtttagtatgacacctcagaggttctagcagtccttggagggtcgtccaatcgcccaagtttgacctgggtggcactttagacctggc

SEQ ID NO: 1039352 - DNA, 120 bp, Artificial Sequence
  ENSG00000260779_18 (sequence is synthesized)
acgcctcttactctcagtattctgagagtaagctcagaatactctcagcttttgcagccatctgactctctgacctcagagcaaaggggctggagacagagctgggtgaggtgctggggg

SEQ ID NO: 1039353 - DNA, 120 bp, Artificial Sequence
  ENSG00000260779_19 (sequence is synthesized)
agagtcatttccactgccctcattacttgaaggatgcaggttgaaaattccctgttggtaattcattagcctgggaaataaataacgtggaaggcacagaggtggcatagaggaaagttg

SEQ ID NO: 1039354 - DNA, 120 bp, Artificial Sequence
  ENSG00000260779_20 (sequence is synthesized)
ctcaccagtacccaacccccacaccggccataccaaacaggtatgtgggaacccaggtgcggggcacgatttgacaagtgggggtgctctccggccagtgctcgccaggcagcaacagga

SEQ ID NO: 1039355 - DNA, 120 bp, Artificial Sequence
  ENSG00000260779_21 (sequence is synthesized)
gcctctggtggagaagcagtgccagcaggatggctggcccacagtgcagaccggcttcctgggaaacaaggcaagtcctggctccaccacatctttggcaagtctctaaccctctttctg

SEQ ID NO: 1039356 - DNA, 120 bp, Artificial Sequence
  ENSG00000260779_22 (sequence is synthesized)
tttctgactgctcatgcttttagcacagggtttgacacatagtcgtaagagcaaatactggaacattattgatattattagtctctcagctcctgaaaccatctccagcaatctttctct

SEQ ID NO: 1039357 - DNA, 120 bp, Artificial Sequence
  ENSG00000260779_23 (sequence is synthesized)
gcccctgcacatggagtaagggtctgggtgggagaggcaggcacagttttatctggctttccctgaataccttaaagaaactccagcgggggtcaggtctgcgatgctagcgtaattgcc

SEQ ID NO: 1039358 - DNA, 120 bp, Artificial Sequence
  ENSG00000260779_24 (sequence is synthesized)
gaagttcctctgtctcttcgaacttccctccaggacattccctccgcaagcctttctctcccctttctcaccatctggtttgctttcatacctacacttgccgtgcttctggacgtctgt

SEQ ID NO: 1039359 - DNA, 120 bp, Artificial Sequence
  ENSG00000260779_25 (sequence is synthesized)
ggcaaccctgctgtgaaggtctcaggtacagaacttagtcttacgtggaagaaaacacagggcttcccaaaggtcttactgcaggtttaaactgtaatggtgttagaagtataaataata

SEQ ID NO: 1039360 - DNA, 120 bp, Artificial Sequence
  ENSG00000260779_26 (sequence is synthesized)
caaacttagaaaaggcaacattgtaaaggataataatttaaacatttaagatactaatatctttgctatggacatgcaagataaccgctgtcttgtgctagtggttctagtccattttca

SEQ ID NO: 1039361 - DNA, 120 bp, Artificial Sequence
  ENSG00000260779_27 (sequence is synthesized)
aactgcaaacacggagaagcagccacaggaaggttgcctttgaagatcctccaaagaacatcctgggacggaaggtctgatggagactgccagtgaacaacaaggcctctgccatgctgt

SEQ ID NO: 1039362 - DNA, 120 bp, Artificial Sequence
  ENSG00000260779_28 (sequence is synthesized)
gggtctggatgaacatctggacatggtctcacatgcagcctaaaagctgaaatgtaatactcaaatttgcaatgctgaagtaatggggaatatttaaataaacttccaaatgatgagttc

SEQ ID NO: 1039363 - DNA, 120 bp, Artificial Sequence
  ENSG00000261438_0 (sequence is synthesized)
cttttctctaactgatgctaaatataacttgtctttaatgcttcttggatcccttagaaggtacttcctttttaaccttaacccttttagtagttaaataattatttccataggttgcta

SEQ ID NO: 1039364 - DNA, 120 bp, Artificial Sequence
  ENSG00000261438_1 (sequence is synthesized)
ttgccaagaagacctcttccaaacagcacatgattattcgtcaaacagtttcgtattccagatactggaatgtggataagaaagtatacatttcaaggggtaggttttattattaagaaa

SEQ ID NO: 1039365 - DNA, 120 bp, Artificial Sequence
  ENSG00000261438_2 (sequence is synthesized)
gccaaatgaggattttgaaatattctttcctgcatattatccattctagctacatgctggccagtgggccacctttcttttctgcaatttaatgctagtaatatattctatttaacccat

SEQ ID NO: 1039366 - DNA, 120 bp, Artificial Sequence
  ENSG00000261438_3 (sequence is synthesized)
gagtcccaaagtattagcatttcaacatgtaagcatgtcggtaagatagttgtgctttgcttagggttccctcctgtgttatggtctggaaagtgtctttaggcagaaagtctgagtgat

SEQ ID NO: 1039367 - DNA, 120 bp, Artificial Sequence
  ENSG00000261438_4 (sequence is synthesized)
cacagggttcactcattaatttctcttttctgagccatcatagtctgtgctgtctgctctccagttttctatttctagacagaagtagggcaagttaggtactagttattcttcatggcc

SEQ ID NO: 1039368 - DNA, 120 bp, Artificial Sequence; identical to SEQ ID NO: 21684
  ENSG00000261438_5 (sequence is synthesized)

SEQ ID NO: 1039369 - DNA, 120 bp, Artificial Sequence; identical to SEQ ID NO: 21685
  ENSG00000261438_6 (sequence is synthesized)

SEQ ID NO: 1039370 - DNA, 120 bp, Artificial Sequence; identical to SEQ ID NO: 21686
  ENSG00000261438_7 (sequence is synthesized)

SEQ ID NO: 1039371 - DNA, 120 bp, Artificial Sequence; identical to SEQ ID NO: 21687
  ENSG00000261438_8 (sequence is synthesized)

SEQ ID NO: 1039372 - DNA, 120 bp, Artificial Sequence; identical to SEQ ID NO: 21688
  ENSG00000261438_9 (sequence is synthesized)

SEQ ID NO: 1039373 - DNA, 120 bp, Artificial Sequence
  ENSG00000261439_0 (sequence is synthesized)
atcgacttttccggcctcggctgggcgctgtccaccacttgcaacgcctgaaacctcatccagctcaggtggctggggcttctactgggctccgagtccgccactgctgattacagactt

SEQ ID NO: 1039374 - DNA, 120 bp, Artificial Sequence
  ENSG00000261439_1 (sequence is synthesized)
ctgaagttttaaaacgtcccccctcgggagaaaggggtggcgcggcttgcatttacagatctgcaagggctccagacagatgcaacatgcaccttgttgcaaagggcaattccccaggcc

SEQ ID NO: 1039375 - DNA, 120 bp, Artificial Sequence
  ENSG00000261439_2 (sequence is synthesized)
ccgcctccccatcaatttgggttgcacaagctcaagagaagccccaagctaaattacccctggctcagaagggtgcggcgagccaaggggggctctgcgaagaaagccccagggagctct

SEQ ID NO: 1039376 - DNA, 120 bp, Artificial Sequence
  ENSG00000261439_3 (sequence is synthesized)
cgaataaaaataagaacatgtcaagcagatgggaaaattgtctccgagtcgctactccctaccatcatggcgccgcctagaacccgcttgtcatgcctgttacacatccaagattttttg

SEQ ID NO: 1039377 - DNA, 120 bp, Artificial Sequence
  ENSG00000261439_4 (sequence is synthesized)
catcttggttctgaaaccgcaagcatgcttcgtctcccactcccaccttcccacgaaaggggtttttattttccattgtttccctacgcgatgcaattatttcggctattgtgtcaagtt

SEQ ID NO: 1039378 - DNA, 120 bp, Artificial Sequence
  ENSG00000261439_5 (sequence is synthesized)
gaaaaataatcatttttgtttactgcacagcaacccctaattaggagctgtgtgtgcacgaaggtgtcacagcaaagcgacgtggaatcttcgctaaacggtctaaacgaactcctccgt

SEQ ID NO: 1039379 - DNA, 120 bp, Artificial Sequence
  ENSG00000261439_6 (sequence is synthesized)
ctcgaactgacaggccaaccgaaacaggaggcccggagggcgcacaccccttcgctgccggccaccccctccccaagcaaacctgcctgtgggatcaccaggaactgccgagtggatagg

SEQ ID NO: 1039380 - DNA, 120 bp, Artificial Sequence
  ENSG00000261439_7 (sequence is synthesized)
aatccacccccagttaattaggaggggaaactgatagctaaggcagaagggggcggcggcaagtggggcctgaaatccgcattgtgggtagattacatggaacacggcctatgcagagtg

SEQ ID NO: 1039381 - DNA, 120 bp, Artificial Sequence
  ENSG00000261439_8 (sequence is synthesized)
taaataaatacactgataaaggccacggagcgaacgaaaactgcgggtgtcaggagagcaatgctgggagggtgggggaggagaggagctgggggcagcaaggggcggacattcagcctc

SEQ ID NO: 1039382 - DNA, 120 bp, Artificial Sequence
  ENSG00000261439_9 (sequence is synthesized)
acaggcagcttccctcccccttccacctctaccttggataaaactgtgcccgtcacctacgtttggaaacccactccttcccctagcacacgacccctcccctaaccctggccctctttt

SEQ ID NO: 1039383 - DNA, 120 bp, Artificial Sequence
  ENSG00000261439_10 (sequence is synthesized)
tttgcgggggagggggtgcgaggggatgtagaaaccacagcctccaattcagcaccaaacgcatgaacagcagacacttgatcctccaccccagtctagggctgggtcccctccatgtta

SEQ ID NO: 1039384 - DNA, 120 bp, Artificial Sequence
  ENSG00000261439_11 (sequence is synthesized)
gccaagttcaaaatcactgccccaggaaaagagcagggggaagtgggattacggaccttgggggatagggaggtatggagggaagaggagaaagaaatagagacagaatgaaacagagac

SEQ ID NO: 1039385 - DNA, 120 bp, Artificial Sequence
  ENSG00000261439_12 (sequence is synthesized)
acagacagaaatggaggcagtgagacacagaaaatattccacaagcaagagtaatgatcataatcatgccaatagtgtgatgttctgatcaatatggcggacactgtcattcatacaact

SEQ ID NO: 1039386 - DNA, 120 bp, Artificial Sequence
  ENSG00000261439_13 (sequence is synthesized)
acaggcgctccccttccccctcccaaaaaacacccacccaggagttagggtggaggacccagaaccaacgtagggagtgggggaggggagtcaaatataggggtgtgtgtgtgtgtgtgt

SEQ ID NO: 1039387 - DNA, 120 bp, Artificial Sequence
  ENSG00000261439_14 (sequence is synthesized)
gtgtgtgcacgaattaaaaaacaggcctggagagcaatgtggagtaagcaatgtaataaaaacgatttaaaaattattcttaataaaagtacgaatcccaatgccacagggacttacttc

SEQ ID NO: 1039388 - DNA, 120 bp, Artificial Sequence
  ENSG00000269220_0 (sequence is synthesized)
agttacccctttgcaacagaacgaggccggcattttctaaagcgtccttgaggagtccagttcctaaaagattatttcagagtccactgttgtgggctgacttgaatgctctcaaaattc

SEQ ID NO: 1039389 - DNA, 120 bp, Artificial Sequence
  ENSG00000269220_1 (sequence is synthesized)
gtaagttgaagccctgacccccaggacctcagaacgtgactgtgcttggacacagggactttccagaggtgattaaggtgaagtgaggtcactggatggccctcctcctatctgactggt

SEQ ID NO: 1039390 - DNA, 120 bp, Artificial Sequence
  ENSG00000269220_2 (sequence is synthesized)
gtcctgatggggacgcggacacccacacaggaacggacccggggagaacaacacatcgtctctgcgccagggagagaggcgtccggggaacccagccgtgcccacgcatttatctccgcc

SEQ ID NO: 1039391 - DNA, 120 bp, Artificial Sequence
  ENSG00000269220_3 (sequence is synthesized)
ttccggctcagaattgtgaggaaacccgcttctgttgtgcaagtcccgggtctgtggtgctcggccatggcgcccccagaactgcatccccaccttctgctctgagccacccatcccctc

SEQ ID NO: 1039392 - DNA, 120 bp, Artificial Sequence
  ENSG00000269220_4 (sequence is synthesized)
tggaagggctgagcttctctccctttccaccttctgttctgagccacccgtcccctccagaagggctgagcttctctctctttcactgcctatgctctgggaaactttcagaatccccag

SEQ ID NO: 1039393 - DNA, 120 bp, Artificial Sequence
  ENSG00000269220_5 (sequence is synthesized)
gctgtttctggaatagtctgggatggtcattttcggtcctcacagaaccgggggtttggaaagtaggtgaagccatatgggttgcagagaatctggcccagcccctcactagtccctgtg

SEQ ID NO: 1039394 - DNA, 120 bp, Artificial Sequence
  ENSG00000269220_6 (sequence is synthesized)
cttgttagttattctttaattacttggatatcaactctgatttaaaacatcaatttaacatacagataatgctgggactgcagcttcgccaggtggccttcctctcccggtctcgggagg

SEQ ID NO: 1039395 - DNA, 120 bp, Artificial Sequence
  ENSG00000269220_7 (sequence is synthesized)
cgtcacccccatcttgtccccccaagatcaagcgaaaagggcaaagttatcttttttttttgcaaaattcaaacctttccctccttcccaggtctgggtcacttgcgaccctcctctcag

SEQ ID NO: 1039396 - DNA, 120 bp, Artificial Sequence
  ENSG00000269220_8 (sequence is synthesized)
gctgcttctgacaggcccaagtcacagccaacttcaggggagctgtgttggatccctccaaactccgggaatgatgtgacctccccggcgctcaccctgggcctctaggttagactcagc

SEQ ID NO: 1039397 - DNA, 120 bp, Artificial Sequence
  ENSG00000269220_9 (sequence is synthesized)
ccagaccctggctcacagggaagcagagcccatggctggcctccacccgctcagacgcccgcacacaggccaggggagggcttgggggcagctctgggagggtccctgtttgcgctgtgg

SEQ ID NO: 1039398 - DNA, 120 bp, Artificial Sequence
  ENSG00000269220_10 (sequence is synthesized)
gtgtccaaggctgggtgtgcagagctgaggttgccacacacctgagggactctcgcataaggatggcgcagggctggaagctggactgagacagtgaatgagacagcgctgccggctctc

SEQ ID NO: 1039399 - DNA, 120 bp, Artificial Sequence
  ENSG00000269220_11 (sequence is synthesized)
tccgcgccgtggactggctcctaggcagtctcacgagcaagtgtgctgttgctcgtgcacgtgtgttttaactgagatgtgagctggcgcgttttctccacccggctccatctgctgggt

SEQ ID NO: 1039400 - DNA, 120 bp, Artificial Sequence
  ENSG00000269220_12 (sequence is synthesized)
ccctccacattgctgcgcgtgtgcctccagtgccatggggtccccactgtgggcagccctgcattttgcccaactgcctcccaaaccatggaaccccagtgacctccaacttgccgccat

SEQ ID NO: 1039401 - DNA, 120 bp, Artificial Sequence
  ENSG00000269220_13 (sequence is synthesized)
gacgagccactctcattcatatcctcaaacacggtgctctgagcccgaatgagggtttctttagagagatatctggggaccaaactgtagggacagagctcccgtctaaggtgggcctgt

SEQ ID NO: 1039402 - DNA, 120 bp, Artificial Sequence
  ENSG00000269220_14 (sequence is synthesized)
ggtgaggtctccccagtggtacactttaatcccacagcagggcttgcaggccgccctgctccatccccaccaacactgggcaggatctagcctccaaacctttgccagtctaatagtata

SEQ ID NO: 1039403 - DNA, 120 bp, Artificial Sequence
  ENSG00000269220_15 (sequence is synthesized)
aaatgatagctcggtgctattttggttttgcatttccatggtgaacaatgagtttgagagtttttgttcaaaagtcctttgggagttcgagaccagactgggccaccaggagttcaagac

SEQ ID NO: 1039404 - DNA, 120 bp, Artificial Sequence
  ENSG00000269220_16 (sequence is synthesized)
cagcccgggcaattcagtgagatgttcatctctacaaaaaataagaaagataaaaaattagccaggcatgtttgtgtgtgcctgtggtcccagctcctcaggaggctgaggtgggaggat

SEQ ID NO: 1039405 - DNA, 120 bp, Artificial Sequence
  ENSG00000269220_17 (sequence is synthesized)
ggcttgaccccgggaggtggaggctgcagtgagttgtgatcgtgtcagtgcacggctagcctgggcaacagagtgagaccccgtttctaaaataaaaataaaaaacaaaagagaaaagtc

SEQ ID NO: 1039406 - DNA, 120 bp, Artificial Sequence
  ENSG00000260771_0 (sequence is synthesized)
ctctggttttggaagctgagtcctcctagccagctgctgaaacatgtgaactccactccacggctgcccagggcagtggcatttgcactgtgtcccctgagcgctggggttttgcagacg

SEQ ID NO: 1039407 - DNA, 120 bp, Artificial Sequence
  ENSG00000260771_1 (sequence is synthesized)
tgacctagggcggggtgcttgacagcaggtacccccggtccctcagccccttctcccccgtcagccctgctcttctcatttcatttgttggggtttcaaagaatgatgtttgcaaaaagg

SEQ ID NO: 1039408 - DNA, 120 bp, Artificial Sequence
  ENSG00000260771_2 (sequence is synthesized)
ggacgctgcaagcctggtgcctccccaacagagtcatggcatgatggcctaccccagacccattgtcaggccagcccagcaaccgttcccctgggacagggagtgggccttggacctgcc

SEQ ID NO: 1039409 - DNA, 120 bp, Artificial Sequence
  ENSG00000260771_3 (sequence is synthesized)
tccagcctgccctccatcaaagtgactctccatggagaagccacaggtccctggggcaggttacagtgcatgggtgtgggggcagatgggtggatttgagtctcatttctgtcactattt

SEQ ID NO: 1039410 - DNA, 120 bp, Artificial Sequence
  ENSG00000260771_4 (sequence is synthesized)
agctttggaaacttaatcaccacatgtgatccaaatgtcttatctgtaagatgaacataataatgacgacttgatacaattgtgccaattaaagaaagcagtgttctcggatacctcaca

SEQ ID NO: 1039411 - DNA, 120 bp, Artificial Sequence
  ENSG00000269680_0 (sequence is synthesized)
caaaatggccggagccgagcggcagaaagaaaagatgtaaaacatgagtatgtacatcaatggtggaacgatggtagaaggcacagcgggtccgtccggtgtgacaggtagtcacgacta

SEQ ID NO: 1039412 - DNA, 120 bp, Artificial Sequence
  ENSG00000269680_1 (sequence is synthesized)
agcgggtccgtccggtgtgacaggtagtcacgactataatggacctttggaaaagaccagatctgagctcaacttccttccagttattttttatctttttttgagacacagtctcactct

SEQ ID NO: 1039413 - DNA, 76 bp, Artificial Sequence
  ENSG00000269680_2 (sequence is synthesized)
ttatatttttagtagagacaggatttccatatgttggccaagctggtctcaaactcggtctcaagcaaaccactgc

SEQ ID NO: 1039414 - DNA, 120 bp, Artificial Sequence
  ENSG00000269680_3 (sequence is synthesized)
ataaaccactgcaccctgccaacttcattccagttctaatacctgatccactttacagatgaagaaactgaggaattaaaaggtaaaacaggctgcccaagtcctgagatgaagctggaa

SEQ ID NO: 1039415 - DNA, 120 bp, Artificial Sequence
  ENSG00000269680_4 (sequence is synthesized)
atcaagtccagtttgtcgtgactctagaacatgcacccttaacccctccaccgtagaaactcaggaactagagagttctgaatggaactttacaccaataaaagccattctgtccaagag

SEQ ID NO: 1039416 - DNA, 120 bp, Artificial Sequence
  ENSG00000228648_0 (sequence is synthesized)
tctgttcctgaaggattacagcatgaagaaaaataatgtgggtagccgggcttcatcttagcaacacgagcacctcattttggttttcagttggtcttttaatgaacaaatgtgttggaa

SEQ ID NO: 1039417 - DNA, 120 bp, Artificial Sequence
  ENSG00000228649_0 (sequence is synthesized)
gggcggggcgggtgctggacccggaggggccttccggcaactttttggttggtgccgccccgcccaggccccttttaaacttgatctccgcagtgccctcccttttcggccgcggcgcgt

SEQ ID NO: 1039418 - DNA, 120 bp, Artificial Sequence
  ENSG00000228649_1 (sequence is synthesized)
gactgggcttggtggagtttcaagatgctgatgaacttaaggtctggcgcttgaaagaatcagtgaagcttttcaagtagaggagtactctactttgaagaaaggaatggaacagaaggt

SEQ ID NO: 1039419 - DNA, 120 bp, Artificial Sequence
  ENSG00000228649_2 (sequence is synthesized)
gtctgcataactaaatggggatctagagaaagtggagactgcctctggagcagggaggtgagtggaccagatcactgtgggcctgggcctactcagctgattttcaagctaaaaccaggg

SEQ ID NO: 1039420 - DNA, 120 bp, Artificial Sequence
  ENSG00000228649_3 (sequence is synthesized)
gtaacttttcctcttgagacgaaagccatgctcacattctgtgaacagccagagatgtgttcgaaaggcttacttttattttgtactagaaaagattgtctttccaaaatttacctcgta

SEQ ID NO: 1039421 - DNA, 120 bp, Artificial Sequence
  ENSG00000228649_4 (sequence is synthesized)
ttcataaactggaaagttctgatggcaatattttgttacaaaattgtcattaatcacaatccaggattatgccaccatgactagaaggccccctaatggagtttatctgcactgcaaggg

SEQ ID NO: 1039422 - DNA, 120 bp, Artificial Sequence
  ENSG00000228649_5 (sequence is synthesized)
tctccaggacagctccacactaatctgtttcaaagacaaaatccagtctaatcagtttgatgtatgtttctgggaatagagccgaatgttgtagctgatggaatggagtctcataccatt

SEQ ID NO: 1039423 - DNA, 120 bp, Artificial Sequence
  ENSG00000228649_6 (sequence is synthesized)
gattttgcagctggacaagtgccctgccatgttactgccactctttaaggcagaatagagcacattgtatcatttataggcctctcacagtgagaaatatgtggaactttggaaatcaga

SEQ ID NO: 1039424 - DNA, 120 bp, Artificial Sequence
  ENSG00000228649_7 (sequence is synthesized)
atctaaaactgcagtccaatggggtagccactattcacatgtgctattgagtacctaaaatgtggctagaccaagttgacatgtgctgaagggtgaaaaacaccaggagtgaagaattaa

SEQ ID NO: 1039425 - DNA, 120 bp, Artificial Sequence
  ENSG00000228649_8 (sequence is synthesized)
aaatgtaaactatctcaattttatattgattacaaattaaatgatgttttgaatatattgagttaaatgaaatacattttttaatgatacatgatgcgtattatatttctgttggacagt

SEQ ID NO: 1039426 - DNA, 120 bp, Artificial Sequence
  ENSG00000228649_9 (sequence is synthesized)
tggacagtactggtctaaaacagttgattcactatccagtagagagaaaggtattgctgttttaccatatgtgaccttcagggaaaagaagaataaaattagcacttgaaaatggaaaaa

SEQ ID NO: 1039427 - DNA, 120 bp, Artificial Sequence
  ENSG00000228649_10 (sequence is synthesized)
tcactatctacatgaactgccaagttggaaaatcaaaaatacatcaaaatcactcttgggacataagtcacggaagtgactcatgcacacaataaatacccaagaagcaggaccagacgg

SEQ ID NO: 1039428 - DNA, 120 bp, Artificial Sequence
  ENSG00000228649_11 (sequence is synthesized)
cagttgtgtattggcacgctcatcagtgctgcaaaaattccccttctggatggcaacaacaatgctgtatccacagcagcattttaaatctcacctctgattactctactttgaagaaag

SEQ ID NO: 1039429 - DNA, 120 bp, Artificial Sequence
  ENSG00000228649_12 (sequence is synthesized)
aagtggagactgcctctggagcagggaggaggtgccctactgtgtattgctggggtcgtatagccaattggcgaactagctgataaaccctggacagaaatagaaactacaagaagtgaa

SEQ ID NO: 1039430 - DNA, 120 bp, Artificial Sequence
  ENSG00000228649_13 (sequence is synthesized)
acaaagttccatccaagaatgaaacaacaactgatcacgtgagatgcccatgtcatcacttgacccacagacaggggagcaaatatattgatgatctggtcctcctgccggactgttggt

SEQ ID NO: 1039431 - DNA, 120 bp, Artificial Sequence
  ENSG00000228649_14 (sequence is synthesized)
attcatccctgtaagtgagaggaaggaaacattgcaacttaatgggtgagtccttccttctggtgaatttaacatcatgcatttgctagatttgctagccatgcagttatggtgaaaaca

SEQ ID NO: 1039432 - DNA, 120 bp, Artificial Sequence
  ENSG00000228649_15 (sequence is synthesized)
ggaaagatccctttgggtttaactatagattagccataggatttgcaaccaggaaaagaccttcaagatcaattctattggaacatggacaattaacataaataaactgagaaacagaca

SEQ ID NO: 1039433 - DNA, 120 bp, Artificial Sequence
  ENSG00000228649_16 (sequence is synthesized)
gaatagaggttgcttttttttttttttttttgtccctttcacagtggtagcaaggttgaattttgagatggccccaatcatctataggaatattatttgacagttttggagacacaaaac

SEQ ID NO: 1039434 - DNA, 120 bp, Artificial Sequence
  ENSG00000228649_17 (sequence is synthesized)
tgccttatagctgacttgatcctgtagaacatttctgtggaattcaattctattatttaaggtagtttttccatgaaccagctgtggtctgtaacttgacagtgttaataaaacaagtag

SEQ ID NO: 1039435 - DNA, 120 bp, Artificial Sequence
  ENSG00000228649_18 (sequence is synthesized)
caataccttcatcatggttcacatggtcaacaaagatatgacttaactctaagattgttattttacagtatagtcttttttttttttttttttttataatagatagtttcactcttgttg

SEQ ID NO: 1039436 - DNA, 120 bp, Artificial Sequence
  ENSG00000228649_19 (sequence is synthesized)
gcctcccaaagggctgggattacaggcgtcagccactatacccagcagtatattcttaaatattactgttgagccatatatacgacaatggtggactttgaatgtccgcacatctgtagt

SEQ ID NO: 1039437 - DNA, 120 bp, Artificial Sequence
  ENSG00000228649_20 (sequence is synthesized)
aatgtccgcacatctgtagtaaaatgcaatgctaccttcattttttgttggtatgctaaagaaattttaagtatctcacttttaaaaaaataggtttgtgtattttatgtgcttacacat

SEQ ID NO: 1039438 - DNA, 120 bp, Artificial Sequence
  ENSG00000228649_21 (sequence is synthesized)
ttttccatagtactgtagatcattttagtgatgaaatttgatacttttgacagaaaaacaggtcagtgagttccttgggatcaaaaaggggttgattacaagggcaggaaggaattgtta

SEQ ID NO: 1039439 - DNA, 120 bp, Artificial Sequence
  ENSG00000228649_22 (sequence is synthesized)
gtgtgattctacagttctgcatcttgattatggtatgactgtgcgtttgtcaaaccttaacaggatgaattttgctgaatgtaaaatcatacttcaataaacatgactttaaaaacttaa

SEQ ID NO: 1039440 - DNA, 120 bp, Artificial Sequence
  ENSG00000228649_23 (sequence is synthesized)
atctcacctctgatgtatccattgttgtgggcatgagatggcagaaagtgggatatggaaaatgttgccgtgcgccattccgaatactactgtggcttccctgcagcattactttccata

SEQ ID NO: 1039441 - DNA, 120 bp, Artificial Sequence
  ENSG00000228649_24 (sequence is synthesized)
ttggctgttttccatttcaggaaagcttaggatgtccttggtaaatactggctaaccaagaaatttgaaaaatgaaaggaggctgagtaattggtcttgggttgaaacggggtgatgctg

SEQ ID NO: 1039442 - DNA, 120 bp, Artificial Sequence
  ENSG00000228649_25 (sequence is synthesized)
cataaactacgtggttgactctgaaaagctggctaaaaagccagtctgcattccttgtcctcatttccttggagtaatgaagggtgcttcttagaagagggatagattcaagtatgggtt

SEQ ID NO: 1039443 - DNA, 120 bp, Artificial Sequence
  ENSG00000228649_26 (sequence is synthesized)
gtgagtcattcttcttttctgtatgtaataggtctaaccacagggcctgttgagccctgccctggtgaccaagagcattttctgacatgaacagagttaggccatcttgcccgtatgagc

SEQ ID NO: 1039444 - DNA, 120 bp, Artificial Sequence
  ENSG00000228649_27 (sequence is synthesized)
cttaggattctaggtttcataccttccctgccactcccccactaccaaatccccttaccctatagcctagcaatgcagagttgtccaatatagaacctctgttaaacatagcatcaccca

SEQ ID NO: 1039445 - DNA, 120 bp, Artificial Sequence
  ENSG00000228649_28 (sequence is synthesized)
ggaaaatgggatgagtggttgcagtcagtaccacagttctgcagaatcaacttgcttaccttagtacattgcctgtctacgtgtttagcagagctaaaagcaggaatggactgttaaact

SEQ ID NO: 1039446 - DNA, 120 bp, Artificial Sequence
  ENSG00000228649_29 (sequence is synthesized)
accatccttttgtgctcaagtgccatgaagagaagcaaacctggagttgaaagttttcaaagagggcttccaagtgaggaacttgggcatgtgaatctttaattatgactataaaagaaa

SEQ ID NO: 1039447 - DNA, 120 bp, Artificial Sequence
  ENSG00000228649_30 (sequence is synthesized)
ttgtgattggaaatagaatttttatgctagtggttatgatttcattgaaaataggaaatcttatttaagaactctggtcacaaaacctccccagatagtgacgtaaataagacccagtgt

SEQ ID NO: 1039448 - DNA, 120 bp, Artificial Sequence
  ENSG00000228649_31 (sequence is synthesized)
aacaactgtggcattgacatgtcagttcatgtagattgagtcacaatttgatttcgagaatggccatatcccattttgtcttactccatggtgttcctgagcacttggatacaaatagat

SEQ ID NO: 1039449 - DNA, 120 bp, Artificial Sequence
  ENSG00000228649_32 (sequence is synthesized)
tctgtttcctaaaagtagccaaatctttgtagttcaagtgaatattccagactaaaatatgtgtctttttgaaggtccttaagccttacatacttaattgtgtaatttggcaaatatttg

SEQ ID NO: 1039450 - DNA, 120 bp, Artificial Sequence
  ENSG00000228649_33 (sequence is synthesized)
ctgttgtgttgtgtcaagtcctgtgatagagacagttcctacctttctggagctttcacagtgtgactcatttcagtacgtaagtcggagccagttttaatagaatgttctctggttgac

SEQ ID NO: 1039451 - DNA, 120 bp, Artificial Sequence
  ENSG00000228649_34 (sequence is synthesized)
ttctgttgtaaggaataatttcatttcatgtctgggtcaatatgtgaaagattaaattattagggcaaactgaaaaaaaaaatctagttttacccccccaccaccacattcccaaaataa

SEQ ID NO: 1039452 - DNA, 120 bp, Artificial Sequence
  ENSG00000228649_35 (sequence is synthesized)
gggaagcgagtgagatctgatgtctgaagcgctttaagtttctaagcggggcagtataatagcggggttagcaaacacacggaggtcatttcactcgcgcagccatcccccaccgccacc

SEQ ID NO: 1039453 - DNA, 120 bp, Artificial Sequence
  ENSG00000228649_36 (sequence is synthesized)
ggggaagcctccgttagggcccctcgggggtgggggcgtcctcgtggcgcttgggcccttcgtcccgggttaggacggcccgtgtccttgtgcgcttgaaggggccgccccctttcctcg

SEQ ID NO: 1039454 - DNA, 120 bp, Artificial Sequence
  ENSG00000228649_37 (sequence is synthesized)
aggatcccacccccactcagcagaagccgccaggcgcccgtcacctcccgtgcctgagtccctgccgtccacgcattcggcctacaggcagcttttagtcctttttcaattaaatgattg

SEQ ID NO: 1039455 - DNA, 120 bp, Artificial Sequence
  ENSG00000228649_38 (sequence is synthesized)
cattttgaggatcaaattccaaccgcaggcggaggcgccgagccccggacggtctctgggttcttggtgcactcggggctcctgcctgcccaggggctgtgaccgcgcggacggaagcct

SEQ ID NO: 1039456 - DNA, 120 bp, Artificial Sequence
  ENSG00000228649_39 (sequence is synthesized)
gaagcagtgtgagctagcgtctaaggattgtgaaaactgagcaagtgcccagaactagaaacttcccagccccctgaactcagcctcagggtaagcgagtttaatagtgcttcctttgat

SEQ ID NO: 1039457 - DNA, 120 bp, Artificial Sequence
  ENSG00000228649_40 (sequence is synthesized)
tttcaaatctgtggaaggtttgtttcagtttttcccagacaaatattgttgggatagtgtttcttttcaaaaatggataggattcaatgctcatcagtgggaagatagtgactcctgacc

SEQ ID NO: 1039458 - DNA, 120 bp, Artificial Sequence
  ENSG00000228649_41 (sequence is synthesized)
tactcatcaaagagagctattggatagccaccataaagaccactcattaaaaaacaaaattgcatgatattcttaacattgtctttcactttttttaaccaggcttggtggagtttcaag

SEQ ID NO: 1039459 - DNA, 120 bp, Artificial Sequence
  ENSG00000234323_0 (sequence is synthesized)
caggtaatggagcagagactggagcagagacaagttgttcccactgagctctcctcagattacagattgagaatatattttgccaagggtaaggactcatgcctgggagggagtggcaaa

SEQ ID NO: 1039460 - DNA, 120 bp, Artificial Sequence
  ENSG00000234323_1 (sequence is synthesized)
tcaaaggcattgcagcctctttcatcactgccgattgctgatgccaaccatgtgccaagtgcttaatacgtcaccttaaatcttctcatccaccctcagagtagctgcagcatcaaccca

SEQ ID NO: 1039461 - DNA, 120 bp, Artificial Sequence
  ENSG00000234323_2 (sequence is synthesized)
gtgccctgactttcaagacgactatgaaaacaccccaactgctgctaaattaccagcaacaaggatctgacattcttattcaaaagaaagaacaccgaaattgaccttaccctgacaata

SEQ ID NO: 1039462 - DNA, 120 bp, Artificial Sequence
  ENSG00000234323_3 (sequence is synthesized)
tgatggctgaaggatttatgatcacttataacatttgaaattgaggcggaacctgaagaataagactctggtgaaaggtcctatttatgcttttgatgtctttcacttggacatttacca

SEQ ID NO: 1039463 - DNA, 120 bp, Artificial Sequence
  ENSG00000234323_4 (sequence is synthesized)
catgcctattggtaggtttgttacataggtcagttaaggtgatacaagaataaataaaacactatccctatcctttaatatcatttatttatggggtcaatcacagattttcatttttca

SEQ ID NO: 1039464 - DNA, 120 bp, Artificial Sequence
  ENSG00000234323_5 (sequence is synthesized)
tatttttacagaattattacaatatatggtagaggatggaaggcaaggtagtatgaaacggaaaagatattttgaattaaggtatttggacctggattaatatttttgctttggtcttta

SEQ ID NO: 1039465 - DNA, 120 bp, Artificial Sequence
  ENSG00000234323_6 (sequence is synthesized)
ttagctgagtgaccttgagaaagttcttctactaaaaaagaacaaagataataattacttcatgaaattgctgtaaaaaacacataacaagtatatccagactcaacagtgtatgctcaa

SEQ ID NO: 1039466 - DNA, 120 bp, Artificial Sequence
  ENSG00000234323_7 (sequence is synthesized)
aaatgcagatcctttttcccttacctgcaaataaagtcttacagtaatacagtgggggtaaaggtttaaactggtggattcaagaagggctatagaaagaggtagcatcttaatagggga

SEQ ID NO: 1039467 - DNA, 120 bp, Artificial Sequence
  ENSG00000234323_8 (sequence is synthesized)
aggagaggatccaagaaatcagatccattttctacaaaaagaaatgggaagacagataattcaagaagaaaagtttacatgattaaagacccgaagttagaaatagtgatgtgtctcaat

SEQ ID NO: 1039468 - DNA, 120 bp, Artificial Sequence
  ENSG00000234323_9 (sequence is synthesized)
agtaagttaggaattggggtggacacaattgttggaagaaggatggtttcagcaaaggcccaagttaggtgacaatttcaagtgtttgtgaagatatatgaacaaaattataaagtagtt

SEQ ID NO: 1039469 - DNA, 120 bp, Artificial Sequence
  ENSG00000234323_10 (sequence is synthesized)
agggtataagaaatagggaggagggaatgaattaacatttatggagtgtcttgcatgttccaagcactgtactacttgccttataaacctttcttcaataaacgcctacaacaatcctga

SEQ ID NO: 1039470 - DNA, 120 bp, Artificial Sequence
  ENSG00000234323_11 (sequence is synthesized)
aggtaatggagcagagactggagcagagacaagttgttcccactgagctctcctcagattacagattggtccacttacacacagatcttctttcatctctcccacccctgagacagcaag

SEQ ID NO: 1039471 - DNA, 120 bp, Artificial Sequence
  ENSG00000234323_12 (sequence is synthesized)
gccaactcctcttcttccacctcctcctcagcctactcatcgtgaagacaataaggagaaagatcttcatgatgattcacttccacttaatgaataggagtggcaaatcaaaggcattgc

SEQ ID NO: 1039472 - DNA, 120 bp, Artificial Sequence
  ENSG00000234323_13 (sequence is synthesized)
ggtaatggagcagagactggagcagagacaagttgttcccactgagctctcctcagattacagattggtctgattataaaaggagaattggaggcttaccaaacatctgaagagctttcc

SEQ ID NO: 1039473 - DNA, 120 bp, Artificial Sequence
  ENSG00000234323_14 (sequence is synthesized)
agaagtttggtcacttctgaattagagaagttaaaacccaatcacctactaatgctgtgggaaagttctgcaggtgatacatcacaggggctcatgaatgtgtcttaagctgggtcattg

SEQ ID NO: 1039474 - DNA, 120 bp, Artificial Sequence
  ENSG00000234323_15 (sequence is synthesized)
actggaagctctcaaacgaggctggcagaagctgaaattgaagtggtctctgacctaattttcttctgcatgaaacatctgcatcaaggctctctttgatgtattccacttggctctgtc

SEQ ID NO: 1039475 - DNA, 120 bp, Artificial Sequence
  ENSG00000234323_16 (sequence is synthesized)
tacgggattgtatcacatggactcggtgttgcctccttattgaaagacatttccagcctttgcaagatggccggtttgacacaaattagaacaaccttgatagctgtcaactggagacta

SEQ ID NO: 1039476 - DNA, 120 bp, Artificial Sequence
  ENSG00000234323_17 (sequence is synthesized)
tctgagaacaaaaggacattattgcaaaccagcactggagcaactctgaaagaagataaaagtacatgaagaaatcatttgcaggcactggacaaaaaagagtgcaaaactataatcttg

SEQ ID NO: 1039477 - DNA, 120 bp, Artificial Sequence
  ENSG00000234323_18 (sequence is synthesized)
gcaggagacagaaactcacatcattcctcctgaccattactcctccagagagaaccttgttccctggcagaaagcttcagtgctaaaactagcaaataccaacaggtttcaaagactatg

SEQ ID NO: 1039478 - DNA, 120 bp, Artificial Sequence
  ENSG00000234323_19 (sequence is synthesized)
gatcttaagtcatgagactggagaagacaccaaagccaggaccatttgattctggaagaacatgcaagtgttctatgacattgataaaccattggcctcattctggtatttggccattta

SEQ ID NO: 1039479 - DNA, 120 bp, Artificial Sequence
  ENSG00000234323_20 (sequence is synthesized)
tcacagtagttaaaattgccagcctgttctttgttacatcctataagacaatttcttttcttttcttttttatcctttttcttcaacttgttgctggcaaataaattgctgatacattca

SEQ ID NO: 1039480 - DNA, 120 bp, Artificial Sequence
  ENSG00000234323_21 (sequence is synthesized)
agtccaggtaatggagcagagactggagcagagacaagttgttcccactgagctctcctcagattacagattggtgatacatcacaggggctcatgaatgtgtcttaagctgggtcattg

SEQ ID NO: 1039481 - DNA, 74 bp, Artificial Sequence
  ENSG00000234323_22 (sequence is synthesized)
atcacaggggctcatgaatgtgtcttaagctgggtcattgaagtggaatgttttcacaagacctcctccacttg

SEQ ID NO: 1039482 - DNA, 120 bp, Artificial Sequence
  ENSG00000234323_23 (sequence is synthesized)
atgttcggatgtgttcggagtttcttcgttctggtgggttcgtggtctcgctggctccggagtgaagctgcagacctttgcaggagtggcaaatcaaaggcattgcagcctctttcatca

SEQ ID NO: 1039483 - DNA, 120 bp, Artificial Sequence
  ENSG00000234323_24 (sequence is synthesized)
gagttggaattgagaattcagaaaacatgatagagaaggaacaggaagaaaccatttggacatccaaaaataaaaggccagaatctcactttgttgcccaggctggtggtctctaactcc

SEQ ID NO: 1039484 - DNA, 120 bp, Artificial Sequence
  ENSG00000234323_25 (sequence is synthesized)
tctccagtatcagcttgttgcttgacacccctgcacagccaactgtgtaatgtgggtgagtctagctgcattttcttcagacacaagcctggctacccagtgctaaggtgacatcaggcc

SEQ ID NO: 1039485 - DNA, 120 bp, Artificial Sequence
  ENSG00000234323_26 (sequence is synthesized)
aggtatttgcctcacgagattgtgtgctccctgaaggaagagtctgcctcaccccagcctcaagatccagcacagcaacatcatgcttaacaagggctcaaagaagccttggagtgtgtc

SEQ ID NO: 1039486 - DNA, 120 bp, Artificial Sequence
  ENSG00000234323_27 (sequence is synthesized)
attaaaagttatctgacgggctcagctttaaagatcatgaaaaagagatggaaagaagggcatgtaaccacagaatcaaatgggaaaatggtacagaggtgcccagaaaatcaatagagg

SEQ ID NO: 1039487 - DNA, 120 bp, Artificial Sequence
  ENSG00000234323_28 (sequence is synthesized)
tctaaggggatcacccttgctggtttatgccttcatccaattgtttagcaacatcgattgaacatctggctctaccaggaactgaacaaagactttccctcaagtgtgagcttgagcgtt

SEQ ID NO: 1039488 - DNA, 120 bp, Artificial Sequence
  ENSG00000234323_29 (sequence is synthesized)
aggttcttcagttccttctgattccctgtgatccagctcgtgcttattgtctttattttctgagtcttgcctctatggcccccctcctctctgaaagcaaggccacttgagtcgtgcctt

SEQ ID NO: 1039489 - DNA, 120 bp, Artificial Sequence
  ENSG00000234323_30 (sequence is synthesized)
tctgaatgaagtcaatgtctgtgccagtcaatgcacaattgtcgcttatgaccttcctgaggtttcctgtttcctcctaatacattagaagaacaaatcaataaagtctgtgtcccagta

SEQ ID NO: 1039490 - DNA, 120 bp, Artificial Sequence
  ENSG00000234323_31 (sequence is synthesized)
atacaaacacgcccacagaaccaaaccaagcggacaaggcttcaaggagagcttctgggcggctcattcccgcggcgaggcatatcccttggcatggtgccactgcagcccagctcccag

SEQ ID NO: 1039491 - DNA, 120 bp, Artificial Sequence
  ENSG00000234323_32 (sequence is synthesized)
cccccccgccatctgtcatcagcgctctgcctactagattacaaactgcccaaagaatgtctcacagtggcaaggattcgttatctgaaatgcgactattatggtcctgtggcatttccc

SEQ ID NO: 1039492 - DNA, 120 bp, Artificial Sequence
  ENSG00000234323_33 (sequence is synthesized)
tctttgctcggcacctctccctattgccgccatatgaaaaaggaggtgtttgcttccccttccaccatgattattataaggtattcaaaggccagaatcatgttcccagtgctgcttcct

SEQ ID NO: 1039493 - DNA, 120 bp, Artificial Sequence
  ENSG00000234323_34 (sequence is synthesized)
actgtgcactctgatggtattcaaaacttgtttgttgattgaccgattaaaatgaggatatggccactgtcctgcctgaatctggttcagcagcattctcttcagaacagagttaagctt

SEQ ID NO: 1039494 - DNA, 120 bp, Artificial Sequence
  ENSG00000234323_35 (sequence is synthesized)
tcctgcctgatgaacctctgctgatgcttcaaatctggctcaaaatgctacgtcctctgcaacagccccactaacagaaaagttctgataattcctcgtcataccaaataacatgatatt

SEQ ID NO: 1039495 - DNA, 120 bp, Artificial Sequence
  ENSG00000234323_36 (sequence is synthesized)
tctaaggagatgatgcccggaagaacagatccccccacttctaaaatgattgttttaatccaaaagcgcattttaaatggaatgaccatccgtctctggtttctgtggtgaacccctact

SEQ ID NO: 1039496 - DNA, 120 bp, Artificial Sequence
  ENSG00000234323_37 (sequence is synthesized)
tgtccttcaaagccactaaaaatctcatctcctctgtgatgctcccaggatgaattgtttgcatttctatgtcctcacagaactttccacatatctctactggaacagagatatatgtat

SEQ ID NO: 1039497 - DNA, 120 bp, Artificial Sequence
  ENSG00000234323_38 (sequence is synthesized)
atatgtgtaaaactacatatgaaaattgtatctgtcttcctcactacagtgatttccttcaggccagatctgtctttattttgttcatttttggcactatcttttgcaactcatgtggag

SEQ ID NO: 1039498 - DNA, 120 bp, Artificial Sequence
  ENSG00000234323_39 (sequence is synthesized)
cttgggacacagtactcacagaaatgtttgatgaatgcaaaaactgcgcgtctgatcctgagatcccttctctgcaaccttggacattccaaatacccagtcaattctaggcaacaaccc

SEQ ID NO: 1039499 - DNA, 120 bp, Artificial Sequence
  ENSG00000234323_40 (sequence is synthesized)
agttgttggtattctcaataaaatgtagttttggactcctagccaaaagataaaacatccacttgtatcctgtgtattaacttcagataatttgatatcacagcctactataagtcaact

SEQ ID NO: 1039500 - DNA, 120 bp, Artificial Sequence
  ENSG00000234323_41 (sequence is synthesized)
caagggaacccttttgattgaattaaggaaatacaataaaaatagatgttcctatagaaaacatcatgcagaggatctcgggcaggcttcttggatcaacttgacataaaattagggtgt

SEQ ID NO: 1039501 - DNA, 120 bp, Artificial Sequence
  ENSG00000234323_42 (sequence is synthesized)
cgtttccattaagtccatatgtaacaaattttctttccatgttgatattcaataactgacctgatctgaatgacctccctgttgtcaattacacattgcttctgtgtgagaacttcatgt

SEQ ID NO: 1039502 - DNA, 120 bp, Artificial Sequence
  ENSG00000234323_43 (sequence is synthesized)
ccactagcttccattactgtttactggacagaaaaatgaattccaggagtctcaccatcaatgtaaactgaaataaaaccaataactacaacattgtagaaatggctctacataccttat

SEQ ID NO: 1039503 - DNA, 120 bp, Artificial Sequence
  ENSG00000234323_44 (sequence is synthesized)
catatttaactctcataaatgtttcaagaggtaggaatttttaaccctacctatgaagaagaaaactgagggccagggaacttaggtaatttatatcaggtcacagagctactaaatgct

SEQ ID NO: 1039504 - DNA, 120 bp, Artificial Sequence
  ENSG00000234323_45 (sequence is synthesized)
aaggcccagattagactccattccctcagctcttctcattaagatacgtgcatatgtcatgttattaagccacatgacctccacctaaaagatgtgtacccatccaatttcaaatgagag

SEQ ID NO: 1039505 - DNA, 120 bp, Artificial Sequence
  ENSG00000234323_46 (sequence is synthesized)
acctttcatagtcattaaaacaccaaaaatggaggatttgtttttgctgtggcagtcacagattttcttccttttctatcttctttattatctttcttatctatgtatgactatctagcc

SEQ ID NO: 1039506 - DNA, 120 bp, Artificial Sequence
  ENSG00000234323_47 (sequence is synthesized)
atacatgtatctattcattcaacgttcaatgagcacccactattaaccagacattgtagcaagcatttggagtgaacccgaaaagataaatatgggtttctctgtccccaaggcaagctc

SEQ ID NO: 1039507 - DNA, 120 bp, Artificial Sequence
  ENSG00000234323_48 (sequence is synthesized)
aaattgctatgactatgtgaatattaataaccaacatttattaaggacttatcttctaggcattgttctaagagttttacatgtaactcatttaatacttactgtaactccatacatttg

SEQ ID NO: 1039508 - DNA, 120 bp, Artificial Sequence
  ENSG00000234323_49 (sequence is synthesized)
gtgatttttattaatcccactttaaaaataaggaaactgaaatacagagaaatgtgatatccaaggtcagacagctaagaaatggcaaagctaggattaaagcccaggctgtctgaacac

SEQ ID NO: 1039509 - DNA, 120 bp, Artificial Sequence
  ENSG00000234323_50 (sequence is synthesized)
agaatgcttgaccaattatcttatacagtctctctatttaatataatgggcgctgactctggggtcaccaggatgaaaaaggcatcattcttaccctcaaggagttaatgaaaaaagcag

SEQ ID NO: 1039510 - DNA, 120 bp, Artificial Sequence
  ENSG00000234323_51 (sequence is synthesized)
gcaaataaacaggtagaacaatacagagtaattgttaagtgggatgtaagagtaaaggtaagtgggatgataggacgggtgtgcagggaggtgcaggcacacagagaagaggtcctgaca

SEQ ID NO: 1039511 - DNA, 120 bp, Artificial Sequence
  ENSG00000234323_52 (sequence is synthesized)
aagtttgcaataacccatctactatccttatgtggacatagcccagattcttctcctatgtccaggattcattcagtgcccagagatcttggtaaaggaaaaagatgggagagggagaga

SEQ ID NO: 1039512 - DNA, 120 bp, Artificial Sequence
  ENSG00000234323_53 (sequence is synthesized)
caagaggaacgatcaaggaaaagagggagaaaaatcttgagaaaggaggcacataaaaacgttgcttgcccaaccatagtgttttgtctttgtgaggcattcctatacctcataaatgca

SEQ ID NO: 1039513 - DNA, 120 bp, Artificial Sequence
  ENSG00000234323_54 (sequence is synthesized)
tacatgcttagaagaaaatgagtaactctggtcctaattgtttccctactcttctccatggtagcacaagaaacataaacgttctcccctcttcatgcccctcggttatcctgagaggta

SEQ ID NO: 1039514 - DNA, 120 bp, Artificial Sequence
  ENSG00000234323_55 (sequence is synthesized)
atatgatgaaaattagggatcctaggaaagaaaatggacgagtccctgctactccaatatgtggatgcactcccgataaatcgtgtaaattatttgctcagccttttacattgaactttc

SEQ ID NO: 1039515 - DNA, 120 bp, Artificial Sequence
  ENSG00000234323_56 (sequence is synthesized)
aggttgtctttagttttctgcaattataaaagatgctagattggttatttttatacttgcatttttgtacaccttttgaccatttcctagaaaagatcccagaatggaattacaaattca

SEQ ID NO: 1039516 - DNA, 120 bp, Artificial Sequence
  ENSG00000234323_57 (sequence is synthesized)
aagggtatattctttttttaaactcttaatccatatggcaaaaacgcttcccaaaaagtagtgacaaattatatcccacggagtatatttgggaatgcttatccaatcacactttcccca

SEQ ID NO: 1039517 - DNA, 120 bp, Artificial Sequence
  ENSG00000234323_58 (sequence is synthesized)
tttccccagcattactatacttttaaaatctttattagaaaaaaatgtttttcatttaactttcatttttggattactagtgaggttaaatatagtttataagtttattaatcaacagta

SEQ ID NO: 1039518 - DNA, 120 bp, Artificial Sequence
  ENSG00000234323_59 (sequence is synthesized)
aataatgcatataaacctagtagatgctcaataaagcaagattattttttaataatgagttcgaacatgatttcatggtttctggctatgtacatttcttcttagaattttaaatttatt

SEQ ID NO: 1039519 - DNA, 120 bp, Artificial Sequence
  ENSG00000234323_60 (sequence is synthesized)
tatttttctcatttccctatttgaagtttagtggtttctctcagtgagctttttatatattaggtataccgatcctttgttttgaaaaaatgtccaggttttgaaggattattgtcactt

SEQ ID NO: 1039520 - DNA, 120 bp, Artificial Sequence
  ENSG00000234323_61 (sequence is synthesized)
ttggaacaatgctatataaaggcattatgctttacaaagatgacactttttatttgactcactgataaggaaacagaggcttaaaatgtgtatgtgtttcctcttttttaggtaaaacct

SEQ ID NO: 1039521 - DNA, 120 bp, Artificial Sequence
  ENSG00000234323_62 (sequence is synthesized)
tttatacagtcaaatgcgtaaatcttacatgtaccatttcatgaattctgacaaatgtacgcacctgtgtcacacaagtttttattaaaatgtagaatattgtatcactctgaaaaattc

SEQ ID NO: 1039522 - DNA, 120 bp, Artificial Sequence
  ENSG00000234323_63 (sequence is synthesized)
ttttgcatgcttttctaatcaatgttgcctttgccctatcccaaccttgaaaggaaaccattgtcctggtttagaacttcatataaatggaatcatacaacatgtactttttttttattc

SEQ ID NO: 1039523 - DNA, 120 bp, Artificial Sequence
  ENSG00000234323_64 (sequence is synthesized)
tggtttctttcacccagcatcatgccttggagatttattcatgctgttgtatctgtcaatggtatgggatattaaaagtaatggcaaaaactgaaattacttttgcaccaaacctatgca

SEQ ID NO: 1039524 - DNA, 120 bp, Artificial Sequence
  ENSG00000234323_65 (sequence is synthesized)
atgacatgagtggttgtggccaagtaatattccattgtatgaatacaccaatttgttcatccattcacctgttgatggatatctgagctacttccaattttttactataacaaataaagc

SEQ ID NO: 1039525 - DNA, 120 bp, Artificial Sequence
  ENSG00000234323_66 (sequence is synthesized)
tcctgccaagtcccattttttgggaggaggaaatggattaggtcctggaggttgtcataaatgcatcaagtgactttctcagcatcatctgaaacaattgaagatcctaaaaaaatgata

SEQ ID NO: 1039526 - DNA, 120 bp, Artificial Sequence
  ENSG00000234323_67 (sequence is synthesized)
gcagcttttaagaaggactatagtggaacaagcaatattctaagtgacaagagacacagattctagaataaacttagccaaatatgtatgaactcgaacaatctcctttgcctctccagg

SEQ ID NO: 1039527 - DNA, 120 bp, Artificial Sequence
  ENSG00000234323_68 (sequence is synthesized)
ttttaatttccccatctttacaatggaagcaatgacaacagcagcatgcagctagtttggagattttgaagtcagattggctatttagcattaacccaccatggtgctggttgatcttgc

SEQ ID NO: 1039528 - DNA, 120 bp, Artificial Sequence
  ENSG00000234323_69 (sequence is synthesized)
tagatacaaatctgtcataagtgaaagcatcttgacggtgtcttggaagctgactggaaaaatactgcttttagcagtacctttaaagcaacaggagcttttctgcattgcatagagaca

SEQ ID NO: 1039529 - DNA, 120 bp, Artificial Sequence
  ENSG00000234323_70 (sequence is synthesized)
taaactgtgctgtagccacgttattctgaaagcccattgggaagatgccaatagtaattcagctcaaataatctctattagccataacccttttggttgcaagagacaaaaacatgactg

SEQ ID NO: 1039530 - DNA, 120 bp, Artificial Sequence
  ENSG00000234323_71 (sequence is synthesized)
aaattattttcggctagaaggatcgaggagacttgcagcatagctttgagaacagctgaaattaaagacatgaatgctgcaagtgtctctgccactctttgtgtattaactttatgtgct

SEQ ID NO: 1039531 - DNA, 120 bp, Artificial Sequence
  ENSG00000234323_72 (sequence is synthesized)
cagcctggcttcctccacactgcaagggatatggctgttgcttatattttcatctccatctttgccaccagagagggactgccttttgtcttgttccaatttgggaattcctggggaagg

SEQ ID NO: 1039532 - DNA, 120 bp, Artificial Sequence
  ENSG00000234323_73 (sequence is synthesized)
actactctggcttgggtcacatgtccacaccctgaatcaaacatctgaggtcatggagaagtacactgattggaagatcctactaatattaaaaagtttgaggaagagaagcaattgcct

SEQ ID NO: 1039533 - DNA, 120 bp, Artificial Sequence
  ENSG00000234323_74 (sequence is synthesized)
ctataaagggatgctactcctagaaaaatgatgggtgctgagaaggccaaatgatcagtgcctactgaactgtcccataggtatttaggtagatatgggtaataaagttcttgtgaacta

SEQ ID NO: 1039534 - DNA, 120 bp, Artificial Sequence
  ENSG00000234323_75 (sequence is synthesized)
gcccactacatggaatgcaatgtaaggaaacacagcttggttctgacaccaactagctgtgtgaccttggacctcatcattcatctctctgaattttgattacttatataaacaactgtc

SEQ ID NO: 1039535 - DNA, 120 bp, Artificial Sequence
  ENSG00000234323_76 (sequence is synthesized)
ttccccctcaccccgccttgagtagggctctttgagattggacagaagtgcagccatccagcccagaacacaacaagaatagagttgatgagccctcttctcctcaacaaacacctgtga

SEQ ID NO: 1039536 - DNA, 120 bp, Artificial Sequence
  ENSG00000234323_77 (sequence is synthesized)
tgagaacattgaggcaagggaacaggtggccaaaaataccctcatagccttgagaaagtccatcttgatgttatccagtgaaacttaatggcaacgcaggagccagggagcctgctttat

SEQ ID NO: 1039537 - DNA, 120 bp, Artificial Sequence
  ENSG00000234323_78 (sequence is synthesized)
tttggaaatgaaaaagtcagtacagttgatgagaatttgaagagaaaagacacaacaaagtagaaggctaacaccaattccaaacaatagtaaagaatcataataaagttactatgaatc

SEQ ID NO: 1039538 - DNA, 120 bp, Artificial Sequence
  ENSG00000234323_79 (sequence is synthesized)
gcccccccgccatctgtcatcagcgctctgcctactgtggcatttccctctttgctcggcacctctccctattgccgccatatgaaaaaggaggtgtttgcttccccttccaccatgatt

SEQ ID NO: 1039539 - DNA, 120 bp, Artificial Sequence
  ENSG00000234323_80 (sequence is synthesized)
aactgccaagagatgcaaaggattaatcatgaacccagttgcccagaggtggaaaaaaaaatctgttgtggtagactgaagaagcaagaagttatatggcaaatacttgcaacaactgga

SEQ ID NO: 1039540 - DNA, 120 bp, Artificial Sequence
  ENSG00000234323_81 (sequence is synthesized)
aaaaaacagaagagggaaagaaagaagtaaaatctcccaccaagtttatcaacccagagccacagctactgttttgtaatctccaggcgactatatatctaggctatgaatccacatctt

SEQ ID NO: 1039541 - DNA, 120 bp, Artificial Sequence
  ENSG00000234323_82 (sequence is synthesized)
tttcacccaactcactattcaagatttatgtgattcagggtattaaatgctaatatatttctgttgctcaaatttttaatgtacgcattagttctgaagtccataagctggttaatattc

SEQ ID NO: 1039542 - DNA, 120 bp, Artificial Sequence
  ENSG00000234323_83 (sequence is synthesized)
acattctggctaacgcatagtgttgaatttgtaccttctaagaattattttagactacaagttggggatatgatacccacaggcaagcaaaatgtaatggggagcttagtaacttataag

SEQ ID NO: 1039543 - DNA, 120 bp, Artificial Sequence
  ENSG00000234323_84 (sequence is synthesized)
aaatcttatcactctaacaataacaaacacaaataataggataattaacatattttttacagttcatacaacacagtcatatataatactttgattttcatgaaataggtagatcaggta

SEQ ID NO: 1039544 - DNA, 120 bp, Artificial Sequence
  ENSG00000234323_85 (sequence is synthesized)
ttactatcatctccatttttagctggatagactaaggttggtcaaaaccattaaatgacttgggaacatatccttgctcactgtttccagagccctctgtctgtaacactcacttgtgtc

SEQ ID NO: 1039545 - DNA, 120 bp, Artificial Sequence
  ENSG00000234323_86 (sequence is synthesized)
tgattacttgacacgtgtcttcctctctaagtttcatggaaacgtggtcctagcacagcatctgatgtgcagtatgtgctccataaccatttgttgaattgaattgatcaagttcccaca

SEQ ID NO: 1039546 - DNA, 120 bp, Artificial Sequence
  ENSG00000234323_87 (sequence is synthesized)
catgatgtcagatgtccatgtcacttgttcttttaaagccttagctgtgttttatttacctattgttactgttggctcataaaaattagaagaagaagatgccaagtgagacaggtagac

SEQ ID NO: 1039547 - DNA, 120 bp, Artificial Sequence
  ENSG00000234323_88 (sequence is synthesized)
tgggaatgtttatttctataccataaaatatttatttttatacctaaaaccacctgtgtgaaacagcactttggcatatggcttagtgatcatatggctttatggccagatagctcagtg

SEQ ID NO: 1039548 - DNA, 120 bp, Artificial Sequence
  ENSG00000234323_89 (sequence is synthesized)
gttgcatagcccagtggtcataagcctcaggggtcatatgtctccatggtcacgtaactcagtagtgggctcagtgatcgtatagctcagtagctatagaggtctatgaacagatagctc

SEQ ID NO: 1039549 - DNA, 120 bp, Artificial Sequence
  ENSG00000234323_90 (sequence is synthesized)
agttgtgatatatataggccagtggtcacatagctccttggtcatataactcagaagtcatatatctcaatgaccttaatggttatatagcttaattgttcagagtcagaggacatataa

SEQ ID NO: 1039550 - DNA, 120 bp, Artificial Sequence
  ENSG00000234323_91 (sequence is synthesized)
tcaggtcttttccccaaacttcactctatcctctcccagatgtcagttttttagcacaccactaaaccttcctaagctgcagtttcctcatctgcaaaatggagattaaaaaaaattaaa

SEQ ID NO: 1039551 - DNA, 120 bp, Artificial Sequence
  ENSG00000234323_92 (sequence is synthesized)
atctccccggattattttcatggcaaaatgaaatcggatctgtaaaccatgcagcacaatgtctggcacttaaaaagcattgattgtgcatcattatcatcattgttattattactctta

SEQ ID NO: 1039552 - DNA, 120 bp, Artificial Sequence
  ENSG00000234323_93 (sequence is synthesized)
ttattattgtgtccctaaagagaaagaagaaagtcttttgggttgaacacagaattgtcaacagcagaaaaggcaatttactgataactgatacttgatttggagataggaaagctttta

SEQ ID NO: 1039553 - DNA, 120 bp, Artificial Sequence
  ENSG00000234323_94 (sequence is synthesized)
ctcaattttctgcaagaatagatgagtaaatgttaactctgtcatgtcttccatgtcacactgcaacccccagaggcaagaacaacatctccagcttcctggggagaagttcattgactt

SEQ ID NO: 1039554 - DNA, 120 bp, Artificial Sequence
  ENSG00000234323_95 (sequence is synthesized)
gccagttgaagaacccaaagcctcctagattattctcctctcattctctttcaccagccctgagtcatttaatctcctcattccaccttcattgctatgtgcagtattttttgtaggcaa

SEQ ID NO: 1039555 - DNA, 120 bp, Artificial Sequence
  ENSG00000234323_96 (sequence is synthesized)
tattttttgtaggcaattaccaccccacttgatcattttaaagaagggaatttctaaatccttttgcagcttagagaagcatgttctttcatttgtacacatacacacacacacacacac

SEQ ID NO: 1039556 - DNA, 120 bp, Artificial Sequence
  ENSG00000234323_97 (sequence is synthesized)
gcagatggcactggcagctgctcaagctggtactcctcctcaatgcttcttgttcctctgctggtggacactgccggttgggcctcgtgctggcagaggctggagagcccaggaggaggg

SEQ ID NO: 1039557 - DNA, 120 bp, Artificial Sequence
  ENSG00000234323_98 (sequence is synthesized)
cagctggggaatctgacttttatggctgaaatgaaaactcccctgggtggcctggaggaagtgttctgaccctctctgaattacccgcactgagatggccgtggcacttctgactccaca

SEQ ID NO: 1039558 - DNA, 120 bp, Artificial Sequence
  ENSG00000234323_99 (sequence is synthesized)
gaaaagcttgaaggtccaatttccatcttcaggagggaaacatctcctgcttctgccttcagacagcctttctctgtgcttctttgtgagccatttctgagaaccgcctgcattctgttg

SEQ ID NO: 1039559 - DNA, 120 bp, Artificial Sequence
  ENSG00000234323_100 (sequence is synthesized)
ctagtggtgaattgattgagaagatcctttgttgatagtccagcttcaaaagcatgcaggctgctgtttgtcttctttcttccttccaacggaggatatgctcctacagaggagtgggga

SEQ ID NO: 1039560 - DNA, 120 bp, Artificial Sequence
  ENSG00000234323_101 (sequence is synthesized)
aaaacaaaaatgccctttttatttacttataacttcactaagctttttgtaaaggggccatagtatcactattttgtggggagtggcaaatcaaaggcattgcagcctctttcatcactg

SEQ ID NO: 1039561 - DNA, 120 bp, Artificial Sequence
  ENSG00000234323_102 (sequence is synthesized)
aattcacagctgcaatggttgggagaatttcctgtctgggagtctggaaactgccaagagtggaaagctgcagccagccagcgaggcctctgttgtcactggcccaaacaacaacaaaaa

SEQ ID NO: 1039562 - DNA, 120 bp, Artificial Sequence
  ENSG00000234323_103 (sequence is synthesized)
tgtgcacacagacatggcttttcacctacaagtttaaggtattcatctcatcacatctgtggacttcttcgtgttcagggataccaagtaacaaactatagcatcatctctggtccagga

SEQ ID NO: 1039563 - DNA, 120 bp, Artificial Sequence
  ENSG00000228643_0 (sequence is synthesized)
aggattatgtcggctgtctaccccgtgggatgcagacagagaccacgaagttacagagccctctccatcttcactcccccgttcagggctcctggctgagccccgactgtgtgtgaagtc

SEQ ID NO: 1039564 - DNA, 120 bp, Artificial Sequence
  ENSG00000228643_1 (sequence is synthesized)
gctgaccccctatttttaatgggacaaatggattccttgaatgagccctttctaccatccaagtgtgggccaagacttccgcccaggcctcctgattcccacaaacacagcaagattaag

SEQ ID NO: 1039565 - DNA, 60 bp, Artificial Sequence
  ENSG00000228643_2 (sequence is synthesized)
taagattaggtcgtcttgctctgtcatccaggatagagtgcagtggcacaatcttggctc

SEQ ID NO: 1039566 - DNA, 120 bp, Artificial Sequence
  ENSG00000228643_3 (sequence is synthesized)
aagaaaattggagctccatattagccaagttgctttgcacaaaataaaaaagactggggccctggattgcaacacacgacagtgaagaagactcaatatcagggacatttattttccttg

SEQ ID NO: 1039567 - DNA, 120 bp, Artificial Sequence
  ENSG00000228643_4 (sequence is synthesized)
cttgacgcagccgggataaaactgaccttatcatgtttgacctgattgtgtcacaaaagcattagacgctttcatgctttcctgggaaattccccgtgggccaccactctgggcagggcc

SEQ ID NO: 1039568 - DNA, 120 bp, Artificial Sequence
  ENSG00000228643_5 (sequence is synthesized)
atgaaggagcctggatgcttccttttcagttgggaaagctttgctggaaatgcttccatttccaaagtgacggttgacagtttagtgtggaaaccaccgacccgcgccgcagctcacgcg

SEQ ID NO: 1039569 - DNA, 120 bp, Artificial Sequence
  ENSG00000228643_6 (sequence is synthesized)
cgccagaaggagaccaggcgcttctccgccaggcctcatgcgcggacctattgctgctattttctttttcttaaaaaaaaaaaaaaaaaaaaaaggaatcctgctgttcagtggtcaaaa

SEQ ID NO: 1039570 - DNA, 120 bp, Artificial Sequence
  ENSG00000270605_0 (sequence is synthesized)
tattattattattattttgtattttctgcagaaatggggtttggtcatgttacccaggctggtctcaagctcctgggatcaagtgatccgtccgcctttgcctcccaaagtgctgggatt

SEQ ID NO: 1039571 - DNA, 120 bp, Artificial Sequence
  ENSG00000270605_1 (sequence is synthesized)
acagcggggagccactgcgcccagcccagccagcccgattctgacccagagggtttagaagttgcttagacagatctgctcctgtaagttcacagaactcctctggctactgctgtccct

SEQ ID NO: 1039572 - DNA, 120 bp, Artificial Sequence
  ENSG00000270605_2 (sequence is synthesized)
ttttttcctgagtcttgtttgctgaaatcttcttgagattctgtgagacaatagcccctatttcttccagtaaattactctttttcttcccctttagacagccagtgctggtttctgtta

SEQ ID NO: 1039573 - DNA, 120 bp, Artificial Sequence
  ENSG00000270605_3 (sequence is synthesized)
catgtaaacaaaaaggattttattttttatttttttaggctagtcaagtgaagcagtgggaggcggaggacaaaaagaattttgactaaggcaataaatatattatacaagtgaagtatt

SEQ ID NO: 1039574 - DNA, 120 bp, Artificial Sequence
  ENSG00000270605_4 (sequence is synthesized)
tcccaaactgtattctgtggaatgctgtgttctcaaatgttaacaagttccatacaagaaccatttatttctaaattctaaagtcacattcatattatgaattatattaaacatatatag

SEQ ID NO: 1039575 - DNA, 120 bp, Artificial Sequence
  ENSG00000270605_5 (sequence is synthesized)
ttacttttattatacctaataatctgtctttataaaagtgtttacccaaaaatgccagcagattccatgagaaactacctgtactacaatgatcgtcaaactttggtgcatacatgacag

SEQ ID NO: 1039576 - DNA, 120 bp, Artificial Sequence
  ENSG00000270605_6 (sequence is synthesized)
catgacagaatcaaccggagggcttgttaaaggattgctgagtcaaacccctcgtttcagcaggtttgtggtggggcctgagaatttacatttcttttttttttttttttagacggagtc

SEQ ID NO: 1039577 - DNA, 64 bp, Artificial Sequence
  ENSG00000270605_7 (sequence is synthesized)
ctcctgaccttgtgatgccgagaatttgcatttctaacaagttcccaggtgatgctgacactgc

SEQ ID NO: 1039578 - DNA, 120 bp, Artificial Sequence
  ENSG00000270605_8 (sequence is synthesized)
tttgcatttctaacaagttcccaggtgatgctgacactgctggctcatggaaccactgctgtagtattttccaaattatcctgattctaagaaccacctatgacctgtgctgttttttca

SEQ ID NO: 1039579 - DNA, 120 bp, Artificial Sequence
  ENSG00000270605_9 (sequence is synthesized)
gtggttactggctcatgtcacataaattcttttaggattcaaacatgtttgtgatattactcagtatttacatcttgcttttactgcagcatgatagaaaaattaaccacaggtatatca

SEQ ID NO: 1039580 - DNA, 120 bp, Artificial Sequence
  ENSG00000270605_10 (sequence is synthesized)
gtatatcataacaaaaagaccatgagttaccattttcacaaagttcagatatatttaaattagcctatttaatctttttttggttgttgttgagatggagtctcactctgtctctcaggc

SEQ ID NO: 1039581 - DNA, 120 bp, Artificial Sequence
  ENSG00000270605_11 (sequence is synthesized)
cagcctatggtacacctttactgaggaaacaattcaggaacatcactcttagtaaggcaattgttgattataagtcaaaaaaacaccatcatgtacaaattcaggggattttgtatacct

SEQ ID NO: 1039582 - DNA, 120 bp, Artificial Sequence
  ENSG00000270605_12 (sequence is synthesized)
tgtttttttggttacaaatatgcaaaattaaagatgtttgctaatacttgtttccaatttttaaacttttcaagtgttgcactgttaataatgttaaaataaaaggcatttgacttagta

SEQ ID NO: 1039583 - DNA, 120 bp, Artificial Sequence
  ENSG00000281769_0 (sequence is synthesized)
gtccgcagccggtggaagtcgtgagacggtgcaacgctgagcggctttccgcagaaggaggtgccttcgaggccggctctggaggagccacagccaagccggccacagcaaagcacttct

SEQ ID NO: 1039584 - DNA, 120 bp, Artificial Sequence
  ENSG00000281769_1 (sequence is synthesized)
ctcgggatgctcagacgttttcaaatgccggtcgccaccctgggcgctggcggcaggttgacttagccacaggcgacttaggctgcaggtggaaggcgaggattcccgccggcccccagc

SEQ ID NO: 1039585 - DNA, 120 bp, Artificial Sequence
  ENSG00000281769_2 (sequence is synthesized)
ctcctctgcaggcctccgaagctggagagttgggtggaatagggaggaaatcgggcttcggatgccccccagcctcgggcgctctgcaggctagctcacggagttgaaacaaccacaaaa

SEQ ID NO: 1039586 - DNA, 120 bp, Artificial Sequence
  ENSG00000281769_3 (sequence is synthesized)
atgatacaaattacgcgcaagcactgaatgctcagtgtgggcgggtcaccgtgccggggcgtccacgcgcgtcgcctcctcttaggtggcctccattctgcagttggggaaagcgaggcg

SEQ ID NO: 1039587 - DNA, 120 bp, Artificial Sequence
  ENSG00000281769_4 (sequence is synthesized)
cagaggagggttaagggacctcctcactgtcccggccagggaggggcggatccgcactccaacccgcctctgtcaggctgggcctctaagccgggccgtccgcgcagagtccgggcggag

SEQ ID NO: 1039588 - DNA, 120 bp, Artificial Sequence
  ENSG00000281769_5 (sequence is synthesized)
ctggggggtgtggggggaatgctcggggcaggatccgctcccgcgattagctctgggagcgaagtgggaaggggcagggcggggctgcagaagtcgggaccctcgaatgggatccgagcc

SEQ ID NO: 1039589 - DNA, 120 bp, Artificial Sequence
  ENSG00000281769_6 (sequence is synthesized)
cgtgtggctacgcgagggggaagccacctgggctgcgtggctccggggcgaactgggtgggatgggattcgtaaaaagaactgggtgggtgagagggagccagtttgaaactcactttcc

SEQ ID NO: 1039590 - DNA, 120 bp, Artificial Sequence
  ENSG00000281769_7 (sequence is synthesized)
tcctttatttattttatttttaaatttgtggcagggtgtttgaagaaaacaagaaaaccaccctcatccaggaaacaacaacaacaaagagttttctctctctctctctctcagtctcca

SEQ ID NO: 1039591 - DNA, 120 bp, Artificial Sequence
  ENSG00000281769_8 (sequence is synthesized)
tctctctctctcagtctccagggtctcactcctgtcgcctaaggctagagtgtagtgccgcgatctcggcgcacctgcggcctcgacttctcaggctcaagcgatcctcccacctcagcc

SEQ ID NO: 1039592 - DNA, 85 bp, Artificial Sequence
  ENSG00000281769_9 (sequence is synthesized)
tgtatttttagtagagacggggcttcgtcctgttgtcgaggttggtctcgaactcctggccttaacctccttcttttcttgttga

SEQ ID NO: 1039593 - DNA, 120 bp, Artificial Sequence
  ENSG00000281769_10 (sequence is synthesized)
caaagtgctgggcctccttcttttcttgttgaggttcccatacgtgactcgcccaaagagagattctcaccgggtgggtctgagcagcgccagaaagggaagggatacagggtgagagag

SEQ ID NO: 1039594 - DNA, 120 bp, Artificial Sequence
  ENSG00000281769_11 (sequence is synthesized)
atttggggtaaagggagagggaggcagagggggaagggggccccaggccggtcagttccaagaggcgagccccgccggccgagctccacgggctgagtcaacagcggcccagttgctttg

SEQ ID NO: 1039595 - DNA, 120 bp, Artificial Sequence
  ENSG00000281769_12 (sequence is synthesized)
tccgaatggtactttgtaatttggtgtcggtttacaaggcaaaggacttctgtttcctcacctcaccaggtcctcagtcacggcctgaccccttttaagagagggacctcaagaggggag

SEQ ID NO: 1039596 - DNA, 120 bp, Artificial Sequence
  ENSG00000281769_13 (sequence is synthesized)
ctgaattccttgagccctcgcctttcaatcaagttttcaaggcacgctttggccgggccctcccggactggctgtgctgctacctccagaggaaatcaacgtctgtaccgaactcctaac

SEQ ID NO: 1039597 - DNA, 120 bp, Artificial Sequence
  ENSG00000281769_14 (sequence is synthesized)
ctgtgaagacctgctgtcctcataattgcggagtggggccaaggaaggctactctttcccctttgcagatgaggcaactgaggcaactgagccgcagaaaactaactgaccaagatcacc

SEQ ID NO: 1039598 - DNA, 120 bp, Artificial Sequence
  ENSG00000281769_15 (sequence is synthesized)
cagccagtggaacaaacagctcgagcccaggctctctggctcctattccctctgaatatttaatttactaaactgtttgagcagccgtagattcccttcacaatccggtaaaatctataa

SEQ ID NO: 1039599 - DNA, 120 bp, Artificial Sequence
  ENSG00000281769_16 (sequence is synthesized)
ttactcctccccttccccaaaatgtacttattttcccattcaatatcggagcttctcggacttcctgaagttagtcccaggataaagatcctctttctcctcccccttgccccgccccac

SEQ ID NO: 1039600 - DNA, 120 bp, Artificial Sequence
  ENSG00000281769_17 (sequence is synthesized)
gacctcgcttcccagtaattgctgggatcccgattctctggaggcattccgggcggattgattgagtgtaattcaactgagttatgattacagctgctggttcccctgtgccgcagacgg

SEQ ID NO: 1039601 - DNA, 120 bp, Artificial Sequence
  ENSG00000281769_18 (sequence is synthesized)
gtgtgtagggagggtggggcacgtggagatgggcaagatgtctggagagagcagtggggctgttgtgcacgtttttgctagaggtgagggttgagagctagggaggaaacaattccgagc

SEQ ID NO: 1039602 - DNA, 120 bp, Artificial Sequence
  ENSG00000281769_19 (sequence is synthesized)
ccaccccgctgggacccacgggctgaggtcctccaggaagcactggggctcagctttccctatgtcagtacggatggaggacacacaggaggaaggctggtggctctgccggaacattct

SEQ ID NO: 1039603 - DNA, 120 bp, Artificial Sequence
  ENSG00000281769_20 (sequence is synthesized)
gagggccttgttctctgcctacgctgggacctgcagtcccatctcccatttggcctcagccagcgtggtttattgtacccaaatcccgcttgtttcctccttatgcagcagttttaaaat

SEQ ID NO: 1039604 - DNA, 120 bp, Artificial Sequence
  ENSG00000281769_21 (sequence is synthesized)
ttcgaactagttcaagagctgctcggctgctcgtttactttcagttttgggaacagaggcttacacccctttctcctcctgtttctcctccagtccctcttcccctcaatctagtttccc

SEQ ID NO: 1039605 - DNA, 120 bp, Artificial Sequence
  ENSG00000281769_22 (sequence is synthesized)
aaagttagcaaacctactttcttgattttgtttcttaacatttaaaacaactggtgaagggctaatgatttcatctccttaccaccacccctaaccttaaaagcaataaataaaataaaa

SEQ ID NO: 1039606 - DNA, 120 bp, Artificial Sequence
  ENSG00000281769_23 (sequence is synthesized)
gcccagcctgccaaccgcatgcacacacggccagcggtggtgggggtttgtagtttgcatacacgtcgcggggcagaagcctgtttgcaaaggctgaaatgtagctagcaggggaagacg

SEQ ID NO: 1039607 - DNA, 120 bp, Artificial Sequence
  ENSG00000281769_24 (sequence is synthesized)
ctgaaaaaacagagtgatttgataaaaacgtgctgggccctgttacaggagggctgctgggagtagtcccaggtactcacatcagaaggggtgcaggggaataaaatttaaaaaagcaaa

SEQ ID NO: 1039608 - DNA, 120 bp, Artificial Sequence
  ENSG00000270604_0 (sequence is synthesized)
ttcctctacttgtccatttactttaagagacacttactgatgcaaaggagactgaacagtgaaggatctcactcagaatcctgtccacaatctgtccagtttacaccttaccccaaagag

SEQ ID NO: 1039609 - DNA, 120 bp, Artificial Sequence
  ENSG00000270604_1 (sequence is synthesized)
tgcataatattccattgttcgtgtgtgtgtgagtgtttagttagtctcaaattgataggtgcatgaatttttccaatcttttgttaaggcaagcagtattgaataaacttgtacataata

SEQ ID NO: 1039610 - DNA, 120 bp, Artificial Sequence
  ENSG00000270604_2 (sequence is synthesized)
gttctttccacttctggggctgtgacttgagtttctccgcaggagcagatagtgtttgtgtagggactgcggacttttgcattacagcctccctgctttgcccgcctgctgctggaagct

SEQ ID NO: 1039611 - DNA, 120 bp, Artificial Sequence
  ENSG00000270604_3 (sequence is synthesized)
tagcagatacatttcatcaatgaagccttctggacctggagtttcctatatgagaaggattttgattacacattcaatttctacaatcaatatatgactggccacattttctatctcttc

SEQ ID NO: 1039612 - DNA, 120 bp, Artificial Sequence
  ENSG00000270604_4 (sequence is synthesized)
tcaggccacaccgtagtcatagagcaagaggactcagatacagtttggttggtcctttaccttcaaaagttcaagtgctggctgccgagacttctccaactcagtgatcagggtcccaag

SEQ ID NO: 1039613 - DNA, 120 bp, Artificial Sequence
  ENSG00000274652_0 (sequence is synthesized)
cgttaaggacctttgtggcctccttgaaaaatgtctgttacccagtcttcagagtgattaggaaagctatcagtcatgattaagatttcctcttcacaggtggaagaatggtccagggaa

SEQ ID NO: 1039614 - DNA, 120 bp, Artificial Sequence
  ENSG00000274652_1 (sequence is synthesized)
ctacgaacccagggttatccaggcttacagggctgaaagcccagaatgactcagtgctacatgttttaagggaaccaataaagatcattattgttactcagcaatgacattcctgccaca

SEQ ID NO: 1039615 - DNA, 120 bp, Artificial Sequence
  ENSG00000274652_2 (sequence is synthesized)
cagcgcaggctctctacatttctatttacaatcttcatgttaatccccaagtaatatttagattgttgtgtaaaaccctaaattctgctccaaaagaagattgtgccaaatccatctatc

SEQ ID NO: 1039616 - DNA, 120 bp, Artificial Sequence
  ENSG00000274652_3 (sequence is synthesized)
ttactaaacaaagaacagctgactgcatttgaatgctcaagacctaaattgaatggggaaggaaagagttacacaaaaaaacacaccagccaattggcttcaactcacttgaactatgag

SEQ ID NO: 1039617 - DNA, 120 bp, Artificial Sequence
  ENSG00000274652_4 (sequence is synthesized)
agcttctaaaaggtacctttcatgaataaggttggaaaaggactacactcagttaaattctttgaacaatcatgacaaaagccaaccctatatccagcagaagttgagtataaaagggta

SEQ ID NO: 1039618 - DNA, 120 bp, Artificial Sequence
  ENSG00000274652_5 (sequence is synthesized)
gagactgcactgaaaaattgaaaagtaaattattacatgcaaagcatgtacctttgcatgaaaacagaattttatgactgtaccatctctgtctattagccaataaagttttaaatgata

SEQ ID NO: 1039619 - DNA, 120 bp, Artificial Sequence
  ENSG00000183154_0 (sequence is synthesized)
ctttcagatgctggagtggcagagccagcaggcgagcagagtttcaaggagcgggccggctgagggagagaagctgctgggactgaggttcccgaaagtgacgggtcagccccgaccctg

SEQ ID NO: 1039620 - DNA, 120 bp, Artificial Sequence
  ENSG00000183154_1 (sequence is synthesized)
agcggcagctaggcccagcgcgcgcacgaaggggcgggggccgcgtaccaggctgtccctgcaggcgctccgtactcgtccgagcccacgagcaagaaaaccgtcacacccctcagcacg

SEQ ID NO: 1039621 - DNA, 120 bp, Artificial Sequence
  ENSG00000183154_2 (sequence is synthesized)
cgacttccttccgggccgtcgcttcgatgacgccatcaattcacgcgagaagaccacacccccgccccgcgctcgctctgcgccccgcccctcgcgctcccagcggtcaatggccgtagc

SEQ ID NO: 1039622 - DNA, 120 bp, Artificial Sequence
  ENSG00000183154_3 (sequence is synthesized)
tggccgccagggatcgcccgcgacttggtcggtgcggtcctggacctcggtcttgggtatccgtcctggggctggggatgagggcggtgttggtgggagctccccgagagcgagcggcag

SEQ ID NO: 1039623 - DNA, 120 bp, Artificial Sequence
  ENSG00000183154_4 (sequence is synthesized)
gacgcgcatgccccggagtactgagacccagggcgaacctttccaaggcgttgactttggggattgctccggatttccttctgcattaggccgaacctggttcgttttggtttttttaga

SEQ ID NO: 1039624 - DNA, 120 bp, Artificial Sequence
  ENSG00000183154_5 (sequence is synthesized)
ggagtgcagtggcacgatcatagctcactacagcctcgaactcctgggcttaagcgatcctcccacctcaccctgctgagtagctgggaccacaggcgcacgccacgacacttgacaatt

SEQ ID NO: 1039625 - DNA, 120 bp, Artificial Sequence
  ENSG00000183154_6 (sequence is synthesized)
tgagtagctgggaccacaggcgcacgccacgacacttgacaattttatttttagtaaagacagggtcttggtatttctggtctcaaactctggcttcaagcaatcctcctgcctcggcct

SEQ ID NO: 1039626 - DNA, 120 bp, Artificial Sequence
  ENSG00000183154_7 (sequence is synthesized)
tacaggcatgagccaccatgcgcggcctttttttttttctctccttgataaggtactggcgagttgcaactgtttgctttcctatagcacagctgaaatgaaacagtcttttcaatgtac

SEQ ID NO: 1039627 - DNA, 120 bp, Artificial Sequence
  ENSG00000183154_8 (sequence is synthesized)
gttctttatatttttctgggagctttggcccttgggatcctgcaacgccacaaagtatattaacaaggaattattattctaattttaatgaacggaatctaagaagttcagcgaggttca

SEQ ID NO: 1039628 - DNA, 120 bp, Artificial Sequence
  ENSG00000183154_9 (sequence is synthesized)
agggtaaaagccaaggaaagtttcctttgtgtttccttaatatcttgagttcactgctttttaaactcctgccacagtgcacaggggctagtgcacttcgtctttctagataaactgtac

SEQ ID NO: 1039629 - DNA, 120 bp, Artificial Sequence
  ENSG00000183154_10 (sequence is synthesized)
gttcccgggagagcagagactgactttccttccgcacccccggggcttaggtgcccagtaaaaacagactgaaggcaacgtgggaccaggcccggaatccagagtttgtgtctcctagtc

SEQ ID NO: 1039630 - DNA, 120 bp, Artificial Sequence
  ENSG00000183154_11 (sequence is synthesized)
taagggcctcacgttgtcctccacctgccctattcaccagcatcacattggggcatttctaattcagccactgaggttattaatattttgtttgcaggagagaaagagtccacttaatta

SEQ ID NO: 1039631 - DNA, 120 bp, Artificial Sequence
  ENSG00000183154_12 (sequence is synthesized)
tagccttcagtaaaagaaaaacttttacaccgggaagatggcaagctggtggtgttagacagatttaagactcaggaaaagggaagtgtggttttttccaggcatgcctgcttgggattg

SEQ ID NO: 1039632 - DNA, 120 bp, Artificial Sequence
  ENSG00000183154_13 (sequence is synthesized)
gcccgtttacctttcctgcgtttgctctgggtgttgggatgtttcagcattacatggtgaaacccatacgagggttacatggtgctgtctgggagctctgtgcccatctccataaatgaa

SEQ ID NO: 1039633 - DNA, 120 bp, Artificial Sequence
  ENSG00000183154_14 (sequence is synthesized)
ggcctttcatctccctactctgtccctgcatcccccaccccaaacagacacagctggccaatctctcgatcaatcctatcagaacttgagttttttctctccctgttcagtgatataacc

SEQ ID NO: 1039634 - DNA, 120 bp, Artificial Sequence
  ENSG00000183154_15 (sequence is synthesized)
tcagctgggcatgcttatttaatagtttatttaataattgagtaagaaaaatggaaatattagggttcatcaacccatgaaatgggggctagcctgcagcatcaagtatttaaattactt

SEQ ID NO: 1039635 - DNA, 120 bp, Artificial Sequence
  ENSG00000183154_16 (sequence is synthesized)
gtaatttaagaatttcctttaaccaacctctggcaacccgtctcccctccccttcccacaaatatgtatattattatgtgtcaattaaaaataataaaaacacaaaaatttcctcacatt

SEQ ID NO: 1039636 - DNA, 120 bp, Artificial Sequence
  ENSG00000262160_0 (sequence is synthesized)
taaaatacaaaatgtacaagaacacacaattccaagtgctgtaaacataactgagaaccagttcctttactaaacatccattttataaaacacaaggtttcaatttgagcccatctgagc

SEQ ID NO: 1039637 - DNA, 120 bp, Artificial Sequence
  ENSG00000262160_1 (sequence is synthesized)
cttaaagatccattctgaataccaaaaacagggcttcacagccaggcccagaagaggtctggtgataatggctggccctgggtggggatagtttacacccgggcagcagcaccacacatg

SEQ ID NO: 1039638 - DNA, 120 bp, Artificial Sequence
  ENSG00000262160_2 (sequence is synthesized)
aacccaaagacatgttctttttaaagctgttttcagccatgtttctctgtgcatctccagtaagcagaaggctacccattccattcctcaacccaagagctagcacagttagagtaggag

SEQ ID NO: 1039639 - DNA, 120 bp, Artificial Sequence
  ENSG00000262160_3 (sequence is synthesized)
ggggtgcgtactagcacgtgcccagttgctcagtgctgctagtagaaattgatttgcatagtccaatggatgtgtgctttaacaccactatgttgcacaaaaatttaagtctttatctac

SEQ ID NO: 1039640 - DNA, 120 bp, Artificial Sequence
  ENSG00000262160_4 (sequence is synthesized)
aaagccaaaaaatattgactcttaacaccaaagcttttacaaagctgatataaaactgcttacatagtatacaaagctctattttaaaatttaatgtttattttaaataggaaagcattt

SEQ ID NO: 1039641 - DNA, 120 bp, Artificial Sequence
  ENSG00000262160_5 (sequence is synthesized)
ctagtgctacaggcatcaaggtatttagaaggcatcaaaatttggtgcatagcaactctggatcatagaggcttttaattcttgagggcacaaagggtattgcaaggggaactcttgcaa

SEQ ID NO: 1039642 - DNA, 120 bp, Artificial Sequence
  ENSG00000262160_6 (sequence is synthesized)
taacctcatgtgaggcagctacaccaggggcaaaagggtaggggcaagtctggccatttctctggaatgtcaaccgagaggccaacttcttgcccctccaaaggaagctgtgggcgtcca

SEQ ID NO: 1039643 - DNA, 120 bp, Artificial Sequence
  ENSG00000262160_7 (sequence is synthesized)
accacaggcccagaagcaaatctcactatccacattctgtgacacaactcacttttcaagaaaatttgaaaacacccagctccaagaggggccacagtgatctgctgaagaatagacctt

SEQ ID NO: 1039644 - DNA, 120 bp, Artificial Sequence
  ENSG00000262160_8 (sequence is synthesized)
tttctctaactaactttaggggagaaatctaaaatatattttgttttttttaaagaccatacttcctcatcctgagtcaacagctcctaacctactgacaacaggtggtgggcaataggc

SEQ ID NO: 1039645 - DNA, 120 bp, Artificial Sequence
  ENSG00000262160_9 (sequence is synthesized)
cagctccctttcccagacctgaactggccttagtagagagagtcctggcatcaagggcctgcagtctcctggaataacagcatcaggccttcaaccagcacactgtctcacatataggca

SEQ ID NO: 1039646 - DNA, 120 bp, Artificial Sequence
  ENSG00000262160_10 (sequence is synthesized)
ctcaaaaaatctgcttcctgaatcaatggaagtatattatttcatttgaaagcatactgcaaacttcagaggctctgtaatgggcccaggaacaggtaaaaaaaatcccattagggagag

SEQ ID NO: 1039647 - DNA, 120 bp, Artificial Sequence
  ENSG00000262160_11 (sequence is synthesized)
gggtaagggcaggttttttttttttttaaagtacccaactcgggtacctcctttggtagacagcaggctgcagtttctgctgggccctgccttggacaccagtctcaccagcagcagcac

SEQ ID NO: 1039648 - DNA, 120 bp, Artificial Sequence
  ENSG00000262160_12 (sequence is synthesized)
cagggtgtctttggtgtggagggtcaggttatcacttctggatgtgctcagagccttctggggaaaaggctggtttttagatcatacagacaggacagggtaggccagaatcatttcagg

SEQ ID NO: 1039649 - DNA, 120 bp, Artificial Sequence
  ENSG00000262160_13 (sequence is synthesized)
atctggagtcctgtattttctctgcccatgctgatgtactgctcatttgtgctttagctctgcacacagcctggcctctagctagagttagaactgcaaagctgcctaaaccactgagac

SEQ ID NO: 1039650 - DNA, 120 bp, Artificial Sequence
  ENSG00000262160_14 (sequence is synthesized)
tggcttcaaaggtcacagaacagccaaaggcagatgcttctgtttggaaaaggttctacgaccagatgacacaaacaggaagcgcactccacagcctactagtttttatgatggcaagaa

SEQ ID NO: 1039651 - DNA, 120 bp, Artificial Sequence
  ENSG00000262160_15 (sequence is synthesized)
atgaaagtgaccaagctagaaccccaccattcagagtcaccttaaatgtagccatcttacccagggtcctgagggaaaaagcaatttcaacatggagccagtatggagagattgcaagat

SEQ ID NO: 1039652 - DNA, 120 bp, Artificial Sequence
  ENSG00000262160_16 (sequence is synthesized)
tacctagaaagttaccaaaaggctatgctctggaatgtctttttatattccaacacttcaatgatggaatggtctcttctcattttatctaacaacagtttagttttataaagaggtatg

SEQ ID NO: 1039653 - DNA, 120 bp, Artificial Sequence
  ENSG00000262160_17 (sequence is synthesized)
gaggtatgagctacatttggctttatttcctataaatctatgaacgtcttcaggacacatgctgactttctgaggcataggtgtgggcttgggatatttttttctttttctttttttctt

SEQ ID NO: 1039654 - DNA, 120 bp, Artificial Sequence
  ENSG00000262160_18 (sequence is synthesized)
tttttttttttttttttttgcttctagaaggtcttatcaaaagttcctattttaaaaattatcataaaaactaaagggcccttcaaatgaccataaagcagtacaaatcaccaatcctag

SEQ ID NO: 1039655 - DNA, 120 bp, Artificial Sequence
  ENSG00000262160_19 (sequence is synthesized)
caccaatcctagctaagtaaccaggtcacctgcaaaagcagcacctcggaaacaagagagcctgctgcattcacactcaaagcacccatcatataaaagtatcctagttaaatataaaaa

SEQ ID NO: 1039656 - DNA, 120 bp, Artificial Sequence
  ENSG00000262160_20 (sequence is synthesized)
gcaaagttcatttccccaaagctcaaacagcctatgctgctcctgttcttttgccaaatctacccaaggcctgaggtggaggaatgctactttccccacaaatggtgggtcccactcctg

SEQ ID NO: 1039657 - DNA, 120 bp, Artificial Sequence
  ENSG00000262160_21 (sequence is synthesized)
gccccagacctgaaggctgcagagttggaaacccaaggtccaaggagagaaacatgctgagaagttggtggtggacacaaggctgcagtaagcactgttagagcccatcagatcttccta

SEQ ID NO: 1039658 - DNA, 120 bp, Artificial Sequence
  ENSG00000262160_22 (sequence is synthesized)
aatccagggactcaggactcgggaggggagcctgcctgctcacccctgctccttgggaaacagaaatctgggacatgtctctcccaattatctcgttcactgaaaaacaagaaaagggag

SEQ ID NO: 1039659 - DNA, 120 bp, Artificial Sequence
  ENSG00000262160_23 (sequence is synthesized)
agtgattagtgacctctgagtgattagccatatgatgcccaacgctgagctctacctcagacatttcccttcccatggctttctgtaaagataaaggcagtgtctgaagcctgctcctga

SEQ ID NO: 1039660 - DNA, 120 bp, Artificial Sequence
  ENSG00000262160_24 (sequence is synthesized)
gctgagtggcattagagatggaaacatcgctccacaaactactctggacctctttttctctctcattcagttcattttgggttgggaagggggcttaccctcactctaaaggtatgttta

SEQ ID NO: 1039661 - DNA, 120 bp, Artificial Sequence
  ENSG00000262160_25 (sequence is synthesized)
aataagtattcaccttactctaacttttctttaattcatatctctttgagaaagtttttattttctacaatgccacctcctatgtaaatggaatgaaaataaatgctttggtcagaataa

SEQ ID NO: 1039662 - DNA, 120 bp, Artificial Sequence
  ENSG00000250481_0 (sequence is synthesized)
ggggacgtgaccacagcactaatctcaccacacatcacaccatcagaagcgtccagtccagaataatgggacagcctacgaagatacatctgctgggccagctcagaggttctggctcac

SEQ ID NO: 1039663 - DNA, 120 bp, Artificial Sequence
  ENSG00000250481_1 (sequence is synthesized)
gggatgatgaagatatgaaaatttgactatggcactgacaagcccagatggcacctccaggagctccccatgccctcctctgaggtgaagtgttcagaggctggacgattttctacttat

SEQ ID NO: 1039664 - DNA, 120 bp, Artificial Sequence
  ENSG00000250481_2 (sequence is synthesized)
aaggtttgactgctgtaatttctgcagcatattcactgtccacccaagggacacatccatgggcctgctctcagtgactgtgacttcttccacatctaggaacctctcttcaactccttc

SEQ ID NO: 1039665 - DNA, 120 bp, Artificial Sequence
  ENSG00000250481_3 (sequence is synthesized)
ctgtgcccaggtgctgggactctgaccctgcttgcaatcttgttggggttctccagctgcccatggttgaaatgccccttttgaactccaggcctctggctatatgactttttcatagca

SEQ ID NO: 1039666 - DNA, 120 bp, Artificial Sequence
  ENSG00000250481_4 (sequence is synthesized)
atttgttgcttttcactctggccactaaagctgacccatgggctgggagggggaatggtgcctgttcctgataagggtgaggccaggccactcaatgccaagtaaaaaagtaaacaagaa

SEQ ID NO: 1039667 - DNA, 120 bp, Artificial Sequence
  ENSG00000267108_0 (sequence is synthesized)
acccaacggcagccagaggccgccctgccccgccggccagaagcggactcggtgcagacatgcagctctctccgtggaatgtgcatgtgcacggagtagagacgggatttcaccatgtta

SEQ ID NO: 1039668 - DNA, 120 bp, Artificial Sequence
  ENSG00000267109_0 (sequence is synthesized)
ctctgccctgctccttgctgccaccgtaagaagaaggatgtgatatcttcaccttctgccatgattgtaatttcctgaggcttccccagacctgctgacctgaccctctctgcagtgcct

SEQ ID NO: 1039669 - DNA, 120 bp, Artificial Sequence
  ENSG00000267109_1 (sequence is synthesized)
ggcatacagcagaaactcgctaaatgaagtctgcgtgtttcatatacgaataactgattgtcatgaccggaggtaaactgaacatctgaaaaggacctaattaacattgtgcgcaagtga

SEQ ID NO: 1039670 - DNA, 120 bp, Artificial Sequence
  ENSG00000267109_2 (sequence is synthesized)
aagaataaatgaataaatgaataaaagaatgaatgagtacggatgctgagaactgagatgtggcatttccatactggcagaagctccgaaagaaacagtcatcacttcctgtcctactgc

SEQ ID NO: 1039671 - DNA, 120 bp, Artificial Sequence
  ENSG00000267109_3 (sequence is synthesized)
gcagtgctttgctgaaatccagaatataaagttaaactttatgagttaaaagtttgaacttttgagcgagatgtaattaagcacaaattagtttgtagaatcctaaatgtcagtgcatct

SEQ ID NO: 1039672 - DNA, 120 bp, Artificial Sequence
  ENSG00000267109_4 (sequence is synthesized)
aaacaaagtacatctatgtttatttgaaagcaaaaaacgatgacacatttttagagaattaaaataaactgatcattgaaattgaattaatttttaatggtaaaattaatttgagtgaag

SEQ ID NO: 1039673 - DNA, 120 bp, Artificial Sequence
  ENSG00000267109_5 (sequence is synthesized)
tagaaagaatgcggctcataatgttttattgatgatgcataaaaatgatcacaagtcattactcattcacttgaaagccagcgttcttccaggagaataaatttctgttgtttttgtttg

SEQ ID NO: 1039674 - DNA, 120 bp, Artificial Sequence
  ENSG00000250488_0 (sequence is synthesized)
gaagacatggattgaaatgaagcgcgtatgtgctcacagttaacaacaacaacaagaaaaggctggagaaaacagcggtaagagcactatgagataaatatgaagactaaatatacagtt

SEQ ID NO: 1039675 - DNA, 120 bp, Artificial Sequence
  ENSG00000250488_1 (sequence is synthesized)
aacaacaacaacaacaagaaaaggctggagaaaacagaggtcctgctggtcattgagagaaaaggtgtgcacacaggttgggcaataagagaatcaaacagttctccaccagccattaac

SEQ ID NO: 1039676 - DNA, 120 bp, Artificial Sequence
  ENSG00000250488_2 (sequence is synthesized)
accagggtttgaaggtgaagaagctggcaaattgaaatgtcaacagacgcatataaaaccctaacaaaagcctctgtagccaatagaacaagaaaggagtagactagcaaggcagaaaac

SEQ ID NO: 1039677 - DNA, 120 bp, Artificial Sequence
  ENSG00000250488_3 (sequence is synthesized)
ttttggaaaataactcttctgctatattcaatctgggaaaaaaaaaaaacacaacactggctccacccaacgatgataacaaaggcccagtaagaaaccttgaccacctctaatatagaa

SEQ ID NO: 1039678 - DNA, 120 bp, Artificial Sequence
  ENSG00000250488_4 (sequence is synthesized)
atggggaactggaactcttaagctcccaatcccaccaagcagtaatgaagagctttcccgcaccatatgtcaacagagcacactgttgtgaggaccccgtaccacttcttctatccagcg

SEQ ID NO: 1039679 - DNA, 120 bp, Artificial Sequence
  ENSG00000250488_5 (sequence is synthesized)
gtaacaagggagatctttccctgctgaggtgttgtcacataaatccagctaaaacaggtttaaagaacacacagagtctcatgatacaaaactgtccagatatcagttaaaaaatacttg

SEQ ID NO: 1039680 - DNA, 120 bp, Artificial Sequence
  ENSG00000250488_6 (sequence is synthesized)
tcataccacgaaccaagatctcaaactgaattttaaaaaggaattcaaaaatgtcattaccaaggtgacagatttgttagaattacctgacaaagatttaaagttgccatgataaaaatg

SEQ ID NO: 1039681 - DNA, 120 bp, Artificial Sequence
  ENSG00000250488_7 (sequence is synthesized)
cttcaacaattaccaaaaaaagcttgaaacaaatgaagcaaaagaaaacttcagcaaaaaaaatcaaatctcagcaaaaaacataatatattaaaaaatggaaatttcagaactaaaaaa

SEQ ID NO: 1039682 - DNA, 120 bp, Artificial Sequence
  ENSG00000267100_0 (sequence is synthesized)
agcggaaatggctccgagaggctttgacgcatgtgtacctttttagtggcggtatctcggccggggattttcgggctccagtggaggtggctatgctcaccccatctcccttgagaggca

SEQ ID NO: 1039683 - DNA, 120 bp, Artificial Sequence
  ENSG00000267100_1 (sequence is synthesized)
cagaaggttagagatgtgtgcgaggaacggccaggtccagcgtctcctcgttgctgccccttgagcccgggaccggcgccaatgcgcgcccgggttcttgggttctttcgtcccgcagac

SEQ ID NO: 1039684 - DNA, 120 bp, Artificial Sequence
  ENSG00000267100_2 (sequence is synthesized)
ctgccttggtgtggcgtccctgggccgtagcttccgaaggctgcagccgacctggtcggggtcctctagcccgccttccccttcccccattgacagatggagaaactgaggcccaggcca

SEQ ID NO: 1039685 - DNA, 120 bp, Artificial Sequence
  ENSG00000267100_3 (sequence is synthesized)
aaaaatatctcactagagggctcaccgccatttcctggaaaaattggggctgggactcaacggacgctcgtccagcagcagcgcggagctccgaagtaaaggcgcccgtgaccgagtgct

SEQ ID NO: 1039686 - DNA, 120 bp, Artificial Sequence
  ENSG00000267100_4 (sequence is synthesized)
ttgtccttacaagcgtggtgttcttgaatgcttccaggcgccttatgaggcccccgatgtacaatctgtgcttaactaaaccccactgtcttccagggtcaggttggccatccgcaggcg

SEQ ID NO: 1039687 - DNA, 120 bp, Artificial Sequence
  ENSG00000267100_5 (sequence is synthesized)
catccgcaggcgtagttgctaggaaggtttgacagatgtccgcctgttgattcagacgttcccaggatttggagcaagaagagcaaggaaggccaggcgcggtggctcacgtttgtaatc

SEQ ID NO: 1039688 - DNA, 64 bp, Artificial Sequence
  ENSG00000267100_6 (sequence is synthesized)
cactaaaaatagaaaaattaactgggtgtggtggagggcgcctgtaatcccagctaatcaggaa

SEQ ID NO: 1039689 - DNA, 86 bp, Artificial Sequence
  ENSG00000267100_7 (sequence is synthesized)
ggtgaaacaccgtctccactaaaaatagaaaaattaactgggtgtggtggagggcgcctgtaatcccagctaatcaggaagctgag

SEQ ID NO: 1039690 - DNA, 78 bp, Artificial Sequence
  ENSG00000267100_8 (sequence is synthesized)
ctccagcctgggcgatagagtgagactcagcctcaaaaaaaaaaaaaaaaaaaaattcgccaagaggcacaagaatgg

SEQ ID NO: 1039691 - DNA, 120 bp, Artificial Sequence
  ENSG00000267100_9 (sequence is synthesized)
aaagatgtgattatgtggcagggggtaagggttaaaaagaaaacaagaacaagttttcctctgcttagccagcttacttcaaggacagttataacactgaaaagtcgaggccaaaggaat

SEQ ID NO: 1039692 - DNA, 120 bp, Artificial Sequence
  ENSG00000267100_10 (sequence is synthesized)
gggctccagacagcctcctccggagcaaagttgaaaagaaaaattcctttactgtctctccttttctgaaccattaaatatgactgtttgccaatggttgtatttagtaagatttgtaga

SEQ ID NO: 1039693 - DNA, 120 bp, Artificial Sequence
  ENSG00000267100_11 (sequence is synthesized)
ctctgtttttcttttgacacagctgcaaggccaacagctgtgcaaagccacaagttatgctaagtcagcagttatgctatagattacatgacctgtgactgtatcattaactgcttttgt

SEQ ID NO: 1039694 - DNA, 120 bp, Artificial Sequence
  ENSG00000267100_12 (sequence is synthesized)
tttgcttctgtaagtttgcctataaaaaccacactcagtctttgttcaatggtcagcttttcagatacaaatccactgagccggtgtacatctaaataaatcctcctgtttcccgtgtca

SEQ ID NO: 1039695 - DNA, 120 bp, Artificial Sequence
  ENSG00000267101_0 (sequence is synthesized)
cctgagcagggagtggcacttgatccaaagagagcctctgaaatggctgcacccgatatctcagcaggttaccccatagagtgttgagtgggcaactcaattattccctcacctgaagaa

SEQ ID NO: 1039696 - DNA, 120 bp, Artificial Sequence
  ENSG00000267101_1 (sequence is synthesized)
gtctgaaagcaagacgaagagagtccttttgcaagagtgatgtacaaagccctacggacatacagacttcgtgtgcaagtcctgtggaggagaggagatgagagagcaatcggttggtgg

SEQ ID NO: 1039697 - DNA, 120 bp, Artificial Sequence
  ENSG00000267101_2 (sequence is synthesized)
catctggggacattaaacagtgacgtggacacagtgatggcctgcagtggtgaaccagtgagggaacaagtcctatggttggggagctacctgaggctggagagcagagtacagccaggc

SEQ ID NO: 1039698 - DNA, 90 bp, Artificial Sequence
  ENSG00000267101_3 (sequence is synthesized)
ggggagctacctgaggctggagagcagagtacagccaggcccacagtggtgcagcataccagagtcaaggtctcactaggatgtcaatcc

SEQ ID NO: 1039699 - DNA, 120 bp, Artificial Sequence
  ENSG00000267101_4 (sequence is synthesized)
ccctcagccatatatgaaggctaaatcagataaagatcccaggaagtgtgcaacaggcacaagattcaaaggaagcaggctgctttcttgcagcaagacaaggcaagttggaagagagga

SEQ ID NO: 1039700 - DNA, 120 bp, Artificial Sequence
  ENSG00000267101_5 (sequence is synthesized)
ttatttttcttcttcaaagctctcaccctcaggaggattcctatcaactactttgggaaagagtgagtacaaaaagacaggggacataccagatgacctctctgggacctttaagcctga

SEQ ID NO: 1039701 - DNA, 120 bp, Artificial Sequence
  ENSG00000267101_6 (sequence is synthesized)
agatttcattacacattctcttcttctgcaaatgtgcccggagaaattttaatgaatagtgagatcccagctgcttgtggttaaaagaccatcaacaccatatgaaaggtttgtcagaaa

SEQ ID NO: 1039702 - DNA, 120 bp, Artificial Sequence
  ENSG00000267101_7 (sequence is synthesized)
caaatactccaagtggagcaaaacaacctcctcagagcataagtgaccagtttttgagacactggatttttgggaagggctttgagaagaaaaaaaaagttcttagttgtagcttttaaa

SEQ ID NO: 1039703 - DNA, 120 bp, Artificial Sequence
  ENSG00000267101_8 (sequence is synthesized)
tgtgctggattgttgctgagcattaaggacatcctaccaaagtccaggaaactgctaattaatcctgcaggagactgcaaagacacacttgccattcatccagcaagtgctatttaaaag

SEQ ID NO: 1039704 - DNA, 120 bp, Artificial Sequence
  ENSG00000267101_9 (sequence is synthesized)
cctgttgtgagcatctgagtgcatttgggctaaagagctcatggactagacgcaacaggagctatacagactaccagtgcaccaccagcgtgcaccagaatgcatgtcccagcaaacaac

SEQ ID NO: 1039705 - DNA, 120 bp, Artificial Sequence
  ENSG00000267101_10 (sequence is synthesized)
tctcaattggccaatttgcaacagggcaccctttagcctctttggccctggtcatttccttcccaccctgcccttttggaggcatcaacattgagctcaaaacatgttcagtgcattctt

SEQ ID NO: 1039706 - DNA, 120 bp, Artificial Sequence
  ENSG00000267101_11 (sequence is synthesized)
gctaaatcagataaagatcccaggaagtgtgcaacaggagaaccagtgacacaatccaccttggtatgagtgtcagccatcttgtctttcaactggaaagctagaagtgacagcatggta

SEQ ID NO: 1039707 - DNA, 120 bp, Artificial Sequence
  ENSG00000267101_12 (sequence is synthesized)
tattaagaggtctctgcttgaataaattgatgtcaagttttattacatatagaccaagctagaaggcacaagacaaccactcaacaactatgtattaaacaacgaaatcaacgaaatggc

SEQ ID NO: 1039708 - DNA, 120 bp, Artificial Sequence
  ENSG00000267101_13 (sequence is synthesized)
atacagcagtatttcaaattcttgaaatacagatagggacaggcaaaaactgtattctctagaaggctgaagtcagccaaagaaaatgcacagtaaacacaaatcgagatatttataaga

SEQ ID NO: 1039709 - DNA, 120 bp, Artificial Sequence
  ENSG00000267101_14 (sequence is synthesized)
gcatcatgttccaggccctgagtgcttcataaaaaaaaaagttccttttccaccaaaacaatgccctgatttgagtgcttcatcaaaagagaaagatttctcatgataaaccatattcta

SEQ ID NO: 1039710 - DNA, 120 bp, Artificial Sequence
  ENSG00000267101_15 (sequence is synthesized)
agcacttagatcacaatatagtaaattttcaaaaggaagtcacttttgccaagatataaaggctcatagagctcaaagagcatcctatctgatatgcaccaggcaacaactgagaacaag

SEQ ID NO: 1039711 - DNA, 120 bp, Artificial Sequence
  ENSG00000267101_16 (sequence is synthesized)
cagccatatatgaaggctaaatcagataaagatcccaggaagtgtgcaacaggcaattgcagccattctcaaaaggatcctgtcttcccaaaataaatgtctgctccacttgagttaaaa

SEQ ID NO: 1039712 - DNA, 120 bp, Artificial Sequence
  ENSG00000267101_17 (sequence is synthesized)
atatcccttctaccaccaacctacatttctcctcaaaataaagttctttactttaacttcctttcaaaactgaatctattttttcccttttgagtcttacctccttccacagattactca

SEQ ID NO: 1039713 - DNA, 120 bp, Artificial Sequence
  ENSG00000267101_18 (sequence is synthesized)
acatttcccaaagacaccttgaacctctgcctgcccttctgcttctgtctctaatgctcctcacctctgcctctccaaatcctacccattcatagagtcactcatctgtgaagttgtaga

SEQ ID NO: 1039714 - DNA, 120 bp, Artificial Sequence
  ENSG00000267101_19 (sequence is synthesized)
gcaaaaggagctctaggaatctggtctaactatgaagaatgatgaacctcaggtctatgcaacaatgctcgggagcagagtgaccgagccacgactcaaaagtgaccccaaagtctttta

SEQ ID NO: 1039715 - DNA, 120 bp, Artificial Sequence
  ENSG00000267101_20 (sequence is synthesized)
tttgttccctttccatgttctttcttcaagaatcagctttagctaccataccatctctttctgaaagattttactcatcattgcagccagaaattttttctctgtctcttctaacctcag

SEQ ID NO: 1039716 - DNA, 120 bp, Artificial Sequence
  ENSG00000267101_21 (sequence is synthesized)
gtggcattttggttgtagccctcttgagatacttagttctttttaggttgtgtttttgttattggccaggttctgagagaaagctattccctgtgctgagagcaaggatactgggtggtc

SEQ ID NO: 1039717 - DNA, 120 bp, Artificial Sequence
  ENSG00000267101_22 (sequence is synthesized)
ggtgcaagtggaaagaataatgagtagatggtattgcccaatagctagataatatgactaaggcttgagtcagcaagggctatgactatccttaacattctgggcagtgtttagggtaaa

SEQ ID NO: 1039718 - DNA, 120 bp, Artificial Sequence
  ENSG00000267101_23 (sequence is synthesized)
gaagccactgtgggaaaatggagcagggttttctggatgattccagggttacagattaagtatggtggagaagaaatggtctttggcagaatatcatcatatctcattatattcaaccta

SEQ ID NO: 1039719 - DNA, 120 bp, Artificial Sequence
  ENSG00000267101_24 (sequence is synthesized)
agcccaggataacttgtcataaagagagatacacaaaatgcaaaaacctaatgtaactctgactctgtgattacagccttatccaaaatctctggaggtaacaccagtggaagcaacctt

SEQ ID NO: 1039720 - DNA, 120 bp, Artificial Sequence
  ENSG00000267101_25 (sequence is synthesized)
caggaagtgtgcaacaggtaaggcatcttggagaattaaaaataaattcttctaatcgtcctttagaacgttaaaggaagaaatcatatcagagccaggtaaaaattcaatgatatcttt

SEQ ID NO: 1039721 - DNA, 120 bp, Artificial Sequence
  ENSG00000267101_26 (sequence is synthesized)
cccgatagtgaagcaaaatgatcaagaaattcaactctgatccaacccacaggcaattgcagccattctcaaaaggatcctgtcttcccaaaataaatgtctgctccacttgagttaaaa

SEQ ID NO: 1039722 - DNA, 120 bp, Artificial Sequence
  ENSG00000267106_0 (sequence is synthesized)
tagaggagggacccggcctagccggtggttcaggtggccggtcgggctggaagggcggggatgagggatgggacgcatccccgggggatgctcctccaaagcttttatcgggcgagcgca

SEQ ID NO: 1039723 - DNA, 120 bp, Artificial Sequence
  ENSG00000267106_1 (sequence is synthesized)
gtggctcacgcctgtaattcctgcactttgggaggctaaggatgaaaggcttcctagcacaaacaccacccctggagttcccggtacatcaataccagcctggggatcacgttctcatca

SEQ ID NO: 1039724 - DNA, 120 bp, Artificial Sequence
  ENSG00000267106_2 (sequence is synthesized)
agagttggaagagggaaagcttgaaccagcttaggaggacctcatctggtactcttgatgaatgaaacagcaatctgaatggctgaaaaaggatggacccagcactccagggagaaaact

SEQ ID NO: 1039725 - DNA, 120 bp, Artificial Sequence
  ENSG00000267106_3 (sequence is synthesized)
tggcattctttgggaatctaacaggatgcagtgaacccaagccttttgaagagctcaccaatcagactgcccttgtctatccatgagcagatgtttgatagtattgcggaggccctctag

SEQ ID NO: 1039726 - DNA, 120 bp, Artificial Sequence
  ENSG00000267106_4 (sequence is synthesized)
tgggtatgctgccaagcaactggagtggcacttgggctctaatccagttgtctatccctttcaccctggcatttcatcagccaaacaaaaaccaactaactcagaaaaaaaggaaagccc

SEQ ID NO: 1039727 - DNA, 120 bp, Artificial Sequence
  ENSG00000267106_5 (sequence is synthesized)
ctcaagggtcctttgaccccgatatctacatagatgctatcggggtcccctgaggggtaccaaacgaattcaaagctcgaaatcaaatagctgctggattcaagtctgtccttttcttgt

SEQ ID NO: 1039728 - DNA, 120 bp, Artificial Sequence
  ENSG00000267106_6 (sequence is synthesized)
ggtctactataaataaaaatgtagactggataaattacatatactataaccaacaacgatttgtcagttacaccagggatgccattaaaggaatagctgaacaattgggtttcaccagcc

SEQ ID NO: 1039729 - DNA, 120 bp, Artificial Sequence
  ENSG00000267106_7 (sequence is synthesized)
aaatggcctgggaaaatagaatagctcttgacatgatattagtggaagtccaatgttgtacctgtatccccaataatacagcccctgatgtaactatcactaagggtctataaggcctca

SEQ ID NO: 1039730 - DNA, 120 bp, Artificial Sequence
  ENSG00000267106_8 (sequence is synthesized)
ccactctaggaaatgaactagctgaaaattcgggaatgaatgatccctttacaggtgtaatggaaaaaatggtttggtagatggaaaggactaatggcctctattctcacctcccttgtg

SEQ ID NO: 1039731 - DNA, 120 bp, Artificial Sequence
  ENSG00000267106_9 (sequence is synthesized)
ctagttcaaaagctcatagaaacagcccttaccaagacctcccacaactctcccccaccctattcagataaacgtttatttctaagcaaccaagaagagcagtgaagccagatcctgtta

SEQ ID NO: 1039732 - DNA, 120 bp, Artificial Sequence
  ENSG00000267106_10 (sequence is synthesized)
gaaatatatgaagaggaaggactacaaaatcaaaaggggaaaattattagacaaaatgagttgctctacaaaggtccaacttcgttgtcctttgttctgtaacctttgttctgtaaactg

SEQ ID NO: 1039733 - DNA, 120 bp, Artificial Sequence
  ENSG00000267106_11 (sequence is synthesized)
cccttcccgcagaaactgtctttcccgccgaccaaaactgcccttcactatcactgtaatccatacccctactctatttgaaactgccaatcgggatcagcttacattgtgtggttcaac

SEQ ID NO: 1039734 - DNA, 120 bp, Artificial Sequence
  ENSG00000267106_12 (sequence is synthesized)
caccagccaatgaggaaaaaacacagaagcaaaagctatgatgcattagggttaaaaaccccttcctttccctgtccaatgtgctcttgagactgctacaggcgcaagcagccaccttct

SEQ ID NO: 1039735 - DNA, 120 bp, Artificial Sequence
  ENSG00000267106_13 (sequence is synthesized)
gcagaagtaaaccttgccttgctgagaaatttttcttttgagtgctggtctctctctgtggcaccaagaacttatttctaacatggagtgatttccaagatagatggttaagtgaaaata

SEQ ID NO: 1039736 - DNA, 68 bp, Artificial Sequence
  ENSG00000267106_14 (sequence is synthesized)
acatggagtgatttccaagatagatggttaagtgaaaataaaaactgtaggttggattatttgaggtc

SEQ ID NO: 1039737 - DNA, 120 bp, Artificial Sequence
  ENSG00000267106_15 (sequence is synthesized)
actccagcctgggtgatagagtgagactcggtctcaaaaacaataataataataataataatacaaataaaaaaatgaaaataaaggccaggtgctgtggctcacccctctaatcccagc

SEQ ID NO: 1039738 - DNA, 120 bp, Artificial Sequence
  ENSG00000267106_16 (sequence is synthesized)
ccttacagagtcatgggctgtcactccaagaccaatgccttccaagttagtattcaaaagggtctaatctgtctttcccttcttcccttaactactcaaggacacttcattatcaatgta

SEQ ID NO: 1039739 - DNA, 120 bp, Artificial Sequence
  ENSG00000267106_17 (sequence is synthesized)
accagatcactctctcctcaaacaatcacgtttgacgcatgtcttgccatacactttggggacctccaaaaccagaagcagctatcctccttgtagaaatatctctgtccttccagggta

SEQ ID NO: 1039740 - DNA, 120 bp, Artificial Sequence
  ENSG00000267106_18 (sequence is synthesized)
gattctaacctcttacattcacgcaactcttgcttggtagaagccgaaacccttacgttttgggaaaggttctgctccacctggaacaatgtcctatggactactaagcatcaagggtgg

SEQ ID NO: 1039741 - DNA, 120 bp, Artificial Sequence
  ENSG00000267106_19 (sequence is synthesized)
acctccccaggaagctgcgcctctttaaaaccatatcttcgtttcaccaaaggaaatgccccctctaattgccaacatcatcaatgcaacccagtgcaaatttctatcttacccctacct

SEQ ID NO: 1039742 - DNA, 120 bp, Artificial Sequence
  ENSG00000267106_20 (sequence is synthesized)
ccatcgatcttgagcccactttaggtcttttctatggcataggaaccgaagtgggctgagacagatcccatagggtcctttgaaatgcgctttagcaacccttccccacctcctaggggt

SEQ ID NO: 1039743 - DNA, 120 bp, Artificial Sequence
  ENSG00000267106_21 (sequence is synthesized)
aacccctctccaaaccctcctccaaatcaaacaactattttgccactacctaatgacaaaactaaagtggtcatagtggaagtcaaagacttaaaccctagccattgaaaccgggtatca

SEQ ID NO: 1039744 - DNA, 120 bp, Artificial Sequence
  ENSG00000267106_22 (sequence is synthesized)
ggatgcaaatgcctagctggaatggattaaatattccgttcatactctaaacaaaagtgactgttacgcttgtgcaacaggtaggccagaaacaaaaatagttccttttctgcttggatg

SEQ ID NO: 1039745 - DNA, 120 bp, Artificial Sequence
  ENSG00000267106_23 (sequence is synthesized)
gtctaaccaaccgggtatggactgcatggtagctctttccagcatcccacagcctggggtaataagtcatgcggcactctcttactgcttttcccagaagtgaaagaccgccctgtgtgt

SEQ ID NO: 1039746 - DNA, 120 bp, Artificial Sequence
  ENSG00000267106_24 (sequence is synthesized)
ataatgatgaatgcacaaatacaaagatacgaatgagccagagccaaccttatattcctgcagtaaatgccactgggtttactattttcttatcaagcagttggaatttatttgctaatc

SEQ ID NO: 1039747 - DNA, 120 bp, Artificial Sequence
  ENSG00000267106_25 (sequence is synthesized)
agttttttgtagatggggggcttgctatgctgtccaggcaggtctcgaactcctgagctcaagtaatccttttgcctcctttcaaagtgttgagactccaggcataagccactttgccca

SEQ ID NO: 1039748 - DNA, 120 bp, Artificial Sequence
  ENSG00000267106_26 (sequence is synthesized)
agactccaggcataagccactttgcccagttgctactattatacttagcgcatttttttgtttgtttgttttttgagacagtcttactctgtatcccaggctggagtgcagtggtgtgat

SEQ ID NO: 1039749 - DNA, 120 bp, Artificial Sequence
  ENSG00000267106_27 (sequence is synthesized)
cctcccgagtagctaggaatacatgcacatgccaccacgcccagctatatttttttagttttagtagatacaaggtttcaccgttttagccaggatcatctcaatctgaccttgtgatcc

SEQ ID NO: 1039750 - DNA, 120 bp, Artificial Sequence
  ENSG00000267106_28 (sequence is synthesized)
caaagtgctgggattacaggcatgtgagccaccgtacctggcttacttagtgaatttgtaccaatattcattaccaatataattctgtagtttttaatgactgtactgtttttatcagtg

SEQ ID NO: 1039751 - DNA, 120 bp, Artificial Sequence
  ENSG00000267106_29 (sequence is synthesized)
actgtttttatcagtgataaaaacgatacatatatacatcttgtactgcatcataaaaagatttagcaagatttgcttcattgttaatactctgaaaggatttatggagaattaggacca

SEQ ID NO: 1039752 - DNA, 75 bp, Artificial Sequence
  ENSG00000267106_30 (sequence is synthesized)
agagaggattactctagctcaggagtttgaggacagcctgggcaatggagtgagataccttctctaccaaaataa

SEQ ID NO: 1039753 - DNA, 120 bp, Artificial Sequence
  ENSG00000267106_31 (sequence is synthesized)
gcctgggcaatggagtgagataccttctctaccaaaataaaaaagtgtgagtttaggtgctgtgttccttgttgttgttacagtgtgagccaccgtgcctggccgagactgggtaagtta

SEQ ID NO: 1039754 - DNA, 120 bp, Artificial Sequence
  ENSG00000267106_32 (sequence is synthesized)
atggctggggaggcctcaaaatcatgacagaaggtgaaggaggagcaaaggcacatcttatatggcagaaggcaagagagcctgtccaggggaacagctgcttataaaactgacagacct

SEQ ID NO: 1039755 - DNA, 120 bp, Artificial Sequence
  ENSG00000267106_33 (sequence is synthesized)
aacagcacacgcctattatcccagctacttggctgactgaggcatgagaattacttgaacagcatggggaaacccccccccatgattctattacctcccacctggtctctccctcgacac

SEQ ID NO: 1039756 - DNA, 120 bp, Artificial Sequence
  ENSG00000267106_34 (sequence is synthesized)
gtggggacacagccaaaccatatcagctggcaacttgcttgcagctcataacatcaactgtttctttgggccttcagtcctgctgacttccggcctcctgagtccctaagcagaggaata

SEQ ID NO: 1039757 - DNA, 120 bp, Artificial Sequence
  ENSG00000267106_35 (sequence is synthesized)
tgctgacttccggcctcctgagtccctaagcagaggaatacgaattcaaatcttgattttctcattgcagctcatagtgggagatgcccagtctctctgtgaacattgacagaatttttt

SEQ ID NO: 1039758 - DNA, 89 bp, Artificial Sequence
  ENSG00000267106_36 (sequence is synthesized)
gagtgccgtggcgcaatagaagtgattctcccatctcagcccccaagtagctgggactacaggtgagtgccaccacacccagctaattt

SEQ ID NO: 1039759 - DNA, 83 bp, Artificial Sequence
  ENSG00000267106_37 (sequence is synthesized)
ccaaaatggtctcaatctcttggcctcgtgatccaaccatctcagcctcccaaagtgctgggtttaaaggcatgagccactgt

SEQ ID NO: 1039760 - DNA, 120 bp, Artificial Sequence
  ENSG00000267106_38 (sequence is synthesized)
agcctcccaaagtgctgggtttaaaggcatgagccactgtgcctggcccagaattctttactgctaacacgagtgggcctggttctggaggatttcccagtgggtcctgaagaaccacag

SEQ ID NO: 1039761 - DNA, 120 bp, Artificial Sequence
  ENSG00000267106_39 (sequence is synthesized)
tttattggcttgtgggcaaaggggtatgtgtatcagttggcctttactgtgtaataaacagccacaaaaattactagctgaaaacagcagctacttaattagcagaagcctcttgaggat

SEQ ID NO: 1039762 - DNA, 120 bp, Artificial Sequence
  ENSG00000267106_40 (sequence is synthesized)
ggacttgcaaaccaaagttgtgctggtttctactggtcaaagcaaggactggctcacataaaaaggagagagattgcaccttcagagagtaatctcaagacatctgtaatctaccacagg

SEQ ID NO: 1039763 - DNA, 120 bp, Artificial Sequence
  ENSG00000267106_41 (sequence is synthesized)
gtgtcactgggcctctgtcaaggagcctattctttctgccaccagatctgtctaatagcttgtgtgacaatgcacttccttctgggtctctctccaagtgtagtaagtgtatatgggaat

SEQ ID NO: 1039764 - DNA, 120 bp, Artificial Sequence
  ENSG00000267106_42 (sequence is synthesized)
cactttattcaaacagtgtagtgcacttagttagaaagaaaaggtattaaggaagacttatatttaaaattgttatttatggtaacaacgaaaagtaacatacaaatttcaaacatcaag

SEQ ID NO: 1039765 - DNA, 120 bp, Artificial Sequence
  ENSG00000267106_43 (sequence is synthesized)
tggctcacgcctgtaattcctgcactttgggaggctaagggtctcactctattgtctaggctcgaatgcagtgacgtgatcatggatcactgcagtcctcaacttactgggctcaggatg

SEQ ID NO: 1039766 - DNA, 87 bp, Artificial Sequence
  ENSG00000267106_44 (sequence is synthesized)
aaagcttttatcgggcgagcgcagtggctcacgcctgtaattcctgcactttgggaggctaagagatggggtttcaccatattggct

SEQ ID NO: 1039767 - DNA, 120 bp, Artificial Sequence
  ENSG00000267106_45 (sequence is synthesized)
acactctggccgggcgaggctcgtgggctccagtttcagccacgtaggaccgggtagaacacagaaattctagtttcctctcgggatgaaaggcttcctagcacaaacaccacccctgga

SEQ ID NO: 1039768 - DNA, 120 bp, Artificial Sequence
  ENSG00000267106_46 (sequence is synthesized)
gacgtcacttccgcttcaacactctggccgggcgaggctcgtgggctccagtttcagccacgtaggaccgggtagaacacagaaattctagtttcctctcggagatggggtttcaccata

SEQ ID NO: 1039769 - DNA, 120 bp, Artificial Sequence
  ENSG00000267106_47 (sequence is synthesized)
ccagcggtatacagattttttaaaactccagctaaagtatgtataaaaagacacatttttttaaaaagcatacagaaagactaagaagtagaggaaaatcaagctgatgtaactatataa

SEQ ID NO: 1039770 - DNA, 120 bp, Artificial Sequence
  ENSG00000267106_48 (sequence is synthesized)
atatctaacagaattagtggaacagaaaacatgcaagaaatagtgtagatttttcaagcgaaatatctgaaagaattcataaacctgggtactctctaccaagattaacacaagcaaagg

SEQ ID NO: 1039771 - DNA, 120 bp, Artificial Sequence
  ENSG00000267106_49 (sequence is synthesized)
gaaagaatgcacaattaataagttattccagaatgcaaaaggagactgaagttatacaaccagcaaaaatgaaaaatataaaaagtataaatttttgctacacatttggaaataaaaaca

SEQ ID NO: 1039772 - DNA, 120 bp, Artificial Sequence
  ENSG00000267106_50 (sequence is synthesized)
ttttgctacacatttggaaataaaaacatgcctagaagaatattctcaaaatacttatgcaagccttagttgtctttttttttttttttttatgagatggagttttgctcttgtcaccca

SEQ ID NO: 1039773 - DNA, 120 bp, Artificial Sequence
  ENSG00000267106_51 (sequence is synthesized)
agcaattctcctgcctcagcctcccaagcggctgggattacaggcgcccgccaactcacctggctaattttattttttgaatttttagtagagacaaaagtttcaccgcattggccaggc

SEQ ID NO: 1039774 - DNA, 90 bp, Artificial Sequence
  ENSG00000267106_52 (sequence is synthesized)
cctgccttgacctcccaaagtgctgtgattaaagccgtgaagcaccgtgcccaacctagttgtctttttttttttttttgagacggattc

SEQ ID NO: 1039775 - DNA, 120 bp, Artificial Sequence
  ENSG00000267106_53 (sequence is synthesized)
gcagagattacaggtgcatgccaccaccatccttggctgaattaaaaaaaatttttttgtaaagaccatatttcaccatatgcccaggctggtcctgaagtcctaatctcaaggaatccc

SEQ ID NO: 1039776 - DNA, 120 bp, Artificial Sequence
  ENSG00000267106_54 (sequence is synthesized)
tgctgggattacaggtgtgagccatcacatccagcatggttttgattttcattttcatgatgtttagtgatgttgagcatcgtttcatgagcatcttttcgtgtgtttattggccatctg

SEQ ID NO: 1039777 - DNA, 120 bp, Artificial Sequence
  ENSG00000267106_55 (sequence is synthesized)
gtgtgtttattggccatctgtatatcttctttggtgatattattcaagtcctttttctgtattgaaatgagttttgttgttgttactcttgggttctagaaattttaaaaataaactctg

SEQ ID NO: 1039778 - DNA, 120 bp, Artificial Sequence
  ENSG00000267106_56 (sequence is synthesized)
gatatttgtccccagtcagatacaggacttgcaaatattttctcccatttgtagattgtctttttactctcttgttattatgctttgatgcacaaaatttgtatcattgattaggttcaa

SEQ ID NO: 1039779 - DNA, 120 bp, Artificial Sequence
  ENSG00000267106_57 (sequence is synthesized)
ctcataatttttcttgtgttgcctgtgtggttgatgtcataactgagaagtcatttccagttgaagctttctcacctatgttttcttctaatagttttccagctctagctcttacactac

SEQ ID NO: 1039780 - DNA, 120 bp, Artificial Sequence
  ENSG00000267106_58 (sequence is synthesized)
cttctaatagttttccagctctagctcttacactacactaaggtttttgatccatttttaaaaaatcatgccacattattattattattattattaagatggagtcttgctctgtcaccc

SEQ ID NO: 1039781 - DNA, 120 bp, Artificial Sequence
  ENSG00000267107_0 (sequence is synthesized)
gttatttgactggagtgaggtctcatgtctgcttatgcggtggctcgctgctcagaacagggaaccattggagatactcattactctttgaaggcttacagtggaatgaattcaaatacg

SEQ ID NO: 1039782 - DNA, 120 bp, Artificial Sequence
  ENSG00000267107_1 (sequence is synthesized)
acttatttgaggaattgaagttgactttatggagctgataagaatcttcttggagaaaaaaagactgggtatattttcaatatgctttccttttaaggtccctcacctgtggaaagtaaa

SEQ ID NO: 1039783 - DNA, 120 bp, Artificial Sequence
  ENSG00000267107_2 (sequence is synthesized)
gaatgtcactttctgacaggctcaggaacctcaagttatgtagggatctcaagaagatgggggaattcacccagttcatacaggtgaaattgctgttgcaaagattatgaatatgagaga

SEQ ID NO: 1039784 - DNA, 120 bp, Artificial Sequence
  ENSG00000267107_3 (sequence is synthesized)
agtccagcatggctgacttcatctcgtgtctggcctcaggctggctgcccttgctcactcttgggcataggccaagctagccatgggaggaatttagtttatagtttaactttgaagcac

SEQ ID NO: 1039785 - DNA, 120 bp, Artificial Sequence
  ENSG00000267107_4 (sequence is synthesized)
ggatgataatagtctctccctaaaatgaaccccttccttgctcagggactgaaactacctttgtatgacaaatgaaagcccacaagattaagattatgagaggggcctgaattctgctaa

SEQ ID NO: 1039786 - DNA, 120 bp, Artificial Sequence
  ENSG00000267107_5 (sequence is synthesized)
tgtcccacagcttgcctttctataatctcttgcttctcaggagtcacatggccagaggtcctgagatttccagtcctgtgacccccacccagagatggacttagtgcatgaggaccattt

SEQ ID NO: 1039787 - DNA, 120 bp, Artificial Sequence
  ENSG00000267107_6 (sequence is synthesized)
tccacacccctatgatttcatcctcaaacaatcagcagcaaccattccctagccccctgccttccaaattatccataaaaatcctagcctctgagttattagggagattgattaataatc

SEQ ID NO: 1039788 - DNA, 120 bp, Artificial Sequence
  ENSG00000267107_7 (sequence is synthesized)
ccagtcctaccccttgggttgctctgatttaattaaaccttctctactgcaataccacggactcagtaaattggttttgtctgtgcaatgggcaagaagaacatgttgcatggttataca

SEQ ID NO: 1039789 - DNA, 120 bp, Artificial Sequence
  ENSG00000267107_8 (sequence is synthesized)
ggtactacaagcacagtctgatggcaaattattggttttgcttcctgcccttgatgtttctaaacatctagtccaaaattacttgtgaaaggtccagcaaagccaattttaaaagaggct

SEQ ID NO: 1039790 - DNA, 90 bp, Artificial Sequence
  ENSG00000267107_9 (sequence is synthesized)
acttgtgaaaggtccagcaaagccaattttaaaagaggctatatggccaatcactattctttctacacattattgcaaataatcaggcca

SEQ ID NO: 1039791 - DNA, 120 bp, Artificial Sequence
  ENSG00000267107_10 (sequence is synthesized)
gttatttgactggagtgaggtctcatgtctgcttatgcggtggctcgctgctcagaacagggtctgatggacaggaaatggtaaggtttctgaaaacctaaggatcacacagcgagttcc

SEQ ID NO: 1039792 - DNA, 120 bp, Artificial Sequence
  ENSG00000267107_11 (sequence is synthesized)
aaaggctgaaagtgcatacctgtcgacactgataccaatgacatccaatggaggaagagggtaatctggaagagtttcctgacctactctgctgctgtgattaaacaaccaccaggaaat

SEQ ID NO: 1039793 - DNA, 120 bp, Artificial Sequence
  ENSG00000267107_12 (sequence is synthesized)
gtggctcgctgctcagaacagggtgagtctctgagttgtacgctgaggaggggaggctgtcaatctagaaaaaacccattgcatgggacacctccatggggtctggggggctgaggatga

SEQ ID NO: 1039794 - DNA, 120 bp, Artificial Sequence
  ENSG00000267107_13 (sequence is synthesized)
ggagctggactggatctagggaaggaggaggtttcagagggtgaaattctggcagtaaatcctgggggtgtttgaaaacttcctccctcagaaggagaagactcagggaggaataaggac

SEQ ID NO: 1039795 - DNA, 120 bp, Artificial Sequence
  ENSG00000267107_14 (sequence is synthesized)
aaaccatgggtcccttgaggggcatttactaacttaagaggactttatcgggaagcagagtgacaatggcctccttgaggactgaggcccctggataaatgaggcccagatccagatcca

SEQ ID NO: 1039796 - DNA, 120 bp, Artificial Sequence
  ENSG00000267107_15 (sequence is synthesized)
gtccatgggagatgagaccttcaagggacatatttttgttgggacagaggaaaagtgcagctctgcagctgcagaggaagccttggcagtgtgaaagcgaccttggagggggccctgtgc

SEQ ID NO: 1039797 - DNA, 120 bp, Artificial Sequence
  ENSG00000267107_16 (sequence is synthesized)
gttctgaatgcttctgaggtccatcccctgtccccgcctctttttctggattttttgggctccatggtctccgccatcttctgagcgctccacgctgccaccttcagttttctcttctgg

SEQ ID NO: 1039798 - DNA, 120 bp, Artificial Sequence
  ENSG00000267107_17 (sequence is synthesized)
gctccaaatactccaaaatctttcatatctgtgcccctacccctgtttttagcatgtgttgggactccaggtccctgaaggtttctggcctgaaatccacctccccagcggtgtggattc

SEQ ID NO: 1039799 - DNA, 120 bp, Artificial Sequence
  ENSG00000267107_18 (sequence is synthesized)
tgctctagagaccccgcacttggcaaggttcccaggcccctgggggacaaccgagtggtatgtgcacttcagggctccacactcggcaaggtctttcaagcccttggggttccctcctca

SEQ ID NO: 1039800 - DNA, 120 bp, Artificial Sequence
  ENSG00000267107_19 (sequence is synthesized)
tctgggatgtagtcactctataaatgccgggatgtgatccccaccccagtgattttttttagttccatgagtgttgctatctgaatagtcatcctgagagtgatgggaccttttgaattt

SEQ ID NO: 1039801 - DNA, 120 bp, Artificial Sequence
  ENSG00000267107_20 (sequence is synthesized)
gcagcaagttttagattagtgtgagtggcctgagatcgcaaaactggggctagcattggatgtgaggttaggctggtggaaaaatttgcccagaacctgaggagtgtgggctcactgcag

SEQ ID NO: 1039802 - DNA, 120 bp, Artificial Sequence
  ENSG00000267107_21 (sequence is synthesized)
gtggttaggatcagcacagaattgcaaggatgtatagctttggggtaaagaataacatggttcagaagtacatgtattagtcttttcatgcattactataaagaattacctgagactggg

SEQ ID NO: 1039803 - DNA, 120 bp, Artificial Sequence
  ENSG00000267107_22 (sequence is synthesized)
tggctcatggttccacaggctgtacaaaaaggatgatgctggccatcagctcaacttctggggaggcgtcagaaaacttagagtcatggcaaaaagcacaagggaatcaggctcatcctc

SEQ ID NO: 1039804 - DNA, 120 bp, Artificial Sequence
  ENSG00000267107_23 (sequence is synthesized)
aaagcacaagggaatcaggctcatcctccatggccagagctggagctagtggtaggagaggtgctgcacacttttgaacaatcagatctttttagaactctatcaccagacagcacctag

SEQ ID NO: 1039805 - DNA, 120 bp, Artificial Sequence
  ENSG00000267107_24 (sequence is synthesized)
aggatggtgctaaattattcatgaaatatccacccatatgatccactcaattctcaccggcccaaccaggaccacctccaccattggggattacaattacacatgagatgtgggtgggga

SEQ ID NO: 1039806 - DNA, 120 bp, Artificial Sequence
  ENSG00000267107_25 (sequence is synthesized)
cacagatccaaactcgatcagtgggcatcttggactgggtctactatagaagaagaaccaggagctgactatcatccttaagactgcccatgatggccaggcagggtggctcatgcctgt

SEQ ID NO: 1039807 - DNA, 63 bp, Artificial Sequence
  ENSG00000267107_26 (sequence is synthesized)
accctgcctctactaaaaacacaaaaaattagatgggtgttgtgccagacgcctgtaatcagg

SEQ ID NO: 1039808 - DNA, 120 bp, Artificial Sequence
  ENSG00000267107_27 (sequence is synthesized)
gttatttggctggagtgaggtctcatgtctgcttatgcggtggctcgctgctcagaacaggcctagctagatgcctggaatttcccttgaaggaagtcaagattttcctttatctccata

SEQ ID NO: 1039809 - DNA, 120 bp, Artificial Sequence
  ENSG00000267107_28 (sequence is synthesized)
ctggctgatggtgatcgagtaagcccctaagaggggtccctgctccatctcgagatgctgctagattctacagtgcctaataaacagctctcgcctggccgacaaagagctgcttgctct

SEQ ID NO: 1039810 - DNA, 120 bp, Artificial Sequence
  ENSG00000267107_29 (sequence is synthesized)
ctggatagcaattccaaagtgaacagacaacatcctgtttggaagactgccactctgttagaagaagcatcaggaaaacctttcttttgagctatttataactaacagcaattgaccaag

SEQ ID NO: 1039811 - DNA, 120 bp, Artificial Sequence
  ENSG00000267107_30 (sequence is synthesized)
gaattaaccaaaatcacagtattctgaagatgattctacaaagcctgctgtttctacaaaggctgctgatgatttctacaaagcctgctgtagtgttgctgtggcctctgcttaaaaaag

SEQ ID NO: 1039812 - DNA, 120 bp, Artificial Sequence
  ENSG00000267107_31 (sequence is synthesized)
tagaaaacacattgatgcagcatgttcaccccaacctccctgcctaaaggctcagggaccatcttggaagaggaaggcgcgtgagattgtaagagccgaattagggggatggagtgtgga

SEQ ID NO: 1039813 - DNA, 120 bp, Artificial Sequence
  ENSG00000267107_32 (sequence is synthesized)
attatataactttgcctgaaaccaacagcacgctcattgcacatatcatgggctcatttatttcacttataaagaacctggccaaggaagagatagtgcctaaagtggccagtattctga

SEQ ID NO: 1039814 - DNA, 120 bp, Artificial Sequence
  ENSG00000267107_33 (sequence is synthesized)
ccgatatgttagaaaaatggtgtgccgaccaattcatgacatgtgtcccaaaactagcaacggaaattgtattcgccgtgttgaggtctctaatccagatgatgctcatctatgtactgg

SEQ ID NO: 1039815 - DNA, 120 bp, Artificial Sequence
  ENSG00000267107_34 (sequence is synthesized)
aaaaggcagagtcctttcctgacaagctgctgaaactcttcagaaacatctcatatttcctgaagaagatgatgtctggacaagcagcacaggaggaagagggtaatccggatgagtttt

SEQ ID NO: 1039816 - DNA, 120 bp, Artificial Sequence
  ENSG00000267107_35 (sequence is synthesized)
ctgacctactcggcggctgtgattaaacaaccaccaggaaattttgacgacactgttctcctgagctcctccctttcctccgggaacaaaacaattgaatttacaaaaataaagtgttat

SEQ ID NO: 1039817 - DNA, 120 bp, Artificial Sequence
  ENSG00000267107_36 (sequence is synthesized)
ttgactggagtgaggtctcatgtctgcttatgcggtggctcgctgctcagaacaggatggcagagatgagcaccaccatcaaaaactcaaggaccagtgctgtgggtccagtcatctgtt

SEQ ID NO: 1039818 - DNA, 120 bp, Artificial Sequence
  ENSG00000267107_37 (sequence is synthesized)
cctacagttactactttcacctaaaccctgcccttagtcaaatccttctcttcttctaagcaatcaacttcaattccttgtataacccacagtataaaagggcttttataccattctatc

SEQ ID NO: 1039819 - DNA, 120 bp, Artificial Sequence
  ENSG00000267107_38 (sequence is synthesized)
ctattgcatgtaagccttgggtctgggaggtaacagtgtgggattccaccatctcatctccctgccacccaaacatgcctgctcttctttaagcaatattaaatgtttgtacttcagaaa

SEQ ID NO: 1039820 - DNA, 88 bp, Artificial Sequence
  ENSG00000267107_39 (sequence is synthesized)
ttttctggtgagggtccaggtttccggaaacaactcagagacatatgttaagatgttatctttagttttcacagggaaccaaatatgt

SEQ ID NO: 1039821 - DNA, 120 bp, Artificial Sequence
  ENSG00000267107_40 (sequence is synthesized)
taagatgttatctttagttttcacagggaaccaaatatgttacgactccaatttccttggctattgttttaagttaccattaccttctcgttgatcaagttgctcatttacttctcaagc

SEQ ID NO: 1039822 - DNA, 120 bp, Artificial Sequence
  ENSG00000267107_41 (sequence is synthesized)
ggtacaatctgagtgagactgctatcagcttctggaggagcctttactaaaatgaatgatgagagtaactggatgatgagagtaactaatggatgatgagagaaccattggagatactca

SEQ ID NO: 1039823 - DNA, 120 bp, Artificial Sequence
  ENSG00000267107_42 (sequence is synthesized)
acaaaaataaagtgttatttgactggagtgaggtctcatgtctgcttatgcggtggctcgctgctcagaacagggaggaagagggtaatctggaagagtttcctgacctactctgctgct

SEQ ID NO: 1039824 - DNA, 120 bp, Artificial Sequence
  ENSG00000267107_43 (sequence is synthesized)
ttctctcaccatagcaataaataacacaacctcggtcacactgtatgcattgttggtctgcaaaatccatgttttgcaaaactcttcaggaaggtggatctgtaatattggcattgacat

SEQ ID NO: 1039825 - DNA, 120 bp, Artificial Sequence
  ENSG00000267107_44 (sequence is synthesized)
gagaacaacagcagtatttattcacaatctcaagctctctgtcttcccgtctctctcattagccatccaagtagtcctgaggaaccaagcccatcagaacattctgcaacataatacaca

SEQ ID NO: 1039826 - DNA, 120 bp, Artificial Sequence
  ENSG00000267107_45 (sequence is synthesized)
gctccattctccattcaaattttgttgttgttgttgttgttgatgagacaacatcttactccatcagccaggctgacgtacagtggggctatctgggctgactgtagtcttgagcttcca

SEQ ID NO: 1039827 - DNA, 120 bp, Artificial Sequence
  ENSG00000267107_46 (sequence is synthesized)
ggctcaaggcatcctctcacctcagcctcctaagtggcttgaactacagacacacagcgacatgctgggctagtttttgtatattttgtagagacgtgctctcaccatgttattcaggct

SEQ ID NO: 1039828 - DNA, 120 bp, Artificial Sequence
  ENSG00000267107_47 (sequence is synthesized)
gcgtaagtgatccaagcaccttggcctcaaagtgctgagattacaagcctgagccactgcacccagcccaatctccattctactgataacaatgtcattaccaggtctgatggacaggaa

SEQ ID NO: 1039829 - DNA, 120 bp, Artificial Sequence
  ENSG00000267107_48 (sequence is synthesized)
gctctgctcataacaaatctatactgaagtgtaagagtttgatggtcatggggattttccatgtctctgcctttcagcgatgtgccatatctgtgaagtgttcagaaatgcaacagcctg

SEQ ID NO: 1039830 - DNA, 120 bp, Artificial Sequence
  ENSG00000267107_49 (sequence is synthesized)
aggcatgctgggcatatcctctaataaaaaggaaaatgccattttatggtcctgtatttctacaagttggaacacatgggcctgtgatccagatgggggaaatgggaatattcccactca

SEQ ID NO: 1039831 - DNA, 120 bp, Artificial Sequence
  ENSG00000267107_50 (sequence is synthesized)
ttcaccttcatccacgaagcccatttgaaagctttgggcttcccatccttgtagattttagtgttgtgggctgggtgcagtggctttcacctgtactgccaacactttgggaggcctaga

SEQ ID NO: 1039832 - DNA, 62 bp, Artificial Sequence
  ENSG00000267107_51 (sequence is synthesized)
tggctttcacctgtactgccaacactttgggaggcctagacaggtgaatccactgaggccaa

SEQ ID NO: 1039833 - DNA, 84 bp, Artificial Sequence
  ENSG00000267107_52 (sequence is synthesized)
aaaggcagagactgcagtgacccgatcctgcctttgcactccacctgggcaagcagaacaaaacttctgtcttgaaaaaaaaaa

SEQ ID NO: 1039834 - DNA, 89 bp, Artificial Sequence
  ENSG00000267107_53 (sequence is synthesized)
gttatttggctggagtgaggtctcatgtctgcttatgcggtggctcgctgctcagaacaggacgtctcactcttgtgcctcactgcaac

SEQ ID NO: 1039835 - DNA, 89 bp, Artificial Sequence
  ENSG00000267107_54 (sequence is synthesized)
agcgagttccaaaggctgaaagtgcatacctgtcgacactgataccaatgacatccaatgcagacgtctcactcttgtgcctcactgca

SEQ ID NO: 1039836 - DNA, 120 bp, Artificial Sequence
  ENSG00000267107_55 (sequence is synthesized)
ccctctataaggacctgcttcctcaaaggacctcatagtcgggtcctgcccctcagtgtccagtctgccttggctggaggggctgcaggggtgtgttggcgccacctggtggagacaggg

SEQ ID NO: 1039837 - DNA, 80 bp, Artificial Sequence
  ENSG00000267107_56 (sequence is synthesized)
gtgttatttggctggagtgaggtctcatgtctgcttatgcggtggctcgctgctcagaacaggatggagtcttgctctgc

SEQ ID NO: 1039838 - DNA, 120 bp, Artificial Sequence
  ENSG00000267107_57 (sequence is synthesized)
agtgagactttgtctcaaataataataataataatcagaccaagtataatgaaattaaaatttattttgcaaataaattggtcctactacaatttatccttcatagaaatgtggaaactg

SEQ ID NO: 1039839 - DNA, 120 bp, Artificial Sequence
  ENSG00000267107_58 (sequence is synthesized)
aagataaaaaaaattaggtttcagaagaaaactatactacacctgttattagattctagccctaaacattgtttttgaggtttttattatttacctgcaatttggtctaaattctgaatt

SEQ ID NO: 1039840 - DNA, 120 bp, Artificial Sequence
  ENSG00000267107_59 (sequence is synthesized)
atttcctgactacaagtatccaaggaataaatgggttttctttttctttatgatagttttagttggcttctaatgcaacaacaatttttattgtaatcctgtgtgcattctattcctact

SEQ ID NO: 1039841 - DNA, 120 bp, Artificial Sequence
  ENSG00000267107_60 (sequence is synthesized)
ttttacttatggcaatataattattggcacaagctcaatcagattcggttttctttcgtaacaggaaccattggagatactcattactctttgaaggcttacagtggaatgaattcaaat

SEQ ID NO: 1039842 - DNA, 120 bp, Artificial Sequence
  ENSG00000267107_61 (sequence is synthesized)
gttatttgactggagtgaggtctcatgtctgcttatgcggtggctcgctgctcagaacaggaaaccatgagctatcaattgctactggcaatggtcctgggaagtcaaccctaagtatgg

SEQ ID NO: 1039843 - DNA, 120 bp, Artificial Sequence
  ENSG00000267107_62 (sequence is synthesized)
attctggggttggatgactccccacaggacttcagtgagcaacaatcactgctggcagttggaggacagagtcgctagggcatgtgaccactgtgaaaccaccgatgtttcacctggggt

SEQ ID NO: 1039844 - DNA, 120 bp, Artificial Sequence
  ENSG00000267107_63 (sequence is synthesized)
attatatatctttacgtgaaaccgacagaacactcattacactttttgtgagctcatttacttcacttataatgaacatggccatggaaatgctagtggagaaagtggtcgattttctga

SEQ ID NO: 1039845 - DNA, 120 bp, Artificial Sequence
  ENSG00000267107_64 (sequence is synthesized)
tggatgtgataaaaaaatggtttgccgaccaattaatgacatatgtctcaaaactagtaacgagacccttaatcgctgggttgaagtttctaatcaagaagatgctcatctatgtattca

SEQ ID NO: 1039846 - DNA, 120 bp, Artificial Sequence
  ENSG00000267107_65 (sequence is synthesized)
acaaagcagcttcccttgcttctgaaatgcttccaaacaacatctcatatttcctgaagaagataatgcctggacaagcagcacaagtcattcaggaggaagagggtaatctggaagagt

SEQ ID NO: 1039847 - DNA, 120 bp, Artificial Sequence
  ENSG00000267105_0 (sequence is synthesized)
ttgattcaaaaatacaatttattttaaaaacaaaaagagggaatggatgcagaagcccgtctgggctttccgtggagtcgccccttcccaatggcgatggccgctccctgtggcctcagc

SEQ ID NO: 1039848 - DNA, 120 bp, Artificial Sequence
  ENSG00000267105_1 (sequence is synthesized)
cgaggggcgtgggttgagggacaggacttgacttaggctcatgtcgccatcttgtggctgtggaaggaacagactgtggctttgacagaggtgactttggagcttttttttttttttttt

SEQ ID NO: 1039849 - DNA, 120 bp, Artificial Sequence
  ENSG00000225606_0 (sequence is synthesized)
catcccgacagggaaagcaggactgagtttgtcggaaggtgagcggggcttggccagagacggtgtgcgctgaggcagcggccctggacaagagtggcgtttggatacttgacggtgaaa

SEQ ID NO: 1039850 - DNA, 120 bp, Artificial Sequence
  ENSG00000225606_1 (sequence is synthesized)
ggggaagaagccagtcaccagctccaaagtccaggaactacacctggcaaaggtcaaagcctgcgagacctgcagccccgcctgcttgcccgcccgggcgaactcttcgtggtatagctc

SEQ ID NO: 1039851 - DNA, 120 bp, Artificial Sequence
  ENSG00000225606_2 (sequence is synthesized)
ccgcgccatggctcctgcacgcgatgctccgggggacgcgtgatatcgctgatcttggactaaaccgagagcagcaggaggaaccttattcgccgccactttatagtgtttgccatccgg

SEQ ID NO: 1039852 - DNA, 120 bp, Artificial Sequence
  ENSG00000225606_3 (sequence is synthesized)
acggggagcgcagcgctggcttccaagctcccacgccttgccccaggccaggagcggaatcggcgtcccagaagtcttgagattcagagggagtttatagtaactcgtgccaatgcctcc

SEQ ID NO: 1039853 - DNA, 120 bp, Artificial Sequence
  ENSG00000225606_4 (sequence is synthesized)
tccaaggaaagacattttctctagcaatagacgaagaacattaacggttaaaactgcttggcactcctttgtgcatacccatcactaccgtcctgcatatttccccttctctcgctaatc

SEQ ID NO: 1039854 - DNA, 120 bp, Artificial Sequence
  ENSG00000225606_5 (sequence is synthesized)
ctcttatttctggatctcagttgtgcctggcaggaggggtgaggtgaggaaagagcgcgccagccctgcagagttgagtcagcgtttactcgggtggagcaatacctgttctttctggcc

SEQ ID NO: 1039855 - DNA, 120 bp, Artificial Sequence
  ENSG00000225606_6 (sequence is synthesized)
ctctagaataattcttagaacaaggcttcctctgctaatagcaacacctgccgttaggcagcagaggagtgtgccacattagcatgctggaataattttaatacatccttctttaaaaaa

SEQ ID NO: 1039856 - DNA, 120 bp, Artificial Sequence
  ENSG00000225605_0 (sequence is synthesized)
ggggatattgtatgtaactggtgacatttgaaagagacatattggacagaaatgacatacgtgaaagctaagatacaatatatttaattttctaagaattcagttcaaggtagtctgcct

SEQ ID NO: 1039857 - DNA, 120 bp, Artificial Sequence
  ENSG00000225605_1 (sequence is synthesized)
ggtttctcaagttctgcatgtttcttcagtagactaaataatgataaggaagctgagatgtagagctgaagtgtcttgcccaagatcatttgtctactgcagctcctgttccacttcctt

SEQ ID NO: 1039858 - DNA, 120 bp, Artificial Sequence
  ENSG00000225605_2 (sequence is synthesized)
tcttgtactgctgaacatccagatagaggcattgacatgcatggtttccaactgatcacttcctactcccttaaggacctcctgtcaggcagttttgctaatttctttaatatcagaaga

SEQ ID NO: 1039859 - DNA, 120 bp, Artificial Sequence
  ENSG00000225605_3 (sequence is synthesized)
atcatgtaacttctgaaaaacttcactgtacacagatgctgacctcacagactccctgaaaggatctccatgacctctatggttccttagactgcactttgagaactattgacgtacagg

SEQ ID NO: 1039860 - DNA, 120 bp, Artificial Sequence
  ENSG00000225605_4 (sequence is synthesized)
gaaaaatgctcttggtgccaagaagggattccgaagatagaagaggaggcatcaacaccgtgaacatcatggctgagttattttgtgagagggataagcctaaagtaaaaaccttggatt

SEQ ID NO: 1039861 - DNA, 120 bp, Artificial Sequence
  ENSG00000225605_5 (sequence is synthesized)
tgcctctgtccttgaacatgctatctggaaagagttttcttaaaagtattgttgtgaacacatccattttcccagtatagttgaatgcagggtttaataaatggaatgaatctagtttta

SEQ ID NO: 1039862 - DNA, 120 bp, Artificial Sequence
  ENSG00000225605_6 (sequence is synthesized)
agtgcaatggtttaggaattgggaaagtataaaaggtatagcacaacagcactagacaactgaggtagtcacctacctaaggagagatgccaaggacaagttggccagctaaacactttc

SEQ ID NO: 1039863 - DNA, 120 bp, Artificial Sequence
  ENSG00000225605_7 (sequence is synthesized)
ttagtgtaaatcagcaaaacatttggcttattaaaaagggccaaactacagagaatgctggtctacagaacttcagagaatccctgagagaattctaagttttgctaatttctttaatat

SEQ ID NO: 1039864 - DNA, 120 bp, Artificial Sequence
  ENSG00000225605_8 (sequence is synthesized)
ggagactgtgcctggagtgatgaaggaagaataacggaaccagcgcggctgaaaagaggacagagataaggaagctgagatgtagagctgaagtgtcttgcccaagatcatttgtctata

SEQ ID NO: 1039865 - DNA, 120 bp, Artificial Sequence
  ENSG00000225605_9 (sequence is synthesized)
agactgatctttatagctacttgggcagggttggagaaatgcaagacttcagtgcagtacaggaaagaagaatcaaataaagctgcttcaaaattcacttactcattcaacaaaatcttg

SEQ ID NO: 1039866 - DNA, 120 bp, Artificial Sequence
  ENSG00000225605_10 (sequence is synthesized)
attgagcagttgctacgtatctgacatagttctacacactctatccgtgaggatagatagtgagcaaaccaatgaaaaaggaacaacagtaaataaacagataaggaagctgagatgtag

SEQ ID NO: 1039867 - DNA, 120 bp, Artificial Sequence
  ENSG00000225605_11 (sequence is synthesized)
ctcatttctgcttctgcattcagtctattgtgatatagcatatcatgtaacttctgaaaaacttcactgtacacagtattactatttttagatgctgacctcacagactccctgaaagga

SEQ ID NO: 1039868 - DNA, 120 bp, Artificial Sequence
  ENSG00000225605_12 (sequence is synthesized)
aacactattgcattgagagttaagtttctaaaacgtgaactctttgggggacacacttaaaccatagcagcggccaagctgtcttgtgtttctggtgcatcttgtgtggaagaaaatccc

SEQ ID NO: 1039869 - DNA, 120 bp, Artificial Sequence
  ENSG00000225605_13 (sequence is synthesized)
atcccaaagctgtgcacagattttgactggttcccagaagaagattcagccacccatgaccctgaactggaataagcagttttgctaatttctttaatatcagaagacagctggattctc

SEQ ID NO: 1039870 - DNA, 120 bp, Artificial Sequence
  ENSG00000225605_14 (sequence is synthesized)
ccaagaatacctgcttaaaggccaggtcaccagttcagctttgcagataggctatgaagttgatggatatctctgattgggcaccccagctggtaggaacacagctgcagctcctgttcc

SEQ ID NO: 1039871 - DNA, 120 bp, Artificial Sequence
  ENSG00000225602_0 (sequence is synthesized)
agagaagagaataagaagagactggaaaattggtcattctctcacagcttaagtttagatctggcggatgatctctcgtcgctcggggacaagtttgtactggataacctcctccagctc

SEQ ID NO: 1039872 - DNA, 120 bp, Artificial Sequence
  ENSG00000225602_1 (sequence is synthesized)
ggacagcatgtggcaagaaaccatggcctgatggaagcaaatcgcattccaaactaattactgcacgaacaatccaaaagacaggattaatttaaatcattccttctggtgtcagggtat

SEQ ID NO: 1039873 - DNA, 120 bp, Artificial Sequence
  ENSG00000225602_2 (sequence is synthesized)
tcccagaactgaatggcttgagaggaggtattatccaatttctcatcgaagacagaaatgtatggcatccaaaactttaacatctatctaaggatggggctggttaccagaaagaccaag

SEQ ID NO: 1039874 - DNA, 120 bp, Artificial Sequence
  ENSG00000225602_3 (sequence is synthesized)
taattatcgggtttgaactttcagccctgtccactgacatccaggaaaggtgaagaggttgaaaatgaaaggcaataaaaactcttgaacaatgagcttccaggttgatgaaggtgctgg

SEQ ID NO: 1039875 - DNA, 120 bp, Artificial Sequence
  ENSG00000225602_4 (sequence is synthesized)
gagggtgaaggtaaaccccagtaccacaggacagaagcttctgcactccagacccttctagaccttccctcattgtacctgttcacctctatcttttataataccctttataataaacaa

SEQ ID NO: 1039876 - DNA, 120 bp, Artificial Sequence
  ENSG00000225602_5 (sequence is synthesized)
aatgggataactggccatccttcccagaacatttagactcctgactcccagacctggagtgacagtttctcatgttaaaatgatcagaatatctggcggatgatctctcgtcgctcgggg

SEQ ID NO: 1039877 - DNA, 120 bp, Artificial Sequence
  ENSG00000244286_0 (sequence is synthesized)
gctgggccaaccacagtcctctctggagcaccagagccagacccgggatgggctcactgtggccaaacacatacataagcttccaaggactgcggcctctgtctggggctttgaagattt

SEQ ID NO: 1039878 - DNA, 120 bp, Artificial Sequence
  ENSG00000244286_1 (sequence is synthesized)
agaaattaattcaagactgaaactccagctgtatatccctggcagccagtacaacacttggcttatgaagaacgctcaatgaacttttgttgaatgagatgaatgcagcaacctgcctaa

SEQ ID NO: 1039879 - DNA, 120 bp, Artificial Sequence
  ENSG00000244286_2 (sequence is synthesized)
cacaaaatgaccttcaatgagagattgttgtttctatatttgtagctgcattgtctcagatcagatacttactaagctctggtttttccaaagctctggtttctccaaccacaagctgca

SEQ ID NO: 1039880 - DNA, 120 bp, Artificial Sequence
  ENSG00000229116_0 (sequence is synthesized)
ctggaggccagggctgagggaaggcctggagcagagccggtgcgcgacctcgcagtgagcagggagggcaggctggggacgttcaccacccagaacgcctctgctccccgcaaccctgag

SEQ ID NO: 1039881 - DNA, 120 bp, Artificial Sequence
  ENSG00000229116_1 (sequence is synthesized)
actccaggctcccctgttcctccctccgggagaccctgcccgtcctccccgcggggctccttcgcagttcgggggaagggacgggttgcgtcctcgggacctttctctgcagccacagca

SEQ ID NO: 1039882 - DNA, 120 bp, Artificial Sequence
  ENSG00000229116_2 (sequence is synthesized)
gcgcatcccagcacctcctccaggagccccgccacctcctgccacccggactttccccacagcgcagcgtcccctcgtcctctcagggctggaacagcggtacccgcagacagtgcaaaa

SEQ ID NO: 1039883 - DNA, 120 bp, Artificial Sequence
  ENSG00000229116_3 (sequence is synthesized)
gggaagtccctgttgccttcccatgcaaactgtagggcgcttacagctgctgggagaggaaaggaaagaagaaatacaagcctgtgacccggatccaacccgcggcgcacagaccccggc

SEQ ID NO: 1039884 - DNA, 120 bp, Artificial Sequence
  ENSG00000229116_4 (sequence is synthesized)
ccctggtgagcgccttctgcgccagagctccgtacagcaccagcccgcgctctcccccagcttctgttcatttgctgcagtcctgacgggtcagttgcctgagcatccatgctgccatcc

SEQ ID NO: 1039885 - DNA, 120 bp, Artificial Sequence
  ENSG00000229116_5 (sequence is synthesized)
atacaaacccaggcacgcagagatgtacatcctttacccagggtgacaccatgtggagctgaatccaagtccgggagtctgatgaccgtgtctgggctctgaccgcgcagccgtctcaca

SEQ ID NO: 1039886 - DNA, 120 bp, Artificial Sequence
  ENSG00000229116_6 (sequence is synthesized)
gtgaaacaaattgcggactggccttgtcctgagtggccttaggaagctgcagtggcctgcagtctcctggccagtctgtagaatttggcaaagatgaggcaccttatagccttacatgtt

SEQ ID NO: 1039887 - DNA, 120 bp, Artificial Sequence
  ENSG00000229116_7 (sequence is synthesized)
cttatttttctttccttttctcttctttattttcttttttaaggatttgaattagtatatgtaaagtgcttaacgcaggagctggcagagaaagtggatactcagtaaataacagcaatt

SEQ ID NO: 1039888 - DNA, 120 bp, Artificial Sequence
  ENSG00000229116_8 (sequence is synthesized)
gttaattgtaaaaagcatgccacttatctggtaaaatcccccattctaagcaccctgttaagtagttggtaattcctcacttgaaagaaattaaaaagaatttttgtcagttttttaaaa

SEQ ID NO: 1039889 - DNA, 120 bp, Artificial Sequence
  ENSG00000229116_9 (sequence is synthesized)
agtcccagagcaatgttgcggtcaagagaacacagtccagctaccaacagttatttcaaaataattcaagctctttgtttatatttctgaaagaaagaaagaaaaaaaaagggtggccca

SEQ ID NO: 1039890 - DNA, 120 bp, Artificial Sequence
  ENSG00000229116_10 (sequence is synthesized)
gctggaaactcggctttaagtcccctttcagggggccctcaggtgggcacctgcttggaaacctctccacccctccaaacacccttttcctctctgagtgttcatttgttgatccagatt

SEQ ID NO: 1039891 - DNA, 120 bp, Artificial Sequence
  ENSG00000229116_11 (sequence is synthesized)
aatttcactcttttaatactttttaagtgtacaatgcagattaataagagaaatgcatacaaatttattaacgtgtacacgggaaaaataaggtgattacccaatatcccatgaggtcca

SEQ ID NO: 1039892 - DNA, 120 bp, Artificial Sequence
  ENSG00000229116_12 (sequence is synthesized)
gatacttatacagcgttttttcagagaggagggtggaaggcggaatgtaggtgattctgttgaggggcaataaattattattaaggagaatgaatgggtcaagaaacagagagttattcg

SEQ ID NO: 1039893 - DNA, 120 bp, Artificial Sequence
  ENSG00000229116_13 (sequence is synthesized)
taaatggttctctttgaaaatttaataagctggagaaatggattatttttttgaaagcgtctgttcaggtgtggtcacgtgttggttttcttttctgcaatagataatgagataagaggg

SEQ ID NO: 1039894 - DNA, 120 bp, Artificial Sequence
  ENSG00000229116_14 (sequence is synthesized)
aggagaaggaaaagtaattgttctctttggtgggtctgcagggtcttcatgtagataagggagaggactcttccagcttctgttgatcttgagggactttaattgaaaatactcatacca

SEQ ID NO: 1039895 - DNA, 120 bp, Artificial Sequence
  ENSG00000229116_15 (sequence is synthesized)
gggagccatattttggggccaagttccctgcgctccttcaatcctcctgtttggaacttccctagaatttcacattatcaacagctgaatcagtgattatggagagatttgggttagagg

SEQ ID NO: 1039896 - DNA, 120 bp, Artificial Sequence
  ENSG00000229116_16 (sequence is synthesized)
aaaagaaggcaaagaaggggaaaaaacaaattgggataagcagaaaagaaaaataaataaatatgttgtcccatatcttcttgaatcagtctcttagtcctaagagtagaagcatttggt

SEQ ID NO: 1039897 - DNA, 120 bp, Artificial Sequence
  ENSG00000229116_17 (sequence is synthesized)
caaacagctgtgtccattctaggaggtggcactacagaggggctgggcttctacagctgatgcaggcaagctggtctttaataagaggcatttctatggaaacaaagaaaaacaaaggtt

SEQ ID NO: 1039898 - DNA, 120 bp, Artificial Sequence
  ENSG00000229116_18 (sequence is synthesized)
agagagctctaccatcaaagccgccaggaagacagacctccacaggaacctgggagggccagcagcatggggagggccatgtgtaaagaaagaaggcttgaaggtggccacacaaggcca

SEQ ID NO: 1039899 - DNA, 120 bp, Artificial Sequence
  ENSG00000229116_19 (sequence is synthesized)
ggcccagtgggatgacatggcagacttcccacctgcctatagtcctgagaagcgacatggctgacttagggagtttattttagtttgctgttgggtgtcagctcctctaagacacaagct

SEQ ID NO: 1039900 - DNA, 120 bp, Artificial Sequence
  ENSG00000229116_20 (sequence is synthesized)
ggtgctggcaaagtaaaagaaagctgggcttgcttgaaaagtgacttgattatatcaacatgtctaatgtctcttgtctgcttctcctttgtctgagagatgggggaaagctgggagcaa

SEQ ID NO: 1039901 - DNA, 120 bp, Artificial Sequence
  ENSG00000229116_21 (sequence is synthesized)
agccagtctgtgtcacctgcatttgagcagcatgtgaggcctgcagacatttctcctgccagctgtcctttgggtggcagatgcattccccacattgcagtgtggcatagatggggaggc

SEQ ID NO: 1039902 - DNA, 120 bp, Artificial Sequence
  ENSG00000229116_22 (sequence is synthesized)
agggctttgagctctcccctgttttcaacatacacatactacacctgcaagggctcacactacaagtacaggtgaagaagaggtgggaaagatttaagatgtgtgatttacatgtggaaa

SEQ ID NO: 1039903 - DNA, 120 bp, Artificial Sequence
  ENSG00000229116_23 (sequence is synthesized)
ttatatgcattttagaatacatctatatctttacatttcatgttatatagagcatgcatagcatgtgtatgtgtatatatatctatatgtcacaatacatacagtaaattgtggaatcca

SEQ ID NO: 1039904 - DNA, 120 bp, Artificial Sequence
  ENSG00000229111_0 (sequence is synthesized)
tttcaatcagactcactactactgcttgaggagtccgttgacataatctctacatcatcttcattttctttattatgcccaggaggttccaacaaaaagtcactactatgatttggtggt

SEQ ID NO: 1039905 - DNA, 120 bp, Artificial Sequence
  ENSG00000229111_1 (sequence is synthesized)
aacatattcatcgacatgtcatttgactgccatggatactgtggagcaaggacatctggagaaaaaaagaagcatagataagaacagctctatctggtctcattctgtcacccaggcttg

SEQ ID NO: 1039906 - DNA, 120 bp, Artificial Sequence
  ENSG00000229111_2 (sequence is synthesized)
agcctcctgagtaactgggttacagatattccaaccttgtcatctctggaaaaccctgatctgtttgaaaacactcttcggcttaacattacctggcaatcttcctgctgcaagtgcatc

SEQ ID NO: 1039907 - DNA, 120 bp, Artificial Sequence
  ENSG00000229111_3 (sequence is synthesized)
tcctggtaaatggccattcacgccattagtggaaggattgttcatctgacccagtaacccacttctcatctctaaatcagttgggtagggtctccgggggtcccctaaaacaataaagac

SEQ ID NO: 1039908 - DNA, 120 bp, Artificial Sequence
  ENSG00000229118_0 (sequence is synthesized)
gttttcagaggcgtggagggagcccgagaagagcagatgttgacaccaccatcactgcctgcagcagtgagaccaggggcacagtttttgttgaaagggtcgaccaggaagcacttcctt

SEQ ID NO: 1039909 - DNA, 120 bp, Artificial Sequence
  ENSG00000229118_1 (sequence is synthesized)
gactctgtcctaaagcctctggagagcccttaaatttgtggtccttgaagctattgtaaaggtgaggacacagcgaggagtaggctgtctatgaaccaggaagtgggccctcaccagaca

SEQ ID NO: 1039910 - DNA, 120 bp, Artificial Sequence
  ENSG00000229118_2 (sequence is synthesized)
tcaatttggacttcccagactccagaactgcaagaaattaatttctattgctcacaagccacccagtctatggtattctgttacagcagctggagcaaactgagacagtacttgacagtg

SEQ ID NO: 1039911 - DNA, 120 bp, Artificial Sequence
  ENSG00000229118_3 (sequence is synthesized)
attttcatgaaggttctcccttgctcatttttaagcccactggttcagacagaagcctctgggagagccctccagagtccaccttgaaggcttcattccttctacccagagcatctccgt

SEQ ID NO: 1039912 - DNA, 120 bp, Artificial Sequence
  ENSG00000229118_4 (sequence is synthesized)
ggagaggaagaaaaagcatcaatgaaatgaggtgccccagcggttctggggagcaattcctctcttcatatgaccatttgggaaacccccagtgagatggagtgtgcttttaagccatga

SEQ ID NO: 1039913 - DNA, 120 bp, Artificial Sequence
  ENSG00000286230_0 (sequence is synthesized)
ggccctgggttggtaagattcgctaaagacggtggcgtgttctctcccgagtctgctttgtggggttggtggggcttttccatcgggagccgcaccagccaccctggcaccgcacttcca

SEQ ID NO: 1039914 - DNA, 120 bp, Artificial Sequence
  ENSG00000286230_1 (sequence is synthesized)
gaaccgcgtcagcaccaaggacagcgccagggagccttggctgcagggacggagccccagatgtggctgagaaggggaagaggaaggaccgtcgtgccctggagcctgcgaccgccacgc

SEQ ID NO: 1039915 - DNA, 120 bp, Artificial Sequence
  ENSG00000286230_2 (sequence is synthesized)
ccttgttccagcctcagccttcaaccccctacacagacgcccagtgagcactacgtgccgcacgcaggactgaggggtggagagtgggaggccatgggtgtcaacgtagggtccctggag

SEQ ID NO: 1039916 - DNA, 120 bp, Artificial Sequence
  ENSG00000286230_3 (sequence is synthesized)
gtattgattcagagggcagtagcccccgggcaggtcctggctggccccacccaggacctcagtcgctgacctcaggacacggtccaggctctttctattcacgtctgtgcgtggcatcct

SEQ ID NO: 1039917 - DNA, 120 bp, Artificial Sequence
  ENSG00000286230_4 (sequence is synthesized)
ccacgatacaagcgaaaatcaccattccccgcctgcctggcgttggcagccaacccccaggaggctcccggccctggcttctcatttctcacctcagtgcgagcatggatctaggagaac

SEQ ID NO: 1039918 - DNA, 120 bp, Artificial Sequence
  ENSG00000286230_5 (sequence is synthesized)
cccagctctcttacaagttgatgagtcaggcccctgtcacttcctggatctttcaatcctggctgcccgcaaggccaggaagagcgaaaacaagggctggattcagcggaaacacggcaa

SEQ ID NO: 1039919 - DNA, 120 bp, Artificial Sequence
  ENSG00000286230_6 (sequence is synthesized)
cacaggacacagccacagcgtgaggagcgagcaagctggaaaacctggatgggggtctggactggttcacctgcaatgagatcaatgatctaatcgcggcaggcgtggtggctcatgctt

SEQ ID NO: 1039920 - DNA, 87 bp, Artificial Sequence
  ENSG00000286230_7 (sequence is synthesized)
cgggtttgggaggctgacgcgggtggatcacatgaagtcaggagttcgagaacagcgtagtcaacatggcaaaacctcgtctctact

SEQ ID NO: 1039921 - DNA, 120 bp, Artificial Sequence
  ENSG00000286230_8 (sequence is synthesized)
gggtgacagaatgagattccatttaaaagaaaaaaaaaaatctaatcctggatgagagtccagggaaagtgagagtggagaaagcttacatgaaaacgcagaccagatccctgagtgtgg

SEQ ID NO: 1039922 - DNA, 120 bp, Artificial Sequence
  ENSG00000286230_9 (sequence is synthesized)
acctggaaaacgtgacacacgtcatcagattcagatgaagggatattgcctgaagtttcatcagccttcggtgtggagttggcctgatgtcccccaagatgaatagacttgtctctaccc

SEQ ID NO: 1039923 - DNA, 120 bp, Artificial Sequence
  ENSG00000286230_10 (sequence is synthesized)
aaagaagcttcttccactctgataaaagaaaggaaaaataggcaaagccacagacaatgtgatgagtattataataagagatttgtttagtttggctccaaacataggagggagtggcca

SEQ ID NO: 1039924 - DNA, 120 bp, Artificial Sequence
  ENSG00000286230_11 (sequence is synthesized)
actgtatctggggtcaaccagaagtagaaagagaagtaggccctggctggtggagaaatattttaccaggcagagggaacagtgtgtgcaaaggccctgaggtttgaatccacctggagt
